(19) United States
(12) Patent Application Publication
(10) Pub. No.: US 2005/0108791 A1
(43) Pub. Date: May 19, 2005

(54) Transgenic plants with improved phenotypes

(76) Inventor: Michael D. Edgerton, St. Louis, MO (US)

Correspondence Address: MONSANTO COMPANY, 800 N. LINDBERGH BLVD., ATTENTION: G.P. WUELLNER, IP PARALEGAL, (E2NA), ST. LOUIS, MO, 63167, US

(21) Appl. No.: 10/732,923

(22) Filed: Dec. 10, 2003

Related U.S. Application Data
(63) Continuation-in-part of application No. 10/310,154, filed on Dec. 4, 2002.
(60) Provisional application No. 60/337,358, filed on Dec. 4, 2001.
(60) Provisional application No. 60/449,054, filed on Feb. 22, 2003.

(51) Int. Cl. A01H 1/00; C12N 15/82; A01H 5/00

(52) U.S. Cl. 800/284; 800/320.1

(57) ABSTRACT

The present invention is directed to seed from a transgenic plant, wherein the genome of said seed comprises an exogenous polynucleotide comprising a functional portion of an encoding region for a polypeptide provided herein, and wherein plants grown from said seed exhibit an enhanced phenotype as compared to the phenotype of a control plant. Of particular interest are plants wherein the enhanced phenotype is increased yield. Exogenous polynucleotides of the present invention include recombinant polynucleotides providing for expression of mRNA encoding a polypeptide, and recombinant polynucleotides providing for expression of mRNA complementary to at least a portion of an mRNA native to the target plant for use in gene suppression.

### CROSS-REFERENCE TO RELATED APPLICATIONS

[0001] This application is a continuation-in-part of prior application Ser. No. 10/310,154 filed Dec. 4, 2002, which application claims priority under 35 U.S.C. §119(e) of U.S. Provisional Application No. 60/337,358 filed Dec. 4, 2001, the disclosure of which application is incorporated herein by reference in its entirety.

### INCORPORATION OF SEQUENCE LISTING

[0002] Two copies of the sequence listing (Copy 1 and Copy 2) and a computer readable form (CRF) of the sequence listing, all on CD-ROMs, each containing the file named Pa_{—}00613.rpt, which is 84,936,704 bytes (measured in MS-WINDOWS) and was created on Nov. 3, 2003, are herein incorporated by reference.

### INCORPORATION OF TABLES

[0003] Two copies of Tables 1-3 on CD-ROMs, each containing the file named pa_{—}00613.txt, which is 3,008,512 bytes (measured in MS-WINDOWS) and was created on Nov. 3, 2003, are herein incorporated by reference.

### FIELD OF THE INVENTION

[0004] Disclosed herein are seeds from transgenic plants, wherein the genome of said seed comprises recombinant polynucleotides, the expression of which results in the production of transgenic plants with enhanced phenotypes.

### BACKGROUND OF THE INVENTION

[0005] Transgenic plants with improved agronomic traits such as yield, pest resistance, herbicide tolerance, improved seed compositions, and the like are desired by both farmers and consumers. Although considerable efforts in plant breeding have provided significant gains in desired phenotypes, the ability to introduce specific DNA into plant genomes provides further opportunities for generation of plants with improved and/or unique phenotypes. The ability to develop transgenic plants with improved traits depends in part on the identification of genes that are useful in recombinant DNA constructs for production of transformed plants with improved properties.

### SUMMARY OF THE INVENTION

[0006] The present invention is directed to seed from a transgenic plant line, wherein said seed comprises in its genome a recombinant polynucleotide providing for expression or suppression of a polypeptide provided herein. Of particular interest is seed from a transgenic plant line, wherein said seed may be grown to produce plants having increased yield as compared to the yield of a control plant. Increased yield may be characterized as plant yield increase under non-stress conditions, or by plant yield increase under one or more environmental stress conditions. The invention also provides transgenic seed for plant lines having other enhanced phenotypes, such as enhanced plant morphology, plant physiology or seed component phenotype as compared to a corresponding phenotype of a control plant line. Of particular interest in the present invention is seed from transgenic crop plants, preferably maize (corn—Zea mays) or soybean (soy—Glycine max) plants. Other plants of interest in the present invention for production of transgenic seed that can be grown to provide plants having enhanced properties include, without limitation, cotton, canola, wheat, sunflower, sorghum, alfalfa, barley, millet, rice, tobacco, fruit and vegetable crops, and turfgrass.

[0007] In one aspect, this invention relates to the generation of transgenic plants by transformation with recombinant polynucleotides, and the identification of transgenic plants comprising such recombinant polynucleotides and having enhanced phenotypes. Of particular interest are transgenic plants that exhibit an improvement in a plant trait that is a component of yield. This aspect of the invention employs recombinant polynucleotides for expression of polypeptides that are useful for imparting desired traits to the transformed plants and recombinant polynucleotides for expression of homologs of such polypeptides as described herein. Exemplary polynucleotides which encode polypeptides of interest in the present invention are provided as SEQ ID NO:1 through SEQ ID NO:339. Sequences of the polypeptides of interest are provided as SEQ ID NO:340 through SEQ ID NO:678, and sequences of exemplary homolog polypeptides are provided as SEQ ID NO:679 through SEQ ID NO:24149. Tables 1-3 identifying the sequences of the present invention and their homologs are provided on the CD-ROM filed herewith.

[0008] Also of interest are recombinant polynucleotides that provide for suppression of expression of a target gene in a transgenic plant host using gene suppression methods, such as antisense or RNAi. Any of the polynucleotides provided herein as SEQ ID NO:1 through SEQ ID NO:339 may be used in such recombinant polynucleotides for gene suppression. Of particular interest are recombinant polynucleotides for gene suppression in maize, wherein said polynucleotide targets gene suppression of the corn aquaportin RS81 protein SEQ ID NO:8 or the retinoblastoma-related protein 1 provided as SEQ ID NO:70.

[0009] Thus, the present invention also comprises recombinant polynucleotides. Recombinant polynucleotides exemplified herein comprise a promoter functional in a plant cell operably joined to a DNA segment comprising encoding sequence for a polypeptide provided herein, or a homolog thereof. Such molecules are useful for production of transgenic plants having at least one improved property as the result of expression of a polypeptide of this invention or suppression of expression of a polypeptide described herein.

[0010] Also considered in the present invention is a method of producing a plant having an improved property, wherein the method comprises transforming a plant with a recombinant polynucleotide providing for expression or suppression of a polypeptide provided herein, and growing said transformed plant. In one aspect, the recombinant polynucleotide comprises a promoter functional in a plant cell operably joined to a DNA segment comprising encoding sequence for a polypeptide provided herein. The polynucleotide may be oriented with respect to the promoter to provide for transcription of sense or antisense RNA, or a combination of sense and antisense RNA, such as for use in RNAi methods of gene suppression. Of particular interest are uses of such methods to generate transgenic crop plants having increased yield.

[0011] Another aspect of the invention provides fragments of the polynucleotides of the present invention for use, for example as probes or molecular markers. Such fragments comprise at least 15 consecutive nucleotides in a sequence selected from the group consisting of SEQ ID NO:1 through SEQ ID NO:339 and complements thereof. Polynucleotide fragments of the present invention are useful as primers for PCR amplification and in hybridization assays such as transcription profiling assays, marker assays, or crop identity assays, including, for example, high throughput assays where the oligonucleotides are present in high density on a substrate, such as for example in microarrays.

### DETAILED DESCRIPTION OF THE INVENTION

[0012] The present invention is directed to seed from a transgenic plant, wherein the genome of said seed comprises an exogenous polynucleotide comprising a functional portion of an encoding region for a polypeptide provided herein, and wherein plants grown from said seed exhibit an enhanced phenotype as compared to the phenotype of a control plant. Of particular interest are plants wherein the enhanced phenotype is increased yield. Exogenous polynucleotides of the present invention include recombinant polynucleotides providing for expression of mRNA encoding a polypeptide, and recombinant polynucleotides providing for expression of mRNA complementary to at least a portion of an mRNA native to the target plant for use in gene suppression.

[0013] As used herein, a “transgenic plant” is one whose genome has been altered by the incorporation of exogenous genetic material, e.g. by transformation as described herein. The term “transgenic plant” is used to refer to the plant produced from an original transformation event, or progeny from later generations or crosses of a plant so transformed, so long as the progeny contains the exogenous genetic material in its genome. By “exogenous” is meant that a nucleic acid molecule, for example, a recombinant polynucleotide, originates from outside the plant into which it is introduced. An exogenous nucleic acid molecule may comprise naturally or non-naturally occurring polynucleotides, and may be derived from any organism, including the same or a different plant species than that into which it is introduced.

[0014] “Recombinant polynucleotide” refers in the present invention to a polynucleotide having a genetically engineered modification introduced through manipulation via mutagenesis, restriction enzymes, and the like. Recombinant polynucleotides may comprise DNA segments obtained from different sources, or DNA segments obtained from the same source, but which have been manipulated to join DNA segments which do not naturally exist in the joined form. A recombinant polynucleotide may exist outside of the cell, for example as a PCR fragment, or integrated into a genome, such as a plant genome.

[0015] As used herein, a “functional portion” of an encoding region for a polypeptide provided herein is a sufficient portion of the encoding region to provide the desired activity. Where expression of protein is desired, a functional portion will generally comprise the entire coding region for the polypeptide, although certain deletions, truncations, rearrangements and the like of the polypeptide may also maintain, or in some cases improve, the desired activity. One skilled in the art is aware of methods to screen for such desired modifications and such polypeptides are considered within the scope of the present invention. Where gene suppression methods are employed, smaller portions of the encoding region may be used to produce the desired effect.

[0016] “Enhanced phenotype” as used herein refers to a measurable improvement in a crop trait including, but not limited to, yield increase, including increased yield under non-stress conditions and increased yield under environmental stress conditions. Stress conditions may include, for example, drought, shade, fungal disease, viral disease, bacterial disease, insect infestation, nematode infestation, cold temperature exposure, heat exposure, osmotic stress, reduced nitrogen nutrient availability, reduced phosphorus nutrient availability and high plant density. Many agronomic traits can affect “yield”, including without limitation, plant height, pod number, pod position on the plant, number of intemodes, incidence of pod shatter, grain size, efficiency of nodulation and nitrogen fixation, efficiency of nutrient assimilation, resistance to biotic and abiotic stress, carbon assimilation, plant architecture, resistance to lodging, percent seed germination, seedling vigor, and juvenile traits. Other traits that can affect yield include, efficiency of germination (including germination in stressed conditions), growth rate (including growth rate in stressed conditions), ear number, seed number per ear, seed size, composition of seed (starch, oil, protein) and characteristics of seed fill.

[0017] Also of interest is the generation of transgenic plants that demonstrate enhanced phenotypic properties that may or may not confer an increase in overall plant yield. Such properties include enhanced plant morphology, plant physiology or enhanced components of the mature seed harvested from the transgenic plant. Of particular interest are enhancements in seed oil, tocopherol, protein and starch components, including increases in the quantity of any of these components, alterations in the ratios of any of these components, or production of new types of these components that do not exist in the seed from control plants. By way of example, increases in total tocopherol content are desirable, as are increases in the relative percentage of a-tocopherol produced by plants.

[0018] A “control plant” as used in the present invention is a plant used to compare against a transgenic plant grown from transgenic seed provided herein, to identify an enhanced phenotype in said transgenic plant. A suitable control plant may be a non-transgenic plant of the parental line used to generate a transgenic plant herein. A control plant may in some cases be a transgenic plant line that comprises an empty vector or marker gene, but does not contain the recombinant polynucleotide of the present invention that is expressed in the transgenic plant being evaluated. In general, a control plant is a plant of the same line or variety as the transgenic plant being tested.

[0019] “Increased yield” of a transgenic plant of the present invention may be evidenced and measured in a number of ways, including test weight, seed number per plant, seed weight, seed number per unit area (i.e. seeds, or weight of seeds, per acre), bushels per acre, tonnes per acre, tons per acre, kilo per hectare. For example, maize yield may be measured as production of shelled corn kernels per unit of production area, e.g. in bushels per acre or metric tons per hectare, often reported on a moisture adjusted basis, e.g. at 15.5% moisture. Increased yield may result from improved utilization of key biochemical compounds, such as nitrogen, phosphorous and carbohydrate, or from improved responses to environmental stresses, such as cold, heat, drought, salt, and attack by pests or pathogens. Polynucleotides of the present invention may also be used to provide plants having improved growth and development, and ultimately increased yield, as the result of modified expression of plant growth regulators or modification of cell cycle or photosynthesis pathways.

[0020] “Expression” as used herein refers to transcription of DNA to produce RNA. The resulting RNA may be without limitation mRNA encoding a protein, antisense RNA that is complementary to an mRNA encoding a protein, or an RNA transcript comprising a combination of sense and antisense gene regions, such as for use in RNAi technology. Expression as used herein may also refer to production of encoded protein from mRNA.

[0021] “Gene suppression” is used herein to refer to reduction or suppression of expression of a target protein in a host cell as the result of transcription of a recombinant polynucleotide provided herein, wherein the polynucleotide is oriented with respect to a promoter to provide for production of RNA having a gene silencing effect, such as antisense RNA or interfering RNA (RNAi).

Transgenic Plants and Seed

[0022] Transgenic plant seed provided by this invention may be grown to generate transgenic plants having an enhanced phenotype as compared to an appropriate control line. Such seed is obtained by screening transformed plants for enhanced phenotypes resulting from the introduction of a recombinant polynucleotide into the genomic DNA of tissue from a parental line. The recombinant polynucleotide is introduced into the genome to produce transgenic cells that can be cultured into transgenic plants having an enhanced phenotype as compared to the parental line or other appropriate control. Such transgenic cells are cultured into transgenic plants that produce progeny transgenic seed. Preferably, multiple transgenic plants (events) comprising the recombinant polynucleotides are evaluated, e.g. from 2 to 20 or more transgenic events, to identify a desired enhanced phenotype. Although the design of a recombinant polynucleotide is based on a rational expectation of a phenotypic modification, the present invention also contemplates that unexpected, yet desired enhanced phenotypes may be obtained.

[0023] Transgenic plants grown from transgenic seed provided herein demonstrate improved phenotypes that contribute to increased yield or other increased plant value, including, for example, improved seed quality. Of particular interest are plants having altered cell division, enhanced plant growth and development, stress tolerance, including tolerance to abiotic and biotic stress, altered seed or flower development, improved light response, and enhanced carbon and/or nitrogen metabolism, transport or utilization properties.

[0024] Yield enhancements by modification of cell division may be obtained, for example, by expression of cyclins, cytokinins, cyclin activating kinases or E2F or suppression of retinoblastoma 1.

[0025] Plant growth and development enhancements may be obtained, for example, by modification of expression of F box proteins or heterotrimeric G proteins, by modification of steroid biosynthesis and signaling or plant architecture, and by modification of activity of key plant development components, such as elongation factors, growth regulators and various transcription factors.

[0026] Stress tolerance enhancements may be obtained, for example by modification of expression of genes involved in heat tolerance, such as HSP90 and HSF genes; genes involved in cold tolerance, such as cold induced genes including SEQ ID NO:147 and SEQ ID NO:168 through SEQ ID NO:176, and fatty acid desaturase genes; genes associated with improved water use efficiency, such as Arabidopsis transcription factor G975 and crop homologs of G975; genes involved in disease resistance, including yeast superkiller (SKI) genes and plant superkiller homologs, or pest tolerance; genes associated with oxidative stress tolerance, such as provided as SEQ ID NO:241 through SEQ ID NO:272; genes associated with phospholipid signaling, jasmonate biosynthesis or flavonoid biosynthesis, or genes encoding phosphoinositide binding proteins, such as SEQ ID NO:331 through SEQ ID NO:335.

[0027] Seed development enhancements may be obtained, for example by modification of nitrate transport, modification of nucellin like proteins related to dsc1 and modification of expression of SET domain proteins, such as for alteration of endosperm or embryo size, or production of apomixis.

[0028] Light response enhancements may be obtained, for example by modification of expression of phytochrome or genes involved in phytochrome regulation or signal transduction genes such as provided as SEQ ID NO:23 through SEQ ID NO:31, SEQ ID NO:53 through SEQ ID NO:56, SEQ ID NO:59, SEQ ID NO:98, SEQ ID NO:11 through SEQ ID NO:113, SEQ ID NO:207, SEQ ID NO:215, SEQ ID NO:216, SEQ ID NO:230, SEQ ID NO:240, SEQ ID NO:277 and SEQ ID NO:311 through SEQ ID NO:315.

[0029] Flower development enhancements may be obtained, for example by modification of expression of genes related to flowering time such as provided herein as SEQ ID NO:40 through SEQ ID NO:43 and SEQ ID NO:326 through SEQ ID NO:328 and corn ear development, such as provided herein as SEQ ID NO:17 and SEQ ID NO:213.

[0030] Nitrogen utilization enhancements, including improved seed or grain quality, may be obtained, for example by modification of expression of genes involved in nitrogen assimilation, metabolism or transport.

[0031] Plant enhancements by alteration of source and/or sink properties are also considered in the present invention and may be obtained, for example, by improvements to sucrose production and/or transport, such as by expression of SEQ ID NO:279 through SEQ ID NO:283 and SEQ ID NO:298 through SEQ ID NO:308, or by modification of carbon partitioning.

[0032] Also of interest are plants having increased yield as the result of expression of genes, that are transcriptionally regulated in a manner that correlates with high yield, or by expression of homologs of such genes.

[0033] Polypeptides useful for generation of transgenic plants having enhanced properties are described in Table 4 below and provided herein as SEQ ID NO:340 through SEQ ID NO:678. Column headings in Table 4 refer to the following information:

[0034] “PEP SEQ ID NO” refers to a particular amino acid sequence in the Sequence Listing

[0035] “PHE ID” refers to an arbitrary number used to identify a particular recombinant polynucleotide corresponding to the translated protein encoded by the polynucleotide.

[0036] “NUC SEQ ID NO” refers to a particular nucleic acid sequence in the Sequence Listing which defines a polynucleotide used in a recombinant polynucleotide of this invention.

[0037] “GENE NAME” refers to a common name for the recombinant polynucleotide.

[0038] “GENE EFFECT” refers to the effect of the expressed polypeptide in providing yield improvement or other enhanced property

[0039] “CODING SEQUENCE” referS to peptide coding segments of the polynucleotide.

[0040] “SPECIES” refers to the organism from which the polynucleotide DNA was derived.

TABLE 4

| PEP | | NUC | | | | |
|---|---|---|---|---|---|---|
| SEQ | | SEQ | | | | |
| ID | | ID | | | | |
| NO | Phe ID | NO | Gene Name | Gene Effect | CODING SEQUENCE | Species |
| 340 | PHE0000001 | 1 | maize cellulose | Cold tolerance | 113-3061 | Zea mays |
| | | | synthase (eskimo 2) | | | |
| 341 | PHE0000006 | 2 | Arabidopsis RAV2/G9 | Root mass | 81-1136 | Arabidopsis |
| | | | | | | thaliana |
| 342 | PHE0000007 | 3 | rice G9-like 1 | Root mass | 336-1430 | Oryza sativa |
| 343 | PHE0000008 | 4 | rice G9-like 2 | Root mass | 572-1522 | Oryza sativa |
| 344 | PHE0000010 | 5 | rice G975 | Water use | 201-283, 516-1161 | Oryza sativa |
| | | | | efficiency | | |
| 345 | PHE0000278 | 6 | corn G975 | Water use | 41-679 | Zea mays |
| | | | | efficiency | | |
| 346 | PHE0000011 | 7 | corn Glossy15 | Water use | 385-1722 | Zea mays |
| | | | | efficiency | | |
| 347 | PHE0000012 | 8 | corn aquaporin RS81 | Root mass | 1-747 | Zea mays |
| 348 | PHE0000014 | 9 | rice cycD2 | Cell division | 13-324, 623-709, 813-911, | Oryza sativa |
| | | | | | 1003-1204, 1314-1438, | |
| | | | | | 1529-1774 | |
| 349 | PHE0000215 | 10 | invW | Sucrose | 1108-1489, 1813-2684, | Oryza sativa |
| | | | | production/transport | 6105-6266, 6417-6658, | |
| 350 | PHE0000015 | 11 | rice GCR1 | Cell division | 312-500, 1123-1154, 1384-1553, | Oryza sativa |
| | | | | | 2048-2163, 2724-2825, | |
| | | | | | 2946-3002, 3331-3474, | |
| | | | | | 3930-4000, 4118-4223 | |
| 351 | PHE0000016 | 12 | corn Knotted1 | Cell division | 181-1257 | Zea mays |
| 352 | PHE0000018 | 13 | corn AAA-ATPase 2 | Plastid division | 104-2533 | Zea mays |
| 353 | PHE0000019 | 14 | rice AOX1b | Cold tolerance | 4531-4851, 5011-5139, | Oryza sativa |
| | | | (alternative oxidase) | | 6072-6560, 6663-6722 | |
| 354 | PHE0000020 | 15 | Emericella nidulans | Cold tolerance | 2189-2442, 2492-2783, | Emericella |
| | | | alxA | | 2843-3352 | nidulans |
| 355 | PHE0000022 | 16 | corn AAP6-like | Nitrogen transport | 96-1547 | Zea mays |
| 356 | PHE0000024 | 17 | corn unknown protein | Flower | 441-2390 | Zea mays |
| | | | | development | | |
| 357 | PHE0000025 | 18 | corn GRF1-like | Plant growth and | 55-1470 | Zea mays |
| | | | protein | development | | |
| 358 | PHE0000026 | 19 | rice GRF1 | Plant growth and | 193-1380 | Oryza sativa |
| | | | | development | | |
| 359 | PHE0000227 | 20 | soy omega-3 fatty acid | Cold tolerance | 138-1496 | Glycine max |
| | | | desaturase | | | |
| 360 | PHE0000258 | 21 | AtFAD7 | Cold tolerance | 132-1472 | Arabidopsis |
| | | | | | | thaliana |
| 361 | PHE0000259 | 22 | AtFAD8 | Cold tolerance | 61-1368 | Arabidopsis |
| | | | | | | thaliana |
| 362 | PHE0000049 | 23 | rice phyA with corn | Light response | 4626-6690, 6913-7729, | Oryza sativa |
| | | | phyC intron 1 | | 8011-8307, 8410-8617 | |
| 363 | PHE0000027 | 24 | sorghum phyA with | Light response | 238-3633 | Sorghum |
| | | | corn phyC intron 1 | | | bicolor |
| 364 | PHE0000028 | 25 | rice phyB with corn | Light response | 67-3582 | Oryza sativa |
| | | | phyC intron 1 | | | |
| 365 | PHE0000029 | 26 | sorghum phyB with | Light response | 429-2640, 3333-4140, | Sorghum |
| | | | corn phyC intron 1 | | 5819-6112, 7491-7713 | bicolor |
| 366 | PHE0000030 | 27 | rice phyC with corn | Light response | 1036-3100, 3205-4021, | Oryza sativa |
| | | | phyC intron 1 | | 4418-4711, 5272-5509 | |
| 367 | PHE0000031 | 28 | sorghum phyC with | Light response | 303-3710 | Sorghum |
| | | | corn phyC intron 1 | | | bicolor |
| 368 | PHE0000032 | 29 | rice PF1 | Light response | 35-676 | Oryza sativa |
| 369 | PHE0000033 | 30 | rice GT2 | Light response | 58-2271 | Oryza sativa |
| 370 | PHE0000034 | 31 | Synechocystis | Light response | 9-992 | Synechocystis |
| | | | biliverdin reductase | | | sp. PCC 6803 |
| 371 | PHE0000038 | 32 | corn cycD2.1 | Cell division | 125-1156 | Zea mays |
| 372 | PHE0000039 | 33 | corn nph1 | Light response | 415-3150 | Zea mays |
| 373 | PHE0000040 | 34 | corn hemoglobin 1 | Stress tolerance | 172-669 | Zea mays |
| 374 | PHE0000043 | 35 | rice cyclin 2 | Cell division | 148-1407 | Oryza sativa |
| 375 | PHE0000044 | 36 | rice cycC | Cell division | 97-870 | Oryza sativa |
| 376 | PHE0000045 | 37 | rice cycB2 | Cell division | 74-1336 | Oryza sativa |
| 377 | PHE0000046 | 38 | rice cycA1 | Cell division | 97-1623 | Oryza sativa |
| 378 | PHE0000047 | 39 | rice cycB5 | Cell division | 292-361, 1019-1347, 1447-1572, | Oryza sativa |
| | | | | | 1657-1908, 2059-2217, | |
| | | | | | 2315-2493, 3276-3432 | |
| 379 | PHE0000244 | 40 | corn SVP-like | Flower | 177-860 | Zea mays |
| | | | | development | | |
| 380 | PHE0000245 | 41 | corn SVP-like | Flower | 93-791 | Zea mays |
| | | | | development | | |
| 381 | PHE0000246 | 42 | soy SVP-like | Flower | 96-713 | Glycine max |
| | | | | development | | |
| 382 | PHE0000247 | 43 | soy jointless-like | Flower | 60-674 | Glycine max |
| | | | | development | | |
| 383 | PHE0000106 | 44 | corn cycA1 | Cell division | 107-1633 | Zea mays |
| 384 | PHE0000050 | 45 | corn cycA2 | Cell division | 107-1222 | Zea mays |
| 385 | PHE0000051 | 46 | corn cycB2 | Cell division | 137-1408 | Zea mays |
| 386 | PHE0000052 | 47 | corn cycB5 | Cell division | 82-1518 | Zea mays |
| 387 | PHE0000382 | 48 | LIB3279-180-C9_FLI - | Cell division | 114-1385 | Zea mays |
| | | | maize cyclin III | | | |
| 388 | PHE0000053 | 49 | corn cycB4 | Cell division | 254-1579 | Zea mays |
| 389 | PHE0000054 | 50 | corn cycD3.2 | Cell division | 220-1380 | Zea mays |
| 390 | PHE0000055 | 51 | corn cycDx.1 | Cell division | 218-1180 | Zea mays |
| 391 | PHE0000056 | 52 | corn cycDl.1 | Cell division | 288-1334 | Zea mays |
| 392 | PHE0000057 | 53 | corn mt NDK - | Light response | 60-725 | Zea mays |
| | | | LIB189022Q1E1E9 | (Phytochrome?) | | |
| 393 | PHE0000058 | 54 | corn cp NDK - | Light response | 103-816 | Zea mays |
| | | | 700479629 | | | |
| 394 | PHE0000059 | 55 | corn NDK - | Light response | 49-495 | Zea mays |
| | | | LIB3597020Q1K6C3 | | | |
| 395 | PHE0000060 | 56 | corn NDK - | Light response | 162-608 | Zea mays |
| | | | 700241377 | | | |
| 396 | PHE0000062 | 57 | sRAD54 - with NLS | Homologous | 437-3556 | Synechocystis |
| | | | | recombination | | sp. PCC 6803 |
| 397 | PHE0000063 | 58 | T4 endonuclease VII | Homologous | 603-1148 | coliphage T4 |
| | | | (gp49) - with NLS | recombination | | |
| 398 | PHE0000064 | 59 | corn NDPK - fC- | Light response | 91-624 | Zea mays |
| | | | zmemLIB3957015Q1K6H6 | | | |
| 399 | PHE0000065 | 60 | TOR1 | Nitrogen | 302-7714 | Saccharomyces |
| | | | | assimilation | | cerevisiae |
| 400 | PHE0000292 | 61 | corn eIF-5A | Plant growth and | 85-564 | Zea mays |
| | | | | development | | |
| 401 | PHE0000067 | 62 | yeast eIF-5A | Plant growth and | 569-1042 | Saccharomyces |
| | | | | development | | cerevisiae |
| 402 | PHE0000068 | 63 | yeast deoxyhypusine | Plant growth and | 173-1336 | Saccharomyces |
| | | | synthase | development | | cerevisiae |
| 403 | PHE0000069 | 64 | yeast L5 | Plant growth and | 987-1880 | Saccharomyces |
| | | | | development | | cerevisiae |
| 404 | PHE0000070 | 65 | yeast ornithine | Plant growth and | 576-1976 | Saccharomyces |
| | | | decarboxylase | development | | cerevisiae |
| 405 | PHE0000071 | 66 | rice exportin 4-like | Plant growth and | 501-750, 1257-1417, 1735-1800, | Oryza sativa |
| | | | | development | 3104-3218, 3318-3427, | |
| | | | | | 3525-3620, 7587-7744, | |
| | | | | | 7828-7915, 8565-8669, | |
| | | | | | 8774-8878, 9421-9450, | |
| | | | | | 9544-9656, 9732-9819, | |
| | | | | | 9961-10180, 11034-11164, | |
| | | | | | 12058-12204, | |
| | | | | | 12770-12898, | |
| | | | | | 12975-13073, | |
| | | | | | 13221-13259, | |
| | | | | | 14674-14823 | |
| 406 | PHE0000072 | 67 | yeast S- | Plant growth and | 415-1605 | Saccharomyces |
| | | | adenosylmethionine | development | | cerevisiae |
| | | | decarboxylase | | | |
| 407 | PHE0000073 | 68 | corn S- | Plant growth and | 268-1365 | Zea mays |
| | | | adenosylmethionine | development | | |
| | | | decarboxylase 1 | | | |
| 408 | PHE0000074 | 69 | corn S- | Plant growth and | 581-1780 | Zea mays |
| | | | adenosylmethionine | development | | |
| | | | decarboxylase 2 | | | |
| 409 | PHE0000075 | 70 | retinoblastoma-related | Cell division | 37-2634 | Zea mays |
| | | | protein 1 | | | |
| 410 | PHE0000076 | 71 | C1 protein | Cell division | 49-843 | Wheat dwarf |
| | | | | | | virus |
| 411 | PHE0000077 | 72 | yeast flavohemoglobin - | Nitric oxide | 1695-2894 | Saccharomyces |
| | | | mitochondrial | signaling | | cerevisiae |
| 412 | PHE0000009 | 73 | Arabidopsis G975 | Water use | 58-654 | Arabidopsis |
| | | | | efficiency | | thaliana |
| 413 | PHE0000079 | 74 | CUT1 | Water use | 372-1082, 1176-1946 | Oryza sativa |
| | | | | efficiency | | |
| 414 | PHE0000082 | 75 | corn cycB3 | Cell division | 88-1425 | Zea mays |
| 415 | PHE0000083 | 76 | PDR5 | Disease resistance | 1552-6087 | Saccharomyces |
| | | | | (cercosporin | | cerevisiae |
| | | | | tolerance) | | |
| 416 | PHE0000084 | 77 | rice cyclin H | Cell division | 235-1227 | Oryza sativa |
| 417 | PHE0000085 | 78 | rice cdc2+/CDC28− | Cell division | 173-1447 | Oryza sativa |
| | | | related protein kinase | | | |
| 418 | PHE0000086 | 79 | Cdk-activating kinase 1 | Cell division | 14-1240 | Glycine max |
| 419 | PHE0000089 | 80 | CHL1 | Nitrogen | 85-1857 | Arabidopsis |
| | | | | uptake/Seed | | thaliana |
| | | | | development | | |
| 420 | PHE0000090 | 81 | NTR1 | Nitrogen | 144-1898 | Oryza sativa |
| | | | | uptake/Seed | | |
| | | | | development | | |
| 421 | PHE0000091 | 82 | Zm SET domain 2 | Seed development | 101-1009 | Zea mays |
| 422 | PHE0000092 | 83 | Zm SET domain 1 | Seed development | 528-1544 | Zea mays |
| 423 | PHE0000095 | 84 | HSF1 | Heat | 1017-3518 | Saccharomyces |
| | | | | tolerance/Water | | cerevisiae |
| | | | | use efficiency | | |
| 424 | PHE0000096 | 85 | Zm HSP101 | Heat | 436-1773, 1878-2159, | Zea mays |
| | | | | tolerance/Water | 2281-2621, 2711-2990, | |
| | | | | use efficiency | 3079-3276, 3371-3670 | |
| 425 | PHE0000098 | 86 | E. coli clpB | Heat | 557-3130 | Escherichia coli |
| | | | | tolerance/Water | | |
| | | | | use efficiency | | |
| 426 | PHE0000099 | 87 | Synechocystis clpB | Heat | 316-2931 | Synechocystis |
| | | | | tolerance/Water | | sp. PCC 6803 |
| | | | | use efficiency | | |
| 427 | PHE0000100 | 88 | Xylella clpB | Heat | 187-2769 | Xylella |
| | | | | tolerance/Water | | fastidiosa |
| | | | | use efficiency | | |
| 428 | PHE0000101 | 89 | corn cycD3.1 | Cell division | 250-1422 | Zea mays |
| 429 | PHE0000102 | 90 | AnFPPS (farnesyl- | Glyphosphate | 146-1186 | Emericella |
| | | | pyrophosphate | tolerance | | nidulans |
| | | | synthetase) | | | |
| 430 | PHE0000103 | 91 | OsFPPS | Glyphosphate | 42-1103 | Oryza sativa |
| | | | | tolerance | | |
| 431 | PHE0000104 | 92 | 700331819_FLI - corn | Glyphosphate | 313-1377 | Zea mays |
| | | | FPPS 2 | tolerance | | |
| 432 | PHE0000105 | 93 | corn cycD1.2 | Cell division | 229-1275 | Zea mays |
| 433 | PHE0000107 | 94 | corn cycD1.3 | Cell division | 206-1252 | Zea mays |
| 434 | PHE0000108 | 95 | ASH1 | Stress tolerance | 61-801 | Arabidopsis |
| | | | | | | thaliana |
| 435 | PHE0000109 | 96 | rice ASH1-like1 | Stress tolerance | 136-1008 | Oryza sativa |
| 436 | PHE0000110 | 97 | rice MtN2-like | Stress tolerance | 425-464, 546-582, 672-783, | Oryza sativa |
| | | | | | 812-898, 988-1149, | |
| | | | | | 1556-1675, 1776-1952 | |
| 437 | PHE0000111 | 98 | PAS domain kinase | Light response | 358-2613 | Zea mays |
| 438 | PHE0000114 | 99 | Su(var) 3-9-like | Seed development | 71-814 | Zea mays |
| 439 | PHE0000115 | 100 | Receiver domain | Cell division | 277-1002 | Zea mays |
| | | | (RR3-like) 7 | | | |
| 440 | PHE0000116 | 101 | Receiver domain | Cell division | 188-2245 | Zea mays |
| | | | (ARR2-like) 1 | | | |
| 441 | PHE0000117 | 102 | Receiver domain | Cell division | 112-2238 | Zea mays |
| | | | (TOC1-like) 2 | | | |
| 442 | PHE0000118 | 103 | Receiver domain | Cell division | 84-1976 | Zea mays |
| | | | (TOC1-like) 3 | | | |
| 443 | PHE0000119 | 104 | Receiver domain | Cell division | 39-1931 | Zea mays |
| | | | (ARR2-like) 4 | | | |
| 444 | PHE0000120 | 105 | Receiver domain | Cell division | 61-1812 | Zea mays |
| | | | (RR11-like) 5 | | | |
| 445 | PHE0000121 | 106 | Receiver domain | Cell division | 391-1116 | Zea mays |
| | | | (RR3-like) 6 | | | |
| 446 | PHE0000122 | 107 | Receiver domain | Cell division | 335-1066 | Zea mays |
| | | | (RR3-like) 8 | | | |
| 447 | PHE0000123 | 108 | Receiver domain 9 | Cell division | 55-759 | Zea mays |
| 448 | PHE0000124 | 109 | ZmRR2 | Cell division | 154-624 | Zea mays |
| 449 | PHE0000125 | 110 | Receiver domain | Cell division | 374-722, 791-2019 | Zea mays |
| | | | (TOC1-like) 10 | | | |
| 450 | PHE0000126 | 111 | corn HY5-like | Light response | 32-541 | Zea mays |
| 451 | PHE0000127 | 112 | scarecrow 1 (PAT1- | Light response | 295-1929 | Zea mays |
| | | | like) | | | |
| 452 | PHE0000128 | 113 | scarecrow 2 | Light response | 153-1934 | Zea mays |
| 453 | PHE0000133 | 114 | G protein b subunit | Plant growth and | 90-1229 | Zea mays |
| | | | | development/Stress | | |
| | | | | tolerance | | |
| 454 | PHE0000152 | 115 | 14-3-3-like protein 2 | Nitrogen | 85-861 | Glycine max |
| | | | | assimilation | | |
| 455 | PHE0000153 | 116 | 14-3-3-like protein D | Nitrogen | 42-824 | Glycine max |
| | | | | assimilation | | |
| 456 | PHE0000154 | 117 | 14-3-3 protein 1 | Nitrogen | 49-834 | Glycine max |
| | | | | assimilation | | |
| 457 | PHE0000155 | 118 | Rice FAP1-like | Nitrogen | 654-1862, 2310-2426, | Oryza sativa |
| | | | protein | assimilation | 3407-3492, 3590-3752, | |
| | | | | | 3845-3890, 4476-4522, | |
| | | | | | 4985-5191, 5306-5392, | |
| | | | | | 5473-5640 | |
| 458 | PHE0000156 | 119 | rice TAP42-like | Nitrogen | 199-1338 | Oryza sativa |
| | | | | assimilation | | |
| 459 | PHE0000158 | 120 | BMH1 | Nitrogen | 79-882 | Saccharomyces |
| | | | | assimilation | | cerevisiae |
| 460 | PHE0000159 | 121 | rice chloroplastic | Yield associated | 41-1261 | Oryza sativa |
| | | | fructose-1,6- | genes | | |
| | | | bisphosphatase | | | |
| 461 | PHE0000160 | 122 | E. coli fructose-1,6- | Yield associated | 208-1206 | Escherichia coli |
| | | | bisphosphatase | genes | | |
| 462 | PHE0000161 | 123 | Synechocystis | Yield associated | 1-1164 | Synechocystis |
| | | | fructose-1,6- | genes | | sp. PCC 6803 |
| | | | bisphosphatase F-I | | | |
| 463 | PHE0000162 | 124 | Synechocystis | Yield associated | 480-1523 | Synechocystis |
| | | | fructose-1,6- | genes | | sp. PCC 6803 |
| | | | bisphosphatase F-II | | | |
| 464 | PHE0000164 | 125 | Yeast RPT5 | Yield associated | 883-2187 | Saccharomyces |
| | | | | genes | | cerevisiae |
| 465 | PHE0000165 | 126 | Yeast RRP5 | Yield associated | 331-5520 | Saccharomyces |
| | | | | genes | | cerevisiae |
| 466 | PHE0000166 | 127 | Rice CBP-like gene | Yield associated | 277-436, 479-1524, 1790-2065, | Oryza sativa |
| | | | | genes | 2150-2425, 3134-3262, | |
| | | | | | 3380-3580, 3683-3825, | |
| | | | | | 3905-4190, 4294-4433, | |
| | | | | | 4711-4789, 4874-4929, | |
| | | | | | 5754-5946 | |
| 467 | PHE0000167 | 128 | rice BAB09754 | Yield associated | 616-903, 1848-1940, 2046-2165, | Oryza sativa |
| | | | | genes | 2254-2355, 2443-2693, | |
| | | | | | 2849-2994, 3165-3363, | |
| | | | | | 3475-4141, 4438-4770, | |
| | | | | | 5028-5309 | |
| 468 | PHE0000168 | 129 | LIB3061-001-H7_FLI | Yield associated | 309-1037 | Zea mays |
| | | | | genes | | |
| 469 | PHE0000169 | 130 | maize p23 | Heat | 106-708 | Zea mays |
| | | | | tolerance/Water | | |
| | | | | use efficiency | | |
| 470 | PHE0000170 | 131 | maize cyclophilin | Heat | 99-1757 | Zea mays |
| | | | | tolerance/Water | | |
| | | | | use efficiency | | |
| 471 | PHE0000172 | 132 | yeast SIT1 | Heat | 361-2130 | Saccharomyces |
| | | | | tolerance/Water | | cerevisiae |
| | | | | use efficiency | | |
| 472 | PHE0000173 | 133 | yeast CNS1 | Heat | 762-1919 | Saccharomyces |
| | | | | tolerance/Water | | cerevisiae |
| | | | | use efficiency | | |
| 473 | PHE0000176 | 134 | RNAse S | Phosphate uptake | 85-771 | Zea mays |
| 474 | PHE0000177 | 135 | maize ecto-apyrase | Phosphate uptake | 210-2312 | Zea mays |
| 475 | PHE0000178 | 136 | PHO5 | Phosphate uptake | 1-1404 | Saccharomyces |
| | | | | | | cerevisiae |
| 476 | PHE0000179 | 137 | high affinity phosphate | Phosphate uptake | 105-1703 | Glycine max |
| | | | translocator | | | |
| 477 | PHE0000180 | 138 | high affinity phosphate | Phosphate uptake | 128-1750 | Zea mays |
| | | | translocator | | | |
| 478 | PHE0000181 | 139 | Xylella citrate | Phosphate uptake | 256-1545 | Xylella |
| | | | synthase | | | fastidiosa |
| 479 | PHE0000182 | 140 | E. coli citrate synthase | Phosphate uptake | 309-1592 | Escherichia coli |
| 480 | PHE0000183 | 141 | rice citrate synthase | Phosphate uptake | 105-1523 | Oryza sativa |
| 481 | PHE0000184 | 142 | citrate synthase | Phosphate uptake | 56-1564 | Zea mays |
| 482 | PHE0000185 | 143 | citrate synthase | Phosphate uptake | 153-1691 | Glycine max |
| 483 | PHE0000186 | 144 | maize ferritin 2 | Stress tolerance | 3-758 | Zea mays |
| 484 | PHE0000187 | 145 | maize ferritin 1 | Stress tolerance | 34-795 | Zea mays |
| 485 | PHE0000188 | 146 | E. coli cytoplasmic | Stress tolerance | 245-742 | Escherichia coli |
| | | | ferritin | | | |
| 486 | PHE0000190 | 147 | corn LEA3 | Cold tolerance | 171-755 | Zea mays |
| 487 | PHE0000192 | 148 | soy HSF | Heat | 23-1114 | Glycine max |
| | | | | tolerance/Water | | |
| | | | | use efficiency | | |
| 488 | PHE0000193 | 149 | soy HSF | Heat | 93-992 | Glycine max |
| | | | | tolerance/Water | | |
| | | | | use efficiency | | |
| 489 | PHE0000204 | 150 | deoxyhypusine | Plant growth and | 26-1129 | Glycine max |
| | | | synthase | development | | |
| 490 | PHE0000219 | 151 | thylakoid carbonic | Photosynthesis | 62-994 | Chlamydomonas |
| | | | anhydrase, cah3 | | | reinhardtii |
| 491 | PHE0000216 | 152 | thylakoid carbonic | Photosynthesis | 49-843 | Nostoc |
| | | | anhydrase, ecaA | | | PCC7120 |
| 492 | PHE0000217 | 153 | Chlamydomonas | Photosynthesis | 156-1232 | Chlamydomonas |
| | | | reinhardtii envelope | | | reinhardtii |
| | | | protein LIP-36G1 | | | |
| 493 | PHE0000218 | 154 | psbO transit | Photosynthesis | 271-1674 | Synechococcus |
| | | | peptide::Synechococcus | | | sp. PCC 7942 |
| | | | sp. PCC 7942 ictB | | | |
| 494 | PHE0000220 | 155 | corn RNase PH | Disease resistance | 86-805 | Zea mays |
| 495 | PHE0000221 | 156 | SKI2 | Disease resistance | 1351-5211 | Saccharomyces |
| | | | | | | cerevisiae |
| 496 | PHE0000222 | 157 | SKI3 | Disease resistance | 793-5091 | Saccharomyces |
| | | | | | | cerevisiae |
| 497 | PHE0000223 | 158 | SKI4 | Disease resistance | 323-1201 | Saccharomyces |
| | | | | | | cerevisiae |
| 498 | PHE0000224 | 159 | SKI6 | Disease resistance | 1007-1747 | Saccharomyces |
| | | | | | | cerevisiae |
| 499 | PHE0000225 | 160 | SKI7 | Disease resistance | 279-2519 | Saccharomyces |
| | | | | | | cerevisiae |
| 500 | PHE0000226 | 161 | rice SKI7-like | Disease resistance | 464-884, 1132-1287, 2103-2252, | Oryza sativa |
| | | | | | 2353-2487, 2957-3288, | |
| | | | | | 3399-3509, 3596-4095, | |
| | | | | | 4350-4518, 4783-5022, | |
| | | | | | 5097-5228, 5315-5449 | |
| 501 | PHE0000228 | 162 | Synechocystis cobA wcp | Nitrogen | 70-801 | Synechocystis |
| | | | transit peptide | metabolism | | sp. PCC 6803 |
| 502 | PHE0000229 | 163 | Xylella tetrapyrrole | Nitrogen | 1-774 | Xylella |
| | | | methylase with transit | metabolism | | fastidiosa |
| | | | peptide | | | |
| 503 | PHE0000230 | 164 | maize | Nitrogen | 15-1286 | Zea mays |
| | | | uroporphyrinogen III | metabolism | | |
| | | | methyltransferase | | | |
| 504 | PHE0000231 | 165 | nucellin-like protein | Seed development | 122-1594 | Zea mays |
| 505 | PHE0000232 | 166 | nucellin-like protein | Seed development | 76-1605 | Zea mays |
| 506 | PHE0000233 | 167 | nucellin-like protein | Seed development | 195-1628 | Zea mays |
| 507 | PHE0000234 | 168 | soy LEA protein | Cold tolerance | 6-704 | Glycine max |
| 508 | PHE0000235 | 169 | dehydrin-like protein | Cold tolerance | 33-710 | Glycine max |
| 509 | PHE0000237 | 170 | dehydrin 3 | Cold tolerance | 84-584 | Zea mays |
| 510 | PHE0000238 | 171 | probable lipase | Cold tolerance | 98-967 | Zea mays |
| 511 | PHE0000239 | 172 | yeast GRE1 | Cold tolerance | 1024-1527 | Saccharomyces |
| | | | | | | cerevisiae |
| 512 | PHE0000240 | 173 | yeast STF2 | Cold tolerance | 683-934 | Saccharomyces |
| | | | | | | cerevisiae |
| 513 | PHE0000241 | 174 | yeast SIP18 | Cold tolerance | 376-855 | Saccharomyces |
| | | | | | | cerevisiae |
| 514 | PHE0000242 | 175 | yeast YBM6 | Cold tolerance | 744-1130 | Saccharomyces |
| | | | | | | cerevisiae |
| 515 | PHE0000243 | 176 | yeast HSP12 | Cold tolerance | 282-611 | Saccharomyces |
| | | | | | | cerevisiae |
| 516 | PHE0000249 | 177 | corn allene oxide | Stress | 111-1556 | Zea mays |
| | | | synthase | tolerance/Disease | | |
| | | | | resistance | | |
| 517 | PHE0000250 | 178 | corn COI1-like | Stress | 139-1911 | Zea mays |
| | | | | tolerance/Disease | | |
| | | | | resistance | | |
| 518 | PHE0000251 | 179 | corn TIR1-like | Plant growth and | 113-1906 | Zea mays |
| | | | | development | | |
| 519 | PHE0000252 | 180 | corn COI1-like | Stress | 130-1923 | Zea mays |
| | | | | tolerance/Disease | | |
| | | | | resistance | | |
| 520 | PHE0000253 | 181 | COI1-like | Stress | 389-2368 | Zea mays |
| | | | | tolerance/Disease | | |
| | | | | resistance | | |
| 521 | PHE0000254 | 182 | F-box protein | Plant growth and | 123-1304 | Glycine max |
| | | | | development | | |
| 522 | PHE0000255 | 183 | F-box protein | Plant growth and | 228-1916 | Glycine max |
| | | | | development | | |
| 523 | PHE0000256 | 184 | corn 1- | Stress | 61-1011 | Zea mays |
| | | | aminocyclopropane-1- | tolerance/Disease | | |
| | | | carboxylate oxidase | resistance | | |
| 524 | PHE0000257 | 185 | rice 1- | Stress | 2-1465 | Oryza sativa |
| | | | aminocyclopropane-1 | tolerance/Disease | | |
| | | | carboxylate synthase | resistance | | |
| 525 | PHE0000260 | 186 | S52650 - | Cold tolerance | 643-1719 | Synechocystis |
| | | | Synechocystis desB | | | sp. PCC 6803 |
| 526 | PHE0000261 | 187 | yeast glutamate | Stress tolerance | 33-1790 | Saccharomyces |
| | | | decarboxylase | | | cerevisiae |
| 527 | PHE0000262 | 188 | cytochrome P450-like | Plant growth and | 29-1495 | Zea mays |
| | | | protein | development | | |
| 528 | PHE0000263 | 189 | cytochrome P450 | Plant growth and | 141-1637 | Zea mays |
| | | | | development | | |
| 529 | PHE0000264 | 190 | cytochrome P450-like | Plant growth and | 104-1657 | Zea mays |
| | | | | development | | |
| 530 | PHE0000265 | 191 | CYP90 protein | Plant growth and | 81-1589 | Zea mays |
| | | | | development | | |
| 531 | PHE0000266 | 192 | cytochrome P450 | Plant growth and | 92-1648 | Zea mays |
| | | | DWARF3 | development | | |
| 532 | PHE0000267 | 193 | cytochrome P450 | Plant growth and | 134-1543 | Zea mays |
| | | | | development | | |
| 533 | PHE0000268 | 194 | rice receptor protein | Plant growth and | 183-476, 706-735, 2796-6734 | Oryza sativa |
| | | | kinase | development | | |
| 534 | PHE0000269 | 195 | soy E2F-like | Cell division | 80-1117 | Glycine max |
| 535 | PHE0000270 | 196 | nuclear matrix | Cell division | 243-3371 | Zea mays |
| | | | constituent protein | | | |
| 536 | PHE0000271 | 197 | OsE2F1 | Cell division | 93-1403 | Oryza sativa |
| 537 | PHE0000272 | 198 | corn GCR1 | Cell division | 74-1036 | Zea mays |
| 538 | PHE0000273 | 199 | soy mlo-like | Plant growth and | 15-1532 | Glycine max |
| | | | | development/Stress | | |
| | | | | tolerance | | |
| 539 | PHE0000274 | 200 | soy mlo-like | Plant growth and | 48-1841 | Glycine max |
| | | | | development/Stress | | |
| | | | | tolerance | | |
| 540 | PHE0000275 | 201 | rice G alpha 1 | Plant growth and | 106-1248 | Oryza sativa |
| | | | | development/Stress | | |
| | | | | tolerance | | |
| 541 | PHE0000276 | 202 | soy G-gamma subunit | Plant growth and | 210-536 | Glycine max |
| | | | | development/Stress | | |
| | | | | tolerance | | |
| 542 | PHE0000277 | 203 | wheat G28-like | Disease resistance | 65-877 | Triticum |
| | | | | | | aestivum |
| 543 | PHE0000279 | 204 | sorghum proline | Nitrogen transport | 16-1341 | Sorghum |
| | | | permease | | | bicolor |
| 544 | PHE0000280 | 205 | rice AA transporter | Nitrogen transport | 61-1485 | Oryza sativa |
| 545 | PHE0000282 | 206 | SET-domain protein- | Seed development | 478-3045 | Zea mays |
| | | | like | | | |
| 546 | PHE0000283 | 207 | scarecrow 6 | Light response | 520-2145 | Zea mays |
| 547 | PHE0000284 | 208 | menage a trois-like | Cell division | 164-745 | Zea mays |
| 548 | PHE0000286 | 209 | oryzacystatin | Pest tolerance | 108-527 | Oryza sativa |
| 549 | PHE0000287 | 210 | Similar to cysteine | Pest tolerance | 18-767 | Oryza sativa |
| | | | proteinase inhibitor | | | |
| 550 | PHE0000288 | 211 | cysteine proteinase | Pest tolerance | 135-461 | Sorghum |
| | | | inhibitor | | | bicolor |
| 551 | PHE0000289 | 212 | Zm-GRF1 (GA | Plant growth and | 96-1202 | Zea mays |
| | | | responsive factor) | development | | |
| 552 | PHE0000290 | 213 | ZmSE001-like | Flower | 253-2115 | Zea mays |
| | | | | development | | |
| 553 | PHE0000291 | 214 | deoxyhypusine | Plant growth and | 54-1163 | Zea mays |
| | | | synthase | development | | |
| 554 | PHE0000293 | 215 | gibberellin response | Light response | 131-2020 | Zea mays |
| | | | modulator | | | |
| 555 | PHE0000294 | 216 | scarecrow-like protein | Light response | 266-1948 | Zea mays |
| 556 | PHE0000295 | 217 | ubiquitin-conjugating | Yield associated | 114-599 | Zea mays |
| | | | enzyme-like protein | genes | | |
| 557 | PHE0000296 | 218 | unknown protein | Yield associated | 90-785 | Zea mays |
| | | | recognized by | genes | | |
| | | | PF01169 | | | |
| 558 | PHE0000297 | 219 | 26S protease | Yield associated | 57-1343 | Oryza sativa |
| | | | regulatory subunit 6A | genes | | |
| | | | homolog | | | |
| 559 | PHE0000298 | 220 | rice p23 co-chaperone | Heat | 68-706 | Oryza sativa |
| | | | | tolerance/Water | | |
| | | | | use efficiency | | |
| 560 | PHE0000299 | 221 | corn p23 co-chaperone | Heat | 71-565 | Zea mays |
| | | | | tolerance/Water | | |
| | | | | use efficiency | | |
| 561 | PHE0000300 | 222 | rice p23 co-chaperone | Heat | 124-642 | Oryza sativa |
| | | | | tolerance/Water | | |
| | | | | use efficiency | | |
| 562 | PHE0000301 | 223 | corn p23 co-chaperone | Heat | 90-617 | Zea mays |
| | | | | tolerance/Water | | |
| | | | | use efficiency | | |
| 563 | PHE0000302 | 224 | putative purple acid | Phosphate uptake | 22-1038 | Oryza sativa |
| | | | phosphatase precursor | | | |
| 564 | PHE0000303 | 225 | acid phosphatase type 5 | Phosphate uptake | 143-1186 | Zea mays |
| 565 | PHE0000304 | 226 | aleurone ribonuclease | Phosphate uptake | 47-814 | Oryza sativa |
| 566 | PHE0000305 | 227 | putative ribonuclease | Phosphate uptake | 55-888 | Zea mays |
| 567 | PHE0000306 | 228 | S-like RNase | Phosphate uptake | 15-770 | Zea mays |
| 568 | PHE0000307 | 229 | ribonuclease | Phosphate uptake | 95-781 | Zea mays |
| 569 | PHE0000308 | 230 | helix-loop-helix | Light response | 202-756 | Zea mays |
| | | | protein (PIF3-like) | | | |
| 570 | PHE0000309 | 231 | SKI4-like protein | Disease resistance | 36-632 | Zea mays |
| 571 | PHE0000310 | 232 | putative 3 | Disease resistance | 238-1098 | Zea mays |
| | | | exoribonuclease | | | |
| 572 | PHE0000311 | 233 | GF14-c protein | Nitrogen | 81-848 | Oryza sativa |
| | | | | assimilation | | |
| 573 | PHE0000312 | 234 | 14-3-3-like protein | Nitrogen | 6-785 | Oryza sativa |
| | | | | assimilation | | |
| 574 | PHE0000313 | 235 | rice eIF-(iso)4F | Nitrogen | 96-713 | Oryza sativa |
| | | | | assimilation | | |
| 575 | PHE0000314 | 236 | rice eIF-4F | Nitrogen | 46-726 | Oryza sativa |
| | | | | assimilation | | |
| 576 | PHE0000315 | 237 | sorghum eIF-(iso)4F | Nitrogen | 78-707 | Sorghum |
| | | | | assimilation | | bicolor |
| 577 | PHE0000316 | 238 | sorghum eIF-4F | Nitrogen | 9-668 | Sorghum |
| | | | | assimilation | | bicolor |
| 578 | PHE0000317 | 239 | rice FIP37-like | Nitrogen | 73-1128 | Oryza sativa |
| | | | | assimilation | | |
| 579 | PHE0000318 | 240 | scarecrow 17 | Light response | 441-2102 | Zea mays |
| 580 | PHE0000322 | 241 | maize catalase-1 | Stress tolerance | 208-1683 | Zea mays |
| 581 | PHE0000323 | 242 | maize catalase-3 | Stress tolerance | 30-1511 | Zea mays |
| 582 | PHE0000324 | 243 | ascorbate peroxidase | Stress tolerance | 197-1063 | Zea mays |
| 583 | PHE0000325 | 244 | corn GDI | Stress tolerance | 57-1397 | Zea mays |
| 584 | PHE0000326 | 245 | soy GDI | Stress tolerance | 45-1418 | Glycine max |
| 585 | PHE0000327 | 246 | corn rho GDI | Stress tolerance | 463-1203 | Zea mays |
| 586 | PHE0000328 | 247 | basic blue copper | Stress tolerance | 13-408 | Zea mays |
| | | | protein | | | |
| 587 | PHE0000329 | 248 | plantacyanin | Stress tolerance | 109-489 | Zea mays |
| 588 | PHE0000330 | 249 | basic blue copper | Stress tolerance | 83-463 | Glycine max |
| | | | protein | | | |
| 589 | PHE0000331 | 250 | Similar to blue copper | Stress tolerance | 323-868 | Zea mays |
| | | | protein precursor | | | |
| 590 | PHE0000332 | 251 | lamin | Stress tolerance | 62-646 | Zea mays |
| 591 | PHE0000333 | 252 | fC-zmfl700551169a- | Stress tolerance | 56-1105 | Zea mays |
| | | | allyl alcohol | | | |
| | | | dehydrogenase | | | |
| 592 | PHE0000334 | 253 | allyl alcohol | Stress tolerance | 103-1128 | Glycine max |
| | | | dehydrogenase | | | |
| 593 | PHE0000335 | 254 | allyl alcohol | Stress tolerance | 6-1079 | Zea mays |
| | | | dehydrogenase | | | |
| 594 | PHE0000336 | 255 | quinone | Stress tolerance | 47-1051 | Zea mays |
| | | | oxidoreductase | | | |
| 595 | PHE0000337 | 256 | E. nidulans cysA - | Stress tolerance | 384-1961 | Emericella |
| | | | AF029885 | | | nidulans |
| 596 | PHE0000338 | 257 | BAA18167 - | Stress tolerance | 801-1547 | Synechocystis |
| | | | Synechocystis cysE | | | sp. PCC 6803 |
| 597 | PHE0000339 | 258 | Synechocystis thiol- | Stress tolerance | 36-638 | Synechocystis |
| | | | specific antioxidant | | | sp. PCC 6803 |
| | | | protein - BAA10136 | | | |
| 598 | PHE0000340 | 259 | yeast TSA2 - | Stress tolerance | 108-698 | Saccharomyces |
| | | | NP_010741 | | | cerevisiae |
| 599 | PHE0000341 | 260 | yeast mTPx - Z35825 | Stress tolerance | 730-1512 | Saccharomyces |
| | | | | | | cerevisiae |
| 600 | PHE0000343 | 261 | yeast TPx III - | Stress tolerance | 657-1187 | Saccharomyces |
| | | | NP_013210 | | | cerevisiae |
| 601 | PHE0000345 | 262 | soy putative 2-cys | Stress tolerance | 160-939 | Glycine max |
| | | | peroxiredoxin | | | |
| 602 | PHE0000346 | 263 | soy peroxiredoxin | Stress tolerance | 104-745 | Glycine max |
| 603 | PHE0000347 | 264 | heat shock protein 26, | Stress tolerance | 117-836 | Zea mays |
| | | | plastid-localized | | | |
| 604 | PHE0000349 | 265 | heat shock protein | Stress tolerance | 112-735 | Zea mays |
| 605 | PHE0000350 | 266 | low molecular weight | Stress tolerance | 28-690 | Zea mays |
| | | | heat shock protein | | | |
| 606 | PHE0000351 | 267 | 18 kDa heat shock | Stress tolerance | 103-597 | Zea mays |
| | | | protein | | | |
| 607 | PHE0000352 | 268 | heat shock protein | Stress tolerance | 229-690 | Zea mays |
| | | | 16.9 | | | |
| 608 | PHE0000353 | 269 | HSP21-like protein | Stress tolerance | 73-696 | Zea mays |
| 609 | PHE0000354 | 270 | Opt1p - NP_012323 | Stress tolerance | 508-2904 | Saccharomyces |
| | | | | | | cerevisiae |
| 610 | PHE0000355 | 271 | SVCT2-like permease | Stress tolerance | 220-1779 | Zea mays |
| 611 | PHE0000356 | 272 | SVCT2-like permease | Stress tolerance | 34-1632 | Zea mays |
| 612 | PHE0000357 | 273 | maize tubby-like | Plant growth and | 519-1958 | Zea mays |
| | | | | development | | |
| 613 | PHE0000358 | 274 | maize tubby-like | Plant growth and | 517-1269 | Zea mays |
| | | | | development | | |
| 614 | PHE0000359 | 275 | soy HMG CoA | Stress tolerance | 80-1441 | Glycine max |
| | | | synthase | | | |
| 615 | PHE0000360 | 276 | yeast HMGS - X96617 | Stress tolerance | 220-1695 | Saccharomyces |
| | | | | | | cerevisiae |
| 616 | PHE0000361 | 277 | PAT1-like scarecrow 9 | Light response | 191-1900 | Zea mays |
| 617 | PHE0000362 | 278 | CDC28-related protein | Cell division | 198-1484 | Zea mays |
| | | | kinase | | | |
| 618 | PHE0000385 | 279 | H+ transporting | Metabolite | 176-2836 | Zea mays |
| | | | ATPase | transport | | |
| 619 | PHE0000386 | 280 | cation-transporting | Metabolite | 222-2168 | Zea mays |
| | | | ATPase | transport | | |
| 620 | PHE0000387 | 281 | yeast DRS2 (ALA1- | Metabolite | 170-4237 | Saccharomyces |
| | | | like) - L01795 | transport | | cerevisiae |
| 621 | PHE0000388 | 282 | S. pombe ALA1-like- | Metabolite | 56-3832 | Schizosaccharo |
| | | | CAA21897 | transport | | myces pombe |
| 622 | PHE0000389 | 283 | rice ALA1-like 1 - | Metabolite | 47-1538, 1619-1925, 3116-3824, | Oryza sativa |
| | | | BAA89544 | transport | 3920-4043, 4143-4362, | |
| | | | | | 4590-5048, 5937-6153 | |
| 623 | PHE0000390 | 284 | rice chloroplastic | Photosynthesis/Carbon | 136-1311 | Oryza sativa |
| | | | sedoheptulose-1,7- | partitioning | | |
| | | | bisphosphatase- | | | |
| 624 | PHE0000391 | 285 | rice cytosolic fructose- | Photosynthesis/Carbon | 171-1187 | Oryza sativa |
| | | | 1,6-bisphosphatase | partitioning | | |
| 625 | PHE0000392 | 286 | Wheat sedoheptulose- | Photosynthesis/Carbon | 14-1192 | Triticum |
| | | | 1,7-bisphosphatase | partitioning | | aestivum |
| 626 | PHE0000394 | 287 | sedoheptulose-1,7- | Photosynthesis/Carbon | 90-1238 | Chlorella |
| | | | bisphosphatase | partitioning | | sorokiniana |
| 627 | PHE0000395 | 288 | soy phantastica | Plant growth and | 275-1345 | Glycine max |
| | | | | development | | |
| 628 | PHE0000396 | 289 | soy phantastica 2 | Plant growth and | 178-1260 | Glycine max |
| | | | | development | | |
| 629 | PHE0000397 | 290 | maize rough sheath 1 | Plant growth and | 92-1144 | Zea mays |
| | | | | development | | |
| 630 | PHE0000398 | 291 | soy lg3-like 1 | Plant growth and | 103-1026 | Glycine max |
| | | | | development | | |
| 631 | PHE0000399 | 292 | soy rough sheath1-like 1 | Plant growth and | 144-1076 | Glycine max |
| | | | | development | | |
| 632 | PHE0000400 | 293 | soy G559-like | Plant growth and | 301-1560 | Glycine max |
| | | | | development | | |
| 633 | PHE0000401 | 294 | soy G1635-like 1 | Plant growth and | 28-888 | Glycine max |
| | | | | development | | |
| 634 | PHE0000402 | 295 | rice amino acid | Nitrogen transport | 89-1426 | Oryza sativa |
| | | | transporter-like protein | | | |
| 635 | PHE0000403 | 296 | corn amino acid | Nitrogen transport | 116-1453 | Zea mays |
| | | | permease | | | |
| 636 | PHE0000404 | 297 | rice proline transport | Nitrogen transport | 313-1731 | Oryza sativa |
| | | | protein | | | |
| 637 | PHE0000412 | 298 | corn monosaccharide | Sucrose transport | 75-1643 | Zea mays |
| | | | transporter 1 | | | |
| 638 | PHE0000413 | 299 | soy monosaccharide | Sucrose transport | 132-1685 | Glycine max |
| | | | transporter 3 | | | |
| 639 | PHE0000414 | 300 | corn monosaccharide | Sucrose transport | 141-1670 | Zea mays |
| | | | transporter 3 | | | |
| 640 | PHE0000415 | 301 | soy monosaccharide | Sucrose transport | 160-1899 | Glycine max |
| | | | transporter 1 | | | |
| 641 | PHE0000416 | 302 | corn monosaccharide | Sucrose transport | 74-1690 | Zea mays |
| | | | transporter 6 | | | |
| 642 | PHE0000418 | 303 | corn monosaccharide | Sucrose transport | 146-1744 | Zea mays |
| | | | transporter 4 | | | |
| 643 | PHE0000419 | 304 | soy monosaccharide | Sucrose transport | 63-1505 | Glycine max |
| | | | transporter 2 | | | |
| 644 | PHE0000420 | 305 | soy sucrose transporter | Sucrose transport | 63-1595 | Glycine max |
| 645 | PHE0000421 | 306 | corn sucrose | Sucrose transport | 76-1599 | Zea mays |
| | | | transporter 2 | | | |
| 646 | PHE0000422 | 307 | corn monosaccharide | Sucrose transport | 201-1763 | Zea mays |
| | | | transporter 8 | | | |
| 647 | PHE0000423 | 308 | corn monosaccharide | Sucrose transport | 93-1634 | Zea mays |
| | | | transporter 7 | | | |
| 648 | PHE0000425 | 309 | soy isoflavone | Stress tolerance | 45-1607 | Glycine max |
| | | | synthase | | | |
| 649 | PHE0000426 | 310 | soy ttg1-like 2 | Stress tolerance | 52-1059 | Glycine max |
| 650 | PHE0000427 | 311 | GATE5 - corn SPA1- | Light response | 227-3139 | Zea mays |
| | | | like 1 | | | |
| 651 | PHE0000428 | 312 | corn PIF3-like | Light response | 173-856 | Zea mays |
| 652 | PHE0000429 | 313 | soy Athb-2-like 1 | Light response | 78-932 | Glycine max |
| 653 | PHE0000430 | 314 | corn SUB1-like 1 | Light response | 44-1954 | Zea mays |
| 654 | PHE0000431 | 315 | soy GH3 protein | Light response | 42-1820 | Glycine max |
| 655 | PHE0000432 | 316 | corn 12- | Stress | 128-1240 | Zea mays |
| | | | oxophytodienoate | tolerance/Disease | | |
| | | | reductase 1 | resistance | | |
| 656 | PHE0000433 | 317 | corn 12-oxo- | Stress | 166-1242 | Zea mays |
| | | | phytodienoate | tolerance/Disease | | |
| | | | reductase-like 3 | resistance | | |
| 657 | PHE0000434 | 318 | corn 12- | Stress | 92-1210 | Zea mays |
| | | | oxophytodienoate | tolerance/Disease | | |
| | | | reductase-like 4 | resistance | | |
| 658 | PHE0000435 | 319 | corn hydroperoxide | Stress | 83-1594 | Zea mays |
| | | | lyase | tolerance/Disease | | |
| | | | | resistance | | |
| 659 | PHE0000436 | 320 | rice cns1-like | Heat | 121-1242 | Oryza sativa |
| | | | | tolerance/Water | | |
| | | | | use efficiency | | |
| 660 | PHE0000437 | 321 | corn HCH1-like 1 | Heat | 42-1100 | Zea mays |
| | | | | tolerance/Water | | |
| | | | | use efficiency | | |
| 661 | PHE0000438 | 322 | corn HOP-like 1 | Heat | 88-1830 | Zea mays |
| | | | | tolerance/Water | | |
| | | | | use efficiency | | |
| 662 | PHE0000439 | 323 | corn HOP-like 2 | Heat | 65-1261 | Zea mays |
| | | | | tolerance/Water | | |
| | | | | use efficiency | | |
| 663 | PHE0000440 | 324 | rice CHIP-like 1 | Heat | 121-939 | Oryza sativa |
| | | | | tolerance/Water | | |
| | | | | use efficiency | | |
| 664 | PHE0000441 | 325 | corn CHIP-like 2 | Heat | 115-939 | Zea mays |
| | | | | tolerance/Water | | |
| | | | | use efficiency | | |
| 665 | PHE0000451 | 326 | wheat SVP-like 1 | Flower | 149-736 | Triticum |
| | | | | development | | aestivum |
| 666 | PHE0000452 | 327 | corn SVP-like 3 | Flower | 75-749 | Zea mays |
| | | | | development | | |
| 667 | PHE0000453 | 328 | corn SVP-like 5 | Flower | 304-774, 956-1219 | Zea mays |
| | | | | development | | |
| 668 | PHE0000454 | 329 | fC-zmhuLIB3062- | Yield associated | 113-853 | Zea mays |
| | | | 044-Q1-K1-B8 | genes | | |
| 669 | PHE0000455 | 330 | corn E4/E8 binding | Yield associated | 253-2259 | Zea mays |
| | | | protein-like | genes | | |
| 670 | PHE0000469 | 331 | yeast YKL091c - | Stress tolerance | 110-1042 | Saccharomyces |
| | | | Z28091 | | | cerevisiae |
| 671 | PHE0000470 | 332 | corn Ssh1-like protein 1 | Stress tolerance | 57-1037 | Zea mays |
| 672 | PHE0000471 | 333 | corn Ssh1-like protein 3 | Stress tolerance | 89-841 | Zea mays |
| 673 | PHE0000472 | 334 | corn Ssh1-like protein 4 | Stress tolerance | 309-1196 | Zea mays |
| 674 | PHE0000473 | 335 | soy Ssh1-like protein 2 | Stress tolerance | 209-976 | Glycine max |
| | | | [ssh2] | | | |
| 675 | PHE0000484 | 336 | soy JMT-like protien 1 | Stress | 26-1135 | Glycine max |
| | | | | tolerance/Disease | | |
| | | | | resistance | | |
| 676 | PHE0000485 | 337 | corn JMT-like protein 1 | Stress | 39-1184 | Zea mays |
| | | | | tolerance/Disease | | |
| | | | | resistance | | |
| 677 | PHE0000486 | 338 | corn JMT-like protein 2 | Stress | 63-1208 | Zea mays |
| | | | | tolerance/Disease | | |
| | | | | resistance | | |
| 678 | PHE0000017 | 339 | corn AAA-ATPase 1 | Plastid division | 184-2214 | Zea mays |

[0041] Transgenic plants having enhanced phenotypes are identified from populations of plants transformed as described herein by evaluating the phenotype in a variety of assays to detect an enhanced phenotype. These assays also may take many forms, including but not limited to, analyses to detect changes in the chemical composition, morphology, biomass or physiological responses of the plant to stress conditions. Enhanced physiological properties in transgenic plants of the present invention may be identified by evaluation of responses to stress conditions, for example in assays using imposed stress conditions to detect improved responses to water stress, nitrogen deficiency, cold growing conditions, pathogen or insect attack or light deficiency, or alternatively, under naturally present stress conditions, for example under field conditions. Enhanced chemical compositions, such as nutritional composition of grain, may be detected by analysis, for example, of composition and content of seed protein, free amino acids, oil, free fatty acids, starch or tocopherols. Biomass measures may be made on greenhouse or field grown plants and may include such measurements as plant height, stem diameter, root and shoot dry weights, and, for corn plants, ear length and diameter

[0042] Phenotypic data on morphological changes may be collected by visual observation during the process of plant regeneration as well as in regenerated plants transferred to soil. Such phenotypic data includes characteristics such as normal plants, bushy plants, taller plants, thicker stalks, narrow leaves, striped leaves, knotted phenotype, chlorosis, albino, anthocyanin production, or altered tassels, ears or roots. Other enhanced phenotypes may be identified by measurements taken under field conditions, such as days to pollen shed, days to silking, leaf extension rate, chlorophyll content, leaf temperature, stand, seedling vigor, internode length, plant height, leaf number, leaf area, tillering, brace roots, stay green, stalk lodging, root lodging, plant health, barreness/prolificacy, green snap, and pest resistance. In addition, phenotypic characteristics of harvested grain may be evaluated, including number of kernels per row on the ear, number of rows of kernels on the ear, kernel abortion, kernel weight, kernel size, kernel density and physical grain quality.

[0043] To confirm hybrid yield in transgenic corn plants expressing genes of the present invention, it may be desirable to test hybrids over multiple years at multiple locations in a geographical location where maize is conventionally grown, e.g. in Iowa, Illinois or other locations in the midwestern United States, under “normal” field conditions as well as under stress conditions, e.g. under drought or population density stress.

[0044] Of particular interest in the present invention are corn and soybean plants. Other plants of interest in the present invention for production of transgenic seed that can be grown to provide plants having enhanced properties include, without limitation, cotton, canola, wheat, sunflower, sorghum, alfalfa, barley, millet, rice, tobacco, fruit and vegetable crops, and turfgrass.

Protein and Polypeptide Molecules

[0045] Polypeptides considered in the present invention are entire proteins or at least a sufficient portion of the entire protein to impart the relevant biological activity of the protein, e.g. enhanced plant phenotype. The term “protein” also includes molecules consisting of one or more polypeptide chains. Thus, a polypeptide useful in the present invention may constitute an entire protein having the desired biological activity, or may constitute a portion of an oligomeric protein having multiple polypeptide chains. Polypeptides useful for generation of transgenic plants having enhanced properties include the polypeptides provided herein as SEQ ID NO:340 through SEQ ID NO:678, as well as homologs of such polypeptides.

[0046] Homologs of the polypeptides of the present invention may be identified by comparison of the amino acid sequence of the polypeptide to amino acid sequences of polypeptides from the same or different plant sources, e.g. manually or by using known homology-based search algorithms such as those commonly known and referred to as BLAST, FASTA, and Smith-Waterman. As used herein, a homolog is a peptide from the same or a different organism that performs the same biological function as the polypeptide to which it is compared. An orthologous relation between two organisms is not necessarily manifest as a one-to-one correspondence between two genes, because a gene can be duplicated or deleted after organism phylogenetic separation, such as speciation. For a given polypeptide, there may be no ortholog or more than one ortholog. Other complicating factors include alternatively spliced transcripts from the same gene, limited gene identification, redundant copies of the same gene with different sequence lengths or corrected sequence. A local sequence alignment program, e.g. BLAST, can be used to search a database of sequences to find similar sequences, and the summary Expectation value (E-value) used to measure the sequence base similarity. As a polypeptide hit with the best E-value for a particular organism may not necessarily be an ortholog or the only ortholog, a reciprocal BLAST search is used in the present invention to filter hit sequences with significant E-values for ortholog identification. The reciprocal BLAST entails search of the significant hits against a database of polypeptide sequences from the base organism that are similar to the sequence of the query polypeptide. A hit is a likely ortholog, when the reciprocal BLAST's best hit is the query polypeptide itself or a polypeptide encoded by a duplicated gene after speciation. Thus, homolog is used herein to described polypeptides that are assumed to have functional similarity by inference from sequence base similarity. Homologs of the polypeptides of the present invention are described in Table 2 provided on the CD-ROM provided herewith, and disclosed as SEQ ID NO:679 through SEQ ID NO:24149.

[0047] A further aspect of the invention comprises functional homolog proteins which differ in one or more amino acids from those of a polypeptide provided herein as the result of one or more of the well-known conservative amino acid substitutions, e.g. valine is a conservative substitute for alanine and threonine is a conservative substitute for serine. Conservative substitutions for an amino acid within the native polypeptide sequence can be selected from other members of a class to which the naturally occurring amino acid belongs. Representative amino acids within these various classes include, but are not limited to: (1) acidic (negatively charged) amino acids such as aspartic acid and glutamic acid; (2) basic (positively charged) amino acids such as arginine, histidine, and lysine; (3) neutral polar amino acids such as glycine, serine, threonine, cysteine, tyrosine, asparagine, and glutamine; and (4) neutral nonpolar (hydrophobic) amino acids such as alanine, leucine, isoleucine, valine, proline, phenylalanine, tryptophan, and methionine. Conserved substitutes for an amino acid within a native amino acid sequence can be selected from other members of the group to which the naturally occurring amino acid belongs. For example, a group of amino acids having aliphatic side chains is glycine, alanine, valine, leucine, and isoleucine; a group of amino acids having aliphatic-hydroxyl side chains is serine and threonine; a group of amino acids having amide-containing side chains is asparagine and glutamine; a group of amino acids having aromatic side chains is phenylalanine, tyrosine, and tryptophan; a group of amino acids having basic side chains is lysine, arginine, and histidine; and a group of amino acids having sulfur-containing side chains is cysteine and methionine. Naturally conservative amino acids substitution groups are: valine-leucine, valine-isoleucine, phenylalanine-tyrosine, lysine-arginine, alanine-valine, aspartic acid-glutamic acid, and asparagine-glutamine. A further aspect of the invention comprises polypeptides that differ in one or more amino acids from those of a described protein sequence as the result of deletion or insertion of one or more amino acids in a native sequence.

[0048] Homologs of the polypeptides provided herein will generally demonstrate significant identity with the polypeptides provided herein. Of particular interest are polypeptides having at least 50% sequence identity, more preferably at least about 70% sequence identity or higher, e.g. at least about 80% sequence identity with an amino acid sequence of SEQ ID NO:1 through SEQ ID NO:339. Of course useful polypeptides also include those with higher identity to such a polypeptide sequence, e.g. 90% to 99% identity. Identity of protein homologs is determnined by optimally aligning the amino acid sequence of a putative protein homolog with a defined amino acid sequence and by calculating the percentage of identical and conservatively substituted amino acids over the window of comparison. Preferentially, the window of comparison for determining identity is the entire polypeptide sequence disclosed herein, e.g. the full sequence of any of SEQ ID NO:340 through SEQ ID NO:678.

Recombinant Polynucleotides

[0049] The present invention contemplates the use of polynucleotides effective for imparting an enhanced phenotype to transgenic plants expressing said polynucleotides. Exemplary polynucleotides for use in the present invention are listed in Table 4 above and provided herein as SEQ ID NO:1 through SEQ ID NO:339. A subset of the nucleic molecules of this invention includes fragments of the disclosed polynucleotides consisting of oligonucleotides of at least 15, preferably at least 16 or 17, more preferably at least 18 or 19, and even more preferably at least 20 or more, consecutive nucleotides. Such oligonucleotides are fragments of the larger molecules having a sequence selected from the group consisting of SEQ ID NO: 1 through SEQ ID NO:339, and find use, for example as probes and primers for detection of the polynucleotides of the present invention.

[0050] Also of interest in the present invention are variants of the polynucleotides provided herein. Such variants may be naturally occurring, including homologous polynucleotides from the same or a different species, or may be non-natural variants, for example polynucleotides synthesized using chemical synthesis methods, or generated using recombinant DNA techniques. Degeneracy of the genetic code provides the possibility to substitute at least one base of the protein encoding sequence of a gene with a different base without causing the amino acid sequence of the polypeptide produced from the gene to be changed. Hence, a polynucleotide useful in the present invention may have any base sequence that has been changed from SEQ ID NO:1 to SEQ ID NO:339 by substitution in accordance with degeneracy of the genetic code.

[0051] Homologs of the polynucleotides provided herein will generally demonstrate significant identity with the polynucleotides provided herein. A polynucleotide of the present invention is substantially identical to a reference polynucleotide if, when the sequences of the polynucleotides are optimally aligned there is about 60% nucleotide equivalence; more preferably 70%; more preferably 80% equivalence; more preferably 85% equivalence; more preferably 90%; more preferably 95%; and/or more preferably 98% or 99% equivalence over a comparison window. A comparison window is preferably at least 50-100 nucleotides, and more preferably is the entire length of the polynucleotide provided herein. Optimal alignment of sequences for aligning a comparison window may be conducted by algorithms; preferably by computerized implementations of these algorithms (for example, the Wisconsin Genetics Software Package Release 7.0-10.0, Genetics Computer Group, 575 Science Dr., Madison, Wis.). The reference polynucleotide may be a full-length molecule or a portion of a longer molecule. Preferentially, the window of comparison for determining polynucleotide identity of protein encoding sequences is the entire coding region.

[0052] In a preferred embodiment, a polynucleotide of the present invention is operatively linked in a recombinant polynucleotide to a promoter functional in a plant to provide for expression of the polynucleotide in the sense orientation such that a desired polypeptide is produced. Also considered are embodiments wherein a polynucleotide is operatively linked to a promoter functional in a plant to provide for expression of the polynucleotide in the antisense orientation such that a complementary copy of at least a portion of an mRNA native to the target plant host is produced. Such a transcript may contain both sense and antisense regions of a polynucleotide, for example where RNAi methods are used for gene suppression.

[0053] Recombinant polynucleotides of the present invention are assembled in recombinant DNA constructs using methods known to those of ordinary skill in the art. Thus, transgenic DNA constructs used for transforming plant cells will comprise a polynucleotide one desires to introduce into a target plant. Such constructs will also typically comprise a promoter operatively linked to said polynucleotide to provide for expression in the target plant. Other construct components may include additional regulatory elements, such as 5′ or 3′ untranslated regions (such as polyadenylation sites), intron regions, and transit or signal peptides.

[0054] Numerous promoters that are active in plant cells have been described in the literature. These include promoters present in plant genomes as well as promoters from other sources, including nopaline synthase (NOS) promoter and octopine synthase (OCS) promoters carried on tumor-inducing plasmids of Agrobacterium tumefaciens, caulimovirus promoters such as the cauliflower mosaic virus or figwort mosaic virus promoters. For instance, see U.S. Pat. Nos. 5,858,742 and 5,322,938 which disclose versions of the constitutive promoter derived from cauliflower mosaic virus (CaMV35S), U.S. Pat. No. 5,378,619 which discloses a Figwort Mosaic Virus (FMV) 35S promoter, U.S. Pat. No. 6,437,217 which discloses a maize RS81 promoter, U.S. Pat. No. 5,641,876 which discloses a rice actin promoter, U.S. Pat. No. 6,426,446 which discloses a maize RS324 promoter, U.S. Pat. No. 6,429,362 which discloses a maize PR-1 promoter, U.S. Pat. No. 6,232,526 which discloses a maize A3 promoter, U.S. Pat. No. 6,177,611 which discloses constitutive maize promoters, U.S. Pat. No. 6,433,252 which discloses a maize L3 oleosin promoter, U.S. Pat. No. 6,429,357 which discloses a rice actin 2 promoter and intron, U.S. Pat. No. 5,837,848 which discloses a root specific promoter, U.S. Pat. No. 6,084,089 which discloses cold inducible promoters, U.S. Pat. No. 6,294,714 which discloses light inducible promoters, U.S. Pat. No. 6,140,078 which discloses salt inducible promoters, U.S. Pat. No. 6,252,138 which discloses pathogen inducible promoters, U.S. Pat. No. 6,175,060 which discloses phosphorus deficiency inducible promoters, U.S. patent application Publication 2002/0192813A1 which discloses 5′,3′ and intron elements useful in the design of effective plant expression vectors, U.S. patent application Ser. No. 09/078,972 which discloses a coixin promoter, U.S. patent application Ser. No. 09/757,089 which discloses a maize chloroplast aldolase promoter, all of which are incorporated herein by reference. These and numerous other promoters that function in plant cells are known to those skilled in the art and available for use in recombinant polynucleotides of the present invention to provide for expression of desired genes in transgenic plant cells.

[0055] Furthermore, the promoters may be altered to contain multiple “enhancer sequences” to assist in elevating gene expression. Such enhancers are known in the art. By including an enhancer sequence with such constructs, the expression of the selected protein may be enhanced. These enhancers often are found 5′ to the start of transcription in a promoter that functions in eukaryotic cells, but can often be inserted in the forward or reverse orientation 5′ or 3′ to the coding sequence. In some instances, these 5′ enhancing elements are introns. Deemed to be particularly useful as enhancers are the 5′ introns of the rice actin 1 and rice actin 2 genes. Examples of other enhancers that can be used in accordance with the invention include elements from the CaMV 35S promoter, octopine synthase genes, the maize alcohol dehydrogenase gene, the maize shrunken 1 gene and promoters from non-plant eukaryotes.

[0056] In some aspects of the invention it is preferred that the promoter element in the DNA construct be capable of causing sufficient expression to result in the production of an effective amount of a polypeptide in water deficit conditions. Such promoters can be identified and isolated from the regulatory region of plant genes that are over expressed in water deficit conditions. Specific water-deficit-inducible promoters for use in this invention are derived from the 5′ regulatory region of genes identified as a heat shock protein 17.5 gene (HSP17.5), an HVA22 gene (HVA22), and a cinnamic acid 4-hydroxylase (CA4H) gene (CA4H) of Zea maize. Such water-deficit-inducible promoters are disclosed in U.S. provisional application Ser. No. 60/435,987, filed Dec. 20, 2002, incorporated herein by reference.

[0057] In other aspects of the invention, sufficient expression in plant seed tissues is desired to effect improvements in seed composition. Exemplary promoters for use for seed composition modification include promoters from seed genes such as napin (U.S. Pat. No. 5,420,034), oleosin, zein Z27 (Russell et al. (1997) Transgenic Res. 6(2):157-166), globulin 1 (Belanger et al (1991) Genetics 129:863-872), glutelin 1 (Russell (1997) supra), and peroxiredoxin antioxidant (Per1) (Stacy et al. (1996) Plant Mol Biol. 31(6): 1205-1216).

[0058] In still other aspects of the invention, preferential expression in plant green tissues is desired. Promoters of interest for such uses include those from genes such as SSU (Fischhoff et al. (1992) Plant Mol Biol. 20:81-93), aldolase and pyruvate orthophosphate dikinase (PPDK) (WO01/19976).

[0059] Recombinant constructs prepared in accordance with the invention will also generally include a 3′ untranlated DNA region that typically contains a polyadenylation sequence following the polynucleotide coding region. Examples of useful 3′ UTRs include those from the nopaline synthase gene of Agrobacterium tumefaciens (nos), a gene encoding the small subunit of a ribulose-1,5-bisphosphate carboxylase-oxygenase (rbcS), and the T7 transcript of Agrobacterium tumefaciens.

[0060] Constructs and vectors may also include a transit peptide for targeting of a gene target to a plant organelle, particularly to a chloroplast, leucoplast or other plastid organelle. For descriptions of the use of chloroplast transit peptides see U.S. Pat. No. 5,188,642 and U.S. Pat. No. 5,728,925, incorporated herein by reference. For description of the transit peptide region of an Arabidopsis EPSPS gene useful in the present invention, see Klee, H. J. et al (MGG (1987) 210:437-442).

[0061] The present invention also encompasses transgenic plants with stacked engineered traits, e.g. a crop having an enhanced phenotype resulting from expression of a recombinant polynucleotide provided herein, in combination with herbicide and/or pest resistance traits. For example, genes of the current invention can be stacked with other traits of agronomic interest, such as a trait providing herbicide resistance, for example a RoundUp Ready trait, or insect resistance, such as using a gene from Bacillus thuringensis to provide resistance against lepidopteran, coliopteran, homopteran, hemiopteran, and other insects. Herbicides for which resistance is useful in a plant include glyphosate herbicides, phosphinothricin herbicides, oxynil herbicides, imidazolinone herbicides, dinitroaniline herbicides, pyridine herbicides, sulfonylurea herbicides, bialaphos herbicides, sulfonamide herbicides and gluphosinate herbicides. To illustrate the that production of transgenic plants with herbicide resistance is a capability of those of ordinary skill in the art reference is made to U.S. patent application publications 2003/0106096A1 and 2002/0112260A1 and U.S. Pat. Nos. 5,034,322; 5,776,760, 6,107,549 and 6,376,754, all of which are incorporated herein by reference. To illustrate that the production of transgenic plants with pest resistance is a capability of those of ordinary skill in the art reference is made to U.S. Pat. Nos. 5,250,515 and 5,880,275 which disclose plants expressing an endotoxin of Bacillus thuringiensis bacteria, to U.S. Pat. No. 6,506,599 which discloses control of invertebrates which feed on transgenic plants which express dsRNA for suppressing a target gene in the invertebrate, to U.S. Pat. No. 5,986,175 which discloses the control of viral pests by transgenic plants which express viral replicase, and to U.S. patent application Publication 2003/0150017 A1 which discloses control of pests by a transgenic plant which express a dsRNA targeted to suppressing a gene in the pest, all of which are incorporated herein by reference.

Plant Transformation Constructs and Methods

[0062] Constructs used for transforming plant cells will comprise the recombinant polynucleotide that one desires to introduce as well as various other elements as described above. It is also contemplated that one may employ multiple genes for expression of multiple polynucleotides for crop improvement provided herein or for expression of a polynucleotide provided herein and one or more other desirable genes on either the same or different vectors for transformation. In the latter case, the different vectors may be delivered concurrently to recipient cells if co-transformation into a single chromosomal location is desired. Numerous methods for transforming plant cells with recombinant DNA are known in the art and may be used in the present invention. Two commonly used methods for plant transformation are Agrobacterium-mediated transformation and microprojectile bombardment. Microprojectile bombardment methods are illustrated in U.S. Pat. Nos. 5,015,580; 5,550,318; 5,538,880; 5,914,451; 6,160,208; 6,399,861 and 6,403,865 and Agrobacterium-mediated transformation is described in U.S. Pat. Nos. 5,635,055; 5,824,877; 5,591,616; 5,981,840 and 6,384,301, all of which are incorporated herein by reference. For Agrobacterium tumefaciens based plant transformation system, additional elements present on transformation constructs will include T-DNA left and right border sequences to facilitate incorporation of the recombinant polynucleotide into the plant genome.

[0063] In general it is preferred to introduce heterologous DNA randomly, i.e. at a non-specific location, in the genome of a target plant line. In special cases it may be useful to target heterologous DNA insertion in order to achieve site-specific integration, e.g. to replace an existing gene in the genome, to use an existing promoter in the plant genome, or to insert a recombinant polynucleotide at a predetermined site known to be active for gene expression. Several site specific recombination systems exist which are known to function implants include cre-lox as disclosed in U.S. Pat. No. 4,959,317 and FLP-FRT as disclosed in U.S. Pat. No. 5,527,695, both incorporated herein by reference.

[0064] Transformation methods of this invention are preferably practiced in tissue culture on media and in a controlled environment. “Media” refers to the numerous nutrient mixtures that are used to grow cells in vitro, that is, outside of the intact living organism. Recipient cell targets include, but are not limited to, meristem cells, callus, immature embryos and gametic cells such as microspores, pollen, sperm and egg cells. It is contemplated that any cell from which a fertile plant may be regenerated is useful as a recipient cell. Callus may be initiated from tissue sources including, but not limited to, immature embryos, seedling apical meristems, microspores and the like. Cells capable of proliferating as callus are also recipient cells for genetic transformation. Practical transformation methods and materials for making transgenic plants of this invention, e.g. various media and recipient target cells, transformation of immature embryos and subsequent regeneration of fertile transgenic plants are disclosed in U.S. Pat. Nos. 6,194,636 and 6,232,526 and U.S. patent application Ser. No. 09/757,089, which are incorporated herein by reference.

[0065] In practice DNA is introduced into only a small percentage of target cells in any one experiment. Marker genes are used to provide an efficient system for identification of those cells that are stably transformed by receiving and integrating a transgenic DNA construct into their genomes. Preferred marker genes provide selective markers that confer resistance to a selective agent, such as an antibiotic or herbicide. Potentially transformed cells are exposed to the selective agent. In the population of surviving cells will be those cells where, generally, the resistance-conferring gene has been integrated and expressed at sufficient levels to permit cell survival. Cells may be tested further to confirm stable integration of the exogenous DNA. Useful selective marker genes include those conferring resistance to antibiotics such as kanamycin (nptII), hygromycin B (aph IV) and gentamycin (aac3 and aacC4) or resistance to herbicides such as glufosinate (bar or pat) and glyphosate (EPSPS). Examples of such selectable are illustrated in U.S. Pat. Nos. 5,550,318; 5,633,435; 5,780,708 and 6,118,047, all of which are incorporated herein by reference. Screenable markers which provide an ability to visually identify transformants can also be employed, e.g., a gene expressing a colored or fluorescent protein such as a luciferase or green fluorescent protein (GFP) or a gene expressing a beta-glucuronidase or uidA gene (GUS) for which various chromogenic substrates are known. It is also contemplated that combinations of screenable and selectable markers will be useful for identification of transformed cells. See PCT publication WO 99/61129 which discloses use of a gene fusion between a selectable marker gene and a screenable marker gene, e.g. an NPTII gene and a GFP gene.

[0066] Cells that survive exposure to the selective agent, or cells that have been scored positive in a screening assay, may be cultured in regeneration media and allowed to mature into plants. Developing plantlets can be transferred to soil less plant growth mix, and hardened off, e.g., in an environmentally controlled chamber at about 85% relative humidity, 600 ppm CO₂, and 25-250 microeinsteins m⁻² s⁻¹ of light, prior to transfer to a greenhouse or growth chamber for maturation. Plants are preferably matured either in a growth chamber or greenhouse. Plants are regenerated from about 6 wk to 10 months after a transformant is identified, depending on the initial tissue. During regeneration, cells are grown to plants on solid media at about 19 to 28° C. After regenerating plants have reached the stage of shoot and root development, they may be transferred to a greenhouse for further growth and testing. Plants may be pollinated using conventional plant breeding methods known to those of skill in the art and seed produced.

[0067] Progeny may be recovered from transformed plants and tested for expression of the exogenous recombinant polynucleotide. Useful assays include, for example, “molecular biological” assays, such as Southern and Northern blotting and PCR; “biochemical” assays, such as detecting the presence of RNA, e.g. double stranded RNA, or a protein product, e.g., by immunological means (ELISAs and Western blots) or by enzymatic function; plant part assays, such as leaf or root assays; and also, by analyzing the phenotype of the whole regenerated plant.

[0068] The present invention will be further illustrated by means of the following examples provided for illustration purposes only and in no way intended to limit the scope of the invention.

### EXAMPLES

### Example 1

### Constructs for Maize Transformation

[0069] A GATEWAY™ Destination (Invitrogen Life Technologies, Carlsbad, Calif.) plant expression vector, pMON65154, was constructed for use in preparation of constructs comprising recombinant polynucleotides for corn transformation. The elements of the expression vector are summarized in Table 5 below. Generally, pMON65154 comprises a selectable marker expression cassette comprising a Cauliflower Mosaic Virus 35S promoter operably linked to a gene encoding neomycin phosphotransferase II (nptII). The 3′ region of the selectable marker expression cassette comprises the 3′ region of the Agrobacterium tumefaciense nopaline synthase gene (nos) followed 3′ by the 3′ region of the potato proteinase inhibitor II (pinII) gene. The plasmid pMON 65154 further comprises a plant expression cassette into which a gene of interest may be inserted using GATEWAY™ cloning methods. The GATEWAY™ cloning cassette is flanked 5′ by a rice actin 1 promoter, exon and intron and flanked 3′ by the 3′ region of the potato pinII gene. Using GATEWAY™ methods, the cloning cassette may be replaced with a gene of interest. The vector pMON65154, and derivatives thereof comprising a gene of interest, are particularly useful in methods of plant transformation via direct DNA delivery, such as microprojectile bombardment.

TABLE 5
Elements of Plasmid pMON65154

| FUNCTION | ELEMENT | REFERENCE |
|---|---|---|
| Plant gene of interest | Rice actin 1 promoter | U.S. Pat. No. 5,641,876 |
| expression cassette | Rice actin 1 exon 1, intron 1 | U.S. Pat. No. 5,641,876 |
| | enhancer | |
| Gene of interest insertion | AttR1 | GATEWAY ™ |
| site | | Cloning Technology |
| | | Instruction Manual |
| | CmR gene | GATEWAY ™ |
| | | Cloning Technology |
| | | Instruction Manual |
| | ccdA, ccdB genes | GATEWAY ™ |
| | | Cloning Technology |
| | | Instruction Manual |
| | attR2 | GATEWAY ™ |
| | | Cloning Technology |
| | | Instruction Manual |
| Plant gene of interest | Potato pinII 3′ region | An et al. (1989) Plant Cell 1: |
| expression cassette | | 115-122 |
| Plant selectable marker | CaMV 35S promoter | U.S. Pat. No. 5,858,742 |
| expression cassette | nptII selectable marker | U.S. Pat. No. 5,858,742 |
| | nos 3′ region | U.S. Pat. No. 5,858,742 |
| | PinII 3′ region | An et al. (1989) Plant Cell 1: |
| | | 115-122 |
| Maintenance in E. coli | ColE1 origin of replication | |
| | F1 origin of replication | |
| | Bla ampicillin resistance | |

[0070] A similar plasmid vector, pMON72472, is constructed for use in Agrobacterium mediated methods of plant transformation. pMON72472 comprises the gene of interest plant expression cassette, GATEWAY™ cloning, and plant selectable marker expression cassettes present in pMON65154. In addition, left and right T-DNA border sequences from Agrobacterium are added to the plasmid (Zambryski et al. (1982)). The right border sequence is located 5′ to the rice actin 1 promoter and the left border sequence is located 3′ to the pinII 3′ sequence situated 3′ to the nptII gene. Furthermore, pMON72472 comprises a plasmid backbone to facilitate replication of the plasmid in both E. coli and Agrobacterium tumefaciens. The backbone has an oriV wide host range origin of DNA replication functional in Agrobacterium, a pBR322 origin of replication functional in E. coli, and a spectinomycin/stretptomycin resistance gene for selection in both E. coli and Agrobacterium.

[0071] Vectors similar to those described above may be constructed for use in Agrobacterium or microprojectile bombardment maize transformation systems where the rice actin 1 promoter in the plant expression cassette portion is replaced with other desirable promoters including, but not limited to a maize globulin 1 promoter, a maize oleosin promoter, a glutelin 1 promoter, an aldolase promoter, a zein Z27 promoter, a pyruvate orthophosphate dikinase (PPDK) promoter, a a soybean 7S alpha promoter, a peroxiredoxin antioxidant (Per1) promoter and a CaMV 35S promoter. Protein coding segments are amplified by PCR prior to insertion into vectors such as described above. Primers for PCR amplification can be designed at or near the start and stop codons of the coding sequence, in order to eliminate most of the 5′ and 3′ untranslated regions. For GATEWAY cloning methods, PCR products are tailed with attB1 and attB2 sequences, purified then recombined into a destination vectors to produce an expression vector for use in transformation.

[0072] Exemplary constructs for transformation of maize to produce plants having enhanced phenotypes are provided in Table 6 below. Column headings in Table 6 refer to the following information:

[0073] “SEQ ID NO” refers to a particular nucleic acid sequence in the Sequence Listing which defines a polynucleotide used in a recombinant polynucleotide of this invention.

[0074] “PHE ID” refers to an arbitrary number used to identify a particular recombinant polynucleotide corresponding to the translated protein encoded by the polynucleotide.

[0075] “NOM ID” refers to a particular construct comprising a polynucleotide of this invention.

[0076] “GENE NAME” refers to a common name for the recombinant polynucleotide.

[0077] “PROMOTER” provides the name of the promoter region driving expression of the polynucleotide

[0078] “TARGET” indicates if a chloroplast transit peptide is employed in the construct

[0079] “pMON” refers to an arbitrary number used to designate a particular recombinant DNA construct. Constructs are prophetic where no pMON is provided.

TABLE 6
Maize Transformation Constructs

| SEQ | | | | | | |
|---|---|---|---|---|---|---|
| ID | | | | | | |
| NO | Phe ID | Nom ID | Gene Name | Promoter | Target | pMON |
| 1 | PHE0000001 | 1 | maize cellulose synthase | rice actin | | — |
| 2 | PHE0000006 | 6 | Arabidopsis RAV2/G9 | rice actin | | PMON68861 |
| 3 | PHE0000007 | 7 | rice G9-like 1 | rice actin | | — |
| 4 | PHE0000008 | 8/4361 | rice G9-like 2 | rice actin | | PMON80526 |
| 5 | PHE0000010 | 13 | rice G975 | rice actin | | PMON67800 |
| 6 | PHE0000278 | 14 | corn G975 | rice actin | | PMON68886 |
| 7 | PHE0000011 | 17 | corn Glossy15 | rice actin | | — |
| 8 | PHE0000012 | 165 | corn aquaporin RS81 | rice actin | | PMON67808 |
| 8 | PHE0000012 | 166 | antisense corn aquaporin RS81 | rice actin | | PMON67806 |
| 9 | PHE0000014 | 22 | rice cycD2 | rice actin | | PMON80471 |
| 10 | PHE0000215 | 24 | invW | rice actin | | — |
| 11 | PHE0000015 | 25 | rice GCR1 | rice actin | | PMON80255 |
| 12 | PHE0000016 | 103 | corn Knotted1 | rice actin | | PMON67750 |
| 13 | PHE0000018 | 28 | corn AAA-ATPase 2 | rice actin | | — |
| 14 | PHE0000019 | 29 | rice AOX1b | rice actin | | PMON80879 |
| 15 | PHE0000020 | 30 | Emericella nidulans alxA | rice actin | | PMON81241 |
| 16 | PHE0000022 | 34 | corn AAP6-like | rice actin | | PMON67826 |
| 17 | PHE0000024 | 41 | corn unknown protein | rice actin | | PMON68354 |
| 18 | PHE0000025 | 44 | corn GRF1-like protein | rice actin | | PMON68396 |
| 19 | PHE0000026 | 45 | rice GRF1 | rice actin | | — |
| 20 | PHE0000227 | 46 | soy omega-3 fatty acid desaturase | rice actin | | PMON68376 |
| 21 | PHE0000258 | 47 | AtFAD7 | rice actin | | PMON68371 |
| 22 | PHE0000259 | 48 | AtFAD8 | rice actin | | PMON74404 |
| 23 | PHE0000049 | 52 | rice phyA with corn phyC intron 1 | rice actin | | PMON80912 |
| 24 | PHE0000027 | 53/4386 | sorghum phyA with corn phyC | rice actin | | PMON80920 |
| | | | intron 1 | | | |
| 25 | PHE0000028 | 54 | rice phyB with corn phyC intron 1 | rice actin | | — |
| 26 | PHE0000029 | 55 | sorghum phyB with corn phyC | rice actin | | — |
| | | | intron 1 | | | |
| 27 | PHE0000030 | 56 | rice phyC with corn phyC intron 1 | rice actin | | — |
| 28 | PHE0000031 | 57 | sorghum phyC with corn phyC | rice actin | | — |
| | | | intron 1 | | | |
| 29 | PHE0000032 | 58 | rice PF1 | rice actin | | PMON83627 |
| 30 | PHE0000033 | 4152 | rice GT2 | PPDK | | — |
| 31 | PHE0000034 | 60 | Synechocystis biliverdin | rice actin | | PMON67805 |
| | | | reductase | | | |
| 32 | PHE0000038 | 65 | corn cycD2.1 | rice actin | | PMON68383 |
| 33 | PHE0000039 | 67 | corn nph1 | rice actin | | PMON67807 |
| 34 | PHE0000040 | 71 | corn hemoglobin 1 | rice actin | | PMON67801 |
| 34 | PHE0000040 | 74 | corn hemoglobin 1 | rice actin | chloroplast | PMON77889 |
| 35 | PHE0000043 | 80 | rice cyclin 2 | rice actin | | PMON80322 |
| 36 | PHE0000044 | 81/4424 | rice cycC | rice actin | | PMON80482 |
| 37 | PHE0000045 | 82 | rice cycB2 | rice actin | | PMON81293 |
| 38 | PHE0000046 | 83/4425 | rice cycA1 | rice actin | | PMON78247 |
| 39 | PHE0000047 | 84 | rice cycB5 | rice actin | | — |
| 40 | PHE0000244 | 89 | corn SVP-like | rice actin | | PMON68372 |
| 41 | PHE0000245 | 90 | corn SVP-like | rice actin | | PMON68373 |
| 42 | PHE0000246 | 91 | soy SVP-like | rice actin | | PMON68374 |
| 43 | PHE0000247 | 92 | soy jointless-like | rice actin | | PMON68375 |
| 44 | PHE0000106 | 114/4427 | corn cycA1 | rice actin | | PMON69457 |
| 45 | PHE0000050 | 115 | corn cycA2 | rice actin | | — |
| 46 | PHE0000051 | 116 | corn cycB2 | rice actin | | PMON68859 |
| 47 | PHE0000052 | 117 | corn cycB5 | rice actin | | PMON67813 |
| 48 | PHE0000382 | 118 | LIB3279-180-C9_FLI - maize | rice actin | | PMON74401 |
| | | | cyclin III | | | |
| 49 | PHE0000053 | 119 | corn cycB4 | rice actin | | — |
| 50 | PHE0000054 | 120/4369 | corn cycD3.2 | rice actin | | PMON81815 |
| 51 | PHE0000055 | 121 | corn cycDx.1 | rice actin | | PMON68355 |
| 52 | PHE0000056 | 122 | corn cycD1.1 | rice actin | | PMON68364 |
| 53 | PHE0000057 | 124 | corn mt NDK - | rice actin | | PMON68350 |
| | | | LIB189022Q1E1E9 | | | |
| 54 | PHE0000058 | 125 | corn cp NDK - 700479629 | rice actin | | PMON68351 |
| 55 | PHE0000059 | 126 | corn NDK - | rice actin | | PMON68370 |
| | | | LIB3597020Q1K6C3 | | | |
| 56 | PHE0000060 | 127 | corn NDK - 700241377 | rice actin | | PMON68356 |
| 57 | PHE0000062 | 130 | sRAD54 - with NLS | rice actin | | — |
| 58 | PHE0000063 | 132 | T4 endonuclease VII (gp49) - | rice actin | | — |
| | | | with NLS | | | |
| 59 | PHE0000064 | 137 | corn NDPK - fC- | rice actin | | PMON67804 |
| | | | zmemLIB3957015Q1K6H6 | | | |
| 60 | PHE0000065 | 139/4405 | TOR1 | rice actin | | — |
| 61 | PHE0000292 | 142 | corn eIF-5A | rice actin | | PMON68888 |
| 62 | PHE0000067 | 143 | yeast eIF-5A | rice actin | | PMON67816 |
| 63 | PHE0000068 | 144 | yeast deoxyhypusine synthase | rice actin | | PMON67824 |
| 64 | PHE0000069 | 147 | yeast L5 | rice actin | | PMON67821 |
| 65 | PHE0000070 | 149 | yeast ornithine decarboxylase | rice actin | | PMON67825 |
| 66 | PHE0000071 | 151 | rice exportin 4-like | rice actin | | — |
| 67 | PHE0000072 | 152 | yeast S-adenosylmethionine | rice actin | | PMON67828 |
| | | | decarboxylase | | | |
| 68 | PHE0000073 | 153 | corn S-adenosylmethionine | rice actin | | PMON68357 |
| | | | decarboxylase 1 | | | |
| 69 | PHE0000074 | 154 | corn S-adenosylmethionine | rice actin | | PMON68352 |
| | | | decarboxylase 2 | | | |
| 70 | PHE0000075 | 155 | antisense retinoblastoma-related | rice actin | | — |
| | | | protein 1 | | | |
| 71 | PHE0000076 | 156 | C1 protein | rice actin | | PMON68851 |
| 72 | PHE0000077 | 157 | yeast flavohemoglobin - | rice actin | | PMON67827 |
| | | | mitochondrial | | | |
| 72 | PHE0000077 | 158 | yeast flavohemoglobin - | rice actin | chloroplast | PMON77890 |
| | | | mitochondrial | | | |
| 72 | PHE0000077 | 159 | yeast flavohemoglobin - | rice actin | | PMON75301 |
| | | | mitochondrial | | | |
| 73 | PHE0000009 | 164 | Arabidopsis G975 | rice actin | | PMON67803 |
| 74 | PHE0000079 | 169 | CUT1 | rice actin | | PMON67752 |
| 75 | PHE0000082 | 172 | corn cycB3 | rice actin | | — |
| 76 | PHE0000083 | 173 | PDR5 | rice actin | | PMON81229 |
| 77 | PHE0000084 | 174 | rice cyclin H | rice actin | | — |
| 78 | PHE0000085 | 175 | rice cdc2+/CDC28−related protein | rice actin | | PMON80475 |
| | | | kinase | | | |
| 79 | PHE0000086 | 176 | Cdk-activating kinase 1 | rice actin | | PMON67812 |
| 80 | PHE0000089 | 179/4360 | CHL1 | rice actin | | PMON80273 |
| 81 | PHE0000090 | 180/4387 | NTR1 | rice actin | | PMON80335 |
| 82 | PHE0000091 | 181 | Zm SET domain 2 | rice actin | | PMON68358 |
| 83 | PHE0000092 | 182 | Zm SET domain 1 | rice actin | | PMON68359 |
| 84 | PHE0000095 | 185 | HSF1 | rice actin | | PMON80915 |
| 85 | PHE0000096 | 186 | Zm HSP101 | rice actin | | — |
| 86 | PHE0000098 | 188 | E. coli clpB | rice actin | | PMON73168 |
| 87 | PHE0000099 | 189 | Synechocystis clpB | rice actin | | PMON80517 |
| 88 | PHE0000100 | 190 | Xylella clpB | rice actin | | PMON80917 |
| 89 | PHE0000101 | 191/4352 | corn cycD3.1 | rice actin | | PMON81811 |
| 90 | PHE0000102 | 192 | AnFPPS (farnesyl-pyrophosphate | rice actin | | PMON67815 |
| | | | synthetase) | | | |
| 91 | PHE0000103 | 193 | OsFPPS | rice actin | | PMON83631 |
| 92 | PHE0000104 | 194 | 700331819_FLI - corn FPPS 2 | rice actin | | PMON68608 |
| 93 | PHE0000105 | 195/4426 | corn cycD1.2 | rice actin | | PMON80329 |
| 94 | PHE0000107 | 197/4428 | corn cycD1.3 | rice actin | | PMON81259 |
| 95 | PHE0000108 | 198 | ASH1 | rice actin | | PMON67849 |
| 96 | PHE0000109 | 199 | rice ASH1-like1 | rice actin | | — |
| 97 | PHE0000110 | 200 | rice MtN2-like | rice actin | | PMON80473 |
| 98 | PHE0000111 | 201 | PAS domain kinase | rice actin | | — |
| 99 | PHE0000114 | 204 | Su(var) 3-9-like | rice actin | | PMON68361 |
| 100 | PHE0000115 | 205 | Receiver domain (RR3-like) 7 | rice actin | | PMON68362 |
| 101 | PHE0000116 | 206 | Receiver domain (ARR2-like) 1 | rice actin | | PMON68367 |
| 102 | PHE0000117 | 207 | Receiver domain (TOC1-like) 2 | rice actin | | PMON68368 |
| 103 | PHE0000118 | 208 | Receiver domain (TOC1-like) 3 | rice actin | | PMON67811 |
| 104 | PHE0000119 | 209 | Receiver domain (ARR2-like) 4 | rice actin | | PMON68363 |
| 105 | PHE0000120 | 210 | Receiver domain (RR11-like) 5 | rice actin | | PMON68853 |
| 106 | PHE0000121 | 211 | Receiver domain (RR3-like) 6 | rice actin | | PMON68854 |
| 107 | PHE0000122 | 212 | Receiver domain (RR3-like) 8 | rice actin | | PMON74402 |
| 108 | PHE0000123 | 213 | Receiver domain 9 | rice actin | | PMON68855 |
| 109 | PHE0000124 | 214 | ZmRR2 | rice actin | | PMON68856 |
| 110 | PHE0000125 | 215 | Receiver domain (TOC1-like) 10 | rice actin | | PMON68369 |
| 111 | PHE0000126 | 216 | corn HY5-like | rice actin | | PMON69458 |
| 112 | PHE0000127 | 217 | scarecrow 1 (PAT1-like) | rice actin | | PMON68887 |
| 113 | PHE0000128 | 218 | scarecrow 2 | rice actin | | — |
| 114 | PHE0000133 | 223 | G protein b subunit | rice actin | | PMON68860 |
| 115 | PHE0000152 | 242 | 14-3-3-like protein 2 | rice actin | | PMON77899 |
| 116 | PHE0000153 | 243 | 14-3-3-like protein D | rice actin | | PMON67817 |
| 117 | PHE0000154 | 244 | 14-3-3 protein 1 | rice actin | | PMON67818 |
| 118 | PHE0000155 | 245 | Rice FAP1-like protein | rice actin | | — |
| 119 | PHE0000156 | 246 | rice TAP42-like | rice actin | | — |
| 120 | PHE0000158 | 248 | BMH1 | rice actin | | PMON73169 |
| 121 | PHE0000159 | 250 | rice chloroplastic fructose-1,6- | rice actin | | PMON83640 |
| | | | bisphosphatase | | | |
| 122 | PHE0000160 | 251 | E. coli fructose-1,6- | rice actin | chloroplast | PMON75485 |
| | | | bisphosphatase | | | |
| 123 | PHE0000161 | 252 | Synechocystis fructose-1,6- | rice actin | chloroplast | PMON82231 |
| | | | bisphosphatase F-I | | | |
| 124 | PHE0000162 | 3383 | Synechocystis fructose-1,6- | Glutellin1 | | — |
| | | | bisphosphatase F-II | 3.1 kb | | |
| 124 | PHE0000162 | 253 | Synechocystis fructose-1,6- | rice actin | chloroplast | PMON75488 |
| | | | bisphosphatase F-II | | | |
| 125 | PHE0000164 | 255 | Yeast RPT5 | rice actin | | PMON73170 |
| 126 | PHE0000165 | 257 | Yeast RRP5 | rice actin | | PMON81210 |
| 127 | PHE0000166 | 258 | Rice CBP-like gene | rice actin | | — |
| 128 | PHE0000167 | 259 | rice BAB09754 | rice actin | | PMON80340 |
| 129 | PHE0000168 | 260 | LIB3061-001-H7_FLI | rice actin | | PMON68857 |
| 130 | PHE0000169 | 262 | maize p23 | rice actin | | — |
| 131 | PHE0000170 | 263 | maize cyclophilin | rice actin | | PMON81258 |
| 132 | PHE0000172 | 265 | yeast SIT1 | rice actin | | PMON81206 |
| 133 | PHE0000173 | 266 | yeast CNS1 | rice actin | | PMON73171 |
| 134 | PHE0000176 | 269 | RNAse S | rice actin | | PMON68388 |
| 135 | PHE0000177 | 270 | maize ecto-apyrase | rice actin | | PMON68881 |
| 136 | PHE0000178 | 271 | PHO5 | rice actin | | PMON73166 |
| 137 | PHE0000179 | 272 | high affinity phosphate | rice actin | | PMON69467 |
| | | | translocator | | | |
| 138 | PHE0000180 | 273 | high affinity phosphate | rice actin | | PMON83753 |
| | | | translocator | | | |
| 139 | PHE0000181 | 274 | Xylella citrate synthase | rice actin | | PMON76326 |
| 140 | PHE0000182 | 275 | E. coli citrate synthase | rice actin | | PMON74420 |
| 141 | PHE0000183 | 276 | rice citrate synthase | rice actin | | PMON80258 |
| 142 | PHE0000184 | 277/4429 | citrate synthase | rice actin | | PMON81278 |
| 143 | PHE0000185 | 278 | citrate synthase | rice actin | | PMON69468 |
| 144 | PHE0000186 | 279 | maize ferritin 2 | rice actin | | PMON69460 |
| 145 | PHE0000187 | 280 | maize ferritin 1 | rice actin | | PMON81261 |
| 146 | PHE0000188 | 281 | E. coli cytoplasmic ferritin | rice actin | | PMON73167 |
| 147 | PHE0000190 | 283 | corn LEA3 | rice actin | | — |
| 148 | PHE0000192 | 285 | soy HSF | rice actin | | PMON68394 |
| 149 | PHE0000193 | 286 | soy HSF | rice actin | | PMON68889 |
| 150 | PHE0000204 | 297 | deoxyhypusine synthase | rice actin | | — |
| 151 | PHE0000219 | 308 | thylakoid carbonic anhydrase, | rice actin | | PMON68865 |
| | | | cah3 | | | |
| 152 | PHE0000216 | 309 | thylakoid carbonic anhydrase, | rice actin | | PMON81823 |
| | | | ecaA | | | |
| 153 | PHE0000217 | 310 | Chlamydomonas reinhardtii | rice actin | | — |
| | | | envelope protein LIP-36G1 | | | |
| 154 | PHE0000218 | 311/4431 | psbO transit | rice actin | chloroplast | — |
| | | | peptide::Synechococcus sp. PCC | | lumen | |
| | | | 7942 ictB | | | |
| 155 | PHE0000220 | 313 | corn RNase PH | rice actin | | PMON74434 |
| 156 | PHE0000221 | 314 | SKI2 | rice actin | | — |
| 157 | PHE0000222 | 315 | SKI3 | rice actin | | PMON80320 |
| 158 | PHE0000223 | 316 | SKI4 | rice actin | | PMON69478 |
| 159 | PHE0000224 | 317 | SKI6 | rice actin | | PMON80278 |
| 160 | PHE0000225 | 318 | SKI7 | rice actin | | — |
| 161 | PHE0000226 | 319 | rice SKI7-like | rice actin | | — |
| 162 | PHE0000228 | 321 | Synechocystis cobA w cp transit | rice actin | chloroplast | — |
| | | | peptide | | | |
| 163 | PHE0000229 | 324 | Xylella tetrapyrrole methylase | rice actin | chloroplast | PMON77900 |
| | | | with transit peptide | | | |
| 164 | PHE0000230 | 325 | maize uroporphyrinogen III | rice actin | | — |
| | | | methyltransferase | | | |
| 165 | PHE0000231 | 326 | nucellin-like protein | rice actin | | PMON72498 |
| 166 | PHE0000232 | 327 | nucellin-like protein | rice actin | | PMON68895 |
| 167 | PHE0000233 | 328 | nucellin-like protein | rice actin | | PMON82671 |
| 168 | PHE0000234 | 329 | soy LEA protein | rice actin | | PMON73159 |
| 169 | PHE0000235 | 330 | dehydrin-like protein | rice actin | | PMON73161 |
| 170 | PHE0000237 | 332 | dehydrin 3 | rice actin | | PMON68891 |
| 171 | PHE0000238 | 333 | probable lipase | rice actin | | PMON69466 |
| 172 | PHE0000239 | 334 | yeast GRE1 | rice actin | | PMON72466 |
| 173 | PHE0000240 | 335 | yeast STF2 | rice actin | | PMON72468 |
| 174 | PHE0000241 | 336 | yeast SIP18 | rice actin | | — |
| 175 | PHE0000242 | 337 | yeast YBM6 | rice actin | | PMON72470 |
| 176 | PHE0000243 | 338 | yeast HSP12 | rice actin | | PMON72467 |
| 177 | PHE0000249 | 340 | corn allene oxide synthase | rice actin | | PMON74422 |
| 178 | PHE0000250 | 341 | corn COI1-like | rice actin | | PMON82194 |
| 179 | PHE0000251 | 342 | corn TIR1-like | rice actin | | — |
| 180 | PHE0000252 | 343 | corn COI1-like | rice actin | | PMON74407 |
| 181 | PHE0000253 | 344 | COI1-like | rice actin | | — |
| 182 | PHE0000254 | 345 | F-box protein | rice actin | | PMON73172 |
| 183 | PHE0000255 | 346 | F-box protein | rice actin | | PMON72459 |
| 184 | PHE0000256 | 347 | corn 1-aminocyclopropane-1- | rice actin | | PMON75302 |
| | | | carboxylate oxidase | | | |
| 185 | PHE0000257 | 348 | rice 1-aminocyclopropane-1 | rice actin | | PMON80260 |
| | | | carboxylate synthase | | | |
| 186 | PHE0000260 | 349 | S52650 - Synechocystis desB | rice actin | chloroplast | PMON75487 |
| 187 | PHE0000261 | 350 | yeast glutamate decarboxylase | rice actin | | PMON80276 |
| 188 | PHE0000262 | 352 | cytochrome P450-like protein | rice actin | | PMON68892 |
| 189 | PHE0000263 | 353 | cytochrome P450 | rice actin | | PMON74412 |
| 190 | PHE0000264 | 354 | cytochrome P450-like | rice actin | | PMON68866 |
| 191 | PHE0000265 | 355 | CYP90 protein | rice actin | | PMON69469 |
| 192 | PHE0000266 | 356 | cytochrome P450 DWARF3 | rice actin | | PMON69470 |
| 193 | PHE0000267 | 357 | cytochrome P450 | rice actin | | PMON68867 |
| 194 | PHE0000268 | 358 | rice receptor protein kinase | rice actin | | — |
| 195 | PHE0000269 | 359 | soy E2F-like | rice actin | | — |
| 196 | PHE0000270 | 360/4432 | nuclear matrix constituent protein | rice actin | | PMON80316 |
| 197 | PHE0000271 | 361/4433 | OsE2F1 | rice actin | | — |
| 198 | PHE0000272 | 362 | corn GCR1 | rice actin | | — |
| 199 | PHE0000273 | 363 | soy mlo-like | rice actin | | PMON74423 |
| 200 | PHE0000274 | 364 | soy mlo-like | rice actin | | — |
| 201 | PHE0000275 | 365 | rice G alpha 1 | rice actin | | PMON80259 |
| 202 | PHE0000276 | 366 | soy G-gamma subunit | rice actin | | PMON68868 |
| 203 | PHE0000277 | 368 | wheat G28-like | rice actin | | PMON68890 |
| 204 | PHE0000279 | 369 | sorghum proline permease | rice actin | | PMON68896 |
| 205 | PHE0000280 | 370 | rice AA transporter | rice actin | | PMON72451 |
| 206 | PHE0000282 | 372 | SET-domain protein-like | rice actin | | — |
| 207 | PHE0000283 | 373 | scarecrow 6 | rice actin | | PMON69472 |
| 208 | PHE0000284 | 374 | menage a trois-like | rice actin | | PMON72453 |
| 209 | PHE0000286 | 376 | oryzacystatin | rice actin | | PMON72454 |
| 210 | PHE0000287 | 377 | Similar to cysteine proteinase | rice actin | | PMON68898 |
| | | | inhibitor | | | |
| 211 | PHE0000288 | 378 | cysteine proteinase inhibitor | rice actin | | — |
| 212 | PHE0000289 | 379 | Zm-GRF1 (GA responsive factor) | rice actin | | — |
| 213 | PHE0000290 | 380 | ZmSE001-like | rice actin | | — |
| 214 | PHE0000291 | 381 | deoxyhypusine synthase | rice actin | | PMON72455 |
| 215 | PHE0000293 | 382/4368 | gibberellin response modulator | rice actin | | PMON75972 |
| 216 | PHE0000294 | 383 | scarecrow-like protein | rice actin | | PMON68897 |
| 217 | PHE0000295 | 384 | ubiquitin-conjugating enzyme- | rice actin | | PMON68894 |
| | | | like protein | | | |
| 218 | PHE0000296 | 385 | unknown protein recognized by | rice actin | | PMON68893 |
| | | | PF01169 | | | |
| 219 | PHE0000297 | 386 | 26S protease regulatory subunit | rice actin | | PMON68899 |
| | | | 6A homolog | | | |
| 220 | PHE0000298 | 387 | rice p23 co-chaperone | rice actin | | PMON68874 |
| 221 | PHE0000299 | 388 | corn p23 co-chaperone | rice actin | | PMON68875 |
| 222 | PHE0000300 | 389 | rice p23 co-chaperone | rice actin | | PMON68876 |
| 223 | PHE0000301 | 390 | corn p23 co-chaperone | rice actin | | PMON68877 |
| 224 | PHE0000302 | 391 | putative purple acid phosphatase | rice actin | | PMON68878 |
| | | | precursor | | | |
| 225 | PHE0000303 | 392 | acid phosphatase type 5 | rice actin | | PMON68879 |
| 226 | PHE0000304 | 393 | aleurone ribonuclease | rice actin | | PMON68873 |
| 227 | PHE0000305 | 394 | putative ribonuclease | rice actin | | PMON68880 |
| 228 | PHE0000306 | 395 | S-like RNase | rice actin | | PMON68882 |
| 229 | PHE0000307 | 396 | ribonuclease | rice actin | | PMON68883 |
| 230 | PHE0000308 | 397 | helix-loop-helix protein (PIF3- | rice actin | | PMON68884 |
| | | | like) | | | |
| 231 | PHE0000309 | 398 | SKI4-like protein | rice actin | | PMON68885 |
| 232 | PHE0000310 | 399 | putative 3 exoribonuclease | rice actin | | PMON68377 |
| 233 | PHE0000311 | 400 | GF14-c protein | rice actin | | PMON72458 |
| 234 | PHE0000312 | 401 | 14-3-3-like protein | rice actin | | PMON72456 |
| 235 | PHE0000313 | 402 | rice eIF-(iso)4F | rice actin | | PMON68378 |
| 236 | PHE0000314 | 403 | rice eIF-4F | rice actin | | PMON68379 |
| 237 | PHE0000315 | 404 | sorghum eIF-(iso)4F | rice actin | | PMON68381 |
| 238 | PHE0000316 | 405 | sorghum eIF-4F | rice actin | | PMON68382 |
| 239 | PHE0000317 | 406 | rice FIP37-like | rice actin | | PMON68380 |
| 240 | PHE0000318 | 407 | scarecrow 17 | rice actin | | PMON81878 |
| 241 | PHE0000322 | 411 | maize catalase-1 | rice actin | | PMON74403 |
| 242 | PHE0000323 | 412 | maize catalase-3 | rice actin | | PMON68400 |
| 243 | PHE0000324 | 413 | ascorbate peroxidase | rice actin | | PMON73162 |
| 244 | PHE0000325 | 414 | corn GDI | rice actin | | PMON68384 |
| 245 | PHE0000326 | 415 | soy GDI | rice actin | | PMON72463 |
| 246 | PHE0000327 | 416 | corn rho GDI | rice actin | | PMON69481 |
| 247 | PHE0000328 | 417 | basic blue copper protein | rice actin | | PMON74416 |
| 248 | PHE0000329 | 418 | plantacyanin | rice actin | | PMON80945 |
| 249 | PHE0000330 | 419 | basic blue copper protein | rice actin | | PMON73164 |
| 250 | PHE0000331 | 420 | Similar to blue copper protein | rice actin | | — |
| | | | precursor | | | |
| 251 | PHE0000332 | 421 | lamin | rice actin | | PMON68385 |
| 252 | PHE0000333 | 422 | fC-zmfl700551169a-allyl alcohol | rice actin | | PMON75470 |
| | | | dehydrogenase | | | |
| 253 | PHE0000334 | 423 | allyl alcohol dehydrogenase | rice actin | | PMON68395 |
| 254 | PHE0000335 | 424 | allyl alcohol dehydrogenase | rice actin | | PMON74413 |
| 255 | PHE0000336 | 425 | qui oxidoreductase | rice actin | | PMON74414 |
| 256 | PHE0000337 | 426 | E. nidulans cysA - AF029885 | rice actin | | — |
| 257 | PHE0000338 | 427 | BAA18167 - Synechocystis cysE | rice actin | | PMON68628 |
| 258 | PHE0000339 | 428 | Synechocystis thiol-specific | rice actin | | PMON68627 |
| | | | antioxidant protein - BAA10136 | | | |
| 258 | PHE0000339 | 429 | Synechocystis thiol-specific | rice actin | chloroplast | PMON75490 |
| | | | antioxidant protein - BAA10136 | | | |
| 259 | PHE0000340 | 430 | yeast TSA2 - NP_010741 | rice actin | | PMON68629 |
| 260 | PHE0000341 | 431 | yeast mTPx - Z35825 | rice actin | | PMON68397 |
| 261 | PHE0000343 | 433 | yeast TPx III - NP_013210 | rice actin | | PMON80506 |
| 262 | PHE0000345 | 435 | soy putative 2-cys peroxiredoxin | rice actin | | PMON74411 |
| 263 | PHE0000346 | 436 | soy peroxiredoxin | rice actin | | PMON73165 |
| 264 | PHE0000347 | 437 | heat shock protein 26, plastid- | rice actin | | PMON68386 |
| | | | localized | | | |
| 265 | PHE0000349 | 439 | heat shock protein | rice actin | | PMON68389 |
| 266 | PHE0000350 | 440 | low molecular weight heat shock | rice actin | | PMON74410 |
| | | | protein | | | |
| 267 | PHE0000351 | 441 | 18 kDa heat shock protein | rice actin | | — |
| 268 | PHE0000352 | 442 | heat shock protein 16.9 | rice actin | | PMON74409 |
| 269 | PHE0000353 | 443 | HSP21-like protein | rice actin | | PMON73160 |
| 270 | PHE0000354 | 444 | Opt1p - NP_012323 | rice actin | | PMON81879 |
| 271 | PHE0000355 | 445 | SVCT2-like permease | rice actin | | PMON83797 |
| 272 | PHE0000356 | 446 | SVCT2-like permease | rice actin | | PMON72464 |
| 273 | PHE0000357 | 447 | maize tubby-like | rice actin | | PMON69474 |
| 274 | PHE0000358 | 449 | maize tubby-like | rice actin | | PMON69475 |
| 275 | PHE0000359 | 450 | soy HMG CoA synthase | rice actin | | PMON69476 |
| 276 | PHE0000360 | 451 | yeast HMGS - X96617 | rice actin | | PMON81886 |
| 277 | PHE0000361 | 452 | PAT1-like scarecrow 9 | rice actin | | PMON78900 |
| 278 | PHE0000362 | 453 | CDC28-related protein kinase | rice actin | | PMON81840 |
| 279 | PHE0000385 | 474 | H+ transporting ATPase | rice actin | | PMON75498 |
| 280 | PHE0000386 | 475 | cation-transporting ATPase | rice actin | | PMON67834 |
| 281 | PHE0000387 | 476 | yeast DRS2 (ALA1-like) - | rice actin | | — |
| | | | L01795 | | | |
| 282 | PHE0000388 | 477 | S. pombe ALA1-like-CAA21897 | rice actin | | — |
| 283 | PHE0000389 | 478 | rice ALA1-like 1 - BAA89544 | rice actin | | PMON80290 |
| 284 | PHE0000390 | 479/4340 | rice chloroplastic sedoheptulose- | rice actin | | PMON67836 |
| | | | 1,7-bisphosphatase- | | | |
| 285 | PHE0000391 | 480/4434 | rice cytosolic fructose-1,6- | rice actin | | PMON67835 |
| | | | bisphosphatase | | | |
| 286 | PHE0000392 | 481 | Wheat sedoheptulose-1,7- | rice actin | | PMON76335 |
| | | | bisphosphatase | | | |
| 287 | PHE0000394 | 483 | sedoheptulose-1,7-bisphosphatase | rice actin | | — |
| 288 | PHE0000395 | 484 | soy phantastica (rough sheath 2- | rice actin | | PMON67840 |
| | | | like) | | | |
| 289 | PHE0000396 | 485 | soy phantastica 2 (rough sheath 2- | rice actin | | PMON67838 |
| | | | like) | | | |
| 290 | PHE0000397 | 486 | maize rough sheath 1 | rice actin | | PMON67839 |
| 291 | PHE0000398 | 487 | soy lg3-like 1 | rice actin | | PMON72488 |
| 292 | PHE0000399 | 488 | soy rough sheath1-like 1 | rice actin | | PMON72485 |
| 293 | PHE0000400 | 489 | soy G559-like | rice actin | | PMON72486 |
| 294 | PHE0000401 | 490 | soy G1635-like 1 | rice actin | | PMON67837 |
| 295 | PHE0000402 | 491 | rice amino acid transporter-like | rice actin | | PMON67833 |
| | | | protein | | | |
| 296 | PHE0000403 | 492/4341 | corn amino acid permease | rice actin | | PMON67831 |
| 297 | PHE0000404 | 493 | rice proline transport protein | rice actin | | PMON67832 |
| 298 | PHE0000412 | 501 | corn monosaccharide transporter 1 | rice actin | | PMON67843 |
| 299 | PHE0000413 | 502 | soy monosaccharide transporter 3 | rice actin | | PMON67844 |
| 300 | PHE0000414 | 503 | corn monosaccharide transporter 3 | rice actin | | PMON67845 |
| 301 | PHE0000415 | 504 | soy monosaccharide transporter 1 | rice actin | | PMON67846 |
| 302 | PHE0000416 | 505 | corn monosaccharide transporter 6 | rice actin | | PMON67847 |
| 303 | PHE0000418 | 507 | corn monosaccharide transporter 4 | rice actin | | PMON69497 |
| 304 | PHE0000419 | 508 | soy monosaccharide transporter 2 | rice actin | | PMON67848 |
| 305 | PHE0000420 | 509 | soy sucrose transporter | rice actin | | PMON74415 |
| 306 | PHE0000421 | 510 | corn sucrose transporter 2 | rice actin | | PMON83760 |
| 307 | PHE0000422 | 511 | corn monosaccharide transporter 8 | rice actin | | PMON79433 |
| 308 | PHE0000423 | 512 | corn monosaccharide transporter 7 | rice actin | | PMON72497 |
| 309 | PHE0000425 | 514 | soy isoflavone synthase | rice actin | | PMON72495 |
| 310 | PHE0000426 | 515 | soy ttg1-like 2 | rice actin | | PMON74408 |
| 311 | PHE0000427 | 516 | GATE5 - corn SPA1-like 1 | rice actin | | — |
| 312 | PHE0000428 | 517 | corn PIF3-like | rice actin | | PMON74417 |
| 313 | PHE0000429 | 518 | soy Athb-2-like 1 | rice actin | | PMON74418 |
| 314 | PHE0000430 | 519 | corn SUB1-like 1 | rice actin | | — |
| 315 | PHE0000431 | 520/4435 | soy GH3 protein | rice actin | | PMON81262 |
| 316 | PHE0000432 | 521 | corn 12-oxophytodienoate | rice actin | | PMON79441 |
| | | | reductase 1 | | | |
| 317 | PHE0000433 | 522 | corn 12-oxo-phytodienoate | rice actin | | PMON74424 |
| | | | reductase-like 3 | | | |
| 318 | PHE0000434 | 523 | corn 12-oxophytodienoate | rice actin | | PMON74419 |
| | | | reductase-like 4 | | | |
| 319 | PHE0000435 | 524 | corn hydroperoxide lyase | rice actin | | PMON75499 |
| 320 | PHE0000436 | 525 | rice cns1-like | rice actin | | PMON79442 |
| 321 | PHE0000437 | 526 | corn HCH1-like 1 | rice actin | | PMON68630 |
| 322 | PHE0000438 | 527 | corn HOP-like 1 | rice actin | | PMON74433 |
| 323 | PHE0000439 | 528 | corn HOP-like 2 | rice actin | | PMON74425 |
| 324 | PHE0000440 | 529 | rice CHIP-like 1 | rice actin | | PMON72473 |
| 325 | PHE0000441 | 530 | corn CHIP-like 2 | rice actin | | PMON72474 |
| 326 | PHE0000451 | 540 | wheat SVP-like 1 | rice actin | | PMON72475 |
| 327 | PHE0000452 | 541 | corn SVP-like 3 | rice actin | | PMON72476 |
| 328 | PHE0000453 | 542 | corn SVP-like 5 | rice actin | | — |
| 329 | PHE0000454 | 543 | fC-zmhuLIB3062-044-Q1-K1-B8 | rice actin | | PMON72477 |
| 330 | PHE0000455 | 544 | corn E4/E8 binding protein-like | rice actin | | — |
| 331 | PHE0000469 | 558 | yeast YKL091c - Z28091 | rice actin | | PMON68636 |
| 332 | PHE0000470 | 559 | corn Ssh1-like protein 1 | rice actin | | PMON79435 |
| 333 | PHE0000471 | 560 | corn Ssh1-like protein 3 | rice actin | | PMON73772 |
| 334 | PHE0000472 | 561 | corn Ssh1-like protein 4 | rice actin | | PMON79436 |
| 335 | PHE0000473 | 562 | soy Ssh1-like protein 2 [ssh2] | rice actin | | PMON75471 |
| 336 | PHE0000484 | 573 | soy JMT-like protien 1 | rice actin | | PMON81287 |
| 337 | PHE0000485 | 574 | corn JMT-like protein 1 | rice actin | | PMON69498 |
| 338 | PHE0000486 | 575 | corn JMT-like protein 2 | rice actin | | PMON69496 |
| 339 | PHE0000017 | 27 | corn AAA-ATPase 1 | rice actin | | PMON68850 |
| 339 | PHE0000017 | 686 | corn AAA-ATPase 1 | rice actin | | PMON72479 |

### Example 2

### Constructs for Soybean Transformation

[0080] Constructs for use in transformation of soybean may be prepared by restriction enzyme based cloning into a common expression vector. Elements of an exemplary common expression vector are shown in Table 7 below.

TABLE 7
Elements of pMON74532

| Function | Element | Reference |
|---|---|---|
| Agro transformation | B-ARGtu.right border | Depicker, A. et al (1982) |
| | | Mol Appl Genet 1: 561-573 |
| Antibiotic resistance | CR-Ec.aadA-SPC/STR | |
| Repressor of primers from the ColE1 | CR-Ec.rop | |
| plasmid | | |
| Origin of replication | OR-Ec.oriV-RK2 | |
| Agro transformation | B-ARGtu.left border | Barker, R. F. et al (1983) |
| | | Plant Mol Biol 2: 335-350 |
| Plant selectable marker expression | Promoter with intron and | McDowell et al. (1996) |
| cassette | 5′UTR of arabidopsis act 7 | Plant Physiol. 111: 699-711. |
| | gene (AtAct7) | |
| | 5′ UTR of arabidopsis act 7 | |
| | gene | |
| | Intron in 5′UTR of AtAct7 | |
| | Transit peptide region of | Klee, H. J. et al (1987) |
| | Arabidopsis EPSPS | MGG 210: 437-442 |
| | Synthetic CP4 coding region | U.S. Pat. No. 6,248,876 |
| | with dicot preferred codon | |
| | usage | |
| | A 3′ UTR of the nopaline | U.S. Pat. No. 5,858,742 |
| | synthase gene of | |
| | Agrobacterium tumefaciens | |
| | Ti plasmid | |
| Plant gene of interest expression | Promoter for 35S RNA from | U.S. Pat. No. 5,322,938 |
| cassette | CaMV containing a | |
| | duplication of the −90 to −350 | |
| | region (e35S) | |
| | Gene of interest insertion site | |
| | Cotton E6 3′ end | GenBank accession |
| | | U30508 |

[0081] Vectors similar to that described above may be constructed for use in Agrobacterium mediated soybean transformation systems where the enhanced 35S promoter in the plant expression cassette portion is replaced with other desirable promoters including, but not limited to a napin promoter and an Arabidopsis SSU promoter. Protein coding segments are amplified by PCR prior to insertion into vectors such as described above. Primers for PCR amplification can be designed at or near the start and stop codons of the coding sequence, in order to eliminate most of the 5′ and 3′ untranslated regions.

[0082] Exemplary sense constructs for transformation of soybean to produce plants having enhanced phenotypes are provided in Table 8 below. Column headings in Table 8 refer to the following information:

[0083] “SEQ ID NO” refers to a particular nucleic acid sequence in the Sequence Listing which defines a polynucleotide used in a recombinant polynucleotide of this invention.

[0084] “PHE ID” refers to an arbitrary number used to identify a particular recombinant polynucleotide corresponding to the translated protein encoded by the polynucleotide.

[0085] “NOM ID” refers to a particular construct comprising a polynucleotide of this invention.

[0086] “GENE NAME” refers to a common name for the recombinant polynucleotide.

[0087] “PROMOTER” provides the name of the promoter region driving expression of the polynucleotide

[0088] “pMON” refers to an arbitrary number used to designate a particular recombinant DNA construct. Constructs are prophetic where no pMON is provided.

[0089] “Gene effect contributing to increased yield” describes the effect of the recombinant polynucleotide on the plant in providing yield improvement.

TABLE 8
Soybean Transformation Constructs

| SEQ | | | | | | |
|---|---|---|---|---|---|---|
| ID | | Nom | | | | Gene effect contributing |
| NO | Phe ID | ID | Gene Name | Promoter | pMON | to increased yield |
| 8 | PHE0000012 | 4249 | corn aquaporin RS81 | e35S | pMON 83080 | Increased root mass |
| 34 | PHE0000040 | 3968 | corn hemoglobin 1 | e35S | pMON 83103 | Cold tolerance |
| 53 | PHE0000057 | 3962 | corn mt NDK - | e35S | pMON 83055 | Abiotic stress tolerance |
| | | | LIB189022Q1E1E9 | | | |
| 62 | PHE0000067 | 4248 | yeast eIF-5A | e35S | pMON83076 | Nitrogen use efficiency |
| 123 | PHE0000161 | 3578 | Synechocystis fructose- | e35S | pMON 81321 | Increased sucrose |
| | | | 1,6-bisphosphatase F-I | | | production/transport |
| 204 | PHE0000279 | 4246 | sorghum proline permease | e35S | pMON 83093 | Nitrogen use efficiency |
| 234 | PHE0000312 | 4247 | 14-3-3-like protein | e35S | pMON83075 | Nitrogen use efficiency |
| 236 | PHE0000314 | 4245 | rice eIF-4F | e35S | pMON83074 | Nitrogen use efficiency |
| 253 | PHE0000334 | 4268 | allyl alcohol | e35S | pMON 84409 | Heat tolerance |
| | | | dehydrogenase | | | |

### Example 3

### Plant Transformation

Maize Transformation

[0090] LH59 plants are grown in the greenhouse and ears and ears harvested when the embryos are 1.5 to 2.0 mm in length. Ears were surface sterilized by spraying or soaking the ears in 80% ethanol, followed by air drying. Immature embryos were isolated from individual kernels on surface sterilized ears. Prior to inoculation of maize cells, Agrobacterium cells are grown overnight at room temperature. Immature maize embryos are inoculated with Agrobacterium shortly after excision, and incubated at room temperature with Agrobacterium for 5-20 minutes. Immature embryos are then co-cultured with Agrobacterium for 1 to 3 days at 23° C. in the dark. Co-cultured embryos are transferred to selection media and cultured for approximately two weeks to allow embryogenic callus to develop. Embryogenic callus is transferred to culture medium containing 100 mg/L paromomycin and subcultured at about two week intervals. Transformants are recovered 6 to 8 weeks after initiation of selection.

[0091] For Agrobacterium mediated transformation of maize callus, immature embryos are cultured for approximately 8-21 days after excision to allow callus to develop. Callus is then incubated for about 30 minutes at room temperature with the Agrobacterium suspension, followed by removal of the liquid by aspiration. The callus and Agrobacterium are co-cultured without selection for 3-6 days followed by selection on paromomycin for approximately 6 weeks, with biweekly transfers to fresh media, and paromomycin resistant callus identified.

[0092] For transformation by microprojectile bombardment, immature maize embryos are isolated and cultured 3-4 days prior to bombardment. Prior to microprojectile bombardment, a suspension of gold particles is prepared onto which the desired DNA is precipitated. DNA is introduced into maize cells as described in U.S. Pat. No. 5,015,580 using the electric discharge particle acceleration gene delivery device. For microprojectile bombardment of LH59 pre-cultured immature embryos, 35% to 45% of maximum voltage is preferably used. Following microprojectile bombardment, tissue is cultured in the dark at 27° C.

[0093] Fertile transgenic plants are produced from transformed maize cells by transfer of. transformed callus to appropriate regeneration media to initiate shoot development. Plantlets are transferred to soil when they are about 3 inches tall and have roots (about four to 6 weeks after transfer to medium). Plants are maintained for two weeks in a growth chamber at 26° C., followed by two weeks on a mist bench in a greenhouse before transplanting to 5 gallon pots for greenhouse growth. Plants are grown in the greenhouse to maturity and reciprocal pollinations made with the inbred LH59. Seed is collected from plants and used for further breeding activities.

[0094] Transformation methods and materials for making transgenic plants of this invention, e.g. various media and recipient target cells, transformation of immature embryos and subsequent regeneration of fertile transgenic plants are disclosed in U.S. Pat. Nos. 6,194,636 and 6,232,526 and U.S. patent application Ser. No. 09/757,089, which are incorporated herein by reference.

Soybean Transformation

[0095] For Agrobacterium mediated transformation, soybean seeds are germinated overnight and the meristem explants excised. The meristems and the explants are placed in a wounding vessel. Soybean explants and induced Agrobacterium cells from a strain containing plasmid DNA with the gene of interest cassette and a plant selectable marker cassette are mixed no later than 14 hours from the time of initiation of seed germination and wounded using sonication. Following wounding, explants are placed in co-culture for 2-5 days at which point they are transferred to selection media for 6-8 weeks to allow selection and growth of transgenic shoots. Phenotype positive shoots are harvested approximately 6-8 weeks post bombardment and placed into selective rooting media for 2-3 weeks. Shoots producing roots are transferred to the greenhouse and potted in soil. Shoots that remain healthy on selection, but do not produce roots are transferred to non-selective rooting media for an additional two weeks. Roots from any shoots that produce roots off selection are tested for expression of the plant selectable marker before they are transferred to the greenhouse and potted in soil.

[0096] Descriptions of media useful for transformation and regeneration of soybean and a method employing microprojectile bombardment are described in U.S. Pat. No. 5,914,451, which is incorporated herein by reference.

### Example 4

### Identification of Homologs

[0097] A BLAST searchable “All Protein Database” was constructed of known protein sequences using a proprietary sequence database and the National Center for Biotechnology Information (NCBI) non-redundant amino acid database (nr.aa). For each organism from which a polynucleotide sequence provided herein was obtained, an “Organism Protein Database” was constructed of known protein sequences of the organism; it is a subset of the All Protein Database based on the NCBI taxonomy ID for the organism. Nucleotide sequences of genes provided herein are identified by SEQ ID NO in Table 1. SEQ ID NOs of amino acid sequences and organism name for polypeptides encoded by the polynucleotides provided herein are shown in Table 2.

[0098] The All Protein Database was queried using polypeptide sequences provided herein as SEQ ID NO: 340 through SEQ ID NO:678 using “blastp” with E-value cutoff of 1e-8. Up to 1000 top hits were kept, and separated by organism names. For each organism other than that of the query sequence, a list was kept for hits from the query organism itself with a more significant E-value than the best hit of the organism. The list contains likely duplicated genes of the polynucleotides provided herein, and is referred to as the Core List. Another list was kept for all the hits from each organism, sorted by E-value, and referred to as the Hit List.

[0099] The Organism Protein Database was queried using polypeptide sequences provided herein as SEQ ID NO: 340 through SEQ ID NO:678 using “blastp” with E-value cutoff of 1e-4. Up to 1000 top hits were kept. A BLAST searchable database was constructed based on these hits, and is referred to as “SubDB”. SubDB was queried with each sequence in the Hit List using “blastp” with E-value cutoff of 1e-8. The hit with the best E-value was compared with the Core List from the corresponding organism. The hit is deemed a likely ortholog if it belongs to the Core List, otherwise it is deemed not a likely oththolog and there is no further search of sequences in the Hit List for the same organism. Likely orthologs from a large number of distinct organisms were identified and are reported by amino acid sequences of SEQ ID NO:679 to SEQ ID NO: 24149. These orthologs are reported in Table 2 as homologs to the 339 polypeptides provided herein. Table 3 provides the SEQ ID NO and the name of the organism in which it was identified for each homolog gene.

[0100] All publications and patent applications cited herein are incorporated by reference in their entirely to the same extent as if each individual publication or patent application was specifically and individually indicated to be incorporated by reference.

[0101] Although the foregoing invention has been described in some detail by way of illustration and example for purposes of clarity of understanding, it will be obvious that certain changes and modifications may be practiced within the scope of the appended claims.

1. Transgenic plant seed, wherein the genome of said seed comprises a recombinant polynucleotide encoding a polypeptide selected from the group consisting of S-adenosylmethionine decarboxylase and deoxyhypusine synthase, and wherein plants grown from said seed exhibit enhanced yield.

2-4. (canceled)

5. Transgenic plant seed of claim 1, wherein said polypeptide has an amino acid sequence that is at least 70% identical to an amino acid sequence selected from the group consisting of SEQ ID NO:456, 457, 458 459, 460 and 452, wherein identity is determined by calculating the percentage of identical and conservatively substituted amino acids in the homolog over the length of the SEQ ID.

6. Transgenic plant seed of claim 1, wherein said homolog has an amino acid sequence selected from the group consisting of SEQ ID NO:679 through SEQ ID NO:24149.

7. Transgenic plant seed of claim 1, wherein said polypeptide has an amino acid sequence selected from the group consisting of SEQ ID NO: 456, 457, 458 459, 460 and 452.

8. Transgenic plant seed of claim 1, wherein said seed is from a maize plant or a soybean plant.

9. A method of producing a plant having an enhanced phenotype, wherein said method comprises transforming plant cells with a recombinant polynucleotide comprising a promoter functional in a plant cell operably joined to encoding sequence for a polypeptide selected from the group consisting of S-adenosylmethionine decarboxylase and deoxyhypusine synthase, regenerating plants from said cells, and screening said plants to identify a plant having an enhanced phenotype.

10. A method of claim 9, wherein said enhanced phenotype is increased yield.

11-12. (canceled)

13. A method of claim 9, wherein said homolog has an amino acid sequence that is at least 70% identical to an amino acid sequence selected from the group consisting of SEQ ID NO: 456, 457, 458 459, 460 and 452.

14. A method of claim 9, wherein said homolog has an amino acid sequence selected from the group consisting of SEQ ID NO:679 through SEQ ID NO:24149.

15. A method of claim 9, wherein said polypeptide has an amino acid sequence selected from the group consisting of SEQ ID NO: 456, 457, 458 459, 460 and 452.

16. A method of claim 9, wherein said plant is a maize plant or a soybean plant.

17. A recombinant polynucleotide comprising a promoter functional in a plant cell operably joined to encoding sequence for a polypeptide having an amino acid selected from the group consisting of SEQ ID NO: 456, 457, 458 459, 460 and 452 and homologs thereof.

18. A recombinant polynucleotide of claim 17, wherein said homolog has an amino acid sequence that is at least 70% identical to an amino acid sequence selected from the group consisting of SEQ ID NO: 456, 457, 458 459, 460 and 452.

19. A recombinant polynucleotide of claim 17, wherein said homolog has an amino acid sequence selected from the group consisting of SEQ ID NO:679 through SEQ ID NO:24149.

20. A recombinant polynucleotide of claim 17, wherein said polypeptide has an amino acid sequence selected from the group consisting of SEQ ID NO: 456, 457, 458 459, 460 and 452.

21. A recombinant polynucleotide of claim 17, wherein said promoter is selected from the group consisting of a rice actin promoter, a glutelin 1 promoter and a PPDK promoter.

The application's sequence listing, which the Patent Office published only in electronic form, follows.

SEQUENCE LISTING (24149 sequences)

SEQ ID NO: 1 - DNA, 3317 bp, Zea mays
ccacgcgtccgcccacgcgtccgcccacgcgtccgcccattctctcacacccaacacccagctatcacaccctgatccccgaggccgcgcgtcggggtgaggaggaggggccatgatggagtcggcggcggcccagtcctgcgcggcgtgcggggacgacgcgcgcgctgcctgccgcgcgtgcagctacgcgctctgcagggcgtgcctcgacgaggacgccgccgagggccgcaccacatgcgcgcgctgcggaggggactacgccgctatcaacccagcgcgcgccagcgagggaaccgaggcggaggaggaggtggtggagaaccaccacaccgccggtggcctgcgtgagagggtcaccatgggcagccacctcaatgatcgccaggatgaagtaagccacgccaggaccatgagcagcttgtcgggaattggtagtgaattgaatgatgaatctggtaagcccatctggaagaacagggtggagagttggaaggaaaagaagaatgagaagaaagcctcggccaaaaagactgcagctaaagcacagcctccgcctgtcgaagaacagatcatggatgaaaaagacttgacagatgcatatgagccactctcccgggtcatcccaatatcaaagaacaagctcacaccttacagagcagtgatcattatgcggttaattgttcttgggctcttctttcactaccgtatcaccaatcctgttaacagtgcctttggtctctggatgacatcagttatatgtgagatctggtttggtttctcctggatattggatcaattcccgaagtggtatcctatcaatcgtgagacttatgttgataggctgattgcacgatatggagatggtgaagaatctgggttagcacctgtagatttctttgtcagtacagtggatccattgaaagagcctccactaatcactgcaaacactgtgctgtctattcttgctgtggactatcccgttgagaagatctcatgctatgtatctgatgatggttctgctatgctcacatttgaatcgctcgcagagactgcagaatatgctagaaagtgggtgccgttttgcaagaagtacgccattgagccacgagctcctgagttctacttctcacagaaaattgactacttgaaggacaagatacacccatcttttgtcaaggagcgtagggctatgaagagagactatgaagagtacaaggtgaggataaatgctttggttgccaaggctcaaaagacacctgatgaaggctggatcatgcaagacggtacaccatggcctgggaacaatcctcgtgaccaccctggcatgatccaggttttcctgggtgagactggtgcacgggactttgatggaaatgaacttcctcggttagtgtatgtgtcaagagagaaaagaccaggctaccaacaccacaagaaggcaggggctatgaatgctctggtccgagtgtctgctgttctgacaaatgccccttacattcttaatcttgattgtgatcactatgttaacaacagcaaagctgttcgtgaagcaatgtgcttcatgatggaccctactgttggcagagatgtctgctatgtacaattcccccagaggttcgatggcattgatcgcagtgatcgatatgccaataggaacgttgtgttctttgatgttaatatgaaaggacttgatggcctccaaggcccagtttatgtgggaactggttgttgtttcaataggcaagcactttatggttatgggcctccatctctgcccgcacttccaaagtcttcgatttgttcctggtgttgctgctgctgtcccaagaaaaaggttgaaagaagtgagagggaaatcaacagagactctcggcgagaagacctcgagtctgccatttttaaccttcgcgaaattgacaactacgatgagtacgagaggtccatgctcatctctcagatgagcttcgagaagtcttttgggctgtcctcggtctttattgaatcgacccttatggagaatgggggcgtccctgaatctgcaaacccatctaccctaattaaagaagccattcatgtcattagctgtggatatgaagagaaaactgaatggggaaaagagattggctggatctatggttcagttacagaggatattctgactgggtttaagatgcactgccgtggctggagatccatctactgcatgccggtgagacctgcattcaagggatcagccccaatcaatctttccgatcgtcttcaccaagttctccggtgggctcttggttctgtcgagatcttcttcagtcggcactgcccgctgtggtacggttacggtggcggccgtctgaaatggctccagaggctctcctacatcaacaccatcgtgtacccgttcacttctcttcctctcgttgcctactgttgcctgcctgccatttgcctgctcacaggaaagttcattatacctacgctgtccaacgctgcaacgatatggtttcttggcctcttcatgtccatcatcgtgacgagcgtgttggagctgcggtggagtggcatcgggatcgaggactggtggcgcaacgagcagttctgggtcatcggaggcgtgtccgcgcacctgttcgccgtgttccagggtatcctcaagatgattgccgggctggacaccaacttcacggtcacggcaaaggccacggacgacactgagttcggggagctgtacctgttcaagtggacgacggtgctgatcccgcccacaagcatcctggtgctgaacctggtgggcgtggtggctgggttctcggccgcgctcaacagcggctacgagtcctggggcccgctcttcggtaaggtgttcttcgccatgtgggtgatcatgcacctgtacccgttcctcaagggtctcatgggccgccagaaccgcacgccgaccatcgtggtgctctggtccgtcctcctcgcctccgtcttctccctcctgtgggtcaagatcgacccattcgttggaggaaccgagaccgtcaacaccaacaactgcaacacgatcatctgctgattcaccatcggtcagctgctgtcgtgccgcggcggacgtgtttctggtgttgcaaacgtgggttgcctgcctgatgcgggtctcctctgtctatctcgcatctgggcttttgccccaggatctgaagcgggtggtgtaggttagctttattttgcgtccaagtgttgattgatgttgtctgtgttatgaaaagttttggtggtgaaacctgaaatgttaaaattcggctcaaaaaaaaaaaaaaaaaaaaaag

SEQ ID NO: 2 - DNA, 1246 bp, Arabidopsis thaliana
gtgtttcttctttctgctaaaaggttataatttttgtttcttggtttggtgagaatcttcaagaaactgaaacaaagaaaatggattctagttgcatagacgagataagttcctccacttcagaatctttctccgccaccaccgccaagaagctctctcctcctcccgcggcggcgttacgcctctaccggatgggaagcggcgggagcagcgtcgtgttggatcccgagaacggcctagagacggagtcacgaaagctaccatcttcaaaatacaaaggtgttgttcctcagcctaacggaagatggggagctcagatctacgagaagcaccaacgagtatggctcgggactttcaacgagcaagaagaagctgctcgttcctacgacatcgcagcttgtagattccgtggccgcgacgccgtcgtcaacttcaagaacgttctggaagacggcgatttagcttttcttgaagctcactcaaaggccgagatcgtcgacatgttgagaaaacacacttacgccgacgagcttgaacagaacaataaacggcagttgtttctctccgtcgacgctaacggaaaacgtaacggatcgagtactactcaaaacgacaaagttttaaagacgtgtgaagttcttttcgagaaggctgttacacctagcgacgttgggaagctaaaccgtctcgtgatacctaaacaacacgccgagaaacactttccgttaccgtcaccgtcaccggcagtgactaaaggagttttgatcaacttcgaagacgttaacggtaaagtgtggaggttccgttactcatactggaacagtagtcaaagttacgtgttgaccaagggatggagtcgattcgtcaaggagaagaatcttcgagccggtgatgttgttactttcgagagatcgaccggactagagcggcagttatatattgattggaaagttcggtctggtccgagagaaaacccggttcaggtggtggttcggcttttcggagttgatatctttaatgtgaccaccgtgaagccaaacgacgtcgtggccgtttgcggtggaaagagatctcgagatgttgatgatatgtttgcgttacggtgttccaagaagcaggcgataatcaatgctttgtgacatatttccttttccgattttatgctttcgttttttaatttttttttttgtcaagttgtgtaggttgtgattcatgctaggttgtatttaggaaaagagataagacc

SEQ ID NO: 3 - DNA, 1644 bp, Oryza sativa
gtaattaactaggctcaagatagatagacgtcgtctctactactcctactagaaaacatatctttgtccaagcaaattaacaaaatcaaatatagcaagaacacgtttaattttgtacacatgctgcgtttgggttggtccaaataaaatacaaagaccagtgtctatatatacagagcacacgcccacagcaactatcactcttcatcatcatcttctttggcttctccctcttcactgccctaattacaacccatttgcttatctctctcctctctctctctctctcgctgcagccatagcttagctagagctagagctttcttggtgccgagatgggggtggtcagcttctcctcgacttcctccggcgcgtccacggccaccaccgagtccggcggcgccgtgcggatgtcgccggagccggtggtggcggtggcggcggcggctcaacagctaccggtggtgaagggagttgactcggcggatgaggtggtgacgtcgaggccggcggcggcggcggcgcagcagtcgtcgcggtacaagggggtggtgccgcagccgaacgggaggtggggggcgcagatctacgagcggcacgcgcgggtgtggctcgggacgttccccgacgaggaggcggcggcgcgggcctacgacgtggcggcgctccggtaccgggggcgcgacgcggccaccaacttccccggggccgcggcgtcggccgccgagctcgcgttcctcgccgcgcactccaaggccgagatcgtcgacatgctccggaagcacacctacgccgacgagctccgccaggggctccgccgcggccgcggcatgggcgcccgcgcccagcccacgccgtcgtgggcgcgcgagccgctgttcgagaaggccgtgacgcccagcgacgtcggcaagctcaaccgcctcgtggtgcccaagcagcacgccgagaagcacttcccgctccgccgcgcggcgagctccgactccgcctccgccgccgccaccggcaagggcgtgctcctcaacttcgaggacggcgaggggaaggtgtggcgattccggtactcgtactggaacagcagccagagctacgtgctgaccaaggggtggagccgattcgtgagggagaagggcctccgcgccggcgacaccatagtcttctcccgctcggcgtacggccccgacaagctgctcttcatcgactgcaagaagaacaacgcggcggcggcgaccaccacctgcgccggcgacgagaggccaaccacaagcggcgccgaaccacgcgtcgtgaggctcttcggcgtcgacatcgccggcggcgattgccggaagcgggagagggcggtggagatggggcaagaggtcttcctactgaagaggcaatgcgtggttcatcagcgtactcctgccctaggtgccctgctgttatagcatcaaatcaaattcatatatagatcaaatcaaatcttcttctcttccatcttttttgttgttcatcgtctgttgtttcatcttcgatttagagctgttctatcttcgactttctttttttgttttttgtctttattttgcatagaagtttgtcaggtcagagattgcaaatgatcgatcaagatcgagctgtatatgtacagccttatta

SEQ ID NO: 4 - DNA, 2001 bp, Oryza sativa
aaagcgacaattaaattgtttcaccaaaaaaaaccaattaaaattatcagtaaaaatactaaaatagctaagaatatatgtatgctcatggaccatttctgtggaaaaagcatgctggcttgcacgaatcaaatttaattaaatatggtacacatcaaaactaaataatagcatcgaccaaaatagtcgattactaacagagattctcgtagccacacatgcctaaacagtaggcacaaacgaacacttgcctgaaaagatcacgcaaaaaatatagcataaaatgacagtctcaacagtgtaaagtttgcaagaatgtgcaattagaagctaacataaacacaaaactagctatcatacatacgagtgaagggctggaagcagctaagctgaaagctcaacacaacatatactaccaatctagctacaaggccactccaagtcgcatatatactagtatctataagctaggctgttctctctttccattcgtcaagaactaccacgacgtcgacatcataatcgtcagagagctcgagaaattttttagtatctttgatccagatcgatcatggagcaagaagctgccatggtcgtcttctcctgcaactccggctccggtgggtcgtcgtcgacgaccgattcaaagcaagaggaggaggaggaggaggagttggccgcaatggaggaagacgagttgatccacgtcgtccaggcggcggagctgcggctgccgtcgtcgacgacggcgacgcggccgtcgtcgcggtacaagggggtggtgccgcagccgaacgggcggtggggggcgcagatctacgagcggcacgcgcgggtgtggctcgggacgttccccgacgaggaggcggcggcgcgcgcctacgacgtggcggcgctccgcttccgggggcgcgacgccgtcaccaaccgcgccccggcggcggagggcgcgtccgccggcgagctcgcgttcctggccgcgcactccaaggcggaggtcgtggacatgctgcggaagcacacctacgacgacgagctccagcagggcctccgccgcggctcgcgcgcgcagccgacgccgcggtgggcgcgcgagccgctgttcgagaaggccgtgacgccgagcgacgtcggcaagctcaaccgcctcgtggtgcccaagcagcaggccgagaggcatttcccgttcccgctccgccgccacagctccgacgccgccggcaagggcgtgctcctcaacttcgaggacggcgacggcaaggtgtggcgattccggtactcgtactggaacagcagccagagttacgtgctcaccaaggggtggagccgattcgtgagggagaagggcctccgaccaggcgacaccgtggccttctcccggtcggcggcggcgtgggggacggagaagcacctcctcatcgactgcaagaagatggagaggaacaacctggcaaccgtcgacgacgatgcccgtgtcgtcgtcaagctgttcggcgttgacatcgtcggagacaagacgaggtaacacgcaagcgcagctagctgcatcgtatcgatcatatatatcaccccggcgccttcttcttcttcttcttcttcttcttcttcttcttcttcttcttcttcttcttcttcttcttcttcttcttcacttgttcttcgttttcttcctcttcgatcttctcattcatcttctgttgctgccctagctacaatgatcgatcgatggatgatccatatcatcgttgatccttcgcttcacatcaggttcatcattcctagctacatcgatatatgtacctataatttgatgatgagatgaacttcttcaaaattcaaattaatctctgaagaaaccaacggagaattaggatcagagtgtgctagctacatgtgagctagagattagagaaatttaagagtgtgtgttatatgtaaatatatcgatcattgccagatcgatcgaggcgaaactatagaattttgccttggggtttaatt

SEQ ID NO: 5 - DNA, 1201 bp, Oryza sativa
gtataggggtggcaggtagtttatattcactggaaaccgagaacttcactcctcccagcactccacactaggaggatgctcactgtctgactgactgactggctgctgctgctgctcattccttctcctactctgcctgcctcctctgctgtgtccttgggagaattcttcagggacagtatccctgcagaggtgagatcatgggacagtcgaagaagaagttccgcggagtcaggcagcgccactggggctcctgggtctccgagatcaggcaccctctcctgtaagtctctatctcactagtgatgatcactagctagctatgttgctctgatgtgttatgccactgtcgtgatagatacattttgatggatagctagtggttctggtttgttgttgctttctttctttttttctttctctttcatggtatgttagtagctaactcaaggtgcttgggtgcgtgcatgcatgaatgatggatgatgttttttttgctacgtgcgttgtggcagtaagaggagggtgtggctgggtacctttgagacggcggaggaggcggcgcgggcgtacgacgaggccgccatcctgatgagcggccgcaacgccaagaccaacttcccagtcgcgaggaacgccacgggggagctcacaccggcggctgcggtggcagggcgggatggccgtgtcggcggcggcagcggcagctcgtcctcaatgacggccaacggcggcgggaacagcctgtctcagatcctcagcgccaagctccgcaagtgctgcaagacgccgtcgccgtcgctcacctgcctccgccttgacccggagaagtcccacattggcgtctggcagaagcgcgccggcgcacgcgctgactccagctgggtcatgaccgtcgagctcaacaaggacacggccgtgtcgtcggctgcgacggtggcagcagcaacagcagtgtcgtccagcgaccagccgactccgagtgacagcacagtcacaacgacgtccacgtccaccacgggctcgccgtcgccaccacctccggcaatggacgacgaggagaggatcgcgctgcagatgatcgaggagctgctgggcaggagcggcccgggctcgccgtcacatgggctgctgcacggtggtgaaggtagcctcgtcatctgaattccggaagaacaggaaagaaattgaaaatgcaagg

SEQ ID NO: 6 - DNA, 961 bp, Zea mays
gccccagcagagctcatctctgcctcctgtgtccttctccatgacagagaatctccactccaggaaaatggtacagccaaagaagtttcgtggagtccggcagcgccactggggctcctgggtctctgagatcaggcatcccctccttaagaggagggtctggctgggtacctttgagacggctgaggaggcagcgagagcatatgatgaggctgctgtgctgatgagcggacgcaacgccaagaccaacttcccaatccaaagaagcagcacaggggagcctaccccagctgcgggaagggacgcccgcagcaacttcagcagcggctcctctaccaccaacctgtcccagattctcagtgcgaagctccgcaaatgctgcaaggcgccatcaccgtccctgacctgtctccgccttgaccctgagaagtcccacattggtgtttggcagaagcgtgcaggagcccgtgctgactccaactgggtcatgacagtggagctcaacaaagatgcagcatccactgatgctgcatcacagtccacatcagcaacaactgctccaccagccacgccgatggatgaggaggagaggatcgcactgcaaatgatcgaagagttgctgagcagcagcagcccagcttcaccctcaaacggagatgaccaaggtcgcttcatcatctgaaaagcatggatcaaacagcacaagtcaccatcccagatcagagtttcgctaggtcggttggtacacaagcagttcaggttgcttcagtaatatagatatatgtctattactaaatccaacttacaagaactataaagtttgcaattgtgtgcagttctatgtacgtgaaaagctctacatacacatgttcctatcaagatactttgttacacatcaatgtcagtgatataattgcttataaaagaaataaatagattatgattgtgttactgctaaaaa

SEQ ID NO: 7 - DNA, 2284 bp, Zea mays
ggatctttcgctttccttaccccgttagcgttcctgcttgatacactacgactgcagattctttggcagaccgctaccaagtgcaagtgtgcaacgcacacacatcactcacagtctcacggtgtctctgtgcgcgcgcgtgggacacaggagggagagagacacagagaagggggcgggacgatcagctctagctcagctggtatcgtctaaactgcataaaaggggagggaaaaaaagttgcaatgatgcatcccggcgcatagatagagagagagagagaagagagagccccgactcgagagccaagaacgccgtgtgttgtgtttgtgtgcatctatctccgtacacgcacgctcgtacgcaccagctagcacgaccgccatggccgccaccaggagagccttcttccacagcgccgtcgacggcattgcgcgcgccgggccgggggaggccgagcggctgccggcgccgccgcaggtcgggcgaccggtggaaggcgccagcagcatggtcttgggcttccccgtgccgcggcccacgatgccggaccgccggccggccgccgtcacccagcagttctttccgcccactactacggccgcgcagcaggcgacgatggaggagcaatgccacgtgcccgccggtagcgcggcggagcagtgggtccggtcgtcggcgtccaggaagagccggcgcggcccgcggtcacggagctcgcagtaccgcggcgtcaccttctaccgccgcaccggccgctgggagtcccacatctgggactgtgggaaacaggtgtacttgggtggattcgacacggcgcaggccgctgcgagggcctacgaccaagccgcgatcaagttccgcggcctgaacgcggacatcaacttcaccctggacgactacaaggacgagatgaagaagatgaaggacttgagcaaggaggagttcgtgttggtgctccggcggcagggcgccggcttcgtcaggggcagctccaggttccggggagtcacccagcacaagtgcggcaagtgggaggccaggatcggccagctcatgggcaagaagtatgtgtacctgggcctgtatgacacagagacggaggctgcccaggcatatgacaaggctgccatcaagtgctacggcaaggaggcggtgaccaacttcgatgcccagagctacgacaaggagctccagtcgcagccctgggacggcgagctggatctcgagctcagtctgggctgcgccagcagcgatccgtccacggtcgccgtcgaggcgttcagccccgcgacgagcagcagtagccgcaagcagaggacgatgacgctgacgctcggtctgccggaggaggaggagacgggcgccggctaccctcaccctgctgccggcatgttcgggcgcccggctgatggccacgtccacgtagcaccgccgccacaccggcaatggcagcagcagcagcagggacagcacgcagctccagatgcggcgcctgagcgacgagcggcagagccagcagatcggcagcggtggggccggggcgcgcgctggcccatcgccagcgccagcggcattaactgggcctgggcgccgccgtacgccaccgcccgcgccggcaccgacgacgacgacgccagcagcgccgccgctgcagcatcatcaggattcccactgtggcagctgggtgcggcgtcgtccaggtccagctggcccagctgctgagcctttcctgtcgtcccgcgccaccaacagtgacgctgctgggccacgtactgacggcgactggtgacctgctggaaccgccgccggcctgtttcccttttctaggtaaaagcagtggcagaggggcgagctagcgacagcgtgcctcgtcatccatcgtccctgcgccgtggctggcggggtgggaaaaagtctgagcagttttgagcgtccggaggagctcgagatttcctccctcgaatagtcacttggggtggccactagttattatttctttccttccccctcgttgattctgctacccattatagcctctgtatctagctacatgcatgatgctgctctagcgctgttggacgttgatggcacggtgtacggatatggacagggttcgtgtgaccccatgtccactgctaggcctgtttccaaatggagtatttctgcagtaccatggcttatagaaatgccgagtattttaaaccattaggtgcttggttactttcccaaaaactaggttttcaaagctatggtataatgaataccacggtatatatttttc

SEQ ID NO: 8 - DNA, 1008 bp, Zea mays
atggtgaagctcgcattcggaagcgtcggcgactccttcagcgtcacctccatcaaggcctacgtggccgagttcatcgccaccctcctcttcgtcttcgccggcgtcggttccgccatcgcctacgggcaactgacgaatggcggcgcgctggacccggcgggcctggtggcgatcgcgatcgcgcacgcgctggcgctgttcgtgggcgtgtccgtcgcggcgaacatctcgggcggccacctgaacccggccgtgacgttcgggctggccgtgggcggccacatcaccatcctgacgggcgtcttctactgggtggcccagctgctgggcgccaccgtggcgtgcctgctcctcgggttcgtcacccacggcaaggccatcccgacgcacgccgtcgcgggcatcagcgagctggaaggcgtcgtgttcgaggtcgtcatcaccttcgcgctcgtctacaccgtgtacgccaccgccgccgaccccaagaagggctcgctcggcaccatcgcgcccatcgccatcggcttcatcgtcggcgccaacatcctcgccgcggggcccttcagcggcggctccatgaaccccgcccgctccttcggccccgccgtcgccgcgggcgacttcgccggaaactgggtctactgggtcggcccgctcgtcggcggcggcctcgctggcctcgtctacggcgacgtcttcattggcggctcctaccagcaggtcgcggaccaggactacgcctaatttattcaccactccatctccgctctggatgaatggattcaaaaccgtcgtcgtttgcttttgctcctcgccacgttcaattaatggttgtgtatgcatgtatgtgccaatatgatgtgcctttgccctggtccattcatttccctttcttttttcggggtgaaatagatgtaaagatctcgtcttgcctgccgtactcgcgctgtgttgggaaaaattggttttcgttccaaaaaaaaaaaaaaaaaactcgagggg

SEQ ID NO: 9 - DNA, 1807 bp, Oryza sativa
gggttgattgatatgggtgttctttgcttcggcgcttccaacatcctcctctgcgcggaggacagcagcagcgtgcttggcctgggcggctttggcggcggcggcggcgaggtggcggcggagctggggtgcggcggcggtggcggctttgatttctttggcttcggtggtggtgctgtgttccccatcgactccgatgagttcgtggcgttgttggtggagaaggagatggatcatcagcctcagcgggggtatctggagaagctggagctcggtggattggagtgttcttggaggaaagatgccattgattggatttgcaaggtgaatatgaatcaaaagtgtaggaaaaataaataaagctctaggatttttttttgctttatttgttactattgatggattaattgggtcttctaggtaggttgttgcatgcttgcgttacatctttgactctagcgtcgatcttgctttggctctgtgcatttgcctttgctgctaaacttgacaaagcaccagattgcagataacaatggggctttgccttttatatggacaaatttgtttttaagtagaaactgacgaaggtgctaatcttgtcttctctcatgtgcgcttgcaggtccattcctactacaactttggaccactcagcctttacctcgcagtgaactacctggataggttcctctcctcgtttaatctccctgtaagaatctgggacgtgtatgtacattgccactacttaattactgtatagtgaatcccggtagtgatcattgcgatgcttttgtttgttcttgttgttgtagcatgacgaatcttggatgcaacagttgctgtcagttagttgtctatctcttgctacgaagatggaggagaccgtggtccctcttcccatggaccttcaggtgaatgaatgaagagttacagttgaaatcgataattgttcagtgatcgcgcgatgatcttgtgctaaaatgggcttttgttgcatgataggtttttgatgcggaatatgtgtttgaagcaaggcatattaagaggatggagcttattgtgatgaaaaccctgaaatggaggctgcaagctgtgaccccattctctttcatcggctacttcctggacaagttcaatgaagggaagccgccgagctacacgctggcatcatggtgctctgatctcacagtgggcactctgaaaggtttgatcatattgcccgatgatttaatcgagaagatctacctgcattgccaatggcaacatctgatgaagttgtacttactagaaatttatgtgcaatgtttttacagactctaggttcttgtcattcagaccttctgagattgcggccgcagtggtgttagctgtgcttgctgagaatcagtttcttgtcttcaacagtgcccttggagaatctgaaatccctgtaaataaggtgagccttttcttgcattttaggaatggcatactgatctgccattgtattttcaatgtttctgaatgtgtcatgtttgtgcatccgcaggagatggttatgagatgctatgagctgatggtagagaaggcattggtgaagaagataaggaacagcaatgcaagctcttcagttccacacagcccgatcaccgtgttggacgcggcgtgcttcagttttaggagtgatgacacaacactaggatcatcacagtcaaacagcaacaacaaagattacaacagccaggactctgctcctgcttccaagaggaggagattaaacacaacaccaatctgataactgtacatacataacttggcattgctttgc

SEQ ID NO: 10 - DNA, 7858 bp, Oryza sativa
atattgttttaaaaaacctttccttttttattgtaaaacaataaaagtttaacattattggatccaagggatgtatcgacatatcgttatagagtttaaagtccacgcattttgacggaatagatttaagagacagttctcgatcgagtaactcctcaatttatatcatgtcagagtggatagatatggtttcaaagctttccttttcttattgtaaaccaataaaagtttacctttatatattttttccaactagctgctgcattttatcaataaatgtaaatttatttgtataatcagctgccagtacatactgggaagtggacaacgaacttaagcacccattcgttcgttttaggcggagcaagaatttaaattatggctttagtgccacgctgtactgtagtaggacactaggacagaactactgacagaatcgctctagaaccaaaatgcatggtttggtggcctactgttaattctagctgtagctagccttgcataattcaaccttattgatcgtccatgttttccggtgaattaaacccacatgcaaacgtagtaggttttttatctctctcggttcacaaatttggacccctgaattccgatcctctgtaataagctgagtagtttgtgcaaattacgtgaaagcctgtcgtttccgtggcccacatgaactggcccccatgcttgctgactcagactccgatcacttcgcccggccaatgctccgctataaaaccctccctttttttggcaaggagttcccaccgtgagatcgagatcgcctcctctctccgtttccttttatttcccgattcgctcggcgtctcggcggcgaccttgcgcgagcgcgcgatgcggtgaaaaaaaaatcatcgcccgcgacagagtacatctgtcccttccgcataaggcaacgtcgcttataaatactgccagcctcttcgttcgtttccatttttcctcgtccgctcgctctcgttcatgtacaaataggagggcgcatgcaccttgtttgccattagctctcgacgtagcctagagcgcaagcagcagcagcagctagattggttggttgccaatgacccggccatctccccgatgatggacggcgccgcgcctctgcttcccgagacgagccccgagagccgccagcaacgtgatccggagagggggaagaggcggacgccggtcctcccggccgtcgtcgcgtccgccgtggtccttctcggcctcgcggcgctcttcctggtgtatggatttcacgacggtggagacgggagggcggccgtactcgcgcccggcaccgtggaggtcgcggcctcgtcgtcccgcggcgtcgtggagggcgtctcggagaagtccaccaccccggcgctgcgcctcggcggcggcgcggtccgggactacgcctggaccaactcgatgctgtcctggcagcgcacggcgttccacttccagccccccaacaattggatgaacggtatgtatacacgttgccatcgttcccgtggtttcatctaggccgttggatctgtaatcgcacggctccgattcaccggttatacaatgttttctcgtttctaatcttgttccctttccgtttcttttccacggacgtctcgtgcgcatggccgtgctgctcgtctttttctcggcatctacagatccgaacggtaagttgctggcgctgattgtcaatgcacggcgcaatcttgtacttgtcacgcattgacatcgatgtcgcgagacgtgacactttttttttgcacgcactgaccgggccgtcgatggatcgatctgcaggtccactgtactacaagggatggtaccatctgttctaccaatggaacccggactcggccgtgtgggggaacatcacctggggccatgccgtgtcgcgcgatctcatccactggctgcacctgccgctcgccatggtgcccgaccactggtacgacatcaacggcgtctggaccggctcggcgacgcagctgcccgacggccggatcgtcatgctctacaccggcgccacggaggagtcggtgcaggtgcagaacctggccgagccggccgacccgaacgacccgctgctgcgggaatggagcaaggcggaggcgaacccggtgctggtgccgccgccgggcatcgggctgacggacttccgcgacccgacgacggcgtggcgcaacccggccgactcggcgtggcggatcaccatcgggtccaaggaccgcgaccacgcggggctggcgctcgtgtacaagacggaggacttcctgcactacgacctgctgcccacgctgctgcacgtcgtcaagggcaccggcatgtgggagtgcgtggacttgtacccggtgtccacctcgccggccgtcgaggacgggctcgagacgtccaccccgccggggcccggcgtgaagcacgtactcaaggccagcctcgacgacgacagaaacgactactacgccatcggcacctacgacggcgagaccgatacctggacgccggacaacgccgacatcgacgtcgggatcgggctccggtacgactacggcaagttctacgcgtccaagacgttctacgaccccgtcgggcggcgtcgcgtgctatgggggtggatcggcgagaccgacagcgagcgggctgacatactcaagggctgggcctcccttcaggtaacgtacattgatcgacaacccccataaccttggtttcatatttctgataggctatagaattagtagtagttacgtataaacaaactttttttatttaattttgacaatggattgaacgagacacggatagagatacgaacccgtcaaatttctttgtgaagcatcataactgaacataattacaaaaatataaaaataacaagttatattaatctcaaatgacgtaggaaaactattataaagctgtctgaaaagccatattgatctgtgatataattcattgcaaaactaattagtcttttttttttgcgatgacatgaacaagatacttaattaagatttttaggtaactgggtatgtactatctcaattggcacagaacgagttactattaaaatctgaaaagccgtactgatttggtataattcatatatattgtaattaatttaacttgccgtatacatccctttttcccaatcatgtactgtactccattaattactgtgtcaaaaacatttagctcatactatttgaatcgctagagcaaaaaagtaaagtgactaggacgatataaactcatggaaatccattaaaaccttatgaaaataacgcccctagctaagccagctagctgctagccagctggatatgatgatcatgctgatctggctagttaaccatggatggctagctaggacccggtcattatgtagttatacacttgcatataccatttctagaccacaattccgcccactaagatataatgcaaaacgtctttacctgtgcaccacgagaggcatgcaggcgtgcggctttcttgttgcgccggccggtcgatccagaagaaaacgtgcatgaacatagttggaccagtagtatatgcagtagtccaggtctgggcgggccccacggggatcacgtccttttttttattattttttgaaaaccggatcacgtccttctaccggtctacccaaacgagttgcacgatgccgacttgattaatcggtccgagtcacgcccgcccaaccaccagaggtagccgggcccggcgagatttgcaggctgccaatagactcgcggggatttgcatgcagcagcggcgccatgacatcggactggatcggccggcgttttctggtgcccgaccgtgacttgtctccggttggccgcgagagcacgagagccgtacgtctaagcaaactagttgtcaccacgtcttagtgtggagaagtattagtactctattaattagctaaggctagagttagattaatcctcaaattgcgaagggttttttttatgcgtccataacgtgtcttgcattggcgcatagctagagattagctaggacatttacttgacgaaagggggatttgagtaaatttctgatttgctagagtttggaattccaaacaggactattcaaaggggttgttccaacgaagcagcacgtggataatgacttgcttagcatcaggaaatttaataccctgacctgtcgctgcaatcgtgttgtttttttaataatccgtaatcatttgaataacttagtaatttcgcggtatatgtacatgtcattcttgtggcaagcgtgaaagtgagttcttgagtggccggttcgactcctaggggaattaacttcgtttttgagaaatttgttttacgttatttttggaactaaaatgtttggcaatttattttaatcgatgatgaaatcaatggtttttgtgaaatgaaaaaaaaaatccactcatagttattctaaagatgaaattgaggagttttcgatatttgtactatactataatataaaaaaggaaatcaacaaacgtctcctttctcagttggttaggcaagttgttgtgatgctaataggctacacaagtctaaccgtgttatctaagttgtaaagatacttgagatgtattttaaaaaatatatggaaatggtaattgagtgagtgtgttcaaacttgaacgcggtccactaggtttctaattctaaactttaccaactgcgcaaggtggagttatcgaaattaggtgatagattaataagtaaatgcactttcttggtggtaaagatacttgagatgtattttaaaaaatatatggaaagggtaattgagtgagtgtgttcaaactcgaacgcggtccactaggtttctaattctaaactttaccaactgcgctaggtggagttatcgaaattaggtgatagattaataagtaaatgcactttcttggtggccagttaagttgtaaaaatacttgagatgcatttgaaaaaaaaagcaccatggtggaaagggtggctgttggcgagtgttttaaaactcgaacgcggcccgctaggttcctaattctaacctttgccaactgcgctaggtggagttatcaaaattaggtgatacacaaatttataaatgcactttcttggtgaccagttatgcaaatacactagacttctattaaaaaattatggtggaaaaaggtgagcatgataatttttatattaaacgcaaacgaaaacaagggtgaaaaggtgagtgtgctaaaactcaaacacaataaacaagggtgaaaaggtgagctgctaaaactcgaacacggtccgctagtctgtctaactatagactttgccaactacactaggcagggcttcttaaaaaagcagtggactttgagtaaatatacttccttggttagatggccgggtatgaaaatatcctagaattgtatcaaaaagaatttgggtgggaagtgagcgtgttaagactcgaacccgggctgttatattttacaactctactatttgccattggcgctaggcgagtttatcagaattaggtgataggttaaccaataaatgcattggccttttgttaaattgcgaactatacaaacttactaaaattgcatctttttttaatcatgctaaaattatgtatttttatctgaatgactgtaaaaacttgctaaaattgtatatttttaaaatcatgctacaattttgtattttgtctgaatgactataaaaaaaactaaactgctactaccatctctaaataaatgtaattttaggtgatccactagaccattttaatactagtttatcttttttttttcgttttctccaccacaaggacatcgtagttttttaatctcttgcttaataatatatctttaactagttaaaactatacatttttagagtcggagggagtagatccttaactgtctctccttcaatcattcatgtcattgtccctttttctttaaatcttatttttttcctgttttaaattgttgttgaattcaatgtgcccttgatgggccttgaccgaggcccatccaaacaaggcatttccctttatttaaattaaccttttattattattattatttgcagtcaattccgaggacagttatgctggacacgaagactggcagcaacctgctccagtggccggtggtggaggtggagaacctccgtatgcgcggcaagagcttcgacggcctcgacgtctctcccggctccgtcgtgccgttggacgtcggcaaagcaacacaggtacgtacgcgtgattttgacacatgaacacaaaatgtgtcatacatttataaaaaaaaagtgtgccatacacatacacaacaactgctatatatccgacccgagaaactgacgtgcaagtgtggttctggtgtgcgtgcggttgtacagctggacatcgaggccgtgttcgaggtggacacttcggcagccgacggtgtcgtcacggaggctggagcagcagcatacagctgcggcacgggcggcggtgcggttggccgtggcttgatgggcccgttcgggcttctcgtgctggccgatgatcagttgtcggagcggacggctgtcttcttctacctggtcaagggagtcgacggcaaccttacaaccttcttctgccaagacgagctcaggtgtgtgtggtacacattttccagtatatgcgtgcatgtcttcctctgtgtgcacatatttttgcaaccaaatattcacacttgatcttgttattagaggatgtattttttttcgatacttcaatttgtggacagaggatgtgtgctgtcgtgtgtagaactccttgtgtatatataaaggaggcttaaattttgctttaatcgagtcaagatgtaaattttaatgcattttaaatcttgtttttttttcaggtcatcaaaagcaaacgatctagttaagagagtctatggcagcttggtacctgtgctagatggcgaaaacctgtcaataaggattttggtaagtctttctagcaatgttgagtacatgcatattcatatgccacaacgcatatattttgatacgtcgtaacctaactctttgtgtgcaatttctttcaataggttgatcactccatagttgagggcttcgctcaaggagggaggacatgcattacctcgcgtgtgtatcccaccaaagccatctacgagtcggccaaaatctttcttttcaacaatgccacaaatgttagagtcactgccaaatcgctaaagatttgggagctgaactctgcttacatccgtccatatgtagactagatcatttttaatgtaatgggaatgaatgatttgtctacatttgttagttatgtttttataggctaatttatcttttttgcttccttctttatgtcaaactacaactatgacatattactagcaactgaaataaaacataatcaatcatattgttttgccacaattttgttattgtgtgtgcgcatgcgcacacgtacgtgcacatgtgcgtatgctatcactctacccctgatgttattattagccatcaccgtaatgttgtcgtaagccaattgtgtcatgtttatcctacataaacaatatacgactttgcgaacattcctcttcaacaatgccacaaatttagggccactagaaaatcactcaagattttggagctaaactctacttaagttcatcaatatataaactacatccttttaaatgcaatggtagtgtggtatgtttagattcattagttgtatctctatagtcaaatttgtttgtcttcatctttctacctatcaaaccacaactgaaaatttttagtcaaatatgtttgtttgctttcttcttcttatc

SEQ ID NO: 11 - DNA, 5000 bp, Oryza sativa
cattttggtgttaaggaaaagttctcaactggagctaccaaaggcagacttataccgagttcatccatggatgggcccatacacacagaaggcccaaaaagcaatacgtctgtacgctggctcggcccattagactaaccaccagacagaccaagtaaaccacagccttcgctacgaaggcaggcaaatccggtccaaaacccaaacccaacccaacgaccaaaccaccgaccggccgttccactgcgccattccttccttccccccacctcctcgtcgacgcggagatcgctcgctcgccggcgacggcgatggcggcatcggcggcggctgcggcggcggtgagccaggcgctgagggaccgcgacgtcctcgacgccgtcggcacctccgccgccgcgctttcgctcgcgggctcttccttcatcgtgctctgctacctcctcttccgcgagctccgcaagttctccttcaagctcgtctacttcctcgcggtctcggtgagcggctcagatctggaactacttggttttggggggttctgggttcgggaggctagcctcgtgatctgcgtaactgcgttgggttgcgatttggaattggggagcgcaaagtggggatctgagggcagtgcggtgttcatttcgcctccgattgagaaatattgggggttcacgccgtcagtttaaccaacggatgctctgtttttgctgcttatgcgtgcgagctgaagcagttctcgacaattttttttttgtaagatgtttgctatctgatcggcacttgaagtagcatagggcatgctccattttttttttagtgaaccgtgtgaggatgtttatgtcatagacccttacttcaatgtggcaagtgatgtccctataagtatccatgtaggcaattgctgggagatcacatttcgtgctactgtcttcttggattggaagtacagttggtttgttatctaattatcatgttggtttgttaatattattaattgctgcaagacaagctgatgtctctaatctcaatttcttcaagacatttggaaatttgtttgagagaaatgatatcacatttctattcaaggtgtttttctgacagcttctgtctaaattgcaggatatgttttgcagcttattcactattatggggtatgcttctgactgtgttattcaaattgtatttgataatgcacgtagttacttcctgacttaaataactgcaactaatgtaggagaaagtgtattactgtgaaggaaaaaacatattgttctttattttgttatttttggaactgttactcatgattacccctttttttgctgactttctattatgcgctagtgaaatattcttacacacatgcttttcatattgcaggggcccatcaaatgcattctactgttttgctcatgactacagtgcacacttcttctgtgtggcttcttttctatggacaaccactatagcgttcactcttcatcgcaccgttgtcaaacataaaacggatgttgaggagtttggatcaattttccacctgtatgtgtggggtatgcaattcttttgaccacttctctgcctttcttggagcttgtgcgtgccaaattagctggtgcaatattattaagaagttagaaatgcttgttgatttggtatagtgcttctttttcatttgaagtattgacaattttatagctgtttcatctatttgaagtgtatgtgattgataagagggaacaagcgggagcattttgatttcttatatctaagcattatgtagatttgatgcacatacttttgtttctccttttctgttattgttgtctgcattgtttgtcatctaagaaccaagtatgcaagttccagtttctcatgcatttttcattcctgtctgctaatgtatatactgaatggtagacaacttaagacatttgttgacttgacataattgcgaacatgtgttgtaactcatcctattaatcttgttgccctgcttgaatttacagttcttgtgacaataattttccttttatatgtttctcaggaacttcactagctacaactgtattacgttcaattggaagtgattatggaaggccaggcacctggtgttggatccaacaaggaagcatgggaaaggcatgtgaccttttgtgttttgtcatgaatcagttaacttggttctaacactgctaacacctatctacagcttacatttgaaccttatccatggtagtcagagtggcccaaattggtgctaatgacgttcctatatgtttttgctttcatttagtatttgagctgttatcaaatgatccaaaacaaactccactcaacagaataagtactacctttgtctcaaaaagacttcatttctagctatgaacctaggcaagtattgtctatattcatagtcagaaatgaagtctttgtgggatggaggtagtaacatttatttatttggaattgcttacgtaccttgcacaagacagatggtatcataaagtttagtgagtctctgagagtatacgcatgctttctcttagtttgtatgtttgactttttgtgcattggcttctttcttttccatatctttactgcaatctatgtcttctgttaatttgccatcttgatcctagctagaccactcattcaaaataaaaatattgtcactttgtcagaattttagcaattgttcattatatgtcttttatatgcaggtcttgcacttggtaaccttttatcttccattgtggggtgccattctctacaatgggtatacatactttcaggttaatcgcatgataaacaacgcgacaagggtatgcatacagttttctattttatattgatgataaataaggcttgtattgaatccttgtaaattctgctctttttgcttatatgttctgattttcataagataatggatgaatttgtagatggctgttggcataagtgatcgatcaattcaatctgacgtgagggcagacaagaaggtataaatttcctacacatctcttctcattatgtgtactgaaatattttcccctaatgtgctactgtattcttcctactatcatgaattcagagagtaactcatttgatcctattattttttttatacctccagtcttgagatgaactggagtataataccttatgttatcatgtttggagcaaaaatgatgtgtaaattctaggagtacttatattatcatgttacctggatgtctggatcagcctcgcaccactgtctactgtctggtagcagataggaatgtttatttgagcagatacagcttattgacttgttttcttttgcaggcgtttaatcggtggggttattaccctctcattctaataggttcatgggctttcgcaacaatcaatcgtgtgcatgactttgctaatccaggccacaagatattttggctctctattcttgatgttgggtttgccggacttatggtgagtattttcatcctagatgctagttacccagttctgaagagttttcataacatattgaaactactttgataatgtgggttgagccaaccttttaagtttagggctagagaaagaggcttagaggactccacgtatcttgttgtcagtcctgttgataattttttataaatgggagcgctggagttccaaccctactctttcttgaaacaggcctatgaaattggttgtatttcatacttagccttcagtatccaaagaattggctctatataatgcatagatgagtcatggtctcgtggagtcctcttgaagttctgtttgtagaagtgtattgttgttttgtttccttgtgaggcttacctcagcttgagcttatctcacaaaacttctctggcgttacatcatctgtgaacacattttccatggattctaatgcttcatggtatctttaggggctttttaattccatcgcttatgggctcaactcgtcagtgcgcagagcgattgctgaaagacttgacatgtgagttattttctagactttacaatcatctgttcctcctgtatcacctcatttccgtttatcatttactatattggtttatgcactatataacattttgtttcctgaattgtccaggtatctacctgagagatttaaaaggagcctccctactctgacacgatttaaaagtcagcaagaaaatgaacttacttctcttattgtcgatgcgagtaacacataggaatttttctagcacactaagtttgttcatatcttgtgggttcttcaatccagaaagggtgtatgacattactgtagagccagatgtttagcattaaccatttgttagcatgtggaatagttcccctgcggtcctttgttgattgccttgaacacgagcagtgtaatatattgaagttgcattgtccggagtacataagagattaggagatagccagagttgtagatactactatgacgttgatctgtatccctttttttgtggatgtatcagtgtaccaccctctccatgttttgctttcatatgtttgtctcaaaatactggccacaggccacatacggtacgacttactaatgtttcggttctcctgagtcctaacagttgacagtgtcaaaacagtttttcccattgatgattattttcaccttagtgaaagcgtagttcttgtaaactgcctcgtggccttgtccatgggaaaggaaaagcactaggctattgctttgagatggtgttggctcgagctctcgtccatagtggaaaaggagaagcggcaaaaggtgaatacatggggaaaggaaggaggctggcaattgctttgagatggtgttggggataggattcaacatgtttgaaggaagaattgaatagggcttgccttgcttaggagttacggtgttggggataggattcaacatattcgaaggaagaattgaatagggcttggcttgttcaggagttactcgaatatttctcggtcttgcacactctcgtcaacag

SEQ ID NO: 12 - DNA, 1627 bp, Zea mays
ccgaggcatccttctcctttccctctccttccccaaacccttttcctctttccctcgccccaagaacttcatctcatctccaggcgccccttttgcgcttgcgcaggaggagctcacggggacagtgggcggagagctcgatcgctgcaccactacttcactggaggtccgcccactcccatggaggagatcacccaacactttggagttggcgcaagcagccacggccatggccacggccagcaccaccatcatcaccaccaccaccacccgtgggcatcctccctcagcgccgtcgtagcgccgctgccgccgcaaccgccaagcgcaggcctgccgctgaccctgaacacggtggcggccactgggaacagcggcggtagcggcaacccggtgctgcagcttgccaacggtggcggcctcctcgacgcatgcgtcaaggcgaaggagccctcgtcgtcgtctccctacgcaggcgacgtcgaggccatcaaggccaagatcatctcgcacccacactactactcgctcctcactgcctacctcgagtgcaacaaggtgggggcaccaccggaggtgtcggcgaggctgacggagatagcgcaggaggtggaggcgcggcagcgcacggcgctcggcggcctggccgctgcgacggagccggagctggaccagttcatggaggcgtaccacgagatgctggtgaagttcagggaggagctgacgaggccgctgcaggaggcgatggagttcatgcgaagggtggagtcgcagctgaactcgctttccatctccggaaggtcgctgcgcaacatcctttcatctggctcttctgaggaggatcaagaaggtagcggaggagagaccgagctccctgaagttgatgcacatggtgtggaccaagagctgaagcaccatctcctgaagaaatacagtggctatctaagctcgctcaagcaagaactgtcaaagaagaagaagaaagggaagctccccaaggaggctcgccagcagctccttagctggtgggatcagcactacaaatggccttacccctcagagactcagaaggtggcactggctgagtctaccgggcttgacctgaagcagatcaacaactggttcatcaaccagcggaagcggcactggaagccatccgaggagatgcaccacctgatgatggatgggtaccacaccaccaatgccttctacatggacggccacttcatcaacgacggcgggctgtaccggctcggctagccaccggtatctcgcttccatttcacaccccacggcctagctataaagactaatggttccaggtgtctgaagtactgaagacaggggggctagctatctaatgtttgtgccgcacgcatgagctgtaaggaggccatgcttaattattctgttgccgttgctactctatctatatgcgcctatgcctccgtgcatgaactatgctttaggtggttgctgctccacactgtggtggtgtgcttttgcttttgtgtggtcgtattgtatgcgtaacctgacagatggatccctgattgctacatgtttgaataatttgcatgatctagctagtttctgcctaatctaatggtacggctcatgtcttgtc

SEQ ID NO: 13 - DNA, 2712 bp, Zea mays
acgcgggccgcatctcgcattctcgccggtgctgctgcaattaacgccgcctccggccaaccacccgaaacctacctccgccgccgtcgtcgccaccgtcaacatggcgagccaaggggagccctcggcctctgcttccgatccgaaggagaagaaggactactcgacggcgatactagagaggaaaaagtcaccgaaccgccttgtcgtcgacgaggccaccaacgacgataactccgtcgtcgcactgcaccctgacaccatggagaggctgcagctcttccgcggcgatactgtgctcctcaagggtaagaagaggaaagacactgtttgcattgtccttgcggatgaaacctgtgaggagccaaaggttcggatgaacaaggttgtccgccagaacctgagggtgaggcttggtgatgtggtttctgtccaccagtgccaggatgtgaaatatgggaagcgtgtgcacattcttccaattgatgatacagttgaaggcattacagggaacctgtttgatgccttcttgaaaccatacttcctagaagcatacaggcccgtgaggaaaggagacctcttccttgtcaggggtggaatgagaagcgtggaattcaaagtgatagagactgacccttctgaatattgtatcgttgccccagatactgaaatattttgtgatggggagcctattaagagagaggatgaggagcgtcttgatgaagttggttatgatgatgttggtggagttagaaagcaaatggcccaaatcagagagcttgttgagcttccactacgccatcctcagcttttcaaatctattggtgtgaagccaccaaagggcatattgctgtatgggccacctggttctggaaagactcttattgctcgtgctgttgctaatgagactggagcctttttctttctgatcaatggcccagagattatgtcgaagttagcaggagagagtgagagcaatctcagaaaggcatttgaagaagcagagaagaatgctccatctatcattttcattgatgaaattgattccattgcacccaagagagaaaagaccaatggagaagtagaacgtcgtattgtttcacagctactgactcttatggatggactcaaatctcgttcccatgttattgttatgggtgctacaaaccggccaaacagcatcgatcctgctcttagaagatttggaaggtttgaccgggaaattgacattggagttcctgatgaagttggccggcttgaggttctccgtattcacactaagaacatgaagctagctgaagatgttaatttggaactcatttcaaaggatacccatggatacgttggtgctgatcttgctgctctttgtactgaggctgctcttcagtgcattcgtgagaagatggacatcatagatcttgaggatgagacaatagatgcagagatattgaactcgatggctgttacaaatgaccatttcaagactgcgcttggaacaagcaacccatctgctctccgtgaaactgttgttgaagtcccaaatgtctcttgggaggatattggtgggctggagaatgtcaagagggagctccaggagactgttcaatatcctgtggaacatccagagaagttcgagaagtttggcatgtctccatccaaaggagttctgttttatggtcctcctggttgtggtaaaaccttgttggcgaaggcaattgccaacgagtgccaggctaacttcatcagtgtcaagggtcctgaattgcttaccatgtggtttggtgagagtgaagccaacgtccgcgaaatttttgataaggctcgccaatctgctccttgtgtcctcttctttgatgagcttgactcaattgcgacgcagagaggaagtagtgtgggtgatgctggaggcgcggctgatagagtgcttaatcagctactgaccgagatggatggcatgaacgccaagaaaactgtgtttattattggtgctacaaacaggcctgacatcattgatcctgctcttctgaggccagggcgtcttgaccagctgatctacattccactgcctgatgagcagtctaggctccagatcttcaaggcctgcctaaggaagtcccctgtggcaaaggatgtggacctgaatgctcttgctaagtacacacaagggttcagtggagcagatatcacagaaatttgccagcgtgcgtgcaaatatgcaatcagagagaacattgagaaggacattgagagggaaaggcggatgaaggacaaccctgaggcgatggaggaagatgaagtggacgagattgccgagatcaaagcagctcacttcgaggagtctatgaagtatgctcggcgcagtgtcagtgatgctgatatccgcaagtaccaggcgttcgcccagacgttgcagcagtcccgtgggttcggcagcgagttccgcttctcagagcagtcggcgacagctggtgctgctgcagccgatccgtttgcttcggctggtgctgcggctgacgatgacgatctatacagctaggtgtcctgttgggttggttctgggttgtgcaatatcagtctcatcagtcatctgtttaaaactctgattatacttagacacgggatgtcatgcaatgatatttgttttccgtacatttggacgttgagataatgcctgtttattttaaaaaaaaaaaaaaaaaaaaaaaaaaaaaa

SEQ ID NO: 14 - DNA, 7421 bp, Oryza sativa
gtcgaccgaaaaaatatggaagaatacaatttttagctaaaatttatcatagtttaatacgccgaattgacggcctagtaaatctatatccctttaaaagaaaagaaattagaaataaagtagtgatggtaatagtgaatttgctacttcacctactgcattgaaatttttgcaagttaactcctgaactttttaatattaaaaagatcgaatctaaatgggtagctcctaaaaaaaataaaagtaggatgaatattctctatagcaaaaagtgaaagtacattaatacattattttatctgtagcgagcatggacatttagatggtttctaaaaattatatagtattttgtgtttatcatgattttttcttaggaaaacaacgcttactacacgtactattttcagaatgggctttctttatagaagaaaaataatccatcctttcggaggatcggttgtggtcgttagcaggcattgcttcctttagggatttgttgaaagtgtagcgtggctttgccctctcccgctgattggagtagcgttacctgtcgtacgagttatatttttcttccttggttgttttttttctctccttggtataagttggtctagctaattacattgagtaatatattgacgtataatctttttcgcgttcatgaaaaaattatagaaaaataattttggagcggaaactagtctccgcaggaactctttgatttctgacggactcaacgcctgcgggctgcagcttctccctgctatcctccttcccttttgatatcgggtcgaactttccaggaccggtgctgcgcatgcaagtgatcttctggtttactagatgttcacattttctcctttccagccacggcgaaatgtcagtccatcttcgccggttgactagcaccggtcgccaaacttcaaggaaaccgacgtgcaggattctttcgttgccatgttgtcactcacccgtgccaccatcgcgcagcagaatccttcagcggcaaaccaagaaacgacatcccgttgaaaggtcaggtcaaccgtaatcctcatcacggcatcagtgcatcacctgaggccgacctgctctcccgatccctcgcgaactccccgggaagacgacgaagaccagttacttctacaacgcaaatcgaactatagccgccctgctctgtccaggaagcaacgcgccggcgcgggatgctccactataaaacgcacccgctaatcacatcgacccgccacaccacctatcacagcaacacaagccaaccacaaagaattctcatttccggtaacttttctcaagcctttttggcgctctgagaatcatcacacggaagtcaagcctttgttgttgtcgtgattagtttagtttagtcaccgagatgagctcccgaatggccggagcgacgctgctgcgccacctgggcccccgcctgttcgccgccgagcctgtgtactccgggctcgccgcgagcgccaggggcgtcatgcccgccgccgcgaggattttccccgcgcggatggccagcaccagcagcgccggcgcggacgtcaaagaaggcgcagccgagaagctgccggagccggcggcaacggcggcggcggcggcgaccgacccgcagaacaagaaggccgtcgtgagctactggggcatccagccgccgaagctcgtgaaggaggacggcacggaatggaagtggctcagttttagggtaagcgctcatcaaccattgatgtgtgcgcttctttttttgtttttttgcacggtgaattctcgatttgatcgtgttcatgatgtgtgtttcttttgcattgtgacacagccatgggacacgtacacgtcggacacgtcgatcgacgtgacgaagcaccacgagccgaagggcctcccggacaagctggcgtactggacggtgaggtcgctggcggtgcccagggacctcttcttccagcggcggcacgcgagccacgcgctgctgctggagacggtggccggggtgcccgggatggtgggcggcatgctgctccacctgcgctccctccgccgcttcgagcagagcggcggctggatccgcgcgctgctggaggaggccgagaacgagcggatgcacctgatgaccttcctggaggtgatgcagccacggtggtgggagcgcgccctcgtgctcgccgcgcagggcgtcttcttcaacgcctacttcgtcggctacctcgtctcccccaagttcgcgcaccgcttcgtcggctacctcgaggaggaggccgtgagctcgtacaccgagtacctcaaggacctcgaggccggcaagatcgagaacacgccggcgccggccatcgccatcgactactggcgcctccccgccgacgccacgctcaaggacgtcgtcaccgtcatccgcgccgacgaggcgcaccaccgcgacctcaaccatttcgcatcggtacgcatatgccagcctgaaaacaaccaatctcgcctgcttaatttttgtgtgaacgggtttgagctaaccgatcgcgtttctcgtgttggtacatcacttgtgcaggacatccagcaacaggggatgaagctgaaggatacgcctgcgcctatcgggtatcactgatcatcattcatcaacgggcgatgcctgctcagttcatcaccatcactgctactacatgcgtattttacatcctatttgggataaactttgttctgtgtatatatgtaaataagctattgtcactccgttttatgcctgtacctatatgcatgctgagattatgcaaattgtgaataacaatatagtaagattttttttggagtagaagtatccacgtgttcagaattgcagcaggtaacacttgtcaagatgctctgctgctaacaaaggaagcatggccgttggctgacccgtgcacacaaccaagaccaaacatccagtccaaatgtgtaaaggcaaatggaatctcttttagacaagttcaaataccattcacactaaacttttttctttttctggactcttgatttcaatatgccctcagaaaaaaatcaccaaagaagcacaaacacaatggctcacctgcaattcaccatctgtcttagaaaaatcaactcctaacttgaaaaatcagtcaggattttttttatggaagtaagtgtagaaaaataatttctttaagccattttacattttttaattaaggaggtgccataagttgatataattttaaatgtcgattattttttattcatcccaatattccctctccacttcagtaataaaaagttggtgtgttacatttaatcccttttcttttagtattcattattattggcagacgaagactggaccggtatataccatatagataccatataggcacctcgctgtgaaatgttatcacctatcactgaaaaataaatttgagctcccgtgttaaacttagaacttaaaccgacgaggggatgtccccttagaatccacgcccacgctacgcttgatatttccttttgtgtccattatgcgcatacaagcactggattgttatttcccttgtgtgcgttatatattacgggcgtataaacacttactgagttgtcatgagcgataacaccattgacacgtttgcttattcagattgtggttcatgtggcaagcacgtacgtacaccgccatggaggcactttccaaaagcaacatcccagatgtttctagctgcgtatactagtcgcaattagcaatagagctgtttagtcacgttctggaattgtcagtggttagattaaggatctaataatagaagttgcctaatttgactgccatcctggatggttggagtctttcttggtccacaagacaagcaacagaatcaggattcgtttccagtttggctttggctttgttgtacgttccgttttccttgtactaccgggcacttgcaaattgcttgcgcattactatccttggtgtgaaatggttctaaacggaatattctacttgtagtacgtacacttgtactccacctgtacaagtgacgcatttttttacattgactttgtgcactttgttatattagcctcttttgatattaggcagtagtaccatcctaagaaaaaaaaaactcaatcaacatgtgatgcgtgtaccaacgacacatcacatactttaatttggcgataaaacacatgtgaaccttttattattagtcacaggcagtttgaaaaaaaaaatcacaagaattagtagtactgctacagtactactaaccgatcaacttggagaagaagaaaagatttcctcagagtcgggaaagcccgaggaaagcccatctcccccgtcactgacggtgtggccccaccaccggttcctctcctttcgctcttcctccctatataaaaccctcccaaaaaaaccctctccatttgcaaatcgcaaccatctcgtcaacaaaaaggcgcctctaagaattcctcccaaactttttggtgttgtcaagccgtgcgtttcggggtacatcaacggcggcgatgagctcccggatggccggatcggcgatcctccgtcacgtcggcggcgtccgcctcttcaccgcgtcggcgacctctccggcggcggcggcggcggcggcggcgaggccgttccttgcaggcggagaagccgtccccggggtgtgggggttgcggctgatgtccacgtcgtccgtggcgtcgacggaggcggcggccaaggcggaggccaagaaggcggacgcggagaaggaggtggtggtcaacagctactggggcatcgagcagtcgaagaagctggtgcgggaggacggcacggagtggaagtggtcttgctttagggtacttgcgcttcgctttgctcctgatcggtttcctgtttcgattctgtttgtcccgtagattgatcgccagatcgatgtatccatactccgagatagtaggctcggtccttaacttgtcgcgccgccgtgtgtaattttggtttgattttctccgcagccatgggagacctacaccgcggacacttcgatcgatctgacgaagcaccacgtgcccaagacgctgctcgacaagatcgcctactggaccgtcaagtcgctgcgcttccccactgatatcttcttccaggtataattgtgcttactcgatcaccatgcaccgcccgacggccgtttgattctccgggtgattagcgctgtgtgtttagttcaacgtttttttcgaagggaaaaactgagaggccgcgtgactcttggcgtgtcataagaggcaaagtagcattgcaaccagggcacttgagaattttggtttccttgcttccgggaagatgccatttgtatttaggacgcctgggttctacctgatccacctgtgtgattgattttattttcggaaagtattttctacacctaggtaacatggcacctatgtgtatgcatgcaatttaaaccgttataaaaaaatttacaaacattatacaaacatgtaagtctaaattcgatcaacatatgaagaaacaaaaataataaattttatatgcgctcttcgggtactattcactgtctgattttattatttttgtttctctagttatagatcaaatttagtcatgcatgtttgtgtatagacttatatcatcacaatcgatgttactaatttttttttcaattttttctataactatttgagtcgcatgcaaatgatgggtgtcatagcacttaggtgtagaaaatccctgtccttttattttccgctatactatctgataacaacggctaagaaaaggacacgcattgtgagaaggactcaactttgatttgttaatctcttgcccattaaatcaatcataggcttattactgtttgcactacaatgactggtgatccaattgtttcctagtgcaaattaatctatatatgattctaatgtcttatgactaatttggaagaacaattatattacatgatatccatttctagtagtatgtggaaatgatctctagtcggtcgctaattgctgtaactgtcaatggttaacactgcaaattgggttgggtgcagaggaggtatggctgccgcgcgatgatgctggagacggtggcggcggtgccggggatggtgggcggcatgctgctccacctccggtccctccggcgcttcgagcagagcggcggctggatccgcacgctgctggaagaggccgagaacgagcgcatgcacctgatgaccttcatggaggtggcgaacccaaagtggtacgagcgcgccctcgtcatcaccgtccagggcgtcttcttcaacgcctacttcctgggttacctcctctcccccaagttcgcgcaccgcgtcgtcggctacctcgaggaggaggccatccactcgtacaccgagttcctcaaggacctcgaggccggcaagatcgacaacgtccctgccccggccatcgccatcgactactggcgcctccccgccaacgccacgctcaaggacgtcgtcaccgtcgtgcgcgccgacgaggctcaccaccgcgacgtcaatcacttcgcatcggtacgcatgcatgatcagcgatcttgctctttgatctcgccttttggggatgtatgttgaattggttctgacgtgtgatctggtctggcttgtgatgtgcaggacatccattaccagggcatggagctgaagcagacccctgcgccgatcggatatcactgaggatgtttgtctactgccgaggatttgcatcactaataatcaaatcaaatgagtatacttcgtttttcagggaaagcaaatgagagctctttagctgtatcggatttggtaattgctactagtaactactaagtactgaaaaataaggagtctccttgtttgaagtacaaatctaggagattttttgaaccaactctatctgaattgggcctgtttttcgtacgccgcactgcttcatgtacatatattccatcccctatcttatgtgtggcaagtgtctttctaaattcttggatgtaatgacacctgaatttctttcgttgaactattggcagctgagttatatatactacataccattcttttgttaaagcaggtcagagcatagttttgtccatttgatgtctgtcacaattctggtggtaatgttccaacttcgagaaaattgcatatctaccatcccataagaatggcttcgctagaataccattatgaaaacgggcttcgctggaataccttcctcaaccagagtgtcttcgccaaaatgccatcccggacagaaatgcccctggctcttcttcttcctccatctcgcgcgtgaagagctcgccggcggccatggctagctccctccctgccatggctagctcgccacgggctccggcggagggctgcgcggtggcggcaggcgcggtcgac

SEQ ID NO: 15 - DNA, 6154 bp, Aspergillus nidulans
gaattcctggagcgaagtggcggatctggcgagtctcgaaaggctccttcagcacgctaaacccgccgccagcatcgtcatctcctcgctgtactagttatggaggtagtgcagttgttttgaatcttgacacagttgtatctctggaataatatagtagataagcggaatctttggaattgcgtcggaaaggccgggtgctttaagggtaacacctcttacggtctagcggggagatgccaggttcgagtcccaggtaatttttttgccatttttctccataattcatgaccggattagatcccacacctagttagaaatatttgtttttcagaagtcagctgctaaaactcgattgataattttgtgtttctgagcccattcaagtcagcaaatttgccgcccaaaaccttgcaattctcggtggaagtctctgcaatgtgatttagatcacatgtggcgaatgaagtatccaactgtcgaaagcaagagaatattaggaacgagatgttaatcccaaattcaaggttgaggcgggttatatgcagctcgcttgaagccccgcagtgggccctggtcaacctcagcttcaaccgctctagactccttcggatcctacacctaccgaccaggatgacatgttaacactcctctgcttgatcgtcggcgagaatatcacaaaataaacatggcaactcaaagggcatgtttggctgtcagatttattgctacaagcttatacttacgactgttgtcgctgacttttctcagattgcgttcaaagtccatggcaccgttcagggtacgtcttcagttctaactagtttcattcttagccagctatgtttaacaagtacctctacaggtgtgggtttccggtaggcacagtttctacaggtcaacattagacatttctgatcatgtcgttacaccagtgatttcaccatgaagcgtgctgcggaatacggtctcagcggctgggtgaagaacactgattgcggaagggtacgtttgtagtccctattaatgctaacaatcttgcaatgtcttgcatcgctcgtcagagtcactaaatgcatatgaaggtcgaaggcgaagcacaaggctcagaagagggtatccaaaaatttctcaaggatatcaataatggccctcgacttgcacatgtagtcaagctggagaagaagacactcgatccgaaagacggagagagtcattttgggcttaggaagacatcggcgactgtttttgattcactttgatggtcgactatacagtgtatactctggttcaagcagaataaagtccatccgctcggcctcccagtttccatgaaaagtagtctcagcgtagcctcttcatccggtcctctgcttacgtggtagccaatttctgaggggcaagcaggaacgcattgccccagaatctttcagcttcgggaatatttccagtgacgtcgatagggctacgcaaacgtcgttattgaatcccgatttattctcggcgtttgtctgagtcatggcccagttagtggtcccgtcccggcttcgtccgtgatcaagtgacagagagctggatccataataccgtaatctgataacacaggtcaatcttgcatctcagcaagtaggactcccaacagactgaaaaatcaatgggaagtaagtataatctgatttcgcttctgctaaagctaaatatttcaaacacacctgtatatgattgaactatatttgttttatgcccctactcaatgctaaatggagtatccagatttgtaacgctccgtaaggtagggcgccctaaatacatggcgttttgccaggtacgacaagtcaggctcataattagaaatactcaggcactcttcctttacagccaccatctagaatgggcgtcagatctgggtccttctttcggtgaatgaaaagttctgttcggcggcgagcgtgtgactcctgtgtgcgggtactcagccctgagagttccgattcctgcctcagattgcctctggttgaattttttttataggtctttgtatttagttggcatatataaatacaaaaaaagttgcagtcccagtcaactccttatgtatgtcaaagcaacatcttatcttgactaagtacagttcgtcagaattgacagcaccttttcaacaataaacaatatcagcattatgaattcgatgtcaacaacggggcctattagggtggccgctataccgaaacattacctgcaattcacagtgcggacctatacgaggagtatggcgagcgctgggttacgatacagcaatccgcccctcgtcaaaaaatgctacgaccaaccgacagggaaaaggttcatttcctccacgccacaatcacagatcaaagactatttccctcctcctgatgcaccgaaaatagtcgaggtgaaaacagcgtgggctcatcctgtgtaagttatccaatcttcaagagaggcgacagatgctgatcaagaacagctacagtgaagaagaaatgcgtgcagtcactgttggccatcgcgaggcaaagaattggtctgactgggtagcgcttgggagtgtccgcctgctccgatggggtatggacctggtcactggctataaacaccctgcgccgggccaagaagacatcaagaagtttcagatgacggaaaaggaatggttaagaagatttgtcttcttggagagcgtcgcgggtgtacctggaatggttggtggtatgctaaggcatttgaggagtctcagacgtatgaagcgagataacggatgggtatgtcgagatttctttcatctttacttttcgtggctcaactaataatcaatgcgcagatcgagacgctccttgaggaggcatacaatgagcggatgcacttgctcacattcctcaagatggccgaacctgggtggttcatgcgcttaatggtccttggagcgcaaggagtgtttttcaacggcttcttcctctcttatctcatctcgccacgtacctgtcatcgtttcgtcggctatctcgaggaggaagccgtgctcacttacactcgggccatcaaagacctcgaaagcggcaggctgccgcactgggaaaagctggaggctccagagatcgctgtcaagtactggaaaatgcctgagggtaaccggaccatgaaggatctgttgctgtatgtccgagcggacgaggccaaacatcgcgaggtcaaccacacgctagggaacctgaagcaagcggtcgacgtcaaccctttcgccgttgaatggaaggatccgtctaaaccgcatcctggcaaagggatcaaacacttaaagaccaccggctgggaacgagaggaggttgtttgagcatttatgcatttatacattgtggttttgtcattcgcgggagcaaatgggagaacatgcatatatgattaaagcggcgcaaattggttggacttgagcatagcatcgcggatatctcctctccttagtctttattggtaatagaatgttcttgaacctgttcagattaattgatatggaccggccatgcaattatgagcgcagatgaaacatacactaaactatattgggatagcaatatccgtgtggaaaatgggtctttgctgttactgagcgtagccaggggcttgccatcatgtctcagagccagatggctccatccaaagctccgtttatgttcgctaatgcatgtcaagatgtcatcaggtttggtgcagcctgcagacgcgatgcagtgttcatctgcctcttgtgggatgagggaccgacagattgcacggcatatcctgttctgggcgtcaggggcgccgggacgaaacagatcgaaaaagcaaacaatagtcgaatgccgaagaccaggttttctttttcttaaagcatcactctatccatactcagagtaagctatgatcacctggtaggcatggtcgttaggctggcgacgttaaaggtataggcgctactatcgaatagttgacccgcttcccctttagtgccacgaaagaagcccaagaacccccctttcgaacgtctcaagtttgttctcgcctgcagatcggtcacgatcgccattttccgctgttattctaccgaggcgtcccttttctatttacgttaaccgttatttctcctctggtgaccacctgtcctttcatcttttgtgaccgacccgtttatacattatcaagcgtttgctacattccacgcatgaaccgaaacacacagtgtcgcaatggacgatcccgccgcgtttgatgctacagcccctcctgtccgagactcctcaccctccccttccatctctccaacacccgcgatttcgtcctgtccatcaccagaccgtacattttctacagtttcttcgttgtcgacatcgtctggcacatccggtgatgccaggtcttcagtgtcagtttctacgcggagacgggggtatatccggcctcagggggcggaattcgccgcctccgcaaaaaaccgggaaagtgtaatgagcctggggagcatcgcacatttgcaatactatttcgctcgaacaggtctgctggatgggaagggtggtaatgcgcgagaatataagaagaaaaagaggaatacggaggacacaccacaattgctgctcacaccaaatgcccgcttcacggacgaaattacaatgagcccaacggaggatatgaatacggattcaggagaagatgcgtttgacgttgtcgaggacggagacgaagtgatgctgcccccgactgtcagtacctatagcattaagacgcaccatatcccgccgcctccggatctgctgcagctacggagggaccttttgaacgcgatatataaagcacagagagagattgatgcggtgtctcagcagcagcattcaccggagacgcttccaccacgaatcgatgtctcgccagatggcgatacggaaccaaatggagattcgcaacaccaggcgaatctggctgcagctcttcagagctgggatgaaatcaacggtatgcgcttattagatgttgtcacgcttgcgattcgcgcagcaaagatatactataccacccatgaatacccggaacgactggcttctataaaaagcgagcgtgagattaggcaagatctatttaatgtccttgaagtgttgaagcgatgggcaggacgcaattttgcaggtgggtttcgagaagaggaaaagaaggccgttctaggctggatgtccgatgtgcgcgatatgttgtcgcaagaggcgcagcttgaagacgcagaagtgaaagagcgggcatcgtgggtctggattgaaggcgattggactggtcgggaacggcagcgggaagaggaatttctggccagccttgacaggtccagactcacgcttgccagtatggacagagcctgaagatggttcactcccatctgcgatgcttgagagactacgtgacggccgcgatctgatccggatccacaacatagccgtccggaagtccaagcgaccttttggtgagatcaaaaccttccatgaagacgttgccaagccatatcgacaagcagataatcttcggtattggataaaggcggccgaactgcgctgggagacgaagctcgaactggacgtcatgggcgtcgtctatggcaccagcgacgaggcgtggcaccagtttgatcgagccattgcagcctggtgcaagtccgtccgagaagagctctcgcaagaccttcgagtattgagaagacgagcgactgcagccagtgttgacgggctgcttgtcaagatctcatgacggcttccgtcgataatccacctctttgagagcgcatgtcttggatgtctgggcttttgggaaagtggccattgggtccacgtagtttgattcaggatgacgtttgtttgcagtccgcgctgcctgtatttgataccccttacttgtcgatgacagttttggcgagggagtttggtgtttgtcctgcaccttgtacattgtgctgcattgcattagtcaatgattagccagattaaatatttaaagtatatccatgatttcctagtcgtatcccgaaccacaaattcggttagaaattcggcagtattacaacgagcagcgcgttcagggaggagttccttggaaatggaatgcctaggcctacggtacc

SEQ ID NO: 16 - DNA, 1652 bp, Zea mays
ccacgcgtccgcccacgcgtccgcccacgcgtccgcccacgcgtccgcccacgcgtccgctcctctctttccccggcacctgtcacgggaggaggatggacaagagcggcggcgaggcggcggcggcggcagcagcagcagacgacgtcgagcggcgggggggcgactacgagcaagacgagcacgagcggagagggacggtgtggacggcgacggcgcacattgtgacggcggtgatcggctccggcgtgctggcgctggcctggagcgtggcgcagctgggctgggtcgcggggcccctcgcgctcgccggcttcgcgtgcgtcacctactacacctccacgctgctcgccggcgcctaccgcgcgccgcaccccgtcaccggccacaggaaccgcacctacatggacgccgtcagatcgtacctcagtcccagggaggtgttcatgtgcggggtcgcgcagtacgtgaacctgtggggcaccatggtcgggtacaccatcacggcgaccataagcatggccgcgatcaggcaggccgactgcctccgccgggacggcgccggcgccggcgcgcgctgcgacgcgccagggaccgtgctgatgctggcgttcagcgtggtccaggtggtgctgtcccagttcccgggcctggagcacatcacctggctgtccgtcgtcgcggcggccatgtcgttcgcctactccttcgccggcctcggcctctccgtagggcactgggtgtctcgtggcggcggcggcctcgggggcagggttgcaggtgccgccgcggcatcctccaccaggaagctctggaacgtgcttctcgccctggggaacattgccttcgcctacactttcgctgaagtattgatcgagatccaggatacactcaagtcaccaccaccggagaacaggacgatgaagaaggcagcaatgtacgggatcggagccaccaccatcttctacatctccgtcggctgcgctgggtacgccgcgttcggttcgaatgctccgggcaacatcttggcggcaggcgggctgggtcccttgtggctcgtcgacattgccaacatgtgcctcatcctccacctgatcggtgcataccaggtatacgctcagcctgtcttcgcttcggttgagaggtgggccgcctcacggtggccagaagccaagttcatgagcagcgcatacaccgtgtccgtcagcatccccctcttgcagagaggatcggtcaccgtcgcgccgcacaagctcgtcctgaggaccgccatagtcggcgcgacgactgcggtggcgctggcgatacccttcttcaacgccgtgctggggctcctcggcgcgttcagcttctggccgctcacggtctacttccccatcagcatgcacatcgcccagggcaagatcgccagggggaccaagtggtggtgccttctgcaggctctgagcatggtttgcttggtgatctcggtggccgtgggtgtaggctctgtcactgacattgtcgatagcctcaaggcctcttctagccctttcaaaattgtaggctaacaggttactgtagtcatgtacaatgctctgagccgatcgtgcgttgaggtttaaaagaactgtggtgcgcgaaaaaaaaaaaaaaaaaaaaaaaaaaaaaag

SEQ ID NO: 17 - DNA, 2864 bp, Zea mays
ccacgcgtccgcccacgcgtccgcccacgcgtccggtctttggtcccggagggaaaaggacaaatcactcacacagagggaacaaaagggcacaggaatcgcgacagcgtgggaggcgtacggcgcaccgcccggccgccggatctgcgccggcgacgcgcccggacgtcggatctacgccgccgcaggaggagggaggcggcgctctggccgttccttgcccgcgagcgcccagatccgtcccgccgccggatatatatatcaatcaatgcccctgtgatatcgagcttcagttgatgcagtggtgaaaacatcttctcgaaaaactgctggctgcaagttgcaaaagtttgtctttcccttgttgtgttgttgcttccttctctggtggagtacacgggagaagtttgcagatacaggcagctcctttcaaatctcctatgtccagggatttggactgtcctgttcagacacagatggctgtggcagtcctggaccggagctttagcagcgaatatcctggaggtagcagaattgaggggaggcaactgagctggaagagagtatttgtccaaactgacaatggttctgtccttggcatcgagctggagagaggagaaaacgtacaaactgtgaaaaagaagctccagatagccctcaatgtgcccactgatgagagctcattgacctttggtgacctagttctgaataatgatcttagcagcattcgcaatgactcacccttgtttctcaaaaggaatcagattcaccggagcaattccacaccttgcctctcacctacaggtaagaatgttttgcaaagagaccggagtggacccattgaaatccttggctgttcaagtccttcatctcggatgaagcagcttgctaaggatgtcattaaagccataatgaatgatgttgacccagtcgctgttaacagtgggatgggtggtgcctactacttcaagaacatttggggagagcgtgtggcaattgtcaagccaactgatgaggaaccatttgctccaaataatccaaaaggttttgtggggaaagctctgggacagccgggcctgaaaaggtctgtacgggttggggagacaggcttcagagaggttgctgcttacctcctcgactatggtcactttgcaaatgttcctcccaccatgctggtcaagataacacacacaatcttcaatgtgaacgactgtgttggctgcaaaagtaaagtgttctgcaacaaatcagaggctgtgagcaagattgcatcgctgcaggagttcattcctcatgatttcgatgccagtgaccatgggacctcaagcttccctgtatctgcagtgcataggattggcatccttgacattagaatcttcaacactgacaggcatgctggaaatcttctggtcaagaagcttggtcctggcgccgacaattttggagagcagacagaactcattcctattgaccatggtctctgtcttccagaatgcctagaagacccatacttcgagtggatccactggccgcaggcatctgttcctttctccgaggaggagcttgagtacattgcaagacttgatcctgtaaaagatgcagaaatgctacgcatggagctacccatgatacgagacgcatgtctcagggtgctggtgctatcaacagtatttctcaaggaagctgcagcgtctggcctctgcctctcggagattggagacatgatgagcaggcagttcactgcgaaggaggaggaaccgagtcagcttgagctgctctgcatggaggcaaggaagtgggttgaggaaagagagtcctttcttcccaacgaagccggagttgaagatgacgatgatgacttcacccagttccttatcgacggcgaggatgattatccggatgccttggaaccatcagctttctgcaagtttggtagcatgaaggcaagttctaggaatccactgtccaagctagatgagcgtgacgaggaagacggagacgggaccgaggaggacgacgacgacgacatcttgaccggtgcattgcctcagaggatctcgtctatctccaagctgtcgtcatccatgaaggggcttggcttcattgggaaacccaagccctaccgcacgtgccttcggaagggtaaagcgacaggcagaactaagtacaccggcaaagccagcgagcatcagtccggcagcaggagcgccaacgagctgctcccgcccagcgccagtttcgtgaagctgtcggacatgagccctaaacagtggagcgcattcctcgacaagttccaggagctgctcccaggtgccctgagcgcccggaagcacgctgccggtgtcgtcggccagcgctcgatgccgaggctgggcacgtcttgccagttttgagagtagcagaagagaagccaccgaacccaaggtatgacgaacgcgcttctgttcgagctctggtgtgcagcagccaagcaggtacggagtattatatatgcttgtagtaggtgtctggagccggtggtggtagagagggtccgagaataagatcatccatggcatgtgagatgaggttgcgggagaaggaagggggttgtgtgtgtttgtgcatagtgtttcgcataagaggtccgttgttctttttttcttcttctctgtatatagttaagtactcctactgctactgcatcgcagcaccgggcacgggctgggatctcggccgttgttatctgaacgatggtggtgagtgtgctggcgtcgcctgctctctgctctgtctttgccgctgtaccattttggaggcgcttaccatattatgaactttgaactatgatatgatgttcgctaaaaaaaaaaaaaaaaaaaaag

SEQ ID NO: 18 - DNA, 1602 bp, Zea mays
ccacgcgtccgctcctcctaactacgcctgcctgtttcctcccccgcaggattgatgagctcggcgagggtgagaggccccttcacgccgccgcagtggatcgagctggagcaccaggccctgatctacaagtacctgtccgcgaacagccccgtacctcacagcctcctcgtccccatcaggaggagcgggagcctcgcatcgtctccctacccgcctccctacttcggcacgagcacattcgggtggggctccttccagctgggctactccggcaatgcggatctggagcctgggcggtgccgccggacggacggcaagaagtggcggtgctccagggacgcggtcgccgaccagaagtactgcgagcgacacatgaaccggggacgccatcgttcaagaaagcatgtggaagaccagcctggccatgccgcgaaagccatgtccgcggtggccgtggcggctgctgctgctgctgctacccagcatgctgctgctctggccggcgccggagctactgctgctgctggcctcgctgtcaatcggcaccggcagccggggaagagctatgccacgggtgcgactgatccatgctctctgcaatatagcagggaactggcgaacaaactgtcgaacgagagcgaaaacatgcaggactctgacaatgtctcgatgctgacttccatgaacacaggaaacactgcaggcagcgtgtttccgttctcgaaacagaacactgctcttttcgaagtgagcagctcaaggccagagtttggtcttgttccatcggattcactgacgagttcacctcatagttccttgaagagtgtcaaaaatctgctcagctcacggagtctgagtgagcaccagagctccgcctccctgcaacactttgtggactggcccaggacgccacctgcccagggaggtctttcatggcccgaggcagaggacatgcccagagctcagaggtcccagctctcagtatccgctccaatggcatcctccgagctatcatcggcctccacatctcccatccacgaccacgagaagctgattctgtcacctctcaagctgggccgcgagtataccccatctggcgtcgtcagcgctgcagcgaacagatacgaggttagccagctagaagcgacctgggcgacgatgttccgcgactcttcgacgggcggcccgttgggggaggttctggccaagaacaacagcaacgcggaagcaagaggttgcccgtcggcggcgccacctctaaccgactactactgctgggattcaggccacggcatgcagtcgtcccccgtgggagttctgcagaggacgaccgccttcggatcggtctccagcagcacgggcagcagccctagggtcgagaaccacggcgcctgctgcgatggtaccagcaacctgatggatgatctcggttcagttgtagtgagacatcccagcatccgcctcttgtgagcccgctgggttctggccatggaaaaagcgtgagggggagcatttaccacgtagtttgtcatttgagactgatctcctgtttctgtcacctgagttcttcttttgttgcccttaaaaaaaaaaaaaaag

SEQ ID NO: 19 - DNA, 1891 bp, Oryza sativa
ttacaaaaccccagccaccgagagctctcccgctccactcgccgcacaccaccaccctcacccctccccccatccgcgtgatctcccgagcagctagagcgcgcgcccgcggcgcctgtactgcgagaccgcttcgctcgcttccggtcggtgaagaggcggtcggtcgcagctgaagtagttgttgcagagatgatgatgatgagcggtcgcccgagcggcggcgccggcggaggtcggtacccgttcacggcgtcgcagtggcaggagctggagcaccaggcgctcatctacaagtacatggcgtccgggactcccatcccctccgacctcatcctccccctccgccgcagcttcctcctcgactccgccctcgccacctccccttccctcgccttccctccccaaccttcactggggtggggttgctttggcatggggtttgggcggaaggcggaggacccggagccagggcgatgccggcgtacggacggcaagaagtggcggtgctccaaggaggcgtacccggactccaagtactgcgagaagcacatgcaccgtggcaagaaccgttcaagaaagcctgtggaaatgtccttggccacgccgccgccgccgtcctcctccgccacctccgccgcgtcgaactcctccgccggcgtcgcccccaccaccaccaccacctcctccccggcgccctcctacagccgcccggcgccgcacgacgcggcgccgtaccaggcgctctacggcgggccctacgccgcggccaccgcgcgcacccccgccgccgcggcgtaccacgcgcaggtgagcccgttccacctccacatcgacaccacccacccgcacccgccgccgtcctactactccatggaccacaaggagtacgcgtacgggcacgccaccaaggaggtgcacggcgagcacgccttcttctccgatggcaccgagagggagcaccaccacgccgccgccgggcacggccagtggcagttcaagcagctcggcatggagcccaagcagagcaccacgcctctcttcccgggcgccggctacggccacaccgcggcgtcgccgtacgccattgatctttcaaaagaggacgacgatgagaaagagaggcggcaacagcagcagcagcagcagcagcactgcttcctcctgggcgccgacctccgtctggagaagccggcgggccacgaccacgcggcggcggcgcagaaacctctccgccacttcttcgacgagtggccgcatgagaagaacagcaagggctcctggatggggctcgaaggcgagacgcagctgtccatgtccatccccatggccgccaacgacctcccgatcaccaccacctcccgctaccacaatgatgaataatctcttgaagaagccaagaagtgatcaacacgcggaagaaatcaacagcttctttcacggcgtgcgagctgcatgctcatgctccaggatcgatcgatcgatcattgcatctccaaactaatcacgcttcgatctttcaggacttcatcaatgacaggccgaaacctcctacgagttctctgatgatattcttattttttttcccacttcttttcgttgagctttttgtaatgttgcttcgagtgttactcctacattttctccgaaatggcctcagaatgatgcggtcgggctgattaattaggttagactcttcctgaaccaactaggaatagattttctgcctggttcctgtcagtccttgtaatatctgcagcagcttgtgagccaagcgtgttcgcttttgtgaacgccctttttcttctttccgattcctctgcctgtgatagtactcgctccgcgaaaaaaaaaaagagcaaaccgtggattcttgtgtcaaaaaaaaaaa

SEQ ID NO: 20 - DNA, 1900 bp, Glycine max
attcggctcgagcttctttgtctctcatctgtctgaggatttttccatcttagttcctggaggcaccaggaacctgacccaataaacaaacccttttttttctttctaatttttctaaagtttcattttttaatccaatggcaacttgggtattatcagaatgtagcttgaagcctcttgctccagtaatccctagacctagaactggggcagttttgtccagcacctcaaaggttggatttttggagacaaacaaggtattggaaggttctaagtttcaacctttgaggtgtaaccttagggagaggaattgggggttaaaagtgagtgtccctttgaggattgcttccattgaagaggaggagcaaaagagtgtcgatgtaatcaatgggagtaatggggttgagcatgagaagcttccagaatttgaccctggtgctccaccaccattcaacttagctgatattagagcagcaattccaaagcattgctgggtgaaggaccctttgaagtccatgagctatgtggtgagggatgtcattgctgtctttggtttggcttctgctgctgcttatctcaataattggttggtttggcctctctattgggctgctcaaggcactatgttctgggctctgtttgttcttggtcatgattgtggtcatgggagcttttcaaacaaccccaaattgaacagtgttgttgggcatctgctgcattcttcaattctagtgccatatcatggatggagaatcagtcataggactcatcaccaacatcatggtcatgttgaaaatgatgaatcatggcatccgttgcctgaaaaattgttcagaagcttggacactgtaacacgtatgttaagattcacagcaccttttccacttcttgcatatcccgtgtacctttggggtaggagtcctggcaagactggttctcactttgaccctagcagtgacttgttcgttcccaatgaaagaaaagatgttattacttccacagcttgttgggctgctatgttgggattgcttgttggattggggtttgtaatgggtccaattcaacttcttaagctttatggtgttccctatgttatattcgtcatgtggttggatttggtgacttatttgcaccatcatggccatgaagacaaattgccttggtatcgtggaaaggaatggagctaccttaggggtggtctaactactcttgatcgtgattatggattgatcaataacattcaccatgacattggaactcatgtcattcatcacctatttcctcaaattccacactatcacttagttgaggctactgaggcagctaagccagtgtttggaaaatattatagagaaccaaagaaatcatctcctcttccttttcaccttattggggaattaataaagagcttcaagactgaccattttgttagtgacaagggggatgttgtgtactatcaaactgactctgagattaatggctcgtccaaatcagagtgaagattaaaattcttttttatatagacaagagagacttatacacaattcttattgctctaaagattgtcttgagtttcttacttagagttgaatccgtcattaataaagggatagatggacggatcatataatttcaattgtaactacatgatataatgtttaggttatatgtagtttatcattcttgaacagtgaatcctctgtataaattgattatattgaagtggtaccttgagtcatgatcaaattgttaatgtatttgatcagaactgaaagacctcgattaaatagtaatttaaaataaattgttttatagaatgttgcggtgttttcttaccagttaccatcccctatttaatttatatactccctattttattcttcaaaaaaaaaaaaaaagg

SEQ ID NO: 21 - DNA, 1662 bp, Arabidopsis thaliana
gcaaagtagaaaacacaagtttctctcacacacattatctctttctctattaccaccactcattcataacagaaacccaccaaaaaataaaaagagagacttttcactctggggagagagctcaagttctaatggcgaacttggtcttatcagaatgtggtatacgacctctccccagaatctacacaacacccagatccaatttcctctccaacaacaacaaattcagaccatcactttcttcttcttcttacaaaacatcatcatctcctctgtcttttggtctgaattcacgagatgggttcacgaggaattgggcgttgaatgtgagcacaccattaacgacaccaatatttgaggagtctccattggaggaagataataaacagagattcgatccaggtgcgcctcctccgttcaatttagctgatattagagcagctatacctaagcattgttgggttaagaatccatggaagtctttgagttatgtcgtcagagacgtcgctatcgtctttgcattggctgctggagctgcttacctcaacaattggattgtttggcctctctattggctcgctcaaggaaccatgttttgggctctctttgttcttggtcatgactgtggacatggtagtttctcaaatgatccgaagttgaacagtgtggtcggtcatcttcttcattcctcaattctggtcccataccatggctggagaattagtcacagaactcaccaccagaaccatggacatgttgagaatgacgaatcttggcatcctatgtctgagaaaatctacaatactttggacaagccgactagattctttagatttacactgcctctcgtgatgcttgcataccctttctacttgtgggctcgaagtccggggaaaaagggttctcattaccatccagacagtgacttgttcctccctaaagagagaaaggatgtcctcacttctactgcttgttggactgcaatggctgctctgcttgtttgtctcaacttcacaatcggtccaattcaaatgctcaaactttatggaattccttactggataaatgtaatgtggttggactttgtgacttacctgcatcaccatggtcatgaagataagcttccttggtaccgtggcaaggagtggagttacctgagaggaggacttacaacattggatcgtgactacggattgatcaataacatccatcatgatattggaactcatgtgatacatcatcttttcccgcagatcccacattatcatctagtagaagcaacagaagcagctaaaccagtattagggaagtattacagggagcctgataagtctggaccgttgccattacatttactggaaattctagcgaaaagtataaaagaagatcattacgtgagcgacgaaggagaagttgtatactataaagcagatccaaatctctatggagaggtcaaagtaagagcagattgaaatgaagcaggcttgagattgaagttttttctatttcagaccagctgattttttgcttactgtatcaatttattgtgtcacccaccagagagttagtatctctgaatacgatcgatcagatggaaacaacaaatttgtttgcgatactgaagctatatataccatacattgcattatcttagataaaaaa

SEQ ID NO: 22 - DNA, 1525 bp, Arabidopsis thaliana
agagagtgcaaatagaacgacagagactttttcctcttttcttcttgggaagaggctccaatggcgagctcggttttatcagaatgtggttttagacctctccccagattctaccctaaacacacaacctcttttgcctctaaccctaaacccactttcaaattcaatccaccacttaaacctccttcttctcttctcaattcccgatatggattctactctaaaaccaggaactgggcattgaatgtggcaacacctttaacaactcttcagtctccatccgaggaagacacggagagattcgacccaggtgcgcctcctcccttcaatttggcggatataagagcagccatacctaagcattgttgggttaagaatccatggatgtctatgagttatgttgtcagagatgttgctatcgtctttggattggctgctgttgctgcttacttcaacaattggcttctctggcctctctactggttcgctcaaggaaccatgttctgggctctctttgtccttggccatgactgcggacatggtagcttctcgaatgatccgaggctgaacagtgtggctggtcatcttcttcattcctcaattctggtcccttaccatggctggaggattagccacagaactcaccaccagaaccatggtcatgtcgagaatgacgaatcatggcatcctttgcctgaaagcatctacaagaatttggaaaagacgactcaaatgtttaggtttacactgccttttccaatgctcgcataccctttctacttgtggaacagaagtccagggaaacaaggttctcattatcatccggacagtgacttgtttcttccaaaagagaagaaagatgttctgacatcaactgcctgttggactgcaatggctgctttgcttgtttgtctcaactttgtcatgggtccaatccagatgctcaaactatatggcatcccttattggatatttgtaatgtggttggacttcgtcacttacttgcaccaccatggacatgaagacaagctcccttggtatcgtggaaaggaatggagttacctgagaggagggctcacaacattagatcgtgactacggatggatcaataacatccaccacgatattggaactcatgtgatacatcatcttttcccgcagatcccacattatcatctagtagaagcaacagaagcagctaaaccagtactaggaaagtactacagagaaccgaaaaactctggacctctgccacttcacttactgggaagcctcataaagagtatgaaacaagaccatttcgtaagcgatacaggagatgtcgtgtactatgaggcagatccaaaactcaatggacaaagaacatgaggacatactgcagtgaaccaggcagacaagttacataaattcatcttggcccattcattatgttctttttgttttggtgtaaagccttttcgagattaaaaaagcattaatttgtagaaacctgtggtaaaactctcgatcaaatgaaataagatat

SEQ ID NO: 23 - DNA, 3487 bp, Oryza sativa
atgtcttcttcaagacctactcaatgttccagttcatccagcaggacccgccaaagctcccgggcaaggatattagcacaaacaactcttgatgctgaactcaatgctgaatatgaagaatatggcgactcctttgattactccaaattggttgaagcacagagaactactggacctgagcagcaagctcgttctgagaaggtcatagcttacttgcatcacattcagagagcaaagctaatccaaccatttggttgcttgttggcccttgatgagaagaccttcaatgttatagcgctcagcgagaatgcaccagagatgcttacaactgtcagccatgcagtgccaagtgttgatgatcccccaaagctacgcattggcaccaatgtatggtctcttttcactgacccaggtgccacagcactgcagaaggcactgggatttgctgatgtttccttgctgaaccctatcctagttcaatgcaagacctcaggcaagcctttctatgccattgttcatcgggcaactggttgtttggtggtagactttgagcctgtgaaacctacagaatttccagcaactgccgctggggctttgcaatcttacaaacttgctgccaaggcaatctctaagatccagtcactgccaggtggaagcatggaggtgctatgcaatacggtggtcaaggaactctttgacctcacaggatatgatagagttatggcttataagttccatgaagatgaccatggtgaagtctttgctgagatcacaaagcctggtcttgaaccttatcttggcctgcattatccagctactgatatccctcaggcagccaggtttcttttcatgaagaacaaagtccggatgatttgtgattgccgtgcaagatctatcaagattatcgaagatgagtcgctccacttggatattagcttatgtggttcaacactgagggcaccacacagttgtcatcttcagtatatggagaacatgaactcgattgcatcccttgtcatggctgttgtggttaatgagaatgaggatgatgatgaagttggggctgatcaacctgcacaacagcagaagaggaagaaactatggggactccttgtttgccaccatgagagccccagatatgttcctttcccattgcggtatgcctgtgagttcttagcacaagtgtttgctgtccatgttaacaaggagtttgaattagagaggcaagtacgcgagaaaagcatattgaggatgcaaacaatgctctctgacatgcttctcagggaatcctctcctctgagtatagtatcagggactcccaacatcatggaccttgtgaaatgtgatggtgctgctcttttgtatgggggaaaagtgtggcggctacagaatgctccaactgagtctcagatacgtgatattgccttctggctgtcagatgtccacagggattccactggcctgagtactgatagcctacatgatgctggatatccaggagctgctgctcttggtgatatgatttgtggaatggcagtagctaaaataaattccaaggatatcctgttctggttcaggtcacatacagctgctgaaatcagatggggaggtgcaaaacatgatccatcagacaaggatgacagcagaagaatgcaccctaggctgtccttcaaggcattccttgaggttgtcaagatgaagagcttgccttggaatgactatgagatggatgctattcactcattacaacttatacttagagggacactgaatgatgacatcaagccaacaagggccgctagtttagataatcaggttggtgatctcaagcttgatgggcttgctgaattgcaggcagttacaagtgaaatggttcgtctcatggaaacagcaactgtcccaatcttggctgtagatagcaatggattggtcaatggatggaatcagaaggttgctgagttgacagggttgagagtagatgaggctattggaagacacatacttaccgttgtagaggaatcttctgtaccagttgtccagaggatgctgtatttagctttgcaaggtttgtcactttgctttcagtcgatttttttgtggtccccagcttagtctgtgaatgtctcctttttttctatgacaacctagtgcctccttgttttcaggcaaagaagagaaggaagtgaaatttgaggtgaaaactcatggctccaagagagatgatggccctgttatcttggttgtgaatgcctgtgccagccgggaccttcacgaccatgttgttggtgtgtgctttgttgcacaagatatgactgttcataagttggtcatggacaaatttactcgggttgagggagactacaaagcaattattcacaatccaagcccgcttattcctcccatatttggtgctgacgaatttggatggtgctctgagtggaatgctgccatgacgaaattgaccgggtggcatagagatgaggtgatcaataagatgcttcttggtgaggtgtttgatagcaccaacgcctcctgtcttgtgaagaataaagatgcatttgtaagtctctgcattcttatcaacagtgcattagctggtgatgaaacagaaaaggctccattcagcttcttcgaccggaacgggaagtatatcgagtgccttctttctgttaacagaaaagtaaatgcagatggtgtcatcactggagtattttgtttcattcaagttcctagtcatgagctgcaacatgcactacatgtgcagcaagcctcacagcagaatgcactaacaaagttgaaagcttactcctacatgagacatgcaatcaacaaccctctctcaggtatgctttactctaggaaagcactgaagaacacaggtctgaatgaagagcagatgaaggaggtcaatgttgcagatagttgtcaccgccagctgaataaaatactttctgacttggatcaagatagcgtcatgaacaagtctagttgcttggatttggagatggttgagtttgtattgcaagatgtgtttgtggctgctgtaagtcaagtactcataacttgccagggaaaagggattagagtctcttgcaacctaccggagagatatatgaagcaaacagtctacggggatggtgttcgactacagcagattctctctgacttcctattcgtctcagtgaagttctctcctgttgggggttctgttgagatctcttgtagcctgaccaagaacagcattggggaaaaccttcatctcatagacctagaacttaggatcaagcaccagggcaaaggagtcccagcagatctgctgtcacaaatgtacgaggatgacaataaggagcagtcggatgaaggcatgagtcttgcggtttctagaaacctgctgaggctcatgaatggcgatgtccgacatatgagggaagctggcatgtcaaccttcatcctcagcgtcgaacttgcttctgctccagcaaaataa

SEQ ID NO: 24 - DNA, 3905 bp, Sorghum bicolor
cgcatccttccgcgccgggcatgggcaccgcgtcggcgcgcgcccctacccagtcgtcgacttgatgctgctcactcgcactcgtcgcagcgccccacgccccgctatttatgcgtacttgcttgccgggagagtcgctggaggtgggcgtcctcctcccgctccagagctcgctgcttcgctccacccacccttaagcaggagtgatatctggtggtttttcaaaagaagacaaaaatgtcttcctcgaggcctgcccactcttccagttcatccagtaggactcgccagagctcccaggcaaggatattagcacaaacaacccttgatgctgaactcaatgcagagtatgaagaatctggtgattcctttgattactccaagttggttgaagcacagcggagcactccatctgagcagcaagggcgatcaggaaaggtcatagcctacttgcagcatattcaaagaggaaagctaatccaaccatttggttgcttgttggcccttgacgagaagagcttcagggtcattgcattcagtgagaatgcacctgaaatgctcacaacggtcagccatgctgtgccaaacgttgatgatcccccaaagctaggaattggtaccaatgtgcgctcccttttcactgaccctggtgctacagcactgcagaaggcactaggatttgctgatgtttctttgctgaatcctatcctagttcaatgcaagacctcaggcaagccattctatgccattgttcatagggcaactggttgtctggtggttgattttgagcctgtgaagcctacagaatttcctgccactgctgctggggctttgcagtcttacaagcttgctgccaaggcaatctccaagatccagtcactgccaggtggaagcatggaggccttatgcaataccgtggttaaggaagtctttgagcttacaggttatgacagggttatggcttacaagttccatgaagatgagcatggggaggtctttgctgagatcaccaaacctggtattgaaccttatctaggcctgcactatccagccactgatatccctcaagctgccaggtttctcttcatgaagaacaaagtcagaatgatctgtgattgccgtgcaaaatctgtgaagattattgaagatgaggcactctccattgatattagcttgtgtggttcaactcttagagcaccacatagctgtcaccttcagtatatggagaacatgaactcgattgcatcccttgtcatggctgttgtggttaatgaaaatgaagaggatgatgaacctgggcccgaacaaccaccacaacagcagaagaagaagagactgtggggtctcattgtttgccaccatgaaagccccagatatgtcccgtttccactgcggtatgcctgtgaattcttggcccaagtgtttgctgtccatgtaaacaaggagtttgaattggagaagcagatacgagagaaaagcattctgcgaatgcaaacaatgctctctgacatgctgttcaaggaagcatctcccttgagtatcgtatctgggagtccaaatatcatggacctagttaagtgtgatggtgctgctcttttgtatggggacaaagtctggcggcttcaaacggctccaaccgagtctcagatacgtgatattgccttctggctttcagaagttcatggggattccactggcttgagtactgatagcctccaggatgctggatatccaggagctgcttcccttggtgacatgatttgtggaatggcagtggctaagatcacgtccaaggacattcttttctggttcaggtcacatacagctgctgaaatcaaatggggaggtgcaaagcatgatccatctgataaggatgacaacagaaggatgcaccctaggttgtcctttaaggctttccttgaggttgtcaagatgaagagtttgccatggagcgactacgagatggatgctattcactcattgcaacttattcttagaggtacactgaatgatgccttgaagccggtccaggcatctggtttagataaccagattggtgatctcaaacttgatgggcttgctgaattgcaagcagtgacaagtgaaatggttcgcctcatggaaacagcaactgttccgatcttggcagtagatggcaatggattggtcaatggatggaatcaaaaggtagcagaattgtcagggttgagagttgatgaagctataggtagacacatacttacacttgtggaggattcttctgtatcaattgttcagaggatgctatatttagctctgcagggtttgtcactttgctttcagtcgatttttttgtggtccccagcttagtctgtgaatgtctcctttttttctatgacaacctagtgcctccttgttttcaggcaaagaagagaaggaagttcgatttgagttgaaaacacatggctccaagagggatgatggccctgttatcttggttgtaaatgcttgtgccagtcgtgaccttcatgaccatgttgttggggtgtgctttgtagcccaggatatgactgttcataagttggtcatggacaaatttactcgggttgagggggactacaaggcaatcattcacaacccaaacccgctcattcctcctatatttggtgctgaccaatttggatggtgctctgagtggaatgtagccatgaccaagcttactgggtggcacagagatgaagtgatagataagatgctccttggtgaggtttttgacagtagcaatgcttcctgccttttgaagagcaaagatgattttgtacgtctttgcattatcatcaacagtgcattagccggtgaagaggcagaaaatgctccattcggtttgtttgaccgcaatgggaaatatattgaatgccttctgtcagtgaacagaaaagtaaatgcagatggtgttgtcactggagtgttctgtttcattcatgttcctagtgatgacctgcagcatgcgctacatgtgcagcaagcctctgagcagacagcacaaagaaggttgaaggctttctcgtacatgcgacatgccatcaacaaacctctctcaggtatgctttattctagggaaacactcaagagcacaggtctgaatgaagagcagatgaggcaggtccatgttgcagatagttgtcatcgccagctaaacaagatacttgccgacttagatcaagataacattactgacaagtcaagttgcttggatttggatatggctgaatttgtgttggaagatgtggtggtgtctgctgtaagtcaagtactgataggttgccagggtaaaggtatcagagttgcttgcaacctgccagagagattcatgaagcaaaaagtttacggggatggtatccgactccaacagatcctctccgacttcttatttgtttcggtgaagttctctcctgttggtggctctgttgatatctcttccaaactgactaagaacagcattggggaaaaccttcatctcatagacttcgaacttaggatcaagcaccaaggagcaggagtcccagcagaaatattgtcacaaatgtatgaggaggacaataaagagccgtcagaggagggtttgagccttcttgtttctagaaaccttctgaggctcatgaatggtaacattcgccacatcagggaagctggcatgtcaaccttcatcctcactgctgaacttgctgctgctccttcagcagttggacaatgaagccatcacatgctctctcagagttcattctgaaagccacggtggtttgcggagaatgggaaatgctgcagcgcgttgcatcaccgaatgcataagaaataagattgacttgtatggttatttgttagggggggaaagttgtactggcatagacgcatagtaagggcggccg

SEQ ID NO: 25 - DNA, 4195 bp, Oryza sativa
gtgaggtgaggcgaggaaaaaatcggacgcacccgcctaatccggaccaatccacgcatcggcgccatggcctcgggtagccgcgccacgcccacgcgctccccctcctccgcgcggcccgcggcgccgcggcaccagcaccaccactcgcagtcctcgggcgggagcacgtcccgcgcgggagggggtggcgggggcgggggagggggagggggcggcgcggccgccgcggagtcggtgtccaaggccgtggcgcagtacaccctggacgcgcgcctccacgccgtgttcgagcagtcgggcgcgtcgggccgcagcttcgactacacgcagtcgctgcgtgcgtcccccaccccgtcctccgagcagcagatcgccgcctacctctcccgcatccagcgcggcgggcacatacagcccttcggctgcacgctcgccgtcgccgacgactcctccttccgcctcctcgcctactccgagaacaccgccgacctgctcgacctgtcgccccaccactccgtcccctcgctcgactcctccgcggtgcctccccccgtctcgctcggcgcagacgcgcgcctccttttcgctccctcgtccgccgtcctcctcgagcgcgccttcgccgcgcgcgagatctcgctgctcaacccgctctggatccactccagggtctcctctaaccctttctacgccatcctccaccgcatcgatgtcggcgtcgtcatcgacctcgagcccgcccgcaccgaggatcctgcactctccatcgctggcgcagtccagtctcagaagctcgtggtccgtgccatctcccgcctccaggcccttcccggcggtgacgtcaagctcctttgcgacaccgttgttgagcatgttagagagctcacaggttatgaccgcgttatggtgtacaggttccatgaggatgagcatggagaagtcgttgccgagagccggcgcagtaaccttgagccctacatcgggttgcattatcctgctacagatatcccacaggcatcacgcttcctgttccggcagaaccgtgtgcggatgattgctgattgccatgctgcgccggtgagggtcatccaggatcctgcactaacacagccgctgtgcttggttgggtccacgctgcgttcgccgcatggttgccatggccagtatatggcgaacatgggttccattgcatctcttgttatggcagtgatcattagtagtggtggggatgatgatcataacattgcacggggcagcatcccgtcggcgatgaagttgtgggggttggtagtatgccaccacacatctccacggtgcatccctttcccactacggtatgcatgcgagttcctcatgcaagcctttgggttgcagctcaacatggagttgcagcttgcacaccaactgtcagagaaacacattctgcggaccggaacactgctgtgtgatatgctactccgggattcaccaactggcattgtcacacaaagccccagcatcatggaccttgtgaagtgtgatggtgctgctctgtattaccatgggaagtactaccctcttggtgtcactcccacagaagttcagattaaggacatcatcgagtggttgactatgtgccatggagactccacagggctcagcacagatagccttgctgatgcaggctactctggtgctgctgacctaggagatgcagtgagcggaatggcggtagcatatatcacgccaagtgattatttgttttggttccggtcacacacagctaaggagataaagtggggtggtgcaaagcatcatccagaggataaggatgatggacaacgaatgcatccacgatcatcgttcaaggcatttcttgaagttgtgaagagtaggagcttaccatgggagaatgcagagatggatgcaatacattccttgcagctcatattgcgggactctttcagagattctgcagagggcacaagtaactcaaaagccatagtgaatggccaggttcagcttggggagctagaattacggggaatagatgagcttagctcggtagcgagggagatggttcggttgatcgagacagcaacagtacccatctttgcagtagatactgatggatgtataaatggttggaatgcaaaggttgctgagctgacaggcctctctgttgaggaagcaatgggcaaatcattggtaaatgatctcatcttcaaggaatctgaggaaacagtaaacaagctactctcacgagctttaagaggtttgtcactttgctttcagtcgatttttttgtggtccccagcttagtctgtgaatgtctcctttttttctatgacaacctagtgcctccttgttttcaggtgatgaagacaaaaatgtagagataaagttgaagacattcgggccagaacaatctaaaggaccaatattcgttattgtgaatgcttgttctacgagggattacactaaaaatattgttggtgtttgttttgttggccaagatgtcacaggacaaaaggtggtcatggataaatttatcaacatacaaggggattacaaggctatcgtacacaaccctaatcctctcatacccccaatatttgcttcagatgagaatacttgttgttcggagtggaacacagcaatggaaaaactcacaggatggtcaagaggggaagttgttggtaagcttctggtcggtgaggtctttggtaattgttgtcgactcaagggcccagatgcattaacgaaattcatgattgtcctacacaacgctataggaggacaggattgtgaaaagttccccttttcattttttgacaagaatgggaaatacgtgcaggccttattgactgcaaacacgaggagcagaatggatggtgaggccataggagccttctgtttcttgcagattgcaagtcctgaattacagcaagcctttgagattcagagacaccatgaaaagaagtgttatgcaaggatgaaggaattggcttacatttaccaggaaataaagaatcctctcaacggtatccgatttacaaactcgttattggagatgactgatctaaaggatgaccagaggcagtttcttgaaaccagcactgcttgtgagaaacagatgtccaaaattgttaaggatgctagcctccaaagtattgaggatggctctttggtgcttgagaaaggtgaattttcactaggtagtgttatgaatgctgttgtcagccaagtgatgatacagttgagagaaagagatttacaacttattcgagatatccctgatgaaattaaagaagcctcagcatatggtgaccaatatagaattcaacaagttttatgtgactttttgctaagcatggtgaggtttgctccagctgaaaatggctgggtggagatacaggtcagaccaaatataaaacaaaattctgatggaacagacacaatgcttttccccttcaggtttgcctgtcctggcgaaggccttcccccagagattgttcaagacatgtttagtaactcccgctggacaacccaagagggtattggcctaagcatatgcaggaagatcctaaaattgatgggtggcgaggtccaatatataagggagtcggagcggagtttcttccatatcgtacttgagctgccccagcctcagcaagcagcaagtagggggacaagctgatatggtgtatgctcgtcgctaacctcgcataactattcggtcaaccaggtgacctgggatcttctgatggagaacccagtttagtttatgagagttccagaaaccaacatttcgtccactctgatgaagcacatctgaactttggaacggcatcggtgattctcggtgtcgaggtggtccctccagtctcctgattcctggcatggcgactgtaagctcagctttggacgatgttgttctattagagttctatggcggcaagcaatgcacactgacggtcatgtaactcgtagcataggcccactatcacttggttgaagtacatatatgttctaaaagctgccatgtatataacatcggttatatatgtactacgtgcataaaggagagctgtgcagctcccagggtggtattttgtagggcttcccaagcctatgacatcttattatatcatcttaacataaaagcatttggtctccttggatgttggcaaaaaaaaaaaaaaaaatatat

SEQ ID NO: 26 - DNA, 3637 bp, Sorghum bicolor
atggcgtcgggcagccgcgccacgcccacgcgctccccctcctccgcgcgacccgaggcgccgcgtcacgcgcaccaccaccaccaccaccactcgcagtcgtcgggcgggagcacgtcccgcgcgggcgggggaggtggaggaggaggaggtggcgggggcaccgcggccacggctacggccacggccacggagtcggtctccaaggccgtggcgcagtacaccctagacgcgcggctccacgcggtgttcgagcaatcgggcgcgtcgggccgcagcttcgactactcccagtcgctgcgcgcgccgcccacgccgtcctccgagcagcagatcgccgcctacctctcccgcatccagcgcggcggccacatccagcccttcggctgcacgctcgccgtcgccgacgactcctccttccgcctcctcgccttctccgagaacgccgccgacctgctcgacctgtcgccgcaccactccgttccctcgctcgattccgcggcgccgccccccgtttccctgggtgccgacgcgcgcctcctcttctccccctcgtccgcggtcctcctggagcgcgccttcgccgcgcgcgagatctcgctgctcaacccgctatggatccactccagggtctcttccaagccgttctacgccatcctccaccgcatcgacgtcggcgtcgtcatcgacctcgagcccgcccgcaccgaggaccccgctctctccatcgccggcgcagtccagtcccagaaactcgcggtccgtgccatctcccgcctccaggcgctacctggcggggacatcaagctcctttgcgacacagtcgtggagcatgttcgcgagctcacgggttacgaccgtgtcatggtgtacaggttccatgaagacgagcatggggaagttgtcgccgagagccggcgcgataaccttgagccttacctcggattgcattatcccgccacagatatcccccaggcatcgcgcttcctgttccggcagaaccgcgtgcggatgattgctgattgccatgccaccccggtgagagtcatacaagatcctgggatgtcgcagccactgtgtttggtaggctccacgcttcgtgctccacacgggtgccatgcgcagtacatggcgaacatggggtcaattgcatcacttgttatggcagtcatcattagcagtggtggtgatgacgagcaaacaggtcggggaggcatctcctcggcaatgaagttgtgggggttagtggtgtgtcaccatacgtcaccacggtgtatcccttttccattgaggtatgcttgcgagtttctcatgcaggcatttgggctgcagctcaacatggaattgcagcttgcgcatcagctgtcagagaagcacattttgcgaactcagacgctattgtgtgacatgctattgcgagattcaccaactggcatcgtcacgcagagccccagcatcatggaccttgtgaagtgtgatggggctgcactgtattatcatgggaagtactatccattgggtgtcactcccactgagtctcagattaaggatatcattgagtggttgacggtgtgtcatggggactcaacagggctcagcacagacagccttgctgatgcaggctaccttggtgctgctgcattaggggatgctgtgtgtggaatggcggtggcttatattacaccgagtgattacttgttttggtttcggtcacacacagctaaagagatcaaatggggtggcgcaaagcatcaccctgaggataaggatgatggtcagaggatgcacccacggtcatcattcaaggcatttcttgaagtggttaaaagcagaagcctaccatgggagaatgcagaaatggacgcgatacattccttgcaactcatattgcgtgactccttcagagatgctgcagagggcactagcaactcaaaagccattgtcaatggacaagttcagcttggggagctagaattgcgggggataaatgagcttagctctgtagcaagagagatggttcggttgatagagacagcaacagtacccatatttgcagtagatactgatggatgtataaatggttggaatgcgaaaattgctgagttgacaggcctttcagttgaggaggcaatgggcaaatctctggtaaacgatcttatcttcaaggaatctgaggagatagtcgaaaagctactctcacgagctttaagaggtttgtcactttgctttcagtcgatttttttgtggtccccagcttagtctgtgaatgtctcctttttttctatgacaacctagtgcctccttgttttcaggtgaggaagacaaaaatgtggagataaagttgaagacatttgggtcagagcaatctaacggagcaatatttgttattgtcaatgcttgttccagtagagattacacacaaaatattgttggtgtctgttttgttggacaagatgtcacaggacaaaaggtggtcatggataaatttatcaacatacaaggggactataaagctattgtacacaatcctaatcctctgatacccccaatttttgcatcagatgagaacacttcttgttcagaatggaacacagccatggaaaaacttacaggatggtcgagaggtgaagttgttggtaaatttcttattggagaggtgtttggaagtttttgtcgactcaagggcccagatgcattgacaaagttcatggttgtcattcacaatgctataggagggcaggattatgagaagttccctttttcatttttcgacaagaatggaaagtatgtgcaggccttattgaccgccaacacaaggagcaaaatggatggtaaatccattggcgccttttgttttttgcagattgcaagcgctgaaatacagcaagcctttgagattcagagacaacaagaaaagaagtgttatgcaaggatgaaagaattggcctatatttgccaggagataaagaatcctcttagtggcatccgatttaccaactctctattgcaaatgactgatttaaatgatgatcagaggcagttccttgaaacttgctctgcttgtgaggaacagatgtccaagattgttaaggacgccactctccaaagtattgaggacggctctttggtacttgagaaaagtgagttttcttttggagacgttatgaatgctgttgtcagccaagcaatgttattgttgagggagagggatttacaacttattcgggatatccctgatgaaatcaaggatgcatcagcatatggtgatcaatttagaattcaacaagttttggctgacttcttgctaagcatggtgcgatctgctccgtccgagaatggctgggtagaaatacaagtcagaccaaatgtaaaacagaattctgacggaacagatacagagcttttcatcttcaggtttacctaccctggtgagggccttcccgctgacattgtccaggatatgttcagcaattcccagtggtcaacccaagaaggcgtaggactaagcacatgcaggaagatcctcaaattgatgggcggtgaggtccaatacatcagggagtcagagcggagtttcttcctcatcgtcctcgagctgccccagcctcgtccagcagctgatagagaaatcagttga

SEQ ID NO: 27 - DNA, 4080 bp, Oryza sativa
ggagatattatcttgggctgccttgccgtgcagtgtggctcgctgtcccactcaggtgcggcgctattccaatccgtgcttatccccggcagaatccaatccccctcgcggcttttctccaaaagcgctccgccttctcgcctatttcgctcgctgccgcggccatgattccccgctgatacctccgcgcgcccatttggttcctcctcgccgaatcccccttcgcagccggtggttctagttgaggaggaggaggaggggatttggttgggggcgagggggaggagggggttgtggagatgtcgtcgtcgcggtcgaacaaccgggcgacgtgctcgcggagcagctcggcgcggtccaagcacagcgcgcgggtggtggcgcagacgccgatggacgcgcagctgcacgcggagttcgaggggtcgcagcgccacttcgactactcgtcgtcggtgggcgcggccaatcggtcgggcgccaccaccagcaacgtctccgcctacctccagaacatgcagcgcggccgcttcgtccagcccttcgggtgcctgctcgccgtccacccggagacgttcgcgctgctcgcctacagcgagaacgccgccgagatgctcgacctcacgccgcacgccgtgcccaccattgaccagcgcgaggcgctcgccgtcggcaccgacgtgcgcacgctcttccgctcgcacagcttcgtcgcgctgcagaaggccgccaccttcggggacgtcaacctgctcaaccccatcctcgtccacgccaggacctccgggaagcccttctacgccatcatgcaccgcatcgacgtcggcctcgtcatcgacctcgagccggtcaaccccgtcgacctgcccgtcaccgccacaggcgcgatcaagtcgtacaagctcgctgccagggccatcgccaggctgcagtccctgcccagtgggaacctctccctgctgtgcgacgtgctggtccgcgaggtgagcgagctcactggctatgacagggtgatggcgtacaagttccatgaggatgagcatggtgaggtgattgctgagtgcaagagatctgatttggagccgtatcttggcctgcactacccagccactgacattcctcaggcatccaggtttttgttcatgaagaacaaagtgcggatgatatgcgattgctccgcaacgcctgtgaagatcatccaagatgacagcctaacacaacctataagcatatgcggatctactctcagggcaccccatggttgccatgcacagtacatggcaagcatgggctccgttgcatcacttgtgatgtcggtcactataaatgaggatgaggatgatgatggagacactgggagtgaccagcagccgaaagggaggaagctgtgggggttgatggtctgccatcacacaagcccgaggtttgtccctttcccgcttaggtatgcttgcgagtttctcttgcaagtatttgggatacagatcaacaaggaggtggaactggctgctcaggcaaaggagaggcacatcctccgcacgcagactcttctctgtgatatgctccttcgagatgctcctgttgggatatttacccaatcacctaacgtaatggatctagtgaaatgtgatggtgcagcattgtattaccaaaaccagctttgggtgctaggatcaacgccctctgaagcagagataaaaaacattgttgcttggttgcaggagtaccatgacggttctactggattgagtaccgacagcttagttgaagcaggttatcctggcgctgctgcacttggtgatgttgtgtgtggcatggcagctataaagatctcttcaaaagatttcatcttctggttccgatcccacacggcaaaggagattaaatggggaggagctaagcatgaaccaattgatgcagatgacaatggtaggaagatgcatccacgatcttcattcaaagccttcttggaggtagttaaatggaggagtgttccttgggaggatgttgaaatggatgctatccattctctgcagctaatattacgtggctccttgcaagatgaagatgccaacaagaacaacaatgcaaagtccattgttacagctccatctgatgatatgaagaagattcaggggctccttgaactgagaaccgttacaaacgagatggtgcgcctaattgagacagcaactgcgcctatcttggctgttgacatcactgggagcataaacggatggaataataaggctgcagaactcactggattacctgtcatggaagccatagggaagcctctggtcgatctcgtcatcgatgattctgttgaagtggttaagcaaattttaaattcagctttacaaggtttgtcactttgctttcagtcgatttttttgtggtccccagcttagtctgtgaatgtctcctttttttctatgacaacctagtgcctccttgttttcaggaatagaagagcaaaatctgcaaattaagcttaaaacatttaatcaccaggaaaataatggacctgtaattttgatggttaacgcctgctgcagtcgtgacctttcagagaaagttgtgggggtttgctttgtagcacaagatatgacagggcagaacattatcatggataagtacactcggatacaaggggactatgttgctatagtaaagaacccttcggagctcatcccccctatatttatgatcaatgatcttggttcctgcttagagtggaatgaagctatgcaaaaaattactggtataaagagggaagatgcagtagataaattgctaatcggggaagttttcacccaccatgagtatggctgtagggtgaaagaccatggtactctgaccaaacttagcatattaatgaacacagtgatatctggtcaagatcctgagaagcttctttttggtttcttcaacaccgatggcaagtacatagagtcactgatgacagcaaccaagaggacagatgctgagggtaagatcactggcgccctttgctttcttcatgtggccagcccagagcttcaacatgctctgcaggtgcagaagatgtctgaacaagctgctatgaacagctttaaggaactgacatacatacgtcaagaattaaggaacccactcaatggcatgcaatttactcgaaatttgttggaaccttctgacttgactgaggagcagaggaaacttctagcatcaaatgtcctctgtcaagaacagctgaaaaagattttacatgacactgatctagaaagcattgaacagtgctacacggagatgagcaccgtagatttcaacctggaggaagccctgaatacagtcctaatgcaagccatgccccagagcaaggagaaacaaatttccattgaccgtgattggcctgcagaagtatcatgtatgcacctctgcggggacaatttaaggcttcaacaagtcctagcagacttcctggcatgcatgcttcaatttacacagccagctgaagggcctattgtgctccaagtcatccccaggatggaaaatattggatctggaatgcagattgctcatctagagttcaggcttgtccatccagctccgggcgttccagaggctctgatacaagagatgttccgccacagcccaggtgcatctcgagagggccttggcctttacataagccagaagctcgtgaagacgatgagcggcacggttcagtacctccgggaatcagagagctcgtcgttcatcgtcctggtagagttcccggtcgcccagctcagcaccaagaggtgcaaggcttccacgagtaaattctgaacttagggctatggccaaaattcttgtgggtgctgtattgttgttgttgctgctgctgctattagcagatcaggcagtctgaggagtacgttagctgaagatgtatcagatgtgtgtagcttgtgaaagtgaaggtagtggttggatagatgtatttgtcacgttgatgtctggagagctagtgagcgagctactaggtgttagtgtaatttaaccggcaaatgtatgaacgaattatgaataaaatcttcacttgtgttgtcatga

SEQ ID NO: 28 - DNA, 3855 bp, Sorghum bicolor
ctgccccgcgcaagccggctcgctgtcccactcgcgcgccacgcctgacgcctcggacccggaggtgtattccctcttcttcccccgtgcttatccgcggcggaatccaatcccctccctcatcacgtccttctcccaggcaaagcccctctttttgggcgtatgcccccgctggcgcgcctatgattcccgccgattcatccgcccgctcggtccagcaacccttgctgctgcagtgctgcggctagttcggtggcggggaaggaggaggaggagggatcttgcagtggggcgaagcggagatgtcgtcgccgttgaacaaccgggggacgtgctcccggagcagctctgcgcggtccaggcacagcgcgcgggtggtggcgcagacgcccgtggacgcgcagctgcacgccgagttcgagagctcccagcgcaacttcgactactcctcgtcggtgagcgccgccatccgaccgtcggtcagcaccagcaccgtctccacctaccaccagaccatgcagcggggcctctacatccagcccttcggctgcctgctcgccgtccacccggacaccttcacgttgctcgcctacagcgagaacgcgccggagatgctcgacctcacgccacacgcggtccccaccatcgaccagcgggacgcgctcgccgtcggcgccgacgtgcgcacgctcttccgctcgcagagctccgtcgcgctgcacaaggccgccaccttcggggaggtcaacctgctcaaccccatcctcgtgcatgccaggacgtcggggaagcccttctacgccatattgcaccggatcgacgtcggccttgtcatcgaccttgagccggtcaacccagttgacgtgccagtcactgctgcgggtgcgcttaagtcgtacaagctcgccgccaaggccatctccaggctgcagtcgctgcccagcgggaacctgtcgctgctgtgcgatgtgcttgtccgtgaggtgagcgagctcacgggctatgaccgggtcatggcgtacaagttccatgaggatgagcatggtgaggtcatttccgagtgcaggaggtctgatctggagccgtatcttggcctgcactacccagccaccgacatcccgcaggcgtccaggttcttgtttatgaagaacaaagtgaggatgatatgtgattgctctgccactctggtgaagatcattcaggatgatagcctagcacagcctctcagcctctgtggttccaccctcagggcttcccatggttgccatgcacagtacatggcaaacatgggttctgttgcatcgcttgtgatgtcagtgactataagcaatgatgaggaggaagatgttgataccgggagtgaccaacaaccgaaaggcaggaaactgtgggggctggtcgtctgccatcatacaagcccgaggttcgtccctttcccactaaggtacgcttgcgagtttctcttgcaagtatttggcatacagctaaacaaggaggtggaattggctgctcaggcaaaggagaggcacatcctcagaacgcaaacccttctttgggatatgctcctgcgggatgctcctgttgggatatttacccagtcacctaatgtgatggatctagtaaagtgcgatggagttgcattgtattaccagaaccagcttttgttgctcggatcaacaccctccgagtcagagataaagagcattgccacatggctgcaggagaaccatgatggttcaactgggctgagtactgacagcttagtggaagcaggttatcctggtgctgctgcacttcgtgaagttgtgtgtggcatggcggctataaagatctcttccaaagattttatcttctggttccgatcgcacacaacaaaggagatcaagtggggtggggctaagcatgaaccggttgacgcagatgacaatggcaggaagatgcatccacgatcttcattcaaggccttcttggaggtggttaaatggagaagtgttccctgggaggatgttgaaatggatgctattcattctttgcagttaatattacgtggctccctgcaagatgaagatgccaacagaaacaatgtaaggtccattgtaaaagctccacctgatgatacgaagaagatacaggggctacttgaactaagaacagttacaaacgagatggtccgcttaattgagacagcaaccgcccctgtcttggctgtcgacattgccggtaacataaatggatggaacaataaagctgcagaactaacagggttacctgtaatggaagccatagggaggcctctgatagatcttgttgttgttgattctattgaagtggttaagcggattttggactcagctttacaaggtttgtcactttgctttcagtcgatttttttgtggtccccagcttagtctgtgaatgtctcctttttttctatgacaacctagtgcctccttgttttcaggaattgaagagcaaaatctggaaatcaagcttaaagcattccatgaacaggaatgcaatggtccaataatcttgatggttaactcctgctgtagtcgggacctttcagagaaagtcattggagtttgctttgtaggacaagatttgaccacgcagaagatgattatggataagtatactaggatacaaggagactatgttgccatagtaaagaaccccagtgagctcatccctcccatatttatgatcaatgatcttggttcctgcttagagtggaataaagctatgcagaagattaccggtatacagagggaagatgtgatagataagttgttaattggggaggtcttcacccttcatgattatggctgtagggtgaaagatcatgctactctaacgaaacttagcatactgatgaatgcagtgatttctggtcaggatcctgagaagctcctttttggtttcttcgacacagatgggaagtatattgaatccttgctgacagtgaacaagagaataaatgctgagggtaagatcactggcgctatttgctttctgcatgtggccagtccagagcttcagcatgctctccaggtgcagaaaatgtctgaacaagctgccacaaacagttttaaggaattaacttacattcatcaagaattaaggaacccactcaatggcatgcaatttacttgcaacttattggagccttccgaattgacagaggagcagaggaaacttctttcatctaatattctctgtcaggaccagctgaaaaagattttacatgacactgatcttgaaagcattgaacagtgctatatggagatgaacacagtagagttcaaccttgaggaagctcttaatacggtcctaatgcaaggcattcctttgggcaaggaaaagcgaatttctattgaacgtgattggccggtggaaatatcacgcatgtacctttacggggacaatttaaggcttcagcaggtcctagcagactatctggcatgcgcccttcaattcacacaaccagctgaaggacctatcgtgctccaggtcattcccaagaaggaaaacattgggtctggcatgcagattgctcatttggagttcaggattgtccatccagctccaggcgtccccgaggccctgatacaggagatgttccggcacaacccagaggtgtccagggagggcctcggcctgtacatatgccagaagctggtgaaaacgatgagtggcacggtacagtacctacgagaagccgatacctcatcgttcatcatcctgatagagttcccagtcgcccagctcagcagcaagcggtccaagccttcgacgagtaaattctgacactcatgctcctggaactgcagtgagagttcgggcggccgcgaa

SEQ ID NO: 29 - DNA, 953 bp, Oryza sativa
ttctctccccctgttcacaccacgcctcactcccatggcgaccgaggaggacgcgtcgaccatggcggcggccgaggcggaccccaagcccgccgccaccccgtcttacccggagatgatactggcggcgatcgaggcgctggacgacaggaacgggtcgaacaagacggcgatctcgcagcacatcgaggggaagtacgaggggctcctcccccccgcgcacccgtcgctcctcacagcgcacctcgcccgcatgaagcagaccggcgagctcgccttctccaagaacaactacttccgcggcgacgacccgtccctcccgcccaagcgcggccgcggcaggccgcccaagcccaaggacgccgccgccgccgccgctgcaccggcgcccgcgcccgcggcgccggcggcctcctcgccgcgcccccgtggccgcccgcctaagcccaaggaccccctcgccgaggcggtcgcgaaggccaccagtggcatgccccgcgcgcgcggccgcccgcccaagaaggccaaggtcgaacaggaagaccccattggcgctcccgccgcagcttcggctcccgccgcggcggctgaggccgcgccgcctgtcaagcgcggccgtgggcgcccgcccaaggtgagacccgccgcgccggtcggggagccagccgctgcttgattagctccgattctccgcatcgccgcgatggcgacgatggtaagctcctttaggttgtaacgtagtcttcagattatgtctcgtactgattggaggcgcggctcgggttgctgcttattgtaagttaatcggatggtgggaggtttaggtgtgctggatggatcatccgttgctgagagttgtgattgaattcgtgttatcgcgtgctgattattatggtaatgttggtgactttcgtgtcgtttgtgttaattctagattggtggctgcatttagt

SEQ ID NO: 30 - DNA, 2957 bp, Oryza sativa
agctggtgggcgttcagggcggagaagtagaggcggcggtgccgtggggcggcgcccatgcagcagcaccagggtggcgggtcccagtacggggccgtgccgccggacatggggccgttctcgccgacgcatcatgcttcggcgccggcccccctgccgctgagcacggccaccgccgcggcgttgtctcagccaccgccgccgcagcagcagcagcagcaaccgaggacgagctacgacgagctggccgccgcgaccagcgccggcgcgggcggcttccccgacgacgacatgctgggcgacgccggcggcagcggcggcggcggtgggtcgggagcggccggcaaccggtggccgcgggaggagactctagccctcatcaggatccggtcggagatggacgccaccttccgcgacgccaccctcaagggtcccctctgggaggaggtctccaggaagctcgcggagttgggctacaagagaagcgccaagaagtgcaaggagaagtttgagaacgtccacaagtactacaagcgcaccaaggaagggcgcgccgggaggcaggacggcaagagctaccgcttcttcactgagctggaggcgttgcatgccgctgcgccgcagacgccccagccgcagcagcagcagcagcagcagttgccgccggttacaagcagcgcacccgcgatgcacgccttcgcgccgccggttcccgcgccaccgccgatgagcgcaatgccaccgccgccggggccgatccagccggccccgatatcttctgcggctcccgcggtgcccctggagctgccgccgcagccgcccatcaacctgcaaggcttaagcttctcgtccatgtcggggtccgagtcggacgatgagtctgaagacgacgagatgacggcggagaccggcggcagccaggaccgcctcggcaagcgcaagcaggccccggcggcaaaaggctggcgactttcttcgaggggctcatcaagcaagtcgtcgacaggcaggaggagatgcagcggcggtttctggagactatggagaagcgagaggcggacgcacggccgggaggaggcgtggcgcaggcaggaggtggcccgcctcaaccgcgagcaggagcagctcgcccaggagcgcgccgcggcggcctcccgcgacgccgccatcatctccttcctccaacgcatcggcggtcagtccgtacaggtcccacccgccgccaccgtcatccagatgcccacaccggtgcagctccagacccctccgccggtcaagcaacctgccaggcagcaccagccacagccaacgccgccgccgccgcaggcggcgccaatcccggccgcgcccctccagcagcaaccgccgcagccgcagcacaaggagacgattcaccacgaggcagtgacgccgcgcagggcgccaccgacgtccggctcatcactcgagctggtgcccgcggcggagcagcacgtcgagagcgggctaggaggaggggagggcgggtcggcgtcgtcgtcgcggtggcccaagacggaggtgcaggcactcatacagctgcgcatggagctcgatatgcgctaccaggagaccgggccgaagggcccgctctgggaggagatctcgtcggggatgcggcggctggggtacaaccggagctcgaagcggtgcaaggagaagtgggagaacatcaacaagtacttcaagaaggtgaaggagagcaacaagaagcggcccgaggactccaagacatgcccgtacttccaccagctcgacgtcatctaccgcaggaagcacctcaccggcggtggcggcggcggcgcttccgcggccaatgtcgccgccacggcaatcgagcaccagaacccgaaccggcacgagatagaggggaagaacataaacgacaacgacaagaggaagaacggcggaggcggcggcgcgcaggtgcccaccagcaatggcgacacggcaccgaccacggccacgttcgacgtcgatagcggcatgaagaagccagaagacattgtgagggagctgagcgagcagccgccccgggagttcacaacggacgagaccgacagtgacgacatgggcgatgactacaccgacgacggcgaggaaggcgaggacgacggcaaaatgcagtacaggatacagttccagaggccgaacccgggcggcgccaacaccgcacctccgccggcgacaaccccggcgtccgcggtgccaacctcgactccgacgagcaccttcctcgccatggttcaataggcgcgcgaacgatgcatcaccaagtacgtacttgttcaaagaaaaaaaatcaaagcatcgccatcaccatcgcatcctctcactacaccaccaccaacacaaacaccatgcatgcatcagcaatcagcaaccactctccttcgagttgggatctctcctgtaatgcatgtgcggtaagtgccaatgacatgtgggcccggaataggtgggacccacatgccagtgacaccagtacagcagtggatttgcatccctctccttcaccttgtaattctcccgtgccattccattatttattgatttctctgtgtaataagagccctccctgatctcaccttaacccgaggaagcagagggggtggtagagaaaatgagtccgggtaactttatctctataggtcacctcgtcgtggtaaaggaagaattgtacatcgatgtaacagtccctgatgtctctgttttttttttctctctctctttttctccttcctccggcgacggcggtatacaagttgtatacgggtatacaacaattacatacatttccagcaatttggagcagaggtcagaaggtgtcttgtttttgtttcttttctttctttgccgtggggaattttgtctccttttaacccgttttttttgcagtggtataaaacgttgttactgtgcaaaaaaaaaaaaaaaaa

SEQ ID NO: 31 - DNA, 995 bp, Synechocystis PCC6803
aaggtactatgtctgaaaattttgcagttgctacgccggtgcgggtcggaattgtcggtactggttatgcggcccaacgtcgggcggaagttttccggggcgatcgccgtagtcaattggttagtttttggggcaatagtgaagccaatacagctaaatttgccgatacttttggagttagaccccagcaatcttggcaggcattaattaatgatccagagatagatttagtgctcattgccaccattaaccaactccatggggcgatcgccgaggcggcattgcaagccggtaaacatgtggtgttggaatatcctttagcgttaacctatgccatgggcaaaaaactacaacagttagcccgggaaaaaggtaaattactgcatgtggaacatattgaactattggggggagtacaccaagccattcgccagaacctaggcaaaattggtgaggttttttacgcccgctatagcaccatcatgggacaaaatcccgctccccaacgttggacctatcaccatcagcaatttggctttcctttagtggcggccttgtcccgcatcagtcggtttacggatttattcggtacagtacagcaggtggatgcccaatgtcgtttttgggatcagcctaatccggaatattttcgggcttgtttagccaccgcctatctccagtttaataatggtcttaaagcggaggttatctatggcaaaggggaagtttttcaccagaatgaacggatttttaccctccatggcgatcgaggcaccttaatttttgtcggggaaacaggtaggttaattcagggacaaacggaaactgaaattaccgttggtagtcgtcgaggactgttcagacaagacacggaagcagtgttggattatctaaccactggtaagcccctttatgtggatttagaagctagtttatatgctttagaagtggcggatctctgtgcccaagcttgtggatataaggttgaaaattag

SEQ ID NO: 32 - DNA, 1623 bp, Zea mays
gtcgacccacgcgtccggagatcggctgcctcgatttctcttcgagtgccaagcagtactgctagttctacttctgtacttcagcagtagtaggccgctgttgctacaattttgactgactgagatgggaatcctctgcctcggtgcttcctccacactgctctgcggggaggacaggaacaacgtactcggcctcggctgcggcaacgagctggtggaggtggggagcggccatgacggcttggactccgtcgtcggcgccgtgttccccgtggacacagatgaggccgtgcgggcgttgttggagaaggagacggaccacaagcctcaagacggctatgcggagaggctggagcgcggcggattggagtactcctggaggagagacgccatggattggatttgcaaggtccattcgtactacaggtttggaccactcagtctttaccttgctgtgaattacctggatagattcctctcctcatatgatctcccacacgataagccttggatgcgacagttgttgtcagttgcttgcctagctctcgctgtcaagatggaggagaccgtgctccctcttcctgtggaccttcaggtctgcgatgtgaaatttgagtttgaagcaaggactattgggaggatggagcttcttgtgctggccaccctgaaatggagaatgcaggctgtgacccccttcactttcatcagctacttcctcgacaagttcaatggtgggaagccgccgagtatggcactagcgtcacggtgcaccgagatcataattggcacactcaaaggctctacattcttgtcattcagaccatctgagattgccgcggcctcagctctagcagcagtttctgagaatcaggttgttggctcctcgagtgctctttcagcatctgaagtccctataaataaggagatgattgctagatgctatgagctgttgcaagagcaagcgctggtgaggaagacagggcacatcaatggaagcccttcagtgccgcaaagcccgattggcgtgctggatgcaacatgcttcagctttaggagtgaagatgtaagactaggatcatcgcaatcaaacaacatcagtagtagtagtaacgacaatcaagtttctaagaggagaaggctaagcatatcaccaatctgagtagatcaaaactctgttggcagtgtcgcattgtgcgcttggttatgcattgatcatcttaacctcagagcttgtcagagcaacaagtagtggtacaaaaggacccagtgaagcattgtaacaagcagaggatggtgacagtaataagttagaagcagcttcttgatctctgcgacgaaataggtgacgaggaacgtttcttcctctagtaactttgaatccccttcctccccggtccctttgttttattccttttcctttttatcggtatctcaaggcatttgtggggactggggagatatatgtggatatgagattggagacgtgaggattaaagagagagagagggagggagggagataaaaaaaaaacaggtttgttcctttgttctctgccaatatacaaaaaaactgtcgtgcgaaaaaaaaaaaaaaaaaaaaaaaaaaaaaaaaaagggcggccgc

SEQ ID NO: 33 - DNA, 3330 bp, Zea mays
ttcggcacgaggatcgatctcacttagctgctgctgctgctgcttgctggtggcctgggcctggctgctgtgtctgtatcgatgtgtccgtattttctccatctcgtctgcatacgctgcaattggtaaggagctagctggcctttcatgtcttccatgctgccatagccatacgcccggccggaaggcaggataccccatcgctcgctgcacatgcatgtatgccgcatggggatacatgttcatcatcagcagcacagtggctctgtatcccccatcccaatccgatcctatataggaggaggagaaggaggagcagcagcagcagccaggcgcggccggcggccggagtagtatccgaatccgctcaacacccacaccggtgcgggtggtctctagctttcccatcgatcaatggctttcaaaggactcccgcgtgattcccgagggtccctcgaagtcttcaatccagacgcccctgtttcagatcgtgcaaccacctccccgttcctcctccctcctgcggtcgcgtcccatcccagcctcctcgccgccggagatggcggcgatgctgacgtgggtcgggcgacacagagggccgccgagtggggcctcgtcctccagaccgacgagcacaccggccgcccccagggtgtcgtcgcccgtccctccggttccaaccgcaccagcgagagtggcaactccatcgacgagagggccgccgccgccggtgctggtagagctctcccccgggtgtcggaggagcttcgcgccgcgctctcagcgttccagcagaccttcgtcgtgtccgatgccacccgccctgaccaccccatcctctacgccagcgctggattcttcaacatgacgggctactcctccaatgaggtcgtcggaaggaactgccgcttccttcaaggttctgggaccgaccccgtagagatttccaagatcagacaggctctcgcagctgggtcaaattactgtggccgtatcctcaactacaagaaggatggcacaccattctggaacctcctaaccgttgcccccataaaggatgaggatggcagggtcctcaagttcattgggatgcaagtggaagtaagtaagtacacggaaggtaacaaagatactgctcttcgtccaaatggattgccagagtcactcatcaaatatgatgcaaggcagaaggatcatgctcgtagctcagtctcggagctcctacttgccctgaaggatccacggtcattgtcagaatcaagaaacaataccttaaaaaggaaatcacaggaatcagcaggttcagctctagttcccggcaagagaagctccgaaactggatcccgtcgtaactcacatagtggaatgagaaactctctacaaaaaatcagtgaggtgcctgaaggagggaataagaccaggaaatctggtttgcgttcttttatgggccttattggtatgggacatgggaatgtagagaagaacattctaaaaccaagggaagatcccctacttgatagcgatgatgagagaccagatagcttcgatgacgatttcaggaagaaagaaatgagaaagggcatagatttggctaccacacttgaacgtattgaaaagaattttgtcatcaccgacccgaggttaccagataatccaattatatttgcatcggatagctttttgcgtttgacagagtattgccgcgaagaaatattgggaagaaactgcaggtttcttcaaggacctgaaactgaccgtgggacagtaaagaagataagagatgccatagataaccaaacagaagttactgttcagctgataaattatacaaagagcggtaagaaattctggaacctctttcacttgcagcctatgcgtgatcagaagggtgatgttcaatacttcattggggttcaattggatggaactgagcgtgttcgagaggctgctgcaaaagatggtgccatactggttaagaaaactgcagacaatattgatgaggctgcaaaggagcttccggatgctaatttgagacctgaggatctatgggctaatcactcaaaaccagtcttgccaaagccacatatgaaggatactgcatcgtggagagccatccaaaaggttcttgagaacggtgaaagcattgatttgaaacatttcagaccagtaaggcctttaggatctggtgatactggcagtgtccacttggtggagttgcttggcacaggtgaatactttgccatgaaagctatggataaaagtgtcatgcttaaccgaaacaaggtccatagagctaccgctgaacgacaaatccttgatatgttggaccacccattccttccgacattgtatgcatcatttcagacaaagacacatatatgtcttattgttgactattgtgctggtggggaactctttatgctccttgataggcaacctatgaaggttctgaaggaggatgcggtcaggttctatgctgcagaagtggtcacagcacttgaatacctacattgccaaggtataatctacagagacttaaagccagagaacattttacttcatagagatgggcacatttcattgacagactttgatttgtcttgcttgacatcctgccgaccacaagtgtttcttccacacgatattgataagaagaaaaagaggaggaagagcaggagtaatcccatattttttgctgaaccaatgcgagcatcaaattcttttgttggtacagaggagtacattgcaccggagattattaccggagctggccatacgagtgctgtagattggtgggcgctaggaattcttctatatgagatgttatatggttatacacccttcagagggaaaacaagacaaaggacatttgctaatattctgcacaaggatatcagatttcctgcgagcatacaggtgagcctggcggcaaggcagctgatataccggttgctacaccgagaccctgcaaataggctaggttcctatgagggcgctatggagatcaaacaacaccccttctttcgtggcataaactgggctctagttcgtgccgccacgcccccagagctggaggctcccctccaggatacattggaggccacactgcctcctcctgcagctgatgcggctcacaccgatatgttctgatcatacattgatccatgatgctgcatgttaatttgcttaaaggaagaaaaaaatattagatgatgaagatgcgtgactttggcatagatgagaacaataatgtatgttaaggactaattatcttgatccatctatgcatgctcacaattagaataaaaaaaaaaaaaaaaaaaaaaaaaa

SEQ ID NO: 34 - DNA, 885 bp, Zea mays
ggtcacacccaacctcccactgtaaaaaagagcagcggaacgtgcgtgcatccatccatccatccatttccaatcccaatcccaatcccaccagtgtccagtgctcggggaaccgacacagctcctcagcagagtagccagcacgacaagcccgatcagcagacagcaggcatggcactcgcggaggccgacgacggcgcggtggtcttcggcgaggagcaggaggcgctggtgctcaagtcgtgggccgtcatgaagaaggacgccgccaacctgggcctccgcttctttctcaaggtcttcgagatcgcgccgtcggcgaagcagatgttctcgttcctgcgcgactccgacgtgccgctggagaagaaccccaagctcaagacgcacgccatgtccgtcttcgtcatgacctgcgaggcggcggcgcagcttcgcaaggccgggaaggtcaccgtgagggagaccacgctcaagaggctgggcgccacgcacttgaggtacggcgtcgcagatggacacttcgaggtgacggggttcgcgctgcttgagacgatcaaggaggcgctccccgctgacatgtggagcctcgagatgaagaaagcctgggccgaggcctacagccagctggtggcggccatcaagcgggagatgaagcccgatgcctagtagtggcgattgcgaccagtgtttaacccatgacgcagcgccgtcacagatgtcccgtgtggtcttgcgctttagcaatttctctctggagggagcgtgtattgttatcttgtgatcgagagcctgtgtgctgcctttgcttcttgtgattatatagctactgaataaagatgtagcgttcttcaaaaaaaaaaaaaaaaaaaaaaaaaaaaaaaa

SEQ ID NO: 35 - DNA, 1793 bp, Oryza sativa
  unsure (1)..(1793): unsure at all n locations
aaataataatgtcttgccttttgtagatccgcgtggctcgtactgctacatgttcatatcgctgcctgtttcttcgatttctgacaaaaaaagcgttcgtgttctgacaaaatttcggtttggtttttctacagtagaacgtcagcaatggagaacatgagatctgagaactttaaccaaggtgtttcaatggagggcgtcaagcatgcgcccgagatggcaaacaccaacaggagggctctgcgggacatcaagaacatcatcggagcacctcaccagcacatggctgtgagcaagaggggtttgctagataaacctgccgctaagaaccaatctggacaccgtcctatgacgaggaaatttgctgcaacactggcaaaccaaccctccattgctcccctggcacccattggaagtgagaggcaaaaaaggacagcagattctgcatttcatggtccagcagatatggagtgcaccaagatcacatctgatgatttgccattgccaatgatgtctgagatggacgaagtgatgggttctgaactgaaagaaattgagatggaagacattgaggaggcagcacctgatattgacagctgtgatgcaaataactcccttgcagtagttgaatatgttgatgaaatttacagcttctacaggaggagtgagggtttgagctgtgtctctcctaattacatgttgagccaaaatgacataaatgagaagatgcgcggcattctcatcgattggctgatagaggtgcattacaagttagagctattggatgagaccctcttccttactgtgaatatcatagaccgattcttggctcgcgaaaatgtggtgcgaaagaagcttcagttggttggcgtgactgccatgctgctcgcctgcaagtatgaagaagtgagcgttcctgtagtggaggatcttatcctaatctgcgaccgcgcctacacaagaacagatattctcgaaatggagaggatgattgtaaacactcttcagtttgatatgtcagttccaactccatactgtttcatgagaaggttcctcaaggctgcacaatctgacaagaagcttgagctcatgtctttcttcataattgagctgagccttgtcgagtatgagatgctcaaattccagccgtcaatgctggcggctgctgccatctacactgctcagtgcaccattaatgggttcaagtcctggaacaaatgctgtgagctgcatacaaaatactctgaagaacagctgatggagtgctccaagatgatggttgagctccaccaaaaagcaggacatgggaagcttactggagttcatagaaagtacagcacatttaggtatggttgccccgcaaaatcggagcccgccgtcttcttgctcaagagcgtggcactgtaactgattggctcactatacacactctaactacttccatggaaagagggaatgaggggtgtatatatagaggccggctgctttgatgaaattacagagaagagatctgcatatatgcaacagctgttgcaaaggattatttgatgggtgggttgggttggtgcaatgtgtgcctttacttccaataacttaacatcgtcgagacattgatctgcgtttggatgttttaggttgcttccaattaaatctgttggaacttgatttcatgttgtatttaagagaattattcttcatttgttctgtggcacatgcaatttgccaataaacattaattgaattgcctgttnaaaaaaaaaaaaaaaaaaaaaaaaaaaacaaaaaaaaaaaaa

SEQ ID NO: 36 - DNA, 1223 bp, Oryza sativa
ttcccccctcccctccggcgaactccgagctcttcccggtgagcgccgccgattcggccggagaggctcgccggagtcgcctccgccctgcccacgatggccgccaacttctggacgtcgtcgcactgcaagcagctgctggaccaggaggacgtggacaaggtcccccaggcggacagcgaccggggcatcacgctggaggagttccgcctcgtcaagatccacatgtccttccatatctggcgattggcacaacaggtgaaagttagacaaagggtgatagctactgctgttacttatttcaggcgtgtatacacaagaaagagcatgactgaatatgatcctcgtctggtagcaccaacctgtttgtatttggcatcaaaggtggaagagagcacagtgcaagcaagacttcttgtcttttacataaaaaagatgtgtgcttctgatgagaagtaccggtttgaaatcaaggatatccttgaaatggaaatgaagctcctggaggcacttgactattatttagttgtttaccacccatatcgtcctcttttacagttattgcaggatgctggcataacagatctgacacaatttgcctggggaattgtcaatgatacttacaagatggatcttattctcatacacccaccatatatgatagcattagcctgcatctacattgcaagcgttcttaaagacaaggacataactctgtggtttgaagagctccgtgttgacatgaacattgtcaagaatatctcgatggaaattttggacttctatgacacctacaagattgatcctcaaagagggctcccagaggacaaaatagcccctgtgatgaacaaactgccttcaaaggcctaaagcagactgagccctagttcagttgttatcagtctgagcgtcaaatcaccttatgctcgtacaacaggaaatatgtgtcaccttccttggagaactttatatttcaaagccatatatatatatagtatcagaattcagaattgcccctaacgaacgatttaattcagaattccgaactatatacagctgttcctgttgcagcagcttgcgaggcaaatcatttacaatgaagatcccaacgggttgggaatggtctgtatctgtatgtgtttttgatgtgtaaaaaaaaacatggctttggtactatttagtttctatagcaaatgaaatcctgaaaaattcttgcggtgaaa

SEQ ID NO: 37 - DNA, 1611 bp, Oryza sativa
cccacgcaggccatcgccatgggcgtctcggctctcctccgcctgtagatcgtgtggatcgtgcttacctgcgatggatagggcgagcgagaaccggaggctggcggcggtggggaagcccgtgccggggatcggagagatggggaaccggaggccgctcagggacatcaacaacctcgtcggggcgccgtcgcacccgtccgcgatcgccaagaagccgatgctagagaagagtgggaaggaagagcagaagcctgcattggtggtgagccaccggcctatgttgaggaatttcgcggcctccttgacgcgaaaagaacagcttgaccatcaggtttccgtggctgatgcagcggtcgtctgcactgatccacagaagaaccccatccccgatggcacagttgacgacgatgtggaatcgtgcgaatcgaacgactatattgccgtggatgaatgcaatgatactgatgaggatgagtccatgatggacattgacagtgccgactcagggaatccgcttgcagcaaccgagtacgtcgaagagttgtacaagttctatagagaaaatgaggaaatgagttgtgtgcagcctgattacatgtccagtcaaggagacataaatgaaaagatgagagcaattctgattgattggctcattgaggtccatcacaagtttgagctgatggatgagactctctttcttactgttaacatagtagacagattcttggaaaaacaagttgtgccaaggaagaagttgcagctagttggagtgacagctatgctccttgcttgcaaatatgaggaagtcgcagtccctgtcgtcgaggatctagtgctaatttctgaccgggcttatacaaaaggacaaattctggaaatggaaaagttgatcctaaacacactccagttcaacatgtctgtaccaacaccttacgtttttatgagacggtttctgaaggcagctcagtctgacaagcagctacagctactttcctttttcattctggagctctccctggtggaataccaaatgctcaagtaccgaccttcgcttctttctgctgctgcagtttacacagcacaatgtgctctcactcgttgccagcagtggacaaagacctgcgaactacatagtagatataccggagagcagcttcttgagtgttctaggatgatggtagatttccaccagaaggcgggagcaggcaagctcaccggcgtgcaccggaaatacagtacgttcaagtttgggtgtgcagccaaaacggagcctgctctcttcttgcttgagtcaggagcaggaggttacaaccttcagaagcagccttgttgaatgaatctattcccctggatagatttttttaacttagcttcagaacaactacagcaagcatgttgatgcttcacaaaagtgcagcagatttaccttactacagctcttttgtggtaatgtaaacttggtgtgaatgatggataatctgggtggtggtcagtccttcagttatactggggggctaataaatgattcaggcattcagcctatgtaagctgaatctcttgtaaatctacatgtgttcaagtagcatgaagaaaataacttgcatgttg

SEQ ID NO: 38 - DNA, 2004 bp, Oryza sativa
gtcgggaagagcacccaaaccctcgcttccgccctcgcaaaccctagcgcccggaggaggaggaggtgggttgcggtggtagtttgccgtccgccgatgtcgagcaacctagcagcctcccgccgctcgtcgtcgtcgtcctcggtggcggcggcggcggcggcgaagcgacccgcggtgggggagggaggaggaggaggaggagggaaggcggcagcgggcgccgccgcggcaaagaagcgcgtggcgcttagcaacatcagcaacgtcgccgctggtggtggcgccccagggaaggccggcaatgcgaagttgaatttagctgcctcagctgcaccagtgaagaagggatctttggccagtggccgcaatgtgggcacgaatcgggcctcggcggtgaaatcggcttccgccaagccggctccggccatatcccgccatgagagcgccacacagaaggagtctgttcttcctcctaaagtgcctagcattgtgccgactgctgcactggcacctgtcactgtaccctgcagcagcttcgtctcccctatgcattcaggagattcagtttcggttgacgagacgatgtcgacgtgtgactcaatgaaaagcccagaatttgagtacattgataatggggattcctcctcagttctaggttccttgcagcgaagagcaaacgaaaacctgcgtatctcagaggatagagatgtcgaagaaactaagtggaagaaggatgctccttccccaatggaaatcgaccaaatttgtgatgttgacaataactacgaggatccgcagttgtgtgctactcttgcttctgatatctacatgcacttgcgcgaggctgagaccaggaaacgtccatcaactgattttatggaaacaatccaaaaggatgtaaacccaagcatgagagcgatcctgatagactggcttgtggaagtcgctgaagaatatcgtcttgttcctgatacattatacctgacagttaactacattgatcgttatctttctggcaatgagatcaatcgtcaaagactgcaattacttggagttgcttgtatgcttattgctgcaaaatacgaggagatatgtgcacctcaagtagaagaattctgctatataactgacaacacatacttcagagatgaggttttggaaatggaagcttctgtcctgaattacctgaagtttgaagtgactgcacctacagcaaaatgctttttgaggagatttgtccgtgttgcacaagtatcggatgaggatccagcattgcatcttgagttcctagccaattatgttgctgagctatcactgctggagtacaatctactttcttaccctccttcactagtagcggcatcggctattttcttggccaaattcatactgcagccaacaaagcacccttggaattccacccttgctcactacacacaatacaagtcgtcagagttaagcgactgtgtaaaggcattgcaccgcctttttagcgttggtcccgggagtaaccttcctgcaatcagggagaagtatacccaacataagtacaaatttgtggcgaagaagccctgcccaccctcaataccgaccgaattctttcgcgacgcaacatgctgaactagaaaaataaaccaaggattagttacagttgctgactgaattcttcctccagaggcacctatgccaggttgtgccgtagaccgttcagataaccttgatgcaaggcatgctgcttgccccccccccccccccccctggttctttcaggcggtttggctgagtgtagatagatcgatgcttctgctgtgtgtggtaacttttatggtactgatgtgctttcttctatcttcttttccctgtacctagatgatccatggttttcagtactttgtacatcggagtcctgcagcaaagctttaaacatcttgtttgatattagctgccaacctgggcgtctcctaggttgatgtatgatagagtctctgttcgtgttgcttt

SEQ ID NO: 39 - DNA, 5100 bp, Oryza sativa
gaccgttggaaagatagacgccacggcaaaattcctcaattccccaccaaaaaaaaccaacccatcgcctacaaagccatagccctccctcttcttctccttcgaaaccaatccatctcgagttctcgccgtcaagaatcggaggagcagaggagagggaggagaattcgagagagaggagaggaggaggaggaggaggaggaggcggagtgaggtgtaagggggtggtggtgacgcgtcgctgattcgtgcggtttgctctgtggacgccgatcccggccgtttcgggcgatggcgtcgaggaggcagtggggagccggtgccggcgccgtcgatgttcctgctcaggaacgcaagggaggtaaggcggccaccgatcatctcctgcgcgcgttctttgccgtgttctttgttctggaggggctctcatggcggcggcggcggcggcgcgatggggagggggttttcttgctgcgatacgtcgcgtgcctgctttgccttcgtaggtttctcccgtccccggagattaggatttttaggatcgatggtgtgttcttgcggggttcttttacggtttcttgtccgatcgacgcttgattgcgaaattgtatgggttctttgatacgggttcttgttctgattcggcgtaaagagagcaccttttgaaaatcatgttcatgtgtggattattttttggtcccaaaatatgatcggaacgcatgtgcccgtggtggaagcagatgtttgtcgcgttggttgatttattgaatcgataggaatttcgcatgggttcttttggcatagaaatgatcttttgctggcgctgtgatggtttctgcgttgttctttgggtttgcttcgataaatctggcatcttcccagaattgcgtttcacctattgaatcgcgtttcttgttctgaatcatgcgtgcgctttcacctatttccgtgcaaaatttctcccttagcgattctgtgctttctcttgttactgatctgaaatttcgactttgtgcagaggctgccaagattgcgaggaggccaaagaccacgacggttgttgctcagcaaccgccaagaatccgtcgagccctcgccgacgtcagtaatctcgtcaatggccgggctgctctgcctgtcgtaaatcgccagaaggcagcagcagcagcagctgacaagtgcaggaaaccaatcaagcagcgcaacgagaacaacaaggcggccaagccagaagtcatcgtgatcagttcagactccgagaaacataagaaaaatccagcccagagagcagcctcccggagggcgccaatccaaacgctcacctcgattctgaccaagtgcagcagggtatgtgttctttggtgttgtttgattctgtaatgttgggaaatttttgtctgaagaatccgttttgttcttcttttgctgaacttgttctgaacacaggcttctgacggtgtgatcagcccgaaaaaggagctgatatacgacatcgatgcatctgattctcacaacgagctggcagtggttgattacgtcgaagatatctacagattctacaggaacaccgaggtgagcttagcttcctcttcttttatgccaaatcaattggtgatggaacggtgattgattactcttgctgcttgatttgtccagaacacctaccggcctctctgcacctacatggtgtcacagaccgagatcaacgagagaatgagagcaatcctgactgattggctcatcgaagtgcactacaggcttatgctgatgccagagacactgtacctcactgtctacataattgatcagtacctgtccctggagaatgtgcccaggaaggagctgcagcttgtcggtgtaagcgccatgttgatagcctgcaagtatgaggagacttgggctccattggtaaggattccacttctgcacaccactgatgccgttcaattttgcatatgatatgctcaacttgctattgtgttcaatgctgttcaatttgcatatgactttcagcttgcacttgcttcttgtcttacagttgagctgccatttttgcaggttaaggacttccttgtcatatcagacaactccttcagcaggcagcaggtcctgagcacagagaagtccatacttaacaagctccagtggaacctgactgttccgacaatgtacatgttcatccttcgatacctgaaagctgcattgggtgacgaggaggtaactaacaagcacagtccattttcagttgttcttctgctggtgctatacatcttcaatgtgttgtaatgtgccattcttttttctgtcaatgcagctggagcacatgactttcttctacgcagagctcgcactggttcagtactccatgctcttttttgcgccatcggtgatagcagccgctgccgtctacgctgctcggtgtacccttggcctgagcccactatggagcgatcttctggagtaccacaccggcttagctgagccgcaattgctgtatgtcttcttcttcatgacttgatctttgcccatgaaatttgattacatattgaatctgaagaatatgacctgtgaattgaattgtgttgactgcgttcccagaaagggatttcagttatataaatttggaatgctaaataatccatcttttcacaatcgttgataacctgttgtccttaagtttcatattcagagatggtcttttttctcatttgctttagttacttaaatcttgcctatgaaattttgattacacgttgaatctgaagaatatgacttgtgaatgaattgtgttgactgcttgcctagaaaaggatttcagttatatataaatttggcatgcttagttacattgttgtgtctccaccagactgactgaattttgtactactgaaagtttcagttgaatattgtcctggactagttggtgatgtccaaactttctttgtatgcaatggcatgttatgctctctctagtctaatccaagaacttaatctgttcatgtggcttgatacagatagttgtaacctgaagaatgctgaacagatagtcctaacatatgctttgaacatagaacaaaatatgaatctactacatgcgtatgctgctaaaattgctagtgcctaaccaattactttgatctgcaccattcaattaaaacgcctgtatgcataaatatgctgatcaagattttgattacatgactcttatcaaagatctgcaccatccaaattattaaaacttaatctgttcatgtggcttgttttttgagctgcagggagtgtgcgaggcggctggtgagcctgcacgcggcggcgccggagagcaggcagaaggtggtgtacaagaagtacgcgagccccaagctcggagccgtctccctccactcgccggccaagaagcttctcccgccgccgtcgccggtggcggcttgagctctcgctgttggaattttggcctcgattggaagaacatgtgcatagataggatcggatcgtcgccgcgtcgtcgtatcatcgctttgatgttaccccccgtttctgatttgattcttccaaattttgggttcctgatttgattggattgctactgattcgaatttggtgcgaatgaaattatgaaaaatcatcttgatgtttattctttttccccctttcctttttgagaggtggtaataatatttacatctttatattacctgaaaaaaatgttgccacggatgggtgggacccacgtggacacgtggccaaacggcagccaagattttgatagcctctggccagattcgctttccagccacacgatttcttctgtgacgtgtggcgtgagataactcacgcagctcagctggggccgacttcgtgggtcccacgagtcccatcccgatgatatgtggggccactggtatccgcgggcccacttgtcagtgtcaatggtgggagcatttaagtagaagaaaccagcactcaatcttcgactcctcctgctctgtttgttcgagtaattaattaagctccgaccacgaagcttctggcgattgtcggcgtcaagaacagcttgacgagcaggcagcaagaggattcgttcttcttctgtggtggatcttgattgggctccctgttttagtgttctgttcttcgcaagaaaggggccattctcttttggtttctacatgcaggtttgtgttcttcagttcttggtttgttgttgttgttatgggcatatacagtaagttctttcatggttagctggatgagaaatgaaagaaaaaaaatattgagaggatcggtgatgtccttgacgggagttaattgtgtgcaattgagtgatctgcttcagcttactcctctgttcttcttctttaatatgatcggttgtttgttcttctcaagaaaggccattctttttggtttctgcatgcaggtttgtgttcttcagttcttggtttgttgttgttatggcatgtacagtaagttctttcatgcttagcaggatgagaaccgaaaggcacaaattattagtgaaaagccaccgtgtgcgattgagtgatctcttccagcttactcttctactaccaattactctgttttcatcgaattcttcttctttgatatgatcttccacggttctgatctctgtcatgttatgatcctgtctgctaactagaattcttttttttttttggcttttcttttctgaatattgctgaacttttctaactcaactagagataactacaccactaattttcgaaatgacaccatgctcttgcataattaatcctgttgcctgcctttcggtgcacaagtatttgcaaagtaatcctgaattaaaatattctgccctgtttttgttttctttcagatgagtagcatggcatgccattcccttccagagagtggaagcaacttgtcagctgctgatgaactctttcagaaccaaaggtcagagcagggaatttactggacactctgggactccaggctatctgatgatctgaacacaacgaccgtatattcagacaatcatggcagcaacggtggcggcacgcaatctttcgacacctctgaacattgcagtacagtgccttcagattcagatga

SEQ ID NO: 40 - DNA, 1135 bp, Zea mays
cacgacttcctcccgccgccggttggcttcgctgctcgtccacctccgcccggcccgtgggacgagtggggactggagagggtcgcctctgggcttcgcctctcggcggccgagtgtctgcgtcgtccacggagctgagagcctgagactgagactgagagcgaccggcggcggggatggcgagggagaggcgggagataaagaggatagagagcgcggcagcgaggcaggtcacgttctccaagcgccgccgcggcctcttcaagaaggcccaggagctctccgtgctgtgcgatgccgacgtcgcgctcatagtcttctcctccacggggaagctctcccagttcgccagctccagtatgaatgagataattgacaagtacaacacgcattctaaaaacctggggaaaacagaacagccttcgctggacttgaacttagagcatagcaaatatgcaaatttgaatgagcaacttgcggaagcaagccttcgactcaggcagatgagaggtgaagagcttgagggattgaatgttgaagaactccagcaattggagaagaacctggaatctggtctgcatagggtgcttcaaacaaaggatcaacaattcttggaacagatcaatgacctcgaacgtaagagtacgcagctggcagaggagaacatgcaactgaggaatcaagtatcccagatacccccagctggcaagcaagcagttgctgatactgaaaatgttattgctgaagaagggcaatcctctgaatcagtgatgactgcgttgcactctgggagttcacaggataatgatgatggttcggatgtatctctaaagttagggctgccttgcgttgcatggaagtaaacaggaaatgaggctccttgtcgattctgggtgtggatgtgggtggagctgcggcctcagcggataggcacttgtgtatggttttatggacgaccggcccccgactacgtactgcaataatcttgcattggaagcgagatcggttaacctgatttgtcatcccttgtggcttcatgatgcgatgttccgcttgtaccgtttgctagcatgttaactgaatttttagaatcgcatatacttttgttcctatatatcactgtcgtactgctcgt

SEQ ID NO: 41 - DNA, 1021 bp, Zea mays
cctccggactgctccggacgcgcgcctcagatctactccaacacctccgcagcggcggcgcccgcgggtggaggagcaggagaggcggcgccatggtcgggaccgggaagagggagcggatagcgatacggaggatcgacaacctggcggccaggcaggtgaccttctccaagaggcggcggggcctgttcaagaaggccgaggagctctccatcctctgcgacgccgaggtcggccttgtcgtcttctccgccaccggcaaactcttccacttcgccagctccagcatgaagcaggtaatcgatcggtacgactctcattccaagactctccagaggtccgaaccgcagtcgtctcaactgcagtcacatatggatgacggcacttgtgcaaggctaaaggaggaacttgctgaaacaagccttaagctcaggcagatgagaggagaggagctccagaggctgagcgtcgaacagctgcaggagctcgagaagaccctcgaatccggcctcggctctgtactcaaaaccaagagccaaaaaatccttgacgagatcagcggtctggaaagaaagagaacgcagctgatcgaggagaactcaaggctgaaggagcaagtgacacggatgtcgaggatggagacgcagcttggcgccgatccagagttcgtgtacgaggaagggcagtcgtctgaatccgtgacgaacacgtcctatccgcgcccgtccaccgacaccgacgactgctccgacacatcgctcaggctcgggctaccactcttcagctccaagtgacggagatttgacatgtccggtagcggagcggtgccgattgcttgcccttctccactctagataggtctggattgggggagagcaagcactgctggatcgggaagacccaagtgaccaacgcgtcgcatcagaataaggcattttgagtgctgtatgatgtgtgtattctggctctgaaagtgagacctgcttttgttataatacatacatacaggcagcatggcaat

SEQ ID NO: 42 - DNA, 876 bp, Glycine max
attcggctcgagctaactggcaactaattaacgtgtttgggactcgcgagttgtgcattcctaacacccatttcaggaagcccaagcattgggagatgactagaaagaggatacagatcaagaaaatcgacaacatcagttcgaggcaagtgactttctccaagagaaggaaagggcttttcaagaaggctcaggagttgtcaaccctttgtgatgcagacatagctctcatagtcttttctgcaactagcaagctctttgagtatgccagttcaagcatgcatcaagtaattgaaaggcacgatcgctattcagcaatccatagattggatcgcccctctattgagctgcagattgagagtgactccaacaacattctgcgcaagaaagtagaagataagactcgtgaactgaggcagatgaatggggaagatctgcaaggattgacattacaagaactgcagaaactagaggaacatcttaaaagaagtttgaccaatgtttcaaaagtaaaggatgcaaaatttatgcaagagatcagcacctttaagagaaagggagtggaactaatggaggaaaaccaaagactgaaacaggtgccgagccttatccatgcacatagctataggcaatcatcggaatccattcttagcaattcatctaaccttcctgaagatggtggtagcaacacatctctcaagttggggttaccttaaataatgaacaaaatgtagattatttagaagtgatcggtttcgcttcctttatatgtcagtcaaaaccaattgaatatcctgtgttgtttgctgtttaaaaacaactcgtgtaaagtaagtaaatccaaaggatgaggtcctgcatgtagaattgtgcttg

SEQ ID NO: 43 - DNA, 999 bp, Glycine max
cggacgcgtgggcccaggcattggtgggttcttaccctttattattattattattggagatgactagaaagaggatacagatcaagaaaatcgacaacatcagttccaggcaagtgactttctccaagagaaggaaagggcttttcaagaaggctcaggaattgtcaaccctttgtgatgcagacatagctctcattgttttttctgcaactagcaagctctttgagtatgccagttcaagtatgcatcaagtaattgaaaggcgcgatagccattcagcaatgaatagactggatcgcccctcaattgagctgcagattgagaatgactccaatgaaatcctgcgcaagaaagtagaagataagaaccgtgagctgaggcagatgaatggggaagatctgcaaggattgacattacaagaactgcataaactagaggaacaccttaaaagaggtttgatcaatgtttcaaaagtaaaggatgaaaaacttatgcaagagatcagcacgcttaagagaaagggagtggaactaatggaggaaaaccaaagactgaaacaggtggtaccgagccttatccatgtacataggcaatcatcggaatccattcttagcaattcatctaaccttcctgaagatggtggtagcgacacatctctcaagttggggttaccttaagtattcaacaaaatgtagattattagaagtgaccgggttcgcttcctttatatatgttttaagtgtttcactcaaaaccagttgagtccagtgatgtttgctgtttaaaaacaactcctgcaaagtaagtaaatcctagggatgaggttctgcaggcagaattgcatgtacttgaattcgtattctattttcttttcgtagattgattcataggaagtgttatatatgcccgagttaatggtcaatgctttggccgtttcttactttctatactttgtcatcataaaaaaattattcttacctaaaaaaaaaaaaaaaaaaa

SEQ ID NO: 44 - DNA, 2003 bp, Zea mays
gaattcggctcgagctcgccgctgccgcatcctcaccctcgtccgctcctccgctgccccaaaccctagcctgaggaggggtcctcctccgctaccgagacccacgatgtcgaccatcgctgcctcccgccgctcgtcctcctcgtcctcttccgcgaccgccaagcgccccgcgattgcggacggccccgggggacccaaggcgaccgccgcacaggccaagaagcgcgtggcgctcggcaacatcaccaacgttgccgcgcggggagggagggcttccgttggcggcagccttgggaacgtcatggcgcccaccagcagcgcgaagttgaatccaacggtacccttgaagaagccgtctttggcaacaagtgctcggagtgtgagttcttccatccggggttctgctgacaaaccggcttccatcaagccagctccaccagtagcacgccatggcagcgcaacacaaaggcataacaatgttcctcctcctaaagtgcctaccattgccgatgtgccaagtcgtgctcctgccttggtgtcctgcaccggcttggtgtctcctggacgctcaggagattctgtttcatccgatgagacgatgtcgacttgcgactccatgaaaagcccagactttgagtacgtagacaatcaggacacctcgatgctggcttcgttgcagcgacggacaagtgaacatctgcgaatatcagaggatagagatgttgaagaaaataagcggaagaaaaatgccgtggccccaatggaaattgaccgcatctgtgatgttgacagtgaatatgaggatccacagctgtgcgctactctggcttctgacatttacatgcacttgcgagaggctgagacgaagaaaagaccgtcaactgatttcatggaaacgattcaaaaagatgtcaacccaagcatgagagcaattttgatagactggctcgtggaagttgctgaagaatatcgtcttgttcctgatactttgtacctgacagtcaactacattgaccgttatctttctggcaacgaaatcagccgccaacggctgcaattacttggtgttgcatgcatgcttatagctgcaaaatacgaggagatatgtgcaccacaagtagaagaattctgctacataacagacaatacatatttcagagatgaggttctagatatggaagcttctgtactgaattacttgaagtttgaaatgacagcacctacagcaaagtgctttttgaggagatttgctcgtgctgcacaagcgtgtgatgaggatcctgctttgcatctggagttccttgccaattacatcgctgagctatcactactggagtacagtctactctcttaccctccatcactaatagctgcatcggctattttcttggcgagatttatactacagccaacaaagtatccttggaattccacactcgctcattacacacagtacaaaccgtccaaactgagcgaatgtgtaaaggcattgcatcgcctttgcagcgttggttctggtagcaaccttccagcaatcagagaaaagtacagtcaacataagtacaaatttgttgcaaagaagcagtgtccaccgcagatccctactgaattctttcgggacacgacatgctagactagaaacccagaagtgattccagttgcttactggattcttcttgatgtgtcttgaatgcccagtgtagcacagcacaactatgcaagtgctgataacccccaggttgtttcaggtgattacaggggtgtaatcaatgtttgtggtcatgttaggtcattggtgtggtttttcttttcctgcttccagtctttctgtatgtagatcagtgttttcaggcgcttgtaaatccgagttctgtagtagagcacaatatcttgtaagttaactgaagaaatttggtgatcaaccaagttacctacaacttatgttgagctggtgatcaggtttttgcgctagttgaaaaaaaaaaaaaaagggcggccgc

SEQ ID NO: 45 - DNA, 1506 bp, Zea mays
gaattcccgggtcgacccacgcgtccggcgacctgctcctgcccccgccgccgccgtgcacgcacagccggagcaggagcagcgctgcccgcctttaccgttgcccatggagaactctgccgccgccgccgccgcccggccgcgcctcacccgcgcagccgccaagcgctcagccgtcgtcacggctgtggccgtcgccgccaagcgcaagcgcgtcgcgctcagccagctgcccacgctccccaacgccgtgctcggcgcgcacgacgacgacgacgacaagcccgtcaggaagcagcgcctcctccccgccgccaagcccaagcccaagcccaaggcagcgcccgcgcctgccgcgcccgccgccgcggatgacacggatgacgacattcagctctgcaagccctacgcttccgacatctactcctacctccgctccatggagtcgcaggccaagcgccgcctcgctgttgactacatcgcggcggtgcagatcgacgtcacgcccaacatgcgtggcatcctcatcgactggctcgtcgaggtcgccgaggagtacaagctcgtctccgacacgctctacctcaccgtctcctacatcgaccgcttcctctctgccaaagttctcaacaggcagaagctgcagctcctcggcgtctccgccatgctcatcgcatccaagtatgaggagatcagcccgcccaacgtggaggatttctgctacatcaccgataacacctacaccaagcaggaggtagttaagatggagagtgatatactgaatgtcctcaagtttgaggtgggcagtcctaccgccaagacgttcctgaggatgttcatcagatctgcccaagaagacaacaagaagtatcctagcctccagttggagttcctggggagctacctttctgagctgagcttgctggattatggcttgattcgctccttgccgtcacttgttgcagcctcagccgtctttgttgcaaggctgaccctggatccacacacccatccctggagcaagaagatgcaaacgctaacaggctataagccatctgagttgaaggactgtgttgctgccatacataatttgcagctcaaccggacatgtcaatccatggtggcgatccgggagaaatacaggcaacaccgattcaagggtgtatcagctttgctacctcctgttgagatccctgcatcatacttcaatacactgaaggagtaggtgttccttgataatctaagagagccaagcacacagctttcctcaagcaagatgtgcaatgctaaggttgttagggtactgaggttcttggatgctgcatctaggcttggcttggagcattcagagttgatttgtttgaagttcaaactcaatagaaagttcggtgtatcaaatcttgtacttgtgtatcataattatacattacaaccaggtgcctttatttattgggggcacaattccaaaaaaaaaaaaaaaaaaaaaaaaaaaaaaagggcggccgc

SEQ ID NO: 46 - DNA, 1699 bp, Zea mays
gaattcccgggtcgacccacgcgtccggtcacggggctcctccgtccgtaaggcaccgccgcagcgtctcggctggatcaacaggccggccgatccgtcttcttcccctcctcctgcgggtcggcgtttggggatcatggcggcgcgggcggctgacgagaacaggagaccggcggcagggaagcccgcgccaggcgtccgagacatggcgagccggcgcgcgctcacggacatcaagaacctcgtcggggctgccccgtacccctacgccgtcgccaagaagcccatgctgcagaagagcaaaagggacgaaaagcagccagcgttggcaagcagccggcccatgacaaggaaattcgccgcctccttggcgagcaagggccaacctgaatgtcagccgatcgtagctgatccagaacccgaagtttgtcaacagaaggaatcagtaggcgatggcaccgttgatattgacgtggaactctacgagctggtcgacggtagtgatagtgacatcgacatgggtgcgacagagaacaaggacattatgaacgaagatgaattgctcatggatattgacagtgcagactcggggaacccgtttgctgcaacagaatatgttaaagagctttacaccttttacagagaaaatgaggctaagagttgtgtaaggccagattacatgtccagccaacaagacataaactcaaagatgagagcaattctgattgactggctgattgaggttcactacaagtttgaactgatggatgagacgctctttcttatggtaaacataatagatatattcttggaaaaggaagtggttccaaggaagaagctacaactggttggagtcacagctatgctgctcgcttgtaaatatgaggaggtatctgttccagttgttgaggaccttgtgctgatatcttaccgtgcctacacaaaagggcaaattttagaaatggaaaagttgattctgaacacgctgcagttcaacatgtctgttccaacaccttatgtcttcatgaagaggtttctgaaagctgcagatgcagataaacagcttgagctagcgtcatttttcatgctggagctctgcttggtagaataccaaatgctgaattatcggccttcgcatctggctgctgctgcggtttatactgcacagtgtgctatcaatcgttgccagcactggacaaaggtctgcgagtctcatagcagatacactagcgaccaactcctggagtgctcgaggatgatggtagattttcaccagaaggctggaaccagtaagctcactggcgtgcacaggaagtacagtacctacaagttcggttgcgtggccaagattttgcctgcgcagttcctgctggagtcgggagggacaccgcctccttcaggtgcaaactagttgaatcgacctattcaactgggtggattttttaaagtttttagaatactccatgaacaagatgcagaaaacatcgtgttgatgttgcccaaaagtgcatcgaatttctttggagagttatgattaacaactttttttttatctatgttgaatgacgagtgacggtcggtcacgttgtgcttgtgcagttatactgcggctaataacaaactgtccagttattctaaaaaacaacgaacgatgttcaggaaaaaaaaaaaaaaaaaaaaaaaaaaaaagggcggccgc

SEQ ID NO: 47 - DNA, 1751 bp, Zea mays
gaattcccgggtcgacccacgcgtccggtccgacgagccctagggaacgcgagaccggccgtcggcgagagaaggactcgaatggagtgcgcaagggagttgcgggttcgctccacgtttacggcggcggccatggcgtccaagaagcaggtggggcctggaggcgcggttcccgctcaggaacagatgaacggcggcgatgccgccagactggtcaggaagccaatggatacatttccacagccagcggcggcaagaggccgtagggcacttgtcgacgttggcaatcttatgaatggccggccttctcttgtgaaccatcagaagcaagcggttgcggcagcggcaaccagtcataaaccactcaacgtcggcaacaagaagccacttgttcctcaggcagcagcaagaggcctgcgaccccttgccgacgttacgaatcttatgatcaaagaccgtgctgctcctgcaaatcgtcagaagcctgtggatgctgtgtttaacaggaacgggaaggcagtaaagctgaaggaatgcaaggtgaagcctgaagtcattgtgatcattccagattccgagaaggagaagaaaggcaaattccctggaggtcagagagtctgtaggagggtgccaacactttttgacaatttgacaaaatgcagcagggcctctgatgggattaccaccccgaagaagaaggatccatatgacattgatgcacctgattcttgcaatgagctggcagtcgttgaatatgttgaggacatttacagattctacaagagcactgagggcacctgccttcctctcagcagctacatgagctcacaggctgaaatcagtgagagaatgagagctatccttattgactggattatcgaggtacagtacaggcttactctaatgccagagacactttacttgaccgtctacatcatcgaccagtacttatctatggagagtgtaccaagaaaggagctacagctcgtcggcataagtgccatgctgatagcaagcaagtacgaagagatatgggctccactggttaaggacttgatgtgcctatgtgacaacgcatttaccagagaccagattctgaccaaggaaaaggccatcctggacatgctccattggaacctgacggttccaacaatgtacatgttcattgttaggtacctgaaagccgcaatgtgtgacgcagagcttgagaacatgacattcttctactccgagctggcattggtccagtacgcgatgctggtttaccctccatcggtgaccgcagccgctgccgtctatgctgccaggtctacacttgggatgaatccacagtggactgatattctggaacatcacactggcctagctgagccacagttactggactgcgctaggcggctgatcagcttccatgccctggctccggaaagcaagcaaaaggcggtgtacaggaagtactccaagcccaagctcggctccgtcgcgcttcaatcccctgacaagaagctgttgtcaggttgaggctcgctgctgctcattgtattgtatatcatcgcttcgatggtaccatttgtttgggtcgtgtgctcttatgcttttctactgaagcagagcatgtgttggttagtcagtttgcttaaacgactactgaagcagagccttgtatgtgtgttgggagaatgtgatatgtgatgtcaagctcaaaaaaaaaaaaaaaaaaaaaaaaaaaaaaaaaaaaaaagggcggccgc

SEQ ID NO: 48 - DNA, 1750 bp, Zea mays
gaattcccgggtcgacccacgcgtccgtagctcctggctcgcggctcagcttgccactaccagcaagcgctcgtcacccgtcggttctccccgagtagctcgtcgcgtcggcaatggagaatctgagatctcaaaactgccaccaaggtgttgccatggagggagtcaagtttgcgccggagaaggccaacaccaaccggagagccctcagcgacatcaagaacataataggaggcccacaccagcacttggcggtcagcaagagggctctgtcagaaaaaccagctgctgctgctgctgcaaatgctaaagatcaagctggctttgttggacaccgtccagtcaccaggaaattcgctgcaacattggcaacccaacctacagttgcccttctggacccaattggaagtgaaagactgaaaagaaacgctgatacggcatttcacacacctgcagatatggaaagcacaaaaatgacagatgacagtcccttgcctatggtgtcggagatggatgaaatgatgagtcctgaactgaaagagatcgagatggaagatattgaggaggcagcacctgatattgacagtggtgatgcaggaaattctctggctgtggctgactatgtagatgaaatttacagattttacaggaaaactgagggtgcaagctgcgtccctacaaattatatgtcaagccaaactgatataaatgagaagatgcgtggcattctaattgactggctcatagaggtacactacaaactagagctgttggaggagacccttttcctaaccgtgaacatcatagacagattcttggcacgtgaaaatgtggtgcggaagaagcttcagttagctggtgtaactgctatgttgctcgcgtgcaagtatgaagaagtgagcgtacctgtggtcgaggatctgatcttgatcggtgatcgtgcatacacaagggctgacattcttgagatggagaggaggatagtgaacacacttaatttcaatatgtcggtgccgactccatactgtttcatgagaaggtttctaaaggcagcacaatcagagaagaagctcgaactcctgtctttcttcatgatcgagttgagtcttgtcgaatatgagatgctccagttctgcccgtctatgctagcagccgctgccatctacaccgctcaatgcaccataaatgggttcaagtcctggaacaaatgctgtgaactgcacacaagatattcagaagaacatctaatggtttgctctaggatgatggttgaactgcaccaaagagcagctcatgggaaacttacaggggtccatagaaagtacaacacttctagatatagctatgctgcgaaatcggaacccgcaactttcttgctggatgcctgaacctaagcttgaactatacacactcttaactacttccatggaaagagtggaagggaggctgcttcgactaaactacagaagtgggatctatctgaatatatgcaacggctgttgcagcaaatatttggtggggctgggttggtgtgttgtttgttagttcaataacttaacattaatgaaacagtgtttgtgttgtttaggttttttttccaattatatcgattggaatttcatttgttgtatcctggccatcattctttactcatgtcatgtgacacctctgcgttttgaaaaataaacattgattatgtggatctgctgaaaaaaaaaaaaaaaaaaaaaaaaaaaaaaagggcggccgc

SEQ ID NO: 49 - DNA, 1850 bp, Zea mays
gaattcccgggtcgacccacgcgtccgcgtcccccctcaagaactgtacccatcacgcgccgccatcgattgaccttgaccgacccgaccacccatcacgcttcttgttgccgccgctgttgcttgccgatacgcggtggctgcgctcgccggcggggaagaggggtcgcgggctgcgcgcctccagtctttcttcgcctccgtgctctcgggcctcttcttcggccaggccgatcaggacgaggaccaagagatggcctcgcgcaaccacaacgccgccgctccgcagcttcaccatcacaaccgagccggtgttcccgctcttggaaaggccaaggccgtgcccgcccgagctgacgctctgaaccggcgaccccctctcggcgatataggcaacctcgtcagcgtccgcccagccacagggaacccgcaggagcaggtcaatcgccccatcactagaagcttcggcgctcaactcgtcaagaaagcgcaggcgaaggccgcaatcaagaatgccgcaatcctgcctgcgaggcatgcgccgaggcaggagaggaaggctcctgtcaagcagcaaccgccgccggaggatatcatagtactcagctccgattctgaacagagcagggcgcagtccgagagcagcgctagctccgtccgctccaggaggaaggccatcaacaccctttcttccgtgctctcggctcgctcaaaggctgcctgtggaatcgctggtaagcctagacaagtggtcgatgacatcgacaagctggacgtcaacaatgagctcgcggtggtggaatacattgaggacatctacacgttctacaagattgctcagcacgagagacggccatgtgactacatcgacgcccaactcgagatcaactctaagatgagggctatcctggctgattggataattgaagtacaccacaagtttgaactgatgcccgaaactctctacctgaccatgtacatcatcgatcagtacctctcgctgcaaccagtcctgcgtaaggagctgcagcttgtcggcgtttcatctatgctgatcgcctgcaagtacgaggagatttgggccccagaggtgaacgacttcatcctcatatcagacagtgcatacagtagagaacagattctttcgatggagaagggaattctgaataggctggagtggaacctgactgtccctacagtgtatatgttccttgtccgttttctgaaggccgcaacattgggcggcaaagttgagaaagagatggagaatatggtgttcttcttcgctgaattggcgctgatgcaatacgatttggtgacacgcctgccatcgctggtcgctgcttctgctgtctacgcagccagactcactctcaagagggctcccctttggaccgacaccctcaagcaccacacgggcttcagggagtcagaggcagagctcattgaatgcacgaagatgctggtgatcgcgcactcgactgcccctgagagcaagctgagggttgtatacaagaagtattccagcgagcagttcggaggggtcgcgctgcgtccacccgcagaggagatctgcaagtgaacgaaggctactttatccgtgtttgcctattgcttgctttaggggaagtggcgatggaaggcgagtctgacattcgctaggcttttttatgtttgcttgtttcagacagccgtttgtttgctaggctgttctcagagtcggttgttatctgacttgtgatggcaactataattctatctagtacaacatttttattcataaatgtgaatggtgttttacaaggtaaaaaaaaaaaaaaaaaaaaaaaaaaaaaaaaaagggcggccgc

SEQ ID NO: 50 - DNA, 1628 bp, Zea mays
gaattcccgggtcgacccacgcgtccgcgtcactacccacgccactgcatagaccgagaaaaaggacgaattttttcctcgccgcaacctcacaccatggaagaggcgatgccgccgccgccgccgccgctctcatcttcctcctccgccgccgtggcctgagctctcccatcgctcgctctctccatcgggcctacctatcctagcagtgaataagtcatggcagctttcgccgcgttgttcgaccccctctactgcccggaggagcacctcgatctgtaccacgaaggacccgtcgaggttgtggacgagcagtggcaggaccagcgcggacagcagcaaccggcggctcttgacgacgagctgccggcgctgttcgaggcgctccgggacaaggagggggtggtgctggcgggtgatggggaggaggatgggtacggcggctcggcaggccgggaggccgcagtcggctgggcgtcacgcgccgcggcacggctgggcttctctgcgctcacttccgcgctgtccgccgcctacctggaccgctgcttcctccccgggggcgcgctccgtctcggcgaccagccctggatgtcgcgcctcgccgccgtcgcctgtgtcgcgctcgccgccaaggtcgaggaaacgcgcgtgccgctgctcctcgacctccagctctgcgccgccgccagctccgacgctgacgcagcggacgcggacgtgttcgaggccaagacggtgcgccggatggagctgctcgttctctccgcgctagggtggcggatgcaccctgtcacgcccttctcctacctccagcctgtcctcgccgacgctgcgatgcgcctacgcaactgcgaggccgtcctgctcgcggtcatggccgattggaggtggcctcggcaccggccctcggcgtgggccgccgccgcattgctcaccacagccggcggcggcgacgacgactcggagctgctcgcgctcatcaatgcccccgaggacgagaccgcggagtgcgccaagatcatctccgaggtgacaggcatgagcttccttgtctgcgacgtcggcggcatgatcgccgggaataagcgtaagcacgcggcggcgcggatgtactcgccgccgctgagcccgagcggcgtgatcggcgcgctgtcctgcttcagctgcgagagctcgttgtccgccacagcggactcgcgcaccctcgctactacggctgcgggggtcggcccgtgggcaccgtcagcgcccgtgtccgtgtcgtcttcccctgagcccccaggtcgggcccccaagcgcgctgcggcggcgggggtcccgcatccgcttccccccgacgaggagagccgcgacgcctggccgtccacctgcgccgcgtgacgcaccgtgccggaacggtgcctatggcgagatcccccgctcaggtagtcaggtggcggtggggatataaaggagcatcagaatctcgcgccggtgacgagaacgaaccattttgcccattgccgcgagagatggggggctagattgcaagaagaaaaggatgtaatgtctgcatgctcatgtatggcagcacattttgcaatgatggttctcgatcgtaaaaaaaaaaaaaaaagggcggccgc

SEQ ID NO: 51 - DNA, 2067 bp, Zea mays
gaattcccgggtcgacccacgcgtccgctaccctccctcatcacttgttccactacgaccggccacctagctcgccgcgcgcgcaagcctgcgccaccacccactctactagcttagtctcccctcgtgcagcgcgacgacagccagcaatggccgccgcccagtgaggcagggtcgcagtgacggcacgagacgcacacccacgggcgctggcggcatgccgggcgacgcctacgacctcctgtgcgccgaggacgacgccgccggcagcgccctgctgtgcaccaccgacgacgacgacgggtgctgctccgctgtcgaggaggactcggcggcggcggcggcctccatcgccgagctcatcggcggcgaggcccagtactcgcccaggccggactaccccgacaggctccgctccaggtccatcgacccggccgcccgcgccgagtcggtcgcatggattctcaaggtgcaagaatactatgggtttcttccattgacagcctacctcgccgtcaactacatggaccggttcctctctctccaccgtttgccggaggacgggtgggcgatgcagctgctggccgtgacctgcctctccctcgctgccaagatggaggagaccctcgtgccctccctcctggacctgcaggttgagggcaccagcagatacgactgcttcgagcctgggacggtcggccggatggagctcctcgtcctgatggcgctcaactggcggctccgctcggttactcccttcaccttcgtcgacttcttcgcgtgcaaggtcgacccaggagggaggcacaccaggtgcctcattgcccgggccacgcaagtcattctggctgcgatgcatgacgtcgagttcttggaccactgcccgtcatcaatggcggcagcggccgtgctctgcgccatcggtgagacgccgtcactggagtcggtcagccctggggctgccgtcagctggtgcatcggccttgcagaggaagggatcagcagctgctacagactgatgcagcggctggtgataggcaacgtccggacaagggtcgccagcacgacgaccatggcagcagtgaacctgtgctgctcggatgaggcgctgtcctcgcattcctccgccacctcctcgccacccccggccaagaggaggaagaggtcgccgacggccacgtgaaaactgaagaacgcaagtagataggattatttatacgcttttggggggcagattaacagggtttgatcgatttctttgcagtttgtttgtcgttttttcttctttgtgattctttctcctttttcccccttttgccatttatttgttctgttcttttgggttggatctctactcctcggtggggggattctgcctgcctgctcgaccggcccagtcatcatggcggcctctggcctctgcaccgccagccagtatgtgaaggcgacgagactcgagagagagaaagaaagacagctactacgtataacagacacatctgtgtttctctgtgcaacactctgtggggcttcttcaaccccgacgcagagctgcagagagggaccattgattggtgagcgagggcagccatggcggcagatggagatggagagggaggggggaagaggcaatgagttgcggtggatggatgatgattggtagggttaaatgaggtggtcaaagggccgggcggtcagtgctcctgccaagatgcagccctgcctgcaaagtttctgttcatattcatgagggcaaaaattgtttgtttccgagtggtttgtttgtattttgttgatgccgctgaggcgagggcgtcagagagagagaaagaggggcatgctttgctttgctgtgatgggagtcacatggatatgccctactgtggtggtgctctggagggaaatatttgtccatctccagagctaacagtgtccaagcatggggcttttgggggcccttgctgattgtttgtatctcttttttcttgcttgtgtatcaatgaagattttgccatttgaattggcctgagaagagagtaaaaaaaaaaaaaaaaaaagggcggccgc

SEQ ID NO: 52 - DNA, 1823 bp, Zea mays
ggtaccggtccggaattcccgggtcgacccacgcgtccgcatgaccccatttcatttctctacctctccagctgcccacttctctgtgagcgcgcgcgagtgtggagagaagggagggaattcccccctttctgttcggcgcacgcacccgcacgccccacgctgcacagtgcacgccgccttttcctccgccttgctgctgcgagtccgcaaccactggaggaaaaatcttttccttcacttttcttccctttccccccgcgcatgcacgggctctgattgacgccatgggggacgccgcggcctccacgtccgctcccaccacgcccacctccatcctcatctgcctggaagacggcagcgaccttctcgccgatgccgacgatggcgccggcactgacctcgttgtcgcccgcgacgaacgtctgcttgtcgtggaccaggacgaggagtatgtagcgctgctcctgtccaaggagagcgcgtcaggcggcggcggcccggtggaggaaatggaggactggatgaaggccgcgcgctccggatgcgtccgctggatcatcaagaccacggcgatgttccggttcggcgggaagaccgcttacgtcgcggtgaattacctcgatcgcttcctggcgcaacggcgagtcaatagggagcatgcgtggggtctgcagctgctcatggtggcgtgcatgtcgctggcgaccaagctggaggagcaccacgctccgcggctgtcggagttcccgctggacgcgtgcgagttcgcgttcgaccgcgcgtccgtgctgcggatggagctcctcgtcctgggcaccctcgagtggcggatggtcgccgtcacccccttcccctacatcagctgcttcgcggcgcggttccggcaggacgagcgccgggctgtcctcgtgcgcgccgtggagtgcgtcttcgcggcgatcagagcgatgagctcggtggagtaccagccgtcgaccatcgccgtagcatccatcctcgtcgctcgcggcagggagacgcccgccggcaatctggacgcgctcaaggcgatcctgggctcatcatttccgcagctagacaccgggcatgtgtactcctgctacagcgcaatgattcgggaggacgacaagtcgccgacgcagtcgacgtcgacgtcgacgggggtggcgtcctcgggcgtctctgtcgccgcgcacgccggggggagcgggagtcccagccccccgggcgcttccgtgtccgtgggcgccaataatgccgctggcaccgccccgccggcaaccacggacaaccgcaacaagaggagacggttgcgctcacctcagcgacagtaggagcagctcagctgctggcagtgcattgcagtgcagtgcagtccagctgcgttttcttttttcagctcaccatttccttttgctgccgattgtttcttcaggggtggccgtagagtgatttggtaatttagtgccggaaagattagtgcggtgtcgcagagtgatttggtaatttagtgccggaaagatttctttgttttgaggagatctttcgcgggaccaaagggaggggggcagtgtaaagacgacagaacaagcgtgaaggcctcgagagtcgagacctcacagggtaccgcctagcgcctactggggtgaaagtgaagtcaaggagtcgggagggtgtgtgtgaataccgtttgtagcagctagtgcgtccgtctgtcttttttttttctttctgtttattaattattaatagcctgctcaaaaaaaaaaaaaaaaaaaaaaaaaaaaaaaaaagggcggccgctctagaggatccaagct

SEQ ID NO: 53 - DNA, 1012 bp, Zea mays
ccacgcgtccggtgctgtgctctgctctgctctcgcctcgcacggactcgtggtaaaggatggagaccatgtcggctctcgcgaggacggcgccgccccttgctgggaccattcgccggccctcatgcgcgctgaggccgacggcgtccctctccttcgccgccgcttcaacgacgccccgcggccggctcgggctggggctgagcacggcgccggcggggagcgggagggcggccagggctcgcgccgtcccgcggcgcatcgtcgcctcctcggaggttgagcaaagctacattatgatcaaaccagatggtgttcagcgtggtctggttggagagattatttctcgctttgagaagaaagggtttttgttgaaaggcttaaaacttttccagtgccccaaggacttggcgcaggagcattacaaggatttgaaggataaacctttctttcctaagctgatcgattacataacttctggccctgttgtctgcatggcctgggagggtgatggtgttgttgcatcagctcggaaattaataggagctactaacccccttcaagctgaaccagggactataaggggtgatcttgcagttcaaactggaaggaacgttgtccatggaagtgatagtcctgataatggcaagcgtgaaattgaactgtggttcaaagaaggcgaggtctgccaatgggaatcagttcaagcaccgtggcttatagaataactattgctaatcatttccagagttgtattcaatgtttttttttgtgttcgtcttgattcaaggagccatgcaagagtgtatgagtttagttcggctaagtaattagctcatgagggcttgaattatcggttctttttgaggattgaggatttgtgcaactgaaacctttgatcagttgctcatgttgagaagctaatttcttgtcatatttacatgtaataaagtccctctactacagtaataaattagtatttcctctggtccaattaaaaaaaaaaaaaaag

SEQ ID NO: 54 - DNA, 1137 bp, Zea mays
attcggctcgagctcgagccgaatcggctcgaggcgaccgcaccggcacggcgcccatccatccatcgccatcctctagcccagtccaaaggaaccctagccatgagcgccgcctccaagaagctcttccaggccgccaggtccctcgtcctctccgcttctaaccgctccgtcctcgccgccgagggccgcaccgccgcgctcgccacgctcaccaactttggcaggaagaccctccccaccgcctacttatcctaccacaagcagggatcccaccatgccgcgtcggggtggggagccatcgccgccgcagtcccagctgcagtttacatgctccaggaccaggaggctcatgctgcagagatggagcgcaccttcattgccatcaagcctgatggtgtccaaagaggcctgatttctgagattatgagccgatttgagagaaaaggctataagcttgttgccatcaagctgattgttccatccaaagaatttgctgagaagcactaccatgatctcaaggaaaggcctttcttcagtgggttgtgtgattttctcagctctggccctgtgcttgcaatggtttgggaaggagagggtgtcatcaagtatgggagaaaactaattggtgccacagacccacagaaatctgaaccaggaaccatcaggggtgatcttgccattgttgttggaagaaacatcattcatggaagtgatggcccagagacagcgaaggatgagatcgctttatggtttgaacccaaggagctggtctcttacaccagcaatgcggagaagtggatctatggggtgaattaacgagagagtcaatctgttttttttccttcttttgatctcggttttcacataattgccgacagacctaggcacaaggatgtaataaagtcgctaccgtcacttctgagttggattgtgaccttcaggtgtagtaaggcacaaggaaggatggaaaggaaaggaatataccgtgaaatatagagcgtgcactgagtagtcgcgatgttcaaatcaaactatatatcaccgtcactggagtcatgtaatccaagatggtgatgcagatgtttctttggatctatttctctagatatccctaccaaaaaaaaaaaaaaaagg

SEQ ID NO: 55 - DNA, 658 bp, Zea mays
aaaaccagaccatcaaacaagtgccagcgccctctcgcagtcgccgcaatggagagcaccttcatcatgatcaagcctgacggcgtccagaggggcctcattggtgagatcatcagccgttttgagaagaagggcttctacctcaaggccttgaagcttgtgaacgtggagaggtcgtttgctgagaagcactacgccggatctcgcctccaagcccttcttccagggctcgtggactacatcatctctggccctgtggtggccatggtctgggagggcaagagcgtcgtcacaactggccgcaagatcattggcgccaccaaccccctggcttctgagcccggcaccatccgtggcgactttgctgtcgacattggcaggaatgtcattcatggaagtgacagcattgagagtgctaataaggagattgccctgtggttccccgagggccctgctgattggcagagcagccagcacccctggatctacgagaagtaaacatggaaagtttcacatcaaaccttgagagccagaggaagcatgtcaccatttgtgctttagcaatgttttcgaaaagattatgatctgtatcttggaaccttatttcaatggaccaaatttctttctttgccaaaaaaaaaaaaaaaaaaaaaaaaag

SEQ ID NO: 56 - DNA, 910 bp, Zea mays
ccacgcgtccgcccacgcgtccgcccacgcgtccgcccacgcgtccgcgcctctcctcctctcctcccccacccgtccatcgcccctccctccggtctgcgctcccacagcctcacccctgcgcccccgccgattcgcgtcgccctttgttggaaggaacgatggagcagaccttcatcatgatcaagcccgacggcgtccagcggggcctgatcggggacatcatcagtcgcttcgagaagaaagggttctacctcaaggggatgaagttcatgaacgtggagaggtccttcgcgcagcagcactacgctgacctttccgacaagcctttcttccccgggttggtggagtacatcatttccggccccgtggtggcgatggtgtgggaggggaaggacgtcgtgttgactggccgcaggatcattggggccaccaggccttgggaggcagcccccggtaccattcgtggggactacgccgtggaagtcggcaggaatgtcatccatggaagcgactccgtggagaacgggaagaaggagatcgctctctggttccctgaaggtgtggcacagtggaagagcaaccttcatccctggatctacgaggcttgagcagttgagcttggatgccttgcctgcttccatggaaaccagagttttgtttgagtattatctgttggctctggctgaagagtcataatttagcgctctgtgtgttacaccagagttaagtctgcctgaacttatgtggcatttgtttgagtttctaccttcgtgccctgttttctaatgtaccgtggttgtgaaccggtcaatgtgatctgaaataaaacattgcgtgccaagtttgtgttacaagtttgatgcactgggaatgccaggcaactaatgtggtaaaaaaaaaaaaaaag

SEQ ID NO: 57 - DNA, 4001 bp, Synechocystis PCC6803
atcaaccagactcccaggccgcccaccaccatggtgataatggtcacaatccaaaaatcactcacttcctggagcatcaccaaccaggcaagaacaacgaacgggacgctgttggcaattaaatgaccaaaatcggcatggagaaagggtgcaaagacaattcccctcagaccttccaaggagcgggggtaaatgccaaattgatccaaactaccccgaaaaacaaacgcatctaagatttccagaagccaaaaaatggctaaaaaactgacaataatcgagaactgactttgcagggtggcccgcagggcagttttggaattttggctcatggtggtgacaaagagcgacggctgaggttaggagggccagggacccatccataatcaaggataaccaatcgccctagaatgggacagaccagaaactagatcctatggcgactatccacggtaattggcaaccctcccacggggaaaacggcggcaaactgtttctttgggcggatacctggggtcatcctttgccagaaaccattggcgatcgccatccctttgcgttggatctgccggatttgctacaggcctggtcgaatttgcccctggccttccccaaggcggatggggtgacagaggcagcccttactctgcatttacccagccatcgccagcaaaaaattcccctaccctttgtcacagggcaagatccggtggccatggatgcgaaatatctccactggcgatcgtggcaggtaaccggggtaaatctgaccccaagccaaacgttaacgttgctccaatctattcccctggggggccaagccttagctaacttaggatcagagttttacttttacggtcaactgcaccgctggtgtttagatttggtgctacggggtaaatttgtgccgggactggagcaaaggggggaagacggtaattactatgcccaatggattcctatcctcgatagcatccaagaccaaacccatttagcccaatttagccagagagtacctgcctgcgccctggccaacctgactgactcccaggagccccaaatgttggtggtggatttactacaaaaattattgcaagcccaaattggtgccgtcagtcccagcctagccaacgttaaagaagtctggttgaatgattggctccggggattaacccatggggggcaaacctccctcggcacaggcaaagctctacaacgattagccacatccttagaccattggtatttaccagtccagaattatttgggccaaaaaaataaccaagctttagcccaacggcaatggcggggggctctgcggttacaacctccagcggacgatggggggggaacctggcaactggattatggtttacaagccctggatgacggggaattttggctcccggcggcttccctctgggccatggccggcgatcgcctggtgtggcagggaaggagggttgaccagggggcggaaagtttactgcggggcttaggggtagctgcccaaatttacgaacccattgctgcaagtttgacggaaaggtgtcccacgggctgtgggctagatgccatccaagcctacgaatttatcctggcaatcgcccatcaattgcgggatcgggggttaggggtaatcctcccgccggggttagaacggggcggcaccgccaaacggttaggggtaaaagtggtgggggaagtgcaacggcaaaggggccagcggctaactctgcaaagtttaattaattacgacttgcaactaatgatggggagcggggacaatgcccggttattgacggccaaggactttgaagcgttactagcccaaaaatctcccctggtggtgctggacggagaatggattaccctgcaaccggcggacgtgcgggcggccaaggtcattttacagcagcaacaatctgccccgcccctcacagtggaggatgctctgcgcctcagcattggtgatttacaaaccgtctctaaactgccggtgacccagtttgctgctcggggcatattacaggaattgatcgacaccctccgtaacccggaaggagtgaaagccattgctgacccaccgggctttcagggtactttacggccctaccaagctcggggagtgggctggttagcttttctggaacggtgggggctgggggcctgtttggcagacgatatgggtttgggaaaaacaccccagttgctggcttttctgctccatttagccgcggaggatatgttagttaagccggtgttgattgtttgtcctacgtcggtgctgagcaattggggtcatgaaattaataagtttgcgccccaacttaaaaccctattgcaccatggcgatcgccggaaaaaagggcaaccgttggttaaacaggtcaaagaccagcaaattgtcctcaccagttacgctttactgcaacgggattttagtagtttgaaattggtggactggcaggggatcgtgctggacgaagcccaaaatatcaaaaatccccaagctaaacagtcccaggcggcccggcaattgccagcgggttttcgcattgccctcacggggactccggtggaaaatcgcctgacggaattgtggtcaattttagaatttttaaatcccggtttcctgggtaatcagagctttttccaacggcgctttgccaatcccatcgaaaaatttggcgatcgccagtcgttgttaattttgcggaatttagtgcggccgtttattttgcggcggttaaaaaccgaccaaaccattattcaagatttaccagaaaaacaagaaatgaccgtcttctgtgacctttcccaagagcaagctggtttatatcaacaattggtggaggaatccctccaggcgatcgccgacagcgaaggcattcaaaggcacggtttagttttaaccctattaaccaaactcaaacaggtttgtaaccatcccgatctattgctgaaaaagcccgccatcacccacgggcaccagtccggcaagctaattcgtctggcggaaatgctggaagaaatcatcagcgaaggcgatcgggtgttaattttcacccaatttgccagttggggtcatttactcaaaccctatctggaaaaatactttaaccaagaggtgctctatctccacgggggcactccagcagagcaacggcaagctctggtggaacgattccaacaggaccccaacagtccctatttatttatcctttctctcaaggctggcggcacagggttgaacctcacgagggctaaccatgtgttccatgtggaccggtggtggaatccggcggtggaaaatcaggctaccgatcgtgcttttcgcattggccaaactcgcaacgtccaggtgcacaaatttgtctgtacaggcaccttggaagaaaaaattaacgccatgatggcggataaacaacaattggcagaacaaaccgtggatgccggggaaaattggctcacccgcctagacaccgataaactccgtcagttgcttaccctctccgccaccccggtggattaccaagccgaagcgtccgattgatgaaagcacaaaaaaatacagtagggaaaattcatctcctactgtgggcctcgatttaacttgaggtcgagttatttattttgctaaagcaatttccctgcttagagcatgtttggaaagttgagttttggctgtttaatcgcccctagccccccttgggaagaggggaactgtcgcaaaagtccccttttttaagccggagctttagtgaggagatttagggggataaatacctagccttgcacttttcaaacactttcttagaaaatttgctagacagaaagttcgctcagttccctggtcatatggtcaaagggggaagcaataaaatctgtgctgttcaggctggaatcctctgccatggcttcaatcatttccttcatgatctgaatgccccgcaccgtgggcccaatgggtacgcccagggaattgtaggtttcccgta

SEQ ID NO: 58 - DNA, 1190 bp, coliphage T4
gtacattgaatggcttgaaactcaaatttctttttctgaccgaatgattcagcaatataagcgattgcatcaaatgttttacaatacttgaaaataataaatacccttatctatttaaggtaagggtttattatgttattgactggcaaattatacaaagaagaaaaacagaaattttatgatgcacaaaacggtaaatgcttaatttgccaacgagaactaaatcctgatgttcaagctaatcacctcgaccatgaccatgaattaaatggaccaaaagcaggaaaggtgcgtggattgctttgtaatctatgcaatgctgcagaaggtcaaatgaagcataaatttaatcgttctggcttaaagggacaaggtgttgattatcttgaatggttagaaaatttacttacttatttaaaatccgattacacccaaaataatattcaccctaactttgttggagataaatcaaaggaattttctcgtttaggaaaagaggaaatgatggccgagatgcttcaaagaggatttgaatataatgaatctgacaccaaaacacaattaatagcttcattcaagaagcagcttagaaagagtttaaaatgacaattgaaaaagaaattgaaggattaattcataaaactaataaagaccttttaaacgagaatgctaataaagattctcgtgtttttccaactcaacgggaccttatggctggtattgtgtctaaacacattgccaaaaatatggtcccgtcttttattatgaaagcgcatgaaagcggaattattcacgtgcatgatattgattattcccctgctcttccatttactaattgctgtttagtagatttaaaaggaatgcttgaaaacggatttaagcttggtaatgcgcagattgaaactcctaaatcaattggagttgctactgcaattatggcacaaattactgcgcaagttgcttctcaccaatacggcggaacgacttttgcgaatgtagataaagtactttctccttatgttaaacgcacctatgcaaaacatattgaggatgcagaaaaatggcaaatcgctgatgcgttgaattatgctcaatctaaaacagaaaaagacgtatacgatgcattccaagcttatgagttaacgtaagtcaagctcatgtaaaatctgcctaaaacgggaaactctcac

SEQ ID NO: 59 - DNA, 828 bp, Zea mays
ccacgcgtccgcccacgcgtccgacttgagcagactagcaaggccttcagaccgggagggctccctgtcctgtcccccgcgccgccgcggatggccggagccaccacgccggcatcaggcgccctcgtcaggctctgcctgccttcgctcctcctctttctgtaccgatgtgaggctgttgagatggagagaacccttgcgatgatcaagcccgatggtttgtcaggtaagtacacagaagcaatcaaggaggtcatcttggattctggatttcatatcgtcaaagaaaccgaggtccagcttgatgctgagagggcatctgtcttctatgcggagcattcccagagaagcttctttgacagcctagtcaagtacataacaagtggtccagttcttgctatggttctggaaagacctgacgccgttgcgcaatggcgcactttgattggaccaactgatgcaaaaaaggccaaaacctctcatccaaacagcattagagcaatgtgtgggctggactctgagaaaaattgcgtgcatggttcggattcaccagaatctgcagacagagagatctcatttttcttcggagaagctgaatccgtaactgtggaacatgatgagctatagacgccacactggtatcaggcaagtcagcaaactgaattttgatgtgtctttgaactcttaggctatctcctgtagcttcttactcgtacccgtttcttattattttaaaagttattatgtaaacagtataatttatagtgcaaaacagtgtcttgcatggccatatgcttgtggcttcaaaaaaaaaaaaaaaaaaaaaag

SEQ ID NO: 60 - DNA, 7974 bp, Saccharomyces cerevisiae
ggtaccattgtccatgacaacagcgggattgtttaagtatgacattgaatcctaatttcttgctcaatcgtgaggccttacggtagggccaattcttgattaaactactctcatatatttttgtttgaaacttttgaaaaggggttctcgccattttgaagccgcggacaccgggtgactactgaaagtccttatcgaagggtcttcttgagcttacgttaaaaaagagccatagtagcttcacgagagagtcattggtaaagtgaaacatacatcaaccggctagcaggtttgcattgatatggaaccgcatgaggagcagatttggaagagtaaacttttgaaagcggctaacaacgatatggacatggatagaaatgtgccgttggcaccgaatctgaatgtgaatatgaacatgaaaatgaatgcgagcaggaacggggatgaattcggtctgacttctagtaggtttgatggagtggtgattggcagtaatggggatgtaaattttaagcccattttggagaaaattttccgcgaattaaccagtgattacaaggaggaacgaaaattggccagtatttcattatttgatctactagtatccttggaacatgaattgtcgatagaagagttccaagcagtttcaaatgacataaacaataagattttggagctggtccatacaaaaaaaacgagcactagggtaggggctgttctatccatagacactttgatttcattctacgcatatactgaaaggttgcctaacgaaacttcacgactggctggttaccttcgagggctaataccttctaatgatgtagaggtcatgagactcgctgcaaagactctgggcaagttagccgttccaggaggtacatatacctctgatttcgtggaatttgagataaagtcttgcctagaatggcttactgcctccacggaaaagaattcattctcgagttcgaagccagaccatgctaaacatcgtgcgcttctgattataacagcgttggcagagaattgtccttatttactctaccaatacttgaattccatactagataacatttggagagcactaagagacccacatttggtgatcagaattgatgcgtccattacattggccaaatgtctttccaccctacgaaatagggatcctcagttaactagccagtgggtgcagagattggctacaagttgtgaatacggatttcaagtaaacacattagaatgcatccatgcaagtttgttggtttataaggaaatcttgtttttgaaggatccctttttgaatcaagtgttcgaccaaatgtgtctaaattgcatagcttatgaaaatcataaagcgaaaatgattagagaaaagatttaccagattgttcccctattagcatcgttcaatcctcaattatttgctggcaaatatttgcaccaaattatggacaactatttagagattttaaccaatgctccagcaaagaaaataccacatctcaaagatgacaaaccacagattttaatatcgattggtgatattgcatatgaagtcgggcccgatatcgcaccttatgtgaaacaaattcttgattatattgaacatgatttacagacgaaattcaaattcagaaagaaatttgaaaatgaaattttctactgcatcggaagattggcagttcccttgggccccgttctaggtaaattattaaacagaaatatactggacctgatgttcaaatgccctctttccgactatatgcaggaaacgtttcaaattctgactgagagaataccatcactaggccccaaaataaatgacgagttgcttaacctagtctgttcaaccttatctggaacaccatttatccagccagggtcaccaatggagataccatcgttttcgagagaaagagcaagagaatggagaaataaaagcatcctacagaaaactggtgaaagtaacgatgataataatgatataaaaatcattatacaagcttttagaatgttaaaaaatatcaaaagcagattttcgttggtagaattcgtgagaattgttgcactttcttacattgagcatacagatcccagagtaaggaaactagctgcgttgacatcttgtgaaatttacgtcaaggataacatctgcaaacaaacatcactacactctctgaacactgtatctgaagtgttatcaaagcttctagccattacgattgcagaccctttacaagatatccgtttagaagttttaaagaatcttaatccatgtttcgatccccagttggcacaaccagataatttgagactcttgtttattgcactgcacgatgagtcgttcaatattcagtcagtagcaatggagcttgtcggtaggttgtcttccgtaaaccctgcatacgtcatcccatcgataagaaaaatactactggaactgctaacaaaattaaaattctcaacttcttctcgagaaaaggaagaaactgccagtttgttatgtactcttatcaggtcgagtaaagatgttgcgaaaccttatatcgaacctcttttaaatgttcttttaccaaaattccaagatacctcttcaacggttgcatcaactgcactgagaactataggtgagctatctgttgtagggggcgaagatatgaagatatatcttaaggatttgtttcctttaattatcaaaacatttcaggatcaatcaaactctttcaagagagaagctgcacttaaggcccttggtcaacttgcagcctcatctggttacgtgatagatcctttactcgactatcccgaattattgggtatattggtgaatatattgaagacagaaaactctcaaaatattaggagacaaacagtcactttgataggtatactgggagctatcgacccatatcgccaaaaagaacgtgaggttacctctactaccgatatatctacagaacagaacgccccgcctatcgacattgctcttctcatgcagggcatgtctccttcgaatgatgagtattataccactgttgtcattcactgcctgctaaaaatcctaaaagatccatccctatcatcttaccacactgccgtgatccaagcgattatgcatatttttcaaacccttggtctaaaatgtgtttcattcttggaccagatcatcccaactattttggacgtaatgcgtacatgctctcagtcactattagaattttacttccaacagctttgctctttgattattatcgtaaggcaacacataagacctcatgtcgattctatattccaggctatcaaagatttttcttcggttgctaagctacaaataacgcttgtaagtgttattgaagcaatatcaaaggctctggagggtgaattcaaaagattggtccctcttactctgaccttgttccttgtaattttggagaatgacaagtctagtgacaaggtcctctccagaagggtattgagactgttagaatcgtttggtcctaacttagaaggttattcgcatttgattacacccaagatagttcaaatggcagaattcaccagcgggaacctacaaaggtctgcaataattactattggcaaactggccaaggatgttgacctttttgagatgtcctcaagaattgttcactctttacttagggtactaagttcaacaacgagtgacgaactctcaaaagtcattatgaatactttaagtctactgctaatacaaatgggcacatcctttgctatcttcatccctgtcattaatgaagttttaatgaagaaacatattcaacacacaatatatgatgacttgacaaacagaatattaaacaatgatgttttacccacaaaaattcttgaagcaaatacaacggattataagcccgcggaacaaatggaggcagcagatgctggggtcgcaaaattacctataaaccaatcagttttgaaaagtgcatggaattctagccaacaaagaactaaagaagattggcaggaatggagcaaacgtctatccattcaattattaaaagagtcaccctcccatgctctaagagcttgttcaaatcttgcaagcatgtattatccactagccaaagaactttttaataccgcattcgcatgtgtttggaccgaactttatagccaatatcaagaagatttaattgagtcattatgtatagccttatcttctcccttaaatccaccagaaatacatcaaacattgttaaacctggtagaatttatggaacacgatgacaaggcattaccaataccaactcaaagcctgggcgagtatgctgaaagatgtcacgcctatgccaaagcgctacattataaagagattaaatttattaaagagcctgagaactcaactattgaatcattgatcagcattaacaaccagctgaatcaaacggatgctgcaattggtatattaaagcatgcccaacaacatcattcacttcaattaaaggagacatggtttgaaaaattagagcgttgggaagatgcactacatgcttataatgaacgtgaaaaggcaggtgatacttccgtgagcgttacactcggtaagatgagatcccttcatgcccttgcggaatgggaacagttgtcgcaattggcagctagaaagtggaaagtttcgaagctacaaactaagaagctaatagctcccttggcagctggtgctcgtgggggttcgggagagtgggatatgcttgacgaatatatcagcgttatgaaacctaaatctccagataaggaattttttgatgcaattttatacttgcacaagaatgattacgacaatgctagtaagcatatattaaacgccagagatttgcttgtgactgaaatttccgcgttgatcaatgaaagttataatagagcatatagcgttattgttagaactcaaataataacagagtttgaggaaatcatcaagtataaacaattgccacctaattccgagaaaaaacttcactatcaaaatctttggacaaaaagactgctgggctgccaaaaaaatgtcgatttatggcaaagagtgcttagaataagatcattggtaataaagcccaagcaagacctgcaaatatggataaaatttgcaaatttgtgcagaaaatctggtagaatgagactagcaaataaggcattgaacatgctactagaaggaggcacgatcctagtttaccaaatacggtcaaagcctcctcccccagttgtttacgcgcaactcaaatatatttgggctacaggagcttataaagaagcattaaaccacttgataggatttacatccaggttagcgcatgatcttggtttggatccgaataatatgatcgcgcaaagtgtcaaactctcaagtgcaagtactgctccgtatgttgaggaatacacaaaattattagctcgatgttttttaaagcaaggtgaatggagaatagcaacacaaccgaactggagaaacacaaatccggatgcaattcttggttcctatctattggctacacatttcgataaaaattggtacaaggcatggcataattgggccttagctaattttgaagtaatatccatggttcaggaagagactaagctcaacggaggtaagaatgatgatgatgatgacacggcagttaataatgataatgtgcggattgacggtagtatcctaggaagtggttctttgactattaatggcaacagatacccgctagagcttattcaaagacatgttgttccagcgatcaagggcttttttcattcaatatctctattagaaacaagttgtttgcaagacacgttgaggttatcgactcttttatttaactttggtggtattaaagaagtctcacaagccatgtatgaaggcttcaatttgatgaaaatagagaactggcttgaagtcttaccacagttgatctctcgtatacatcagccagatcctacggtgagtaattcccttttgtcgttgctttctgatttagggaaagctcatccacaagctctcgtgtatcctttaactgtcgcgatcaagtctgaatctgtttcaagacaaaaagcggctctttcaataatagagaaaattaggattcatagtccagtcctggtaaaccaggcagaattagttagtcacgagttgatcagagtagccgttctatggcacgaattatggtatgaaggactggaagatgcgagccgccaatttttcgttgaacataacatagaaaaaatgttttctactttagaacctttacataaacacttaggcaatgagcctcaaacgttaagtgaggtatcgtttcagaaatcatttggtagagatttgaacgatgcctacgaatggttgaataactacaaaaagtcaaaagacatcaataatttgaaccaagcttgggatatttattataacgtcttcagaaaaataacacgtcaaataccacagttacaaaccttagacttacagcatgtttctccccagcttctggctactcatgatctcgaattggctgttcctgggacatatttcccaggaaaacctaccattagaatagcgaagtttgagccattattttctgtgatctcttcgaagcaaaggccaagaaaattctccatcaagggtagcgacggtaaagattataaatacgttttaaagggacatgaagatataagacaagatagccttgttatgcaattatttggtctagttaacactttgttgaagaatgattcagagtgtttcaagagacatttggatatccaacaatacccggctattccattgtcgcctaaatctggtttactaggatgggtaccaaatagtgacacattccacgttttgatcagagaacaccgtgatgccaaaaaaattccgttgaacattgaacattgggttatgttacaaatggcccccgattatgagaatttgactcttttacaaaaaattgaagtattcacgtacgctttagataatacaaaaggccaagacctttataaaatattatggttaaagagtaggtcgtcagagacatggctagaacgtagaacaacttatacgagatctttagcagttatgtccatgactggttatattctgggactaggtgatcgccatccaagcaacctgatgctagatagaatcaccggtaaagttatccacattgatttcggcgattgttttgaagctgccatcttaagagaaaagtatccagaaaaagtgccatttagactaactaggatgttaacatacgcaatggaagttagtggaattgaaggcagtttccgaattacttgtgaaaatgtcatgagagtcttaagagataataaagaatcattaatggcgatcttggaagcttttgcgcttgatcctttgatccattggggattcgatttaccgccacaaaaacttactgagcaaactggaattcctttgccgttgattaatcctagtgaattattaagaaagggcgcaattactgtcgaagaagcggcaaatatggaagcagaacaacaaaatgagaccagaaacgccagagcaatgcttgttttgagacgtattacagataaattaacgggcaatgatatcaagaggttcaatgaattagacgtccctgagcaggttgataaactgatccaacaagccacttctattgaaaggttatgtcaacattatattggatggtgcccattctggtgactgcggtgtcatttttcatttcgtgctttgtttactatttattttttttgtattacgcatttgtatacgtgtgcaagtattgtgtattattattattattattatcattatttttgtaatatctcgtcattatgtgaaatgaaggatgatataaggtacataaattgttgaaatcaacaccatttaaaacaactttattggatagatggcacatcggtacttttcacaataggtattgacaatatcagtccatttgttat

SEQ ID NO: 61 - DNA, 820 bp, Zea mays
cccacgcgtccgtccccatccgcacctctctccatctccctgctcctccgcctccttcttgatccagccaagccagggatcgccatgtcggactcggaggagcaccacttcgaatcgaaggccgacgccggagcgtccaagacctacccgcagcaggctggcaccgtccgtaagaacggcttcatcgtcatcaagaaccgcccctgcaaggttgtggaggtttctacctcaaagactggtaagcatggccatgccaaatgccactttgttgccatagacatattcaacgggaaaaagctcgaagatattgttccttcgtcacacaactgtgatattccgcatgtgaaccgtactgagtaccagctgattgatatatcagaggatggatttgtgagccttcttacttcagatggcaacactaaggatgatcttagactcccaactgatgagactcttgtggcccagatcaaggaagggtttgaaagcggcaaggatcttgttgtgactgtccagtctgctatgggggaggagcagatctgcgcgctgaaggatgttggccccaagtaacttccctgccttggaatactgtatctcaaaacctaaatcgaaaaaagaagtgtatcaaggattgctacagagacatccatctggcttgagctggcttttgctatggcaaacacaagtgcagggatcgctgggtgttgcaccgtgtctgcattatgtggttacattctggaccctgtattttctatgcttttatgcccctactgtttagtattaattatcaataaatttgtttgggacggttgaattgcaaaaa

SEQ ID NO: 62 - DNA, 2156 bp, Saccharomyces cerevisiae
cccgggaattttagattcaggtaggaaattgattacataaatactgttaccctgaatcatattcgacgatgtcgtctcacacggaaatataattcatttcttggttttccaaaaaaattttcattttttttcacttttttgtttcgtcctcctttttttttttttttattttttttcctgtgttcaccttttttttttttttttcagtttacaactttctgcattcttttctgtgttttttttttttcgtttttccattgttcgttcgttgcctgtttttttgccctattgttctcgagcctaaaaattttttcctttcctgctttcctttcttcgttcaaagtttcctattccattgttctcttcggtaaactcattgttgtcggaactcagatatattcaggtcaatttactgtacttcaattgacttttttcttgaaatttcaacttgccttttcaacttgttcttcttttttaatcttattctacactttagttcccttaccttgttcctaattattgtctagcaaaaagaaaacatacacctatttcattcacacactaaaacatgtctgacgaagaacacacctttgaaaatgctgacgctggtgcctccgccacctacccaatgcaatgttctgccttgagaaagaatggtttcgttgtcatcaaaggtagaccatgtaagattgtcgacatgtccacttccaagaccggtaagcacggtcacgccaaggtccatttggttacccttgatatcttcactggtaagaagttggaagatttgtctccatccactcacaacttggaagttccatttgtcaagagaagcgaataccaattgttggatattgatgatggctacttgtccttgatgaccatggacggtgaaaccaaagacgatgtcaaggcaccagaaggtgaattgggtgacagcatgcaagctgctttcgatgaaggtaaggatttgatggtcactatcatttctgccatgggtgaagaagctgccatctccttcaaggaagctccaagatctgattagatattttagatttctatagcttacaaaatacgcgatgtttttttgatctagaaatcttatttatacattttatataatattataataatcataatcataattattcatcctaactaacttcgttctgtttcagctacgaagttgccttcattatcggtacgttcgtgttaattggtgtttgataccatagtcacttatgacgacttacagaacttttttttttgacggatattttcccctcaatatgccgaggatgataactttataaattgccttctttcggttccttttttctttttaatttagctgacgggaacatgtgtatataccccagaagaatttaaacagaaatttttttgagctattttacgaaaatattaaaaactagggctacagatatcagagaaaaaattacttatatgatgacaataacttaatatcacagtcactatcgttctcgcctttatatgcgcaatgacagcattcgacttttccttagaagggatccgatcaacgaaacttcaaaaagagtagaagtcgaaatattttttgcacgacgagggtgacaaaccgtgctatgtccacaaatgaggccctgctttcccaagataaattgcgtaaacatataattgttacaaggatccgatcaacgaaacttcaaaaagagtagaagtcgaaatattttttgcacgacgagggtgacaaaccgtgctatgtccacaaatgaggccctgctttcccaagataaattgcgtaaacatataattgttacaaatccaaggctctgtgatttcttcaccaagtgtagttgtgatgtatagtgtgtaggataggtaatgaccggtaaatcaagctggtaaaaagtcctaataacaagcccgaatctggaataatggtaatattcccatgccaggtggacagtgttgtccttacacaaactcaagagattaaaggcaacttggccgagtggttaaggcgaaagattagaaatcttttgggctttgcccgcgcaggttcgagtcctgcagttgtcgttattttttatttccctttcttttcgtacatacacaatgcacagtcttcaaagtaaaataccaacgtatgtatcaagatc

SEQ ID NO: 63 - DNA, 1764 bp, Saccharomyces cerevisiae
ggaagaactgaaaaaaaggtgggaaaaaaaaataaaaagtaaagtgaaaaattaaatgtaatgtatatttccattttgacgcaaagtacttccctctatcagttttgtatctaactgaagagtaaagtcgtgttttgcttagttaacttatatacaagtcaaagcaaaaaagatgtccgatatcaacgaaaaactcccagagttactacaagatgctgtcttgaaagcatctgttcctattccagatgacttcgttaaggttcaaggtattgattactcaaagcctgaagccactaacatgagagcaactgatttaattgaagctatgaagaccatgggtttccaagctagttctgttggcactgcctgtgagattattgatagtatgagatcatggagaggtaagcatattgacgaattggatgaccatgaaaagaaaggttgcttcgatgaggaagggtaccaaaagactactatcttcatgggttatacttctaacttgatcagttccggtgtacgtgaaactttacgttatttggtgcaacacaaaatggttgatgctgtcgttacttctgctggtggtgtggaagaagatttgatcaaatgtcttgctccaacttacttgggtgaatttgctttgaaaggtaaatctttgcgtgaccaaggtatgaatcgtattggtaacttgcttgttccaaatgataactactgtaagtttgaagaatggattgtcccaattttggataagatgttggaagaacaagatgaatacgtaaagaagcatggtgctgactgtttagaggctaaccaagacgtggattcaccaatctggaccccatctaagatgatagatcgttttggtaaggaaatcaacgacgaatcctccgtattgtactgggcccacaagaataaaattccaatcttttgtccatctttgactgatggttcaatcggtgacatgttgtttttccatacttttaaagcatctccaaaacaactaagagttgacattgtaggagatatccgcaaaatcaattcaatgtccatggccgcttacagagccggtatgatcatcttgggtggtggtttgatcaagcaccacattgccaatgcttgtttgatgagaaatggtgctgattatgccgtttacattaacactggtcaagaatacgatggttccgatgcaggtgcaagacctgacgaagctgtgtcttggggtaagatcaaggctgaagccaaatccgtcaaactttttgctgatgtcaccactgttcttccattgattgttgctgctacctttgccagtggtaaaccaatcaaaaaagttaagaattgatgagagaattttgagatgaaaaaaaaaaatgaatctgtactatttctttttttagtgccaaaattttgttttaatatagagataaataaaaaatgaacatattactataatatcaacaaaatatgatgtaatgtctgcaataaagatgagtcaattgcatttctataccgtacctaaaccgtgtgtacatagccatgaaattatgtaagtttatacacataaattgcgtcgagtctgctgtgtaatttataaatgtgtcacagcagcttttgtatttctattagttgccgttacctctcattttttcggcggtaagaatgtcactgccctatggattccattacatttttctcaatcagttcacctacggtttgaataaaccatactagcttcgtaagcacttactatacgttgttgagtaatgccta

SEQ ID NO: 64 - DNA, 2307 bp, Saccharomyces cerevisiae
gaattcgtatctcattctccagtgaagtatcacaaattttaccgtggaaattcgttcctcaacaacgtgaggtttacgttctgcctggtgaaacagccctcgctttttataaagccaagaattacagcgataaagatattattggtatggctacttatagcatagcgcctggtgaagcagctcaatactttaataaaatccaatgtttttgctttgaagaacaaaagctagctgccggtgaagaaatagatatgcctgtcttcttttttatcgatccagattttgctagcgatccagcgatgcgaaatatcgatgatattattttacattacacattcttcagagctcattatggtgatggtacagctgtaagtgactctaaaaaggagcctgagatgaatgcagatgaaaaagcagcgtcattggctaatgctgctattttatccccagaagttatagacacaaggaaagacaactcaaattaattgtaaatacaaagtcattcaatgtacataaatactgttatgcttttgaattaagtaaaacaccatgacttcatattgagatgttttaagcatataatcacggcaccgaacttcttgtaatcatcaaatctttgttttctagccgtcatagaaatgaagaaatgaagattcttgttcatgtgatacagcttttctagacagctaacttgtacatccagacatcctaaaacacccataaagcaaaaaaaattattgaaatattctcttttttttcttttttttttttctggtggctttcaatgcggaatcgctaacatccgaaaatttcagaggcttcacttagcgtcgcagatcccgtagtcgccagatgctttgaaaaaaaaaaaaataaatagaaaagtttgtagacatatccgatgtagtatatttcagaggccaacctttacttttgttttctcctacacttcaaaataaaagacaccgtcacaaatctcagcaacaatggctttccaaaaagacgctaagtcctctgcttactcctctcgtttccaaactcctttcagaagaagaagagaaggtaagactgattactaccaaagaaagagattggtcacccaacacaaggccaagtacaacactccaaagtacagattggttgttagattcactaacaaggatatcatctgtcaaatcatctcttctaccatcactggtgatgtcgtcttagctgctgcctactcccacgaattgccaagatacggtattacccacggtttgaccaactgggctgctgcttacgctactggtttgttgatcgccagaagaaccttgcaaaggttgggtttggacgaaacttacaagggtgttgaagaagttgaaggtgaatacgaattgaccgaagctgttgaagatggtccacgtccattcaaggtcttcttggatattggtttgcaaagaaccaccactggtgccagagttttcggtgctctaaagggtgcttctgacggtggtttgtacgttcctcactccgaaaacagattcccaggttgggacttcgaaaccgaagaaattgacccagaattattgagatcttacatctttggtggccacgtttcccaatacatggaagaattagctgacgatgatgaagaaagattctctgaattattcaagggttacctagctgacgacattgatgctgactctttggaagacatctacacttctgctcacgaagctatcagagctgacccagctttcaagccaactgaaaagaaattcaccaaggaacaatacgctgctgaatccaagaagtacagacaaaccaaattgtccaaggaagaaagagctgctcgtgttgctgccaagatcgctgctttggctggtcaacaataaattatggatatataacgtcattttgagatattttaaataaagctatcttcacataacctttgtattcatttttagttaactcatttacatcatccacttactacatttgtattttttttacgatttgcgtaccgcctcattactaccctttttttgcactgcagtaatagtacactcaaatcatgatgaaaagagaaaagaaaaaaatgccacaaaaagtagttgattttataaaagttatcatccaattttaggtaattttattctctttatgtaacgaacatatgaagatttcttctctagaatggcattctaactaagtccgtgccataaaatcatcactaacaaatataagatcacgctatactatcaatgaagaaacaaatattaatagttgctgcacaaagtattttatgtctactgtttt

SEQ ID NO: 65 - DNA, 2995 bp, Saccharomyces cerevisiae
gaattcgtccccgaacgcaactgcgaaattgaagggtaccgttgcttattttgtaattacataactgagacagtagagaattgatacatggataactgaatctctttcaactaataagagacattatcacgaaacaattgtacatttctctccttgtctgtgctaaataaactacaaataaaaattcattttctttcattttcattcgacacgccgcggcatcttcgttttcttcaccgattaattttaatctgcgccgtgcagatattttcgcccatttcgaagtgaaatcattctaataacttctcctgcgcaatagattggtcatcctgatttttattctgaaatcgaaaatgaaaagcatttattgcactgaaatagcggaacctgcttctaataagcttaaaattcaatcataatagtgtagttaatagaaaggacagaagaacttttcgttccttggtttatcatccaggtttcagcacggcttttgtttcaagtttaagtaggtaagattttttgattgttctacaactttttcatagtaatcaaaacctttgaatttcaaacttactatgtctagtactcaagtaggaaatgctctatctagttccactactactttagtggacttgtctaattctacggttacccaaaagaagcaatattataaagatggcgagacgctgcacaatcttttgcttgaactaaagaataaccaagatttggaacttttaccgcatgaacaagcgcatcctaaaatatttcaagcgctcaaggctcgtattggtagaattaataatgaaacgtgcgaccccggtgaggagaactcgtttttcatatgcgatttgggagaagtcaagagattattcaacaactgggtgaaggagcttcctagaattaagccattttatgccgtcaaatgtaatcctgataccaaggttttgtcattattagcagagttgggcgttaatttcgattgcgcttccaaagtggaaattgacagagtattatcgatgaacatctcgccggatagaattgtttacgctaatccttgtaaagtagcatctttcattagatatgcagcttcaaaaaatgtaatgaagtctacttttgacaatgtagaagaattgcataaaatcaaaaagtttcatcctgagtctcagttgttattaagaatcgctaccgatgactctaccgctcaatgtcgactttccaccaaatatggctgtgaaatggaaaacgtagacgttttattaaaggctataaaggaactaggtttaaacctggctggtgtttctttccacgtcggttcaggcgcttctgattttacaagcttatacaaagccgttagagatgcaagaacggtatttgacaaagctgctaacgaatacgggttgccccctttgaagattttggatgtaggtggtggatttcaatttgaatccttcaaagaatcaactgctgttttgcgtctagcgctagaggaatttttccctgtaggttgtggtgttgatataattgcagagcctggcagatactttgtagctacagcgttcactttggcatctcatgtgattgcgaagagaaaactgtctgagaatgaagcaatgatttacactaacgatggtgtatacgggaacatgaattgtattttattcgatcatcaagagccccatccaagaaccctttatcataatttggaatttcattacgacgattttgaatccactactgcggtcctcgactctatcaacaaaacaagatctgagtatccatataaagtttccatctggggacccacatgtgatggtttggattgtattgccaaagagtattacatgaagcatgatgttatagtcggtgattggttttattttcctgccctgggtgcctacacatcatcggcggctactcaattcaacggctttgagcagactgcggatatagtatacatagactctgaactcgattgaaggatatatttaaccacgactttcgcaagagagacggagggggtgggaaaaggctgaatgcaaccattgtcactaagaatttgagtgttcatgaacgagttatacacgctatttaagagtcagagaatgatgattcaagaaaattctggcatttttcctgtccaccactgtacgccattgtacacaaaagtatttttttatattttttttacaattttttataatttttttttatgtttagtgtatatttgctagaaagaaacaagatcttttttggtagtgtaaatgcttaaactttgtctctttttcctttttactttggaaaaatgccgacgcaagaacatagacatctgcgaaaaccaaaaataaagtaccaattgtacatacaaaaacagagaaaaagttcatgaacagaacgttactacggtatagcaagatctttgaatacatccattacttcggattgttcaccatacttcaacacaggccaagatagaccatagctacagtgatagacgaatatttatttcaaaagaagcatcaaccataaaataaaaagaaaaatgatgaaaaaaaaaccaaagtgccaaattgcaaggaccaaaccatcggtcgaaaacgtcataccatataaccaattcaagaagacgcagccgcgattcaacggcaacttttctgcactgaataatgaagaatacataatactctttggcggaggtcgggacctgatactaggctccctgacaccttgttcgagctctcatttgtccaatcaagccaacccacaagacaccagtgagtatggcacagacctgtttatactcaacagctgcattatcatttggttcaatggcttgggatatgggctggaaattccctacagcagcgttttgtaccatgcatcaagacggctaccagatggtagggaagggcttcaattagaaattttgctgactttggaaagagacgaagtgttggacatgctctaccaaagcctcgcgccacaggcctgcgaattc

SEQ ID NO: 66 - DNA, 15323 bp, Oryza sativa
tgttgcatatgtttgtgttagtgctcatttaagcgtgttatgaactagaaatgcttagtcaattccaacaaaaagttcttcttagatgattattctgccattgtgctgctttagctgtcactgagtttggcatttccactcttgcagataactctacccaggctgagttgtggctggtattggcgatataagcttgttagctgttttctcttgtgtctttggtcttcatctttgattacgcgtcattgaaaagactgtacatgagaaaactcttttgttgaaacatttctcttgtaatatgaatgtattgagtttgtgactatccttctcctgtgctagaatcatatatttcagcttcaaagctcttgtggtacttttcaagtttcctgttgaaccgaatacctagtgcattaactctaagcttgtgacaaacattcatgcaaattcgtggatattaacattggatacttggtctactggaaaattggagctccttattcatgtcatcaatggagagcctagcacagttagagctgttatgtgaaaagctttacaattctagagactccgctgagcgagcacatgcagaaagcaccctcaagtgcttctcggagaacagtgactacatttcacagtgccaatatatattggacaatgcctcaacaccatatgccctgatgctggccagttcaagcttgttgaaccaagtcaacgaccgcagtctttcattgcaattgcgtcttgatatctgtaatgttccttaccaaaaatttatcatgaaatcagttgttcacctgtttttgcttttctattgcatctgcatggcatgttttcatttacgtctctaccaatttattcagttatgattatttctgcattgcaagttaccacagaaagcagtaagcactcgtttgtactgctatttagtataagtggccatatttaaatctttgttgttccttccttgactcaacttatttctgttgcctttgatgtcttatgcttatttaatatggctcgagttgaacaaacaaatatttattctttgcattctatccttgaattcatttatgcctctgcagcatgttagaatggccaaatatttatttccatttacccactgttgttttatgcatcggtaatgtagataaattgcaaaaatacatgtctataaacaatgcttaaatctattttgtgtacttttgtgcccttgtctactgctaattttaaaccaatatattgtgatctgtttgaagtgaattatgtcataaactatcttgctatgaggggacctaaactgcagacgtttgtgattaaatccctaattcagcttgtctgtcgaattacaaaatttggatggttcgatgatgataaattcagagatattgtcaaggaggcagctgatttcttatctcttgtaagtttgttgtctgttttgttggcatttagttgagagctttttaaccgttgataacatatttaaggactatgtaccttcgatttgagtggagctatacaccttggtacataaatccttggcaatttctatgaccaatgcccgttctttagaactaagtaatatgaaaaaggataaccggcctaccagataaatctacataagaacctgatttctattaaagaatccatatgaggaacagttataggttttattccatgctctattgcgagttaattgatgcatactaaagttgctgcttatgcttttcatttcaggcatcccaggatcattatttcataggattgaagatactatatcatcttgtaggagaaatgaaccaggtgccacctagaaacttctctattattataattgttcaataactattgattctaatcaataagataagggtacccataagataatgcaatttggcaatacgtagattaatttaaaagttgaaaaaaaaatatttcaacagtattttttttgtgtttagaactgcacaacgtgcatggtgttgttggcacttataaaacatcggatgaaacacagaaggtcaaacgtacatgaaacactacatatgcactaacttgtgcatgaatcaattaatatcataagtaaaagttgttctttattttcctttgcgacacttaacaaagagttataaacatgcagatagacatatataggcatagtattattgaaaaaatattaatggttaatccaaccaatgttaacaagacaaagttaaacattgacactgatggttactgtattaatttccatttattttaaagagtattggcggcaatatgatactccttccttccctaaatgtttgacgccgttgacttttttagacatgtttgaccgttcgtcttatttaaaaacttttgtgaaatgtgtaaaactatatgtatacataaaagtatatttaacaataaatcaaatgataggaaaagaattaatagttacttaaattttttgaataagacgaacggtcaaacatttttaaaaaagtcaacggcgtcaaatattttgagatggagggagtatgtggcaccttactaaattgtgttggggtagtgttggtagcattcctttttacctgcttggagctgtgatgcacatttcagcctttttactgtcccacctttctgttagcctgtcacttctttttatgccttccttctttgtcttaactttttctggtatagtttcttgaatatgattgtgtgtcactgtatttcttgtaatgttgagtttcattttatttaacatgaaataacacagattgcttgcttagtacaagaaagggttctagttctacaaatatcttctatgaactgtttctctttttttccggtaacaattctttcaatgaatagttgatttggaccattaagctttctcagtatgtacttggcttcatactttttgcatgctgtcttctgcttatgaattatatagtgttcgttaatatcttcaattctgattgggttatgtacttatgttgttgcttatatcttttcaatatagtttatactgctgtgcccatttttatccactcttgttcaatttcctttgtcaggtggactgtaatgtgtttagctgactttttgtgtctgtgtatgcatgcaggcaaacgctatgcctttgacacttcacagaaaaattgcttgttcgttcaaggaccagtttcttctacagatcttccaaatttctttaacctcattacaccaactgaagagtgaaggtaaagttcaaggaccacattttgtaaaaagtagagtgtatcggaatgcccacactttctcacttccatcttctgatacaatctgtaattaaactgcagtacctgatgactttaggcgtgatcccctctcgcttgcattaaggtgcttgtcatttgactttgttggttgtcctgtggatgaaagctctgaggaatttggtacagtgcaggtatgttagtttgcacaattgttatcttctctgtaaaaccattgacctatcccagttggtctatttcttataatttgtgtaatttttattgatgcagcttcctgcatcttggaggcctctccttcaagatccttctactgttcagatcttcttcgattactataaagtcaacgatacatgtgtttcaaaagaggtatacattgattgggtgatttgaataatatagatgatataatctctgattatttttaccgagtgctttgtccattactccataaacacaaaagaggtatattttgcttcatagttcctcatgtttagaatgtacactttgatcgcatgatttttcattaatacattttacaaacttattgctagttagctatcactacagttctgcaatattttgattgacttccattcagcagcaatatttttccaatgttgtcttttaaaagcatgacttcctcacctctgtgaagcagcaatattctcctaatgtatggatctctaagaggcatgctttattcctttcaagaatctctaagaagaaatattttccttgtgaatttatcttacaaacagctgtttcgtttttctttctatatgagtaatgtgccatgttcagtggatttgctctttccttgactcttccccgcctccctctcctatgcacttctttatgtcatttctgcaggctttggaatgtcttgtgagacttgcttctgtcaggcgcagtatttttgttgaggacccttcaaggacccagtttctttctcatctgatgtcaggcacaaaggagatactccaaactggccaaggtataacgctttgtcctttttttgccaagttctgttctattgtagtactcctgttacaaatttcagttacttggaccagcggtttcaattgcaatcctcttacatggagtgaaaagcctcttttatgtaaagtgaagaagcatttaaaacatgagttgattgactcatgcctagtcacgctatgtggtgcactgtagaaaccagacttgctttttataagtaaaagcacacattggttcattataaatgcaatagtaatctttaaacttaggtacttgtctgtcaaattagctccatgcaggaacaaaaataaatgctccatatctttacgtaatttattctgatgtgtgatctgctcatctgcaggtcttgctgatcatggaaattaccacgagttctgccgtcttcttggacggttcaaagtgaatttccaggttggaatcctgttacttaaaatgaaggatgaagctaacttttcttgtttgttttgtgtcaaggatttgctcttcgttctctctctttgcattcttttacagaattattgacttgctagtttttggtacgtaacaactgatgaattagttggcaacagtagtgatgcattaattctggttggtatcctgactgaaatgaattgcgatggtggggattttgtgggattccaaacacgccttactgatgttattttaccctgatttgtacttttgtactattgctttgaaggaacagtaataagtaaatccaatggtttgtagcttctagtcttttggctttactagcagcactaactagtcatactgatatgcagttcaaggttttaaatagtggattgcatttttatagtgcattggttttgatgtagagcatatcgtaatgatgcagtgcatgttgtagtgaacagttgatggaatagttaatttgtatcataattataattctacgaagtgaactattgtgtttatgatgtttttatgtatttttggtaatgtttgcaacttgcaagtgctatttttgttggcatcttcttttaattttttgccttacagacatttggtaccaatttattagctttcaaagtttcaataaacaacggagcatttaatacctgtgtaatagtgttgtcaactgaagatggccattgttccaaactttcttttaccatttttctatatgcattccttgtcccaattgcctattactaacttactgtttgttaagttctaaataaaaagcatggttcaatattttcttaccacattcaaaatttgccataatgaccattccttcttatttagaactttgataataacgtagttatgtaaattagtctatgttgatcatgaaaataaaattgaactgtattatgtttgttttctgttggcatatcttcattgtgacattcggaatactcccggcattttgactaccaaatgatttggttggttgattgttacctgtgtattagatagtgttggctgcactcatttatgatcctttatcaagttctctgttattatcatagtaatattcaagctatgaatggacctctttgtgatcaagtgtggattcttgcattgttgtactttgcagttgtcagagcttctgagtattgagttttatggtgaatggattggtttagtagcagaattcacaactaaatccttgttgtcatggcaggtctgtttcccttttttttttttgactaattctcttagcactggattattcaataattaatttccaatagttctaactattgaatatttgtagtgggccagcaatagtgtctactatcttttgagcctttggtcaaggctggtgacatctgttccttacttgaaaagtgacacaccaagtatgcttgatgagactgttcccaaaatcacggagggttttatcacctctagaattaattctgttcaggtactgatttctaatgagatgatggaactgctttctatctcagattctcagttgaagagtaacgtttgttatattctgttgtttctatccatctcaggccagctttgcaaacgactcatccgatgatactttggataatgtggatgttcttcaggagcagttggagtctcttccttacctttgtagattccaggtcgccatttcctgtcaagttctggtttccaatttaagagacaattttctgttaaacttttgattggatccatctttgtaatcatgtccacctgtagataagataccttgcttaatcaattgaatgttttcttttatggagattaaccctgttccagcttttcacataacaggattcatagttttatgtaattgatttttttattgaacatatacattggttttacttttatctacttgcagtttactgcatgcacttagtaatttcttgtatatggcactagaatttctttctttaagttatggagaactaatagaatgatacaacaacagtagatgcatcaaatttaagttgcattatgctattcattttttatcgtatttaattatacgattctaaaacaagaataaccagagtaattttttggccaacttaagtgctttgttgagttgttcaacttcatattctggacgggtgcagaaaatatagtaaataagataaaaaatttgacaaatttagaaatgctattggatggatcaaaaggaaagataccagtttctctctgcatttttcttttttgggcggttgggggggggggggtcaatggctgtgatcagatgctcatgttccagtataacagtagctatttgttttgttatggcaaactggctgattgaaattttctaagcacttcatgtggtcgtcagcccttcccgattgacatggtcaagaataaaggcaactgtggatagacatgcaacttagcagttttgagccttcgcaagtgttgtgtacacatcctatgtttattatgtatgttagcttgccaacatgtgagtttagctatctacattgtgcctctcaaacagatgaagatctcttattaccatttctgctgttttcagctaatttattacgccacttcattatatatatctgttatttttgtccggatggaatttttatataattattttgagtcactactaacctccttgccagttaccaatagtacgaagaagctagatgaaatgcccttattgttcttaggcctttttttttttgatagggagttgcattatatgacatggccataacatgattttcttttgctgatttgcagtaccaaaacagtagcatttacatcataaatattatggagcctcttctacaagcttatacggtatgttagtgttatttcacagtcctcttttttgggcagaaagaatgccttttcaaagccaaatactttttacaggaaaggtcaagattaccagctcctggagatgcgaatgagctctctgtcattgaaggacagctcacatggctagtccacataattgaagccattctcaagattaggcagaccattggttgtaggtgagaaattaacattccttgcttccttatattctgtttgatttcctttttttttcacctacaatgctcattttttcatgcagccaagaatcacaggagttaattgatgcagaacttgcagcccgtgtgttacagttgataaacgttactgacacgggggtgcacgcacaggttagatgaaaatgatttggtcatctaacatcaatgctgagtgctgagctagtgtacttgtagcaacaacaattttcctttctagtattgtctgcaaattatagaatataattgcatatgtaggtaggactgattttgttttttgacaaacatagatattttctagtactgtaatgcaaataacttacaactttatttttatcgccaatactgtaacatatataaccaattactcgtttctctatttgtcgtgaagcttggagtcacagcaacgcatgtggttgttgatggtgttttggtgtttcttacagttatcatgagaatgctaccaatagaagctgtgaatttgcacttaaaaataggctgaaattgaatttatttaacgaaaatatctaaacaatgtccccctatgaacttaacctttggtaaccagcccactttaagagagttatatttcatattgtattatgtgcagcatgtaaaccacatactgtccccataaaccaaatctgtttctgtattgcgacactacgtatcacaggatgctctccaatttgttctttactttcattaacctgttttagctgctcttataaccattcacagcttcacaaatttgtgaatgatgacttgggtgcattctttgcagagatatcgagtattaagtaagcaaagacttggtcgtgctattcttatctttgtgcaaaatttcagaaggtcatatgtaggagatcaagccatgcattcttcaaaggttagaagaaaccgaataataggacataactattataatttttctttttatcttgatgtacctttttatgtaaatccccatcaagttttacttctttgctgcagcagttgtatgcaagattatctgagcttcttggattgaatgaccatttagttttactcaatgccattgttgggaaaatagctactaatctaaagtgctatgctgaggtacctattgtttagacatttactgattttaggcatactttgatctatatgctgtggctgatcctttgtgtggttacagtgcgaggatgttattgatcatactctgtccctcttccttgaacttgcatctgggtaaagttgtagctatatgtattcactttacatgtctcatgcttattatggtaacaattcttcatatgtattttcgtagcagctatatgactggaaaactgcttctcaagctggagagtacaaaatttataattgcaaatcattctgtacagtcttctcactagcttctgtttcatgttatccctgtgccattcctggtcttagaagtgattctattttcattattaatcttttcagagggattcttttccatttcttgaagaatacagatgtgcccgcagtagaacaacattctactacatccttggctgcttggttttcatggaagacaccccagtaaaattcaggagtttcatggagcctctcctacaagtgcattgctacttatattcataatctctccgccccagaatgtagctatatctggacctgtacagatcgtaggtagaaatagctacattttggggtgtaggaagtactagttaagttttttctccattcttatatggttttcttcttcgtattctccataggttgcagttaatttggaggcaaccgctgatgctgctttctggactgatgttgtgaagtacgcatttattggtttgatgagagacttacgaggcattgctatggccacaaacaggtgcacaatttgattatatgtggtatatatgtgcatcaactcactaactactttgttgatctgatccagccgcaggacctatggcctcctatttgactggctatatccatctcgcatgccacttttactgaaagccatctcactctgtgctgatgagccggaggtaactaccaaatcgcaatgctttccttgcgtagctgttctttttgaaaaagtttgaactgtttttagaaaatatctagagccttatgcttctaaatcttttgctcagctactgcaaaatcaccactttgtgttcatgcaggtcaccacacccctactcaagtttatgtgcgagtttgttttgaacaaagctcagagattgacatttgattcatcatcaccaaatgggatccttttattccaggaggttagcaagctgattgtggcttatggatcacgtattctgttgcttccaaacggcactgatatttatggaagtaaatacaaaggcatatggatatcacttgctgttctttcaagaggtgagttcagaaaatatgttttgaaaacacctgtatgctctgcaattttattacagtttcagtaaagtctacctgctgttattcactgttttctaatgcttgatttttttagtggatttcatcctttccaattttatgtgcgactctcattgcacaatttttttgtttgaaaaagtgtgctttaggttacacttttgctgtgaaatgttatttgaattccaacatgtctctacgaaatttcaagaccaaaaccttgtttttgcaccccattgagatcattgttttccaacagacaatattaacttatccccatgggccatattacctggactgtgaaagcttgttcatttctgttaatcatttaactccttactgatttgtgatatttgagttgaattgtagcctcataggccctggcagatgataaatatttcaattgcataagatttgcagtagttgagaatgggtttatgatgattttggctaaactgaaatttaactgcaactatggttaaattctgttgcaaatatggcagactttctataccttttcagtttcatgtgtggtatgatctatggatctccttattcaagaggatactgatttacttgaatttggtatgagatgttacttggagttttcggttagggtgacagctgagttccaccatctctgattcaaactttttgttgtgcttttaatgttataagaataaaattggctgagttccactcaactccgagcccaattatttgttcttaaactgtatcttctgggaaccttatctcccattgcagactaaagatttgtattttttttcttttgctgttattctgactggaaccattgcagctttatgtggaaactatgtcaattttggtgtatttgagctgtatggtgacagagcacttgctgatgcccttgatatatctttaaagatgagcctctcagttccattgtctgacatattggcattcaaaaaggtattccttgcaactttagtgatttactattgttttgctgtgtagtgctattgcttttattaatatggttattaagatctcaaatatattcattctaagttttatagcattgaagatgtaaagttctcattatatcgcaatgaaagtgaattgaatgttatgtatatcaattaagcagaggtaattacttgtgcctcaggaactggactgagtgattttagtgccaatcttctaatctaactgagaaccctgcatttacgcacttggtccagttagacaacgctgttatgacagaatatacaaattgatcagatcctagtatcttagcctgtctagaaagatttgtatattctgtcataacagcgctgtcatttttttatttgaaaatatacacagtaaaattaccaggagaaaacatgaaatgagtaccgccaacagtgggctccagagttctatcaggaaactttttctttggaacatgggatgctgctgttattttttatttttatgccagacattttcaaacatttttttaagagcattctccaacccctagaactgtactccagttgtgtttgaactttgcatattttttttcaacattttgtttgtagtctccttggcattttaccagcaggtaccctgcatgcgagcttagtttatttatttaggtgatctcctggcaatttttgcccactggtaacatgcgtacaggtttagtgctatgttttccaacaattgtgcttttactggcttgatcatagacaaataaacagcctagacaccattccaggtcttgcattgtcccacattgatttatggttaaccagatgattgagatattcttgtttcatccgtggaagcattcatactaggctctttctttatttcagctgtcaaaagcattctatggatatattgaagttctgttcagcagccatatcacttttgttctcaatttggatacaaacaccttcgtgcatattgtcagcactcttgaatctggcttaaaaggtctagatacagggatatcaacacaggtatacgacatgatgctttttactgcttgtaaaatgttccccgcttcttgttacaacagcatcggtgaatcactgcttaaactgtgtcctatcggggaagacatacttccaatctgtggttgctggtagataataattgatgccatcataatactctattctcttttatgtggtttcccttttagtttcttctcttggatctggatgtcatgtgcaacctggttagggcccacatagaagcagcagtcaacctctctaggcctgcagtactgtgcacatgaatagtaatgggaacaacatctgcctatggttactgtttaatcatttccatgttcttcgatacggggtatatcgtaaaggtttgggttgtagaggtttattaaggaagcaatacacacaagcttttagtctcttttttatctccttcccttatgcagctacctcagcactgcttggttcattaagcctaagggcccttaactatgttcatcacattggaatccatcattgttctttagtgctttctgtttggactaatctgtaaattgttgcttccttttggcagtgtgcctctgccattgatagcttggcggccttttatttcaacaatatcacagctgctgatggccctccttcaccagctgcactaaatcttgctcggcatattggagagttccccactttatttcctcaggtttgtgttaataatcttctctaccatatgcagaaaggtctggatgtaattacattttgttttttttctgtgacagatactgaagacgctttttgagatcatcatctttgaggatgcgggtaatcaatggagtcttagtaggccaatactgagtctgataatgatcagtgaacaggtgcttgtctttttaaaacttttaaatcatgttccttagcatttcttttgcactcttttttccagtttgtattgtctttgttttttttctttttttttttgcgagggtctttagatcttttctaatcagttgtttttctttgtgcagatgtttagtaatttgagagcacagatattagcatcacaggtcagtgaactctctggtctgatattccactatgcagtcctgtctttctagttttatttttgggttaattggatccatgccactgcaaatatgccaatttgaaaaaatgtcactactattcagcattcggctatgtgccactgaaaattggagaaactggaaccgttcacattttccgtcaaaaatccctgttagcccccaactgcacgtgggccccatctccctcccctctcttctctttccccttctctctccaccaccgtagatgcggtaggtgttgtcgccatcgtctcggagccggaagatttgcgattcaccctcaccgatctcgcgacgatgggtgatgtggccgcaccagctgcggcggcgcgggcggcgaggccgacgagcccgttgcgcccgcccaaggcgatccgcagcaccaagccaaggggctcgacgaggagaccgtcatggcaccattcgtcaagcaccttgtctcggagccggcctgctgggatgcgcctgcgtcgtcgtcgtcgttgtcgagcgcctcgtctcggagccggcgagccagactgcgcctgcatcgtcgtcgtctgctcccccggcaaggtccccggccaccgcccccgtgccggtcgtcaccccgcccaccgccgcatcgctgtggccaaccctcgctgccaccgccaccgacctcctcccggagcgctcgctttcatctccttcccccgtgccgctcgtccctccgcacttcaccatcggctccccggctgccgattcccctcagccgtcgccctcctgggctcgccggcgtccatggcggagaagctccccggctgctaattccctcgacgacggcggtgagggtgctgcgtccgccggcaaggacgacgaggaacggacgggtcgcggcggctgctggtggagcagcgagagatggagggggggggggatcactggctagctgcagtggcaaggaccagcgagttcgaggtggagtgctcgccggtgtccatggtggagaagtgaagaaaggaagagggagagagatgacggaggttgacagaaaactggatggaagtggcatggttccaatttccccaaattctagtggcacgtagccgatatgctcaatagtagtggcattttttcgaattggcatatttgcagtggcatggatccaattaacccttttttttcctctgcttgaagctttctagtgtcaagttatcaacaatgtttccagtcatcagcgtgcaggtgttaggagacaagtttcttttcagtaaaaatattaaattctactagtacatcttttgattagaactgtatgtccagcttgtgatgtacctaagttttgttaacatatgtctgccaataacagcattagtaatcattattgaagaactaatgtacgtcttgtttgcagcctgtagaccagcaacaacgcctttcgcaatgcttcgagaagctgatgtctgatgttgctaggaacttggaaccaaagaacagagataaattcactaaaaatcttacaacattcaggcatgatttccgtgtgaagaacattcaggcatgacagctgttcaggaccagctaccagctttaaggtggtgcactcatgtgctgtaaatactttagcttagcttcgttttaggaaccaccattcccgtggggggaaagttatggtttaactcagtttggtttggattggctgaaagatgaagggttctcctgctgcacgtggtggcaaaatgcagttgttgatctcttaccttgtcgtgtactagactggcgagtgcaggagattcttcttcttcttcttcttcttcttcttcttcttcttcttcttcttcttcttcttcttcttcttcttcttcttcttcttcttcttcttcttctctttttataccttagtgttaattccatctctttttgcttgtacagcaatattcatgtgaaagcctgtgatcgctgtttccctaagttgttagggcgaaagcagccatcgctcaaaatataattcatttgttaacaggttagaagaatagaaaaaaagttgtaaatggttgtgcttcc

SEQ ID NO: 67 - DNA, 3501 bp, Saccharomyces cerevisiae
ccagagatatgtagccttccatcagtagtaatatccaataaattgggcaccatggtttggcaatcaggctttttaccctcgccctcttttccttcgccttttacctcttctgcatccaatttcagcgtacgtacacaatgattgactttggaaattttcacttttttccactcgaagaaaaaaaattccaaacacggttctccggtatttaggcatcgaataaactttgctaatcgactaaaagcatctctgcatatctatacgtgtatatattgtattcgctacagctcgctccttgcatcaactctttttttcttttttttcttccaggttaatcaattactgtactgtagcttcttttttatattttttaggttttcatatagtgtcttacgcaaataggcggaccatagaatgactgtcaccataaaagaattgactaaccacaactacattgaccacgaactatcagccactttagactcaacggatgcgttcgagggtcccgagaagttgctggaaatctggttcttccctcacaagaagtccatcacgaccgaaaagacattaagaaatattggcatggatagatggatcgagattttgaaattagtgaaatgcgaagttctttccatgaagaagactaaagaactggatgcctttttgttgagtgagtcttccctcttcgtcttcgatcacaaattgacgatgaagacgtgcggtactacaaccacattgttctgtctcgaaaagcttttccagatcgttgagcaagagttatcgtgggctttccgcacaacacaagggggcaagtacaaaccatttaaagtgttttattctagacgatgtttccttttcccctgtaagcaagccgctatccatcaaaactgggctgacgaagtcgactatttgaacaaatttttcgacaatggtaaaagttattccgtgggaagaaatgacaagagcaaccactggaacctgtacgtcaccgagacggaccgctccacacctaagggaaaggagtacatcgaggatgacgacgaaactttcgaagtactgatgacggagctggacccagaatgcgctagtaagtttgtttgcgggcctgaggcatccacaaccgctctcgtggagccaaacgaagataagggccacaacctcggctaccaaatgactaaaaatacaaggcttgacgaaatatatgtcaactcggcccaagactccgatttatcatttcaccacgatgcatttgcgttcacgccatgtggatactcatccaatatgattctcgctgaaaaatactattacaccctgcacgtgactccggaaaagggttggtcttacgcctctttcgaaagtaacatacccgtatttgacatttcccaagggaagcaagacaacttggacgttcttctacatattctgaacgtttttcaaccaagagagttctcgatgaccttttttaccaaaaattatcagaaccaatccttccaaaaactactaagcatcaacgagtcactgcccgactacatcaagttagacaaaattgtttatgatctggacgactaccaccttttctatatgaaattgcagaagaaaatatgaaaagccgccatttgtgtctcctcatacttacatagaatagccctcttctattatccttcgcttgctttctagcactcataactaatgtagtttaacccgcttgtatatcttctacatcattaccccgcatgcttttttttttcctctagagaaaaccggcacagattggccggacccggaacaggaaaaatggccactgaaaattcctggccagaccacccctgagctaagggagtttagccgctcaagcttttatttcctctgatgtaatatatcacacacccagacacggttgccaaggcctcgacggaaggccgcttcaagggacggggcagtggctatcagaaataccttaatatcatcaatatttttcatcaatcgcaaggtgtcaaacatcaataaaggatgatgctcaaaggtttatgcccgatgttcttctaatcccctttctctcctaaaataatcctttttttactcttcttcttttcccctgtttccatttttgtcttttctcaccccttatgggacatcaataatgcaagtatgtttatacatttttatataaatgtatatataaatgccatttcttacacataacctccattctttggttaattctttcttcattcttttttttttcattctgaaaagccctccaagcaagcacgctaatttaatatcgatttaaacatgaaagtatcacaagttttcatttctgccatctctgtcttcggcctcgctactagcgtaaatgctcaaaacgcatccaacaccacgagtaacgctgctcctgctttgcacgctcaaaatggtcaactactaaacgccggagtcgtcggtgctgctgttggtggtgctttggcctttttgatttaggaaaaacgccgcttactgccacgatgatgataccctattgacgtttctgaaatgtataatttcttttctcatcttcccctttgatattccatctataggccccagagtagtaaatttggtgctttaattttttttctcttcttccagttcgtctctattttttcattccattatatttatttatcagttttactttctcaaatattcttatataacactatttcatctacgtaaccgaaaataagtagtttaataacgataataatcataattgtgataaaaatatttacatttttcttacttgtcgcccgcttcgtttttgtatagaacgtactgtattagttgtccgttcttttcacgtctgaagaggtcgatttcttgcaatttaacatcaacgtggtattttccattatatacaatcaaagaatcatcgtccagttcgatttcgccatgaaaccaaaggtgtaatgcatgtgagtccccctgcagtgggtattcgtacttgaacgacccgtataccctctccggcgatataatctcaaataaatcggctgtttccaaaccaatgcggttcagtaaatcgtcgatggttccccgtatacttattggccgatgcgttatcctccatttgcaaacaaagggtattctataccaagtgtgcgaactatcccttttatcgtctggctccattacaataccagttacacatggatcttgatcttcgcaccacatgctgaattcatttaacgtgggtgaattgccatctttatcaagcaatggtactccgtattgttccttgatcatgtcatgaccggataatatctctaaaacccttaatttagaaagcttctgtacttggtttacgtcaacctttttcaaatctctggtactcagtttacgtatcttggatgatggaaacaatggtaagaaactttgttcctttaaatatatcactctatagattagtgagtatcctaatatcacaccgaatataccaccaaatatggcggaccatatttg

SEQ ID NO: 68 - DNA, 1650 bp, Zea mays
attcggctcgaggcattgaggacgttcgacctgccggaggcgcgaagaagttccagtctgctgcttactccaactgcgcaaagaagccatcctgatatcccttttggctttctcgttctagtagtttaggatttcttttctgacacttcgattcttaccaatccccctggcctgctgctttcctgacaatcgaccagttccccagtcttgctccctgcagtcctccctcctccatctccagcgttgtgttctgactcacctgcaccaatggctgttctttctgctgctggtgctcccccggcctcagctatcgggtttgagggctatgagaagcgccttgagatcacattctctgaggcacctgtctttgtggacccccatggcagcggtttgcgtgccctctccaggtcccagattgactctgttctggatcttgcacggaagattgtcatcaagacctgtggcactaccaagctcctgctcacaattccaaggatcctagagcttgctgaagagctgtctatgcctcttgctgctgtgaagtactcccgcgggacgttcatctttcctggcgcacagccagccccccaccggagcttctccgaggaagttgctgtacttaaccgatactttgggggcctgaagtctggtggcaatgcttatgtgattggagatgcagcaagaccaggacagaagtggcacatctactacgccactgagtacccagagcaaccaatggtcaaccttgagatgtgcatgactggtctggacacgaagaaagcttcagtcttcttcaagactaatgctgatggcaacacaacatgtgccaaggaaatgacgaagctctctggtatctctgaaattatccctgagatggagatctgtgattttgacttcgaaccctgcggctactccatgaatgcaatccatggctctgcgttctccacgatccatgtgacgcctgaggatgggttcagctacgccagttatgaggttatgggcttggatgccactgccctgtcttacggtgaccttgtcaagagggtccttgggtgcttcggcccctcggaattttctgtcgccgtgaccatcttcggcgggcggggccaagctgggacatggggaaaggaacttggtgcggaggcttatgactgcaacaacatggtcgagcaggagctgcctggaggtgggatcctcatctaccagagcttctgtgctgctgaagacgccgttgctagctcgcccaaatccgttcttcgctgctttgatggcgagaatgcagcaccttttgcgaaggactgcaagctggctaatcttgtctgcttggaggaagttggatgctatcgaggagaaggatggagtgcttgatgagtaagacgggtttctggtgtcgatttgcttctgagtttttttctttttatatcgttgcgatctcgtggttgtcgtttggttagcagccaagccaggctattagtacgaagaatgtcgtctataaacatgtgttcctacgttgccacatgctgagtcaatctgtatacagctagctctaggtggtcagctgcgtctaccacaatgagcatacatgtatggataaatcttctgtgaaagcattcgatgaataaaaaaaaaaaaaaaaaaaaaaaaaaaaag

SEQ ID NO: 69 - DNA, 2082 bp, Zea mays
ccacgcgtccgcccacgcgtccgaaagaattccctcccctagccgccgccgccgccgctcgtctccctgagaggtgccgggaccgaggaactggccgagtactaggtagagaatcggtttttcttgtctcagcccggggtctgctgcgtctggtggtggtgaaggggagaaattcgtgagatctgttccggatcaggcgtgcgagctcgggaatcaggggtttcacacatagcttcgtcgatttgaatttgatgtactaatggagtctaagggtggcaaaaagtctagcagtagtcgttctatgatgtatgaagctccccttggctacagcattgaggacgttcgacctgccggaggcgtgaagaagttccagtctgctgcttactccaactgcgcgaagaagccatcctgatatcccttttggcttcctcattctagtagtttaggatttcttttctgacactttgattctgaccaatctctctggcctgctgcttcctgataatcgaccagttccccagtcttgctccttgcactcctccctccatctccagcattgtgttctgattcacctgctccaatggctgttctttctgctgctgatgcttccccggtctcagctatcgggtttgagggctatgagaagcgccttgagatcacattctctgaggcacctgtctttgtggaccctcatgggcgtggtttgcgtgccctctccagggcccagattgactctgttctggatcttgcacggtgcacaattgtgtctgagctctccaacaaggatttcgactcatatgtcctttctgagtcaagcttgtttatctatcctctgaagattgtcatcaagacctgtggcactaccaagctcctgctcaccattccaagaatccttgagcttgctgaagagctgtctatgccacttgctgctgtgaagtactcccgtgggacgttcatctttcctggcgcacagccagccccccacaggagcttctctgaggaagttgctgcacttaaccgctactttggcggcctgaaatctggtggtaatgcttatgtgattggagatccagcaagacctggacagaagtggcacgtcttctacgccactgagtacccagagcaaccaatggttaaccttgagatgtgcatgactggtctggacaagaagaaagcttgtgtctttttcaagactaatgctgatgggaacacaacatgtgccaaggaaatgacaaagctctctggcatctctgaaatcatccccgagatggagatctgcgattttgacttcgaaccctgtggctactccatgaatgcgatccatggctctgcattctccacaatccatgtgacgcccgaggacggtttcagctacgccagttacgaggttatgggcttggatgccactgctctgtcttatggtgaccttgtcaagagggtcctccggtgctttggcccctcagagttttccgttgccgtgaccatcttcggcgggcgtggccatgccgggacatggggaaaggcacttggtgcagaggtctatgactgcaacaacatggtggagcaggagctgcctggaggcgggctcctcgtgtaccagagcttctgtgctgctgaagacgctgttgctacctcgcccaaatctgttttccactgctttgacggcgagaacgtggagagtgctcctcctcctatgaagaaggactacaagctggctaatcttctctgctgggaggaggaagcggatgccatggaggagaaggcgggagtgcttgatgagtaagacgggcttctggggtcgatttgcttctgagttgtttattttatatcgtcgcaatttcgtggttgtcgtttggttattctgtgaagcagccaagccaggctattgttatgaaaatttgtcgtctgtaagcatgtgaacttccgatgttgccacatgctggatcagtctgaataagtaagtatgcagctctaggtggtcagctgcgtctaccacaatgagcatgaacgtatggagaaatatctgtgaacccattttgtttatgaataagatttgtttttttcgaaaaaaaaaaaaaaaag

SEQ ID NO: 70 - DNA, 2985 bp, Zea mays
gcggccgctgcccgggttttcgtcggtcccttcgccatgtcttcgctggacccttcgccagcgacgagcacccaacagaagcaattggagagtttggtaaatctactgacgcagggaagcaggttctaccgcaaagcatataatgaactgttctcaggtgtaactactgagcaggatccggattcatcgactaatattcctgagtatatgctttttgggtggcatctcttcttaatgctccattcgagatcaccagaattgttcaaggacctggtgtcctgcatccatggattagttgctgtgttggccatacttttgattcacgtgccagctaaatttaggagcttcacgattgaaggctcttctcacttaatcaaacaaactgagaaaggcgtggatcttattgcttcattatgtcataactatcatacctctgaagaacgtttgaaagaaatgttgcacaagtcttacaatgcaatagaagacattttccatatgaaagcactaagtgcttcagagtgcaaaccagaaaatttggataagatagacacagatgacctgatgtatttcaaaggtctgattgatatggaatgtttccagtcaaatttggaaaaaatggagaaactatgtaattctaatagctgtaaaggggagcttgattttaaatcaattttgatcaataatgattatattccctatgatgagaactcgacgggggattccaccaatttaggacgttcaaagtgtgcctttgaaacattggcatctcccacaaagacaataaagaacatgctgactgttcctagttcccctttgtcaccagccaccggtggttcagtcaagattgtgcaaatgacaccagtaacttctgccatgacgacagctaagtggcttcgtgaggtgatatcttcattgccagataagccttcatctaagcttcagcagtttctgtcatcatgcgatagggatttgacaaatgctgtcacagaaagggtcagcatagttttggaagcaatttttccaaccaaatcttctgccaatcggggtgtatcattaggcctcaattgtgcaaatgcctttgacattccgtgggcagaagccagaaaagtggaggcttccaagttgtactatagggtattagaggcaatctgcagagcggagttacaaaacagcaatgtaaataatctaactccattgctgtcaaatgagcgtttccaccgatgtttgattgcatgttcagcggacctagtattggcgacacataagacagtcatcatgatgtttcctgctgttcttgagagtaccggtctaactgcatttgatttgagcaaaataattgagaactttgtgagacatgaagagaccctcccaagagaattgaaaaggcacctaaattccttagaagaacagcttttggaaagcatggcatgggagaaaggttcatcattgtataactcactgattgttgccaggccatctgttgcttcagaaataaaccgccttggtcttttggctgaaccaatgccatctcttgatgacttagtgtcaaggcagaatgttcgtatcgagggcttgcctgctacaccatctaaaaaacgtgcttctggtccagatgacaacgctgatcctcgatcaccaaagagatcgtgcaatgaatctaggaacacagtagtagagcgcaatttgcagacacctccacccaagcaaagccacatggtgtcaactagtttgaaagcaaaatgccatccactccagtccacatttgcaagtccaactgtctgtaatcctgttggtgggaatgaaaaatgtgctgacgtgacaattcatatattcttttccaagattctgaagttggctgctattagaataagaaacttgtgcgaaagggttcaatgtgtggaacagacagagcgtgtctataatgtcttcaagcagattcttgagcaacagacaacattattttttaatagacacatcgatcaacttatcctttgctgtctttatggtgttgcaaaggtttgtcaattagaactcacattcagggagatactcaacaattacaaaagagaagcacaatgcaagccagaagttttttcaagtatctatattgggagtacgaaccgtaatggggtattagtatcgcgccatgttggtatcattactttttacaatgaggtatttgttccagcagcgaagcctttcctggtgtcactaatatcatctggtactcatccagaagacaagaagaatgctagtggccaaattcttggatcacccaagccatctcctttcccaaatttaccagatatgtccccgaagaaagtttcagcatctcataatgtatatgtgtctcctttgcggcaaaccaagttggatctactgctgtcaccaagttccaggagtttttatgcatgcattggtgaaggcacccatgcttatcagagcccatctaaggatttggctgctataaatagccgcctaaattataatggcaggaaagtaaacagtcgattaaatttcgacatggtgagtgactcagtggtagccggcagtctgggccagataaatggtggttctacctcggatcctgcagctgcatttagccccctttcaaagaagagagagacagatacttgatcaattataaatggtggcctctctcgtatatagctcacagatccgtgctccgtagcagtctattcttctgaataagtgggttaactggagcgatttaactgtacatgtatgtgttagtgagaagcagcagtttttaggcagcaaactgtttcaagttagcttttgagctatcaccatttctctgctgattgaacatatccgctgtgtagagtgctaatgaatctttagttttcattgggctgaaaaaaaaaaaaaaaaagggcggccggcgatcccacgcgtccgcccacgcgtccgcccacgcgtccgcccacgcgtccgcggacgcgtgggtcgacccgggaattc

SEQ ID NO: 71 - DNA, 889 bp, Wheat dwarf virus
cacaccccgttttttcgctaaggacctgccggacttctgttcactaccatggcctcttcatctgcacccaggttccgtgtctattccaagtacctctttctaacatatcctgaatgtacccttgagccacagtacgccttggattcacttcgcactctcttgaacaaatatgagcccctctacatcgctgctgttagagagctccacgaagatggatcaccacatctgcacgttctcgtgcagaacaagcttcgtgcttccatcaccaatcccaatgccttaaacctccgtatggatacatctccattctccatattccatccaaatatacaagctgccaaagactgcaaccaagttcgtgattacatcacgaaggaggttgactccgatgtaaacacagctgagtggggaacattcgtggctgtttcaactccaggtcgtaaagaccgtgatgcggatatgaaacagatcattgaatctagttcctctcgcgaggaattcctcagcatggtttgcaatcgttttccgtttgaatggtctatccgtctcaaagacttcgagtacacggcacgccatctatttcctgacccagttgccacttacacacctgagtttccaaccgaatcactcatttgccatgagaccattgaaagctggaaaaatgaacatctctactccgtaagcctcgaatcctatatcctttgtacttccactcctgcggatcaagcgcaatctgacttagagtggatggacgattattccaggagtcaccggggaggcataagtccatctacatctgcgggccaaccagaacaggaaagacttcctgggcaaggtctctagggacacacaattattataacagtctagttgatttcacaacatatga

SEQ ID NO: 72 - DNA, 3150 bp, Saccharomyces cerevisiae
tgcacgtttatctatctatgttgcctccaaagggttattctctcaaaaagctcaatcactgtggaaccgaaaaataatgttatgaagattttttgagcagtatgtcttgtcaaaagctcaactagtgcagctgatgttgcttaaaaaaataaaaaccaaatttttctactttgctcttgtacgttgcacaaagaagattatgtaacaaacttgaagggactctcaaaaacttgctataaattgtacaaaagcctcaatatcacctagtagtggttctatacctgtctcgagccatcgccaaatagttgataaatttgattaatttctgcccttattcgcacgtgccataacacctgtacctctcacgctaaagacctttataatcaaggaaacttgttgctgcagaggaaataggaggtaatgaattgtgataaggcacatcacatcaatttttcttgcattcttgcatagaaagataggctgatgcaattagcgcgtttcaatcgcgtgccaaagacgtatatactaagcaatataaccgaattgattaagtagttggttaattgtatattttgtgataaagatggttaactgacttaggcggacataatagtagaaaatctatataatttttcccatgcagttgttattacaaaatgcaattcttgagatagcacaagcaagaataatagggcacggtacgttcattccacgtagcgttagctagtgctgccacaaggtaaacgtacgattatattcatttttgaaacggaagttctttgtaaccctcatgctcgtttgatagtcacttaactacaagatattctcgttcagtgattgcttgcttataaatcaggaaacttcatttttattccttacattttcgaaaagcccgcaaggttttcttcgccacgctcaagcattcatcgttgaaaagcaaaactgtgcacactgtaccttaggcgactcttctccgaacaagctcatggctcatttttaaaatcacaagcttcgtataattgccaagacataatctaattgagaaggtcagacggcaaaacaaatgaccgaaatcttcgtttattggttcgcctgcgttgccaactggtacattttcccagagtaccagcaaaggaaggcatccttgatgcctactctgatactgtggaggatttaaactgaaaatgatagtctgcgcggcaaatctttctatttctactaaagttggatcctccggccgatataacgtattctttttatccaataatgtcaattttaaatgctcgattactaatcgttactaaaatagcggacgcgcttatgcgtcttcgacggatagttttcagatcatccctctcagaaagcaatgcaggaaccgcctgtaaaactatcttttgctggcactcacacattatggtattgatgccacctgaaaatacggaaattaaccattccttgtacggagatctaagagcaactattattgaattgttgccgttaaagtttcatttcagttccgtgtgtggtcaagtacaagactactgatgaaatatgttgtacacacacggaaatatatatatatatatatatataacaatattgtgggttgaggtggagacttgatttttcttatacagtatattcttgttcattttttaccattttcaacaaaccacacaaagactttattcattatgctagccgaaaaaacccgttccataatcaaagcaaccgttcctgttttggaacagcagggcactgtcatcacgcgtacattctacaaaaatatgcttactgaacacaccgaattacttaatatttttaacagaactaatcaaaaggttggcgcacaaccaaatgccttggccactactgttttggcagcggctaagaacattgacgatttgtctgtgcttatggaccatgtcaagcaaattggccacaagcatcgtgccttgcaaattaaacctgagcattatccaatcgttggtgagtacttgttaaaagcaatcaaggaagttttaggcgatgctgcgactccagagataattaatgcatggggcgaggcttaccaagcaattgctgacatcttcatcactgttgaaaaaaaaatgtacgaagaagctttatggccaggttggaaaccatttgacattactgccaaagagtacgttgcttcagatattgttgaatttactgttaagccaaagttcggttctggtattgaattggaaagcttgccaatcactccaggtcagtatattacggtaaacactcacccaattagacaggaaaaccaatacgacgctttaagacactactctctttgttctgcttcaactaaaaatggtttacgatttgcagtaaagatggaagctgccagagaaaattttcctgcaggattagtctctgaatatttacacaaggacgctaaagttggtgatgaaattaagcttagtgctccggctggtgatttcgcaataaataaagagttgatacaccaaaacgaagttccattggtgttactatcgtctggtgttggtgttacaccacttttagctatgttagaagaacaagtcaaatgcaacccaaataggccaatttactggattcaatcttcctatgatgaaaagactcaagcattcaaaaaacatgtagatgaactattagctgaatgtgcgaatgtcgacaaaataattgttcatactgatactgaaccactgattaatgctgcattcttgaaggaaaagtcacctgcgcatgccgatgtctacacttgcggctctttagcttttatgcaagctatgattggtcatctaaaagaactagagcatcgtgatgatatgattcactatgaaccatttggtccaaagatgtcaaccgtgcaagtttaggcgttaagcctcggaaacttcaattttattactgattcatttgataatttcacttgttcgatttcacagtttgagaagttatattacgaaataagaaaaatttttaaaacatgagaccattgctaatcttttgttgttatactgtgttagaaatcctcgtgaaatccttgtgaaatcctatgtggaatatttagatagtaagtaaagattgtgtatgtatttataagatgaataagcgccaggtgctaaacagagt

SEQ ID NO: 73 - DNA, 768 bp, Arabidopsis thaliana
attactcatcatcaagttcctactttctctctgacaaacatcacagagtaagtaagaatggtacagacgaagaagttcagaggtgtcaggcaacgccattggggttcttgggtcgctgagattcgtcatcctctcttgaaacggaggatttggctagggacgttcgagaccgcagaggaggcagcaagagcatacgacgaggccgccgttttaatgagcggccgcaacgccaaaaccaactttcccctcaacaacaacaacaccggagaaacttccgagggcaaaaccgatatttcagcttcgtccacaatgtcatcctcaacatcatcttcatcgctctcttccatcctcagcgccaaactgaggaaatgctgcaagtctccttccccatccctcacctgcctccgtcttgacacagccagctcccatatcggcgtctggcagaaacgggccggttcaaagtctgactccagctgggtcatgacggtggagctaggtcccgcaagctcctcccaagagactactagtaaagcttcacaagacgctattcttgctccgaccactgaagttgaaattggtggcagcagagaagaagtattggatgaggaagaaaaggttgctttgcaaatgatagaggagcttctcaatacaaactaaatcttatttgcttatatatatgtacctattttcattgctgatttacagccaaaataatcaattataccgtgtattttatagatgttttatattaaaaggttgttagatata

SEQ ID NO: 74 - DNA, 1966 bp, Oryza sativa
agaaaaccttgtgtcccccccatgatgcagaaatctaataagagcagcccaacgcttccggttggtggcggtagaccggcctctttaaactaccccatccgccccagatttatcaattactcctcgtcatctcgtctcgtctccgccaccgtgcgcgcgtcccctatattagaccccccaaccgggcaccggacacaccatcaccaacacaccactgcaaacccatccgcctccgcaccgcatcgcacctacaaattgtgcacgctgcaccgctcaaaaaaaagaagaaactaaagtcgtacgtaggacgcggcgtgcgagcgttggtgcggtgcgcggcggcgcgcggggaagtagtgagagcatcgatcatgccgggggcggcggggtactccgggtcggtgaagctgaagtacgtgaagctggggtaccagtatctggtgaaccacttcctgacgctgctgctggtgccggtgatggcggcgacggcgctggagctggcgcggatggggcccggtgagctgctgtcgctgtggcggtcgctgcagctcgacctcgtccacatcctctgctcggtgttcctcgtcgtgttcgtcggcacggtgtacttcatgtcgcggccaaggccggtgtacctcgtcgactactcctgctacaagccgccgcccagctgccgggtgccgttcgccacgttcatggagcacacgcgcctcatcaccgacgacgagaagagcgtgcggttccagaccaggatcctcgagcggtcggggctcggggaggagacctgcctcccgccggccaaccactacatcccgcctaacccgtccatggaggcgtcgcgcgccgaggcccagctcgtaatcttctccgccatcgacgacctcgtccgccgcaccggactcaagcccaaggacatcgacatcctcgtcgtcaactgcagtctcttctccccgacaccgtcgctctccgccatgatcatcaacaagtacaagctccgcagcaacatccgcagcttcaacctgtccggcatgggctgcagcgccggcctcatctccctcgacctcgcccgcgacatgctccaggtaagtactagccagctctttgatgttactactgtttagctaactaactaatcaggtgagccattaacgagcgacatggacggacacgcgcaggtgcatcccaactcgaacgcgctggtggtgtcgacggagatcatcacaccaaacttctactggggaacccggcgggacatgatgctgcccaactgcctgttccggatgggcgcggcggcgatcctgctgtcgaacaggaggagggaggcgaggagggccaagtacaggctgatgcacgtggtccgcacgcacaagggcgccgacgaccgcgcgtaccggtgcgtgtacgaggaggaggacgagcaggggcactcggggatctcgctgtccaaggagctgatggccatcgccggcgacgcgctcaagtcgaacatcaccaccatcggcccgctggtgctgcccatgtcggagcagctgctcttcttcttccgcctcgtcggccgcaagctcatcaacaagaagtggaagccgtacatcccggacttcaagctggcgttcgagcacttctgcatccacgccgggggacgcgccgtgatcgacgagctgcagaagaacctggacctgtccgcgcagcacgtggaggcgtcccgcatgacgctgcaccggttcggcaacacgtcgagcagctcgctctggtacgagctcgcctacatcgaggccaaggggcgcatgcgccgcggcgaccgcgtctggcagatcggcttcggcagcggattcaagtgcaacagcgccgtctggaagtgcctccgcacagtcaagacgcccgccgacgggccgtgggacgactgcatccaccgctaccccgtcgacatcccggaggtcgtcaagctgtgatcgaatccatggtagcc

SEQ ID NO: 75 - DNA, 1679 bp, Zea mays
cttctccttgtcccgtgtcttttcaaggatagcccgggcgcacgcagcatttcttggcgtcggtgtccgcgggttggcgactaagcaatggcgacgaggaaccaccgcgccgctgccgctccgcagccggcgaacagaggtgccgcgagggtcgccgggaaacagaaagccgccgccgccgggacacgccgagccctcggtgacattggcaacgtcgtctccgatgccctcgacagggcgatcaagctgccggaggggatccatcgccccatcaccaggagcttcggcgcccagctcatgaaggccgctttggcgaacaagaacgccgacgccgccgtagctcctgctcagcctgtagcggcgcgcgccgttacgaaaccagctaggaaagtgactacgaagaacgtccctcgtcctggcgctgggcaggctcccaaggagaacaagaagccatcagcagagggtgccgccgccgcgagcggccgctctgtgcagaagaacaggaggaagaagcccgcgtgcacgctttcgaccgtcctttctgcgcgttctaaggctgcctgtccggttaccgagaagccaaaggagcccatcgaggacattgacaagttcgacggcgacaaccagcttgctttggtggactacgttgaagacatctacacattctacagaccgcccatgcatgagagccgccccattgactacatggggcaaaccagccctgagctcagccccagaatgcgctccatcctcgcggactggctcatcgagtctcaccgaagattccagctcatgccggaaacgctctacctcacaatatacatcgtggaccggtacctgtcgctgcagcccacgccgaggagggagctccagctcgtcggcgtggcagcgttgctgatcgcctgcaaatacgaggagatctgggcaccggaggtaaatgacttaatccatatagccgatggcgcgtttaaccggagccagattcttgccgccgagaaggctattctgaacagcatggagtggaaccttacggtccccaccccgtaccacttcctgctgcggttcgcgaaggctgccggtagtgctgatgaacagcttcagcatacgataaacttctttggagagctcgcgctgatggactacggtatggtgatgaccaatccttcgacggcggctgcttgcgctgtgtacgctgctcgcctcacgttggggaggagtcctctctggacagagaccttgaagcaccacactggtcctcaacgagcagcagatactggaagggccaagacactggtcggatctcatgctgctagtgctagccctgatgcgaggctgaaggccgtctaccagaagtacgccacggagcagtttgggcgtgtggctctgcacccaccggcaccggctgctcttcccgaccttgtctagagtttttacttgacaaggctgagggatttagttgagttcgctttgattgacaagttcgagagttgtttcgtatactctattctcgcggtgtattagacactagtagtaacaactattcataactatatgaataaccacaatcaaaatttatgattggctgaagcttctttcgaaagactgtgaggtatttccacagttttgtaagactgtcagaatgaaacggtcttgattaaaaagagctgtctgccaactgc

SEQ ID NO: 76 - DNA, 6440 bp, Saccharomyces cerevisiae
tagttttctatggtggagtgaagcacagcagaaagaacgttaggaaccttagctaaaagatagaaaaaaagagcactacaaaaatcttatcctcgatttgaaatactaatgtcgagccagatcaaattaaatgaaatcgaaatgatataacgttgctcttgcacgtgtatttcgctgcttaggaaagttgtttccacatattatcttttgtacgattttaaacagtaaaatcgatgcatattaagggaggcccaatacccgcgggcagtaaccgcatctttggaaataccgggtaataataaatgcccgggaaaaaagagcataaaacagagaggcgatataggaatgaatatgtgctatttacggaagggaaaaacacttattgtttttctgaaatgtgacacagtaaagtccgtcatatacggttctccgttgggcgctaccacacacatatatataagcctgaatgcagtagacaaatttcagatatcatacaaaggaagcgttctctgggacccctttctatgtttagatggttcactgaacttgttcgttaacgtaaatatgtcttcctctttgattccaacaatgatattataaggaaattatcgtcacaatctaatcaacaaggacaaagaaaagaaaaagttgagagagagaacaaaagttcaaatcaaagaaaaaaaagaacatcaaattacctattacaataaacaattaagccatactcgcaacaatttgccataatagaaagcagcacctcgttggcgcagtcccttacatagtacacaacatttatcacttcacacaatcaggagtggaactcaatggaaaacaacaccacacgtatgatcttactaataaaagaacatgaacgttcctcagcgcgaacgttcgcattctgcgccttcgagcacaggataagttgcaggaagccatcacatctatgcaacgattatcacgacacaaccttgccgccgagaaaacgtccgtggagaaccattcggtcgattgcttcccacggaacgagtggactgaaacttaagactgcccctctctttccgcggaatcgctcatgccgcggtgccacaacattttcagatttactaagactccggtgagtgtgggctcacccgcgggtcgtgatcacgattcagcaccctttggactcgtgattccgtggaaaggtcagatctgtattcctacttatggtaatgtgctaaaaaaagagaaatgtctccgcggaactcttctacgccgtggtacgatatctgttgaacgtaatctgagcaatacaaacaaggcctctcctatacatatataattgtgatgtgcataaccttatggctgttcgcttttattatcataccttagaatgaaatccaaaagaaaaaagtcacgcaaagttgcaaacatataacaactgtgttagttatcactcgactttgttattctaattataaataaattggcaactaggaactttcgaaaaagaaattaaagacccttttaagttttcgtatccgctcgttcgaaagactttagacaaaaatgcccgaggccaagcttaacaataacgtcaacgacgttactagctactcctccgcgtcttcttctactgaaaacgctgctgatctacacaattataatgggttcgatgagcatacagaagctcgaatccaaaaactggcaaggactctgaccgcacagagtatgcaaaactccactcaatcggcacccaacaaaagtgatgctcagtctatattttctagcggtgtggaaggtgtaaacccgatattctctgatcctgaagctccaggctatgacccaaaattggaccccaactccgaaaatttttctagtgccgcctgggttaagaatatggctcacctaagtgcggcagaccctgacttttataagccttattccttaggttgcgcttggaagaacttaagtgcttctggtgcttccgcagatgtcgcctatcagtcaactgtggttaatattccatacaaaatcctaaaaagtgggctgagaaagtttcaacgttctaaagaaaccaatactttccaaatcttgaaaccaatggatggttgcctaaacccaggtgaattgctagtcgttttaggtagaccaggctctggctgtactactttattaaaatccatctcttcaaatactcatggttttgatcttggtgcagatactaaaatttcttacagcggctactcaggtgatgatattaagaaacattttcgtggtgaagttgtttacaacgcagaagctgatgtacatctgcctcatttaacagtcttcgaaactttggttacagtagcgaggttgaaaaccccacagaaccgtatcaagggtgtcgatagggaaagttatgcgaatcatttggcggaagtagcaatggcaacgtacggtttatcgcatacaaggaatacaaaagttggtaacgacatcgtcagaggtgtttccggtggtgaaaggaagcgtgtctccattgctgaagtctccatctgtggatccaaatttcaatgctgggataatgctacaaggggtttggattccgctaccgctttggaatttattcgtgccttaaagactcaagctgatatttccaatacatctgccacagtggccatctatcaatgttctcaagatgcgtacgacttgttcaataaagtctgtgttttggatgatggttatcagatctactatggccccgccgataaggccaagaagtactttgaagatatggggtatgtttgtccaagcagacaaaccaccgcagattttttgacctcagttacaagtccctctgagagaaccctgaacaaagatatgctaaaaaaaggtattcatataccacagaccccgaaggaaatgaacgattactgggtaaaatctccaaattacaaagagctaatgaaagaagtcgaccaacgattattgaatgacgatgaagcaagccgtgaagctattaaggaagcccacattgctaagcagtccaagagagcaagaccttcctctccttatactgtcagctacatgatgcaagttaaatacctattaatcagaaatatgtggagactgcgaaataatatcgggtttacattatttatgattttgggtaactgtagtatggctttaatcttgggttcaatgtttttcaagatcatgaaaaagggtgatacttctacattctatttccgtggttctgctatgttttttgcaattctattcaatgcattttcttctctgttagaaatcttttcgttatatgaggccagaccaatcactgaaaaacatagaacatattcgttataccatccaagtgctgacgcttttgcatcagttctatcagaaataccctcaaagttaatcatcgctgtttgcttcaatataatcttctatttcttagtagactttagaagaaatggtggtgtattctttttctacttattaataaacattgtcgcggttttctccatgtctcacttgtttagatgtgttggttccttaacaaagacattgtcagaagctatggttcccgcttctatgttattgttggctctatccatgtataccggttttgctattcctaagaagaagatcctacgttggtctaaatggatttggtatatcaatccgttggcttacttattcgaatctttgttaattaacgagtttcatggtataaaattcccctgcgctgaatatgttcctcgtggtcctgcgtatgcaaacatttctagtacagaatctgtttgtaccgtggttggagctgttccaggccaagactatgttctgggtgatgatttcattagaggaacttatcaatactaccacaaagacaaatggcgtggtttcggtattggtatggcttatgtcgtcttctttttctttgtctatctattcttatgtgaatacaacgagggtgctaaacaaaaaggtgaaatattagttttcccacgcagtatagttaaaagaatgaagaaaagaggtgtactaactgaaaagaatgcaaatgaccccgaaaacgttggggaacgtagtgacttatccagcgataggaaaatgctacaagaaagctctgaagaggaatccgatacttacggagaaattggtttatccaagtcagaggctatatttcactggagaaacctttgttacgaagttcagattaaggccgaaacaagacgtattttgaacaatgttgatggttgggttaaaccaggtactttaacagctttaatgggtgcttcaggtgctggtaaaaccacacttctggattgtttggccgaaagggttaccatgggtgttataactggtgatatcttggtcaatggtattccccgtgataaatctttcccaagatccattggttattgtcagcaacaagatttgcatttgaaaactgccactgtgagggagtcattgagattttctgcttacctacgtcaaccagctgaagtttccattgaagaaaagaacagatatgttgaagaagttattaaaattcttgaaatggaaaaatatgctgatgctgttgttggtgttgctggtgaaggtttaaacgttgaacaaagaaaaagattaaccattggtgttgaattaactgccaaaccaaaactgttggtctttttagatgaacctacttctggtttggattctcaaactgcttggtctatttgtcagctaatgaaaaagttggcaaatcatggtcaagcaattctatgtactattcaccaaccctctgctattttgatgcaagaattcgatcgtttactatttatgcaacgtggtggtaagactgtctactttggcgacttgggcgaaggttgtaaaactatgatcgattattttgaaagccatggtgctcataaatgccctgctgacgccaacccagctgaatggatgctagaagttgttggtgcagctccaggctctcatgcaaatcaagattattacgaagtttggaggaattctgaagagtacagggccgttcaatctgaattagattggatggaaagagaattaccaaagaaaggttcgataactgcagctgaggacaaacacgaattttcacaatcaattatttatcaaacaaaattggtcagtattcgtctattccagcaatattggagatctccagattatttatggtcgaagtttattttaactattttcaatcaattgttcatcggtttcactttcttcaaagcaggaacctcgctacagggtttacaaaatcaaatgttggctgtgttcatgtttacggttattttcaatcctattctacaacaatacctaccatcttttgtccagcaaagagatttgtatgaggccagggaacgcccctcaaggactttttcttggatttcatttatcttcgctcaaatattcgtggaagttccatggaatatattggcaggtactattgcttattttatctactattatccaattggattttactccaacgcgtctgcagctggccagttgcatgaaaggggtgctttattttggttgttctcttgtgctttctacgtttatgttggttctatgggtctgcttgtcatttcattcaaccaagttgcagaaagtgcagctaacttagcctctttgttgtttacaatgtctttgtctttttgtggtgttatgactaccccaagtgccatgcctagattttggatattcatgtacagggtttcacctttgacttatttcattcaggctctgttggctgttggtgttgctaacgtagacgtcaaatgcgctgattacgaattgctagaattcacaccaccatccggtatgacatgtgggcagtacatggaaccatatttacaactagcaaagactggttacttaactgatgaaaatgccactgacacctgtagtttctgtcaaatatctacaaccaatgattacttagctaatgtcaattctttctacagtgagagatggagaaattatggtatcttcatctgttatattgcattcaattatatcgctggtgtctttttctactggttagcaagagtgcctaaaaagaacggtaaactctccaagaaataatagaattttgaatttggttaagaaaagaaacttaccaagatggacttttttaataaacatacataatcactacatataggtgcgtaataataagtttttattttttttttcttaattcagcgagctttctacatttcaattttcttgaatttaccagctctgataaatcaaagttcaatgtccgaaagaattccgagaattttattcctaggttatctcatcggtactttttttttataggcatcagcatttagtgtgaaaacattatttcttaactgtgccttacggttaaaaagaaaggacgcaatggatatagttaaaatataagatatattatatcattatctgtccga

SEQ ID NO: 77 - DNA, 1593 bp, Oryza sativa
cgacgacgcctccctcgtacgccggcgctctcgcagttgccgccgccgccgcgaacgcccaccgcccgcgctctggtcggtggatcgtgacgtgctgtggtggtctctgatctgctctgggggtgggtgggcgtctcgcggagtcgccgtgttcgtcgagggctcgatcggctcggggagagcgagtgagaagaggtgagggttggggggaggcacatccgcggcggcggagagatggcggatttccggacctccacgcatcgggagaggtggatcttccagacgaacgatctgatggatagatggggggcggcgaaccagcgggccacggagacgctcgttcagtatggaacgacgcggttgaaggtggaccctgttgatgggtcgctgtcatacccggaacctgcgcctgatcatgttgtagggagctcaggtgtaaagcctctgtcttgtgaagaggagcgattgatgcgggtattttatgagcaaaagattcaagaagtatgttcagcatttaagttccctcacaaaatccaggctaccgcaataatatatttcaagagattttatctgcaatggtctgtaatggaacatcacccaaagcatattatgttaacttgtatttattcttcttgcaaagtggaagaaaatcatgtttctgctgaggaacttggtaaaggaattcaacaggaccaccagattattctaaataacgagatgattgttctcaaatctttagattttgatctgattgtttatgctccgtatcgatctatcgaaggatttgttgatgacatggaggatttctgcagagcaggtaatggtgagcaccaacggttgcaggatttacgtcaaactgcgatatctcaggttgacaaaatgatgttgactgacgctcctcttctctacactcctggacagttggctctggctgctttgcacaaatccaatgatatgcacaagatccttaattttgaaaggtacttggaaagtgttttttcaaggcaacattctgattgtccaatcgaacaatttgttgggtcaatcaatatgatcaattatttggttgagcagcttaaaatacctactcctaaggacatgaggcatattgaccgcaagcttaagcattgtttggatccaagctcacaggatgagcataagaagaaagagaagaagtcgaagcacaaatcaaaaagggcagctaatgaagcccaacttgacagctagaaaacatacggttgggctgcaccgtgtaagaatcagttctttagtttgttgtggctccaattgatcaaaagagctactttcctgagcaggtgaggttccgttttagccgaggacaaccaattttgagatgaagcgagataatacccatgacctcgccttcttgtaatcttgtatgcctggaagccctagcaaactcctcgttgcaatggctactgtactttttttggggggtaatttatcccttgtcaaatgggaagaagcagcatacatcggatgattgcctccatatacgaaaatgacagctaactcagacttttgtcggttgcatttttctgtttaaaaaaaaaaaaaaaaaaaaaaaaaaaa

SEQ ID NO: 78 - DNA, 1764 bp, Oryza sativa
cgcgcatcgcagccgagacgagccgccccccgcaccgcactctccgccgccggccgcgccgacctcctccgccgcgccgcctccccggcgcgcgcccccgtcaccctctctcgcctcgccgccgccgccgctgcctcctcgtgaggggggacggtggtgggggcctctgcctatggcgagcggcgacggcggcgacgacgcgggcgtgaagcgcgtggcggaccgctacctgaagcgcgaggtcctgggagagggaacctacggcgtcgtcttcaaggccgtcgacaccaagactgggaatacagtcgcaataaagaaaatccggctagggaagtacaaggaaggtgtcaatttcactgcattgagggaaattaaacttcttaaggagctgaaagattctaatattatagagctgattgatgctttcccttacaagggaaacttacatcttgtatttgagttcatggagactgatttggaagctgtcatacgagataggaacattgtattatctccagctgatacaaaatcttatattcagatgatgttaaaaggtttagccttctgccataagaaatgggtgctacacagggatatgaaaccaaataatttactcattggcgctgatgggcagcttaagcttgctgactttggtctggcgcgcatatttgggagtccagagcggaacttcactcatcaggtctttgcacgatggtaccgagcaccagaattattatttggcaccaagcagtatggatctgcagttgatatttgggctgctggttgtatttttgctgaactgctgcttaggcgaccgtttctccagggttctagtgacattgatcaacttgggaagatctttgctgcatttggaactccaaagtcttctcaatggccggacatggtttatcttccagattatgttgaataccaatttgtctctgcacctccacttcgctcattgtttccaatggccagtgatgatgcattggatcttctatcaagaatgtttacatatgatccaaaagcaagaattacagctcagcaggctctagaacaccggtactttttatcagtaccagcgccaacaaaaccatcacagcttccaaggccaccacctaagggtgattcagggaataacaagataccagacttgaacctgcaggacggccctgttgttctgtccccgccaagaaagttgcgcagggtgactgcccatgaagggatggaagtccatatgcatcgggcggatagaacagaagagcatccttcaggggcaaggcacatggatgacatgtccagccagagttctagaataccaatgtcagttgatgttggagctatttttgggacacgacctgctcctagaccaacgttaaacagtgccgacaagtctcgtttaaaacggaaacttgatatggatccagaatttggatacacagagtaaatcaccattttttccatactggcttgttgatttttaaaatattctttggggagatagttccactatctaccaacaaaagaggattgtgtcgaaagccataaaaacttcactgaagggcgctgacaggatggcacagccaactatgctgttatcgtttttgactaccaaagccggctcaggaagaggaaactgaagagttacgtgttacgatgctaatttacaccaggacgtgcacatgccatttcattttggctggcatacataaatctgtaatctttattgcatagatgagtttgcttgtgtgagcatgtttcttc

SEQ ID NO: 79 - DNA, 1583 bp, Glycine max
attcggctcgaggatggatcctccaccgaagagctggagcatccacacccgatccgagatcatcgcaaaatacgaggtcatggagcgggtcgggtcgggagcctacgccgacgtctaccgtggccgtcgcctctccgacggcctcaccgtggccctcaaggaaatccacgactaccagtccgccttccgagaaatcgacgcgttgcagctcctcgagggctccccaaacgtcgtggttttgcacgagtacttctggcgcgaagacgaggacgccgtcctcgtccttgagttcctcagaaccgacttggccaccgtcatcgccgacaccgccaaggccaaccagcccctccccgccggcgagctcaagtgctggatgatccagattctctccggcctcgacgcctgtcaccgccacatggtcctccaccgagatttgaagccctctaatctcttaatttccgaacacggcctcctcaagatcgctgattttggacaggcaagaattctcatggagcctggtattgatgcttctaataatcatgaagaatattctagagttttagatgacattgacaataaggatactattactagcacccacgatgggaatgcaacatgcaacacaagtgacgtagatagggaagaggaagaacttggttgttttacgtcatgcgttgggactcgttggtttagggctcctgagttgctttatggatcaagaaactatggtttagaggttgatttgtggtccttgggatgtatctttgcagagcttttaacgctgcaacctttgtttcctggaactgctgatattgaccagcttagtagaatcattggtgttttgggtaaccttgatgagaatgcttgggctgcttgttctaaacttcctgattatgggataatctcctttagcaaggtggagaaccctgctggtcttgaagcttgtttgcccaatcggtcccctgatgaagtggctctggtgaaaaaactggtttgttatgatcctgccaagagggccacggcgatggagctgcttcatgacaagtactttagtgatgagcctcttcctgttctggtttctgagctgcgagttcctctgaccagaaaagagcaagatggggattcccctggtgggtggggtgatatcaacgatatggattccgattccgattcccagtttgatgagtttggccctctgaatatcacaaggactggtactggtttctccatacagtttccttgaagaattcaaggtacattgtattcttggaactgcctttttgccttttctgtcgtgttgctcaactgttactatttgctggaaattcttcggtgagaatattgataagaaaaatccctttttttttttctgatttgtcattcacttgtgaacaaagggataaattattcaaaagtaattagaatgattgtgtgtttacatgacattcatagttgaccatgacactcacagttgatagtttatataatacatggacttgtatccttccaaattcacacatataatgatagcacgtactatagttatttttgtgttaaaaaaaaaaaaaaaaaaaaaaaaaggc

SEQ ID NO: 80 - DNA, 1977 bp, Arabidopsis thaliana
ctcaaacaaaacagccttttacataagaacaaacacccccaaaaactgcaaaaaaaagagagagatcattaatccatcttcaagatgtctcttcctgaaactaaatctgatgatatccttcttgatgcttgggacttccaaggccgtcccgccgatcgctcaaaaaccggcggctgggccagcgccgccatgattctttgtattgaggccgtggagaggctgacgacgttaggtatcggagttaatctggtgacgtatttgacgggaactatgcatttaggcaatgcaactgcggctaacaccgttaccaatttcctcggaacttctttcatgctctgtctcctcggtggcttcatcgccgatacctttctcggcaggtacctaacgattgctatattcgccgcaatccaagccacgggtgtttcaatcttaactctatcaacaatcataccgggacttcgaccaccaagatgcaatccaacaacgtcgtctcactgcgaacaagcaagtggaatacaactgacggtcctatacttagccttatacctcaccgctctaggaacgggaggcgtgaaggctagtgtctcgggtttcgggtcggaccaattcgatgagaccgaaccaaaagaacgatcgaaaatgacatatttcttcaaccgtttcttcttttgtatcaacgttggctctcttttagctgtgacggtccttgtctacgtacaagacgatgttggacgcaaatggggctatggaatttgcgcgtttgcgatcgtgcttgcactcagcgttttcttggccggaacaaaccgctaccgtttcaagaagttgatcggtagcccgatgacgcaggttgctgcggttatcgtggcggcgtggaggaataggaagctcgagctgccggcagatccgtcctatctctacgatgtggatgatattattgcggcggaaggttcgatgaagggtaaacaaaagctgccacacactgaacaattccgttcattagataaggcagcaataagggatcaggaagcgggagttacctcgaatgtattcaacaagtggacactctcaacactaacagatgttgaggaagtgaaacaaatcgtgcgaatgttaccaatttgggcaacatgcatcctcttctggaccgtccacgctcaattaacgacattatcagtcgcacaatccgagacattggaccgttccatcgggagcttcgagatccctccagcatcgatggcagtcttctacgtcggtggcctcctcctaaccaccgccgtctatgaccgcgtcgccattcgtctatgcaaaaagctattcaactacccccatggtctaagaccgcttcaacggatcggtttggggcttttcttcggatcaatggctatggctgtggctgctttggtcgagctcaaacgtcttagaactgcacacgctcatggtccaacagtcaaaacgcttcctctagggttttatctactcatcccacaatatcttattgtcggtatcggcgaagcgttaatctacacaggacagttagatttcttcttgagagagtgccctaaaggtatgaaagggatgagcacgggtctattgttgagcacattggcattaggctttttcttcagctcggttctcgtgacaatcgtcgagaaattcaccgggaaagctcatccatggattgccgatgatctcaacaagggccgtctttacaatttctactggcttgtggccgtacttgttgccttgaacttcctcattttcctagttttctccaagtggtacgtttacaaggaaaaaagactagctgaggtggggattgagttggatgatgagccgagtattccaatgggtcattgatcatgaattcatgatcatgatcatgatgatgaacattatgcatgtctatgttgatatgtttgaatttgattttgagttttgtttgtatattttatgatgcttttcttaattaaaaaaaaa

SEQ ID NO: 81 - DNA, 1965 bp, Oryza sativa
ggtggaggagagtgaggacggcccacgcggacgagcagagagtggcgggctcagtgtcgggctcgccggagtccgcgcaatccggccgttcatgcttcattctctcggacattaacctggtttacttgtaagaaagtagagccatggactcctcataccagcatgacaagcctctgctggatgaagagaactcctcgcaagtgacccttgaatatacaggtgatggatctgtttgcatccgtgggcatcctgctttaaggaaacatacagggaactggaagggttcctcattagccatcgttttttcattctgctcttatctggcctttacttcaattgtaaaaaacctagtcagttatctcacaaaagttctacatgaaacaaacgtggccgctgcaagagatgttgcaacttggtcaggaacaagttatcttgcacctctggttggagccttcttagctgattcatatctggggaagtactgtacaattctgatcttctgcacgatcttcattatcggattgatgatgttgcttctgtcagcagcagttccattaatctctactggtcctcactcatggatcatatggacagatccagtctcttctcagaacatcatattctttgtcggtttgtacatggttgctttagggtatggtgcacagtgcccctgcatatcatcatttggtgctgatcaatttgatgacactgatgaaaatgagagaacaaaaaagagttcttttttcaattggacctatttcgtagccaatgcgggctcattgatctcggggactgttattgtgtgggtgcaagatcacaaaggttggatctggggttttaccatttctgcactatttgtgtatttaggttttggtacttttatctttggctcctctatgtatgatttcagaaacctggaggaagcccctcttgcgagaatatgccaggttgttgttgctgctattcacaaacgcgataaagatttgccatgtgattcctcagttctttatgagtttctggggcagagttcagcaatcgaaggcagccgaaaattggagcatacaactggacttaagttctttgatagagctgcaatggtgacaccatctgattttgaatctgatggcctactaaacacatggaagatttgcacagtcactcaagtggaggaactgaagattttgatcaggatgttccccgtttgggcaacgatgatattatttgctgcagttctggacaacatgttttcgacattcatagaacaggggatggtgatggagaaacacatcggctctttcgaaatacctgcggcgtccttccaatccattgatgtcattgctgtccttatactagttccagtctatgaaagagtccttgttccagtgttcagaaaattcactggcagagcaaatggcattactccactgcagcgaatggggatcggcctgttcttttccatgctctccatggtatcagcagcattggtggagagtaatcggttgcggattgcgcaggatgaaggtttggtgcacaggaaggtggctgttccaatgagcatcctgtggcagggaccccagtacttcctgataggcgtgggagaggtgttctcaaacattgggttaactgaatttttctaccaggaatcaccggacgccatgagaagcttatgtctcgcattctcacttgctaacgtttcggcaggaagttacctcagctcgtttatcgtttctcttgtgccagtgttcacagccagagaaggcagtcctggatggatacctgataacttgaacgaagggcatttggatcggttcttctggatgatggctggcttgtgtttcttgaatatgctggcctttgtgttctgtgccatgaggtacaaatgtaagaaggcttcctgaaccttgttaacattagcaatataatggtggtggaaaaggacaattgtgttgcaaaaaaaaaaaaaaa

SEQ ID NO: 82 - DNA, 1048 bp, Zea mays
cctagccgcctgaggccgacgccaaatctctcctgaccgcaacggggaactcgacccccgcctccgccaccgccaccgcgccggtcgccgacccactcagatgaacacgtctccgtccagatacagggcaatgatgggaggctgggggggttcggatgggtacgagggatcaaagaggacgcgaatgatgatggaatcgaatccctacttcgcagtgaacgcagggagcccactggatgtctcaaagagggccaggatgatggaaccaggtgctccctattttggggctatgggaagcagcgccagcggtgccggcggcggcttctaccagccctttaacagcaacctagctggtgcagggtctagcaccggtatccaaagcttcccatgtgtccggctgcgaggccttccctttgattgcaacgacattgacgtctgcaagttctttgtggggctggacatagtggactgcctcctggtcaacaagaacgggcgcttcaccggcgaggctttcgtggtcttcccaacatccatgcaggcagagtttgcgctgcatcgcgacaggcagaatatggggcggaggtatgtcgaggtgttcaggtgcaagaagcacgagtactactgcgcaatagccaatgaggtgaaccagggcggttatttcgagccggagtaccgtcgctccccgcctcctccgaggcctaggaagccgtctgaagataagggcagcatggagtacacagaggttctgaagctccgcgggcttccctactctgccaccactgaggacatcatcaagttcttcctggagtacgagctggcagaggagaacgtgcatatcgcctaccgcaccgatgggaaggccacgggtgaagccttcgttgagtttccgacagctgaagtcgcgaagacggccatgtgcaaggataagatgaccattgggacgaggtacgtggagctgttcccgtcgaccccagaggaggccagcagggcgaaatcccgaggcaggcattgaagaaacgtgttccagtgatcttctgtatgcatgcat

SEQ ID NO: 83 - DNA, 1797 bp, Zea mays
gccggcgagccccgctccgagcatctccgctgctgcttctgccgaatcccagagctccttctcccgcttgccccctttccctcctgtcacattgattcgattttcgtcgcccatggagctacaaattaagtgtaggaaccaattaaaagcttgccaaaactagggcggcggcatcagcattcagcaataccctaggcgggctctcctcgcctccacagctccaggaagccgacccagagcagcacagcgccgcccattctgtctctctcggtctcggcagcgtaggcagcgtcaccctccgcttaaaccaccagcaccagctgctggtgcgccgccccgcccggcaccgccgctcctctacctcttcctggtggattggtgagaggaagccctaacttggcctctcttgaatcaactcggcggtggctttgagtcagtaggtgttgttttgcgctcttattcaaaacccaaatctgtccctcctctcagattattgtgagtttatccctgccccaatccatctgtccatggtccgcgtgggcttgtcttccgcgcccggggtcaatctgacagagcaaatcgataatgtttttgaccaactgatcaacaagatagaacatgcggattttgatacgcggcctttcttgaaacaattgaatgtgttaggccgctatgaaccaatcaagcggaatgtatattgcactaagagacgcattgaagattatggcatttcttgtcactgtaagccttctcctggttcatcagttgtgtgtggcagagactgccattgtggcatgcttttctcttgctgttcatcacaatgtgaatgtgatgacacatgcaccaataaatcattccagcacagacctcttaagaaaaccaaattgattaagacagagaaatgtggtcatggattggttgctgaggatgaaataaagaaaggagaatttgttattgagtatgttggagaagttattgatgacagaacatgtgagaataggctatggacaatgaaaaggctgcttgacactgacttctacctttgtgaggtcagtagtaatatggtcattgatgcaacaaacaagggaaaccggtcccgattcataaaccatagctgtgaaccaaacacagcgatgcagaaatggactgttgatggagagaccagggttggaatttttgcacttcgtgacataaagataggggaggagctgacctatgactataaatttgtccagtttggagcagctcaagtttgtcattgtgggtcttcgaactgcagaaaaatgctaggcacgacgaagtattcaggaagctcacagaatcatcatgccaagaagaaaaagcggaaaacaagttgtgagaattgcatacagcagtttcttcggctgtggcatccacataaaaaaatgtatgttggttgttggataattgacttcgatcaagaaactaaaatgcatactctgaagttcaatgatctccatactgaaaagttcaatttgaaggaagaagaatggcacttcttagaggtcgattttgatgaagattgatcattgaaggtaactgcaagagttggctgccatggtttgtgacagggttgccatggtttgctgcaccgccggcctactagttgggggttcatttgcgatggcagcatagacagacggacggccatttttcttccattttggagtaatagtccaagcctgaactgtgacattcgtgcatgcttatacgtgaaagtgtacctgagagcagattatacgtgaaagtgtatcagcgttgcataaaaaaaaaaaa

SEQ ID NO: 84 - DNA, 3926 bp, Saccharomyces cerevisiae
ttcatacttacgataaaatcacttggaatagaatctacaccaatgaacgcgttttctaagatttccctgaggggtgattaaccaaattgaaaaagatatcgtcaaattcttctttgtgtattttaaagaaggtttttgtattagaaaacgtgcgaaacaaatctttattgatttctgaaaacaatggcaatcgaagctcataggaaccacttttctgtgccttttgaaagatattctcaattatctcgattagctttggcaaatctttaccatatataaagtctccactgatgggtttgtcaatgtggccccatgcgtactcaaaaatagcatcaaacgcaccgttactcatacttacgttgtcaaagacagaattgtttgtaaagctttctttcttaaccttggagccgccaaaaaaatactccactaaggccagtagcaacaacacgttttcttggatgatgcgttttcttgaacaaacagtaccgactaggactgtttcaatgaagttgtgtacggtctggtagtatatctatattccgtgatgcctttgtggaggacgttgagatgagactgagtcgtacaccatgttattcctgtttatggttaattgcgcgtcgcgctttctctagcaaatatctcggttcgaagtaaagcaggtccttcatgtaatggtaacctaaggcaaagggtttgtcatatacccgtgaaggcatttacacaagcgcacttctagtcatatgcagttcatgcatattaagtgagtgttataacgcaagagttatatttgaaatagggttgttaaagaagggagaaacccattcaccacattatctttgcgagtgtaaaactagataacttaaatttttaggagagattttgccacttggcagcaaataccaaatagcagtactgttccggtagataaaggcaaagagttagaggtgtgctttacgaacagcgctggaagggaaaggaaacaaaaaagacaaaaagacagctgtattgttggcgccatgaataatgctgcaaatacagggacgaccaatgagtcaaacgtgagcgatgctccccgtattgagcctttaccaagcttgaatgatgatgacattgaaaaaatcttacaaccgaacgatatctttacgaccgatcgtaccgatgcaagtactacatcttccacagccattgaagatattattaacccctcattggatccgcagtcagcagcatcgccggttccttcttcctcttttttccatgactcaaggaaaccttccaccagtacacatttagtaaggagaggtactccattgggaatttaccaaaccaatctatacggtcacaatagcagagaaaatactaatcctaatagtacattattatcttctaagttactcgcgcatccaccagttccttatgggcaaaatcccgatttactacaacatgctgtgtacagggcacagccgtcaagtggaaccactaacgcgcaaccgcgccaaaccacaagaagatatcaatcccataaatcacggcctgcatttgttaataaactatggagcatgttaaacgatgattctaatacgaaacttatacagtgggcggaggatggaaaatcttttattgtcacgaatagggaggaatttgtgcaccaaattttaccaaaatattttaaacattccaatttcgcttcctttgtaagacaattgaacatgtatggatggcataaagttcaagatgtcaagtcaggatcaattcaaagtagttcagatgataagtggcaatttgaaaatgaaaacttcattagaggtagagaagatttgctggaaaaaataatcaggcagaaaggttcctccaataaccataatagccctagtggtaacggtaatccagcgaatggtagcaacatccctctggacaatgccgcaggaagtaataatagcaataataacatcagtagtagtaattcattttttaacaatggtcatttattgcagggtaaaacactaagattaatgaacgaagcgaatcttggagataagaatgatgtcaccgcgattttgggggaattagagcaaataaaatataaccagattgcaatttccaaagatttactaagaataaacaaagataatgagttattatggcaagagaatatgatggccagggaaagacatagaacccaacagcaagccttggaaaaaatgttcagattcttgacatctatagtcccacacttagatcccaaaatgattatggacgggctgggagatccgaaagttaataatgaaaagctaaacagtgcgaataacattgggttaaatcgcgacaacacaggcactatagatgaactaaaatccaacgattctttcataaacgatgatcgtaattctttcaccaatgctacaaccaacgcccgtaataacatgagtcccaacaatgatgacaatagtattgacaccgctagcactaataccaccaacagaaagaaaaatatagatgaaaacatcaaaaataacaacgacataattaatgacattatatttaataccaaccttgccaacaatctcagcaattacaatttcaacaataatgctggctcgccaataaggccctataaacaaagatatcttttgaaaaatagagccaattcctcgacatcgagtgagaatccaagcctaacgcctttgatatcgaatctaataatgaccgcaaaatttcagaaattccttttgatgacgaagaagaagaagaaaccggattttaggccttttacctcgcgagatcctaataaccaaacgagtgaaaacacttttgatccaaacagatttacgatgctctctgatgatgatttaaaaaaagattctcataccaatgacaataaacacaacgaaagtgatcttttttgggacaacgtacatagaaatatagacgaacaagatgcaagactccagaacttggaaaatatggttcacatactttctcctggatatcctaataagtcgttcaacaacaaaacttcctcgacaaacactaattccaatatggaaagtgctgtcaacgttaatagccctggtttcaacttacaggattatttaactggagagtctaattcccccaattctgttcattctgttccctccaatggcagcggctccacaccgttgcccatgccaaatgataatgacaccgagcacgcaagtacaagtgtcaatcaaggcgaaaatggaagcggattaacgcccttcctcacggtagatgatcacacactaaacgacaataacactagtgagggaagtacaagggtgtcccccgatataaagttcagcgccactgaaaacactaaagtgagtgataacctgccaagctttaatgaccacagttattccacccaggccgacacggcgcccgagaacgctaagaaaagatttgtggaggaaataccggaaccggctatagtcgaaatacaggacccgacagagtacaacgatcaccgcctgcccaaacgagttaagaaatagtacacaggacgaggtcattaaatagcgtatataatcatttaatatagtatgttctcgaagctgatcgcgtaaggcgcagaacgaactaaaaaaaataccggcacccatgcacctcacaccgccgcacgcgagtgaggttgaactgcacccggaaaatgccaagtagatgagtcgtgaagagttctcgttattcgagctagtgagagcctgagaagggcttgccgagtgaactggggtcacattggccgttttaacgcaagttggcgtacttatgttgactgttggatgaaagggtaatcaagagaaacggaaacggcctcctcatcgtaaagctcatcagtattcatttctcccctttctgctccatcgcgtgctcgagactatactcttcagattatcaagcagaaa

SEQ ID NO: 85 - DNA, 3942 bp, Zea mays
  unsure (1)..(3942): unsure at all n locations
gtgggcccatggcacagacggcttacagagatcctaccccacattccagagatatggaacgccaccatggccgataccgaacagccgcgccatgtgtcacacatcgggagcacttcgtcaacaatccaacggtccatgattattaaggcccacatgtcatagaaccctctggcaccctctcgccgcttcgtcacctgtcccgtcgctcgtcctctcgtttccacggccttctagactcccggcgaacactcccctccgccttcttatgctcatcccctccgcttccgaagcacaacatttcaaccagaaacactagccgaagcaaatccattccacaagcacctggtgggatcatctcatcatcagaaaccaagagagagattccgtgtccgcttgttgtagtagattgtgaggactgaggaccgagaagcagccatgaatccggacaacttcacccacaagacgaacgaggcgatcgtgggggcgcacgagattgcggtggaggccggccacgcgcagctcacgccgctgcacctggccgcagtgctggctgcggacaagggcggcatcctgcggcaggccatcacgggggcgtcggggggcgacggagcggccggggactcgttcgagcgcgtgctgaacaactcgctcaagaagctgccgtcgcagtccccgccgccggactccgttccggcgtctacggcgctgatcaaggtcatccgccgggcgcagtccgcgcagaagaaacgcggggactcgcacctcgccgtcgaccagctgctgctcggcctgctcgaggactcgcagatctccgactgcctcaaggaggccggcgtgtccgcggcgcgggtgcgcgccgagcttgagaagctccgcggcggggaggggcgccgcgtggagtccgcgtcgggggataccaacttccaggcgctcaagacatacggccgggacctcgtcgagcaggccgggaagcttgaccccgtcatcggccgcgacgaggagatccgccgcgtcgtgcgcattctctcgcgccgcaccaagaataaccccgtcctcatcggcgagcccggcgttggcaagacggccgtcgtggagggcctcgcgcagcgcatcgttcgcggcgacgtgcccagtaacctcctcgacgtccgcctcatcgcgctcgacatgggcgcgctcgtcgcgggcgccaagtaccgcggcgagttcgaggagcggctcaaggccgtgctcaaggaggtggaagaggccgaggggaaggtcattctcttcatcgacgagatacacctcgtcctgggcgcgggcaggacggagggttccatggacgcggccaacctgttcaagccaatgctggcgaggggacagctcaggtgcatcggcgccaccacgctggaggagtaccgcaagtacgtggagaaggacgcagcgttcgagcggcggttccagcaggtgttcgtcgcggagccgagcgtgcccgacaccgtcagcattctgaggggcctcaaggagaagtacgaggggcaccatggcgtgaggatccaggaccgcgccctcgtggtcgcggcacagctctccgcgaggtacatcatgggtcggcacctgcctgacaaagccatagacctggtggacgaggcctgcgccaatgtgagggtgcagctcgacagccagccggaagagattgataacctggagaggaagagaatccagcttgaggttgagctccacgcgctcgagaaggagaaggacaaggccagcaaagcccggctgattgaggtgcgtgtctcgagcactgaattttcctcaaacaagtcctcttgtctgatgttcctgttttgaacttttgatactaacgtcgcttaactgtggccattgttcaggtcaggaaggaattggacgatctgagggacaagctgcagcccctgaccatgaagtacaggaaggagaaggagagaattgatgagatcaggaagctgaagcagcgccgcgaggagctccagttcaccctgcaggaggccgagcgccggatggacctggcccgtgtggccgacctcaagtacggcgccctccaggaaatcgacgctgctatctccaagctggagagcgaaacaggggagaacctgatgctcaccgaaaccgtcggccctgaacaaattgcagaggtatgttattattcttgttcaccgtcacaaaaattttgcagagcaagtgccgaatttgccgatcgtctcctagtagagtagtcgtgcagcgtgctgaaatggtgtttcgtcctatgggcaggtggtgagccgttggacgggtattccagtgacccggcttggccagaacgacaaggagaggctggttggcctggctgacaggcttcaccagagggtggtcggccagacagaggctgtgagcgccgtcgcagaggcggtgctgaggtcgagggccggtcttggcaggccacaacagcccactggctcgttcctcttcctgggtccgactggcgtggggaaaactgagctggccaaggccctagccgaacagctgttcgacgacgagaaccttcttgtccgcatcgacatgtcggagtacatggagcagcactcggttgcccgcctcatcggagcaccacctgggtaagtagcagaaaatgcatgcatcttcgtatttttaactgcgaattgcgatgaactcttgttctgacagtgggccggacctgtgacagctacgtcggccatgaagagggtgggcagctgactgaacaagtgaggaggaggccgtacagcgtgatcctgttcgacgaggtcgagaaggcccatgtcgccgtgttcaacaccctgctccaggtcctcgacgacggcaggctgacggatgggcaaggcaggacggtggacttcaggaacaccgtgatcatcatgacatcgaacctcggcgccgagcacctcctcgctgggatggtgggcaagaactccatgaaggtcgctcgcgatctggtcatgcaggaggtatgcattgcgataacgttctgaatcgtcgttagacattgttcctctgcagcgtgatgctcaatcggatcgttattgctgtgtgcaggtgaggaggcacttccgccctgagctgctgaaccgtctcgacgagatcgtgatcttcgatcctctgtcccacgagcagctgaggaaggtcgctcgccttcagatgaaggatgtggccgtccgtcttgccgaaaggggcatcgctctggctgtgaccgacgccgcattggacatcatcttgtctctctcttacgatccggtatgtgaccatccatgatttgatccatctgaattcgtcggtgacacctgatggtgctgactctcttatctttcttgtgtggcttcaacaacaggtgtatggcgcgcggccaatcaggaggtggatcgagaagagggtggtgacgcagctgtcgaagatgctgatccaggaggagatcgacgagaactgcacggtctacatcgacgccgcgcccggcaaggacgagctggtctacagggtggaccggagcggcggtctggtgaacgctgagacggggatgaagtcggacatcctgatccaggtccccaacagctccaccaggagcgacgctgcgcaggccgtcaagaagatgaggatcatggaggaggacgaggacggcatggacgaggagtaaaaggcgggccggaggacgcggagctgcgcccaggccgcangtctggcgccggcatcatcgagtgtcttttgaataagcgtgtagataagcccgtgaatatgcagacgaggttgagatgatgttcttgtaacgctgctgtttgtcaagcatggacggatggtctctcatatggtatcaaagtgacgaaggtctctcaatcgatgtcttgtcattatttttatctccctaaatgtttttacatgttttcctctattcattgcatcctttatgca

SEQ ID NO: 86 - DNA, 4248 bp, Escherichia coli
agatgactgccgactgcctccctgtgctgtttttgcaatcgacgggaacgaagtcgccgccgctcatgctggctggcgtggactgtgcgcaggcgtgctggaagagacggtttcctgttttgctgataatccggaaaatattctcgcctggttagggccggcaattggtccacgcgcgttcgaagtggggggggaggttcgcgaggcgtttatggcagtagacgctaaagcaagtgcagctttcattcagcatggtgataagtatctggcggatatttatcagcttgcccggcagcgtctggcgaacgtgggtgttgagcaaattttcggcggcgaccgttgtacatatacggaaaatgagactttcttctcttatcgtcgcgacaagaccaccggtcgtatggcaagtttcatttggctgatataacctaaagaatcaagacgatccggtacgcgtgattttcttttcacattaatctggtcaataaccttgaataattgagggatgacctcatttaatctccagtagcaactttgatccgttatgggaggagttatgcgtctggatcgtcttactaataaattccagcttgctcttgccgatgcccaatcacttgcactcgggcacgacaaccaatttatcgaaccacttcatttaatgagcgccctgctgaatcaggaagggggttcggttagtcctttattaacatccgctggcataaatgctggccagttgcgcacagatatcaatcaggcattaaatcgtttaccgcaggttgaaggtactggtggtgatgtccagccatcacaggatctggtgcgcgttcttaatctttgcgacaacgtggcgcaaaaacgtggtgataactttatctcgtcagaactgttcgttctggcggcacttgagtctcgcggcaccgtggccgacatcctgaaagcagcaggggcgaccaccgccaacattactcaagcgattgaacaaatgcgtggaggtgaaagcgtgaacgatcaaggtgctgaagaccaacgtcaggctttgaaaaaatataccatcgaccttaccgaacgagccgaacagggcaaactcgatccggtgattggtcgtgatgaagaaattcgccgtaccattcaggtgctgcaacgtcgtactaaaaataacccggtactgattggtgaacccggcgtcggtaaaactgccatcgttgaaggtctggcgcagcgtattatcaacggcgaagtgccggaagggttgaaaggccgccgggtactggcgctggatatgggcgcgctggtggctggggcgaaatatcgcggtgagtttgaagaacgtttaaaaggcgtgcttaacgatcttgccaaacaggaaggcaacgtcatcctatttatcgacgaattacataccatggtcggcgcgggtaaagccgatggcgcaatggacgccggaaacatgctgaaaccggcgctggcgcgtggtgaattgcactgcgtaggtgccacgacgcttgacgaatatcgccagtacattgaaaaagatgctgcgctggaacgtcgtttccagaaagtgtttgttgccgagccttctgttgaagataccattgcgattctgcgtggcctgaaagaacgttacgaattgcaccaccatgtgcaaattactgacccggcaattgttgcagcggcgacgttgtctcatcgctacattgctgaccgtcagctgccggataaagccatcgacctgatcgatgaagcagcatccagcattcgtatgcagattgactcaaaaccagaagaactcgaccgactcgatcgtcgtatcatccagctcaaactggaacaacaggcgttaatgaaagagtctgatgaagccagtaaaaaacgtctggatatgctcaacgaagaactgagcgacaaagaacgtcagtactccgagttagaagaagagtggaaagcagagaaggcatcgctttctggtacgcagaccattaaagcggaactggaacaggcgaaaatcgctattgaacaggctcgccgtgtgggggacctggcgcggatgtctgaactgcaatacggcaaaatcccggaactggaaaagcaactggaagccgcaacgcagctcgaaggcaaaactatgcgtctgttgcgtaataaagtgaccgacgccgaaattgctgaagtgctggcgcgttggacggggattccggtttctcgcatgatggaaagcgagcgcgaaaaactgctgcgtatggagcaagaactgcaccatcgcgtaattggtcagaacgaagcggttgatgcggtatctaacgctattcgtcgtagccgtgcggggctggcggatccaaatcgcccgattggttcattcctgttcctcggcccaactggtgtggggaaaacagagctttgtaaggcgctggcgaactttatgtttgatagcgacgaggcgatggtccgtatcgatatgtccgagtttatggagaaacactcggtgtctcgtttggttggtgcgcctccgggatatgtcggttatgaagaaggtggctacctgaccgaagcggtgcgtcgtcgtccgtattccgtcatcctgctggatgaagtggaaaaagcgcatccggatgtcttcaacattctgttgcaggtactggatgatgggcgtctgactgacgggcaagggagaacggtcgacttccgtaatacggtcgtcattatgacctctaacctcggttccgatctgattcaggaacgcttcggtgaactggattatgcgcacatgaaagagctggtgctcggtgtggtaagccataacttccgtccggaattcattaaccgtatcgatgaagtggtggtcttccatccgctgggtgaacagcacattgcctcgattgcgcagattcagttgaaacgtctgtacaaacgtctggaagaacgtggttatgaaatccacatttctgacgaggcgctgaaactgctgagcgagaacggttacgatccggtctatggtgcacgtcctctgaaacgtgcaattcagcagcagatcgaaaacccgctggcacagcaaatactgtctggtgaattggttccgggtaaagtgattcgcctggaagttaatgaagaccggattgtcgccgtccagtaaatgataaaacgagcccttcggggctcgtttttgtctataagttagacggaaaagactatatttaagatgttttgcctgaaaagtgagcgaacgataaagtttttatatttttcgcttgtcaggccggaataactccctataatgcgccaccactgacacggaacaacggcaaacacgccgccgggtcggcggggttctcctgagaatctcaacagagaaaagcaaagaaatgcttgactctgtagcgggaaggcgtattatgcacaccgccgcgccgctgagaaaaagcgaagcggcactgctctttaacaatttatcagacaatctgtgtgggcactcgaagatacggattcttaacgtcgcaagacgaaaaatgaataccaagtctcaagagtgaacacgtaattcattacgaagtttaattctttgagcatcaaacttttaaattgaagagtttgatcatggctcagattgaacgctggcggcaggcctaacacatgcaagtcgaacggtaacaggaagcagcttgctcttcgctgacgagtggcggacgggtgagtaatgtctgggaagctgcctgatggagggggataactactggaaacggtagctaataccgcataatgtcgcaagaccaaagagggggaccttcgggcctcttgccatcggatgtgcccagatgggattagcttgttggtggggtaacggctcacctaggcgacgatccctagctggtctgagaggatgaccagccacactggaactgagacacggtccagactcctacgggaggcagcagtggggaatattgcacaatgggcgcaagcctgatgcagccatgccgcgtgtatgaagaaggccttcgggttgtaaagtactttcagcggggaggaagggagtaaagttaatacctttgctcattgacgttacccgcagaagaagcaccggctaactccgtgccagcagccgcggtaatacggagggtgcaagcgttaatcggaattactgggcgtaaagcgcacgcaggcggtttgttaagtcagatgtgaaatccccgggctcaacctgggaactgcatctgatactggcaagcttgagtctcgtagaggggggtagaa

SEQ ID NO: 87 - DNA, 3180 bp, Synechocystis PCC6803
acttctaggacgtagccctcattccaagtcatggcgtctgattctgcgtaggggtcaagattagcccttagcttacaagaaaggggctttggggcctagttgaatggcacaaattttccttccctgactgtttttgcgccattgtctagctcaaagtcagcctccggcatcctctagaaagacttccatcccctggttgagcaagggtaaaccccaccactgcattgggaaaaccctccttcctagctccggattccaccccctaaaattgatttggtagtccttacacacccaatagccaatatagaaaattttatgcaacccacagatcctaataaatttacggagaaagcttgggaggcgatcgccaaaacaccggagattgctaaacagcatcgacaacagcaaattgagacggaacacctactcagtgccctactagaacaaaatggtctggccaccagcatctttaataaggctggggcgagcattccccgagttaacgatcaagttaatagctttattgcccaacagccaaaattaagtaatccgagtgaatcgatttatttaggccgcagtctcgataaattgttggacaatgcggaaatagccaagtctaaatatggagacgactatatttccatcgagcacttgatggcggcttacggccaagatgaccgcctgggcaaaaacttatatcgagaaattggcctaacagaaaataagttggcagaaattatcaagcaaattagaggaacccaaaaagtgaccgatcaaaatccagagggcaaatacgaatcccttgaaaaatatgggcgagatttaacggaattagcccgggaaggtaaactagatcctgtcattggccgggatgaagaagtgcggcgcaccattcagatcctttcccgccgcacaaaaaataaccctgtgttaattggggaaccgggggttggtaaaacggcgatcgccgaaggtttagcccaaagaattattaaccatgacgtaccggaatcattgcgggatcgcaaactaatttccctcgatatgggggcgttaattgccggggcaaaataccggggggaatttgaagaaagacttaaagcggtacttaaagaagttaccgacagccaggggcaaattattctctttattgacgaaattcataccgttgtcggcgctggggccacccaaggagccatggatgcgggcaacttattgaaacccatgttagcccggggtgctttgcgttgtatcggggccaccactttagatgaatatcgcaaatatatcgaaaaagatgcggctttggaacgacgtttccaggaagttttagtggatgaacccaatgtattagataccatttccattctccggggattaaaagaacgctatgaagtacaccacggcgtaaaaattgccgatagtgccctggtagcggcggccatgttgtccaatcgttacatcagtgatcgttttctgccggataaagctattgatttagtagacgaagcagcggccaaattaaaaatggaaatcacctccaaaccagaggaattagatgaagttgaccggaaaattctccaactagaaatggagcgtttatctttacaacgggaaaatgattctgcttccaaggagcggctagaaaaattggagaaagagttggctgattttaaagaagaacagtctaaacttaatggccaatggcagtcggaaaaaacggttattgatcaaattcgtactgttaaggaaaccatcgaccaggtgaacctagaaattcaacaggcccaacgggattacgactacaataaagcagcggagttacagtatggcaaattaactgatttacagcggcaagtggaagctttggaaacccaattggcggagcaacaaacctctggcaaatccctcttacgggaagaagttttagagtctgacattgctgaaattatctcgaaatggaccggcattcccatcagtaaattggtggaatcggaaaaagaaaaactgctccacttggaagatgaactacacagccgagtgattggtcaggatgaagcggtaaccgccgtagccgaagccattcaacgctcccgagctggtctttccgatcctaatcgtcccaccgctagctttatttttctgggccccacaggggtcgggaaaactgagttagcgaaggctttggcgaaaaatttattcgacacggaagaagccctggtgcggattgatatgtctgaatatatggaaaaacacgctgtttcccgtttaatgggggcccctccgggctatgtgggctatgaagaagggggacaattgacggaagcaattcgccgccggccctattcggtcattctttttgacgagattgaaaaagcccatggggatgtgtttaacgtcatgctccaaatcctggatgatggccgtttaaccgatgcccaaggccatgtggtggacttcaaaaatacgattatcattatgaccagtaacctgggctcccaatacattttggatgtggcgggggatgatagtcgttatgaagaaatgcggagccgagttatggatgtaatgcgggaaaacttccgcccagaatttctcaatcgggtggatgaaacgattattttccatggcttacaaaaatccgagttacgatccattgtccaaattcaaattcagtctttggctacccgtttggaggaacaaaaattaactttgaagttaacggataaagccctagattttctggctgccgtgggctatgaccccgtttatggggcccgacctttaaaacgagccgtccaaaaatacctagaaacggcgatcgccaagggaattttacggggggattacaaacctggtgagaccattgtggtggatgaaaccgacgaacgcctcagttttaccagtttaaggggggatttagtcatcgtttagggacttctgttccgtcaactctgacggattaataactccatcaatgctaaccctaggggattccaactccgccgtcatggttgcccctggggtttggtgatggggtaataactcctgaccccggttaatcaaagccgccatgcccttgtcataattgctggcgatcgccaaaaaagcaccggccataacgtaaataggcaggggcaaaattaccccccatagccattggaaaagttgcactccggc

SEQ ID NO: 88 - DNA, 3000 bp, Xylella fastidiosa
tgttggcgtgtgggctgtttcatcagttttgtgtatttggggtaggttgtgtatctctgttcgatcgggtgttctcaaatgaacacatacttggtcatcggtcgtgtccttgaaagtgacttgttaaaccgcatctgttggatgtcgccggcagatgtccggtctctttcctaactggggctttttatgcggatggataagcttacttcgcgtttccagaatgcgttggctgatgcgcaatcgctggccgtcggtcgtgaccatactattattgagccggtgcatgttttttcggcattgcttgatcagcagggggggagtacacgtccgttgctcatgcaggccggtgtcaatgtgccattgctgcgtgagcggttgaccgagatacttgaggcattgccgaaagtgagtggtcagacggttaatgtctcacccagcaatgaattgagtcgtttgtttcatcggactgataagttagcgcagcagcatggcgatcagtttatggccagtgagtggttcgtgttggctgtggtcgatgatagtggggggctgggccaggcgttgcgtgctgctggtgcggaaaaaaagaagattgaggctgcgattgataaattgcgtggcggtgaaactgtccagactgagaatgcggaggagcagcgtcaagcgttggaaaagtacacgattgatctgactgccagggctgagagtggcaagcttgatccggtgattggtcgcgatgaggaaattcgccgcacgatacaggtattgcagcggcgtacaaaaaataatcctgtgctgattggtgagccgggtgtgggtaaaactgccattgtagaagggctggctcagcgcattgtcaatggtgaggttccggaagggttgcgcagtaagcgtctgctctcgctggatttgggagcgttgattgctggggccaagtttcgtggtgagtttgaggagcgcttgaagggggtgcttaacgatctcgctaagaatgaggggcgggtcattttgttcattgacgagctgcataccatggttggtgccggtaaagccgatggtgcgatggatgctggcaatatgctcaagccggcgttagcacgtggtgagttgcattgtatcggtgcgactacgttggatgagtatcgcaagtacattgagaaggatgcggcgttggaacgccgtttccagaaggtgtttgttggggagccgacggtggaggataccatcgcaattcttcgtggacttaaggaaaagtatgcgttgcaccacggtgtggaaatcactgatccggctattgttgctgcggctacgctgtctaatcgctacatcactgatcgtcagttaccagataaagcgattgacttgatggatgaggctgccagtcgtattcgtatggaaattgactccaagccggaagagcttgatcgtttggagcgtcggttgattcagttgaaaattcagcgtgagatgctgaagaaagaaaaggatgaggcgagcaagcagcgtttagccgatcttgagcgtgatattgaggttctggaccgtgaattttccgatctggaggaggtgtggagatcagaaaaagccgcgctacagggggcgactaagatcaaggagtcgatcgagcaggccaagcttgatttggaagccgcgcagcgccgtcaggactacgccaagatgagcgagattcagtatggtgtactccccgcgttggagaagcagctggtggcagcaagtcaggcggaacagcacgattttacgttggtgcaggagaaagtgactgctgaggagattgccgaggtagtcagtcgttggactggtattccagtgagcaagatgcttgagggcgagcgcgataagttgttgcgtatggaagctgatctaggccgacgtgtggttggtcaagaggaggcgatcaaggtggtatcggatgcggtacgccgttcgcgtactggtttgtctgatccaaatcgaccgagcggctcgttcctttttctgggtccgacgggtgttggtaagactgagttatgtaaggcgctggctgaatttttgttcgacagtcaagatgcaatggtccgcattgatatgagtgagttcatggaaaagcattctgtggcgcgcctgattggtgcgcctccgggctatgtgggttatgaggaaggaggttatcttactgaattggtgcgacgtcggccttactctctgattcttttggatgaagtggagaaggcgcatagtgatgtgttcaatattctgctgcaagtacttgatgatggacgcttgactgatggtcagggccgtactgttgattttcgcaataccgttattgtgatgacatcgaacttgggttcacatcagatccaagaactcagtggagacgattctccggaggtgtatacgcaaatgaaggcggcagtgatggaggtggtgcaggcgcattttcgcccagagttcattaacaggttggatgatattgttgttttccacccgttggacaaggcgcaaatcaagcagattgcgcggattcaactgcaggggcttgagaagcgtctcgctgaatctgagttgaaactagatttggatgatcgtgcgttggaattgcttggtaatgtcggatttgatcctgtatatggtgcccgcccgctgaagagagcgatccaatctcagctggagaatcccttagcgcagcagatcttagctgaagcgttcgtcagtggagatactgtgcaggtgggtgttgatggagggaagcttgtattcgctaaggtgtgaagttgtttactgtatatagtcagtagtgctgtgtattgtatgggtgtacgaggggtgtggttataaataacctttcttggttgccagtagtgttggtttatattgatcaggttgggtccgcgcgcatcgtgcgcggacagatgtaaggtctgtatggaaagccaaattaatttggctggatgctaagaaatggacgaaggaggagatcaattgcgacagtcattgagt

SEQ ID NO: 89 - DNA, 1864 bp, Zea mays
ggtaccggtccggaattcccgggtcgacccacgcgtccgcccacgcgtccgcgtcactcgccacgccacgccaaagaccaagaaaaaaaaggacgattttttcctagctgcaacttccctcacgccatggaggaggagatgccgctgcagctgctctccgcttcctccgccgccgtcgctgtctgagctcccccttcgctcgatctctccatcgggccgggcctacctctcctagcagtgaatcaaaccatggcagctttcgccgcgctgttcgaccccctgtactgcccggaggagcacctcgatctgtaccgcgacgaacccggcgagggtgcggacgagcagtggccgggccagcacggacagcaggagccggctgtcctcgacgacgagctgccggcgctgttcgaggcacaccgggccaaggagggggtggtgctggcggaggatggcgggtacggcggcgcagctgggcgtgaggccgcggtcggctgggtttcacgcgccgcggcgcggctaggcttatccgcgctcaccgccgcgctcgccgccgcctacctcgaccgctgcttcctccccgggggcgcgctccggctcggcgaccagccctggatggcgcgcctagccgccgtcacctgcttcgcgctcgccgccaaggtcgaggagacgcgcgtgccgccgctcctcgacctccagctctacgccgccgctgacgccgcggatccgtacgtattcgaggccaagacggtgcgccggatggagctgctcgtgctctccgcgcttgggtggcggatgcaccctgtcacgcccttctcctacctccagcccgtcctcgccgacgctgcgacgcgcctgcgtagctgcgagggcgtcctgctcgcggtcatggccgactggaggtggcctcggcaccggccttcggcgtgggccgccgccgcgttgctgatcacagccgccgccggcgacggcggcgacggcgacggcgacacggagctcctggcgctcatcaatgcccccgaggacaagaccgccgagtgtgccaagatcatctccgaggtgacgggcatgagcttcctcgcctgcgatgtcggcgtgagcgccggaaataagcgtaagcacgcggcggcgcagttgtactcgccgccgccgagcccgagcggcgtgatcggcgcgctgtcctgcttcagctgcgagagctcgacgtccgccaccgctatggctgcggcggtcggcccgtgggcgccgtcggcgtccgtgtccgtgtcgtcctctccagagccaccaggtcgggcccccaagcgcgcagcggcggcgtcggcgtcggcgtcggcgtcagccggggtcgcgccaccggtccaggtcccgcatcagctaccccccgacgaggagagccgcgacgcctggccgtccacctgcgccgcgtgacgcaccgtgccggaaacggtgcctatggcgagaccgccgttcggtggcggtggagaatggagaacaaggagcatcattggctcgcgtcggtgagcaggagaacgaactattttgcccattgccgtgacagatggggggcaagagagataagaaaagatgtccttgtttgcatgcttatggcgggagtaatgtttgcatgcttgtggcagcacattttgcaatgatggttctcagagaacttagctggaggtggaagatgattagcggataatttgccgtcgagatcgatggcgatttagtatttgttgcaactgtagtgatgctagttcttgccgtgttcttgttggttcttggcattgcttgcttggaaggggcctccgacctccgttgtcctgaaaaaaaaaaaaaaaaagggcggccgctctagaggatccaagct

SEQ ID NO: 90 - DNA, 1304 bp, Aspergillus nidulans
caaacaaagggatcgtcgtcctgacttttattttatagtccagagatccgtcttgtctgacatctactgccaaaccacaggtgtctgttcaattgcgctggttgtgccctgatttctgaattctctttccgccgcatactccgcaatgccatctactacaagccgcgctgccttcgaggcggtcttcccctccctggctgaggccatgcttgaccatgcgaggaaatacaacctgccccaaaatgctcaggaatggttcagcaaggccattcacaccaacgtccctggcggcaagctcaaccgcggtctctctgtccccgacaccggcgtggccctcctgcagaaggaactgagcgaggagcaatacaaggaccttgctacacttgggtggctgaccgagctgctccaggccttcttcctcgtcagcgatgaccttatggatggttcaatcacccgtcgcggccagccctgctggtaccgccaccagggggtcggtctcattgccatcaacgacgctttcctccttgagtccggtatctacgttatcctgaagaagcaattccgttcacaccctgcctacgtcgactttattgagctgttccatgagaccacctggcagacggaattgggccagctgtgtgatctgatcacggcgcccgaggacaaggtcgatctcaacaacttctccatggagaagtacatgttcattgtcacctacaagaccgcctactatagcttctacctcccggttgccctggccctccactaccttcagcttgctacccccgagaacctccgtcaggctcacgacatcctcattccgctcggccaatacttccaggtccaggatgactacctcgatgcgtacggcgaccccgaggtcattggcaagatcggaacagatatccaggacaacaagtgctcttggttagtgaaccaggctctgcagcgctgcagtgccgagcagcgcaaggtgctcgacgctgcctatggtcgtaaggacgctgagcaagaggccaaggtcaaggctattttccgggaattggacctcgaatccgtctacaaggagtacgaggagaagatcgtgggtgagctgaagacgaagatcgcggctgtcaacgagtcggaggggttgaagaaggaggtttttgaggcattcctcgggaagatctacaagcgcagtaaataagcgataggcagcatagtatgccattttgagatacctcgcaatagactaaagacattaattcggattccaaaaaaaaaaaaaaaaaaaaaaaaaaaagcggccgctcgagcatgca

SEQ ID NO: 91 - DNA, 1289 bp, Oryza sativa
ccctcgcatcgcacgtgaggcagtcgagggatagcggcgcaatggcggcggcggtggtggcgaacggcgcgagcggcgactcctccaaggccgcgttcgcggagatatacagcaggctcaaggaggagatgctcgaggacccggccttcgagttcaccgacgagtcgctccagtggatcgaccgcatgctggattacaatgtgctcggaggaaagtgcaaccgcgggatctctgtcattgatagtttcaagatgttgaagggcactgatgttctgaataaggaggagacatttcttgcctgcacccttggttggtgcattgaatggcttcaagcttattttcttgtgcttgatgatattatggacaactctcaaacacgacgtggccagccttgctggtttagggtgcctcaggttgggctcattgctgtaaatgatggtattatccttcgcaaccatatttcacgaattcttcaacgccattttaaaggaaagctgtattatgttgatctcattgatttgttcaatgaggttgagtttaagactgcttcaggtcaattgttggatcttattactactcatgagggagaaaaggatctcacaaagtacaacttgacagttcaccgccgcattgttcagtacaagacagcttactactcattctatcttccggttgcatgtgctttgctgctatctggtgagaatttggataacttcggtgatgttaagaacattcttgtggaaatggggacatacttccaagttcaggatgattatctagattgttatggtgatcctgagtttattggcaagattggaacggacattgaagactacaagtgctcatggttagttgtgcaagctctcgagcgtgctgacgagaaccaaaagcacattctatttgaaaattatgggaagccagatcctgaatgtgttgcaaaagtgaaggatctgtataaagaacttaatctggaggccgtatttcatgaatacgagagggagagttacaataagctgattgccgacatcgaagcacatccgaacaaagcagttcagaatgtattgaaatccttcctgcacaagatctacaagaggcagaagtagagctaagctcatggagaagctgtttcatgtttgcttggtaactagagtcgtggggacaaataactggtaactagaatcatggggactgttccctgatgttgtgtgtattatggttatgttcgtaccgtgtagtacagcgtgctactccgtaaaataatgaagcatggtgctatttatgcgtgcgtg

SEQ ID NO: 92 - DNA, 1569 bp, Zea mays
attcggctcgagctagagttaaaaaaacacttacagcacgcagttgtcgtcgtcattgtcttcgactcttcgtggcacctcccgtccataaaaataaacgtgtgcccacaaatctgttcgctcgcattggcaactgaaccgcaccaggcaccacagtcccgtgcggcagtggcagacgcacagcagatcagcagcgcctccctctgcggctctgcctcttgccaaagccccccacagaattcttctccctccccgtctcctctcgcgctcgcgcgtggtgaggtgaggtggagttccgaccccgaggccgcaatggcgacagcggaggtggtggtggccaacggctcgggcggcgccgacaccaagaccgcgtttaaggagatatacagcaagctcaagcaggagatgctcgaggaccccgccttcgaattcactgacgagtcgctccagtggatcgaccgcatgttggattacaatgtgcttggaggaaagtgcaatcgtgggctatctgttgtcgatagctacaagattttgaagggtgttgacgttctgagcaaggaggagacatttctggcctgcacccttggctggtgtattgaatggcttcaagcttattttcttgtgcttgatgatattatggacaactcccagacacggcgtggccagccttgctggtttagagtgccacaggttggtctcattgcagtaaatgatgggattatccttcgcaatcatatctcacgaatccttcaacgccacttcaaaggaaagccatattatgttgatatcattgacttgttcaacgaggttgagttcaagacagcttcagggcaaatgttggatcttatcactacccacgagggtgaaaaggatctaactaaatataacttgacagttcaccgccgcatcgttcagtacaagacagcttattattcattctaccttcctgttgcatgtgcattgctgctggctggtgagaacttggaaaactttgttgatgtaaagaacattctcgttgaaatgggaacatactttcaagttcaggatgactatctagattgttttggtgatcctgaattcattggcaagatcggaactgacattgaagactacaaatgttcctggctagttgtgcaagctcttgagcgtgctgctgagaaccaaaagagcattctgtttgaaaattacggaaagtctgatccagcgtgtgttgcaaaggtgaaggacttgtacaaagagcttaaactggaggaggttttccatgagtacgagagggagagttacaacaagctgattgccgacatcgaggcccagccgagcaaggcagtccaaactgttttgaagtccttccttcacaagatctacaagagggacaagtagacccagatcgtcgacaagctgctccatcgacgcttgcatcaatcgaattactatacttgattgatgcggacgagtaatttgtactatgttgttttgtgttttcattctcctgttgtacggtacaccttaatataataaagcacagtggtactagggatgcaaaaaaaaaaaaaaaaaaaaaaaaaaagg

SEQ ID NO: 93 - DNA, 1647 bp, Zea mays
gaattcccgggtcgacccacgcgtccgaatagaggtgtgatcggctcaagcaccagctagccacctcgctgcctcgctggtgctcttccacctcctgcaccacagcgccattgcgcttccacggccagctaccgctgccggaatatacactggtggatctttaacaggttcctccggtccgatccaccgccagcttccgacgtcgtactcgggcggatcggttccacaatgggggaacggggagcagaggaggacggctcgggcggctcctccctctccctcatgtgcctggaggacggcgccgacctcgacgccggtggctccgcggagagcgccgacgacggcgagccggccgtcgttgctcacagcgacgccggtgaggaccaggaggaggagtacatggactacctcgtgtccaaggagagcagcttctgctgctccccttcctcctcgcccgtctcctccgacgccggcgccgagacgcgcccttcgtccacggcgtcgtcatccgacgagtggttccgctgcgcgcgccacgccaccgtcgcgtgggtccttgagacgcgggcttacttcggcttctcccaccgcgcggcgtacctggccgtctcctacatggaccgcttctgcctccgccggtgcatggacgtgtcagtgatgccctgggcggcgcggctgctggcggtggcgtgcctgtccctggcggcgaagatggaggagtaccgcgcgccggcgctgtccgagttccgcgcccacgacgactacgacttcagcagcgtctgcatccggcgcgtggagctgctggtgctgtcaacgctggggtggcgcatgggcggtgtcacgccgctggattacctcccctgcctctccttcaggctacgccgaggcggtggcggcgggctcatcgccgccaaggccgccgcacttatcttctccgccgcggaagctgccagcgtgctcgactacaggccgtccaccgtggccgtcgccgccgtcctggcggcggcccacggcgccatgacaaaggaagcgctggagtgcaatatgagcagcctcactccgtcctgcctgctcgacaaggacgacgtgcacgcctgctacagcacgatgctgagcgagagctcctcgcctacgccgagcaagctggcggacaagagaccgccgccatccagctccggctcgacgatgtacgagtcggtcgacgcggcctcctcgttcgcggccacggcgggccggagcaagagggcgcggctggagatgccggccattggcccatgagaagcaccgccgggacacgatcgtttatttttttgccacttgtcctgtgctgtgcggctgtggcggcctgccggggctaatcttcttcgccaactgtagttttttttttcttcttccagctttgacttttcagttgtttgattgatcacgcggcgcgcgcgcgcagcacgctctgctggagaaacggtgacgcgcacgggcagtgccccggttgtggagatggagggtttggttgcctgtgctttgtttgcatactatagtttgatcctaatgatctaatccacgtacgatgaggtgaatgagaatgtaagttacacctcaatccacctaaaaaaaaaaaaaaaaaaaaaaaaaaaaaagggcggccgc

SEQ ID NO: 94 - DNA, 1920 bp, Zea mays
gaattcccgggtcgacccacgcgtccgacgtcggcctcttccacggccgccgccgtcgtcgccgccgccgccacctcgccgccgaccaccataccatcagatatttcagagctcgcgcccctcacgcatggttcttggcttcttgcttcttgctcgacgtgcgccgtaactaatcgactataagcgtggtgacacgtctgacgagatgatgccggtggcggcggtggatgactggtcggagcgcggtttctcgctgacctgcgaggaagactgcgccgacctcggcaacggcgtcgtagacgacgacgagttcctcccgctctacaatgccggcgaagaggaggaagaggagtatttggagcagctggtgtttaaggagaccagcctctgctcctcctccgactcagccgcggactgcgacggcgacggcgaaggagacgaagaatacccctcgctcgcctctgaggagtggtttcggcaagctcgcctcgccgccgtcaagtggattcttgaaacccgcgggtgcttcggcttcggccaccggacggcgtacctcgccatcgcctacttcgatagcttcctcctccggcgacgcgtcgatagggaggcgatgccgtgggcggcgcagctgctgtccgtggcgtgcgtgtccgtggccgccaagatggaggagtgccaggtgccggcgctgtcggagttccacgccggcggctacgatttcgactcggcgtccatccggcggatggagctgctggtgctgtccacgctcggatggcgcatgggcgccgtcacgcccttggacttcctcccctgcttctcctcccgggtccacccgcacggcggcgccggcgccggcggccacgtcgcccacaaggccatcggtttcatctttgccacggctgaagctggtagcgtgcttgatcacaggccgtccactgtggctgcagctgcaatcttggctgcaacctatggacctctactgaccaaagaagcactcgattccaagatgagctacctttctccatcttgtcttattgagaaggaacatgtacatgcctgctacagtatgatggttggggacaataacaggagaggtagcaagagatcattgccatgttcagtctccaacgagattgccactagtacatatcattctgttcttgttgatgatgttacggacaccgccgccgcctttgccacggcggtatcggccaggaataagcggatcaggctggagctgacgggcatcagttgagaaagctagcaccaccggggacacagtttttagccagatgtctaggggggcttggtttgatcttccctttcattttcttcccttctttttgaacttatatgtttgcgaaaaagaagatatttttttaggttctttgagccattgccatgggttggcattggctgttgtcagatttgattggtttggtttgtgagaggtggaagagatgaacaaagcagagggctgagctttcctatggagaggagagcttaggttaataagcccaatgccagcgcccaaacagggcacacttcacattcagtgaactttacttcaaaggttgatgcaatgttgcattgcatgtggtgagagatgctgctgcagagaagatgcaaaacaagtggtaacaacactgagaggttgagggttttgccattgtttatagaacgagtgagcgagagagggagatgtttccctttttcacctgtgcaagtggatgtgagagtggtgtttcactctgcacttgcgagggttacatcgatttgtaacaaaccctgtgtacttgtgtaaccccctcttgttcctgaggaatggaatcagattgcgttttgcgtcaaaaaaaaaaaaaaaaaaaaaaaaaaaaaaaaaaaaaaaaaaaaaaaaaaaaaaaaaaaaagggcggccgc

SEQ ID NO: 95 - DNA, 974 bp, Arabidopsis thaliana
ctctctcagcttacgaacaagaaaaaaagaagaatctttagccacctttgagatcaaaagatgaacatcgctcacactatcttcggcgttttcggaaatgcaactgctctgtttcttttcttggctccttcgataacattcaagagaatcatcaagaacaaatccactgaacaattctctggtatcccttatccaatgactctcctcaactgtctcctctctgcttggtatggacttccctttgtgtcaaaagacaacacacttgtgagcacaatcaatggcacaggagcagtgatcgaaacagtctacgtgttaatctttcttttctacgcaccaaagaaggagaaaattaagatctttggtatcttctcttgcgttttggctgtattcgcaacagtagctctcgtctctctctttgctcttcaaggaaacggtagaaaactcttttgtggtctcgcagctactgttttctccatcatcatgtacgcttctccactctccatcatgagattggtggtaaagacgaagagtgtagagtttatgccattctttttgtcactctttgtcttcctctgtggtacttcgtggttcgtctatggtctaatcggtcgtgacccttttgttgcaatcccaaatgggtttggatgtgcattagggacactgcaattgatactatacttcatctactgtggaaacaaaggagagaaatctgcagatgctcagaaagatgagaagtcagtggagatgaaagatgatgagaagaagcagaatgtggttaatggaaagcaagaccttcaagtttaaaagagcttttgaggatgatttggttatgtgatttcgtattaactctgcttaactagagttttccttttcgtttcgttggaatgtaaaaaaaatgatgctgaaaaatgtaacgtttcctagtttcgtactgatacactagtgattgatgaagaatgacgatgccttttgtg

SEQ ID NO: 96 - DNA, 1163 bp, Oryza sativa
ccgtgttgtagtgttgtgtagcagtagtccaccgctgagaagctagcaaagccagccatccattcagcgcagtactctcgggagagctagaagcgatctattctagccacaaggaggagagataaacgtatcgaaatggagcacatcgcgaggttcttctttggagtttccggcaatgtcatcgctctcttcctgttcctttcgccagttgtcaccttctggaggatcatcaagaagagatcaacggaggacttctccggcgtgccttacaacatgacacttctcaactgcctgctatctgcttggtacgggctgccgttcgtgtcaccgaacaacatcctggtgacgacgatcaacgggacggggtcggtgatcgaggccatctacgtggtgatcttcctcatcttcgcggagaggaaggccaggctgaagatgatgggtctcctgggcctcgtcacctccatcttcaccatggtggtgctcgtctccctcctggccctgcacggccagggccgcaagctcttctgcggcctcgccgccaccatcttctccatctgcatgtacgcctcgcctctctccatcatgaggctggtgatcaagacgaagagcgtggagttcatgccgttcctgctctccctgtccgtgttcctgtgcggcacctcctggttcatctacggcctgctcggccgcgaccctttcatcgcgatccccaatggatgcgggagctttctgggcttgatgcagctgatcctctacgcgatctaccggaaccacaagggggccacgccggcggcggcggccgggaagggggacgccgccgacgacgtggagatggccgaggggaggaacaacaaggtcgccgacggcggcgccgccgacgacgactcgtacggccggcggcaaggcgggcaccgaagtgtagctctggcgtgcgtctcgaatcggctaagatttcccgcgtgtgttctacttctacaagtagtaatattagctagacccttgctgctttgatctttactagaaaggagagcgcggcgccacgccgcgcgcgatggcaaatagttctacataaaatggttagatagtagatacatattttgataaatatagtctacatttgtttaataaacagagtacaatgaagtataaaaaaaaaaaaaaaa

SEQ ID NO: 97 - DNA, 2501 bp, Oryza sativa
ttcagaaaaaaacttttagtcttgccctagtatttgtttcatgagttgtgtcttaatcaacaaacggttgggctcatgaaatgacactattggtggttgtgatattctttgctaaattttagagtttagttcccacaatctttacttgttctgattaatgtttcaataaaaaaagaagcgaatgtatgcttttgaaagcaaccggatgccaaacggagcataatctgtttgtgccatcctactgaatttcatggagcatatgcatagcttttggccttctgtgcttcatccacccattctgcatttcagacttttaagtatgctttaggcattataaatagacagacccacacttggagcaaagaagtaactattttgtcaaatactagtccattcgagttgaaacgttcagtgaacagctagaatggtttccaacacaatccgtgtagcagtaggaattctaggtacttctcttctgaatgttcttggaataaattcagattttcattattttcagagcataatttagtgtctcccactttcaggaaatgctgcttccatgctcctgtatgcagcacctatgtatgtacatcacatccacagataccatacatgatcagaatttatttcatttgctatctttgcttatcaatgtgctctgaaaatcacagattaacatttaggagggtgatcaagaagggcagtgtagaagaattctcttgtgttccatacatcttagctctgttcaactgcctcctgtacacatggtatgggcttcctgtagtaagctcaggatgggagaattctacagtgtcttccatcaatgggcttggcatactgcttgagatcgcattcatcagcatatacacatggtttgcacccagagaaagaaaggcaagttctttgcagaggaattcttcagatattcatgatacatgaactcttgaaacaatgttttgacaggcttatctaatgatcttatttcagaagtttgtgttgcgaatggtgctacccgttcttgcattctttgcgctgacagcaattttttcaagctttctgtttcatacgcacggtttacgcaaagtttttgtgggtagtattggcctggtggcttccatatcgatgtacagctctccaatggtagctgcagtgagtatctttcacatatactgccctacttcagagtcataatctgcacagacaaaattaagttccaaatagcattaacttcaagaaaaaaacttgtattgacaaggaataagtacagatcatatccataggagtgatgaaacaattcggcatctcaaaaaaagatatcataaacatggctaaacttgaaagaacataattaatcaacaccagtctaccactaacagataaatgcttgccttttcaactactaagccttttctcaattctctcttcaataagtttccaatctttattagaaagcttcctaaatcaaattcggaagttggaactgtgtacaagaagaattgttttcatttttcttacgcggtaatcttaaattttctaatggagctaacatttgcagaaacaagtcataacaacaaaaagtgtggagttcatgcccttctacctgtcattgttttccttcctctccagtgctctatggatgatatatgggcttctagggaaggatctcttcatcgcggttagtacataccgggtacatatgtttttattcagagatggatcgatcgagctgtaaaatcactctgttttcatttctttcttctgcttgtttcgtgcagtcaccaaacttcattggctgtccaatgggtatccttcagttggtcctgtactgcatttacaggaaaagccacaaggaagctgaaaagcttcatgacatcgaccaggaaaatggtctgaaagtggtaaccacgcatgagaagataactggaagggagccagaggctcagagagattgatgtgttttatgtactcacttggggactttgtttcatttctgttgtcttaagagtaggtacgatagcagactacaaacatattttaaggagataaagaaaagagagaaaagcaacgggctataaatttgtagctagccgcaacacactccaagatgcaatgtatgtataacaggtgggatcaagtattaatagtgtagtaactattgtatgaattagctattaaattaattataaatgattaggagctagtagttgactatactattaaacttgctcttagggcactcgcaatggttatctataggctctctacaagagatccatgtcagcatattttttctcttggaagagattaaatgaagagagagagcaaagctatctattaacctgaagatagtctatagagaaaaacgaggcaatggattagagagctatagatacccatgtagatatactattgaggtggtttaccattaatctagtgtattgctgagatgtacatattttatagagagtacattactttaccattaccattgcgggtgatct

SEQ ID NO: 98 - DNA, 2959 bp, Zea mays
ggtgagcgagacagattccacagcaatttgctcctcttccacgcacaggcaagactgctccccagaaaagattgtagttttcatcgatttagccggtttctgcccggggggatcgctgctggagatctcagagaaccgggaggctccgagcttttgctccgtttgcgtcgaatctgcctcgggagcggagaaaggagcggccttccgagctcgtaggggccgtccctgagaaggcgagaggggacgcggcggcggcggagtcagctctagggcgctcgtggaagtcggtgatgccggtggtttgaggacgaggcggcctcggtggttttgaggaagccagcctctgccgcggcaaggatggactccagcggggaggaactcctgaagaagatccgggaactggaggttgggcaggcgcagctcaagcaggagatgtctaagctaatacccggcgctggggagcgtcggcgctcgcaatccgtctcgccgcggcgcggcgtgccggtgccgccgccaccgccggccaaggcgaaggcgggggcgccaggtaggcggctgtccggggggtttgagggcgggcagcgcgcgtgggcccgtgggtcggcgtctttcccgcactcatcaccgctgcagcgggagggccgcgcaggcgctggagacgctagcaccagcgctaggctgccggagaggcagtactccagggtgcttcagtcaatggggcagtccgtccacattcttgacctcgacgggaggatcatatactggaatcagtctgcggagaatctgtttggctatcctgcatcagaagcccttggtcaggatgccctcatgcttctggttgattcccatgaccacaatgcggtaaataacatcttccaacgtatttctatgggtgaaagttggactgggaagtttccagttaagaacaagcaaggacatagattttcagctgttgccaccaatacacctttctatgatgaagatggcagtttgatgggtttcatttgtgtttcaagtgattcccgccaattggagcagatattttgtaagcctccgacctctgcaaggtcccagtcagaatcatctatgacatcttgtgatgggagttgcagcaacactagtcacagaatcaattcgttgaatagaagttcttttgattctaatctacccctgcaaagcactttagcatccaagataacgaatttggctaccaaggtcacaaataaagttcgttctcgggtcaggacagacgagaatgacgatggtggcagtggtgagagccattgcttggatcgtggtgcaaaggaagagccaacatctagcggaacaagcacaccaagaggggatgcaccacatggtccctttgctacagaagagaactcacctgggaaatcaacgaacccaaacagcgacgaatcagaaggaaaagtaggtctgcacaagattttgggttctaaggcagaggcactattgaacaagaaagggatatcatggccttggaaagggcgcgagaatgagggacctgatgaaagaaaccatgtgatattgccgtggttgcatggtggccaagagaatggtgtgaatcatcagaaggtttctgattctagtatatctccagacgcccaaggcgctgaacacaaccaacctagcaaaaatgaggcatcaggttcctggtcctctttcaacaataacagcacaggcagtgcaagcagcacgggaagcactaatagcagtgctctctacaaagtagatcatgaagcagattgtctggattatgagatcctgtgggaagaccttgtcattggagaacaaataggtcaaggctcttgtgggacagtatatcatgctttgtggtatggttcggatgtggctgttaaagttttctccaagcaagaatattcagaagaagtgatactgacctttcgacaagaggtatcccttatgaagaaattgcgccatcctaacatactgctcttcatgggtgcggttatgtctccacaacgcctttgtattgtatcagagtttctcccccgtggaagcttgtttcgcttacttcaaaggagcgctaccaagttggatgtgagacggcgtgtccacatggctttagatattgtaaggggcatgaattatcttcaccattccagcccgcctatcattcatcgagatttaaaatcatctaaccttttggtcgacaagaactggattgtgaaggtggcagactttggtctttcacgtctcaagcgtgaaactttcttgacaacaaaaacaggaaaaggaacaccccaatggatggcgcccgaggtgttgcgcaatgaaccttccgatgagaagtctgatgtgtacagttacggggttatcctgtgggaacttgttactcagaagataccctgggaaaatctgaactcaatgcaggtcattggtgcagtgggttttatgaaccaaaggttggatatcccaagtgaagtagatcctcagtggaaatcaattatcctgagctgctgggaaagcgacccgcagcaacggccgtcgttccaggagcttcttgagaggctccgggagctgcagaggcactacgccatccagcaccggaacacaaagaacagcatcgaggagtaaagaacacaatgcgacctctcagagcggcttgcttcgaagcattttgcgagcgaacgaacgaagaaccccaggtctctagaagggcctggaccctcctgtactgtatggttttgcttctgcggaacagccaaggctggaagaagtttgttgtacagacgggggtacgttcttctttgtttgacagggcaattgtgactgtaatctctgggtcctgacacccaagggtagggtagagactatagagtgagtagtgactgagctccggattgctggcgcatttgggttcttctgattcgtggcaatgcaaatgcgtggttaacaataacaaaaaaaaaaaaaaaaa

SEQ ID NO: 99 - DNA, 1383 bp, Zea mays
gcctgaagaacttttgccacatggcagttctttgccttgggaaggatttcactatatcacaaaccgtgtgatggattcatctcttattgattcagagaactctatgcctgggtgtgcatgttctcatcctgaatgttctcctgagaactgtggtcacgtgagtctctttgatggtgtctacaatagcctggtggatatcaatggaacaccaatgcatggcagatttgcatatgatgaagatagtaaaattattttacaggaagggtatccaatatatgagtgcaattcatcatgtatttgtgactcgtcctgccagaataaagtattgcagaaagggctgcttgttaggttggaactctttagaagtgagaataagggttgggctattagggctgctgaacctattctacagggtacctttgtctgcgagtatattggtgaagttgtgaaggctgacaaggctatgaaaaatgcagaaagtgtgtcatcaaagggtgggtgcagttacttgtttagcattgcttcccagattgatagggaaagagttcggactgtaggggctattgaatactttattgatgccacaaggtctggaaatgtttcccgttatattagtcacagttgttccccgaatctcagtacccggttggttttggtagagagcaaagattgccagcttgctcacattggattgtttgctaatcaagatattgccgtaggagaagaactcgcctatgattaccgacaaaagcttgtagcaggcgatggctgcccatgccattgtggaactaccaattgccgaggccgtgtctattgattttgcaggaatacactaactgttcaatgctcggttgcagaactccagagatttcaacagttgtgtaggcttgctgagcgatttagcattgcaattttcctacagcttgagtgcagggctaggatctcattgttaatgctacaaatagtgattgtgatataggactcaggcaagcattaggcaataacatagtgtcgattttagtcatggtaccatcatgtttaactgattatttgttagaagcagcctgaaatgaaactgattcaggctgctctgttcgtaggcgagaattctctctgtaaaattccttcatattttatggttcatgagcaccatcattgacgtgaagtaataaactagttatcccagtggcctattgtgcggataatactccctctgttttttttagggagcgacaaataaaaaaaaaaaaaaaaaaaaaaaaaaaaaaaaaaaaaaaaaaaaaaaaaaaaaaaaaaaaaaaaaaaaaaaaaaaaaaaaaaaaaaaaaaaaaaaaaaaaaaaaaaaaaaaaaaaaaaaaaaaaaaaaaaaaaaaaaaaaaaaaa

SEQ ID NO: 100 - DNA, 1164 bp, Zea mays
ctctctgctccgggttcagagcagagctcagcgccctgtctccctccctccctccattcctcctcctccgctctctctctgcaggcctgcactgtgaggagactgtgacccggggacggagagctcctttcttctctctcatcgctccaccccttatttaccggtcggttgttcctgggccgtcccgtcccgtcccgtcgtctcgcctgggttctcgcttgcttctcaccatcactaccaccgtccacaccatcgcgagggcctggagggaagaggatgggacagggaggagaagtgaaggcggcgccggccgtgagggtgctggtggtggacgactcccccgtcgaccgcaaggtcgtggagctgctgctccggaaccacaaccaccagggcggcgccgcgccattccacgttaccgccgtcgacagcggcaagaaggcaatggagcatctccggctgatggagcaaggcggccagctggattcatgtgccgctgatgctaatcggataaccattgacatcgtgctcacggactactgcatgccggagatgactggctacgacctgctcaaggccatcaaggcgctgagctcccctaacccgatcccggtggtggtgatgtcgtcggagaacgagccccagaggatcagcagatgcctaaccgccggtgccgaggatttcatcctcaagccactcaagaccaaggacgtgcagcgcctgcgcaactgctccagcgccgctagacccagggacgacgcggcccaccagtgcgagagcttgaggaggagcagcagaaagctgcggtcggatcaggtcgccgcgcctggccacagatcgcaaccgacgacgggattaaccatggtgctgcatgcctccagcattgagctctcgcactacttccagttcctcctcaagttcgtgctgctcgcgtacgcggtgctgtgcctgaccgagctcctccacagatggtccaatggctccgtcctctccctgtggtctgcatgaggtcgactggaaccgcgatgcggtattattagtgtaaccactaaggctccaggctttcagttcaattcccccctgtaatccagtcctggcatgaggagccaccagttcttgctcgccgctccctatatttccatttcacttaaaaaaaaaaaaaaaaaa

SEQ ID NO: 101 - DNA, 2594 bp, Zea mays
cccacgcgtccgccctgcttcgctgttccctttccccgcccctacctggggcatctgcctctgaatcgcggcggctcccgaggcgccgcctggcgagcgtctaggcgccggtctacggcgacgatggaggtgtgatttggacgggagagagcgtggtggtgaggtctcggttttctcgatataggagatggcggcggcagaggcgcggggaggggagttccccgtgggcatgaaggtgctggttgtggacgacgacccgacgtgcctcgttgtgctcaagaggatgctccttgagtgccgatatgacgtgacaacatgtcctcaggctacaagagcactaactatgttgcgagagaataggcgtggttttgatgttataataagtgatgtccacatgccggatatggacggattcaggctacttgaacttgtaggccttgagatggaccttccagttatcatgatgtctgctgattcaagaacggatattgtaatgaacggaattaagcatggagcatgtgactatttaataaaacctgtcagaatggaggagctgaaaaacatctggcaacatgttattaggaaaaaatttaatgaaaacaaggaccatgagcattctggtagcctagatgacaccgatcgtaacagaccaaccaataatgataatgaatacgcttcctccgcgaatgatggaggtgatggcagctggaaatctcagagaaagaaaagagagaaagaagatgatgaaactgacctcgaaaatggtgatccttcttctacatcaaagaaaccaagagttgtttggtcagttgagcttcatcaacaatttgtgaatgcagtcaatcacctcgggatagacaaagctgtcccaaagaaaattttggaattgatgaatgtcccaggcttaaccagggaaaatgttgccagccatttgcagaaattcagactctacctgaagagaattgctcagcatcatgcaggaatacctcatccatttgttgcgcctgtatctagtgctaacgttgctccgttaggaggactggaattccaagctttggctgcttctggtcagatccctcctcaagctctggctgctttgcaggatgaactccttggtcgacctacaagcagtttggcgttgcctggaagggaccagtcatctttgcgagtggctgcaatcaaaggaaacaagcaccatgaagaaagagaaatagcatttggtcaacccatatacaagtgtcagaataatgcatatggtgcattccctcaaaacagcccagcagttggaggattgcaaccttttgcagcttggcccaataacaaagttggtatgactgattcaacaagcacattgggaaatgtgggcaattctcaaaatagcaatatgctattgcatgaattgcagcaacagccagacaccttgctgttaggaacccttcacaatattgatgccaaaccttctggtgtagttatgccatctcagtcgttaaatacattcccggctagtgagggtatctcacctaatcaaaatcccttgattataccatctcaacccccaagttttgtgtcatcaattcctccatccatgaaacatgaatctcttcttggattaccttcaacgtcaaccagtctgttgggcgggcttgatatggttaatcaagcttcaacaagtcaggctttgattagtagccatggaacaaatcttcctggtctcatgaaccgtagctcaaatgcaatcccttcaccaggaattagtaattttcaaagtggaaatattcattatgttgttaatcagaacgctatgggagttagctctaagccaccaggtgttctaaagaccgagagcactgactcactgagttgtagttatggctatattggtggtagcaccagtgtggactctggcttgttctcttctcagtccaaaaatccacagtatggtctactgcagaatcaaaatgatgttaacggcagctggtcgccttcacaagattttgatagttttggaaattctcttgggcaaggccaccctggtaccacttcatctaacttccagagttccgcccttgggaagttgcctgaccaaggacgagggagaaatcatgggtttgtcgggaaaggcacttgcattccaagccgctttgcagtggatgaggttgaatctccaactaacaacttgagccacagcattggaaacagtggagacatagtgaaccacgacatatttggatttagtggacatatgtgaaactttcttgaatttcgttgatcagtgagcactggaaacaaatctagtggtttgatgaatggttgctagtaatttcgtttcttttttttttcttctgtaattggtttataaagggaataatctatgtggcagcatgtggaatcttactttatagaagtttgttcagttcaaaggacttaaaattggtcagtcccttgtcatatagcttcttttctttgttctctttttctgtaattaccaattgtagcattatttttatgaccgtcgtaattcagcctagtcgatttattcccggccaaaaaaaaaaaaaaaaaaaaaaaaaaaaaaaaaaaaaaaaaaaaaaaaa

SEQ ID NO: 102 - DNA, 2542 bp, Zea mays
gggaatgccgccttagagaatggccaccatcaggctgaagctgacgcagatgaatggagggaaaaggaagaggacttggccaacaacgggcacagtgcgccaccgccaggcatgcagcaggtggatgagcataaggaggaacaaagacaaagcattcactgggagaggttcctacctgtgaagacactgagagtcttgctggtggagaatgatgactctactcgtcaggtggtcagtgccctgctccgtaagtgctgctatgaagttattcctgctgaaaatggtttgcatgcatggcgatatcttgaagatctgcagaacaacatcgaccttgtattgactgaggttttcatgccttgtctatctggtatcggtctgcttagcaaaatcacaagtcacaaaatttgcaaagacattcctgtgattatgatgtctacgaatgattctatgagtatggtgtttaagtgtttgtcgaagggagcagttgatttcttggtaaaaccactacgtaagaatgagcttaagaacctttggcagcatgtttggaggcgatgccacagttccagtggaagtgaaagtggcatccagacacagaagtgtgccaaactaaatactggcgacgagtatgagaacggcagtgacagcaatcatgatgatgaagaaaatgatgacggcgacgatgacgacttcagtgttggactcaatgctagggatggaagtgacaatggcagtggtactcaaagctcatggacaaagcgtgctgtggagattgacagcccacaacctatatctcccgatcaactagttgatccacctgatagtacatgtgcacaagtaattcaccctagatcagagatatgcagtaacaagtggttaccgacagcaaacaaaaggaatgtcaagaaacagaaggagaataaagatgaatctatgggaagatacttaggaataggtgctcctaggaactcaagtgcagaatatcaatcatctctcaatgatgtatctgttaatccaatagaaaaaggacatgagaatcacatgtccaaatgcaaatctaaaaaggaaacaatggcagaagatgattgtacaaacatgcctagtgcaacaaatgctgaaactgctgatttgattagctcaatagccagaaacacagaaggccaacaagcagtacaagccgttgacgcaccagatggcccttccaaaatggctaatggaaatgataagaatcatgattctcatatcgaagtgacaccccatgagttgggtttgaagagatcgagaacaaatggagctacagcggaaatccatgatgagcgaaatattctgaaaagatcagatcagtcagccttcaccaggtaccatacatctgtggcttccaatcaaggtggagcaagatatggggaaagctcttcaccacaagataacagttctgaggccatgaaaacggactctacatgcaagatgaagtcaaattcagatgctgctccaataaagcagggctccaatggcagtagcaataacgatgtgggatccagtacaaagaatgttgctgcaaggccttcgggtgacagggagagagtagcgtcaccattagccatcaaatctacccagcatgcctcagcatttcatactatacagaatcaaacgtcaccagctaatctgattggggaagacaaagctgatgaaggaatttccaatacagtgaaaatgagccacccaacagaggttccacaaggctgcgtccagcatcatcatcatgtgcattattacctccatgttatgacacagaaacagccatcaacagaccgtggatcatcagatgttcactgtggttcgtcaaatgtgtttgatcctcctgttgaaggacatgctgcaaactacagtgtgaatgggggtgtctcagttggtcataatgggtgcaatgggcagaatggaagtagcgctgtccccaatattgcaagaccaaacatagagagtattaatggtaccatgagccaaaatattgccggaggtggcattgtaagtgggagtgggagtggcaatgacatgtatcagaatcggttcctgcaacgagaagctgcattgaacaaattcagactgaagcggaaagatcggaactttggtaaaaaggttcgctaccaaagcaggaagaggcttgctgagcagcggccacgggtccgaggacagtttgtgcgacaatctgagcaagaagatcaaacagcgcaaggttcagaaagatgacacgtaatttctaatacaacgtatcatcttcttcggcagatctgagaattaggcggttcttcctattgcgcatcttcgtcgacagatctgagaattaagtggtccttcccattgctgatagtagcccactgattcccaacgttagagtacacaataaataagactctagttgtcaatttctgtggttgactgcagatgatcaccctagcgctatggagtcaacaatgtaatatttatatactatgttcgtgccttggcgccttggcggtttgcaatcttcagtttcctttctgagaaaaaa

SEQ ID NO: 103 - DNA, 2382 bp, Zea mays
cccacgcgtccggcgagaatagggagagatcagacaagctgttgtcggaatccactccggcgaggaggagtgctgaggtcgaaatggggggaggagcggatgaggtggtgaaggtcgtggattcggaggacggcgagggggaggaggaagaggcagaggccgcggcggcggaggggtcgagcaaggagacgccgatgctgccaaggatgccggtgcgcgtgctgctcgccgagggcgacgactccacgcgccacgtcatctccgcgctgctccgcaagtgcggctaccgagttgctgcagcctctgatggtgtgaaggcgtgggacatattaaaggaaaaatctttcaacatagaccttgttttaactgaagttgaactgcctttgatgtctgggttcctcttgttatccacgatcatggagcatgatgcatccaagaacatccctgttataatgatgtcttcacacgactctgtaagcatggttttcaaatgcatgctaaagggtgcagcagatttccttgttaagccgctaagaaagaacgaattaaggaacttgtggcagcacgtttggagaaaacaactggcaaacggcgggcccgatgtgcagcacatacaagaagagaatctcgcagaaagaatggaacagaagactggcgtgacaaaagctgataatttgaacagtgatggtccccataaaaatagagaatgcagtgaacaagaaagtgatgctcaaagttcttgcacaaggtcagagttggaggctgaaagtaagcaaactaacaacattttggagtatatgcaatcaactgaaaggcatttgtttattcgtagccacaaggatttagagctaaatggagagaccaaaacacgaactaagggtaataacttgattccaacaagagaagacgatttattgccaaagaaaagaacatgtttgaatgacaatgattctgagagaacttccagagatatggagctagtccacattatggacaatcagcagaagcatgacacacagagggatgtggatactatgagaacaacatccaggggaaatgatgagaagaactccatcccagcacaccagttggaactttctcttagaagaactgactatggaaaattagagaaccacgagaaaaatgatagaagaacactgaaccattcaacttcatctgcattttacttgtataattgcaggactgcgtccagcttaggaaatgctggtgatggtcaattatgcagcacctcagaaacactagtggatgttgaaaatagaaatggagatttggcagctctgtctgaagacacgactgaaacaaatcgtcctcctatcagagttgtaccatttcctgtccctgttcaatgcttcacatttgatgggcagccgttctggaatggtacaccggtggcatctccattctacccacagtcagctccccccatttggaatagcaaaacaccaacgtggcaagaatcaaccccacaggcaacttcactgccgcaaaaatcgcaacagaatgaaccagttgaaatggatgctaaaccagttgaaaatgcagaggaacaatttgtcgtaggtcctcccagtgccagtgggaagcagctgcatgttgaaattcctaaagatggtctacggcacatttctcctgtgaccggtgaaagtggaatcagtacggtgctagacagcaccagaaatactctgagcagcagtggctgtgatagcacttccaaccggatcaccgcctctactgaaccatcatccaatgtatacaggggcgttcctgaaaccgcaagagccgaaggtttacgacacctgagccagcgtgaggctgcactgaacaagttccggctaaagaggaaggacaggtgctttgagaagaaggttcggtaccagagccggaaattactcgcagagcagcgtccacgggtcaagggccagtttgtccgtcaagatcatagcatccaaggaagctagggtccagttactgagctggaactcttccccattatctaaaaaaaagtcactgtaagtgactccactgcggggtatcctgatgtcaggttttttcgaagagttggaagcaatcacaccgagttacggtttgctgtgtatgtttgctaaagcttgtaatataagtatgtataggctgactcttctttccttaggttaggcacaggacctggcacgttctagacggtttgtcgttagacgttagaaaatacaggcatacttgtgtcctccagtagcacgtcctccagtagcacgtgtgctttaagccttgtattatgtaattagccaaggtgctgtttggttcacgaaatgtaacgtaaagggtaatggtaatggtttacactaaaaaaaaaaaaaaaaaaaaaaa

SEQ ID NO: 104 - DNA, 2232 bp, Zea mays
ccgctgctgttggattcgccgagccggagccgccggagatgaccgtcgacgagctgaagctgcaggcgagggccagcggcggccacggcgccaaggaccagttccccgtcggcatgcgcgtgctcgccgtcgacgacgacccgacctgcctcaagatcctcgagaacctcttgctccgctgccagtaccatgtgacaacaacgggacaggcagccacggccttgaagctgctgagggagaagaaggaccagtttgaccttgtgatcagcgacgtccacatgccggacatggacggcttcaagctcctcgagcttgtgggcctcgagatggacctcccggtcattatgctgtctgcaaatggggagacacagacagtcatgaaggggattacccatggagcatgtgactacctgctgaagccagtgcgtattgagcagctgaggactatatggcagcatgtggttaggcggaggagttgtgacgccaagaacagtggcaatgacaacgatgattcgggtaaaaagttgcaggtggtgagcgctgaaggtgacaatggcggtgttaatcgcaacaagagaatttcacgcaagggtagggatgataatggtgatgacggtgatgattctgatgacaacagtaatgagaatggagactcgtcgagccagaagaagccaagggttgtgtggtctgttgaattgcaccgaaagtttgtggctgctgtcaaccagcttggcattgacaaggctgttccaaagaaaatattggatcttatgaatgttgagaacatcacaagggagaacgttgcaagtcatctgcagaagtatcggctgtatctgaaaagactcagcgcagatgcaagcaggcaggctaacctaactgctgcatttggaggaagaaaccctgcttatgtgaacatgggactagacgccttcaggcagtacaatgcatatgggagataccggccagttccaaccactaaccattcacagccaaacaacctccttgcaaggatgaactctcctgcatttggtatgcatggtctgctgccttcgcagccacttcagattggacacaaccagaacaatctgagcacttccctagggaatgtcggggggatgaacaacggcaacctgatcaggggtgcgcatatgccactgcaggatactagcaaatgctttcctactggcccttctggtaattcgttcgcgaacatatcaaacagcacacaactggttacgacaaacaacttgccattacagtctcttgagccaagcaaccaacaacaccttggtcggctgcattcctctgcagaccctttcaactcatttgttggtgagcccccccagtttgcagatcttggaaggtgcaacaccacctggccaaccgcggtctcatcatccaatgttcaggagattggccagaaggacaggatcgtgaataggcccaagcttgagcctctctcaagctttacagaagcatccagtcagatccctttgctgggaagtgaaatgcagagccaccaagtagcatcactagccagcaacggtcttccgatgccgttcactcaggaagcggtgcccttcgcttatggaagcagcacgaactcgagagagatgctgaataacaaccttgcgcttagtaattcaggcgtcaactctacattgccgaaccttcgcatagacggttctgttgttccagggcagacactgggtggtagcaattcaggtggttgtgttgtcccccctctgcaagatggcaggattgatcaccaagctgtcagcagtcatctaaactacaacaacgaactcatggggacaggtaggctgcaaaggggacttagtggtggtctggatgacattgtcgtggacatgtttaggccggaccgcgcagacgatggcgtctccttcattgatggggactgggaactggtctagcaagtttcagttctctacatcaagtctgccttcgtgtgagattttccgcatttgtggttgtggaggggttcggcgcttgattggtccaaagttgtttatagtagcaagattgcatcacaaatgccctttgcatttggtttttcagtttagcgaccaggttccagtgtcacgtccgaatatcaactatgtggtatttgctaccttaactcgtatggctatgttttcaagtcaggtgttaactgtggctatcgtgatatatacagcatggttatgagccaaaaaaaaaaaaaaaaaaaaa

SEQ ID NO: 105 - DNA, 2079 bp, Zea mays
ccttcgccctcccccgcctgcgagcgcgaggcgcggaggggctagcgcgctagcggcgccatggccctgaccgacgccaccgcgttcccctacggcctgcgggtcctcgtcgtcgacgacgaccccacctggctcaagatcctcgagaagatgctccgcaagtgttcatacgaagtcaccacatgcggtttagccagtgttgctatccaaattctccgggagaggagaaacaagtttgacattgtaatcagtgatgtcaacatgcctgacatggatggtttcaagcttctcgaactcattgggcttgagatggatctacctgttataatgatgtccatagacggagagacaagtagggtgatgaaaggtgtccagcatggtgcatgtgactacctcctcaagcctgttcggatgaaggaactccgaaacatttggcaacatgtgtataggaaaaaaatgcatgaggtgaaagagattgaaggtaatgacagctatgatgatctccaaatgtttagaaatggtgtagagggattcgacgagagggacctatttatgagagctgactctgatactatgaggaagagaaaagacgtgaataaggaccatgcagatcaggactcaagtgatggagctactgttaagaaggctagagttgtctggtctgttgaccttcaccagaaatttgtaaatgctgtcaaccaaattggatttgacaaagtcgggccgaagaaaatactggatcttatgaatgttcctggcctgacaagagagaatgtggccagtcatcttcagaaataccgcctctacttgagtaggttgcaaaagcagaacgaggaaaggataatgggtgctgctaggcaagatttcaatcaaaagggaccatcggatcatcttaacctccgaagttccttccaagagcaaccaggcaacctttccaatggatgtcagcatagttctcagaaggtcgaagctcagaccaacattctcgatcctcatctggacgacacgaagacttcaatgcccttgaaggtgccagataaaaatggaatttcagcaagtgatgctgttgaccctcacaatatcaccactgcttcacctttaagtggggtgttctcttttgaaagaatgccagtgaatcaggacaggaagctatcagaaaccatgatcttggaatgtgagtcctggagtggaagtgtgccaccaaagcagttcatgcagtatccaaagcataaccatgagcgctgcgaccttctaggagactattcttgcttgcctaaaccggacttggagcacccaattgcccctggtcatctgtatgccccaccgccagtaatttcgatgagttacaatgtggagaaagatgtcagagacttctcagatgtaaaaccagatcttcttggctgtatgaagtccttatcaccagcactgacatgtacagttgagtcggtttctgctcaacttagtgacagtgttgtgacctcaactaacagtgaccggaagttttccagcgtggaggggttgtccagcattaaagattgtgactttgatcaggaaaggaacggagctattttgtttacttcagaagaggcaagtatattatgcggcactgattttacttgtctacctgaagacctgtccggctatcaacttcaaggtgtctccttcgggaataaaggattgaacagcatcgatttatatcagtgcaatgatacaatgttaatacctggactgcagaataattggtatgatgatgatgtagagtttagcagtgaaaccgtggagttcccattgctagacggaggcctgtttgcataaatgcctcatctggccctatctttcaaccatgcccttatgtcagcagggatgatgttcattggtatgttcccctatagcgcctcctgtagggctatatttaacctaacttgatcctgtggtggaaggatttaatttgtagtctcgccacttttgataattgtctgtattatagactgtgccatggcacaatgactgcaatatatactcttcacggtgatcaaaattacatatgaagactgtcaaaaaaaaaaaaaaaaaaaaaaa

SEQ ID NO: 106 - DNA, 1708 bp, Zea mays
caactcatcgggcgcggagaccaccgcggggggaaaagcgagggaggggggagaggactgaagagaaatcatggagccgatttgctgtggagattcgggcgcgtgatccggtcggatcttgctttcccggggggcgatcgaggccacgccgctgctgccgcggtgccctccctctgcctctgggctctgcgtgtgacgtgccgtgccatggcgctcgccctcgcctatatccccagcctccctcgccccgccgctggccgccgcattcagtaaaaagccacctaccctaccctcctgcgctggtactacttactacctagccaggccaaggagcccaacgagggggaacgctgcggtaggcgcgcgctgctcgtcccaccccacgccgccatgacggtgccagatgccgagtcgcgcttccatgtcctcgcggtggacgacagcctcgtcgacaggaaactcatcgagatgctgctcaagacctcgtcctaccaagtgaccacggtggattccgggagcaaggcgctggagctgctggggctgagggacgcgtcgtcgccgtctccgtcctcgcctgaccaccaggagatcgacgtgaatctcatcatcactgactactgcatgccaggcatgacaggatacgatctgctcaagagagtgaaggggtcctcctcgctcaaggacattcctgtggtgatcatgtcgtctgagaatgtgcctgcccggatcagcaggtgcttgcaagacggcgcggaggagttcttcctgaagcccgtgaagctggccgacatgaagaagctcaagtcgcacctgctgaaacggaagcagcccaaggaggcgcaggcgcaggcgcaggcgcaggcgcagcagggacaggcggtggagctggagcctgagcagcagctggacccgcgcacgcagccggcgcacgacgcggaggaaaccgcggcagagccgccgccggccgcatccaacggaaccaccgatggcggcaacaagaggaaggcggcagccatggaggaggaggggatgctggccgtgatgacggtggcggcgccggagagcagcaccaagccgaggctgtccaccaccaccagcagcctggcggtggaaacctgagctgagaatcggacggcgaccggatcacatactactacctacgtacattaatccaccattgcgggcagtcgagaggcaaccaaccaaccaagaaccaaccgaccaaacccaggccaccgccgagaaagagctcgtcctccttttctttcgctggttcttttggttctcggagctaattaatggaatgaaggtgtgagctcctggggatggaggggcggttacgggctctaagtgaagaacaattacgacgtaccttacctagcggctgctgcttcggccggcaaattttgttgtgctcgtggtcatggacacccttgtgttcgttaggagggggtcggggtggaacggtgaaaaggaagctgtagatagaaaaggcaggcgtctcatgctcttgttgtctagtctaatttttaattttactcggcttattaatcacggtactgactagctgccaaaaaaaaaaaaaaaaaaaaaaaaaaaaaaaaaaaaaaaaaaaaaaaaaaaaaaaaaaaaaaaaaaaaaaaaaaaaaaaaaaaaaaaaaaaaaaaaaaaaaaaaaaaaaaaaaaaaaaaaaaaaaaaaaaaaaaaa

SEQ ID NO: 107 - DNA, 1395 bp, Zea mays
cctgacaccatactatacctccccctccccggccctgtcctactagccgtcagaggtttgccgcctcctcgctcctcgtcttcatcactctctctctctctctctctctcttccttcgtcctcgacctgtggccacctgtggcgtcacgctttataagagcacgcggccggcaaccatctcccttgccacccacaagtagagaagaatcttttgttgctgacgcctgagacgctggcactgccgccgcgccgtctggagagaaagagcagagggacactgaagcagaggagccgaggggtagcgacgagagacgagcgagagcggacgacggagatggaagcaggaggagcaggagcggagggggtgatgagggtgctgctggtggacgactcccccgtcgaccgccgcgtggcgcagctgctcctcagcagcaactcctgcgccggctcattccacgtcatcgccgtggacagcgccaagaaggcgatggagttcctcggcctcaaggacggcggcaaggagcaggccatcgacatggtgctcacggactactgcatgccagagatgaccggatacgacctgctcaaggccatcaaggcactgaacccgctgaagccgatccctgtcatcgtcatgtcgtcagaagacgagccccagaggatcagccgatgcctgaacgccggcgccgaggacttcatcgtgaagcccctgcagagcaaggacgtgcagcgcctccggaactgctccacggtcgggaggcccagcaacaagggcggcgccacgttgccgtgcgaggagaacgccgtggccaagtggagtaacaacaagctgccgccctccgccggcgccggcgccggcgccagcgccacgtcgccgtcgggacggcgggcgaacctcgccggagtcgccatgcgccaggtgctgcactcgtcgagcgtggagatctcgcagtacctgccgctcctgctcaagctcgtcgtgctggcgtacgccgcgctgtgcctgggcgagctcctgcacagatggtcgtcgggcggcagctgctcgctctccccgtggtgcgcctgatcaggaaggagcaagcagcgcaaaaagccagcaacggtgcaagagccccccctgggcaccgacgacaggagactgctgctgcaccaagcattatttcaggctccaatagccctagtcttttaatttaggtagagattgtctctgctctgagatcctaaccggggtttcgaccgatgatgagtccccccgtggcttttgttcgttgatttgaggggccgtagacgtaggaaggaggaggaactgaacgaaccccttgtatcctctgctctgtatagaatgaatgaatgaatgaatgaatcagaatgcaacgcgtcaaaaaaaaaaaa

SEQ ID NO: 108 - DNA, 1214 bp, Zea mays
cggacgcgtgggtcctccaccaccattcatcagaaagcgaagcacaagcctctgatgccaagccaaagcacacacacctcctccagcctttcttcctctacagccccaattcttccctgcagctctgctgctgccttgtttcgatcggtcatggcggcggtggccacagagactccgttccatgtcctggcggtggacgacagcctcccggacaggaagctcatcgagaggctcctcaagacctcttccttccaagtgaccactgtcgactccgggagcaaggcgctgcagttcctgggcctccatgaccaggatagcacggttcctcctgtccacacgcaccagctggatgtggctgccaatcaggatgtggctgtgaacctgatcatcacagactactgcatgcctggcatgacaggatatgacctgctcaagaagatcaaggagtcgtcgtctctcagagatatcccggtggtgatcatgtcctctgagaacattccttcaaggatcaataggtgcctggaggaaggagctgacgagttcttcctaaaacctgtgcggctatcagacatgaacaagctcaagccccacatactgaaaagcagatgcaaccaggaacagcaccagcaaagtgacagtcacagtggcgaacgcaggaaccccacaatcagcagcagcgatagcataaacaaccgcaagagaaagggtgcaggcaccgaagaaatcttgccccagctggcaaacagatcaaggcacagttaactgagaactgactagtacagctaaaaccttttctttttcactttactttggcctactgatttgtaacgtagatgttagccctggatttgcaaaacggaacggaatctgtaaactgatactgcttgagtcgaatcgatcgaagtgattctgcaccagatctccctatttcatttatcagaatcgaaagccagctgacagagtcacagtaacagcccgttggacatagcagcaggtgccgaagccaagaacatctgaaactgaccgtcggataacctacgatgggagtagccttttactgcttctaagctttagcctggatacaagttgtcactacagtagtcagtagggcagtaacttggtgcatctccaagagttttcaaaacacactgtcaatctagaaatttttggtgaaaaaaaaaaaaaaaaaaaaaaaaaaaaaaaaaaaaaaaaaa

SEQ ID NO: 109 - DNA, 975 bp, Zea mays
gactagttctagatcgccgcaactgcccgtctgctcctgcttttcatccagtcgcaaaacaaagagaagagatctccgcgtccgcaaccgcatcgcttccctcccggcagaagaagaagattcggttgggttgtttgtctcttgcaaaccgcaatggctgctgctgccactgctactccggccgtggcgccggaggccggcgaccggaaggcggtggcaccgccggtcgacgcggtggatctggagctggagctggaggagaagcacgtgctggcggtggacgacagctccgtggaccgcgcggtgatcgccaagatcctacgcagctccaaatacagagtgacgaccgtggactcggcgacgcgcgcgctggagctgctggcgctggggctggtccccgacgtgaacatgatcatcacggactactggatgcccgggatgaccgggtacgagctgctgaagcacgtgaaggagtcgtcggcgctgcgggccatcccggtggtgatcatgtcgtcggagaacgtgcccacccgcatcagccggtgcctggaggagggcgccgaggacttcctcctcaagcccgtccgccccgccgacgtctcccgcctctgcagccggatccggtgaccgcccgcgcaaggatggaggatctggttgcgcgctctgacttaattagaggagttgttaggatccaattttttgtgtgttcgttcgttcgttcgttcttttctttctttcttcttggacatagatctgctgccgccgctgctgccgtcgactgaaacaagaagctaacttagttttagggtccaggttgttgttgttgttgttaggaaggcgagtcgttgggggcattcacggatgttcttcctcgtttcccctccctccgtgcctgaggctgcaaaaatatgccccccagacatgaaaaaaaaacaagacctgttaacagttccaaaaaaaaaaaaaaaaaaaaaa

SEQ ID NO: 110 - DNA, 2229 bp, Zea mays
caacagagaagagcggacgccaccggacgccaccgccgccaatcaatagattaggcgcggataatggtgctggccggaccgcgacgggcggaggagggcgccgcggcccccgcccgccgccgctgacagagtatacctgcttaaccagccgtctgcaggcacggcgcacgcgcggtggtacctcgcgaggggctcgggttgactgggcgctactcgtggccgcggggatggaggaggaggcgtctgcagatccaccgaccgcttcgtcctgcaccggcgtctctggttccggccgctgctgaatccgacgcttcggttcgcgtccccagtccccttggcggaggcgtggatcgtgtgtttggggggtttgggtatggtgggcggcggtgagggggatcgcgtgggcggcggcgtaggggttgggggaggccagcagttcgtggaccgcagcaaggtgaggattcttctctgcgacggcgacgccagcagctcccgggaggtgctgcggctcctctgcaactgctcgtaccatgtaacttgcgccaagtctccgcggcaggtgatcaatattctcaactacgagggcggcgagatcgacatcatcctggctgaggttgatctgccggtctccaagtgcttcaagatgctcaagtacattgccaggaacaaggacctgcgccacatccccatcatcagtaggcagccttcctattctgagccttgtgcggttgtgcctattactgtgatgtgctttctgtgaccgtcctccctgtcttatggaactgtgcagtgatgtccaacagagacgaggtgtctgttgttgtcaagtgcttgaggcttggtgcggccgagtacctggtgaagccgctgcgcacgaatgagctgctgaacctttggacccatgtgtggcggcggagacggatgcttggtttgcccgagaaaaacttcttcaatgacaacttcgagttggtgctctcagaacctagtgatgcaaataccaatagcgccaccctcctctcagatgagacagacgacaggcctaaagaaaacacaaatcaagaaacgggcacctcaaatcagcttgaatacgagtctaatccttccgttgctgagcgcgaccagagagacaagatcggtgctccaggctctgccctagatgccagtcaatcatcgactccgggaagaatgttttcacgtcctataaaaactaacctgaaggttgctgagtcgtctgcatttctagcatatgttaagtcaagcaccccagccaccagttcatttgatagcggactacaaagaggtgacagccggttagattctttggataaccatggtaattgctctagtgcaacagatagaagtgacaccggtactgatgtaaatattcggaataaagaagcttttgagatgcctgtgcagtatcctatggtatgcttttcttcctctagcatgcatatggagcgaagcaatgaaggccataatgacacttcaggaactccacctgcataccatttcccattttattatccagggatggtagaacacaacatggcactttcatcagtgcaaaattttcaagcaaacataaacagtgctcaagcacatacaccaccagcgatgcttcatcagtacaatgttttctcccaatgccatagtttacccatgatatcaccatttcagtttaatacttctggcatgagtatgcactcaagtcatttaccgacgcaaaatgtgtggtcatcggcatcgagcacaccaacgcctgacgaaacatgcaatcgctccgagagaagggctgcagcacttgctaaattcaggcagaaaaggaaagagcgctgttttgacaagaaggtgaggtatgtgaacaggaagaaacttgctgagacgaggctaagggtgcgaggtcaatttgttaggcatgcaagcaatatggatatcataagcactggagatgacatatctgaagacgaagatgacgatccaacctccagggaggtagatatgatttcttctccagagtagtggagaggtcctcttgtgtgaaaaattagagtgcagatggttactgctcactttgttacaactcagtaggactagacaatacattcttctactggcaacaaggcaatacaccctttttgctcacacacagtataaacttttgtccccaaatatctggctgttactccggttgctttaatcgagaaatcatctttttgataaaaaaaa

SEQ ID NO: 111 - DNA, 1645 bp, Zea mays
cccacgcgtccgcccacgcgtccggccccgcatggcaccccaggggcggagagcgacgaggagatacggcggggtgccagagatgggcggcgcgtcggcgtcggcctcgtcgggcgccggcgcggacgagcgtcccaagggggaggacggcaagcaggggcaggtggcggcgggggcgcagcctccagcgggcgggaagaagcgcgggcgcacggcgggggacaaggagcagaaccggctgaagcggctgctgcggaaccacgtgtccgcgcagcaagcgcgagagcggaagaaggcgtacctgacggagctggaggcgaaggccaagggtctggagctccgcaatgcggagctggagcagcgggtgtccacgctccaaaacgagaacaacacgctccgccaggttatagatgttagtggaaaagaattcaaattcacctgggcatctggacgtggcgaattgtgtgatatttatgaagaacgtcagagtggagaggatggaaatgggttgcttctggagtgtggctctacttggcgcaagtgaaccctatagcctgggcagttcctacaaaacatgagggtgatgccagtgaagaagcttctctcgccgatgagacacttgcatcagaagtagtgctaacccggaagaggaaaataggaagctctttgtcagtagagccaaaccatctctctgatgaacttgaaccaaagttggaggatgcttagaacggggagacgtctaactgaaaagtaaaagtgggcagcatcgtgatgccaacttacccccctgccatggttttattggtcctctgcttgtttctcgttttccttgggagtcagcttctctgttttatgtggtcgcacacggccttatttgtagtattacaccacagaagctggctgacccccactgagggagaggtgattgatgcaagcattgtgtatgatccttggacaagggaatcgcgggggtttggttttgtcaccatggctgctactaaggaggcagatcactgcatcaaatatctggattgttctgtgttgcaagtactctacacagaacattttattgttttgtcttcaccaccgagaatccgagatcgcctcccatagcctccacatccataaggtcctgcttgactgcgacgacgtccaggctgatgccctcatcgtggatcgactcgcctcgctctagaaggagtggcccctctggagttgaatatgcagttataaccaatttttaccccttttatcctagaagagttgccaagacacggtataagaccatgataatagactaagagaggatttggctctaattactatatgttttatttatgcagtcccatgagaactttgagtatttgcagattgctttattaatttattaaagttaaagattgtatgtgttgagtatgtatccactcttgttggaagtgtcttgcaattccaatccaaggatgtataaaatactgcatgggctaagtatgtgttttttcatgtatttggagtatatatactttttgttgcttgagaacatgtatgtacactagaagcttgtcaattgtgtgaacttgagttgatccctgtctaacctgagtatatatatatatatatatatattttgttgcttgagaaaaaaaaa

SEQ ID NO: 112 - DNA, 2358 bp, Zea mays
cagtgaggcacccctctcctggcctcttctcgccttctccgtttccgcgaacccagctgcctcgtagccccaccacaccgccgagcacgcggtctcccgcgccgccttccacccaagcgaagctacccctactcgacccagaattatcttctaccagcgctagtccgctccgcctctctactggctgccgtggagtggggatccgtccggacttccttctttcgctgttgatgtcatcatgctgagcattttgtggtagagacgatcatctctttgggttccagcatataactcatgcccataaaatttgcactagaaaatatgtcgacacaagcctctaaccggtcatacagatatccagacagaacccaactgccgtaccacaatggcaatccaatgcatgttgggggcaatggtaattactgtgtgcaacaaaatcacgatgatgttaactacatttcctctgatgatggatcacagagcagtagttctagagttcaagattttcaagcacagttttgcaccctagattcgtcttcggccaattgtgtttatcctgcacatagttctacctcttctcagagcataagtggaagccctctgtctcagcaggagagccactctgatcatgcatatggttcctctccaagtgcatcgtgcatcactcaggttcccacctggacacttaaggatctagaaaatgtgatgcttggacccgattctgacataggtagccctgacagttcctttctgcttgacactgccttgcatggaaataactggagagaacttttgggaattcaaactggggatttgaggcaggtaattgtagcatgtggtaaggctgttgacgagaatgctgtctatatggatgcattgatgtctgagttaagggagatggtttctgtctctggtgaaccgatgcaacgtctgggagcttacatgttggaaggcctcattgcgaggctttctttcactggacatgccttgtataaatctctgaagtgcaaagagcctgtggctacgagttctgagctcttgtcctatatgcatcttctttatgagatctgtccattcttcaagttcggttacatgtctgccaatggtgccatagctgaagcggttaagggggaagacattattcacatcatcgattttcaaatcgctcagggtagtcagtggatgactatgatacaggcccttgcttcaaggcctgggaggcgaccatacctaaggatcactggcatagatgactcgaattctgctcatgcccgaggtggtggactggatatggttggacagaggttgcacagaatggcccagtcatgtggtctgcccttcgagttcaatgctgtgccagcagctagtcatgaggttgtgtttgaagatctttgtctaagatctggggaggccatcgttgtcaattttgcttatcagctgcatcatactcctgatgagagcgtgggcatagaaaaccatcgtgatagaatactgagaatggtcaagagcctctctcctaaggtggtaactcttgtagagcaggaggcaaacacaaacacagcacctttctttcttagatacatggagactcttgattattacacagcgatgtttgaggcaatagatgttgcttgccccagggatgataagaagcgcattagcacagagcaacactgtgttgcaagggatattgtcaatttaattgcttgtgaaggtgcggaaaggatagagagacatgagccttttggaaagtggagggcaagacttgtaatggctggttttagaccatacccgttaagtccagtggtgaacagaaccatcaaaacactgcttgacagttaccacagccattacaggcttgaggagagagatggcatcctttatcttggctggaagaacagaaagctggtcgtatcttctgcctggtgctgatatttccaacttcttctaagaagcattgttaagattctttcgtggcttggggttcaggcgttcagcacatgaatccaaggtggaacctaaacttcagtatgaagactgcacaatcaaaaaaacaagctggttgcttccttactatttgttgcccagccttgaaactctcccacgctcactatcatcgctgatgtacttaccatgactcagttccatccttatatataggtgcaaacaatggtcttaatattgtatattggtagaatctggtggtattagcttccaaatctggattgctgaatcgtttgtgttactacatttagccaggatttgacagtagacacaaggagtgctgtaagatcctgtatgtacaacgtgcttcagttggtgtattgtacgtacttgggtgctaaaaaaaaaaaaaaa

SEQ ID NO: 113 - DNA, 2470 bp, Zea mays
cgtagctatagctggctagcttcctcctcctggctagctgctacccttcccggttctcaccgcgctgccattaaaacccccttccttgttaccacttcgaccttgagcaagcgcactcttcatgttgccgcctcgccgcagtagcagcttacatggatacgctgtttaggttggttagccttcaagcctccgaacagcagcagcagcagcaatcggcgtcctacaactcgaggagcaccacgtcgagcggctccaggtcgtcgtcgcaccagaccaacgcatcctacaactactactaccacagcaacagcagcggcggcggcggcggcgggcagtactactacggtcagcagcacccacagcagcaccagcaccagcagtactacctggagccgtaccagcaagaagaatgcggcaacacccaccacctttacatggatgaagacttctcctcctcgtcctcgtcgaggcagcatttccactcgcacggcgcggtggtgcagccgccgacgtcgtccacggccacgcccacggcgccgacgccctcgctgtccacgtcgtccacggccgctggggcggcgcacgcgctgttcgaggcggccgacctgtcgttcccgcctgacctcaacctcgacttctcatccccggcctcgtcgtccggcgggggcgcggcctcgtcggcggcggtcgggggaggtggcgggggaaggtgggcgagccagctgctgctggagtgcgcgcgcgcggtggcgggccgcgacagccagcgcgtgcagcagctgatgtggatgctcaacgagctggcctcgccgtacggggacgtcgagcagaagctggcgtcctacttcctccaggggctcttcgcgcgcctcacggcgtccggaccgcggacgctgcgcacgctcgcggcggcgtccgaccggaacacgtccttcgactccacgcggcgcacggcgctgcggttccaggagctcagcccgtggtcgtcgtttgggcacgtggccgccaacggcgccatcctggagtcgttcctggaggccgccgcggcgtcgccggagccccagaggctccacatcctcgacctcagcaacacgttctgcacgcagtggcccacgctgctggaggcgctcgccacgcggtccgccgacgacacgccgcacctgtcgatcaccacggtggtctcctccgcgccgtccgcgccgacggccgccgtgcagcgcgtgatgcgggagatcgggcagcggatggaaaagttcgcgcggctgatgggcgtgcccttcagcttccgcgcagtgcaccacgccggggaccttgcggggctcgacctcgacgcgctcgacctgcgcgacggcggcgccaccaccgcgctcgccatcaactgcgtcaactcgctgcgcggcgtggtgccgggcggtgcgcggagacgggacgcgttcgccgcgtccctccggcgtctcgatccgcgggttgttactgtcgtcgaggaggaggccgatctcgtggcttttgaccccggcgcgcccgaggaaagcggcgacacggaggcagcgttcctgaaggtgttcggcgagggcttgcggttcttctcggcttacatggactcgctggaagagagcttccccaagactagcaacgagaggctggcgctggagaggggagccggacgtgccattgtagacttggtctcgtgcccggcgtcggagtccatggagcggcgggagacggcggcttcatgggcgcgccgcatgcggtcttccggcttctctccggtggcgttcagcgaggacgtcgccgacgacgtgcggtcgttgctccgtcggtatcgggaaggctggtcgatgcgggacgccggtttagacgactcggcagccggagcaggcgtcttcctggcgtggaaggaacagcctctcgtgtgggcgagcgcgtggaggccatgatagagatccccgtcgacgcaagatgcaagctcggtggagtacgcgcgtacgtggaacatcatgaaccacaggagaagcaagggcgccatccgccatacctagccggcgcgtggatgcaatgatccatgcagtggatcgggcgcacgtgcatgtgtatggcgagctgaatggcgcaacgcatctagggttttggagcagtagtagggattgctagttcacgcacacatggttgtatgcagcaaggtgatccaggaggaggtatggtcgatggttttaggttttagacttgcatctatttcaaatttggatcatcgatcgccacaagctcttggcgtgatgattccgattttcttgcttctttgtttttttttttttgtcacatttctctgtgtttcttcatgtaattcaaggttaacgactttcttccctctggagggatttacgtgcatggttttgtcatactttctctcattcctctgtttgcatttgcattgcatggttgttgagatgtcgcttcctaaaaaaaaaaaaaa

SEQ ID NO: 114 - DNA, 1480 bp, Zea mays
gcttcatgcgtggatcctcgtagaccccgacccgcgtgcactcaatccctaggcggcggcctccggcgcgaggctagcgggcggcacccatggcgtccgtggcggagctcaaggagaagcacgccgcagctacggcgtcggtgaactccctgcgcgagcgcctccgccagcgccgggagacgctcctcgacaccgacgtggcgaggtactccaagtcgcaggggagggtgccggtgagcttcaaccctacggatctggtctgctgccgcacgctgcagggccatagcggaaaggtatattctctggattggacccctgaaaagaattggatagtcagtgcctctcaagatggaaggttaattgtgtggaatgcattgacaagccagaaaacacatgccataaagctgcattgcccatgggttatggcgtgtgcttttgcacccaatggccaatctgtcgcctgtggtggtcttgatagtgcgtgctctattttcaatctcaattctcaagcagacagagatgggaacatgccagtatcaagaattcttactggacacaagggctatgtctcatcatgtcaatatgtcccagatcaggaaacacgtcttattactagttcaggtgatcaaacatgtgttctttgggatgttactactggacagaggatatcaatatttggtggtgaattcccatcagggcatacagctgatgttcaaagtgtgtccatcaactcatcaaatacaaatatgtttgtctctggctcatgtgatacaactgtgaggctgtgggatatcagaattgcaagtcgagctgttcgaacctaccatggacatgaggatgatgttaacagtgtgaagtttttccctgatggccataggtttggtactggctcagatgatggcacatgtagattatttgatatgagaacagggcatcaacttcaggtgtacagtagggagcctgatagaaatagtaatgaactacctactgttacatctattgcattttcaatatcaggaaggctactttttgctggttactccaatggtgactgttatgtgtgggacacacttctcgccgaggtggtacttaatttgggaaacctgcaaaactcccatgatggccgtataagttgcctcgggatgtcatctgatgggagtgcattgtgtacaggaagctgggacaaaaatttgaagatttgggccttcagtggacaccggaagatagtttgaaggccaacttttctcccccatgttgtatgttccttgttgccccttaacaacggacagtggtgattggtgaccaactcgacttgttcctgggaatccctttgttgttttgtaagctctgttcgcgctatgtttaatggaaaaatgtgcaatttgtcagtgtcacggcgctacatcttgttgagttggtaactgtttatactgttattacgagaatatcagtaacgtgtgatctgcccttttctttgtac

SEQ ID NO: 115 - DNA, 1123 bp, Glycine max
attcggctcgagttttttctttctccgccccttttttgttgttccttcttctcgttcgtcgctttgtgatctctctctgcaaccatgtccgtcgagaaagagagagagacccaggtttacttggccaagcttgccgagcaggccgagagatacgaagaaatggttgagtgtatgaagaaagtagcaaaacttgatcttgatctgactgtggaagaaaggaaccttctctcagtgggatacaaaaatgtgattggtgcacgaagggcctcttggcgcataatgtcctcaattgagcagaaggaagagtctaagggaaatgagcacaatgttaaactgatcaagagttactgccaaaaagttgaggaggaactctccaaaatctgtggtgacattctgactattatagaccagcatttgattccttcttccggatcagcagaagctagcgttttctactacaagatgaaaggtgattattttcggtatcttgctgagttcaagactgaccaagaaaggaaagaggcagctgagcagtcactaaaaggatacgaggctgcttctgccactgcaaacacagatcttccatcaacacatccaatccgtcttggacttgcactcaatttctctgtcttttattatgagataatgaactctcctgaaagggcctgccatttggccaagcaagcttttgatgaggcaattgcggagttggacaccctgagtgaagagtcatacaaggacagcactttgatcatgcagctgttgagagacaaccttactctctggacttccgatttaccagaggatggaggtgaggacaacataaaagctgaagaagccaaaccttctgagcctgagcattgatgtgattcagtagtcagaaatctaaggtactccccaagagggcatttttcagcttttcttgcaatggatttggaccggacaatagggactgtggtggccatttcataattcttgttctctcttaatatctttaccaaagccagaagatctgcacccttttttttcccttaaaactttttatttttattgccttctctgttttaagtggtcagttaagcaatgaacaatttacatttacccttaaaaaaaaaaaaaaagg

SEQ ID NO: 116 - DNA, 1179 bp, Glycine max
attcggctcgagcgtaaaccctaatttcggaaagatcggcgatgactgcctccaaggatcgcgagaacttcgtctacatcgccaaactcgccgagcaggccgagcgttacgaagagatggtggaatcaatgaagaacgttgcgaatctcgacgttgaactgacggtggaggagcggaatttgctttctgttgggtacaagaatgtgattggtgctcgcagagcgtcctggaggatcctgtcttccattgagcagaaggaagaaacaaaagggaacgagttgaatgcgaagcggattaaggagtacagacagaaggttgaattggagctatcgaacatctgtaatgatgttatgagagtgattgatgagcaccttatcccttcggctgcagctggtgaatccactgtgttttactataagatgaaaggagattattatcgttatcttgctgaatttaagtcaggcaatgagaagaaggaagctgctgatcagtctatgaaagcatatgagtctgctaccgctgcagcagaggctgatttacctcccacacatcccatccgattgggtctagctttaaatttctctgttttctattatgagatcttgaactcccctgaaagagcctgtcatcttgcgaagcaagcttttgatgaagctatttctgagcttgacaccttgaatgaggagtcatacaaagatagcaccttaatcatgcaacttctcagggacaacctaactttgtggacttctgacatcccagaagatggagaagatgcccagaaagtgaatggcactgccaagcttggtggaggtgaggatgcagagtgagtccgatggatgatggaatcttccataggattcgatgcatgcgtttgggaatgaaacatgagggccgattacttatctgtgtattagctagagatagggattctattgtttcctctttgtttcctgttggattgcccaatacttcccgataggggaaagagatactccatttgtgctatatttatggtatgtttttatttgtgtggtgtctggaaatggcctatttcattcccaatccgtttcctccagtctctgggggatttgattgatgagaattgcttatggtgggtgtatttccttttccaatgaaatgctacaacatttactgcaaaaaaaaaaaaaaaaaaaaagg

SEQ ID NO: 117 - DNA, 1092 bp, Glycine max
attcggctcgagctctcatccagatcttgcaaaaaaaaaaaaaacacaatggcagcgagcgctcccactccacgcgaagagttcgtgtacatggcgaagctggcggagcaggccgagcgctacgaggagatggtggagttcatggagaaggtctccgcctccgccgagagcgaggagctgaccgtggaggagcgcaacctcctctccgtcgcctacaagaacgtaatcggcgctcgccgcgcctcctggcgcatcatctcctccattgagcagaaggaggagagccgcggcaacgaggaccacgtcgccgtcatccgtgactaccgctccaagatcgaggccgagctctccaacatctgcgacggaatcctcaagctcctcgacacgcgcctcgtcccctccgccgcctccggcgactccaaggtcttctacctcaagatgaagggagactaccacaggtacctcgctgagttcaagaccggcgccgaccgcaaggaagccgccgagagcacgctctccgcctacaaagccgctcaggacattgctaacaccgagctgcctccaactcaccctatcaggctgggtcttgctctgaatttctctgtgttttactatgagattcttaactctcctgatcgtgcatgcagccttgcaaaacaggcttttgatgaggctattgctgaattggatacgttgggagaggaatcatacaaggatagcactttgatcatgcaacttcttcgtgataaccttaccctctggacctctgacatgcaggatgatggtgcagatgaaattaaagaagccgcacccaaaggtgacggggaacaaaattaaacataccatacttctaattagtgattgaacttcccttgtgtaatgttttcaaagggagaaggtgttgaatgctaatctcggtgttactgagattttgggcattcatgttcttcgttatgaattgtggatgtactgggctattttagtttgtccttccattagtacgcgtttctgaactgcctattttcataatgacactgaaatttccattataatgctgtttagaatattaagatataaaaaaaaaaaaaaagg

SEQ ID NO: 118 - DNA, 6501 bp, Oryza sativa
agctaacctgcgtgatatttctaatcaattcgggaagggaaggataaaattgttttttgttgctatgtgttcgaatcttaatgttaatcacaccgcttaaccaaatgtcttctacagagttgtccctccgtcccgaaaattttcttcttcactgagaataccaagtttatttctcacctgcattttagattctcatcgacttgcacttagccaagaatctgttacacgaagaagggcaaatttacatgtattttcttcacagggagatttgcaataatgacattgtaaacattaacttttactataatgatataggatccatatttcatagacatagatgggtccatgtttgcagttctaatattataattttaaggataagggaattaatatatacaacgtgtcgaaattttgagtcaatttgccaactatggataaaaaattacaaattcaaaaagaaacttgttgcccgacagatcagcccacacaaagtttgaaggctaaaagcccaatctggggggcgcaagaattccagcccaagttataaaaatcacgaaatatcttggatctgacagtctgacagcaaaaggccacactcctcacaaatctcgtgcgcgccaccgtcatctccggcgaccacctcaccgccggccatgccattctcctacgccgccgcggcctctggctccgcgtcctcttctcgcaagccggttcccgtcgccgcggccgccgcccgccgacccgcgccctcgccggcagcggcggcggcacccgcgccctcgccgtcaaaccctagcgcggtctccgattccgacccctcctcgtactcctcctccggggaggagaccgacctcaccgcctccgatccggcggccgcctccgtcatctcctcctacctctccgttgcgggggatggcgccgacctctccaaggtcgggatcttcctcagctccgcggcgcgccgccgatcgccgccgtgcctgatatgcttcgatcccatccgcccctccgaccccgtctggtcctgctccgcctcctgcttcgccctcctccacctccactgcatccagtcatgggcacatcagtcatcctctgccgcgccttctcccacctggggttgccccaaatgccgcttcccctatcccaaatcccagactcccacctcctacctctgcttctgctccaagacggtagacccagctccggacccctggatcctcccccactcctgcggcgacgtctgtggccgacgtctcaatgcagaccgtgactctggctgtgagcacaactgcctcctgctttgccaccctgggccatgtccaccgtgcccggcaattgttccaaatgctatgtgcttttgcggctcacatcgtgagacgcgtcgatgctcacatcagcgttattcttgctcggggaaatgcaataaacgcctcggctgtggaatccaccggtgtcctgtggattgccatgatgggccttgcccgccttgtgcggtgcgaggaaagcacaaatgtgagtgtggagaaacaatggaggagaggctatgctctgaaagggtgttccagtgcaagagggagtgtggtgggatgttgcagtgtgggaagcatagttgtgagaggggttgccatgctggaaagtgtggaggatgcccactccaagggcgacgaacttgcccatgtgggaagaaagattatccaagtttggactgtgatgcagaggctgccacatgtggatcaacttgcgagaaggtgcttgggtgcgggcggcacaaatgcccagagcggtgtcatcgtggttcatgcgttgagacatgtcggcttgtgatcacaaaatcgtgccgctgtgggggtctcaagaaggaggtacaatatatcacacgttttttatgtcaaaattcttaaaaggaaggaaacaaggaatatgtttaaacccttcaagcagataaattaaacaaatcaattccttggttgtctaaaatgcaaaaagcaattagagaatgtcattgtcaattatgtttgatacattattagttaaaatgccttttaagttacttcacatagttctctatagttctaccgacctatttctatatttggaggcaagtatgcttcaaccgttctgagtggaaacaaaacagagtaaaaataagtaaaatcttctttctttatgttacctcaatctgggccagtatagtaaatactggttgtgcaccatcctagcgctggtattgaatgtggagggctgcagcttttgagtacttctctcttattagaatgcaaaccaaatttgttgttcatgtgatgctgcatcaggtgccttgctaccaagaattgacatgcgaaaggaagtgtcagcgtttgcgaaactgtggccgccatgcttgtagacgacgttgctgcgagggtgattgtgcaccctgcccagaggtaaatcctttctttggggggtgtgatgtattgatacctatcaattactaaagtagatttatttctgtttgtaggtttgtgacaagaggctcagatgtggcaaccataaatgcctatctccatgccacaggtattctcttaatcaaatatacatctttggcttgccatgttgaattgtttagtgctagtactgctaattgcattggtgcataccttttatacatatgttcccattttgagccatatttttgcaatggatgtaccacattgccatgataggttccacaaatttaagaatgctgttttgctctcagacatttgcactttattctcttttattccaaatttcaagactaattcaatgtcccgaatcataaatattcttgtttatccaaactgctaatatatgtgacaatatttttcttcattttgtttaacagaggtgcttgtgcaccttgtcctttgatgaagaccatttcatgcaactgtgggcaaacattttttgaggtggaattcggtacactctaaatatgttgtttgtttcttatgcatcccatgtttgatgatcacagcacttcacttgaacagcaagtttacaggaaaaaaagatattcagttagcattaggagtaccattgttttcatatgattttatgtactttgttaaaaaagttaattcttgtccgatccttccacacaaaacttgccttgtgactcgacttcttgtccaaaattcgtatgcacaactttgtatgtaggtgccctgtgggactgagaagaatcagaagccacccaaatgctcaaaaaaatgcaatatagctcgcctttgcaggcacaaacttgaatgccgggtaaacaattacatatctctgctttaaccttatcattaatgataatctcatctattttgtgtttagaaatttatcctggagcattttggggttctcttctataaattaatcctcagaattttcttcttagccccacaagtgccactatggagcttgcccaccttgcaaactaatctgcggagaagaactttcttgtggccacaggtgtaagctgaggtttgtattttgactattttctgaatgtgccagtgttggtaatttgccccaggagtatatccttctgatatgtaaccatccgctcgcactctgccaggtgtcatggccccattgctcctccaaatcctgagttcacactgaaaccaataaaaaggaaaaagggaaagcatatagactctacacctggaacaccatgcccgccatgccaagaagttgttttggtgccatgctttggacatcatcttggccaagaacgtgcagtaagtttcacccttcctcacacatccacactcatatgtgtgctccgtgattgctgagtgcctgagtgcatacaaattctttctccctgcagatactttgctccaaaaggaggcagtttccatgtcagaatttatgtggtaaccctctcaactgtggcaatcattattgtacgaaggcttgccatgtgttacagattccattgagtcagcctgaaggagatcaatcggctatactgtctcttgctagtgcaagtgcattcgctgagccttgcgaagaatgtaacctgccttgtcaaagggtcagtgttctttattgtccttagcaataactttggtttagttctgtttacagacttttaatgtgaaattttgtgcatggttccacatcttttaactttggtgcagcatatttggtatttaccatttctttcaggtcagggagcctccatgttcacatccctgccctttgccatgccatcttaacgattgtccaccttgcaaagcccttgttaaaagaccatgtcattgtggtgctatggtacacgcttttgagtgcatgtattataacaacttaaatgctacaaaacagcagaaagtaaggtcctgtggtggcccatgtcataggtcagttacttttttcctcggtcctatcatcttttttgaatgttggtaacattttccattgctgattttgtaagtttctttcatctgttctttttgcagaaaattaccgaattgtccccatctgtgctcagaaatatgtcaccctggtcagtgcccatcagttgatcagtgcatgaaaaaggtatcttggtgaaactagagttacctaattggcatgatatcacttggtaggcatatatttacattacataattagcatgacattattagcaacctgttctgtggcttagcgatactacaatttttacttgatgaaactggagtaaggtttggaactttgggatatggtccacttatgttctatatatatttttagcgagatcaatcacagaataccatagttgtttttacctctttcatgtaatgtaattaggcactaggctttctcttttctgtccttgtgcgctatcacaagaactttgctgtttttcttgaagaacttgcttaatgaaggcagagctgcttacactttacctaaaaaaaatcacaacatacttttgaaaatatgtattaatacatgttcctctacctatctgatatccattaaggtcaatgtccgttgtgcatgcaacaaccttaaaaaagagtggatatgtcaagatgttctgaaggaataccgtcagtctggtcgtgacccaaaacaaatacctaaaaatcaatatgcagttggcctacttgcctgtggtgaagattgtgttaaaaaggttaaagctgcagattctgagttgcatctccggaaaattcaggagatcaaggtactggaccttaccatctgaaccaaacttcataagttgttacactgttgtgcaaacaatcagctcttgtagttatttttgcttctgtgcttattggctgtaatttccatgtagacccctgctgtggaagttgaaaatgtgcccaagcgcaggaagaggcgtaaccgtggccaagaaagtgttgaaagctcaaaattccaggtgtgctagatactgatgtgctggtttgttatttgggttcgctaagcatgcgttccttacatgaactttatatattgcaggaaatcaaagctgttgcgttgaaatttctcctggttatttttctgtgcataatcgttgtagctggattgtaccttttgtggaaaggtgtttaccggctttctgattggatgaatgacatggaggagcagagggccaggcagaggcatttgaagcctggaagattgtaaattaaagactacggagggtgtttgtggaatattcacaactgagatgtgcatcggttcaccgtcagggattggtttcggatatatggtagtgaaagatgtcatcattttgttattggagccaagccccggagtttgtaactagtttggtctcttgtccgaagctactggttaatggaaactaaagttatccgtgtcaaaagaaagatatcattttgttctttgtttgccaaacaaaatgtaggaactcaacaaccttgtactgtagtttacatgcatactgtgttcgagtgaattaagggtgtgtttagttcacgtcaaaattagaagtttcattgaaattgaaacgatgtgatggaaaagttagaagtttatatgtgtagaaaagttttgatgtgatggaaaaattagaagtttgaagaaaaaattgggaactaaatcaggcctaattaaatgaacaaattctgtcaagtaattgatatacgataaccactgtaatttctacggtgcacataaatatccatcataataaggtacagccttacaggcgatcacatttctgcaccttttgcagtgttgagttctgttgcagtaataacacctagtgattcaggtaaaattggttttgttagtataataagtttatttttgttttgagagagagtacaaacacaagcgtttccgaggtacagcacctgcgtactcattcctataaacaagtgcacgtaaacggcacattttatttctatgagcactttcaacagactagatcggtatattttaaaattgataaagtcactatcgatgtcttaaccgactgatggtatatattgagattaacgaagtcatcaccgatgtctcgct

SEQ ID NO: 119 - DNA, 1585 bp, Oryza sativa
gccaagctcgaaattaaccctcactaaagggaacaaaagctggagctccaccgcggtggcggccgctctagaactagtggatcccccgggctgcaggaattcggcacgagccgcgtcgcttcccttccttcgcgcggcgctgctccggtagggttttagccggcgatctctcccctctcgcgcgctcggcgactgagaatggtcgaggtggaggaagtcagcaacaagatgcaggtgcagatgcgcctccaccccgccgcggcggcggaggaggaggacgccgacctcccgctccccgccctcttcgacaaggcgtcccacctccactccctcgcctccagctcctccctcgaccaggaagggatccgcaagggggtcgacctgctgcggcggtgcgacgagatggtcagtaaggtcggcctcttctcctccaacgagaccaaggatgacatctccaccgccaacctcaaatacctactcgtaccgtactaccttggggaaatgactgaaagggtagcgcaggaagatcggatcccagtccttaaggcgtcgcaggatcatttgaaggaattcatttctatctgtgaagcactggagcttatatcagaggatgagcttgaaatatctaggcagaagaacctgataccatggcaaatcgaagagcacagaaggttgcacggttcaagcgccaaaaggctgcagaaacaaagctctagaatcaaggagaggaaagaaaggcgtaggcgtcatgagagcagctgcttatcagctcctattgagctgggaggagatcttttgaggatgatggagaaggaaagagaaggcatggttagctactatctcattggctctatcgaaggctttgaccttcttgacatgttaaagaaggaagaagaaatcgttccggcagtaaaagaaggaaagcgaaggatggtaatgcatttgctcgtgaaatgcttgatgaacgtacaaaaagggctgaagcatggcaccataatgctgccaaccgtgcaccatactccaaaccagctgatccaatcacttgtgcaactaaccagtgaaagagagagaatggcagcacaagtttttcagccaagttataggttgccaacgatgagcatagaagaagctggcttacgtgagatgaaaatgatggagaaatggcaagaaagaactgccaagatgattcaagaatcaaactccgcatggcacaaggatggcagtcggtcagcccaagaggacgaggacgccgaagaggagaaagcgagaggatgggatgactggaaggacgataaccctcgtggtgcaggcaacaagaagctcactccctgtggctaaattatatgctatggcaattctattgaacttacatctgaaactgaagctcgtgtaaaaatatgtggtttttactaactttccttactgcggcatttgttgattgctgagtaataatgtgttccatatgtatattataattgtgcatggtttccttctgccaatatatgggcaaccaagtaatgccagaaaagctgatttgagaagcaaaaaaaaaaaaaaaaaaaaaaaaaaaaaaaaaaaaaaaaaa

SEQ ID NO: 120 - DNA, 1284 bp, Saccharomyces cerevisiae
tagtttttcctattttcaaaattgagagcgcaagcaagtgagaagaaaaagcaagttaaagataaactaaagataaaaatgtcaaccagtcgtgaagattctgtgtacctagccaagttggctgaacaggccgaacgttatgaagaaatggtcgaaaacatgaagactgttgcctcctctggccaagagttgtcggtcgaagagcgtaatttgttgtctgttgcttataagaacgttattggtgctcgtcgtgcctcttggagaattgtttcttctattgagcaaaaggaggagtccaaggagaagtccgaacaccaggtcgagttgatttgttcgtaccgttcgaagattgagaccgaactaactaagatctccgacgatattttgtccgtgctagactcccacttaattccatcagccaccactggcgagtccaaggttttctactataagatgaagggtgactaccaccgttatttggctgaattttctagtggcgatgctagagaaaaggccacaaacgcctctttagaagcatacaagaccgcttctgaaattgccaccacagagttacccccaactcacccaatccgtctaggtttggctcttaacttctctgtcttctattatgaaattcaaaactctccagacaaagcctgccatttgcgcaagcaagcttttgacgacgctattgctgagttggacactctgtctgaagaatcatacaaagatagcacacttatcatgcaactgctaagggacaatttaaccttatggacttcagacatgtccgagtccggtcaagctgaagaccaacaacaacaacaacaacatcagcaacagcagccacctgctgccgccgaaggtgaagcaccaaagtaagtattctgataaatctaaagagaaattactaaaaaaaagaaaaaaaaaagaacgagggtgtaataatttgtagttcattattgcaattatatatctatatctatatatgtatataacattaacatgtgcatgtacacacgtaatcgcgcgtgtacatgtctatatgtgttacttgaactatactgttttgacgtgtatgtttatttatctctcttctgattcctccaccccttccttactcaaccgggtaaatgtcgcatcatgactcccgacaataatcccctctggtatacgcagaagcaactttagcttcttaacggcaagaacttttttatgtttgtcgcacctgtatcttcacaaaagttggatacagcaataagaaaggaaaccacatttgtgcca

SEQ ID NO: 121 - DNA, 1424 bp, Oryza sativa
ggagagcgcgagcagagcaagcaaccaagcagcagcagcgatggccgccgcagccacgacatcctcccacctgctcctgctctcccgccagcaggcggcggcctcgctccaatgcggcctctccttccggaggcagcccggcaggctcgccggtgggtcgtcggccccgagcgtgcggtgcatggcggccgtcgacacggcctcggcgcccgccgcgacggaggctagcaagaagagcagctacgagatcaccacgctgacgacgtggctgctgaagcaggagcaggccgggaccatcgacggcgagatgaccatcgtgctggccagcatctccacggcgtgcaagcagatcgcctcgctggtgcagcgcgcgcccatctccaacctcaccggcgtccagggcgccgtcaacgtgcagggcgaggaccagaaaaaactcgacgtcgtctccaacgaggtgttctccaactgcctcaaatcgagcgggcgcaccggcgtgatcgcgtcggaggaggaggacgtgccggtggccgtggaggagagctactcgggcaactacatcgtggtgttcgacccgctcgacggctcctccaacatcgacgccgccgtctccaccggctccatcttcggcatctacagccccaacgacgagtgcctagccgacatcgccgacgaccaaaatcttgaccaggtggagcagaggtgcatcgtgagcgtgtgccagccggggagcaacctgctcgccgccggctactgcatgtactcgagctcggtcatcttcgtgctcaccatcgggacaggggtgtacgtgttcacgctggacccgatgtacggcgagttcgtgctgacgcaggagaaggtgcagatccccaaggcaggcaagatctatgccttcaacgagggcaactacgcgctctgggacgacaagctcaagagctacatggacagcctcaaggagcccgggccgtccgggaagccatactccgcgcgctacatcggcagcctcgtcggcgacttccaccgcacgctgctctacggcggcatctacggctaccccagggaccagaagagcaagaacggcaagctgcggctgctgtacgagtgcgcgccgatgagcttcatcgtcgagcaggccggcggcaagggctccgatggccaccagaggatacttgacatcatgcctacggagatccatcagagagtgccgctgtacatcgggagcgtggaggaagtggagaaggtcgagaagttcttggcttgactgcaagtttcatatacgggggtgtttctaaaaaaaaaagtattgtaactaaattataatatatttgtagaaattttcttttctgatggcgaattaattaaacccattgtgaaggatttcatccctactgttgataggtcgaggctccttctcactagtcctg

SEQ ID NO: 122 - DNA, 1501 bp, Escherichia coli
gtgccacaaattcctaaaatatgaatgcgcatacgtcactatccttttttaatctgccgctcattttacgcatatgtcgggcaagtgagaaacgcatttcaggataatccgtaatttgctggcgcgattcacctgagcgcaacattgagattatttgttaagattgttgcggtcgctttactccataaacattgcagggaaagttttatgaaaacgttaggtgaatttattgtcgaaaagcagcacgagttttctcatgctaccggtgagctcactgctttgctgtcggcaataaaactgggcgccaagattatccatcgcgatatcaacaaagcaggactggttgatatcctgggtgccagcggtgctgagaacgtgcagggcgaggttcagcagaaactcgacttgttcgctaatgaaaaactgaaagccgcactgaaagcacgcgatatcgttgcgggcattgcctctgaagaagaagatgagattgtcgtctttgaaggctgtgaacacgcaaaatacgtggtgctgatggaccccctggatggctcgtccaacatcgatgttaacgtctctgtcggtaccattttctccatctaccgccgcgttacgcctgttggcacgccggtaacggaagaagatttcctccagcctggtaacaaacaggttgcggcaggttacgtggtatacggctcctctaccatgctggtttacaccaccggatgcggtgttcacgcctttacttacgatccttcgctcggcgttttctgcctgtgccaggaacggatgcgcttcccggagaaaggcaaaacctactccatcaacgaaggaaactacattaagtttccgaacggggtgaagaagtacattaaattctgccaggaagaagataaatccaccaaccgcccttatacctcacgttatatcggttcactggtcgcggatttccaccgtaacctgctgaaaggcggtatttatctctacccaagcaccgccagccacccggacggcaaactgcgtttgctgtatgagtgcaacccgatggcattcctggcggaacaagcgggcggtaaagcgagcgatggcaaagagcgtattctggatatcatcccggaaaccctgcaccagcgccgttcattctttgtcggcaacgaccatatggttgaagatgtcgaacgctttatccgtgagttcccggacgcgtaatctcctgcgcctctccacacggagaggcgtttttattgctgcgcaatgttgactcttgtcactggcgaactctgacgattctcccacagcaccgttaatccacgctgtaatgctataaaaataaacaacaaaataccgatggcgattttcgtccaccaggaactcagcgtgccatcaaagtttatgtaagtctgaatcagtccctgaatcgccacgccaaaaagcgtccctaataccgttccaacgccaccgctcaaaagcgtaccgccaattaccactgaggcgatagcatcca

SEQ ID NO: 123 - DNA, 1167 bp, Synechocystis sp. PCC 6803
atggacagcaccctcggtttagaaattattgaagtcgtagaacaagcggcgatcgcctcggcaaaatggatgggcaaaggtgaaaaaaacaccgctgaccaagtagccgtagaagccatgcgggaacggatgaataaaatccacatgcggggccgcatcgtcattggcgagggggaaagggatgatgcacccatgctctacatcggcgaagaagtaggcatttgcaccagagaagatgccaaatccttctgcaatcccgacgaattggtagaaattgacattgctgttgacccctgtgaaggtaccaacctagtagcctatggtcaaaacggttccatggccgtgttggcaatttctgaaaaaggtggtttgtttgccgctcccgacttctacatgaaaaaactggcggctcccccagcggccaaaggtcatgtggacatcgacaaatcggccaccgaaaacctgaaaatcctctccgattgcctcaaccgcagcattgaagaattggtggtagtggtcatggatcgtccccgccacaaagaattgatccaagaaatccgcaatgccggtgctcgggtacgtctaatcagtgatggagacgtttccgccgccatttcctgtgctttttccggcaccaacatccacgctctgatgggcatcggggctgctcctgaaggggtaatttccgctgctgccatgcgctgtctggggggtcacttccaaggtcagttaatctacgatcccgaagtggttaaaaccggcctaatcggtgaaagtcgggaaggcaacctagagcgtctcgcttccatgggcatcaaaaatcctgaccaggtttataactgcgaagaattggcctgtggcgaaaccgtattatttgccgcctgtggtatcacccctggcactttgatggaaggagtccgcttcttccatggtggggtacggacccaaagcttggttatttctagccagtccagcaccgcccgctttgtagacactgtccatatgaaaggaaagccccaaagtaatccaactgcattaatttccctctcggcaactatccccaagaaggttaaaacctggggaaatacatcgccgtttcccttgtcccctgaagttcagactttgggggacttatgttttggttgggtcatagtaactggggtttga

SEQ ID NO: 124 - DNA, 2001 bp, Synechocystis PCC6803
ttaatccacgacggtgcccgttgtttggctacgccggatttgtttgatcgttgcacagaggctctccagcattgccaaggattaattgccgccatgccagtgaaggacaccatcaaaatagttaacgctgatggttggatcactgacacccccgatcgccaaggattgtggggagcccaaacgccccagggttttgacgtggccctgctcaaagcctgccatgacaaaggtaaacaggaaggttgggaagtaacggatgatgcggccctgctggaaaaatgtgggcaacccgtgaaaatagtgccaggggaagatactaacttgaaaattaccacccccgtagatttggcgatcgccgaatttattttggggcagaggtcggcaaaatccgcctgaaaataggcaaatttcggggttcggaaagatcaagctaggatggaagggactttgagcctagcaatccaaggagacttttatccatgaccgttagtgagattcatattcctaactctttactagaccgggattgcaccaccctttcacgccacgtactccaacaactgaatagctttggggccgatgcccaggatttgagtgccatcatgaaccgcattgccctagcgggaaaactgattgcccgtcgcctgagtcgagctgggttaatggccgatgtgttgggcttcactggggaaaccaacgtccagggggaatcggtgaaaaaaatggacgtatttgccaatgatgtttttatttctgtctttaagcaaagtggcttggtttgtcgtctggcttcggaggagatggaaaaaccctactatattcctgaaaattgccccattggtcgctatactttgctgtacgaccccattgatggttcctccaacgtggacattaacctcaacgtgggttccatttttgccattcggcaacaggaaggggacgatctagacggcagtgcgtcagatttattggctaacggagacaagcaaattgctgctggttatatcctctacggcccctccaccatcctggtttattccctcggctccggagtgcatagctttatcctcgatcccagtttgggggaatttattttagcccaggaaaatatccgcattcccaaccacggccccatttacagcaccaatgaaggtaacttttggcaatgggatgaagccctgagggattacacccgttacgtccatcgccacgaaggttacactgcccgttatagcggtgctctggtgggggatattcaccggattttgatgcaagggggagtgtttctttatcctggtacggaaaaaaatcccgacggcaaattgcgtttgctctatgaaactgcgccgctggcctttttggtggaacaggctgggggaagggctagtgacggccaaaaacgtttactggacttaattccttctaaattacatcagcgtacccccgccattattggcagcgcagaagatgtgaaattggtggaatctttcatcagcgaccacaaacaacggcagggtaattagtttacttaatcactgcaaatcgtttgaggtctaggaacgtcttttaaaagccccctagccccccaattctggggggaatagtgttcaaagtcccccaaatttgccggagctttagtgaagacatttggagagtggatcatgacttttcaaacatactctaacgccggagattcaactttgttggtaaatctacattgatcaatcctatgcgacagttattgctaatttctgacctggacaatacctgggtcggagatcaacaagccctggaacatttgcaagaatatctaggcgatcgccggggaaatttttatttggcctatgccacggggcgttcctaccattccgcgagggagttgcaaaaacaggtgggactcatggaaccggactattggctcaccgcggtggggagtgaaatttaccatccagaaggcctggaccaacattgggctgattacctctctgagcattggcaacg

SEQ ID NO: 125 - DNA, 2877 bp, Saccharomyces cerevisiae
gaattcttcgaaattgcgggactcgcttacagttttggagaaagcagatagtattgaacacaataaaggaacaactatgtaaccaaccagtgatgagtttaaaaatttagtgcagatggaaaagaaaaaaatgatctagtatactgtctgcaatcaacaaaaactctagccacaacaaactaagcaatcttccccaaatcaacgatattgtacgattaatatatgcaaagaatagtaaggtaagctatagtaaaagggcaagtttaacctcttctgttatttgatctggtgatgagttctgccagaagagcctgtgcaataattttgccaaaaaaaatggcaaatttgctgaaacacgatattcacgtatatagtgatgataataagcatgctatatatcagtagtatgtattttgcagcttctactttctgcaatgtgatgccgttggcattgagattccaacgaatatacacagatgcctgatttgtttgcgattagttactgtaatagagaaaaaaaaatttaaaaaagacgaaagccccaaaagagacgagtgcaattagtggtgatactttatactatgtttaatatatatacctggtttacctagtgagtatgttcgtaaaaaaataacgtcagtaatggttgttggtcggcagccttggcgaattcttttattagcaatggtttaatcatgtagttacccggcaaatatgtggtggcaaaaatgaattaatgtatattttactgaaaaggaccccattaatgaactcttgggtaaaaagggcacatcaggagtttgtctaaaacgtttatacgagtgatttatttgtgcattatagaggtgagaacaaattggaaagttttaattttagtttaagatggccaccttggaagaattggatgctcaaactttaccaggagacgatgaattagatcaagagattttgaatctttcgacgcaggagcttcaaacaagagccaagctcttggacaatgaaattcgtatttttagatctgaattgcaaagactgtcccatgaaaacaacgttatgctcgagaagattaaggacaataaggaaaaaatcaagaataatagacagttaccgtaccttgtggctaacgttgtcgaggtcatggatatgaatgagattgaagacaaagaaaatagtgaatctactacacaaggtggcaatgtcaacttagataacaccgctgttggcaaagctgctgtagtcaagacttcttctagacagactgttttcttgcccatggtcggtttagtagatcctgataaacttaagccaaatgacctggtaggtgtgaataaagactcgtatttgattttggatactttaccctctgaatttgattctcgtgtaaaagctatggaggtagatgaaaaacccacagaaacttactcggacgtgggtgggttggataaacagattgaagagctggtggaggccattgtgttacctatgaaacgtgcagataaattcaaagatatgggaattagagcgcccaagggtgccctaatgtacgggcctccgggtacaggtaaaactttattagctcgtgcttgcgcagctcagacgaatgctacttttttgaagctggcagcacctcaattggtacaaatgtatatcggtgaaggtgctaaactagtgcgcgatgcttttgcactggccaaggaaaaggcaccaactattattttcattgacgaattggatgccattggtactaagagatttgattctgaaaaatccggtgatagggaagtgcaaagaaccatgctggaattattgaatcaattggatggctttagctccgatgatcgtgtcaaagtcttggcggctaccaatagagttgatgttttagatcctgctttgttaagatcaggaagattggatagaaaaattgaattcccactcccatccgaagactcgagagctcaaattttacaaattcattccagaaaaatgaccactgatgatgatattaactggcaagaacttgccaggtctactgatgagtttaatggtgcccagttaaaggcggtaactgtggaggcaggtatgattgccttaaggaatgggcaatcttccgttaaacacgaagatttcgttgagggtataagtgaagttcaagcaagaaaatcgaaatcggtatccttttatgcataaaaataataatattttgatttatcaagccgccattcacatatctacatattagaacaatccttttatttaaagtcgcgtaacttccttattattgatactgtatatggctaattgtatactacttattatttgatgaaaccgaaagcgtagacacaagtatatattcattggcgtttgactttttttttactgtattttcttttcgttggcaccttcgcaatttcaaggatgcattgaaggaaagagaaaagcgtaggagaacaagacgcatcgacggctacgggtgctttgagatttaacttgcagagctccatatacagcacacatctgtagatgatttagtgacatattaataggctgcagaaagggagtaaaacaggtagaagtaagatatcggcaccattctacttttcatataacgattgattaatcttaccaaagcattaaatttaaacaggcttgcagactgaaggagtactcataaagcaaccggaccaggtaatatttgttgtagtattatgggacagtcttcttcaatcagttccagttcagtaacgaagagggttcttcccactcaaaaaaattcacaaatagcaaagatattttggcatatttcaataacaaagcacagcaacaggtcactattccagaattagtcagttttaagggaaatttgcaaattgaagatct

SEQ ID NO: 126 - DNA, 6001 bp, Saccharomyces cerevisiae
gtttctgggcttactttattcaacaaattattagtagacgtaaacttacttgttgccgcggtacatatttcaccattagagagtttattgtcactacattggccagtcattcaatgcccgcgtgcaaagtgatctaagtcgtttctgattccgaaaaattttgaaaaattttaagatgagatgagctaaacccttctatacattagcagcaactgaagaaagctcagtaaggttcgtctattcatttttatttaaagctattagtatctactactacagtctgaatcaaggaccgtttaatataaaaaacacacctgtactgttgcaaaaatggtagcttccaccaaaagaaagagagatgaagattttccactttcgagggaagactccacaaagcagccctctacctcatcattagtaaggaacactgaggaagtctcttttccaaggggtggtgcgtctgctttgactcctttagaactgaaacaagttgctaacgaagctgcaagtgatgtgttatttggtaatgaaagtgtcaaagcatctgaaccagcaagtagacccttgaaaaagaagaagacaacaaagaaatccacttctaaagattccgaggcctcatcagcaaactctgatgaagctagagctggactaattgaacatgtcaactttaaaacgttgaagaatggctcttctttgcttggtcagatttctgctatcactaaacaagatttatgtataacattcacagacggaatttctggttatgtgaacctaacacatatctcagaagaatttacttcgattttggaagatctggatgaagatatggatagtgatactgatgctgctgatgagaaaaaatccaaagttgaagatgcagaatacgaatcgtccgacgacgaagatgaaaaattagataaatctaatgaattacctaatttaagaaggtactttcacattggtcaatggctaagatgctctgtcatcaagaatacctctttagaaccatcaactaagaaatccaaaaagaagagaatagagttaaccatcgaaccttcatccgtcaacatatacgcagatgaagatttggttaaatccacgtctattcaatgcgcggtcaaatccatcgaggatcacggtgctaccttagatgttggtctgccaggctttacagggttcattgctaagaaggattttggcaattttgaaaaattattgccgggggctgttttcttaggtaatatcaccaaaaaatccgacagatcaattgttgtaaatacagacttttcggacaagaaaaacaaaattactcaaatctcctcaattgatgccattatccctggtcaaatcgtcgacttattgtgtgaatcaatcactaaaaatggtattgccggtaaagtttttgggttagtatccggtgttgtcaacgtatcacatttaagaacattttccgaagaagatttaaagcataaatttgttattggttctagtattagatgccgaattattgcttgtttagaaaacaaaagcggtgacaaggtcttgattttgtcaaaccttccacacattttaaaactagaagacgctttgagatctactgaaggtcttgatgcattccctatcggctacacatttgaatcatgcagcattaaagggcgtgattccgaatatctatacttagcattggatgatgatagattaggtaaagtacattcttcaagagttggtgaaattgaaaattcagaaaatttaagttccagggtccttggttatagccctgttgatgacatttatcaattgtccactgatccaaaatacctaaaattaaagtatctaagaacaaatgatattccaatcggagaattattaccaagttgtgaaataacttccgtctctagttcaggtattgaattgaagatatttaacgggcaatttaaggcttctgttccaccattacacatttcagataccaggctagtttatccagaaaggaagttcaagataggttctaaggttaaaggtagagttatatcagttaattcaagaggtaatgtgcatgtcactttgaaaaaatcattagttaatattgaagacaacgaattaccactggtttccacttatgaaaacgccaaaaatatcaaagaaaaaaatgaaaagactttagcaactattcaagttttcaaaccaaatggttgcatcatttccttttttggtggtttatcgggatttttacctaattctgagatctcagaagtctttgtgaagagaccagaagaacatttaagactcggtcaaacagtaatagtaaaacttcttgacgtcgatgctgacaggaggagaattattgccacatgcaaagtttcaaatgaacaggctgcccaacaaaaagataccattgaaaatattgttccaggcagaacaatcattactgtccatgttatcgaaaaaaccaaagattctgttattgttgaaattcctgatgttggcttgcgtggtgtcatctacgttggtcatctctctgattccagaattgaacaaaatagggctcagttgaaaaagctcagaatcggcactgaactgactggtttggtaattgataaagatacaagaacccgcgttttcaatatgtccctcaaaagttctctgattaaagacgctaaaaaggagactcttccattaacatatgatgatgttaaggatctaaataaagatgtaccaatgcacgcttacattaaatccatttctgataagggtctctttgttgcatttaacggtaagttcattgggttggttttaccaagttacgctgttgatagtagggatattgatatcagcaaggcgttttatattaaccaatccgttaccgtctatttattaagaacagacgacaaaaaccagaaattcctattatctctaaaagctccaaaggtcaaagaagagaagaagaaagttgaatctaatatcgaagatcctgttgattcgtctatcaaaagctgggacgatttgtctattggtagtattgttaaagcaaaaatcaagagcgtcaagaaaaatcaattgaatgttattttagcggcaaatttgcatggcagagtggacattgctgaagtgtttgacacgtatgaagaaattacagataagaaacagccgttgagtaattacaaaaaagacgatgtcatcaaggtaaaaatcataggtaatcacgatgtcaagagccataagttcttgccgattacacacaaaatctcaaaggctagcgttttggaattatccatgaaaccatcagaattaaaatctaaggaagtgcacacaaaaagtcttgaggaaatcaacattgggcaagagttaactggctttgtcaacaattcatcaggtaaccacctatggctaacaatttctccagttttgaaggcgagaatttctctactagatttagctgataacgattcaaatttttcagaaaatattgaatctgttttcccattaggttcagccctccaagtgaaagttgcctctattgaccgcgagcatggctttgtcaatgccattggaaagagtcatgttgacataaatatgtccacaattaaagttggtgatgaattgccaggtcgtgttctaaaaatagctgaaaagtatgttttgttagaccttggtaacaaagtgactggtatttcctttattacggatgcgttaaatgatttctccctaacattgaaggaagcttttgaagacaaaattaacaacgtcattccaactaccgttttatctgttgatgaacagaataagaaaattgaactatcccttcgtcctgctactgcaaaaactcgttcgatcaaatctcatgaagatttgaagcaaggcgagattgtagatggtattgttaagaatgtgaatgacaaaggtatttttgtttacttgagtaggaaagttgaagcctttgtccctgttagtaaactatctgattcttacttgaaggaatggaagaagttttacaagcctatgcaatacgttttgggaaaagtcgttacatgcgatgaagattctcgtatttctctaaccctaagagaatccgaaataaatggtgatttaaaggttctaaagacctattcagacattaaggctggtgatgttttcgagggtacaattaaaagcgtcactgattttggtgttttcgtcaaactagataacactgttaatgttactggtttggcacatattactgaaattgcggacaaaaaacctgaagatctttctgccttgtttggtgttggggacagagtaaaagctattgttttgaaaacaaatccagaaaaaaaacaaatttcattgagcttgaaagcgtctcatttctctaaagaagccgaattggcttctactaccaccaccactactactgtggatcaactggaaaaggaggatgaagatgaagtcatggcagatgctggcttcaacgattccgacagcgaatctgatatcggagaccaaaacaccgaagttgccgataggaagcctgaaacatcttcggatgggctatccttgagtgctggttttgattggactgcttccattttggatcaagcgcaagaagaagaagagtctgaccaagatcaagaagactttactgaaaataagaaacacaagcacaagagaagaaaggaaaatgttgttcaggataagaccattgatatcaacactagggcaccagaatctgttgccgattttgaacgtctacttatcggtaatccaaattcgtccgtagtgtggatgaactatatggctttccaactacaactgagtgagatcgagaaggctcgagagctcgcagaacgtgcgctaaagaccatcaacttcagagaagaagccgagaagttgaatatttggattgcaatgctgaatttagaaaatacttttggtaccgaagaaactttagaagaagtgtttagcagggcttgtcagtatatggactcatatactattcatacaaaactgcttggtatttatgaaataagtgaaaagttcgacaaagcagcagaattattcaaagctacagctaagaaatttggcggcgagaaagtttctatctgggtatcgtggggtgattttttgatcagccacaatgaagagcaagaggcacgtactattttaggtaatgctttgaaggccctaccaaagcgtaatcatatcgaggttgtccgcaagtttgctcaattagaatttgcaaagggtgacccagaaaggggtcggtcattattcgaaggtttggttgctgatgcgccaaagagaattgacctgtggaacgtttacgtagaccaggaagtgaaggcaaaagataagaagaaggtggaagatttatttgagagaataataaccaaaaaaataacaaggaagcaggctaagtttttctttaataaatggttacaatttgaggaatctgaaggtgacgaaaagaccattgaatacgttaaagctaaagctactgagtatgtcgctagccatgaatctcaaaaagcagacgaataattcctgatggatttttaactgtaaagtaatataaatggctaagtttgtaaagtatatttgtaaagtacatagaatgtaaagtttcaagaagcaatttctatcgatcaatttagctttgacggttcgtagagctccttttcttaaagttttagttccgcttctcgcttcttgattacaagatggttccgtgttaacgaagattgagttctatgtattttttatattcacacgctaaaatcacatatttattaaataatgaagtaaattttaaaagcacttttttcaaccagagtgctctgtttgatacatatcaacaaaatccattaaaatatctggtttgaaaggccactccatgaataatttcgttagatatataaactcgtcatttgtcaaatcaatcggacacttttttagcagatctttgtcagtgattctactattaaaatattgttggccaccatgtcccagcgagtccatgaca

SEQ ID NO: 127 - DNA, 6001 bp, Oryza sativa
caattctgcatcatttcggggtagtatgtttcattggagtgcttcagcagcttcatccaaactaaactcacaacagctgcctgtgatggaggtgcccatctaccatgatagagttactcctggacctaataatctgccctcctgtgcatataatgtatcctccactcagggtgagttgagatgatgagttacctattttaacctcacaatacaccttaatttttttaattctttattggcttgattttggcaggatataaccaatatgaaaactgtatgggtgctgctaactttgctcattcgttggctgataaacccaagcagatgcctgaaagattagcaaacaccatttttacctcatgtgcatcaactctaccgaaatgtagccctagtattgatgtactgcatattggccatataaaagaacatttctcaggtgagtttacatcccctttcttatgtctgaaacagagttgagctgaagttatttggcatcataaacactatggtcaaattttgccaggtgatgcgtatcaaaatgatagttcacaaccatcaacctctgggagttctagttctttgtcagcagtgtgggatcaaacaacatgttctagtgcaatgagaacacttccgatggattctttctcaacagtgaacggacaaaacctttccacaaacaataaaagtttgtatcccacaaccggtcagggacctttgttgcaacaatacatagaatgtgagatgaagcaagagacgtggagtcggtcactagagcaatcagatcagtcaaacattaccactggaaaccgtgacttgtatcatgctcaaattcatccgtacatcaatggagagcacaaacgggatcgatgcattcaaatgaaagaaaaacttgggcatacttctgatcatgaaggtttctccagggagaaaagctcaaatttaagcaaccactttatgcatcatcagcagggcttcatgactaattatggtgcttgtagccctgtaagcaagacagtggatagagctgaacagacatcaaatagtactgtatcaaagccgacttcacctgcttcagatggatcttctggcaagcattatccagcaaaacgcttgaaagttgatgttccccatcttgtccatgtcaatgaaatggaggcttcaaaggaacaacaacctgctgccaatgagacttatgcatctgctgaaacagtacaatctgaagtcactaattcaccaacaaaatcaccatgttgtacttccttgggggacaacattgcttgcaccgataatgtacatggaatggatatggtcagattgtcggggagtgctgtacaaactgaagaagaatttcgtcgtgaaaatagtgacattgagatgaaggatgcaaaggttgatttattggaccaaacattgtcaggggacagcctgagggcaaggaagagaagaggggcctcagtactttatgcattaacttctgaggagcttaaagatcacttgtgtactctgaaccatgatacttctcaggtgagtgaataacctgttggatcttgtatgatttatctagtattgtaaagcacttgattattattggttgatgtagtctagagaaattttcaaactgagcagctgcaaaattaactaaatattatgtactttcaattgattttcatttggtactaagattttgggttttgttgtcactcaagctttcttgattatattgtacagagtgtgtgcttgttttaagcaaagtttatatctcttaacatgattaacttattttttgtagagcaaagtgccgactgaagagctgctatcagttgaaggcttgcctgatcagaacacatgcaatttatgtgggatggaaagactcctctttgagccccctccacgattttgcgcgctctgttttaaaataattaattctacaggatcctattatgttgaagtggaaaatggaaatgacaaatcttcaatatgtggcagatgccaccatcttagtagtgccaaagccaaatatcagaagagattcagctatgcagagacagatgctgaggcagaatgggtaacatatgcttctcttatttctctctagtcatttggaatcatatacgaattactcattttttgtttaattatgccttttcagtgggtccagtgcgataagtgcaaagcttggcagcatcaaatctgcgcactttttaaccccaaaatcgtggatccagaggctgaatatacttgtgcaaaatgtttcttgaaggaaaaggataatgaagatgttgattcacttgagccatctactattctgggagcacgcgagttaccaagaactagactaagtgatcatattgagcaaaggctttctgagcggcttgtgcaggagcggcaacagagggcaattgcttctggaaaaagtgttgatgaggtagttgtgttatgcttttcttttataccttgtcccgtgtacagaatatgctggtgttgcattctgctaccgttgaacaggctacctcactgttaacctattgaaccacagccaaaagttacatacgtctttccaattgcatttttgtgcttcttgctctatgtgctggattgaaggttacaagtaacatgttagtccttatattatagtcttctaagttgacttagataattcattacatgaatgcatctttactgtcatacgtttctttttattttttacaatgtactgatggcatttcacttaatcatgttcttaatacttctcttggtgcatctagcaatgtgtatttatggcttcaggattgcagctgattacacatgaattcatctttggaacacatgttgatgaccatatatttgttgcgtttcagtatcctttttagtgaaactacttttttcttctttttccttgcattttattggattccgataaaagttggttctgcatattcatctgatttagctgaccaagatgtcatattacaattcatggtcaaacttggaacataaacttgtggatgctttgcttagtcttatctgatcatctatgctgatcttaatgttatttttctgcctctaggatttttattacactgtaatatactggagaaacttattgggcgaacttttatggtccaattattaggtaccaggagttgaaggtcttactgttagagtggtatcttcagctgatagaacactgcaagtccaaccacgtttcaaggatttttttaaaaaagaacaatatcctggggaatttccgtacaaatcaaaggtgattatgtgatacttatactttactaatgctattattataacatccatttaaattatgctttcattatttagtggataatgtgggttaccatttccgtgttttgtgcttgtgcaggccattctcttgtttcaaaagaatgaaggtgtagatgtatgcctgttcgccatgtatgtgcaagagtatggttcagcctgcccatcaccaaatcaaaggcacgtttatcttgcatatattgattctgtcaagtacttcagaccggaaatcaagtcggccagtggagaagctctccgtacctttgtgtatcatgaaattttggtatgagaatgcataatcattaaacacttagtgttcttgatcttgatttcagtttatggatctcatgttggtctgattatcttccaatctgttttcccccagattggctacttggatttctgcaagaaacgagggtttgtaagctgttccatatggacttgcccatctacaaagcgtgacgattatgttttatattgtcatcctacaatacagaagatgccaaagtctgacaagcttcggagctggttggtcttcatcatcttttacagtcaatcctaaaattatttatgggccttcatttgataatcttttcaatatatttaggtaccagaatttggtaaagaaggctgttaaggagggggtagttgtggaacggaatacactctatgacttcttccttcagcccaccaatgaatgcaagaccaatatctcagctgcatggttgccatactgtgataatgatttctggcctggggaagcagagaggctccttgaaaagaaagatgatgacacctcacagaagaaagaaactcaactaggaaggcttctacgggttgccaaacgtgatgaccggaaaggaaacctcgaggatattttacttgtgcataaggttggttgtttaaatcatggtgctccctttcttcagaattttttttcgccgggccttcttcagtattttaggcacttgaccccttaattttcattgttggcagcttggagaaaggttgcgaaccatgaaagaagattttttaatgctttgtctgcagcaattttgcaagcattgccaccatcctattgtatctggtagtagttgggtttgcaccagctgcaaaaacttctttctttgtgaacggtaagcattcagtcatgtaaacttttgtgaccatatagaatgcatttcccatactgaagaactttctggaacagcactaggggaaatgtctgctgttggtaaaaatatataattgcacatggcacttgcatagttcaaccattctagcttatacagtgaccgtttgcctgtcaaattgcaaaatgaatctacattcctactcttttgttgttattcaattactctttgtcgttaaggcacccattatttatgatgccattcttatttgtcctcgtagttgttatgctgaggagctgaatacccctctgaaggacaggcacccagctacaacaaaacaaaagcatgcatttgaaagagtacgtatatgaattcatctatttaaggtagctacaatctgcctgcatggaaatactaaccagattactaatctcctctgacagatagaggaagaacctcttccagaaacggatgatgtagatccaacaatggaaagcaagtactttgacagcagaatagatttcctgaagcattgtcaagacaatcaataccagtttgatactctccggagggcaaaacattccacaatgatgattctttatcatctacatgattcaacttgttcttcttgtcaccgtgccatggatcaatgcttggcatggcggtgcttggtttgcctaggctgcaacttttgtgattcatgctataaacaagacggtgaaagtttgcatattcataagttgaggcagaaaaaagaccatcacgtattgcagaagtacactctacaggtatccttaaattggtagctgaatctttttcatctcctatttgtgtttttcatgaatgtttattatgcactcgaaattaacatcttctgattttttgggaacaactctggggatctgatttttttttggttgtttgctcttcgcatgattatatttggcataaactgtagaatataagtgagttgcactattattatttgttccataattttatccttttggtttaatcttgagcatatgtgtgaagtgtatgcttcactattcttatgtgttgcttcatgttatgttttgtcccagtattttgtgactgcatatccaaattttcaatcaggatgaaaaatattctatgagcttttagattctaatgtggtaattatgtggtttcatcccaaatattattttctgctagtgatatttacggtgcctcttgctaatgaattggatgctttcaaagcaggactaccttgaaggcttggtgcatgcatcaagatgttttgatcgaagttgcacttccaaactttgtttgacgttaaagaaactgttcttccatggtgtacgatgtcatacccgtgcccgtggtggaggaggttgccatatgtgtgtattcatgtggaaactgctgttcacgcactcactgctttgtgacaatgcagactgttcagctcccagatgcaggtaaagtgtgcatcacccgcaatattgatctgccttccggagttgtgaaataattttcacaattttattttttccaattggcttgttaattatctttttcccttttaa

SEQ ID NO: 128 - DNA, 6001 bp, Oryza sativa
ttagcgggttcactgctaatggctatggttgtattaacttatatttttttgttgttaagggtgtaatgccgctgcttgcagccataactaaggctatagggagcgttcttctggccggctacaatggttgcagttgtagctacgcacagtgagtgcggcactattcgtgtcgatcatggtgcagtcacaaaagcaacagccgaaaatgctcattaaatagagccgcttatttttaagttaattagaactgatctaaaagttttacatataaattatattttggttgatactaataaaaacatgatggctggaaacaacaagacataaattttggaggaaaaaccgctgtaaaatacactccgtctcccacaagagaacacgccattttggcaggcgtttccccctccgaactccaccgaggtgatccctcccatggcggccgttagctacgagtagccgcggagacggaagactctcccacctagcaaaaggactagtagcaatccagcgaactcaaagccacccctcctcgtctccctcgcccaagtccacggcgagccgcggcggcggcggcggcggaggaggaggcgcagcgagtgggaggggaggcggaaaatggtggtggtggacgcgtcggagttcggggcggaggggttcgacccgaagcggtggatcaacgcggcgctggacgcgcgccacccgtcggagccgctcgaccgcttcctcgccgacgccgaggagcgcctccgctcggccgccgacgacgccgcggccgcgctcgagcgggacagcgccgacgcgctccgccgcgtcccgctcgcctgccgcgacgcgctccgcctccgcgacgacgccgtctcgctccggtcccatctcgcctccgtcctccagtcgctctcccaggtgcgcccccgctcgcctgctagttggatctggatctcacagttcactcgtgcacaattgtacgtgtatcacgcgaaacccagatcattttggaggattacgaacttgcgataatagttggtgcgaatgagcaaatgttgaaccaatttggcacaataggttttagtttgattcatttatgcgtatgattcagcctctggccgcttttagtaccccccgttttttcacttggatctggatctcacgtactgtatttggtcatgtcaattttatccttgtacgctttgcattgaacagtgcgtacaactagaactgtatttagtcatgtcaattttatcgctgtacgcttttatcaaatgatatgttaatttgatcatctctgttaactgaaactgaagtcagaatttgcgtgggcttggcaaaaccaagctggagctctgttggcaaaatccttgcatgtgtcgggatgttataatgctgtgtacttatgcaatgcagttatgtgcatgtaaactttgagtatgctgtagaggacattcaaatccagcagttcagtgatgcccataaaactatgcctatagtctattataatgggataccgtcacttatatcatttagttcatataggtgataggtcaggatgctacatcaaatcacaagcaaaacattttctcctgtagcatgtacttcttgttacgtgtagcgttatcttctcataacatttagcttgacattttgtagaatacactggaatgaatttgctagcactagaacttttttttttgggtactgagtgattccttctttgtaacggccaatgctgaatactgggtgttaatgaatgaaatatgacatacatatgcatgtatgatcaactaactaggtattcagtcccatctacatttcataaattctgtattactgatgatgatgatttcttcaatcaggctgagggttcatctgcagagtcaataactgcactagcacgaattgatactgtgaaacaacgaatggaagcggcgtatgcaacattacaggtaagttgtatgtggactatggtgcatgttactgaagtaaatgcttcactcacagtggtaggttatcttttaatagatttaacagcttgttggtcggaatgccaggatgcggctggactagctcagttgagccaaagtgttgaggatgtattttctagtggtgatcttccaaaagctgcagaaaccctggcaaccatgagacattgcttgtcggcagttggtgaggtattgtactctctcacacaaacatgcacagtacactgagtttatatgcagaagctatttgttttgcttatataaaagttgctttcaggttgcggagttcgctaatgtgagaaagcagcttgaagtattggaagaacggctagatgacatggttcaacctcgtttggtggatgcactttctaaccgcaaggtttttcttactaatctcatttatatttgttaaacagtagtacaggcatctctatttcatctaaagcctacaaattttggttggaaggtcgatgctgtgcaagatcttcgtggaatactgatacgtattggcagattcaagtcactggaggtgcaatatactaagatccatgtcaagcctctaaagaaactttgggaagattttgatctaaaacagagagctaagcgggtagagatggagaagtatggtggagaaagcataaacagtctctcatttgctagctggcttccaaatttctatgatgagacactactttaccttgaacaagaatggaagtggtatgttcattgtaccctgttgtcttttgttctgaatcagcaatgtttgcccttgtaaacagaagccagtttttggcagcatcttttagctgcattcggacaatatttttgctccaccaaaaattaatggatgttctacaatgctaatgctgaaggtgcctgactgctttccctgaagaatacaaatcactagtcccaaaagtacttgttgaaaccatgagtgagttgaattcaagttttgtctctcgtgtcaacctagcaactggagatgctgttcctgaaactagatctgttgcaaaaggtaatgcataaacttctcgtattatttcatttttgtatgtctatactaatttcatgattgaattacatgttttatttttctctgttcaattaaaaaaggatattacttgtttgccacatatgcgtacttctttcgtaacaataaattgattttatgtcctctgtacccaggtatactagatgttttatcaggtgacttgccaaaaagtaccaaattgcagaataagcatcttggagcactgatcgacctgcacaacatgacgggcacttttgctcggaacatccaacatttattttcagagtcagatcttttagttctgctgaatacattgaaagctatttattccccatatgagacttttaaagcaaggtaaaaaaaaaacttgtgaaaaattctgttgcatgcagttaactgcattggtgagattttttttgttgctattgctgtagtactcagccagtggtgtttcatgctatgtaggtatgggcaaatggagcgtgctttactttctgctgagatggctggtatagatatccgtggggccattgctcgtggtgtgggtgcacagggtatagagctgagtgaaactgttcgtagaatggaggaatccatcccacaaattatagtgcttcttgaagcagctgtcgagagatgcattagtcttactggtggttcagaggcagatgaactggtattggctctagatgacattatgctgcagtacatatcaaacctacaagaaactttaaaatcccttaggattgtatgtggggtggataatactgcacatagtgattcctctaaaaaggaagcaggactagagaaaaaagaagcacaacgattggtcgatgtctctgaagaggaagaatggtctattgtccagggtgctttgcagattcttacagttgctgattgcctaactagcagaacctcagtttttgaagcttctttaagggctactcttgccaggattggaaccaacttttctatttctggttttggttctagcctagataaatcaactgcagcaaatggtgatgagaatgcagaagtgcctatcacagggagggcagcacttgatattgcagctattcgcctcaccgatctaccagacaagtctaagaagctcttcactgtactagaacaggcaagttatatatttttaaattatcttgctagtgtcacaacactagagttatcacatgtttctctgatttgtttgaacagcctgattgcaaacttaggtggtagtattaagctagattatctggttttataggaaattcggagatcttttttagctttccttttctattatgcatttttttaagctactcatatgtggcatagaacctattttttgacctataatttcccaagtatcacaagtaactctttgtttgtcttcatggctaatttaaagataacatttctgttatacagtcaaaagatccaaggttccatgctctacctctgacatcacaaagagttgcggccttctcagacacagtaaatgaactcgtctatgacgtgctcatatctaaagtccgacagcgtctcaatgaggttgctcgcctcccaatttggtcatcggtggaggaaccaggtggccttccccttccaagcttcagtgcctacccgcaggcatatgtgaccagtgttggggagtatctcctaactttaccccagcagttggagccacttgcagaaggtatctcaggcggtgaggctggcaacgaggaggctcagttctttgctactgaatggatatttaaggtaatatattcaaagcattttttttcatcatgctgtgtacattcgcaacataccatcgacaaaaccattcatacttcacactgcgactttcgcaaattccgtacagaagagttgaccatttagaactacatgcattgcaactgaatacaacattacataaaaccccaataatctgaccacaacataaacaccgaacccaaatcttttgatgaattaatctagaactgtctctgatctctgtttccatgatgaaccaggtcgcggaaggcgccaccgcgctgttcatggagcagctgcgagggatccattacatcaccgaccgaggcgcgcagcagctggcggcggacatagagtacctgagcaacgtcctctcggcgctgtccatgccgatcccacccttcctcgccaccttccacacctgcatctccaccccgagagaccaggtccgcgacctcatcaagtctgacggcggcagccagctcgacctccccaccgcccatctggtctgcaagatccggcgcatctcgtcatcagattagtgaaacacaaaggttgccttggtttgttcacgccctgtaacatcgtgtgcatccatccctccaccgttttcccacatcctgagcaaactgatcctgccgacgagtggttgacagtttgacatgtgcttgtaattctttaccattctgcatcttggctacagagttttgcctgtgtaatcgtattccttacagatagagaataatcattagtatatcatcatagaagaaaattctacactatgtgtaaattcgacgaggaaaaaaattcagtcggcaggtcgtgcaagggaaatggacggctctggctttgtttacccaataactaatgttggcagcaacttagtatgtcatattgccatgctctgaccagtgtgtcgccttcacatctccaggattccaagcagtccaatcttgcgtgagccgtgagtccagcagccacgacactacaagccatcggaggaaaaccccactggctacgaaaatggcacgcaaaaaatacgagccatttgccaatttcaccaggacggagagatatttcacttcgtctccatgggctttggcttccgtctaagtgggctcatctcttccttatcgacgctgtgggcacggaggcggccacgtcgcccccatccccctctcctcctcttcctccccaaatccccacgcaactgcgcaccggagagagagagaga

SEQ ID NO: 129 - DNA, 1179 bp, Zea mays
cccacgcgtccgcccactttcattgagagacgaacacgcgagtagagaatttctcctgcctgctcacgaccgccctctcgccggtcgccggtcgccgctcgcaacgcaagtcggaagaggaatctctccaagctccaatcctccgatcctgccccaacccaagtcccctccaccaggccgcacacctccgccgcccggcgcgaccttgcatccaccagcctgccctctccttcgcgtgaggcggccccggcgaccgcgtcggcagtgcaagaccagaccgaggcttctcccgttggaaggttccagccatggcgagcgccgatctgctgcggaaggaggaggagttctactcctccctctttgattccgcaaaaggcgacggcgtcaagtcgcgctcgcaggtgattgagaggaagattgaatccctcgaggacatggccaccaaggtcagcaaccggagatcaagaagatggttgaacgaccgcttgctgattgagcttgtcccacgccttcatgttgaagaaatcaaaggcctctttgctcctccaccatggggtgaggagctgcccttgtcagcattctgcaggacaagtgttagtgactgggaggccttcaggagcatcgacatggatgctgaggcaagattgatgcaacacatgaaacgatcatccgaaaaacaaaggactcatgtcgacgaagatgaattgattgctctgaatgcttggcgtcgtataggtcgccaaacaagagaagctattaagaaaaaatttctacctgatctacttcaaatatatgaagaacaggttagggccttcattgaaggtactggtgacagcgacgtgcttgtgctgaatgtccaggacccgttccagaggctgcttctgcacggtgtttgtgagttctataacgtaacctcaatgaccacaagcagtgtaagggacgggaagccatggaagagcaccaccatcaagaagaggcatgtcaccggtcttcctccgagaatcacattagttagcttcctgaggatgaggaagaattagtcgtcccagtaacatgtggatgtgagggtcctacactaattcgcctggatgtgtactaaaaagacaaatttgttgctttaggtcgcatctagcatgtaatcaaatgtaaaatatccatgtcaaatgtaaaatacattgc

SEQ ID NO: 130 - DNA, 939 bp, Zea mays
cccaaattcttgggtggacccacgcgtccgcccacgcgtccgaaaaaccctcgctccccacaacccgccgccgcccacgccgccgcctgtaccagcggcgtcaagatgagtcggcaccctgaagtgaagtgggctcagaggatcgacaaggtttacatcactgtacagttacctgatgccaaggacgctaaggtcaatttggaaccagatggtgtcttcacattctctggcagtgttggtacaaacttatatgaattgaaactagatctgaatgacaaagtaaacgttgaggctagcaaaataagtgtgggtgtcaggtccatattctgtattgtagaaaaagctgaggccaaatggtggaagaaacttgttcgagatgatcaaagggcacctcactttgtgaaagttgattgggacaaatgggttgacgaagatgatgatggtgctgatgtcaacttggatgggatggacttttcgaattttggcggcatgggtggtatgggtggcatgggtggtatgggtgatatggctggcttgggtggtcttggtggcatgggtggaatgggcggtatgggtggtatgggaatggatgattttgaggatgatagtgatgaagaagaagtgtcgaaacctcaagctgccggacatgctgctgaggccgagaagactgagtcggcggaagccaagactgagtcggctcagagcagttgaagatgctttcgacatgatctaaactagttgtatcgtcaagttaattctgctgaatcgatggacaaacttctacgttgttggcactggccgatcccagtgacttgccctaaaatttacgttctgtctttacatgggcatcctagtgttgtgctcatcacattattgatattgtttctgtgatgcttcctttggtcgacaatcatgtgctggagtttggtttaaaaaaaa

SEQ ID NO: 131 - DNA, 2019 bp, Zea mays
ctctctctcgaaccttcttccaaagcacccgaaccctagtgatctcggaaccctagccgcgcgcggatctcggcttttccccttcctccacgccagccatggacgaggacttcgagatgcctcccgccggcgccgatgagatgatgggcgacgacgagatgggcgacttcggcggcgacgagggcccggtgatgaaggtgggcgaggagaaggaggtcggcaaggaggggctcaagaagaagctgctcaaggagggcgagggctgggagactcccgaggtcggcgacgaggttgaagtgcattacacgggcacgctccttgatgggacaaaattcgactcaagccgtgatcgtggagaacccttcaagttcaagcttggacaaggtcaagtgataaagggttgggatcaaggaatcaagaccatgaagaaaggagaaaatgctatttttaccattcctccagagctggcttatggagcatctggttcacctccaactatcccacccaatgcaaccctgcagtttgatgttgagctgctttcatggaccagtgtcaaagacatttgcaaagatggcggcatattcaagaagatccttaaagagggagagaaatgggagaacccaaaggatcctgatgaagtacttgtgaaatatgaggcccgtctggaagatggtactgttgtatccaagtctgagggggttgagtttactgtgaaagatggctacttttgtcctgccctggccaaagctgtcaaaaccatgaaaaaggcagagaaggtgctccttacagtaaagccacaatatggatttggtgagaagggtagaccagcagctggagaggaaggtgctgtgccgccaaatgcttcgctgctcattgaccttgagttgatttcatggaagactgtcacagaaattggggatgataagaaaatccttaagaaggttctcaaggagggagaaggttatgagcgtcccaacgagggtgctgttgttgaagtcaaaattatcggaaagcttcaggatggcgcggtgtttacaaagaaggggcatgacgaagagccatttaaattcaagaccgatgaagaggaagttattgccggtcttgatcgtgctgtgttgaacatgaagaagggcgaggttgctcttgtcacaattcctcctgaatatgcatttggttcaactgagtcaaagcaggatcttgctgttgttccacctaacagcacagtaatatatgaagttgagcttatttcatttgtgaaggacaaggagtcgtgggacttgaacaatgaagagaagattgaggctgctggtaagaagaaagaggaagggaatgcattgttcaaatcgggcaaatatgctagagcttccaagcgatatgagaaggctgccaagtacattgagtacgacacttcgttcagtgaagatgagaagaagcaatccaagcaactgaagatcagctgcaacctaaacaatgctgcctgcaaactgaagttgaaggattacaaggaagctgcgaagctttgcaccaaggttctggaactagacagccaaaatgtcaaggctctctacaggagggtgcaagcttacattcaacttgctgacctagagctagcagaggccgatatcaaaaaggcactggaaatcgatcctgacaacagggatgtcaagttggaatataagatcctgaaggagaagatcaaggagtacaacaagaaggacgccaaattctacagcaacatgttcgccaagatgacaaagtagcttttggggtggaggatgttgtggtgaagcgaagggattaaaaacaccgatttctgctgccgaaggacttcgcccgttgcttaacttctcgcttttcgcatactttgtagtcaattagtgtgcacggatgcttggatatgtgaaactgaggaacatgtacttcgaggattattattggttctgaatttttatgttttctggttcttgttaggaccgttgaatgttctctctatataattttcggacacatgttcttaat

SEQ ID NO: 132 - DNA, 2280 bp, Saccharomyces cerevisiae
aatattctatgtctggcaacttctgatgatactttcaagacaaacgccgcaattgaccaaactattgaactaaacgcaagttcaatatacataatatttgactatgagaactgatatcttcgtgaagattcgtgtagtatgatagaacattccagaaaaaaaattcagattcatcgctctctcttcgcttctcctcctttaaggaataaagaaaaaatcacatacatagattaagtaaataggatctgctagaaaaattatatatagatcaatcatcttattaaggtatcttgtttaagcccaaaagtctgctcccaaattcctcactgtagctactaaaacaacctatacgcaagaaagatgtcattgacagccgatgaatacaaacaacaaggtaacgctgcatttaccgctaaggattacgataaagcgatagagctcttcactaaagctattgaagtttctgaaactccaaaccatgttttatattctaacaggtccgcctgttatacttctttaaagaaatttagtgacgcattgaatgatgctaatgaatgtgtcaaaatcaatccatcttggtctaagggttataatagactcggtgccgcccacttaggtcttggcgatctcgacgaagctgaaagcaactacaaaaaagccttggagttggatgccagtaacaaggccgccaaagaaggattggatcaggttcatcgtacccaacaggcaagacaggcacagcctgatttagggttgacacagttgtttgctgacccaaatttaattgaaaatttaaagaagaacccaaaaactagcgaaatgatgaaggaccctcaattagtggctaaactgattgggtacaaacaaaatccgcaagctattggccaagatctgtttactgatccaagattaatgaccatcatggctacattgatgggggttgatttaaacatggatgatataaaccaatcaaactccatgccaaaggaaccggaaaccagtaaaagcactgaacaaaagaaagatgctgaaccacaaagcgattccactacgagcaaggaaaattcctctaaagcaccacagaaagaagaaagtaaggaatccgagccaatggaagttgatgaagatgactctaaaattgaggccgacaaggaaaaggccgaaggtaacaagttttacaaggcacgtcaattcgatgaagctatagagcactacaacaaggcgtgggaactgcataaagatattacctatttaaacaaccgtgctgctgctgaatacgaaaaaggcgaatacgagacagctatttctaccttgaatgatgctgttgagcaaggtagagaaatgagagcggattacaaggtcatttccaaatcatttgcgcgtattggtaatgcctatcacaaattgggtgacttgaagaaaactatagaatactaccaaaaatcattgaccgaacatcgtactgctgacattttgaccaagttaaggaatgctgaaaaagaattgaagaaagctgaggcggaggcgtatgttaaccctgaaaaggcggaggaagcccgtcttgaaggtaaggaatattttaccaagagtgattggccgaatgctgttaaggcttacactgaaatgatcaaaagggcacctgaagatgctagaggatattctaatagagctgctgcactagcgaagttaatgtctttccctgaagctatcgcagattgtaacaaagccattgaaaaagatccaaatttcgtgagagcttatatcagaaaggccaccgcacaaattgctgttaaagaatatgcttccgctttggaaacactagatgcggccagaaccaaagatgctgaagtgaataatggttctagtgcaagggaaattgatcaactgtactacaaggcaagccaacaaagattccaacctggtaccagtaacgaaaccccagaagaaacctatcaaagggccatgaaagatcctgaagtggctgcgatcatgcaagatcctgttatgcaaagtattttgcagcaggcccaacagaatcccgctgctttacaagaacacatgaaaaatccagaagtattcaaaaagattcagacgttgatcgctgctggtatcatccggactggccgctaaaaataatacgaaatataactttattatcttgaattctttttttactgctttttcatacatacgtacatataatgatcttctcacttagtatactaaatttgtttcatgctatggttgatatttgagaaatcggaacttgaagataataag

SEQ ID NO: 133 - DNA, 2097 bp, Saccharomyces cerevisiae
tgtcttagcttattagtaatatccacctgcgcacaaattttgtaaatcccctactaatttaatttgaattcaaattggctcgtgatctgttgacccttgttagcaacgtttgtaatcttcctcaccgaattgcgtcgttttgaataatatatatgattgaaaatttttcaagagaaaagaaaaatttttccttccgcggtcagccattgctaaaaaaaggcctccgttaggagtcgaatagaggacaacaacaatacattgccactttaattttaaatgcttgcatattaactagcgatcagatgctctgctctatataaaataaattattgatacggtttctagtctcggttgatgataagagtacgttaatccacctaccgagcattaccaagatatctggcactttatatgtagagagtctgtgttctcaagtttacttgtgcggataatgagcttaaagacttaaatactaaaagcgtatgcgttcgtatctctgtttaggcaccttgtacagtttcacagaaaactgtgtaatgtgtgattatagtacacagaacaaaataacttcacctcatctctttcttaacgcagtgaggaaaaaggtggaaaaaaaagaaagaaaaaaagaatatgtgtaatttccggcacttttcagagcgatgagcttaaattcaaaagcagcattgaattaaaagtgaggtcttgagcactacattctagcaagtaaaagaaaagaataaattggttttgcatctagaatgagctccgttaacgcaaatggaggatataccaaaccacaaaaatatgtgccagggccaggtgatcctgaacttccaccccaactatccgaatttaaagataaaacatcggatgaaatcttgaaagaaatgaacagaatgccttttttcatgaccaagttggatgaaacagacggtgcaggtggtgaaaacgtggagttagaagctttaaaggcattagcttatgaaggcgaaccacacgaaatcgctgaaaatttcaagaagcaaggtaacgaactatacaaagcaaaaagattcaaggatgcaagggaactttactcaaagggcttggctgtagaatgcgaagataaatcaataaatgagtcactatatgccaatagagcggcatgtgagttagagctgaaaaattacaggaggtgtatcgaggactgcagtaaagctctaactattaaccccaagaatgttaagtgctactatcgtacaagcaaggcttttttccaattaaacaagttggaggaggccaaatcagccgcaacatttgccaatcaaaggattgacccagagaacaaatcaattttgaatatgttatcagtgattgatagaaaagaacaagaattgaaagcaaaagaagaaaaacagcaaagagaagctcaggaacgtgaaaacaagaaaattatgttagagagcgcaatgacgctgagaaacataactaacatcaaaactcactctccagtagagttacttaatgagggtaaaataaggctagaagacccaatggattttgaatctcaattgatctatcccgcattaattatgtaccccacgcaagatgaatttgattttgtaggtgaagtaagtgagttaactactgtgcaagaacttgttgacctagttttggaagggccgcaagaacgcttcaaaaaagaaggtaaggaaaacttcacaccaaagaaagtgttggtgttcatggaaacaaaggcaggtggtttgattaaagctggtaagaaactgacatttcacgatatcttgaagaaagagtcgccagatgtaccattgttcgataacgctttgaaaatatatattgtgccaaaggtagaaagtgaagggtggatttccaagtgggataagcaaaaagccttagaaagaagatctgtgtgaagtgtcaaatagttaaaaatatgtaacgcaaagttgtagatagaaataacaaagcaagaaggaaaagtaaagaaagtgaacgatatacgtaatgcagggggaataccagagtatttaaagtgtacttgatttaatgttaaccagtttgaatttttcttttctggggtaatcgaattca

SEQ ID NO: 134 - DNA, 949 bp, Zea mays
cgctgcaagcaacaaagttctactctgtccacccgtccatctagctctcaagaaccaacccgtaccagcgctatccggccggccatggcggcggcgcgccggctctccctgcccctcgtcctgctggtcgtcctggccgtcgccgggcgcgcggcggcgcaggactacgacttcttctacctcgtgctgcagtggccgggggcctactgcgacaccaagcagagctgctgctaccccaagtccggcaagccggcggcggacttcgggatccacggcctctggcccaaccgcgacgacggcacgtacccgcagaactgcagccccgacaacgccttcaacccgtcgaaggtgagcgacctaatgagcagcctccgcgccaagtggccgacgctggcgtgcccgtccaacgacgggctgcgcttctggggccacgagtgggagaagcacggcacctgcgcagccgacgtcttcgacgagcacggctacttccaggccgcgctgcgcctccgcgaccagctgggagtcctcggcgcgctcacctccgccggcgtcaagcccgacggcggctactacacgctgagccagatcaagggcgccatccgccagggcaccggcttcgagccctacgtggagtgcaaccgcgacgaggccggcaacagccagctctaccagctctacttctgcgtcgacgccgccggcgacagcttcgtcgactgccccgtcctccccagcggcaggccctgtggcaaccggatcgagttcccggctttctaagctaactcactcttcacgtcagttgctgcaatatactgctagtccttttgcttgcattctatgcaagaggataatggaatgttcattccccattcttcattttttttgcaaataaaaggagggcgatcggtgttccatatttattatgttgatcataacatgacattcagagaac

SEQ ID NO: 135 - DNA, 3010 bp, Zea mays
catctgcctgccccccctcggccgccggcggcggcgatcgcgggtagccgccccaaccggccgaggttgcatagaggtgctggtatcttactctgcttctggttatgctatctgcctatgacttcagcttcccaaacttctccctgcttcttgcccctggttggtaaaaatctgtaacaactgctgccctgactgcaaaagacgcaactatgcgtctttcttcttctcttcaagatttgccgaccttcaccagaattgatgctttggaaaggggttctagcgtaggcagtgatctgagctcagggcgcccaaaacctgtccgcatgcttcaaagagatggtgccgtcgcaagcttttcaaaagaaagaacacccccctcatcgccgacaaatagaaagaaatgcatgagagcagccgggtgtgctattgcattgatcttactggtgttctttgcgtatggttcatggagatattttcatgtgttcctctctgaaggaagatctgaatactatgttgttcttgattgtggcagcactggtacgagagtttatgtctatgaatggcatattaatcataatgacgcaaatgcatttcctattgttttgaaacctttagggaatgctcccaagaagaaatctggtaaattaacccgactatatcagcgaatggagacagaacctggattgagcaagctcgttcacaatgaatctggattgaagaaggcaatagagccccttcttcagatggctgagaaattgatccctagacatgcacacaagcacactccactttttctatatgctactgctggtgttcgcaagctacctagtgcagattcagagtggctcctggataagtcctgggatatcctgaacaattcatcatttttatgtagtagagatagagttaagatcattagtggcatggatgaagcttattatggatggatagctcttaaccacaacatggatatgcttggcacctcatcatctaaaatgacatatggttcacttgatttagggggatcatcattacaggttacatttgagaatgataaatcagtgcaggatgagacaagcattcgtctgagtattggttcagttgaacatcacctcagtgcttattctcttactggttatgggttaaatgatgcatttgataaatctgtagcacatctagtgaaaagactgggaggagttgctagcaatggcaaggttcaagtcaaacatccctgtctacagactggattcaaggaagattatatttgttcttactgccatccattgaaacaagatggaagtcccagtgtcggcgagaagaacagtggcaaagagaagcagggaatagctgttgaactggtcggagcacctcagtggaatgaatgtagtgctcttgcaaaagtaacagtcaatctttctgagtggtccagtgcaagtccagggcttgattgtaacatccatccttgtgctcttgcctctaactttccccgaccatatgggcagtttttcgctatctctggcttctatgtggtttttaaattttttaatttgactgctgatgcgactctaggtgatgttcaaaaaagaggtcaggaattttgtgaaaaaccatggaaagttgcaaagagtagtgttcctccacagccttttgtagaacaatattgcttcagagctccttatatttcatcactactgagagagggattgcagattaaagatagtcaggtgataattggctctggcagtattacttggactcatggagttgctttgctggaggctggtcaagcattgtcttcacgactagatattcaaggataccgaatactgcacagggagataaatccaaatattctcatagtactgtttctgatttcaattgtgttggtcatatgtgccatactatgcgtcagcaattcgataccaagatcattccgcaagtcttatctgccaattcataggcataattctggaggcagttctgttcttggtatgggattgcctttcaaacatttattatggaatcccattagttcaggtgatggtagaacaaagacaccactgagccctactgttgctgggtcagatcctcatccatttgcaggactaggaggcagcagtgtcgagcttatggagtcctcgaggcaatccttgggtgcctatcacagctattctgttgggagcttaggtcagatgcagttttctagcggggtgaggaaccctagccgaggtcagactacacttcaaagtcggaggtcgcaatcaagagaggatctcagttcttcacttgctgatattcattttccaaaagtgtagcactgcatcaaggaatgactagaatgagatccttacatgccataacaaactctgtaaataatagctccagagttcgaactgcttgatttcttctctaatcagaagtcaattttgtctgtccgcttacacttcaatgaggtttaggattcatataaatgaacttatgacttgtgcctatcctggacatgatacatccattcatcccattgtatgtgctcaagaacataccatagcagtgaagttctggtagtgtactggaagatatatttatgccgttcaccagactggttgaccatggctacagcctacaactttatagatcgattgtgctgcaatcagggatgttatttttttgtatctgagacataataaaggtgcatgtggtctcatgtactgttgtaccctctaggctctagtggctctgtgaggttactcttctttcctggaataccttttgataggctactctgtggtatcaactgaaatcatgaaacactgacatcagttctactggattatctagttgcgtactgtgtatacacatctattgagttttttttgttggcatagtatctactttgatgacactgaaaatcagtataggaacatttgggccaatgtttttcctcgttgagctgagtttgatctgtattgcacatttgcttgtggatcaaaaaaaaaaaaaaaaaaaaaaa

SEQ ID NO: 136 - DNA, 1404 bp, Saccharomyces cerevisiae
atgtttaaatctgttgtttattcaattttagccgcttctttggccaatgcaggtaccattcccttaggcaaactagccgatgtcgacaagattggtacccaaaaagatatcttcccatttttgggtggtgccggaccatactactctttccctggcgactatggtatttctcgtgatttgcctgaaggttgtgaaatgaagcaactgcaaatggttggtagacatggtgaaagataccctactgtcagtctggctaagactatcaagagtacatggtataagttgagcaattacactcgtcaattcaacggctcattgtcattcttgaacgatgattacgagtttttcatccgtgatgacgatgatttggaaatggaaaccacttttgccaactcggacgatgttttgaacccatacactggtgaaatgaacgccaagagacatgctcgtgacttcttggctcaatacggttacatggtcgaaaaccaaaccagtttcgccgtttttacctctaattctaagagatgtcatgacactgctcaatatttcattgatggtttaggtgaccaattcaacatcaccttgcagactgtcagtgaagctgaatccgctggtgccaacactttgagtgcttgtaactcatgtcctgcttgggactacgatgccaatgatgacattgtaaatgaatacgacacaacctacttggatgacattgccaagagattgaacaaggaaaacaagggtttgaacttgacctcaactgacgctagtactttattctcgtggtgtgcatttgaagtgaacgctaaaggttacagtgatgtctgtgatattttcaccaaggatgaattagtccattactcctactaccaagacttgcacacttattaccatgagggtccaggttacgacattatcaagtctgtcggttccaacttgttcaatgcctcagtcaaattattaaagcaaagtgagattcaagaccaaaaggtttggttgagttttacccacgataccgatatcctaaactttttgaccaccgctggtataattgacgacaaaaacaacttaactgccgaatacgttccattcatgggcaacactttccacagatcctggtacgttcctcaaggtgctcgtgtctacaccgaaaaattccaatgttctaacgacacctacgtcagatacgtcattaacgatgctgttgttccaattgaaacctgttccactggtccagggttctcttgtgaaatcaatgacttctacgactatgctgaaaagagagtagccggtactgacttcctaaaggtctgtaacgtcagcagcgtcagtaactctactgaattgaccttctactgggactggaacactactcattacaacgccagtctattgagacaatag

SEQ ID NO: 137 - DNA, 1995 bp, Glycine max
cacttgttcaattactccttcaaatcagtctggcttgacaagcaggaaaggtatttattgctctctacttaggtaacataagccaacaattttagtagtaattaatggctggagaattgggagttttgaatgcacttgatgtggcaaagacacaatggtaccacttcactgctattgtgatcgctggaatgggtttcttcaccgatgcctatgacctcttctgcatttccctagtcaccaagcttctagggaggctatattacacagaaccaggtgcaccaaagccaggttcacttcctccaagagttcaagcttctgtgactggtgtagcactatgtggcacattagccggccaactattctttggttggcttggtgacaaaatggggagaaaaagagtctatggactaacactcattctcatggtagtgtgctcccttgcctcaggactctcctttgggtcaactccagagggtgtcatggcctcactttgcttcttcaggttctggctagggtttgggattggtggtgactaccctctttctgccacaatcatgtctgaatatgccaacaagaagacgcgtggcgcgttcatagccgcggtgtttgcaatgcaaggattcggaatcctggctggtggagtggtggcattgattgtttcatatgcatatgaccaaaagtacaagcttcctagttatgaacagaatccagaagcatccttggaccccgcatttgactatgtttggagaatagttttgatgtttggtgcagttcctgctgcactcacctactactggcgcatgaagatgccagagacagcacgttacactgcccttgtggccaagaatgcaaaacaagctgctgcagacatgtctaaggtgttgcaagtggaacttgaagctgaagaggagaaggtgaagaaattgacagagaatgagagcaacaagtatggtttgttcaccaaggaatttgtgaaacgccatggcctgcatttgttgggaaccaccaccacttggttcttgttggacatagcattctacagccaaaaccttttccagaaggacattttcagtgcaattgggtggatccctccagcaaaggaaatgaatgcaatccacgaggtgtataagattgcaagagcacaaacactcatagcactatgcagtactgtgccaggttactggttcacagtggcattaattgattacatgggccgttttgccatccaattgttggggttcttcttcatgactgtgttcatgtttgctttggctataccatatgatcattggtctgagaaagaaaacagaattgggtttgtggtgatgtactctttcacctttttctttgccaattttggtccaaattccaccacatttgttgtgccagcagagattttccctgcaaggctaaggtccacttgccatggaatctctgctgctgcaggaaaggctggtgcaattgtgggtgcatttgggttcctatatgctgcacaaagcaaggacccttccaagactgatgcagggtaccctactggtattggaattaagaactcactcattatgcttggtgtgatcaacttcattgggatgttgttcaccttgcttgttccagaatcaaagggaaaatcactggaggagttgagtggggagaatggtgaaaatgatgctgaacatgcagtgtctgctaggacagttcctgtttgattgaagttaagtttgtgttcaacaatgtggttcaacttcaaattgtgatatgtgtacattttaatactgggttttggttgtgacgtgtttacaccaatgatgtagtagttgcacggttcagggtgctagagcttaaaaataattacagtttgtttgcttttggttcttacttttgtttttttttttgtttaaaatagatacctggtaattttacttttgattatttgtaaagttttattgttttgttatttaatcacaatttatgattaatttattgtcttttaaaaaa

SEQ ID NO: 138 - DNA, 1947 bp, Zea mays
cccacgcgtccggcttcaacaagctaggcagctgcaagcatctcccaaatcccagcctgctgccccgcgcgaacacacttctcttgtcgttgcattgcagggcagctagccggctacagcatccgccatggcgcgcggcggggacggcctgcaggtgctcagcgcgctggacgcggcgaagacgcagtggtaccacttcacggccatcatcgtcgccggcatgggcttcttcacggacgcctacgacctcttctgcatctccctcgtcaccaagctgctggggcgcatctactacacggacaccagcaaggacaacccgggctcgctcccgcccaacgtcgccgcggcggtcaacggcgtcgccttctgcggcacgctggccggccagctcttcttcggctggctcggggacaagctcgggcgcaagagcgtgtacgggatgacgctcatgctcatggtcatctgctccgtcgcgtcgggcctctcgttcggccacacgcccacgggggtcatggccacgctctgcttcttccgcttctggctcgggttcggcatcggcggggactacccgctgtcggcgaccatcatgtccgagtacgccaacaagaagacccgcggcgccttcatcgcggccgtcctcgccatgcagggcttcggcatcctcgccggcggcattgtcacgctcgtcatctccgccgccttccgcgcggggtacccggccccggcgtacagggacgaccacttcaactccaccgtgccgcaggccgactacgtgtggcgcatcatcctcatcctgggcgccgcgccggcgatgctcacctactactggcggatgaagatgcccgagacggcgcgctacaccgcgctcgtggccaagaacgccaagcaggccgcggccgacatgtccagggtgctccagacggagatcgtcgacgagcaggagaagctggacgagatggtcaccgccgagagcaacaccttcggcctcttctccagggagttcgcgcgccgccacgggctccacctcgtcggcacctccaccacgtggttcctgctcgacatcgccttctacagccagaacctgttccagaaggacatcttcaccagcatcaactggatccccaaggccaacaccatgagcgcgctggaggaggtgttccgcatctcccgcgcccagacgctcatcgcgctctgcggcaccgtcccgggctactggttcaccgtcgcgctcatcgacgtcgtcggccgcttcgccatccagctgctcggcttcttcatgatgaccgtcttcatgctcggcctcgccatcccctaccaccactggaccacgcccggcaaccacatcggcttcgtcgtcatgtacgccttcaccttcttcttcgcaaacttcggccccaacagcaccaccttcatcgtgccggccgagatcttcccggcgcggctgcggtccacatgccacggcatctccgccgcctcggggaaggccggcgccatcatcggggcctttgggttcctgtacgcggcgcagaaccaggacaagagcaaggcggacgccgggtaccccgcgggcatcggcgtgcgcaattcgctcttcgtcctcgctgcctccaacttgcttggctttatcctcaccttcctcgtgccggagtccaagggtaagtcgctcgaggagatgtccggggaggctgacgacgccgaggacgacgccgtcggcacccgcgcggtgcggccgtcggggacccagatggtgtagaatcgaacatggcgacgcgtgcacacgggtcctccatcctggggcccgactgggaagacaaggcgcgccggttcaagcctgccgatgctttgctgtgcagaagtagttcgtacaggtgcatgtgtgttataggcgggaaagtaagtgaacttacatgcttgtatttattatatccaaccttacgtacaaaaaaa

SEQ ID NO: 139 - DNA, 1701 bp, Xylella fastidiosa
taagtttaaaaagcgttacgcacgttaagttgcctatttttttatgtattttgcgattcacgcagattgcgtgagcgctttaaggataacccaagaggcggatctataagcgcttaactattaaggtggtttcctttgcatacatctttttttgtggatgtctgtaatagcttaagcgcattattctttgatacctaacaaccgcccttacggtttgccgtttgggcgtctttccattgttaaggagcccacgctatgtccgatcttgataaggtcacgctcaatgccggtgagacttctctcgttttaccggttttgaaacccacgttaggtaatggttgcgttgatattgccaagttgacaaaggaaaccgggctgtttacttacgactctggttttacggcaactgcaagctgtaagtctgccatcacttacattgatggtgaaaagggtgtgttgttgtaccgcggctatccgattgagcagttagctgagcactccagttttttggaggtcgcttatttgttgatgaacggtgagttgccgagaaaagacgagtttgccaagtttgatgatgaaatcacgcatcacacgatgatgcatgagtcgttgaagaactttcttggcggttttcattatgatgcacatccaatggctatgttggctgcttcggtggcttcgctgtcggcgttctaccacgatacccttgatttgaacgatcttgagcaacgtcgcttagctgcaattcgtttgatcgctaaggtgccgacgcttgcagcagcagcgcatcgctactcgattggctggccgatccgctatccacgaaacaatcttggttatgtcgagcgctttttgcatatgatgttcgaagtgcctagtgaaccgctgcagttgaatccagttgtgaccaaagctctggatttactgtttattttgcatgctgatcatgagcagaacgcttcgacatcaacagtccgcttggtgggttcgactggtgctaatccttatgcatcggttgccgcgggtatcaccgcgttgtggggaccggcacacggtggcgctaatgaggccgtgttaaagatgttggaggagattggtgatgctaagaatgttgacttggttattgcaaaagcaaaaactaaggacaaaaactctccattccgtttgatgggtttcggccatcgtgtctataaacattttgatccgcgtgcgaaaatcatccgtgagatggcacacacagttcttggtgagttaggtgtgaacgatccgctactggaagtggcattaaagttggaagaggcagcgctgaaagatgattactttgtgcagcgtaagttgtaccctaacgttgatttttattcgggcatcatctacaaagccatcaacattcctttggaaatgtttacagtgatgtttgccatcgcgcgtaccgcagggtgggtttctcattggcttgagcagcaagtcgacccggagatgaaaatcagcaggccacgccaaatttacacaggtcatggcgagcgtgactacaaagatgctaggtaaagagtaaagagactcttatatcttccaatgtgcttctcagatgaaggagctattgtggatgcctgacgagatcgcgggtaataacccgaatgaccgaccaggaacagcgcctcaaacaacgtgaggtgctgacaatgtatagatggaccaactcat

SEQ ID NO: 140 - DNA, 1701 bp, Escherichia coli
taaaagttatgaagtcggtatttcacctaagattaacttatgtaacagtgtggaagtattgaccaattcattcgggacagttattagtggtagacaagtttaataattcggattgctaagtacttgattcgccatttattcgtcatcaatggatcctttacctgcaagcgcccagagctctgtacccaggttttcccctctttcacagagcggcgagccaaataaaaaacgggtaaagccaggttgatgtgcgaaggcaaatttaagttccggcagtcttacgcaataaggcgctaaggagaccttaaatggctgatacaaaagcaaaactcaccctcaacggggatacagctgttgaactggatgtgctgaaaggcacgctgggtcaagatgttattgatatccgtactctcggttcaaaaggtgtgttcacctttgacccaggcttcacttcaaccgcatcctgcgaatctaaaattacttttattgatggtgatgaaggtattttgctgcaccgcggtttcccgatcgatcagctggcgaccgattctaactacctggaagtttgttacatcctgctgaatggtgaaaaaccgactcaggaacagtatgacgaatttaaaactacggtgacccgtcataccatgatccacgagcagattacccgtctgttccatgctttccgtcgcgactcgcatccaatggcagtcatgtgtggtattaccggcgcgctggcggcgttctatcacgactcgctggatgttaacaatcctcgtcaccgtgaaattgccgcgttccgcctgctgtcgaaaatgccgaccatggccgcgatgtgttacaagtattccattggtcagccatttgtttacccgcgcaacgatctctcctacgccggtaacttcctgaatatgatgttctccacgccgtgcgaaccgtatgaagttaatccgattctggaacgtgctatggaccgtattctgatcctgcacgctgaccatgaacagaacgcctctacctccaccgtgcgtaccgctggctcttcgggtgcgaacccgtttgcctgtatcgcagcaggtattgcttcactgtggggacctgcgcacggcggtgctaacgaagcggcgctgaaaatgctggaagaaatcagctccgttaaacacattccggaatttgttcgtcgtgcgaaagacaaaaatgattctttccgcctgatgggcttcggtcaccgcgtgtacaaaaattacgacccgcgcgccaccgtaatgcgtgaaacctgccatgaagtgctgaaagagctgggcacgaaggatgacctgctggaagtggctatggagctggaaaacatcgcgctgaacgacccgtactttatcgagaagaaactgtacccgaacgtcgatttctactctggtatcatcctgaaagcgatgggtattccgtcttccatgttcaccgtcattttcgcaatggcacgtaccgttggctggatcgcccactggagcgaaatgcacagtgacggtatgaagattgcccgtccgcgtcagctgtatacaggatatgaaaaacgcgactttaaaagcgatatcaagcgttaatggttgattgctaagttgtaaatattttaacccgccgttcatatggcgggttgatttttatatgcctaaacacaaaaaattgtaaaaataaaatccattaacagaccta

SEQ ID NO: 141 - DNA, 1523 bp, Oryza sativa
gaacaatcgctctctctctctctccctccccgattcgattcaattcgcgacgcctccgtgaaattctccaaagccagcttgccctgtagccgcgtgctccggccatggcgttcttcaggggcctgaccgcggtgtcgaggcttcgatcccgcgtggcacaggaggccaccacgcttggtggtgtgcgatggctgcagatgcagagcgcatctgatcttgatctcaagtcccagctgcaggaattgattcctgaacaacaggaccgcttaaagaaacttaaatcggagcatggaaaggtccaacttggaaatataacagtcgatatggtccttggtgggatgagagggatgactggaatgctttgggaaacatcattgcttgacccggatgagggtattcgttttaggggtctctcgattccagagtgccagaaagtgctgccgacagcagttaaagatggggagcctttgcctgagggtctactttggcttcttttgaccggaaaggtgccaaccaaagagcaagttgatgctctatcaaaggaattggctagtcgttcgagtgttccaggtcatgtgtataaggcaatcgatgctctccctgtaactgctcatccgatgacccagtttaccacaggagtgatggcacttcaggtggagagtgagtttcaaaaagcctatgacaaaggaatgtcaaaatcaaagttctgggagcctacctatgaagattgcttaaatttgatagctcgccttccagcagtggcttcatatgtttaccggaggatattcaagggagggaaaactatagcagctgataatgcactggattatgcagcaaatttttcacacatgcttgggtttgatgatcccaaaatgcttgagttgatgcgactatatataacaatccacactgatcatgaaggtggaaacgtcagtgctcatactggacatctggttggaagtgctctgtcagacccttatctttcttttgcagctgcactgaatggtttagctggaccgttgcacggcctggctaatcaggaagtgttgttgtggatcaaatctgtaataggtgagactggtagtgacgttacaactgatcaactcaaagagtatgtgtggaagacactaaaaagtggaaaggttgttcctggctttggtcatggagttctacgtaagaccgatccacggtatacatgtcagagggagtttgctttgaagtacttgcctgaggatccacttttccaactggtctccaagttgtatgaagttgtgcctcctatcctcactgagcttggcaaggtcaaaaacccatggcctaatgttgatgctcacagcggagttctactgaaccactttggattatctgaagctcggtattacactgttcttttcggagtttcaaggagcattggaataggatctcagctcatttgggaccgtgctcttggcctgccgctcgaaagaccgaagagtgtcaccatggagtggctggagaaccactgcaagaaggttgctgcttga

SEQ ID NO: 142 - DNA, 1813 bp, Zea mays
ctgcatttgcttggctgctgctcccttctcccaccgaccaactcgatcccgcgccatggatcgcgccgaccccgcgcggggccgccttgccgtgctctcctcccacctccgtggtgcaggggccgaggaggcggcggggctggagaggtcgccggtatccgcgccggcgcccgggccccgcgccggcgcgcttgccgtggtggacgggaggaccgggaagcggcacgaggtcaaggtctccgaagacggcaccgtgcgcgccaccgacttcaagaagattaccactggaaaggacgacaagggtcttaagatttatgatcctggttaccttaacactgcccctgttcgctcgtccatctgctacatcgatggagatgagggaatccttcgctataggggttatccaatcgaagaattggctgaaagcagctcgtttgttgaggtggcctaccttttaatgtatgggaacttgcctactcagagtcaattggcaggctgggaatttgctatttctcagcattctgctgttccccaaggactgttggatatcatacaatcaatgccccatgatgctcaccccatgggtgttcttgccagtgcaatgagcaccctttctgtctttcatccagatgcaaaccctgctctacaaggtcaagatctttataaatcgaagcaggtgagggataaacaaattgtgcgagtacttgggaaggcaccaacaatagcagctgctgcctacttgagattagcaggaagacctcccgtccttcctttaaatactctatcttattcagagaacttcttgtacatgctggactctttgggtgacagaacatataaaccaaatcctcgacttgctcgagctctagatattctttttattctgcatgctgaacatgaaatgaactgctccactgctgctgttaggcaccttgcttcaagtggtgtggatgtatttactgctctttctggtggtgttggagctctatatggtcctctgcatggcggcgcaaacgaggcagtacttaaaatgttaaatgagattggaagcatggaaaatattccagatttcattgtaggagtgaagaacaggaagaggaagatgtccggttttgggcaccgtgtgtataaaaactatgaccctcgtgctaaagtcataaggaaattggcagatgaggtgttctcaattgttggacgggatccacttattgaggtggccattgccctagaaaaggcagccctgtcagacgaatattttatcaagaggaagctgtatccaaatgtggatttctactctgggctaatttatagggcaatgggattccctacagaattttttcctgtgctgtttgctattcctcgcatgggtggctggctagcgcattggaaagagtcactcgatgatcctgacactaagattataaggccccaacaggtatacaccggcttctggcttaggcactatacccccgtcagagaacgagtgctatcaagccagagtgaggaacttggtcaggttgccacctcaaacgcaactaggcgccgccgtgctggttctgccctgtagaagctgcagcgtataaacgcaccggcatactcaataaacatcgaccacttttgtgcttgaaaaggccacaaatgctttttagcttggttggagttgtaggccttttgttgtcgagtatataggcaataatgcagtgagaacaccacaccgttacaatgtaaaactgtcacgaggcatcacttgctggtgtacaccccttgcgttctctatgacttaatcacttaacttcccaaaagatgaaaaaaa

SEQ ID NO: 143 - DNA, 1854 bp, Glycine max
aacaatttcgcttttcccttcaaacttccaagttccaattcaactctgatccttaaattcatttgcatattcagtcctttgaattattccactttcttcaaatcattccaattccacaaccaacgaagaagcatcatcaacacaacacaacaatgtcaaaaacaacaacttcttccgaacaaactgcacgaaaccgtttggccaccctcgcagctcacttgcttccctccgacgccacctccgccgccgcgatcctccacccccaccggctctccgcccccaccggagacttgccgccggcgaacctgaagggcacccttaccgtcgtcgacgagaggaccggcaagaagtaccagatcgaagtcaccccagatggcaccgtcagagcctctgacttcaagaagatatcatctgggaaaaatgacaagggactcaaactttatgatcctggctatttgaacactgctcctgtcatctcaaggatttcttacattgatggtgatgctggaatccttagatatagaggatatcctattgaagacttggcagagaaaagcacctttacagaagtgtcatatctcatactgtatggaaatttgccttctgaaagtcagttagcggaatgggaattcgccttatctcagcattcagctgtaccacaaggagttttggatatgatagaatcaatgcctcatgatgcacatcctatgggcatgcttgtcaatgccatgagcgctttgtctgtttttcatcctgatgcaaatcctgctctcaaaggtcttgatatctacaactcaaagcaagtgagagacaagcaaatagcacgggttattggaaagataacaacaattgctgctgcgattaatcttagattggcaggaaggccgcctgtgcttccatccaacaaactttcttacacagagaacttcctatacatgctagattcttttggcaatcgatcatataaacctaatcctcgactaactcgagcgctggacattatcttcgtcctgcatgcagaacatgaaatgaattgctctacatctgctgtacgtcacctctcatcaagtggtgttgatgtatatactgctattgctggggctgttggagctctatatggacctcttcatggtggagccaatgaggctgtcctcaaaatgttgagtgaaattggaactgttgagaacattccagcattcattgagggtgttaaagccaggaaacggaagctcagtggttttggacatcgtgtgtacaaaaattatgatccaagagcaaaggtcttgaggaaactgacagaggaagtgttttccattgttggccgggatcctcttatagagattgctgttgccttggagaagattgcactgtctgatgagtatttcatcaagaggaagctatatccaaatgttgacttctactctggactgatttatagggccatggggtttcaacctgagtttttcactgttttatttgccatccctcgaatggccgggtacttggcacattggcgagagtccttggatgatcctgatacaaagattatgagacctcaacaggtttatgttggggagtggttgaggcattatgcaccaattaatcaaaggactgcatcaagtaacactgacaaacttggtcaattggctgtatcaaacgcctcaaagaggcgtcttgctggatctggggcttaactagtgaaactgccaagtgctcaataaggtccagactccagagaaaaaattaattttttttctggtacataaaataagtttgtttgtttatgtataaaattatgatatcaaatagataaataaaatcatgaaatcaataagaccatggtttcagtaaaaa

SEQ ID NO: 144 - DNA, 945 bp, Zea mays
agatgatgcttagggtttccgcgtctccggccgccgcggtggccaaccatctctctggtggggccgcggcgaccacggctcctgccagggtgacggcgcagcgcagcggcgtctcgctgtccgccgccgccgccgccggcaaggggaaggaggtgctcagcggggtggtgttccagcccttcgaggagatcaagggggagctcgccctcgtgccccagtcccccgacaggtcgctcgcgcgccacaagttcgtcgacgactgcgaggcagccatcaacgagcagatcaatgtggagtacaacgcctcgtatgcgtaccactccctcttcgcctacttcgaccgcgacaacgtggccctcaaaggatttgccaagttcttcaaggaatccagcgacgaggagagggagcacgctgaaaagctcatggagtatcagaacaaacgcggaggcagggtgaggctccagtcgattgtggcgcctttgaccgagtttgaccaccccgagaaaggcgatgctctgtacgctatggagctgactctggctctggaaaagctggttaatgagaagctgcacagcctgcatggtgtggcaacaaggtgcaatgatcctcagctgatagacttcatcgagagtgagttcctcgaggagcaggtggaagccataaataaggtctccaagtatgtcgcgcagctgaggagagtgggcaacaaggggcacggggtgtggcactttgatcagatgctgcttcaggaaggggcctgaaggccaacaagggtggcgtggacggagctgagctctgggtggtgtattcttttctttttcttttctttccagttggttagtgttttagttgtagaacggtgttgcgttgcccacatgacatgatggatgttacgtggaggattgtctcttatatttgaacattatattgtcgttcgtttttggc

SEQ ID NO: 145 - DNA, 1213 bp, Zea mays
gcgaacgcacacgcacccacacgacacatccagatgatgcttagggtttccccgtccccggccgccgcggtgccaacccagctctccggtgcgcccgcgacccctgctcccgtcgtcagggtggcggcgccgcgcggagtcgcctcgccgtccgctggcgccgcgtgcagggccgcgggcaaggggaaggaggtgctcagcggggtcgtgttccagcccttcgaggagatcaagggggagctcgccctcgtgccccagtccccagacaagtcgctcgcgcgccacaagttcgtcgatgactgcgaggccgccctcaacgagcagatcaacgtggagtacaacgcctcgtatgcataccactccctcttcgcctatttcgaccgcgacaacgtggctctcaaaggatttgccaagttcttcaaggaatccagcgacgaggagagggagcacgctgaaaagctcatggagtaccagaacaaacgtggaggcagggtgaggctccaatcgattgtgacgcctttaaccgagtttgaccaccctgagaaaggagatgctctgtacgctatggagctggctctggccctggaaaagctggtcaatgaaaagctgcacaacctgcatggtgtggcaacaaggtgcaatgatcctcagctgacagacttcatcgagagtgagttcctcgaggagcaggtggaagccataaacaagatctccaagtatgtcgcccagctgaggagagtgggcaaggggcacggggtgtggcacttcgatcagatgctgcttgaggaagaggcctaaaaagaagaacggacagatgaatgaaggaaacaagtgtgtaatgttgatcaggcggaggaataatgggtcaactgacaactctgggtcggtggatttgtagttggtttgggttttttagttgtagaacggtgttgcccccctcctagagagggatgaacacattatgcatgcgatgtgtcagttcggtcggtgctatgctcgttgggatttgattgtcggaaataaaacatgggtgatgaatgtgtaccctccctaatctatgtcttggtgatgaagttgagaaagccctgcgggtgtaggtggatttgtagagttttttcttcagttggttaggttcgctgttgcctacctcatttgcccctcatcatcgccgtaatttatttatttataatataaaagatccagattttccccc

SEQ ID NO: 146 - DNA, 1001 bp, Escherichia coli
gttccttatgtttgaatacggaattcactttgtcatatcagtgccatcattccgccttccctgtctttctctaaatattttaatcagcgaggggatcttcgctgattaaagaaatagcggtaatgcgttttattcccattcgtatttttaataattgaagtttatattttaccttttgcaaataataaaataacaaattatagtgacgccacagcaacaaatataacctttgtggagcactatcatgctgaaaccagaaatgattgaaaaacttaatgagcagatgaacctggaactgtactcttcactgctttatcagcaaatgagcgcctggtgcagctatcataccttcgaaggtgctgccgcgttcctgcgccgtcacgcccaggaagagatgacgcatatgcagcgtctgtttgattacctgactgataccggcaatttaccgcgtattaataccgttgaatctccgtttgctgaatattcctcacttgatgaattattccaggaaacctataaacacgaacaattaatcacccagaaaattaacgaactggctcatgctgcaatgaccaatcaggactacccaacatttaatttcctgcaatggtatgtttctgagcagcatgaagaagagaaactgttcaaatcgattattgataaattaagcctggcaggcaaaagcggcgaaggtctgtattttatcgacaaagaactctctaccctcgacacacaaaactaatgctctccggcggcaggtttactgccgccgtttcaaatcagtgacggcaaatcttactctgatcggtcgaaaaaccgtctttcgaaggtataaatttgccttttgctgccagaaacgctaccagctctcccgctgtcatcccttctgccgagcaggtgtgaaaacgtgcctgttcaccaaaacgcgctttaatcgcagcttccagactggcatgcgtatattgctcgcctgattcaatcatcatatttaacacttcatg

SEQ ID NO: 147 - DNA, 1052 bp, Zea mays
ccacgcgtccgctgttcgaagctttcagccgagcaccatcgtcacagtcagtagccaagcatatttctttctccgagtgatttgcgctgagcgatcagttcatccagagcgagcggagctgagctgagctgagctgagcgagcttgcgttgcttgagagaccctgctgccatggcttcccaccaggacaaggctagctaccaggccggcgagaccaaggcccgcaccgaggagaagaccgggcaggcggtgggggcgaccaaggacacggcgcagcacgccaaggaccgggcggcggacgcggcggggcacgcggcgggcaagggccaggacgccaaggaggccaccaagcagaaggcgtccgacaccggcggctacctgggaaagaagaccgacgaggccaagcacaaggccggcgagacgacggaggccaccaagcagaaggccagcgagacgacggaggcgaccaagcagaaggccggcgagacgacggaggccgccaggcagaaggcagccgacgccatggaggcagccaagcagaaggccgccgaggccgggcagtacgccaaggacaccgccgtctccggcaaggacaagtccagcggcgtcatccagcaggccactgagcaggtgaagagcgcggcggcgggcgccaaggacgcggtgatgagcacgctggggatgggcggggacgacaagcagggcgacgccaacaccaacaccaacaaggactcctctaccatcaccagggatcactagacgcgtgtatgcacacgcacttggtccgatcctgtcgtccgtgaccctgtttgcttgttcgcgagtccagtatgggtttgtgcatgttttcagtgtcatggtttccttttctacgaatttggcgttgtaagttcgattcgcaggtacgttgctgtgttttttttctgcgccatcaggtgtctgtaaacgagtcgggcgggtttgagtgtcctttgttgtgataataaagttggtaaatcgtaattaatatatagcatgcgactgtcttgctatggcctaaaaaaaaaaaaaaag

SEQ ID NO: 148 - DNA, 1595 bp, Glycine max
attcggctcgagtgcgattgcgatggtgaaatcgaacgagaacggttctggttccgtttcggtgcctcctttcctgaaaaaatgttacgatatggtggaagaccgcaacactgattctatcatccgttggagcgatggcggtgacagctttgtcatctccgacatcactcaattctccgtcacgctccttcccacctatttcaaacacaacaatttctccagtttcatcagacaactcaatatctatggtttcaggaaaattgatacggattgctgggaatttgccaatgagaactttgttagaggtcaaaagcatttgttgaagaatatacgtagaaggaaacatccacacagtgcagatcagcaaaaagcattgccacagcaagacaattgtgatgaaccatcacaagaagcaccgtatcatggcctttggaaagaagttgagaatctaaaacttgataaaaattcgctcacgcaagaattggtcaaacttaggcaacaccaggaatctgctgagaataagttgctgctcctgagtgatcgccttcaaggaatggaaaagcatcagcagcagatgttatcatttttagtcatggttgtgcaaagccctgggttcatggttcagcttcttcatcctaaggaaaataattggcatttggctgaatcatggaatatattggatcaagataaacaagatgacaagccagttgcttctgatgggatgataataaagtataaaccacctgtaggtgaaaaactaaagcctgtagttcctctgtctcctggtttcgaaaagcaaacagaacccgagctttctgcagaagggctaaaagacttgtgcgtcagttctgaattcttgaaagtgcttctggatgaaaaattatctccattagaaaatcattctccatttctcctaccagatttacctgatgatggttcatgggaacagctttttctaggtagtcctttcatgggaaacattcaagattctaataaagaaagtgaggggcacaccaatggtggaatggagatggaaccaacaatatctgagactccaaatgaaaattctcgaacttttgaatcgatgattgtagagatggagaaaactcgagaatgagttggagttgtatgcacatggtgggctgtcttcttggaatccatcagatatttttcagctgggctgtctcatactgagctaatggagctttagtttctgaaactaacaatatatagggaaggaagtaataatgtccatcagatatttttcagctgggctgtcttcacagattacttcacactataattatattatagtattaagtcgcaattattttctctcccatcttccttcagcagttgttagatcctcttctagaatccatattttggcttcctgatacatggtgtcggagatcaggagttgtatggtagtgcacaagtgcggcgacctatatatatagcggatcaattatttcttttatggaaaattgtaagggaaaacggcaactttattttttgtgccacattaaacagtggcacttgccttcatatatattataaaatttcacgaaaaaaaaaaaaaaaaaaaaaaaagg

SEQ ID NO: 149 - DNA, 1159 bp, Glycine max
gattccttttcctttctatctctctctcttcttatatttccacattccacgtgaaccttctagaactataatagaaagaaaccctccattccatggctccgccgctcgaacacaacggcgtttccacgagcggtgactctcagagatccattcccacgccgtttctcaccaaaacctaccagctcgtcgacgatcacaccatcgacgatgtcatttcgtggaacgattctggatcgtccttcatcgtctggaacaccaccgctttcgccaaggatttgcttcctaaatatttcaagcacaacaacttctccagcttcgttcgccaactcaacacttatggatttagaaaagttgtacctgaccgctgggagttctcgaacgagtattttcgaagaggcgaaaagcgtcttctctgcgaaatccagcgacggaagatcctctccgcatctcctccgccggcgggagcaactgccaccgtggcggttccgtcgccgctgccgctatctgcgatcccgacggcgaagccgatcgtgtcgccgtcgaactccgcggaggagcaggtgctttcgtcgaactcgtcgccggcgagagcaccggtggagctgttggacgagaacgagcggctgagaaaggagaacattctgttgacgaaggaattggtgaagatgagatcgctctgcaacaatatattcaatctcatgtcgaattacgctaacgctcaagcggacggtagttccgcggcggcggcgaagcggtgctccggcgaggatgcggtggaggagatgaatccgaagctgtttggggtggcgattggtaagaagcgagcgagagaggaggaaggacatggagcgaagtatgatacggctttgagtctgcatcagccgtttcatgcggacgtgaaatctgaagcgttggatttaccaggacgtggcgaaaataaaaaaacgccgtggctaaatcaatgtcatagagcaaatcagagggtgtgtaattgacacacgacgttgtaatagctaggtaacacgttaggttaagttaggggcgtcgtagagaatcagagtctgtaagcacggagacgcgcgtgtcaaatgtacgtcgttaaccgtttgggacttttttcgtagaagtttctcagaagaaaactatattttgttgttcc

SEQ ID NO: 150 - DNA, 1409 bp, Glycine max
gaagaagagagagacagacagaacaatgggggaagcaaagggaaaggaagaagaagtgttagcctcagttcactcaaccgtgttcaaagaatcagaaagccttgatggaaagtgtgttaagattgagggctatgatttcaaccgcggcgtcaattatccgttgctactcagctccatggtcacaactgggtttcaagcttccaacctcggtgatgccatccaagtcgttaatcaaatgctagattggaggctagttgatgaacccgtagctgaggattgcagtgaccaagagagggatttggagtaccgaaaatctgtgacgtgtaaagtgtttctgggtttcacttctaatcttatttcttctggtgttagagatactgtgaggtttcttcttcagcatcgcatggttgatgtagttgttacaactacaggtggcattgaagaagatcttataaagtgcctggcaccaacatataaaggagatttctctttgcctggagcatatctgcgctcaaaagggttgaatcggattggtaatttattggtcccgaatgacaactattgcaaatttgaggactggattattcctatctttgatcagatgttgggggaacaaaataatgagaatgtgttgtggacaccatctaagttaatagctcgattgggaaaagaaataaaaaatgaaagctcttacctttactgggcatacaagaacaacattccagttttctgtccgggcttaactgatggctcattgggggacatgctgtacttccattccttccgcaatcctggtctgattgtggacatagtgcaagatataagggcaatgaacggtgaagcagtacatgcaagtcccaggaagaccggaatgataattttaggaggtggccttccaaaacatcacatttgcaatgccaatatgatgcgcaatggtgcagactatgctgtttttatcaatactgcacaagaatatgatgggagtgattctggagctcgtccagatgaagctgtttcatggggaaagatacgagactctgctcagactgttaaggtacactgtgatgcaacaatagcatttcctctgctggttgctgaaacgtttgcttcaaaagtgaaacctccccattgatgaaggttaaagatgaatttactctgaagttcattttaattgtgtgtgtttgaggatcttgatggacaagttcggcattggtgttcaatttgactatcatttgattcctaagctcctcttagcagtggagacctttttgaccattcaaaggtaatccattaatcctgtcagtgaggaagtcaggaattatagatgtgaggatcattgtactaatatctttagggaaaataaggctaagaaaactaactgatcatatatggcatttttaatattttcc

SEQ ID NO: 151 - DNA, 1383 bp, Chlamydomonas reinhardtii
cttttgtagacccacttgtcagtgggcactgcccctagaagcggcttcttgaccagagaagatgcgctcagccgttctacaacgcggccaggcgcggcgagtgtcttgccgggttcgggcggatggttcgggcgtggattcgctgccctcgaccagcgccagcagcagcgcacgccctctcattgatcgccgtcagctcctgaccggtgctgctgcgtcggtcataaccttcgttggctgcccttgccccctgtgcaagcctggggaggcaaaggccgcagcttggaactatggcgaagttgcgggtccgccaacctggaagggtgtgtgtgcgacgggcaagcgccagtcgcccatcaacatcccgttgaacacatcggcgccgaaggtcgacgcggagatgggcgaattcgatttcgcctacggcagcttcgagaagtgcgacgtgctgaacacgggacacggcaccatgcaggtgaacttccccgctggcaacctggcgttcattggcaacatggagctggagctgctgcagttccacttccacgcgccctcggagcacgccatggatggccgccgttacgccatggaggcgcatctggtgcacaagaataaaagcaccggcaacctagctgtgctgggcattatgctggagcccggcggcctgatcaagaacccggcgctgtccactgctctggaggtggcgcccgaggtgcccctggccaagaagccctcgcccaagggcatcaaccccgtcatgctgctgcccaagaagagcaaggccgggacacggccgttcgtgcactaccctggctcgcttaccacgcccccgtgttcggagggggtggactggtttgtgttcatgcagcccatcaaggtgcccgacagccagatcctggacttcatgcgcttcgtgggcgacaacaagacatacgccaccaacacgcggccactgcagctgctcaacagccgcctggtcgaatacgagctgtgagcggacacgagtgtgctagggtcagtgagcagcgtgtgaacatgaagattacaagtttgctgacagagagcgggcggagtgcccatgcatcgcatcgtaacagcccgcgaagtacgacttaacatgacataaaagtgcaatgcgcatattgactggtttggcccacggtggggaaggcgtacgcgcggttccatcaagcagcctttggggaggcatcgccttgcacgcacttgccgtatgtaggcgtgctggtgaatgaggtatggggcgagagacccgcgaactaaacttaagtagattacccatgtatcctttatttggcttgcgtgccctctcaattggggcaccgatgcaggggctggaaggccccgtgtaacacatgacactca

SEQ ID NO: 152 - DNA, 900 bp, Nostoc PCC7120
gtttgcaacgtttagtttaatatcgcagtatgtttcaaccgcagggaaatgagtagtactttatatcgaaggcaactactgaaattattgggtatgagtgtcttgggaacctcattttctagttgtgtcacatctccagctagggcaaaaacggtaaactggggatatatcggcaaagtaggcccagagcattggggtgagctttcccctgactttgccctttgccaaataggcagaaaacaaacgccgattgatttgcagattgcagatgtgaaagatgtccacagcagcagtcaagatttgttagttaccaattatcagccaacggcattacacctaatcaacaacggtaaaacagtccaagtcaactatcaaccaggcagttatctcaagtatgctcaccaaaaatttgagctgcttcagtttcactttcatcacttcagcgaacatcgggttgatgggaaattatatgatatggaactccatttagttcaccggagtaaatctggcgacttagccgttatgggtattttcttgcaagcaggagcatttaacccgacgctgcaaattatctgggatgccacacctcaaaaccaaggaacagacaaaagaatagaggatataaatatagacgcttcccaatttctcccagcacaacacagattttttacttattctggctctctgacaaccccaccctgttcagaaaatgttctctggtgcgtaatggcgacacctatcgaagcctctcctgcacagatagctaagtttagtcaaatgtttccccaaaacgcacgtccagtgcaacctctcaacgatcgcctagttatcgaagccatttaaaatttttctgtcaacttccccggattttgtgttgctatgtcatactaagagatgaga

SEQ ID NO: 153 - DNA, 2025 bp, Chlamydomonas reinhardtii
cataacttcaaagcctaaacgtctattcctcgtgccaaggcactttctccggaagcgcacccacctctccgcgccgctcgccttcacgcgtgctctcagctcaacaccactgtaactcaggccttgacgggcttgttttatcaaaaccagcaagaatgtcatccgacgctatgactatcaacgagtcgctgatggaggtggagcacactcccgccgtccacaagcgcattctggatatcctgcccggcatttcaggcggtgtggcccgtgtcatgatcggccagccctttgacaccatcaaggtgcggctgcaagtgctgggtcagggcactgccctggcggccaagctgcctccgtcggaggtgtacaaggactcgatggactgcatccgcaagatggtcaagagcgagggcccgctgtccttctacaagggcaccgtcgcgcccctggtcggcaacatggtcctgctgggcatccacttccccgtcttctcggccgtgcgaaagcagctggagggtgatgaccactactccaacttctcccacgccaacgtcctgctgtcgggcgcggctgccggtgccgccggttctctgatctctgcccccgtggagctggtccgcaccaagatgcagatgcagcgccgcgccgctctggctggcacggtggccgcaggcgccgccgcctcggctggcgccgaggagttctacaagggctcgctggactgcttcaagcaggtcatgtccaagcacggcatcaagggcctgtaccgtggtttcacctccaccatcctgcgtgacatgcagggctacgcctggttcttcctgggctacgaggccactgtcaaccacttcctgcagaacgccggccccggtgtgcacaccaaggccgacctcaactacctgcaggtcatggccgccggcgtggtggcgggcttcggcctgtggggctccatgttccccatcgacaccatcaagtccaagctgcaggccgactccttcgccaagccccagtactcgtccacgatggactgcctcaagaaggtgctggcgagcgagggccaggcgggtctgtggcgcggcttctccgccgccatgtaccgtgccatccccgtcaacgccggcatcttcctggcggtggagggcacgcgccagggcatcaagtggtacgaggagaacgtggagcacatctacggcggcgtgatcggccccgccacgcccaccgccgcgcagtaaatgtggccgcggctgcggctacgtgcttgagcgcccgcgtgtgctctatctagctgctgcaacagctgctgttgcgcacgcggcgcaaggcgcaacctcctggcatgacaacatggctcaaaaggtgtcacgtgtgtgtgtgtgtgtgtatgtttgtgtgtgcgtgtggagagtctggcataggtagatgtggtcgttagctttctgcttcgttccccatcgtgaggcgcatacatgcggcaacaagccagtggatgcactctgggcagaacgtgcgtgtgtgctcgtttttcctagcttagtggtggcagcagcggcaacagaaagaggtaggcagaagcaggagcggtcgagggaacaggacagctgctgaatacaaaggcgtcagacctgaacgtaattttgtgcgggcaccataccccgcttacggtccaagggcatgatgcctttttgatgcacacatcacccctccccgcgcatgtatgttaaatgatgattttgactgctgtttttgagagcggaacaaggggaactgcagtactggctcggacatgagaggagaggccggcgagagaggctcatgacaaaaagtggaatgggcttgcagatgtatatagcagggcaaactggcaaaaggagcgatacctttcgtaagcacagggctgaggtgcatggtcgtggaaggtcacgggagttgagccgctacaccggctgtcagtgctggtctgtttctccatcgggaaacgcgggtcaatatgtaatcgtgatgggtttcaaaaaaaaaaaaaaaaaa

SEQ ID NO: 154 - DNA, 1801 bp, Synechococcus PCC7942
ctggtgcaagccctcgcgactgcgttacctgctggtgcagaggtctttctgcaatccgatgtgctggaagtgcaggcagagatgtgcgaacactttgcggcggaaccccgctttcagcgcacctgcttggactggctgccggaaaatccgctgcccgtcccgaccgagcgcgaaattgccgttcaaaacaaacagttgccagtctaccgtgctctcttcattcggcagccagcggactaagctcttaaggcaagcgttgacgcgatcgcgatgactgtctggcaaactctgacttttgcccattaccaaccccaacagtggggccacagcagtttcttgcatcggctgtttggcagcctgcgagcttggcgggcctccagccagctgttggtttggtctgaggcactgggtggcttcttgcttgctgtcgtctacggttcggctccgtttgtgcccagttccgccctagggttggggctagccgcgatcgcggcctattgggccctgctctcgctgacagatatcgatctgcggcaagcaacccccattcactggctggtgctgctctactggggcgtcgatgccctagcaacgggactctcacccgtacgcgctgcagctttagttgggctagccaaactgacgctctacctgttggtttttgccctagcggctcgggttctccgcaatccccgtctgcgatcgctgctgttctcggtcgtcgtgatcacatcgctttttgtcagtgtctacggcctcaaccaatggatctacggcgttgaagagctggcgacttgggtggatcgcaactcggttgccgacttcacctcacgggtttacagctatctgggcaaccccaacctgctggctgcttatctggtgccgacgactgccttttctgcagcagcgatcggggtgtggcgcggctggctccccaagctgctggcgatcgctgcgacaggtgcgagcagcttatgtctgatcctcacctacagtcgcggtggctggctgggttttgtcgccatgatttttgtctgggcgttattagggctctactggtttcaaccccgtctacccgcaccctggcgacgctggctattcccagtcgtattgggtggactagtcgcggtgctcttggtggcggtgcttggacttgagccgttgcgcgtgcgcgtgttgagcatctttgtggggcgtgaagacagcagcaacaacttccggatcaatgtctggctggcggtgctgcagatgattcaagatcggccttggctgggcatcggccccggcaataccgcctttaacctggtttatcccctctatcaacaggcgcgctttacggcgttgagcgcctactccgtcccgctggaagtcgcggttgagggcggactactgggcttgacggccttcgcttggctgctgctggtcacggcggtgacggcggtgcggcaggtgagccgactgcggcgcgatcgcaatccccaagccttttggttgatggctagcttggccggtttggcaggaatgctgggtcacggtctgtttgataccgtgctctatcgaccggaagccagtacgctctggtggctctgtattggagcgatcgcgagtttctggcagccccaaccttccaagcaactccctccagaagccgagcattcagacgaaaaaatgtagcgggctccccaacaaattcctgtgcacccgactggatccaccacctaaactggatcccaaaggtatccggtggatctagggtcataacgaactccgaccgcgatcgcgtccgcgaactgaacctcca

SEQ ID NO: 155 - DNA, 1135 bp, Zea mays
gtcgaggagtagggttctagcgcctatctggtttctccctgcgccgccgccgccgccgtggacaaccggagcgtagtgggaggggatgatggagggaggtagccgcgcggatgggcggaatccgaaccagctccggccgttcacctgcaccgggaacccgctccaccgcgcccacggctccgcgcggtgggcgcagggcgacaccgtcgtgctggccgctgtgtacgggcccaagccgggaacccggaagggcgagaaccccgagaaggcctccatcgaggtcgtgtggaagcccaagaccggccagatcggaaggcaagaaagggaatatgagatgacactcaagaggacgttgcagagcatctgcttgctcacagttcatcctaacaccaccacctctgtcgtgcttcaggttgtgggtgatgatggttctcttatgccatgtgcaattaatgcttcttgtgctgctcttgcatttgctggaatccctatgaaacatctcgctgtcgcaattagctgtggagtgatggacaatggtgtggttatcttagacactagcagagcagaagagcagcaagctaggtcgtttgctcacctggtgtttccgaactcgcgcaagtcagtcgaatcgaaggacccgacacagcgagatgaggagtccgagcgaggattgataacttgcatcacgcatggagcaatgtctgaagatgactatttcaactgcatagagaggggtgtcatggcgtcctcgaggatctcggatttcatgaggaagacactgcagaaggaggcgtccagggatgcctgacctgagtagcaaatgtattagcacgactgagaagctgcctgcctgtgatagacgatggcgatggcaatggtgtgtagacagcagctgggtctctagtttagacggcatgtagtcgtgttagaacgaaggaggcaagggtgcggagtggaggtcaatcggcgtgtgatgccatgtctcaattgtgcggtggagtggtttggtggacttttgatgaacagataatgaggttgtatttggtggtacccaattgtgtgtgttgaaatcatatgatgcacggcacgctgaaattttactcgaacgccgcccgattaaaacaatatccatact

SEQ ID NO: 156 - DNA, 5218 bp, Saccharomyces cerevisiae
tctagaggaagttttcaattccaaatgggcggataggctaatttggatgactacgattccgatgaagattcgaggacccaaggcgactacgacgattatgaatctgagtattcagagtctgacatcgatgaaactataattacaaatccagccatccagtatttggaagaacaacttgctcggatgaaagtggagttgcaacaattaaaaaagcaagaactggaaaaaataagaaaagagaggcgcttacgacgtggatcaaagaaacgcggcaaaagatcgaagggaaggagtgggtctaagaacgcttcttcgaaaggaaggcgagataaaaagaataaattgaaaacagtagtgacatatgatatgaaacgtatcattacagagaggatcaatgatttaccaacttccaaattagaaagagcaatcgacataataaaaaaatccatgcccaatatttctgaagacgatgaagtagaacttgacctcgacactttagataatcacaccatcttaacattgtacaacactttctttagacaatatgaaagctcatccggtgcttctaacggtttggacggtacttcaggtgttacgcgagatgcttcgtccttgtcgcctacaagtgcgggaagcagaaagagaagatctaaggcattaagccaagaggagcagagtaggcagatagaaaagataaaaaataaactagctatcttagacagtgcttcacctctgagccaaaacggctccccaggccaaattcaaagcgctgcacacaacgggttttcctcatcttcagatgacgatgttagcagcgaaagtgaagaagagtgactgaattttgaatttgattatcttcaacgactgagaagaatgagcaccattttgatattttgattaattaagtggtaatcttaagctcatatacaaaaagggaaggaaaaaaaataaagatagaaaagatcttaggaacggatagaggtttgaaaaaggaataacaggtaatttttcattttcatatcggttgtaacattataaagctcacaaatttaaaacaaaaaaaaacataaacctaacaaggttaatcatttgcacatgatctcatcatatagatcaattcataatctatataataatgaataattagaataaaaatttcctcttgtctcagaacgcccatcggatggcataactttagttaatgatatcacgacggacgaagtattgaaagacaacctaacctgttcatcaatttaaaagtcaacgcagaaactataatacattgccacatagttctttccgatatgaacaacctaactcacaaaatttactgtactaatactaatttatatgtctgagggattcagtagcagttccatacaggaattatatcaatcgttaaaagaaatcactaacaacgcagacgtagagcttttcgaagatcgcattactaaattagattttgagagcaccgatgaaccaaagcatgcaaatgatatcataaaggatagatttttgagaccttctaatgctcttccttggagcttgttggacatggtccaagacgttccacatacgtcttctccagaagattgctctggtaaactagattacaaggaattgctgaaagtcccggacccaattaatagaacatcataccagtttaaaagaactgggttagaaggtaaaatttcaggctacaaagaagaggttgatttgaaggaagttgcaaatgccaatgcatcaaattcactgtcgattacgagaagtatcaaccataaccaaaactcagtaaggggttctacagcgcaattgcctttcacaccaggcggaattcccatgaaatctgtcaagacagattcagaacaaaatggatcttctacaatggccaacgctactaaattgttacacaaggatggtcaaggtttattcgatattccagagggtatgaatagaggcattaagccgatggattctccagctgaaaatgaggatcaaaacggacagttcaaagaattgaaacagctaaatgagatagataatgaattagacataaggattgaggcgaacgaggcaaagttaaaagaggaggaaaaatctgccaagtcaatttctgaagaaattatggaggaagccactgaagaaacgactgccgataatgctgatgatgccgaaatcgatgaactattaccaattggaatagactttggcagaactaaaccagtttcgaaaagtgttcctgttaaaaaggaatgggcccatgttgttgatttgaaccataagatcgaaaatttcgatgagttgattccaaaccccgctagatcgtgtccttttgaattggatacatttcaaaaggaagccgtctatcatctcgaacaaggtgattccgtatttgttgccgcccacacatctgctggtaaaactgttgttgcagaatacgcaattgccatggcacatagaaacatgactaaaactatatatacatcacccattaaagccttatccaatcaaaaattccgagactttaaagaaacttttgacgatgttaatattgggttgattactggtgatgtgcaaattaatccggatgctaactgtttgattatgacgaccgaaattttaagatcaatgctttatagaggtgccgatttgatcagagatgtagagtttgtcattttcgatgaagttcactacgttaatgatcaagaccgtggtgttgtctgggaagaagttattattatgcttccacagcatgtcaagtttatcttattatctgccaccgttcctaacacttatgagtttgctaattggattggaagaactaagcaaaaaaatatttatgtcatttccacaccaaaaagacccgttccattggaaataaatatatgggctaaaaaggaactgataccggttattaatcaaaattcagaatttttagaagctaatttcaggaaacataaagagattctaaatggggagagtgcaaaaggggctccttcaaaaactgacaacgggagaggtggatccacagcaagagggggccgtggtggatccaatactcgagatggaagaggaggccgtggtaattcaacacgtggaggtgccaaccgtggaggttcaagaggtgctggcgcaattggctccaacaagcgtaagtttttcactcaagatggtccttcgaaaaaaacatggcccgaaattgtcaattacctaaggaaaagagagcttctaccaatggttgttttcgtatttagtaaaaagaggtgcgaggaatatgctgactggttggagggaattaacttctgcaacaataaggaaaaatcacaaatccacatgtttattgagaagtcgattactcgtttgaaaaaagaggatagagatttgcctcaaattcttaaaaccagatcattacttgaacgtggtatagctgttcatcatggggggctattgcccattgtcaaggagttgatcgaaatattattttccaagggttttatcaaagttttatttgcaacagaaacttttgccatgggtttgaaccttcccacaagaacagttatctttagcagcatccgtaaacatgatggtaatggattaagagaactgactccaggtgagtttaccctggctggtagagctggtagaaggggcttggattccactggtacagtcattgtgatggcatataatagtcctttatctattgctacgttcaaagaagtaacgatgggtgttccgacgaggttgcagtctcagtttagattaacatacaatatgatattaaatcttttaagaattgaggcgttgagagttgaagaaatgatcaagtattcttttagtgagaatgccaaagaaactttacaacctgaacatgaaaaacaaatcaaagtattacaagaggaattacaaaccatagagtacaaaagttgtgaaatctgtgataatgatatcgaaaagtttttggaattgatgctggcatataaggaggcaacagtcaacctaatgcaagaaatggttaaatcgccttcgatattgcatatcttgaaagagggcagactcgttgcttttagggaccccaatgattgcttgaaattaggatttgtatttaaagtttctctgaaggatgctgtttgtgtcattatgacgttcacaaaaccatacaaactcccaaatggtgagccaaatcatttaatatactttccaaaagcggatggatacagaagaaggaacttccctaaattccagaagactgatttttatatggaagaagttcctgtgacggctattgaagtgatcactaaacgcaagtttgccgcacccttgggaaaagtgattaaaaaggatgttgccgctttgaacgagtttaacgctgaaacaaataacattttggacggcaaaacgctaaaagaagcaattaacattgaaaagcaaggtttaaaaattcaccaaatattgttagaccgtacaaatataagggatgagatattcaaactaaaaagcattaaatgtcccaacctaagccaacacattgttcccaagtttaaggcgcatgtaattaaaaagaaaattgaagaattgtaccatttgatgtctgaccaaaatctgagcttactacccgattatgaaaagagattggctgttctgaaagacactgaatttatcgaccaaaaccacaacgtgctgttaaaaggtagagtggcatgtgaaattaattctggttatgagttagttttaactgaattaattttagacaactttttaggaagctttgaacctgaagagattgtagccttattatcagtatttgtttatgaggggaaaaccagggaagaggagcctcctattgtcacaccaaggctagcaaagggtaaacaaagaattgaggaaatttacaagaaaatgctttgtgttttcaatacgcatcagattccattaactcaggatgaagctgagtttttggacagaaaaaggtttgccatgatgaatgtggtgtatgagtgggcccgtggtttatcattcaaagaaatcatggaaatgagccccgaggctgaaggtactgtagtcagagttatcacttggctagacgaaatttgccgcgaagttaagactgcctctattattattggtaattccacattacatatgaagatgagcagggctcaagagttgattaagagagatattgttttcgccgcaagtttgtatttatagagagctc

SEQ ID NO: 157 - DNA, 5192 bp, Saccharomyces cerevisiae
tttgtaatgcaaataactggacgagagaaccacgctataacctatttggtaataaaaatgtttgtatgaataaaaaagctgctgactgctttctttgatatgtgtatatagaatatttaatcggtgattgaatctaagaaaagcttacctctgaaagttctctcttcggtcgcttgctgatttgtagtaaacaatttgaaaagtttagcaaattcttcctcaggattttcaaaaccggcttcctttaaagaatcaatgacctcattcaagggaacgtttaaatcgtgtcctcttccaatggcttttaaactttcttccaattcttcacgctcgggaaactgcgataagttcttccccatgatagataagaatatgggaaagcttacaccttcttctccaacttccgcggtactggtgtcattgtcaggtaccattttggaccattcctcatctgtcaatgtcttccccaatgttgcatatatcttggtaagatctcccctactaatcagaccatcctcatcctcatccagcatttggaaagcatctttgagtttatttatgtagtcctgcgtaagttggttaaacgttagcgattcactatggtccatatctacttcaagtttgctcaataaacgattcgaaattactcttttcttagctgtgcattgtatagtttagaaatacgagaaatgtaaaaaaaaaaataaagttggaaaacaactaactaataaaactttcttgtcaagaaagacactaagaacacagaaaagaaacacgaagagcagaggaaatatgtcggatattaaacagctattgaaggaagccaaacaagaattgacaaatcgtgactatgaagagaccatcgaaatatcggaaaaggttcttaaactagatcccgataattatttcgcacatatttttctagggaaagcactttcgagtcttccagctagtaataatgtcagttcaaatcggaacctggagagagctactaatcattacgtgtccgctgccaaattagttcctgataaccttttagcgtggaaaggactttttctcttatttagaaccactgaggttgtcccagacatactttcgtatgatgaatattttgacctgtgtggccaatatgcagacgcacttttaaagcaggaacagtctcaagtagaactaataaatgacataaaattactaaagaaaacgcatccagattgtcaaaaagccttttatcagcatttgaaacctgggtcgctaatggcggaaactattggtcgtcatctatctacaccccaggacgctttattaaatcttataaagatactgtctaatattgaaacaacggaaataggtaagacccttagtcagaacaggttaaaactaaaagctagtgatcctgattatcaaattaaactaaattcattctcctgggaaataattaaaaattcagaaattgatcagttatacaaccagttggtaaatattctcgctgacgatcaaaagagaagtgaaattgagaaccagtggttagaatatagaatcaaagtgctaaaatcaatgccgctggatgtaaaaaaagattttttcacgaaagttaaggaaatggtcgaggatatggttcttgtgaatcatcaatctttgcttgcatggcaaaagtatttcgaatggacagattacgaagatctggacaacatggatgccccattgataataaagtactttaagaaatttcctaaagatccattggccatgatcctctattcctggctttcctcaaaactatcgaaatatgatattaaaagtttggaatcggctaataaaccacctgaaggccataaaaagacggagaaggaaacagatattaaggatgtagatgagacaaatgaagatgaagttaaagatcgcgttgaagatgaagttaaagatcgtgttgaagatgaagtcaaagatcaagatgaggaggcaaaggaagatgaagaagaagaccttgatgatatagaaattggtttattagaggaagaggttgtcactgtattgacggagaatatcgtaaaatgtaaaaataatatcttagcgcatcgcattctttgtcaatattacctactgaccaaggagtatgaggcagctttaccatacatcaaaaatggtatttctttaattgcctataatataaaggacctgggggtacatttgccattaacaaaaagagaattttctctggatttggctaccgtttatacatatgtcgatgccccaaaggaccacaatgctgcattaaagttatatgataacattttatccggtgattttagtaatatacaagcaaaaatgggcaaaggtataatttttattgaaaggaaaaattggaaggatgctatgacattactaacacaggtgcatgaacaatcgcctaataatctggaagttttatctgaactgtcatggagtaaagcccatatgggttatatggacgaggcattagctggcttagatactgtcatcaagggtatcaaaggtatggatttacgttcgatagatttcagagcattaaacttatggaggcaagccaaagtttacattatgaagcatgcttccattaacgatgctaaacaggaaaacgtcaagtgcgcattcaaattactcattcagagtattaaaatattggacacttttgctcccggattttcgacactgggcgatatttattgccactattataaagaccatttgagggccttcaaatgttatttcaaagctttcgatctggatgcgggggattacacagcagcgaagtatattaccgaaacttatgcaagcaagcccaattggcaagctgcttcttccatcgcttcaagattaattaaaggtgaaaaagcaaaggcagaactgcgctcaaataactggccctttagggtcgtagggattgctcatttggaaaagcaagaagaaagtgattctattgagtggtttcaatctgctttacgtgttgatccaaatgatgtagagtcatgggtgggcctgggacaagcataccacgcgtgtggtcgtatagaagcatctatcaaagtttttgacaaggcaattcaattaaggccctctcatacttttgcccaatactttaaagctatttctctatgtgacgtaggtgaatatcttgaaagtttagacattctggaaaaggtatgtcaagaagccgctacagaagagtcattccaaattggtttagtggaagtgcttatgagatgttccttggatttatattcgcaagggttcttgctcaaatcagtttcaattgcaaaggacactattgaacggatcaagataattatcagtgaattaaaatgtgagaaccaacaggtttggatctacctttcacaagtactgagattatttatttggatagagtcaaaggttgatactttacctgttgaatcactagtatcaatttttgaaaattctcaattttctggtagtgaagaaattgattctgtcgacaatatcaaaatcgatactttactcgatagcactactgatgataatgtgtccattgcgtgcaagtttttgatcttagcttcaaaatatagtgtttcggatcaaaaatttacagatatagcaggaacggtcagggcctcatactggtataatataggtatctcagagcttactgctttcataacattgaaagaaccgcagtatagagatgctgctatttttgcttttaagaaatccattcaattacagtctaatataagtgaaacttggattggtctagggatagccactatggacatcaactttcgtgtctctcaacattgctttattaaagcaactgctttggaaccgaaggcgacaaatacatggttcaacttggctatgctaggtttaaagaaaaaggatactgaatttgctcaacaggttctgaataaattacaaagccttgccccacaagattcgtcaccttggctaggtatggccttgattcttgaggaacaaggagacattatcggaagttctaaactttttgcacactccttcatattatctaatggaaggtcaaaggctgcgcaatttatgtatgctaaaaatgtccttgagaatcacattaataatggtgacgatgaaagagatattgagacagtggaaaaactaaccactgcttcaatagctttagagcagtttttcaaaaaaagtcctgatagtcaatttgctcttcaatgtgctcttctaactcttgaaaggttacatcactatgaaaatgcaaacgaactggctaatcggttgataggcattttggaaaaaaagtttgagaaaactcaagatgaaagagaactgtttaattttgcgataattaaaggacaattcgctcgtattcacttaggtttaggaaatttcgaactctctattgaaaacgctgatctttctcaaggtattatatctgaatcgagcgacgaaaaatcaatgaaaaccaaaatatccaatcacatttgcttaggattaagttatttcttcttaaacgactttgatcagactttgaaccaattccaagaactgctaagcatttcaaaggattctaagcacctagttgttttaattgcgaaggtgctttatgatgtaggtgaatctgacacaaaggaaattgctttacaggaactaacagaatatatagccacaagcggcgcagacttgttagtaacactaacgattgcagctatgtcaattctagacgataagcgtgaagatttaagcattattttagaagaattgaaagctttgccattatccaaacaaataatagataagcacaaagacgcaccatatctgatagaagaaattactaagagactttatcgtaacgataccggtaaacaagtatggcaaaggagtgcgtactttttccctaataacctcaaggtttgggagagattagataagaatattcaacgaagaatagcttctaatggacaaaataaagttactgcggaggagatgagtaaactatattgtgagagtaagaatttgagaagcatacaaagaggtatgtttttgtgcccttggaacgttactgcagtgaaggcgctaaacgaatgtttctaaaaatttggattcgagatagtcaatcaaaccttaatgtaacattagtaataaattttatcttttctatagagtataaaaggttattagacagagtttatcag

SEQ ID NO: 158 - DNA, 1386 bp, Saccharomyces cerevisiae
agcagaaaactgggagaaatggaaatgaatcaaatcatacatatcaagacattctagtttttataaacctataatttatcgcaagaatcttgggtgttatgtgttgtatttgcggcatcatttcaaaataccgtctgcattacccgtctccgtcacgtgaagtaaaaatttccaaaaaatattgaaaaaagaaagaaaaataagatccagaattcactgatgatgagcttatggtacggcatgattaactacgcatttgtatattaaagattctttgattttttccagagcattgaatacctcaatctataagtgtattataatggcatgcaattttcagtttccagaaatagcttatccaggtaaactaatatgcccacagtacggtacggaaaataaagatggcgaagatataattttcaattatgtgcccggtcccggaactaaactaattcaatatgaacacaacggacgaactttagaagctataactgctacactagttgggacagtgaggtgtgaggaagaaaaaaaaactgatcaggaagaagagcgtgaaggcactgatcaatctacagaggaagaaaaatcagtagatgcatcacctaatgatgtcacaagaagaactgtaaaaaatattctggtttcagtgcttcctgggacagaaaagggtcgtaaaaccaacaaatatgctaataatgattttgccaataacctaccgaaggaaggtgatattgtgctgaccagggtgacaaggctttcgttgcaacgagccaatgtcgaaattttagctgtggaagataaaccatctccaattgatagtggcatcggcagtaatggatcgggaatagtcgctgctggtggcggttctggagcagctacgttctctgtttctcaagcatcatcagatttaggtgagacattcagaggtataatcaggtctcaggatgtacggtctacagacagagatcgtgtgaaagtgatagaatgtttcaagccgggagatattgttagggcgcaagttttatcattaggtgacggaaccaactactatttgaccactgcaaggaatgaccttggggtcgtgttcgccagagctgctaatggtgctggtggattgatgtatgctacagactggcaaatgatgacttcaccggttacaggcgctacagaaaagcgcaaatgtgccaaacctttttgatatgtaacagcttatctacagtgcatatagacgcgtatatatttaaaagagggtattcgcttcttcttctttagattgcattctttgatggttaggaaaaagaagcgggaacgtgattaaactttttattctcttttatttattatatattatagtgcattatcattatctatctaaatttgcct

SEQ ID NO: 159 - DNA, 1857 bp, Saccharomyces cerevisiae
taaagtactaatctcatcctccttttgtttttctcgagagggcccccttattcgtccgcctgagattgcattggccgaattgaaaagtgacagttatgcacctcagcggctattccctgcgtcgcttgctgaagattgaggattataggaagtagtaagctggaaatggtaatttgtaaaaagaaaatttctaatactgtgacaatgttattaaatcggggttgtttttgtttggggcggccagcggaataatttgttttcaaggacagcagaagctcagaagaacaaaatctccgtgatcttttaaacttttttccattctgatggaataatggtcttgatcccctaaatatttccttttttattgcaattatgatagaaattaatagtagtctatgctggatgatatatatatctcttttgagcttgcttcaaattttttcccgttataatgatgagtgttttgcttattaagggtctaggacatttctatcagtttctataccaaaagaagaaaaagtggagaattgtttgtttattttaatattttgttctttagttttaaaaattcagaagagaaaaaaattttatttgtcacaaggaaataaaacataaacaaaaaagaaaaattaagatttgcaattctgccgcttaagcaaaagtagatcattcactggaatatatatatataaacgcatttataatcttgtaacgtgcactcaatttagctacgaaagccaaccagcaaggaaccttttatttgagtaggtacatttacatcttcgggtaacgcggtgaaattgaaaaattttaaggcattaataattgaaaagctagaagaaatggatgaatgaatgacattgcgaaccattgtgcaatgaacatcatccaaaagaaaacatcatttacacatattttctttccagggtcccactggtaaaatctattaacatataaaaagatttacaaaaaaactttagtgccataactacagcaggatcatcatatgtcaagactagaaatatactcgccagaagggctacgtctcgatggacgtcgatggaatgaactccgccgttttgaaagttccatcaacacacatccgcacgctgcagacggttcatcctacatggaacaaggtaacaacaaaattatcactcttgttaaaggtccaaaagagccaagattgaaatctcaaatggatacctcaaaggctttattgaacgtatcggtaaacattacaaaattctccaaattcgaaagaagtaaatcaagccacaagaatgaaaggcgtgttcttgagatacaaacctccctggtgaggatgtttgagaagaatgtcatgctgaatatctaccccagaacagttatcgatatcgagatccatgtccttgagcaagatggcggtattatgggatctttaatcaacggtattaccctcgctttaatagatgccggtatatcaatgttcgattacataagtggtatatccgtcgggctgtacgatactaccccattattagataccaattcattagaagaaaatgctatgagtacagtgacactaggtgtggtagggaagtcagaaaaactttctcttttattggtggaagacaaaattccgttagataggttagagaacgttcttgccatcggcatcgcaggtgctcatagggtaagagatttgatggatgaagaactgaggaaacatgctcagaaaagagtcagtaacgcctctgctaggtagaataaaaaacgccattaattgccactgtttatataaaagtacataaaaaacagtaaaattgaaaattgaacgcatttacattttcgtgtttctaccgtaaagcaaaacgc

SEQ ID NO: 160 - DNA, 2646 bp, Saccharomyces cerevisiae
cgctgtgattttctacaatcaaacaaccctgtgttttcgctctttttaggacttgtcaagaaaagaatgatgatactgacttttccatttgatattaatttcaactagcggagtttttccagttttcaaagtacaggacaaagtgttgtgtaacccggaccagatttacattggtgtactataatatgtactataacagattggaggtataaacctagagacccttctacaatacacgtacgaggaggtggtcttcgaaacttacagtaccacctgacatgtcgttattagagcaattagcaagaaaaagaatagaaaaatctaaaggccttttaagtgcggaccagtctcatagtacatcgaaaagtgcatccttactagaaagactacataagaatagagaaactaaagataacaatgctgagacaaaaaggaaggatctgaagacgctacttgcaaaagacaaggtaaaaagaagcgactttaccccgaaccagcatagtgtttcattgagtttaaagttgtctgccttaaagaagtcaaatagtgatttggagaaacaaggaaaatcagtgacattagacagcaaagaaaacgaactccctaccaaaaggaaatcgcctgatgataaactcaacttagaagagtcatggaaggctattaaagaaatgaaccattactgtttcttgaaaaacgatccatgcataaatcaaaccgacgattttgcgttcacaaactttatcataaaagataaaaaaaactcgttgagtacatcaataccgctatcgtcgcagaattcatcatttctgtccttaaaaaagcataacaatgagctccttggtatttttgtgccttgtaacctgccgaaaacaactcgtaaagtagccattgagaatttcaatagaccaagtcctgatgatataatacaatcggcccaacttaatgctttcaatgaaaaattagaaaacttaaatatcaaatctgtgcccaaggccgaaaaaaaggaaccaattaaccttcaaacaccacctactgagtcgattgatattcattcattcattgccacccatcctctgaatttgacatgtttgttcctcggtgatacaaacgcaggcaaatccactttgcttggtcatcttttatatgatctaaacgaaatttctatgtcatcaatgagggaactacaaaaaaaaagcagtaatttggatccttcatcttcaaatagttttaaggtcattctagacaataccaaaacagaaagagaaaatggattttccatgtttaagaaagttattcaggtagaaaatgatttactaccgccatcatcaaccttgacgcttatagacactcctggtagtatcaaatacttcaataaagaaactctgaactcaattttgacctttgatcctgaagtttatgtattggttattgattgcaattatgactcgtgggaaaaatcattagatggtccaaataatcagatttatgaaattttaaaagtgatctcttatttgaacaagaattccgcatgcaaaaagcacttgataattcttttgaataaggcagatctaattagttgggataagcaccgactagaaatgattcagtctgagctaaattatgtgttgaaggaaaactttcagtggacagacgcagaattccaatttatcccgtgttcgggtttattaggttcgaatttgaataaaactgaaaacatcacaaaatctaagtataagtcagaatttgactctataaattatgttcccgaatggtatgaaggtccgacatttttttcgcaactatatctattggtagagcataatatgaacaaaatagaaacaactttggaagagccatttgtaggcacaatactgcaatcttctgttcttcaaccgatagcggagataaattacgtgtcactcaaagtcttgatcaacagcggatatattcaatcaggccagacaattgaaattcatacacaatatgaagattttcattactatggtatagtttcaagaatgaagaattcaaaacaaatactggagactaacacaaaaaataatatatcagtcggtttgaaccctgacattttagaggttcttgttaagattcataataccgaagacttcacgaaaaagcaatttcacattcgtaagggtgatataataattcactctagaaagacgaatacactatcaccgaatttaccaaacacactaaagttgttagccttgcgtttaataaaattatcaatacaaacgcacgcgctaagtgatcccgttgacttgggttctgaattgcttctttaccataatttgacgcacaacgcggtaaaattggtgaagattctcgggactaacgacatctcaattaatccaaatcagtcacttattgtcgaagtcgaaattatagaaccagactttgctcttaatgtgattgattccaaatacattaccaacaatattgttttaacatcaatagatcataaggttatcgcagttggcagaattgcatgccagtaatcctacaactaagaaattatactaggcattcatacttattgtttaatatataaaatgaatagtaataagttgatgatagattgatttttttaacccattttacacatatcttatgaaagtgata

SEQ ID NO: 161 - DNA, 6001 bp, Oryza sativa
cacgttgcgaaatgctgactgctgaagctgcttatatatgtgatgattgtatttttctgtgtacgctagcgtcattacgcggaggcccatgtatatgtagttttatgaacttagtattatcaagcaaagaagtacagtgaacttgtccttataagttgcttttatttttatccaagtttgaccaactttataaaaaaatatactagcattttcaacataaaataaacatattatcaaaatatgttcaatgttaaatttaataaaaggaaaaaagtccactttgactcccttaaaagtcacccgaatctaatccgtgaccctcaaccgtaaaaccggataggatgactccccgaactattcaaactagtgcaatttgactccctcagcggttttggatggcggttttgctgatgtggcgttgacgtgccgacccgatggcaaccgtgcggtgccgtaccggcccatgggctcagacgtcgggccaagcacggcacggctgaacgggtcgtgccggcacggcccacgagcgggcgtgccgtgccgttcctgggccggctacagtgctgccgtgctcgggccggcacgccttggcccggcccatttggccaggtatactagtcggctccagtcctcctccccccagcgacctaagccgccaccgccctcgccgcgctaccgccagcgccgcctgccgtccctccgtccctcctcctccggcgggcgcgcggcctgccgtccctcgccgcgcgaccgccagcgccgcctgccgtccgccgtccctcctccgccagcctccgtcgccgcctcccaccagcgccggcccgtcggcgtcccccaggccccagcgcgcgaccaccagagctcgccgctgccggagctcgcccgtcatcgtcgctcaggcccccaggccctcgccggagctcgcccgtcatcgtcgcccaccgagccacttcatacttcaatcaagctatttgttcaaagcctcctttcttgatttgatggtagggttagtgttatttgtaaagagaaaaccagcttccagatctcgaatttgcctcaaacttatcttctcttgtagatctggaagctaggttttctctttacaaataacactattttttcccccattaggtctgccctgtgtcagcaggatgccgcgcaaggttgtctctgggcctgactacgatgatgagtacaatgatgactatgatgagtatgatgaagactatgatgattacggtgggactgggcacagtgacgacattcagcaccctacgaaggagaaaggtattatgtcaaaggtttgaagctagtactagacagtgtacacctcagcatgtaagaatggtgaaatagctattggagtcgcttcatgatgcacacctaacatatctactcgtgtaggttagtcacggcggtgtaggttactaggagccttcacccgttatcataatttgctcagtggtgttaaatgttgttaatgtcattacattgtttccatcctgcattcgtacttgctatcgcatcctctattgcctgattatgcaaataagaatttctagtgcttaattactctaaaacttccaatagcattgcttgttcaaacaaatgcagtgatcgtgtagcttatgtttgccgattacctggtcttgtgataatttccttgcccatttatcccatcatatgcacttcagatatttgttttcttgaaggcattgttattcaacatgcattttttggaatgagtcaaatatcattcatccagtccatcaaaataaaaacttactacaaattaaatctacccaaattgggtgagaatcgaaacatagctggctgccagttagaactaccagtattacctactggttgcttgctgaatcctggtgcatatgcatattattgttttatatatttgacacattttgaaataattcatatgcttatacatttaaccgttgctttccgcataagctccacgcatcgaatgctttgctttgttgttgtacagtgaagtttttttgtgacttactcagcatatcaagctaactgcgtgtagtgcagctccttgatctctaatgttatgtcaccactctattgtgcagagtcatcgaagaagtcctcaagtatggtgcctgtgctttggagatgctccatgtgcatgttcgataatcatgaaagcatggtgtattgtgagatgtgtggggtttttcgagaatcctttatgaaatctgccaaggatggttcaataaaaggtaacatccttcacccattctaattctctttgaatcacaatttgtattctgacaaggaattctaatgtaatcatagtgtactataactattaaattacagtccatgggataccaagtgattttgggacaccttcgatgccgaaatctgattctacaaagatgccagtgaatactcgtactacagactttggtggtgaccctgagataaagaatgctagcatatctcatgagaaaggtactgctggtgcaaatggtagatgctgtacaattttgtgtatgcaactctgttctacctttaaactagcttctcctaccataacaccttattgagttatgaaaaggataattcataattcaccatataaaagaatcacattagctcatcttatgtgcgggaagcagattttgatccttttctttcccaagcaccattgtcacttactgtggctgaacagattgttcccttgcataccactaaaaaatgtttcacttgttggacaacaacaacccacagctcacgtgtcatgccctctgaagtctgaaccaagctacttttgtaagggtgacttatttgtacttgatttgcagatcttcccaaccagttgtatcatctgttggttgataagccttcctgttgaaaaaaaagcctgttagctttgttcttttattgtcaccttaatttaaattattttattattcaacagttggttccacacagtacgcatctgttggtagctcatcaggcgctgggaaaaaggtgaaacacattgcacttcctgaagatgtgcctgtcgagaggacagctcaattgatttctgatcattttcagctgaaggaggaccagagtagtagggctaccagttctgcacagaatgaggatgtggcccagaaactttcttctgacatacagaagctaggtttagaaaagaatgaagtagatactgcaaaaccttatttacctgaagaatataagcctgagaagtggatgtttgctaatgaggaatcaggagtgctgagccaactaaaccttgcaatagtatgctatactcatcttctgttctgaatatggcatatgttccgtaacaattttgttattctaaaagtgctttgtctaaataggttactgtctacgaacaatttgtttaggtaggtcatgttgattctggcaagtcaacactctctgggagactgctacatctgttaggaaggatatcgaaaaaagatatgcacaagaatgagaaggaggctaaagaaaaagtaagtttattattgttgttattgtactatacttgatcctgatgttccattcatattcttgtattatggaaattattttttaccagggaaaaggatcatttgcttatgcgtgggctatggatgaaagcagtgaagaaagagaaagaggtgtgacaatgactgtggctgtggcttatttggagaccaataagtaccgtgtagttttgcttgactctccaggccataaagattttgtaccaaatatgatatctggcgcaacgcaagctgatgcagctattcttgttgttgatgcttgcactggttcatttgaagctggcatggacggtgaaggagggaaaagtgttggccagacaaaagaacatgctcagcttattagaagcttcggcgttgaacagcttattgttgcggtcaacaagatggatgccatcgggtactccaaagaaagattcgagttcatcaaggttcaacttggtagttttctgcgggcatgcaacttcaaagattcatctgttacctggattcctcttagtgctgttgaaaatcagaatttgatcaaaattccttctgatgtccgtttaacttcctggtaagttatgttttgacacactacttccatgccattcgaaacactacattgtgtagaatttttcaacagagatggctgtttcatgcatcttgcaatttctaaccttttcacatggtaatatcgacatattgtagtaagcactcgtgagaatagcattactgatattttgaaatatttgggaccatactgtcttattagaaaaaaaatcatttgtttatctgaagaataggaatcttgaactgatgtcctttcaggtatcaaggattttgtctcttggatgctatagattccttgcagcttccatctcgggatgtttcaaagcccctcattcttcctatctgtgatgttatcaagtctcagtcaacagggcagttggcagcatttggaaaattagagactggagctattcgaattggttcaaaggtacattcctcacaaatcagcagggactattgatacttgtatatttcattgagatgagctccaaatatgaggatagaggaaagattgatcaagagcgtttacattgtgacatttgctagttgcatatttgcatgccaatctttcagtaacagcatgatgtcggaatttggtctttttaaaaaatatatatatttatacttgcttttgtacgcaaatgtcttgacattcctatctgttttgacagcttggaacttgctgttgcaggttttaatttcaccttgtggggaagtggcgacagtgaaatccatcgagcgggattcaaattcatgtgacatagcaagagctggtgataatgtagcggttagtttacagggcatcgatgggagtaagctaatagcaggtgggattctttgcaaccctggtttcccagtgcctgtctctaacttcttggagctaagggttctagtgttggacgtcaccattcctatccttattggctatcaggtaaagatatgaccaaaagctctccttttgattattttcttccctgatgcaatctgataaaaatatgggcctaggtcgagtttcacatacatcatgtgaaggaggctgcgagggttacgaaaatcgtggcattgcttgacaaggctggcaaaccaagcaaaactgcacctcgatttcttaagtcaaagcagaatgcagttgtgcaggtaacaactgatcacagatccttgtgaggagccattgcttccgaagtcatcatttgcgatgttgtgattttcttgatatttgtcaggttaccttagacgctccggtctgtgttgaagaattctccaaatgccgagctcttggcagggcattcttaaggtctggtggaagcacaatcgctgttggagtcgtaacgcgggtactcgggcaagatcagaactgaaagacctccgcccaacatctgaaaatttgaacgtatctgcagccgtgccctgctttggggtccataatattgtagttgactcaaaacggtattgccgatgagaagaagtttggcgacggcatttttcactgtgtgttcgtcgccatttcagaatttaatccgtcactcttttagttatttgtaattttcttatgcctaatgaaaaagggggtttcaggatttcatttttatttagacaggggcacaagaaaagaagacagtgcaacgtactgcatataaaatcgcatccgacctgaccaatgaatactacatttgactgttggtgatagggaggaaattacgacatggccattaatccgttggtgatttaatgatctgatggcactagatctacatctacggagttgctagaaatatggcgctatatgctacagttgatttttttagccacttacacagtagttatatcttatttacaccccacttacatatataattagtatgtaattttcgaatttacatatgtaattttagtacttacatatgtaattt

SEQ ID NO: 162 - DNA, 901 bp, Synechocystis PCC6803
ctatgagcagcagggctcaccagaggcgcaacggctagaactgcggctgcaagccatgggaattcggctatgacgggcaaagtctatctcgtcggcgctgggccgggcgaccctgaatatctgacgctgcaggcacagcaatgtttgcagtcagcagaggtgttgatctacgacgcgctgatcgacccccgaattctcgacttagtgccagctaattgcgatcgcattgccgtgggtaaacgcggtggcgcggagagtacgccgcaagccactatcaatcaactactggtcgagcactgccagcaagggcgcaaagtcatccgcctcaaaagtggcgatccctttgtctttggtcgcgctgccagtgaattggatgcgctggagcgatcgggctgtgattatgctgtcctgcccgggctttcgaccgctttagcggctccactgttggcgggcattccgattaccgatccggtgctgagccgtggctttgcggtttacaccgtccatgagccagacgcgttgaattgggaagcgctggcgcaactggaaacgctgattctgctgatgggtagtcgccacttgctgacgattggccacgagctgattcggcatgggcgatcgccggatagtcctgtggcgctgattcagtgggccggacatccacagcagaccgttttggaaagtagcctcagccgcatggcgcagcagtggggcgatcagccgttatcgccctgcgtaattgtgattggcgaggtggtacggttgcgaaagtactgggcgcactaccgttacgatggctgagcagccgctgatcggtaaaaccattttgacgacgcgagccgcggggcaatcttcgccctttgccgcacaactgcgggccgctggcgcagccgtgatcgag

SEQ ID NO: 163 - DNA, 774 bp, Xylella fastidiosa
atgagcgtcaccctggtgggcgctggcgccggcgacgccgggctactgaccttaaatgcactgcgcgccttgaatgaagccgacatcatcctctacgaccgcttggtcagcgacaccgtgttacaggtggcacggcgcgatgcggagcagatcgaagtaggcaaatccgcgacaggccacagtgtgcgccaagaagacattcacagcctgatgctgcaacacgcccgtgctggccagcgtgtcgtacggctgaaaggtggcgatccattcgtcttcggtcgtggcggcgaagaactggaatttttacgtacccacaacatcccctatgaggtcatccccggaatcactgccgccctggcctgtgccgcctatgccggtatccccttgacccaccgcgaccatgcccaatcgctatgcctgatcaccgcccattgccaatcctcgctagacaccctggactgggctgcactagcacaagaacgccaaacgctggcgttctacatgggcgtggcggggctacccaccatccagcaacgcctgtgtgaggctggacgcgccgaaacaacgccttttgcactgatcgaaaatggcgcacgcgcgcaacagcgggtgctcaccggaacgctgaaaacactcgcgcacaccgcacagacatatgccgtgcgcccccccgcactgctgatcctcggcgaagtcaccacgctggccgaacacctgcattggttcggcaccgcaccattatctgccccatgcccccccgcactcatcctataa

SEQ ID NO: 164 - DNA, 1637 bp, Zea mays
ccccgcgcatcgccatggctctcgccgtccgcacgcctcgcttccagcctcgaccggcctccatttctgcgcccacaacacccgcatcgacctccctcgccgccgggaacgcgaggccccgcccctgcgccggcgccgccgttcgcgcctcgcccttcaccgaggccacctcctcctcgcgctaccgccgcgacgcctggtcatacgccgccgatggctcctccaactccgcatccccgtcctccgctgccgctgctgccgcgggccgtcgggatgacgagatcgcgctgcagctgccggaactgcggaggctcctggacgtgctgagggcgtccagggggaggggcgccgaggagggcggcggacccggggaggtggcactggtgggcacagggcccggggaccccgagctgctcacgctcaaggcggtccgggccatcgaggcggcggacctggtgctctacgacaggctggtgtctaacgacgtgttggacttggtcggggagggcgccaggctgctctatgtcggcaagaccgcgggataccacagccgcacccaggaggagattcacgagctgctgctgagctttgcggaggccggtgccaatgttgtgcgcttgaaaggtggcgatcctctggtttttggaaggggtggagaagagatggatttcttacagcaacagggaattaaagttgaagttatcccaggaattacttctgcttcgggtattgcagcagagctaggcattccgttaacccatagaggtgttgctaccagtgtcagatttttaactggccactccagaaatggtgggacagatccactatatgtagctggaaatgcggctgatccagacactactttggttgtgtatatgggtttgtcaacacttccatcacttgctccaaagttaatgaagcacggcctgccaccagatacccctgctgttgcagtagagcgcgggactacaccccaacaacgaacggtgttcgcctcgttgaaggatcttgtggatgaagtcaagtcagccgatctagtttctccaactctaataattattgggaaagtggtatccttgtcacccttctgggttgagtcatctgaacatgatgcactgaaagttcagagctcgtatgcaaatgaggcagatgacaacagattttcttggtttttagtgactggacaatacttgagaaatgcaagatcccagatatgggagcacaggttcgacctggtgtacacagaaacatctcaggaagcatggatcctgaatggcggatggtagcttaagcttataacagacttggggcagaagcgcacttggactgatcatgcttgattctttggcctaatctacatgagattcacaatttttcgatttagttgagttcgacaatagttgtgtgcttctttgttactagtagccatgtacgtgcggcgcagcggtgtttacgattctatgccctagcatagtaaggctattccaacgctgccacgttatgattttatgataatgggagtttcgtagcaccatgataatgagaaatagtgctacgaagctcttattatatgacaagtgccataaatcgtagcacttatgattttatgatatggggagcttcgtagagctctttct

SEQ ID NO: 165 - DNA, 1794 bp, Zea mays
ggcagccagcaggggaggaggacacgaatcgtagtcggcctcccgcccgccccggcaattgttgttgctgctgcgcgcagggcggttctggattgcggtctgccccacccacgaacaatccatggctccatctccgcctcggcgtgctgcgctcctcctcaccactgtgcttctgctggcggcggccgggtccacccccggcgccacggctgctggcatcttccaggtgcgccgcaagttcaccgccggggtgggagggggtgctggcgccaacatcagcgcccttcgcgcccacgacggcacccgtcacggccgcctcctcgcagccgccgacctccctcttggcggcctcggcctccccactgacactggcctctattacacggagatcaagctcgggacgccacccaagcactactacgtccaggtcgacaccggcagcgacatcctctgggtcaactgcatcacctgcgagcaatgcccccacaagagcgggctcgggttagacttgacgctttacgaccccaaggcatcctcgaccgggagcatggtgatgtgcgatcaggcattctgtgcagccacctttggcggaaagctgccgaagtgcggcgccaatgtgccctgcgaatatagtgtcacctacggtgatggtagctcgacgataggttcctttgtcaccgatgcgctgcagtttgatcaggtgactagggatgggcagacacagccggctaatgccagcgtcattttcgggtgtggtgctcaacaaggtggggatttgggaagttcaaaccaagcccttgatggaattcttggttttggtgaggcaaatacatcaatgctatcacaactaactaccgctggtaaagtgaagaagatatttgcccattgtttggataccataaaaggaggtggaattttttctattggagatgtggtgcagccaaaagtaaaaacaacgccattggtagccgacaagccacactacaatgtgaaccttaagacaatcgatgttggtggcactactctacaactcccagctcatatttttgaaccaggagaaaaaaagggtaccataatcgacagtggtaccaccttgacataccttccagaattggttttcaaagaagtaatgctcgcggtatttaacaagcatcaggatataaccttccatgatgttcaaggttttttgtgtttccaatatcctggaagtgtagatgatggattcccaaccatcacattccattttgaggatgatcttgcactacatgtgtatccccacgagtactttttcgcaaatgggaatgacgtatactgcgtgggattccaaaatggtgcatcacagtcaaaggatggaaaggacattgtgcttatgggagatcttgtcctttccaacaagttggttatctatgacttggaaaatcgagtcattgggtggactgactacaactgttcgtcgagcattaaaattaaggacgacaaaacgggcgcaacatctactgtcaattcacatgacttgtcctcaggatggaagttccactggcacatgtccccggttctattgttggtaacaacggtgtgcagttatttaatatgctaactccactgtaaaggaaatccatctggttcgtatatcctttccacgaaaaggatcggagagatgtagggctttctttaggttgtgttctcccaccacggaaaacaatggaaacagaaaacactgtaatgctttactgagccattgtttaactaggtaatgctgaggtgaggtaatgttctgtcatttctttgggaaaa

SEQ ID NO: 166 - DNA, 1937 bp, Zea mays
gctcctctcccaccaccgcccccgccgtcgcctgctgttccatgaaggactaatccgtcggtccacttctcagctatggcgcagctcgcggtgcggtcgctgctgctgtccctgctcctggtctcgccagttgtggcttcacctggtattgtgaagctcaactcgtcgtcgaccctcttcggcatcgagttcccgccgttcaacaccgccgtcgccgcgaccggctgcgacagcaagctggttgcagccgacgaggcgggggatgagcagaagcagccggcgagctcgtccccgtcgctgcagctgcgcatgaagcaccggtccgcggaggggggcaggacacggaaagagtcgttcttagataaggccgagaaggatgccgtccgcatcgagacgatgcaccggagggcggcgcgctccggcgtggcccggatgccggcgtcttcgtctccgcggcgggcgctgtcggagcggatggttgcgacggtggagtccggcgtggcggtcgggtccggcgagtacctgatcgacgtctacgtcggcacgccaccgcggcgtttccggatgatcatggacaccggcagcgacctcaactggctgcagtgcgcgccgtgcctggactgcttcgagcagcgtggcccggtgttcgaccccgccgcgtcctcctcctaccgcaacgtcacctgcggcgaccagcgctgcggcctcgtggcgccgcccgaggcgccgagggcgtgccgccgccccgcggaggactcctgtccgtactactactggtacggggaccagtccaacactaccggcgacctggccctggagtccttcacggtcaacctcacggccccgggcgcgtcccgccgtgtggacggcgtagtgttcgggtgcgggcaccgaaaccgcggcctcttccacggcgcggcggggctgctggggctcggccggggcccgctgtcgttcgcgtcccagctccgcgccgtgtacgggcacaccttctcgtactgcctggtggagcacggcagcgacgccggcagcaaggtggtgttcggggaggactacttggtgctggcgcatccgcagctcaagtacacggcgttcgcgcccacgtcgtcgccggcggacacattctattacgtgaagctcaagggcgtgctggtgggcggcgacctgctgaacatcagctcggacacgtgggacgtgggcaaggacgggtccggcggcacgatcatcgactccggcacgacgctgagctacttcgtggagccggcgtaccaggtgatccggcaagcgttcgtcgatctcatgagcaggctgtaccctctgatcccggacttcccggtgctgaacccgtgctacaacgtctctggcgtggagcgaccggaggtgccggagctgtcgctgctgttcgccgacggtgccgtgtgggacttccccgcggagaactacttcgtccggctggacccggacggcatcatgtgcctggcggtccggggcaccccgcgcaccggcatgtccatcatcggtaacttccagcagcagaacttccacgtcgtgtacgacctgcagaacaaccggctgggcttcgcgccgcggcggtgcgccgaggtgtagtgtatagccgccggcgaggcctcctgagactgagaggacgaacaattcgaactcagtcctcgcttgattgattggattgggaggcaaattgggtgtagaaatttttggttgggaaggacggtggcacgtacgcaagctctaatacatagttttttttgttgcatttatctccaaggagagaaggttagggatattttattaaggaccgtgcaggtgggttgtaacgggaaaatactgattttgttcccatgtacaatacccgtttcttcactcaaattttagaaattgtaagttgtagattaagaatgagagtgcacacaaaaaaaaaa

SEQ ID NO: 167 - DNA, 1830 bp, Zea mays
attcggctcgagcgccaaacggaccaagaatttccacgcagatttcaacagagatgatgggctcgcccgccggtgctggtgcactcgcccatgtctcgcgcgtcgcaccgccgaggacggcgccccgattcgtcctccttatttaggcaccgtcttttgtcccccccatccgttccgagccgaaccaaggcgccatgagctccccggccgtgcgccgcgtcgtactcctctcgtcactcctctgcgccggagcgctcggtttcttgccctgctcccatgccgccgcggtggcgcccggctacgtcgccgtctccgccgccagcttcgtgccgtcctcaacgtgcagctcccccgaccgagttccgccgcaccggcggaacggcacgtccgccgtgctgcggctgacgcacaggcacgggccgtgcgccccctcgcgggcgtcctcgctagcggccccgtcggtggctgacacgctgcgcgcggaccagcgccgggcggagtacatactgaggagggtgtcggggcgcgcgcctcagctgtgggactccaaggcggcggcggcggtggcgacggtgccggcgagctgggggtacgacatcggcacgctcaactacgtggtgacggcgagcctcggcacgccgggcgtggcgcagaccatggaggtggacaccggcagcgacctgtcgtgggtgcagtgcaagccgtgcgccgcggcgccgtcgtgctacagccagaaggacccgctcttcgaccccgcccagtcgtcgtcctacgccgccgtgccgtgcgggggccccgtgtgcgcggggctgggcatctacgccgcgtccgcctgctcggcggcgcagtgcgggtacgtggtcagctacggcgacgggtccaacaccacgggcgtgtacagctccgacacgctgaccctgtcggcgagcagcgcggtgcagggcttcttcttcggctgcgggcacgcgcagagcgggctgttcaacggcgtcgacgggctcctgggcctcggccgcgagcagccgtcgctcgtggagcagacggcgggcacctacggcggggtcttctcctactgcctcccgacgaagccgtccaccgcggggtacctcacgctgggcgtgggcgggccgtcgggcgccgcgccgggcttctccacgacgcagctgctgccgtcgccgaacgcgccgacctactacgtcgtcatgctgacggggatcagcgtcggcgggcagcagctcagcgtgcccgcgtcggcgttcgcgggcgggacggtggtggacaccggcacggtcgtcacccgcttgcccccgaccgcgtacgcggcgctgcggtccgcgttccgcagcggcatggcctcgtacgggtacccgacagcgccgtcgaacgggatcctggacacctgctacaacttcgccgggtacggcaccgtgacgctcccgaacgtggcgctcaccttcggcagcggcgcgaccgtcacgctgggcgccgacgggatcctgtcgttcgggtgcctcgcgttcgcacccagcggcagtgacggtggcatggccatcctcggcaacgtgcagcagcgctcgttcgaggtgcgcatcgacggcacctccgttggcttcaaacccagctcctgctaactcatggattaacagtcggcgacttgggatcactactagtagtagtatatgcacgtacgtagacgagagtgcagagatacatacaaagttactgtacatgatgatagtaaagataaacttgcaggagagcgtataccatacacagcacacagcagtagcggtggaagttctttcgttggtggaaaaaaaaaaaaaaagg

SEQ ID NO: 168 - DNA, 1050 bp, Glycine max
cagccatgttcttaaccagaagcgcgctttttcgcttttcaaagtctctcccttatgccccttcactctcccttaaaccctccatggtcaccttctcctctactcccaattcaggctggagaaatgcagcagaaggaggaagaagagacggaagaaccaattggacgtatgattctgccgaggcaagacgcgaggcagatgaaatgtctgagagtgccaaagaaacgatgaatgaaggctatgacagggccaaggatcaagcgcgggaagccaaagacagaacaaaggatttcgcacacgacgcaaaggagaagacaaatcagcctcaaagtcaccaggtatctacaattctgccactgctgacaacaaaaccggttccaaggtcggagagtacgcagattatggttctcagaaggcgaaagaaacaaaagatgcaacgaaggaaaaagctggagagtacacagattatgcttcgcagaaggcgaaggaaacgaaggacaagacaatggaaaaggctggagagtacactgattatgcttcgcagaaggcgaaggaaacgaaggacaagacaatggagaaggctggagagtacacagattatgcttcgcagaaggcgaaagaagccaaggacaagacaatggagaagggaggggaatataaagactatgctgcagagaaggctaaagaaggaaaagatgctactgtgaataagatgggagagtataaagattatacggcggagaaggctaaagaggggaaagatacgacgttggggaagcttggggagctgaaggactctgcggctgatgcggcgaagagggcagtgggttacttgagcggcaagacagaggaaaccaaagagaaagtctcggagacggcagaggcgacggctaataaggcggcggagatgaaggaggccaccagggagaaggctgccgggactgcggaggcggccaagaacaaggccgcagaggtaaaggacagagctgcagaaaccgcggaggcggccaagaacaagactgccgagactgctgaggcagcgaagcagaa

SEQ ID NO: 169 - DNA, 1378 bp, Glycine max
gtacttccttacaatcaaaaccaacaacaactatggcaagttatcaaaagcactacgatgatcagggtcgcaaggttgacgagtatggcaacgttgagaagcaaaccgacgaatacggcaaccctgttcatgctgctagtgtcacctatgtagccaccagaactgctgctggtggttacagtgatgacattaataagcaacatgataccaccaatgcctacggcgtagacactggtagacagcattctagtggtggctacgatggtgacactaataaacatcatggaactactggtggctataatgatgacaccaatagacatcatggaactaccggtgtctatggtatagacaccgataggcaacaacatgggactactggtggctatgccggtgacactggtaggcaacatgggaacatcggtggcccttactatggaaccaacaccgcagacaccggtactggtcccagaagtggaaccacgggcggcaccggttatggaggcactggtggcactgattatggaacaactggtggcactggttatggaagtggaactgggtatggagtcaacactgggggtgcgcacactgaagcaggatataggaaggaacatcgtcagcatgaccaatctcatggtgatcagaacgagaagaaagggattatggacaagattaaggagaagcttcctggaggacacagtgacaagtagatgcatcgtgcatcatgcatgcatgcatatatataatattgttgtctttgaataaatttgctgcatatgtacttacgtacgtacagtgtcttgtcatgtatgtggaggatatagtatatggttatagtttatgtagaagaataaaaaatgtatgcatgtagtaatgtaagggtcttatatatgtggctgaaatataaaccataataaaggcagagatgttgtgccaaaaaaaaaaaaaaaaaaaaaaaaaaaaaaaaaaaaaaaaaaaaaaaaaaaaaaaaaaaaaaaaaaaaaaaaaaaaaaaaaaaaaaaaaaaaaaaaaaaaaaaaaaaaaaaaaaaaaaagggggggccccccccttaagaattttcccccccggaaattaatttcggaccgggccctgggggggacccaattttcccttatgggggggctataaaaacttggggaaaaaaggggaaaaaatttttcccggggaaaaatgttttcccgtaaaaattccccaaaaaaaaaaaaccgaaaacaaaaaagggaaaaccccggggggcctaagggggggcccaacccaactaattgggttggcccaactggcccttttcaaggggaaaaactttgggccctcttctttaatgaatgcccaaccccggggaaaagcgttttccttt

SEQ ID NO: 170 - DNA, 839 bp, Zea mays
ccacgcgtccgcacgatcgagcacacaaccacgaagactcgtttattaggagaaaccacaaaccaccaagccgtgcaagcatcatggagtacggtcagcaggggcagcgcggccacggcgccacgggccatgtcgaccagtacggcaacccagtcgggggcgtcgagcacggcaccggcggcatgaggcacggcacgggaaccggcggcatgggccagctgggtgagcacggcggcgctggcatgggtggcgggcagttccagcctgcgagggaggagcacaagaccggcggcatcctgcatcgctccggcagctccagctccagctcgtcggaggacgacggcatgggcggaaggaggaagaagggaatcaaggagaagatcaaagagaagctgcccggaggccacaaggacgaccagcacgccacggcgacgaccggcggcgcctacgggcagcagggacacaccggcagcgcctacgggcagcagggacacaccggcggcgcctacgccaccggcaccgagggcaccggcgagaagaaaggcattatggacaagatcaaggagaagctgcccggacagcactgagcggcgcctatacacgtggctgtgctttgctggcgcgtcaaagccgtaatgttcagtgtttcatagataataagataaacccatgaataagtgtcctacccttgatcatgtgacagggacagggacagtttcctgtacttgtggggtgaatttgtacgtgtgatacggtaactgggtccgtgtactgtttatgctacgttttccatacttaaaagtacgtatatataaaaaaaaaaaaaaaaaaaaaaaaag

SEQ ID NO: 171 - DNA, 1341 bp, Zea mays
cactgaagaagccagtcaatagcgagttctactactagtagctagcctgctgatctgttctgttgtttagttcgcaaagccttctgtttcggcgaccatggaggatgagaggaacacccagcagcaccagggcggtgaggcccagcaggacgccgccgatcaggtggacgtgaaggatagggggctcctggacagccttctcggcaggaagaagcacgacgacgaccaggagaagaagaagcagacggatgagctggcgaccggcatggagaaggtcacggtgtccgagcccgagaagcacgggcacaaggaggaggagcacgaggtcgtcggcgagaagaaggagggccttctcgccaagctgcaccgcaccagttccagctccagctcgtcgagcgacgaggaagaggaggcgatcgatgagaacggcgagattatcaagaggaagaagaagaagatgggcctcaaggagaagctcaaggagaagctgccgggccacaaggacggccaccacacggccgcaccgtccccggcgcccgcgcccgtggagacgcatgcccaccaccaggaggaagcgcacaggccgcacgtcgtcccgaccccggccccgccgcctccaccgcacgtccaccagcacgaccacggcgtcgtcgtccaggacgacgtgaagaccgggaccccgccgcatgcaccggaggaggagaagaaaggcctgctggacaagatcaaggagaagctccccggtggccacaacaagaagcctgaagccgctgccgctgccgcaccggctccgcccgtccacgcgccggcgccggcgccgcaggcggagaacgtgagcagcccggatggcaaggagaagaagggcttgctgggcaagatcatggacaagatacccggctaccacaagagctcagctgaggaagcagaccacaaggcggacgccgccggcgagcacaggaccagctcctaaggtcgcagtcgcagcgcgtgtcctggccgtggccgggccttgggcgatcagaaggtagctagcgttggcatgtgggttcggttctggtttgcttttaccaaaagtttgtttcaaggtggatcgcctggtcaaggtccgtgtgctttttaaggtggatcgcgtgactggcagtgagtgttgctgcttgtgtaggacgtggtacgtacgggttttattttggttccaagtcaaaagtcacggtcggtctggatgttgtgtactgggtttgttgaattatgagcagctgcgcgttgtaattcggctgggctacctggatgcgttaataattgctttggtttctgcccaaaaaaaaaaaaaaaaaaaaaaaaaaa

SEQ ID NO: 172 - DNA, 2073 bp, Saccharomyces cerevisiae
gattgtgttacacgctctatcttctttctcacaccttccttcttctacttccggagtatagtctctagcttatccttgatggctctttttatgcaggcagaataattacagtgacgtatttgtggcttctttggcacaacgttttgttccacgatcacctcatatcaccgttaagttcttcatcgtccaattccggagttccccgtcagccgtgcgaccatgtggtatttcacccgaataattaagggaaaacagaaggagaattacgtatcttaaaggagctagactctttgcctcattgaggctttctatacatcgggtccccatgtatggtccgttccatagtcgaagcatccttaatttcctgtgacattacagtagtttcgccgtagagcctttcacgggaagaatatgttcagtggttccaggtatgggtttgaggatgttcttgtaaggtgtgtagatcccatcttttttagggatcacaaagggaaaataactacacagcatgtggtggtacagatgaggtcaatggcagttttgccttagttgtaagtaattaaccaatccttgtcgtgcttctcatgaatgtgtatgaatttatgttcatcagaatatccctctttaaccacagttcttgcgtaaagcatagtctggcttcctttagaaaaaggaaatgtggtaattctaggaccacgttttgggcttcgtcatttcttttcactcctccacttttatgacatttgatcgcaagttcctccatacatcatgcctagtaatcaaaacaaataacgcacaagggagtaaagggaaatggttagaaaagaccgaaatcctttttttggtctccgttacgtgcttgttaatcaggctcccttgaagcagtcaatatttcttggactataaaagcacattactatttcatcaaaaaaaggatacatacctaccctcaactcttaatatctactagcagcagagccaaacactaccgcataaaagctaagtacgaataacaattaagaaatgtccaatctattaaacaagtttgctgataagttgcacggcaacgatcatgatgaacgttacgaagacgacaatgacgaccagactagacaacagcgtcatgaaaaacatcaacagagggaattcaggaatcaaggatccaaggccgatccctacggcgaagaaaaccaagggaatttccctcaacgccagcagccacagtctaatctaggcggtaacacgcagtttggcggtaacgacttccagcaacaaactactgactacactgccggcactggtggtggcacttatacccaaacttaccgcgaaactaacactcaaggtcagttggacgacgatgaagacgatgacttcttgacttcgggccaacagcaaaaacaaggtcgtacaagaggtgctcaaagtaaccgctaccaatcctctaatatcggcagcggtagacgcgatctgtctgggtcaggaaacgatgaatatgatgatgatagtgggaaccaaggcgtctggtagatgcggtggtcgaagcttctattacatgcctgaggtgcgggtctcacccttgagcagcaagtgagaaattttaccctaatttcgtcttcttttttcttttttcttcatctggacctattattggtcatgatgccactttttacaaactatttcatatgtttaatctagtttatttagatctacagctgtcagtttatacgtttttattaatgtcagtttgatttgattagtagtgacctttttcgtcgaggtatgccgtttcacggacctccagatccaggtgtataacaatagaattatgggaaaacggggtgggaaggtcgttgtctaactcaaacctcctggaattagcgggtaaagtgtcgttattgtgctgggcaacaacttttttttacgatttctttttacctctcatctaggttagtgttagttgtaaaaacccgagcagattggtgccttttcaagtgcgttcttacaaccatacttttttattctagaacgtgtaagcaattactttctcaaaaaagcaaacgcaataaagat

SEQ ID NO: 173 - DNA, 1106 bp, Saccharomyces cerevisiae
aatatgcctgtaaaaactatgtaatatatcacaagtaacaacatttcatcaccattactaccattatgtagaaatttatgagcaaagacaaataagtaaagaaaaagacattgatataatataagagtatgctttcttcattttaatgtttggttgtgaattgaaagaataccattcgggcacgcaatagttatgaacttaaccgagctcaaataatttaaagataaaagataaaagataaaagataaaagacaaaagaaaattcatagcccatgttgaagtatcccagcgggaaatgttgctatccaacagaaagtaccaagccagtttcaaaaaggtacagaattaagtgatgctatccgtcccacaactaattttctccagcggaggaaatatacgcggagggggggaggaaaacctctcagtaagcaatgaagggatagataatgggggcgcgcctgcctagcttaggctaagaaactccttcgaaaacagggggctgcgagcgcagaagcgaacacttgtcatttgtataaaaggactatttataagtttgctttttgtcactctcttggccctaattacccatactattgtaacaattgttgtgtaaactcaattatacaaataaacgaacaatcaacagtaacaaaccgctcaagtgtacaaccaatcagaaaaaatgacgagaacaaacaagtggaccgaacgtgaaggaaaggctgatccaaagtacttttcgcacactggtaactacggtgaatctccaaatcacatcaagaagcaaggttccggcaagggtaattggggtaagccaggcgatgagattgatgacttaattgataatggtgaaatacccccagtgttcaagaaagatagaagaggctcaaatttgcaatcgcatgaacaaaagtttgaaaacgtccaaaaggaatgagggcgttttcaagataaaaaaaggttttttgatctctgaaggatagtggccttctccactgatttatatgcatctataggtatatacttgcatgcctacttcatgacttatgtaatacagttttcttacatccatttaatttacgttcgaagaagttttcaacatttgt

SEQ ID NO: 174 - DNA, 1042 bp, Saccharomyces cerevisiae
ggtacccctttaagacaactatctcttaaccttctgtatttacttgcatgttacgttgagtctcattggaggtttgcatcatatgtttaggtttttttggaaacgtggacggctcatagtgattggtaaatgggagttacgaataaacgtatcttaaagggagcggtatgtaaaatggatagatgatcatgaatacagtacgaggtgtaaagaatgatgggactgagagggcaattatcatccctcagaatcaacatcacaaacatatataaagctcccaattctgccccaaagttttgtcctacggcatttttcaatctttcgttatctgtgctctttactttagtagaaaggatataaaaaagtatagtcaagatgtctaacatgatgaataagttcgctgaaaaattacaaggtaacgatgattcccatcagaagggaaagaacgccaaatcctccaacaaggaaagggatgatatgaacatggacatgggtatgggtcatgatcagtcgaagggaatgaagatgggccatgatcaatctggaacaaagatgaacgctggcagaggaattgcgaacgattggaagacttacgaacatgaaaatatgtacgtttttggcgcattaaccaagtcctcttatttttttaatggtttatttatgaattgtttatgtttatgttctttatactcaaaatcaataagtgcttattttagcgaattttcttctacgaatatatataagtcatatctaagacttccatccgtgctttattacgtttgtatgatgcatacaatgatgccaaatcagcttgatgctgttggtattcagtcgtccgaaagcctgttgatgtgacactcaaatcttcggcatgtgtgaacggtggccgagcatagttcgtgaacatcatcacttaaaataagaactacactttacatcagcgtggaagataaaggttgttttaagctcaagggcgctggaggtgtagcgcttcggaggaaaataatattgaataacttcgctttttgttccaaattctaga

SEQ ID NO: 175 - DNA, 1446 bp, Saccharomyces cerevisiae
actgaaaatataattttactgacctacctacactgatttgtctcgaagtagatatgataccttgagcagcacgaggatattaaaaagtagggcaattctgcttttaacgtataagcaacaccaagtacacgtaatttattttgatgattcttctatattttttttttcttcattgttattttttcactatctttttcatccctccgcaaaaggacgcgatccttttttagcacgtgaacggtaataacgggtcctggacgatgtattagagtcacctaatcaccaagcgagccaatggcgactcacttgacttgcatgtttgcataacctatttagcgaaccctccaacttctgagcgcaccagcttaacttgtgcgctaagctgccttgcccgacatagtgccatcgctcattccacctcacacctgattaactaaaagttttaaaactacgggactgcgaaaaagtagagctacgttactgcagacctacaataattgcacacatcggcctgataacgaatgcttctaaaattctactgtgctactatcggctggtcgcgcccgacgggttcgctcagccgctctgcgccctcttactcttcagccattctgctgcggccgaagctataaaagtatgtcaatttggctttttccaaaatccccctctggctctttctcttctcaagacaagcattgaagagactcactagtaagcttaagatagtcctacacacaaccaccatgtctgctaacgattactacggcggaaccgccggcgagaagagccaatattcccgtccctccaacccgccaccttcatccgctcatcagaacaaaactcaggagcgtggatacccaccccaacaacagcagcagtactaccagcagcagcagcagcatcccggatactataaccaacaaggatacaatcagcaagggtacaatcagcaagggtacaatcagcagggctacaatcagcagggatataaccagcagggatataaccaacaaggccatcaacaaccagtctacgtccaacaacaaccaccccagaggggtaacgaaggttgtctggctgcatgtctggctgcattatgtatatgctgcaccatggatatgctattctaagagaacccgcaaaagtattcaagaatgaaaaaaaaaaaaagaataatctccccttctgttctttgcagttgcctttcttcccctcagtgttattttttttcacaaggagataaaaaaaaaaactttaacatgtcactttaagcatgtatgtaatacgtctattaattatatgtaacttttataactattttcatttctatgtgatccatttgcagttatgcaccttttttttttttccgaattgtgctatgtatatatcactagtaataatgtaccaaactatacaaacacgtaggatacagtaaaaaaaatttta

SEQ ID NO: 176 - DNA, 665 bp, Saccharomyces cerevisiae
cccacaaacacagaccagaagcactctagacggagagtaactagatgtacagcccctggaaaatcgttggtcaactttgaggttccggtcgtccccctcttgatctgaaaggtctttctctaaatctatattaaaacgtataaataggacggtgaattgcgttctacttcctcaattgcgtttgatcttatttaatctctctctatatatagaaaaaaaaaccatctgttattcgataatctcaaacaaacaactcaaaacaaaaaaaactaaatacaacaatgtctgacgcaggtagaaaaggattcggtgaaaaagcttctgaagctttgaagccagactctcaaaagtcatacgctgaacaaggtaaggaatacatcactgacaaggccgacaaggtcgctggtaaggttcaaccagaagacaacaagggtgtcttccaaggtgtccacgactctgccgaaaaaggcaaggataacgctgaaggtcaaggtgaatctttggcagaccaagctagagattacatgggagccgccaagtccaagttgaacgatgccgtcgaatatgtttccggtcgtgtccacggtgaagaagacccaaccaagaagtaaatctttcggaactctttgtagttacatgggtttttttctttgtgatgtgtgtga

SEQ ID NO: 177 - DNA, 1814 bp, Zea mays
ccacgcgtccgagtccttcttcgtaagccttcaaaccgacgaatttgagcaactgcacccagagcgcgatccattgccggggaagaagcaacttgttgcgagcctcctctatggcgagctccgaccatggttccaccaccgcccccaaggacgtgcctggcagctacggcctgccgctggtgggcgccgtgcgcgaccgcctcgacttctactacttccaggggcaggacaagtacttcgagtcccgcgtggagcgctacggctccaccgtggtgcgcatgaacgtgccgccgggccccttcatggcgcgcgacccgcgggtggtggcggtcctggacgccaagagcttccccgtgctcttcgacatggacaaggtggagaagaaggacctgttcacgggcacctacatgccgtccacctccctcaccggcggctaccgcgtctgctcgtacctggacccctccgagcccacccacaccaaggtgaagcagctgctcttctccctcctgctctcccgcaaggacgacgtgatccccaccttccgctccaacttctcctcgctcctcgccaccgtggaggcggagctggccaagggcggcaaggccgagttcaacaagctcaacgacgtcacctccttcgacttcatcggcgaggcctacttcggcgtgcgcccctcggcgaccgacctcggcaagggcgggccgaccaaggcggccaagtggctcatctggcagctccacccgctggtcacgctcggcctccccatggtcctggaggagccgctgctccacacgttccacctcccgcctttcctcgtcaagggcgactacagggcgctgtacaagtacttctccacggtggcgaagcaggcgctggacaccgccgagggcctgggcctgtcgcgcgaggaggcctgccacaacctcctcttcgccaccaccttcaacagctacggcggcctcaaggtgctgttcccgggcctgctggccaacgtggccagcggcggcgagaagctccacgagcggctggtggccgagatccgcggcgccgtggccgacgccggcggcaaggtcaccctcgcggcggtggagaggatggagctggccaagtcggtggtgtgggagtcgctgcgcctggacccgcccgtcaagttccagtacgggcacgccaagaaggacctgctggtggagagccacgacgcggtgttccaggtgaggaagggcgagatgctgttcggctaccagccgtgcgccaccaaggacccccgcgtgttcggcgacaccgccggggacttcgtgcccgaccgcttcctcggcgaggagggcagcaagctgctgcagtacgtgtactggtccaacggccgtgagaccgagaaccccagcgtcgacaacaagcagtgccccgggaagaacttcgtggtgctggtcggcaggctcctcctcgtcgagctcttcctccgctacgacacattcaccgccgaggtcggcaaggagctgctcggcaccagcgtcatcttcaccggtgtcacgaaagctacctccggtccgggcagcgagtaaaccgcccggccggcgcgcgtcgttggatatatgatgagtggacgtgacagagtgtcccattatttcttaatttcgtcattttcctccttccttctaataagacttctctctcaccctcggccccaccttcacgtgtgattggaggtgtttgtcgcttttgtaataattataatgcaggatggcatgttgcataaattgctccccaaaaaaaaatcttatctttcacaaaaaaaaaaaaaaaaaaaaaaaaaaggc

SEQ ID NO: 178 - DNA, 2419 bp, Zea mays
gaattcccgggtcgacccacgcgtccgcccacgcgtccggcatcaccacaccccgtctccaccccgtacaaatccaaaagagggcgaggagggaaacagatcggctggcggcaatcggtagccggcttggctggcacgatgggcggcgaggccgagggcggggagcggcggctggggcgggtgctgagctttgggatcccggacacggcgctggggctagtgatggggtacgtggaggatccctgggaccgcgacgccatctcgctggtgtgccgacactggtgccgcgtcgacgcgctcagccgcaagcacgtcacggtcgccatggcctactccacaacacccgagcgcctgttccggcgcttcccgtgcctcgagtcactcaagctcaaagcgaagccccgcgcgtccatgttcaacctcatctccgacgactggggcgggtctgcgtcgccttggatccgacagctctcggccaccttccacttcctcaagaagctccacctgcgcaggatgatagtatccaacgaagatatcaacatccttgtgcgtgccaaggcgcacatgctcgtcgcgctgaagctcgaccgctgctccggcttctccactccctccatcgcactcgtcgcccgttcctgcaggaaactggaaacacttttcctggaagaaagcacaattgatgagaaagaaaatgatgagtggatccgtgagcttgctacgagcaattctgttcttgagacactgaatttctttctaacagatctcagggcatccccagagtatcttaccctccttgtgcgcaactgtcaacgattgaaaactctgaagattagtgaatgtttcatgcccgatctggtcagtttgttccgaactgcacaaacactacaagagttcgctggtggttcctttgaagagcagggtcaacctgtggcaagtagaaattatgagaactactattttcctccttcactgcaccacttgagtttgctctacatgggaacaaatgatatgcaaatactgtttccatatgctactgcacttaagaagttagaccttcagtttacattcctttccacagaggatcattgtcagatagttcaacgctgctccaatctggaaaccttagaggtgagggatgtcataggggatcgtggactacaagttgttgcacagacctgcaagaaattgcataggctcagagtagagagaggagatgatgatcaaggaggtcttgaggatgaacaaggtaggatttcacaggtggggttgatggctatagcccaaggctgccctgagttgacatactgggcgatacatgtatcagacattacaaatgcagctttagaggcagttggtacatgcagcaaaaatcttaatgacttccgccttgtcctccttgatagagaagcacatataaccgaattgccactggacaatggggttcgtgctttgcttagaggttgcaccaaactacggaggtttgcattttatgtgagacctggggccctatctgatgttggtcttggctatgttggagaatttagtaagagtattcgttatatgttgcttggtaatgttggtgaatctgataatggaatcatacaattatcaaaaggctgcccaagcttgcaaaaactggaggtgaggggttgtctctttagtgagcatgctttagctttggctgcactacagcttaagtcactgaggtatctgtgggtacaaggattcaggtcatctccaactggaactgatattatggcaatggtacgccccttctggaacattgagtatattgttccagatcaagatgaaccttgcccagagcataagagacagattctggcatactactcccttgctggcaggaggacagattgtcctccatcagtaactctgctttacccggcattttgagtgtagatacttgctttttgccagactgaatctcatggtactaagttccattggtcccactatctgtgaagtaaatggtccctgttcttccaattgatgaggacatgcagacgttccagtgcaaagaaccccaaaggtaagctttaagcaggacggccagctctgaactgaggctagctgagaacaatcatgaatacctgaaggcagcacttatgtcagcttggcctagctgtccagtatgggcatgtaagctttaccatcttttgtagttttggagaaacaattttgcaataactacccttgtttagtgtatattatcgattttcgttcatatgctgttgtattgttgtattgaacaattatgtcaattaattagtctacactctacagtctaacttgctgtgattcgatgaatagtgtttatatcacccacaaaaaaaaaaaaaaaaaaaaaaaaaaaaaaaaaaaaaaaaaaaaaaaaaaaaaaaaaaaaaagggcggccgc

SEQ ID NO: 179 - DNA, 2345 bp, Zea mays
gcagagcagcgcaggcgccctgcacctccactctgcagctctgctccccctccctctctcccgctcctcctccttttccttctccagctcggccgcctcagcccgcgccgcgatgtcagaggaggacgaggaccagccgccggccaagcgacccagcccgtcgccgcccgcggaccaggtgctcgacaacgtgctcgagacggtgctccagttcctggacgccccgcgggacaggagcgccgcctccctcgtctgccgctcctggcacagcgccgagtccgccacccgcgagtccgtcgccgtccgcaacctcctcgccgtgtcggccacccgcaccgcgcgccgcttccccaacgcgcggagcctcctcctcaagggccgcccgcgcttcgccgacttcaacctcctcccgcacggatgggacgcctccgccttccgcccctgggccgccgccgtcgccgccggggccttccccgcgctcacctcgctctacctcaagcgcatccccgtcaccgacgccgacctggacctcctctcccgctccctcccggcgtcattccgtgacctcaccctgcacctttgcgacggcttcacctcgcgcgggctcgcgtccatcgcctcccattgcaggggcctgcgagtgctcgacgtggtggagtgcgacatggccgaggagcaggaggttgtggactgggtggccgcgtttccgcaggagccctctaacctcgagtcgctctccttcgagtgttacgagccgcctgtggccttcgcggcgctcgaggcgctcgtggagcggtccccgcgcctcagacgcctgggggtcaatctgcacgtctcgctcggccagctgtgccgcctcatggcgcacgcgccgcgcttgtcgcacctgggcaccgggtcgttccggccggcggatggcggcgaggaggggacaggattcggggaggttgtctctgcattcgtggccgctgggcgagcgcgcacgcttgtttccctctccggcttccgtgacctcgcgcaagagtacctgccgaccatcgccgtggtgtgcgcccacttgaagagccttgacttaagctactccgcggtcaccccgaatcagattctgatgttcattgggcaatgctacaaccttgagacactatgggtacttgactcggtgcgcgacgaagggctcgacgccgtgggaatttcctgcaagaagctccagtctcttcgtgtgctcccgttgaatgcacatgaggacgccgacgagttggtgtcagaggttggccttaccgccatctcacggggctgccctgctctccgttcgatactatatttttgccagaccatgaccaacgctgctgttgtggacatgtcgcggaactgcccggagctgaaggtattccggttatgtataatgggacggcaccagccggaccatgcgactggggagcctatggatgaaggattcggtgccatcgttcagaattgcagcaagcttaccaggctatccacgtccgggcaacttactgatcgggcatttgagtacattggcaggcatggcaagtccctgcggacgctctccgtagcatttgctggaaacagtgatgtggcgctgcaatacatcctccagggctgtccaaagctagagaagcttgagataagggactgccctttcggtgacgctggcctcttcgccgggatgcaccatttctacaacatgcggttcgtctggatgtcaggctgcaacctgaccctgcaagggtgcaaggaggtggctcaggtgctgccacggatggtggtggagttgataaatggccagtctgatgagaacgaaaggaatgaaagcgtggacatcttatacatgtatcggtcactcgatggtccaagggaggatgttccaccgttcgtgaagatcctgtgaagctgcgcttctgcggagatggctgggtatcgctatcagtgtagtattcaggctgctgcacttgatatgctggctgagtgcagatcatttaacggaatatatatgtaagttgttgagctgcagatgtggtacatttttatctcttagaaagatttcgaagcactgtactggagcggggcgggcgggggtatcatgtagtaggagttcatcagatgtggtacatttttatctagtaggagttcatcagtgtatccaaagcgttcacggcaggaggactaagtgcagcagagcaggcttcttcgagggggcctcatggctgcctcagttttgtttgctgctctggagggggctctggtttgaggaccatattttctgtgccggtgcaaccaccatgttttccttcaaattttcgaaatgaaacctgtcatatcagact

SEQ ID NO: 180 - DNA, 2178 bp, Zea mays
attcggctcgagaccacacctgcagaaatcacagcggcaggtgcagcaaaaatctccatgcccccgctcggctagatctccgacgagccggccccgcgctgtagcagattcgctccccgatcccgaccgatgggcggtgaggtgccggagccgcgccggctgagccgcgcgctcagcttcggctgcggcggcgtccccgaggaggcgctgcacctcgtgttcggctacatggacgacccgcgagaccgggaggcggcctcgctcgtgtgccgcctctggcaccgcatcgacgcgctctcgcgcaagcacgtcaccgtgggcttctgctacgccgtggagcccgcgcggctgctcgccaggttcccgcggctcgagtcgctcgcgctcaaggggaggccacgcgccgccatgtacgggctcatccccgaagactttggcgcctacgcggcgccctgggtcgccgagctcgccgcgccccttgactgcctcaaggcgctccacctgcgtcgcatgaccgtcaccgacgaggacatcgccgtgctcgtccacgcgcgcggccacatgctacaggcgctcaagctcgacaagtgctccggcttctcaacagacgccctccgcctcgtcgcgcgctcctgcaggtctctgagaaccttgttcctggaagaatgtataattgaggatgaagggagtgaatggctccatgaactcgctgtcaacaattctgttctggtgacactgaacttttacatgacagaactcaaagtggagcctgctgatctggagcttcttgcaaagaactgtaaatcattgatttctttgaagatgggtgactgtgatctttcagatctgattgggtttttccaaacctccaaagcattgcaagaattcgccggtggtgccttttttgaagttggagagtacaccaagtacgaaaaggtcattttcccacctaggctatgcttcttagggggtcttaccttcatgggtaaaaacgagatgccagttatctttccgtattccacaatgcttaagaaactggacttgcagttcactttcctcaccactgaagaccactgtcagcttattgctaaatgccccaacctaagtgttctcgaggtgaggaatgtgattggggatagaggactagaagttgttgctgctacatgcaagaagctacgaaggctcagaattgagcgtggcgacgatgatcctggccaagaagagcagggaggagtctctcagataggtttgacagccgtagccgttggctgccgcgaactagagtacatagctgcctatgtatctgatatcacaaatggggcgctggaatccattggcactttctgcaagaatctctatgatttccggcttgttctacttgacaaacagaagaagataacagacctgccacttgacaacggcgtccgtgccctactgaggaactgcgtcaaacttcggaggtttgccttctacctgagaccgggagggctttcagacgtaggcctcggttacattggactatacagtgggaacatccaatacatgctgctcggcaacgttggtgaatctgacaacggattgatccagtttgcaacgggatgcaccaacctgcggaagctcgagctgaggggctgctgcttcagcgagcgagctctggcagtggccgtgctccagatgccctcgctgaggtacatatgggtgcaggggtacagagcctctcgaacgggccaggacctcatgctcatggccaggccgtactggaacattgaattcgcgcctcccattcccgagagcgcttatcgggtgatggcagatggacagccttgtgttgacacccatgcccaggtccttgcgtattactcccttgctggaaggaggccggactgccctcagtggctggtgactttgcaccctgcgtcactgtaaatacgtcaagctgtcccgagtgtggtttttgtaccagctgcttgtgtaccgtaataaactctagtactgtagtggtggaggcgtagtgcaataaagttgcagttgttgcttgtactagtgaatctaatcctaggaggttgttgccctgtgctttcttttccccggaattgtatctttgctccactgtaaatatcagaaatggcctgtgctagatgagttgaataaaaaaaaaaaaaaaaaaaaaaaaaaagg

SEQ ID NO: 181 - DNA, 2743 bp, Zea mays
attcggctcgagctcctaacctgtcgagctgcccacagcccgtacctacctgcccccagtccccgccgccccgcctgcccgacccgcggcttatccaccacgtccaccgctgggctggatcgatcgggaccggggtcgcgccgccgccgctgccctccgcactcgcgggatcctgttcctaccatgcagcagcgctgcgcccttgcccgaccgcgccggcccgccgaaccgcgcgttccgctccccgacgatcactccctcgtcgccgtcttctccttcctcttcatccccacctaaatcaacctcctcgccgcgaaattctgctacaatttcttcatcttcccttgccgccgggagcggacggatcgccgcttcctcggccggcgggatgagccgggaggcgcagaaactcgactgcaccgccgccggcggcgggatcggggtcctgtcgctggacctgctgggccaggtgctggaacacctgcgggagccccgggaccgcaagacgtgccgcctcgtcagccgcgccttcgagcgcgccgaggccgcgcaccgccgcgcgcttcgggtgctccgacgcgagccgctcccgcgcctgctccgcgcgttcccggcgctcgagcggctcgacctctccgcctgcgcctcgctcgacgacgcctccctcgccgcggccgtcgccgacgccggcggggggctcgccggcctccgcagcgtgtgcctcgcgcgggccaatggtgtcggctggcgcggcctcgaggcgctcgtcgcggcctgccccaagctggcggccgtcgacctgtcgcactgcgtcagcgccggggaccgcgaggccgccgcgttggcggcggcgtccgagcttagggacctgaggctggacaaatgccttgccgtcaccgacatggggctcgccaaggtggctgttgggtgccccaagctggagaagctcagcctcaagtggtgccgtgagatctctgacattggaattgatctgttggccaagaagtgccctgagctccgcagcctcaacatatcctacctcaaggtgggcaatggatcccttggatcaatttcgtcacttgagaggcttgaggaattggcaatggtttgttgttcaggtatagatgacgaaggcttggaattgctgagcaaggggagcgattcgctgcagagtgttgatgtgtcaagatgtgatcatgtgacttccgaggggttagcttcactcatagatggtcgcaattttcttcagaagttatatgctgcagattgtttgcatgagataggacagcgttttctatccaagttggcaagactgaaggaaaccttgacgttgctgaaactcgacggtcttgaggtctcggactctcttcttcaagccattggtgaaagctgtaacaaattggttgagattgggcttagcaaatgcagtggtgttacagatggaggaatctcatctcttgtagctcggtgtagtgacctaagaacaattgatctcacatgctgcaatctcattaccaacaatgcgcttgattcaatagctgacaactgtaagatgcttgaatgtttgcggttggaatcatgctctttgataaatgagaagggactaaagcgaattgcaacttgttgccccaaccttaaggagatagacctcactgactgcggagtggatgacgcagcattgcagcacttggctaaatgctctgaattgcgaatattgaaattaggcctatgctcaagtatttctgacagaggcattgcatttatcagttctaattgtggaaagctcgtggagcttgatctctaccggtgcaactctattactgatgatggattggcagctttagcaaatggatgcaagaggattaagttactgaacttgtgttactgcaacaagatcactgatactggtttaggtcacttaggctccctggaggagctcacaaaccttgaactgaggtgcttggtccgcgttacaggcattgggatctcctcagttgcaatcggatgcaagaacctgatagagctggacttgaaacgatgctattcggttgatgacgctggactgtgggcccttgctcgttatgctttgaaccttagacagcttacgatttcgtactgccaagtcacggggttgggcctgtgccacctgctgagctccctgcgatgcctccaggacattaagatggtgcacctctcatgggtatcaatagaagggtttgagatggctctgcgagcagcctgcgggaggctgaagaagctgaagatgctctgcgggctgaagaccgtgctctcccctgagctcctccagatgctgcaggcttgtggctgccgaataagatgggtcaacaagcctcttgtctacaaggactagacagactcgtgttcctcattgtgtgtgcagtgtcagcatcagcatgtattgtcaagatcttgcaggtttgccctggctcacgttgtgagtccgcaataatcgttgggggcgtaagctcccgtccccaagatgtggttatggtgcctttggggcacttcttgcgccatttgtcactctctgctccggtgtatctgtgtatgcaaacggaggcaccggtaatgttcatgtgtatatagcgtgcagtagaatgatcccattttatgggattagttagtgtgtaattgttacctcatttcgcatgattcgaatcttgagatgaaagaatcataaggggtatgatcgatgcattgcattcaaaaaaaaaaaaaaagg

SEQ ID NO: 182 - DNA, 2082 bp, Glycine max
attcggctcgaggtagtagagcactgaattggatatgtgtctatcacctaatctaagtcatcgtgtggtggtggttttggtcggtggcaaagagagaagaaacaaagcctgttcttcttaccatgtcggatcatcttccgcgcgaagtgctaaccgaaatcctctcccggttaccggtcagatccctactgagattccggtcaacgtccaagtcatggaagtccttaatcgacagccagcacttgaactggcttcatctgactagatccctgaccttagcctccaacacgagcctcatcctccgtgtggactccgatctataccagaccaatttcccaaccctagaccctcccgtatcccttaaccaccctctcatgtgctacagcaacagcataaccctcctcggttcctgcaacggccttctctgtatatccaacgtcgccgacgacatcgccttttggaacccctccctccgccaacaccgtattcttccttacctccctgtcccccgccgccgtcaccccgacacgacgctctttgccgcccgcgtctgcggcttcggcttcgaccataaaactcgcgactacaagctcgtccgcatctcttatttcgtcgaccttcatgaccgctccttcgactcccaggtcaagctctacacgctccgcgccaacgcctggaagacacttcccagcttgccctacgcgctctgctgcgcccgtaccatgggcgtcttcgtcggaaactccctccactgggtcgtcacgcgcaaactcgaacccgaccaacccgatctcatcatcgccttcgatctcacccacgacatcttccgcgagctcccgcttcctgacaccggaggtgtcgacggcgggttcgagatcgacctggcgctgttaggtggttccctctgcatgaccgtgaactttcacaaaacgagaatcgacgtttgggtgatgagggagtataaccgtagagacagttggtgtaaggtgttcacgctcgaggagtcgcgtgagatgagatcgttgaaatgcgtgaggccgttgggctactcgagcgatgggaacaaggttctgttggaacacgacaggaagaggctgttttggtatgacctggaaaagaaagaggttgcccttgttaaaattcagggtttgcctaatttaaatgaagccatgatttgtttgggaaccctcgtaccaccatacttcttacctcgtcaaatttgtaggaagccgcgtgctttaggatgcgaacgtcccaggaagacgagggatgacttcctgtcgcagggtttcaaattgacattatgaggaagtctaagaagaagaagcaatggtacatgggggtagctgaaactggctcggcgggtttgttttgcagttgattcaagccaaagggaggttgaggaaaagtaagaaaatgttgcttccgttacaatgactgtaatgtatagttaaattaatactatcagctacatattttactttgggatgtgtgccacgtttgacgaactctgaaacaaacatgctcttattggttacttgctgagttatctgactctgatgatgaaattcgtggccctggttcacaggacgagttaaattgatcaagagcaggaacagagacaccgttttgcctgttaagatataagactctttccttgtacagtttttgcaccttttgttttcttagcgatttaggggcgaacaaagccccccaccaaagtgaaagaaagggctgcagacctgccattcagaatgttgaagaaggaaacaatgactgaagaacagataccaaatatacaaatgctgctttcctcacttattaacagtctccaattactaagatcccgtaagacactcgctttccgcaatagaaaaaaaatggcctatatggttttgtctaagcttggattgcctcagtggtttggttgtaaagaagtgtcatgtatgtacgtgtgttaatctggttgtaccagcaaactgtaattaaatttttgcagttaacttgacatgaaatattgttgtttttgtttattggtaggtggactttgcaaattgaaaaaaaaaaaaaaaaaaaaaaagg

SEQ ID NO: 183 - DNA, 2101 bp, Glycine max
acagagcgcagaaaataaaataggtgaaatgaatatcgatttcaattccgccactgaatttcgaaaccaaaaaaccattccaacgaagaagatgaacctcgaagaagagggttagttacttctgagtgagtgagtgagttagtggttcctctgaggaacggtgaggaccttcaatttctcaagttctcaaccgttcgttttctctttcgttcccctaaccgccgtggatgggacaatctgtttcctccgccgccgtcgctagccgtcgcgagagggaccaaggccaccgctccgtcaactcttccaagaccagattcaccgcctcggtttcgccgatggccggttattcctccggcgccgccgaagaaggcgaaaaccatcgcgtggaggccgttgccgatgaatccaccgactacatctccgatctcccgaacgagtgcctggcttcggtgtttcagtttctcagctccgccgatcggagccgctgttcgctcgtttgccggcggtggctccagatcgaaggacagagccgccacaggctttctctgaacgccgaactggatctgtttccggcgattccgtcgctgttctctcggttcgattcggtgacgaagctcgcgctgaagtgcgaccgcagatccgtgagcatacgcgacgacgcgctcgtgctgatctcgcagcggtgccctaacctcacgcgcctgaagcttcgcgcgtgtcgcgagctcaccgacgcaggaatggaagcgttcgcgaagaactgcaagggattgaagaagctctcgtgtggatcgtgcacgtttggatccaaaggcatgaacgcggtgctcgacaactgcgccgcgctggaggagctctccgtgaagcgcctccgtggaatcgctgacactgcagcggcggagccgatcggtcccggcgtggctgcggcgtcgctcaaaactgtttgcctgaaggagctatacaacggacagtgtttcggaacgctgattctcggcgcgaagaatctgaaaaccttgaagcttttccggtgctccggcgattgggaccggctctttcaattattggtggatcgagtcacgaaaattgttgaggttcacctcgaaaggcttcagattagcgacgttggattgcaagcgatagcgaattattcgagtttggagattttgcatcttgttaagacacctgaatgttctgatattggacttgttgctattgcagacaggtgcaagcttttgaggaagcttcatattgatggatggaaggcgaatcgaattggggacgaaggtttgatagctgttgcaaaaggttgccctaatttgcttgaattagtgctaattggggttaaccctactaaggcgagtttggaaatgttggcgtctaattgccagaatctcgagcggttggctttgtgtggaagtgattcggttggtgatcctgagatatcttgcattgctgcaaagtgtgtggctttgaagaaactgtgtattaagagttgtcccgtttccgatcaagggatggaggcattggggaatgggtgtccgaatttggtgaaagtgaaggttaagaagtgtaaaggggttacccctgagggtggtgattggttgaggaggactagagggtcagttgctgttaatttagatactggtgaggcagagcttcaggaagccagtgctagtgatggaggggcacaggacaatggtgtagagttccctcaaatgcctgcccaaatcgctgctgcatcgagcagcactcggtctagttcgtcgaggtttgcgcttatgtctgcgaggatttcagcggctgcattgaggagcactcggtctggttcgtcgaggttagggcttttgcctacgaggatttcagcggctagcacttttaggagatggtctggtggtagcactagtgcacgccatggttagggacagggccaaagcaaaacctgagtctttgaccatttttcattgtttttggttgtcgtatcatttgatttttatatttcttgtacttaaatttgaaatttatgccgtgtgatgtttattgcctttggaattgaagcttcacggttgcaattgacaatcgcatttttttcctttctaaaaaa

SEQ ID NO: 184 - DNA, 1291 bp, Zea mays
ggcctgccctgtcctgccttgttaagcaacacagcgagacatcacgagagctagagagagatggcggccacggtttcctccttcccggtggtgaacatggagaagctggagacagaggagagggccacggccatggaggtcatccgcgacggctgcgagaactggggcttcttcgagctgctgaaccacggcatctcgcacgagctgatggacgaggtggagcggctgaccaaggcgcactacgccaccttccgggaggccaagttccaggagttcgcggcccggacgctggaggccggcgagaagggcgccgacgtcaaggacgtggactgggagagcaccttcttcgtccgccacctcccggcctccaacctcgccgacctccccgacgtcgacgaccgctacaggcaggtgatggagcagttcgcatcggagatccggaagctgtcggagaggctgctggacctgctgtgcgagaacctcggcctggagcccgggtacctgaaggcggccttcgccgggtcggacggcccgacgttcggcaccaaggtgagcgcgtacccgccgtgcccgcgcccggacctcgtcgacggcctccgcgcgcacaccgacgccggcggcatcgtgctgctgttccaggacgaccaggtgagcggcctgcagctgctcaggggcggggagtgggtggacgtgccgcccatgcgccacgccatcgtcgccaacgtcggcgaccagctggaggtcatcaccaacgggcggtacaagagcgtcatgcaccgcgtgctcacgcgccccgacggcaaccgcatgtccgtcgcgtccttctacaacccgggcgccgacgccgtcatcttcccggcccccgcgctcgtcggcgccgccgaggaggaccgcgccgaggccgcgtacccgagcttcgtgttcgaggactacatgaacctgtacgtgcgccacaagttcgaggccaaggagcccaggttcgaggccatgaagtcggccatcgccaccgcgtgagcaaagactgacttccgctcccggcttccttcgtggcgtcaagccttgaggcttgaacgaacaacgtacgtccatgtgcttatagtggcacagttatcgcgtggaacggcctaatgtatttcggttgcctcagatcgatctatatgtgcgtatacattatgtactgaaaagtgtgtagcgtctggttaatgtacgagcagtgtgtatgtgaccaggacccggtgtgtagttgctactactaccatatccggtgaatgatcaaaccttttggtgtatt

SEQ ID NO: 185 - DNA, 1485 bp, Oryza sativa
gatggtgagccaagtggtcgccgaggagaagccgcagctgctgtccaagaaggccgggtgcaacagccacggccaggactcgtcctacttcctggggtggcaggagtacgagaaaaacccgttcgaccccgtctccaacccttccggcatcatccagatgggcctcgccgagaaccagctgtcgttcgacctgcttgaggagtggctggagaagaacccccacgcgctcggcctccggcgagagggcggcggcgcctccgtcttccgcgagctcgcgctgttccaggactaccacggcctcccggctttcaaaaatgcattggcgcggttcatgtcggagcagagagggtacaaggtggtgttcgaccccagcaacatcgtgctcaacgccggcgccacctcggctaacgaggcgctcatgttctgcctcgccgaccacggcgacgccttcttcatccccaccccatactacccagggttcgaccgcgacctcaagtggcgcaccggcgcggagatcgtacccgtgcactgcgcgagcgcgaacgggttccgggtgacgcgcgccgcgctggacgacgcgtaccgccgcgcgcagaagcgccggctgcgcgtcaagggggtgctgatcaccaacccgtccaacccgctcggcaccgcgtcgccgcgcgccgacctcgagacgatcgtcgacttcgtcgccgccaagggcatccacctcatcagcgacgagatctacgccggcacggcgttcgccgagccgcccgcgggcttcgtcagcgcgctcgaggtcgtggccgggcgcgacggcggcggcgctggcgtgtccgaccgcgtgcacgtcgtgtacagcctgtccaaggacctcggcctcccggggttccgcgtcggcgccatctactccgccaacgccgccgtcgtgtccgcggcgaccaagatgtccagcttcggcctcgtgtcgtcccagacgcagtacctcctcgcggcgctgctcggcgacagggacttcacccggagctacgtcgcggagaacaagcggcggatcaaggagcggcacgaccagctcgtggacgggctcagggagatcggcattgggtgcctgcccagcaacgccggcctcttctgctgggtggacatgagccacctgatgcggagccggtcgttcgccggcgagatggagctctggaagaaggtggtgttcgaggtcggcctcaacatctcccccgggtcgtcgtgccactgccgcgagcccggctggttccgcgtctgcttcgccaacatgtcggccaagaccctcgacgtcgccatgcagcgcctcaggtcgttcgtcgactccgccaccggcggcggcgacaacgccgccctccgccgcgccgccgtccccgtcaggagcgtcagctgcccgctcgccatcaagtgggcgctccgcctcaccccgtccatcgccgaccggaaggccgagagataatcgccaagaacaaaaccaca

SEQ ID NO: 186 - DNA, 2001 bp, Synechocystis sp. PCC 6803
ccatccttgggcaggattagtgttttggtgggcggccctagaaagacaggtacgggtggatggtcaagtggaaaaaattgatccggcagaatccgatgcctattttcagtcccgtccccggggttctcaattgggggcctgggcttctccccaaagtcggattgttggcgatcgccaggagttagaagacaatctagcccgttgggaaaaacaatacgaaaaccaatccattccccgccccccccactggggaggatttcgagtgattccccatcgcatcgaattttggcaaggccgccctagtcgtctccatgaccgtttgcaatttaatttgcttgatggtcaatggcacagacagaggttggcgccgtagaagttaaactagcccccattccattgcagtcttaaagttttgacgttttagtccataaagttgatcagagttgcgtatttataaacatttgaactttttatcgtcctttctctacacaaatttgaatcaagtattctccttagtgtgttttctgtcttagtcaaaattggtcttactgccgaattttcatcttccaacggcagccttctttgaagatttaggatagaatcataggattgttttgccgtcatagcccctaagataaatacatgcgtctagaaatttcatcgcctcaaacaaagcttccttaccccaaaactgaagaattaccatttaccctccaagagctcagaaacgctattccagcggattgttttgagccatcggtagtccggtccttgggctacttttttttggatgttggtttaattgccgggttttatgctctagcggcctaccttgattcctggttcttctatccgattttttggttaattcagggaaccctattctggtccctgtttgtggtgggccatgattgtggccatggctccttttccaaatccaaaacccttaataattggattggtcatctcagccacacgccaattttggtgccttaccatggctggcgtattagtcatcgtactcaccatgccaacacgggcaatatcgacaccgacgaaagttggtatccagtgtcggagcaaaaatataaccaaatggcctggtatgaaaaacttctacgtttttacttgcctctgatcgcctaccccatttatctatttcggcgatcgccaaaccggcaaggctcccatttcatgcccggcagtcccctattccgtcccggagaaaaagcagctgttctcaccagcacctttgcccttgcagcctttgtcggcttccttggctttttaacttggcaatttggctggctatttttgctgaaattttatgttgccccctacctcgtgtttgtggtgtggttagatttggtcacatttttacatcacactgaagacaatatcccttggtatcgtggtgatgactggtattttctcaaaggtgccctctccaccattgatcgggattacggcttcattaaccccattcaccatgacattggcacccacgtcgcccaccatattttctcgaatatgccccactacaagttacgccgggcgactgaagccatcaagcccattttaggggaatattatcgatattctgacgagccaatttggcaagctttttttaagtcctactgggcttgccattttgttcctaatcaaggttcaggggtctattaccaatccccatccaatggtggatatcaaaagaaaccttaattgatcctaattgaatcaaaccaacatcgggagggaaggcaatattagatggtattactcccttccgatcgccttatgagaagtatggaagaagttaaacaatcacactccaaaagatcagcattaaaccaacaacggtgctgtggtgaggcagaagattgaaaaaggattgtttacctaactgttgactgagaaaaatcgaccaaagtaccccggccaaaagcagcataccttgcaaaaaggcgatcgccgctggatccgccaccaacatcggtaaat

SEQ ID NO: 187 - DNA, 1801 bp, Saccharomyces cerevisiae
ttaacaatccaggctgaacaaaacaaggaataatgttacacaggcacggttctaagcagaagaacttcgagaatatcgctggaaaagttgtccacgaccttgcaggtctgcaattgctttctaacgacgttcaaaaatccgctgtccaaagtggtcatcaaggatcgaacaatatgagagatacttcgtctcagggcatggctaataagtattcagttccaaaaaagggactacctgctgatttgtcttaccaactgattcataatgaattaacacttgatggtaatccgcatttgaaccttgccagtttcgtgaacacttttaccactgatcaggcaaggaaattgattgatgaaaatttgaccaaaaatcttgctgacaatgatgaatatccgcaattaattgagctaactcagcgttgtatttctatgctagctcaattatggcacgctaatcccgatgaagaaccaataggctgtgccaccacaggttctagtgaggcaatcatgttgggtggactcgccatgaaaaaaagatgggaacacagaatgaagaatgctggtaaagatgcttccaagccgaacattataatgtcttctgcgtgccaagtggcattagagaagtttacgagatattttgaagtggaatgccgattggttccggtatcccacagaagccatcatatgcttgacccagagtcgttatgggattatgtagatgagaacactattggctgttttgtaattttaggaaccacctacactggccatttggaaaatgtagagaaagttgcagatgtcttgtcccaaattgaggccaagcatcctgattggagcaatactgatattccaatccatgcggatggcgcttcaggtgggtttattatcccatttggctttgaaaaagagcacatgaaagcttatggcatggaacgttgggggttcaaccatccgcgtgtggttagtatgaacactagtggtcataagtttggcttaaccactcccggtctgggttgggtgctatggagagatgaatccttactggctgatgaattgagattcaaactaaagtacctcggtggcgtggaagaaactttcggtttgaatttttcaagacctggatttcaagttgtccatcaatacttcaattttgtttctctaggccattcagggtatagaacacaattccaaaattctctatttgttgcaagagcgttttctttcgaattattgaattcgtcaaaattgcccggatgctttgaaattgttagcagtatccatgaaagcattgagaacgattccgcccctaagtcagttaaagactattgggaacacccccaggcttacaaaccaggtgtaccgctggtagccttcaaattgtccaagaaattccacgaagaatatccagaagtgccacaagcaatcctttcctctttactgagaggtaggggttggataataccaaattacccactaccaaaggcaacggatggatccgatgagaaggaggtattaagagtggttttcagatcggagatgaagttggatttagcacagttgttgatcgttgacatcgagagtatcttgacaaagttgattcatagttacgaaaaggtttgtcatcatatagaacttgcctctgagcaaactccagagcgcaagagttcgttcatctacgaaatgttgctggcattggcatctccacaagatgacatcccaacgccggatgaaatcgaaaagaaaaataagctaaaggaaacaacaacgagaaactatagaggaacatgttgagttgaaaaggt

SEQ ID NO: 188 - DNA, 1925 bp, Zea mays
ccacgcgtcctcggacgcgtgggtgtcgatggattacttggctgctgctgtacccgtgaccttggctctgggagtgggagctatcttgttggtcttacgatggacgtactgccgccgccgaacaagcgccgaagaagcaagactgcccccggggtcaaggggcctcctgttcctgggggagacgctccactacctggcagcgtcctccaccccgggggtattgccaccattcttccagcgacggttggagaggtatggccccatcttccggacgaacctggtcggggaggatctcgtcgtgtcgctggacgcggagctgaacgcgcacgtgctgaagcaggaggagcgcggcttccagatctggtacccgccctccttcatgcgcgtcttcggcgccgacaacatcaccgccaagctcggcgtgctccaccgccacatgaggaccctcgtgctccgcctcttcggccaccagaccgtccgctccgtgctgctgcacgacgtgcagcggagcgcgcgcgacgagctgcgctcatggctcggccgcccggacgtcgaggtcaggacggccacctccaggatgatatttggcgtcactgccaacaagctgatcagccatgacgacgcagcatctggaggcacgttgtggagatgcttccacgactggacttcggggctgctctcgtttccggtttccattcccggcacaaccttctacagatgcatgcagggacgtaagaaggttatgacgatgctgaaacagcagctcgtcgagcgtcgacggaacgcagcggagcgcgagacgacagaggatttcttcgatctcgtgatcgatgaactgaacaagccagaccctatgatggacgagagcaccgcgttggacttgctgttcaccatgttgtttgcgagccatgagacgacgtccatggtattaaccgtcatactcaagtatctgactgacaacccaaaagctttgcaagagctgacagaggagcacgaaagaatcctggaaagtagggccgatccaggctctgacctcacgtgggaggagtacaggtctatgaaattcacatctcatgttatacatgagtcgctaaggctcgcaaacatcgcactggccatgttcaggaaagcaaatcaggatgtgcacataaatgggtacacaattccaaaaggatcaaagatcatgatgtgtgcactagcatcgcacttgaatacggaggtctacgaggacccctcagtgttcaatccatggagatggaaggatattcctgaaccagtcggcacctctaaggactttatggccttcgggggtggtttgcgcctatgcgctggtgccgagttttccaagatgcagatggctatgttcctccattacttggtcacaaattacagctggaaacccgtcagcggtgggacaatgttattctatccaggactgcaatttccagaaggcttccacatccagcttcttccaaaaatcccaaacgtggttccataaaccctatgaagaaatatgaatacgaataatttaagcaaatattctaaatgtaccctggggaattgaagttcgataacgatgtggtacgggctgatttggtaaccatggatcacaggaggatgggagaggattgatggagaaattagttcatttctccctcaacctctttcaatcctcttatgatccacttatcaccaaatcaaccctaatgatagcaggtcgaattgtcggaacaaataatagtttcaccaaacagaaggggagtatgcatgtgtgtaactttttatagttataaataatagtagagtaaattcagctcgttgtgtaacaactatgcaggtgagtaaaaattggttcagcatattgtatatattatgcccagttcaatggaaaaaaaaactttgttgtcaaaaaaaaaaaaaaaaag

SEQ ID NO: 189 - DNA, 1915 bp, Zea mays
ccacgcgtccggaaagatttttcttccctcctccgacgccccagcccaccaacacactctataaagcagccctcagtcacacacagaacgcacaagcgcaagccgggcaagaaaactccgcaggccagtctgcgagttggatggccttcttcttggccctcgtgtgcatcctcatcttgctagccatcgcctcctacgtccagtacactcgctggcaaaaggggaaaggccgcttcggcggccatgggaggtctgctcccttgaagctgcctcctggctccatgggctggccttaccttggcgagaccctccagctttactcccaggaccccagcttcttcttcgcttccaaacagaagaggtacggcgagatcttcaagacgcaccttctgggttgcccgtgcgtgatgctggcgagcccggaggcggcgcggttcgtgctggtgacgcaggcgcacctgttcaagccgacctacccgcggagcaaggagcgcatgatcgggccgtcggctctcttcttccaccagggcgactaccacctccgcctccgcaagctcgtccagggcgcgctcggccccgacgcgctgcgcgcgctcgttcctgaggtggaggccgccgtgcggtccactctcgcttcctgggacgccggccacgtcagaagcacgttccacgccatgaagacgctgtcgtttgatgtgggcatcgtgacgatcttcggcggccggctggacgagcggcgcaaggcggagctgaggaagaattactccgtcgtggagaaggggtacaactccttccccaacagcctgccggggacgctccattacaaggcgatgcaggcgcggcggcggctgcacggcgtgctgtgcgacatcatgcgggagcgtcgtggccaggcccaggcggcgggcaccggcctgctgggctgcctgatgcggtcccggggcgacgacggcgcgccgctcctgagcgacgagcagatcgccgacaacgtcatcggcgtgctgttcgcggcgcaggacacgacggccagcgcgctcacctggatcgtcaagtacctccacgaccaccccaagctgctcgaggccgtccgggcggagcaggcggcggtccgcgaggccaccggcggcgggaggcagccgctggcgtgggcgcacacgaagagcatggcgctaacgcatagggtgattttggagagcttaaggatggcgagcatcatctcgttcacgttcagggaggccgtggccgacgtggagtacaaagggttccttatccccaaggggtggaaggtgatgccgctcttcaggaacatccaccacagcccggactacttccaggatccacacaagttcgacccttctagattccaggtggcgccgcgtccgagcacgttcctgccgtttgggcacggcgtgcacgcgtgccccgggaacgagctggccaagctcgagatgctcgtcctcatccaccacctggtcaccggctacaggtggcaaatcgttggatccagtgacgaggtcgagtacagcccgttccctgtgcccaagcacggcttgcctgtcagattatggagacaaaacaatccggtcgacagaaaggggcgtgagaccgacgacgatcatgtggagaggatatttatttagtttgactcttgagttaggcatgaatttaaccccaagctagctagagaagttttttttcccctttgaaattcttctttgctcgcctcttcctcctggatcaaattgcgttggaggagaagaaacggcagctttctctctttcgttttctttgcctgcttcaccgctacgataatggtgaaaatatgtaagctacgtggacatcaatgatccacagcatcgttgatatatataatatatagagaaaattctctgcaaaaaaaaaaaaaaaaaaaaag

SEQ ID NO: 190 - DNA, 1886 bp, Zea mays
ggcctcacccttttccctggtgttgcaagttgcaacacacagcgtccggcgagatcggcgatcagaaaccacgagcccacccaccatccggaacgcgcgcgcgatgtgtcccgtcagaggcggtggttgttcttggccagcgtccgtcgtcggctctgtcacggcggcgctgctcctcgccgccgtcatcgtgcggctcttcgtcccccgtgcctgttcttcaggaattatcaaggggcggcggcaggtaggtgctggtgctgccggaggagcacggctccctgccggctcgctcgggtggccgctcctcggcgagacgctggcgttcatccgggccgcgtactcgcctcgcccggagtccttcgtcgagaaacgccgcgtcttgtacgggaaggtgttcaagtcgcacctgtgggggtcgccggcggtggtgagctcggacccggaggtgagccgcgcggtgctgcaggccgacgcgtcggcgttcgttccatggtacccgcgatcgctcatggagctgatggggcaatcgtccatcctagtgctcggcggcggcctccagcgccgggtgcacggcctcgcgggcgccttcttcaagtcgccgcagctcaaggcgcaggtcaccctggacatgcagcgccgcgtcggccgcgccatggacatgtggggcaggcgccatcggagcatgggcgacgacgacagcggtggtatgcccgtgcgtgtgcagaacgaggccaagtcgattgtgttcgaaatcctagtgagggcgctgatagggttagaggaaggggacaagatgcagtacctcaggcaacagtttcaagaattcattgccggtttgatatcacttccggttaagcttccggggactcaactctatagatccctcaaggctaagaagaggatgacaaagttgataaaaacgatcatccaagagaagaggaagaagatgatgtcggaaggcgacgaggatctgcgtggtgggactcatccacgtgacatgatcgacgtcctgctaggcaacggcaacgacgagctctccgacgagctgatatctgacaacatgatcgacttcatgatccctgcagaggactccgtgcccgtgctcatcacgctggccgtcaagtacctcagcgaatgcccactggctctgcagcaactcgaggaggagaacatggagctcaagaggcagaaatcaggcgcgggagaaaccctagaatggacagactacatgtcgctcgccttcacacagcacgtgatcacggagacgctgcggatgggcaacatcatcaacgggatcatgcggaaggcggtgcgagacgtggaggtgagaggccacctggtcccgaagggctggcgcgtcctcgtctacttccgcgccgtccacctcgacgccgccgtccacgacgacccgcacgccttcaacccctggaggtggaaggagaggcccgacgtcgtggccatgagcggcttcaccccgttcggcggcggccagaggctgtgccctgggctcgacctggcaaggctcgaggcctccatctttctgcaccatctcgtcaccaatttcaggtgggtggcggaggaggacaccgtcgtcaacttccccacggtgcggctcaagcgagggatgccaatcgcagtgacgcccagaacctgctgaacgcaacgcaacttgccaggcaaaaccatactatacatttatactccgtaatcaactaaagaggtgtgagaaataatacagtacatgcaagcatgtaatggagggcgaaattaaaagttggcacggcaaaggcgccgatggtatgccaaaagttcagtttgcaaattatatagtttaattgctattacactaggggcacccatgtctgatgcctcgtttatgaaaa

SEQ ID NO: 191 - DNA, 1844 bp, Zea mays
ccacgcgtccgatctgtcactccccgacacgcgcacgagctccactccccactccgcacccaacccaaggcgccactgccatggacgcgggcggtccgccgccgctgttcctcctgggcgccgtgctggccgcggcgctggggtggctgctcgtggtctggcgggcggcggcggggcggcggcggtccgcgtcggcgcggctgccgccggggagcacggggctgccgctcatcggggagacgctgcggctcatcgcggcgtacaagtcgccgaacccggagccgttcatcgacgagcgcgtggcgcggcacggcagcggggtgttcacgacgcacgtgttcggcgagcgcaccgtgttctccgccgacccggccttcaaccgcctgctgctggccgcggagggccgcgccgtgagctgcagctacccgtcgtccatcgccacgctgctgggcccgcggtcgctgctgctcacctcgggccccgcgcacaagcgcctccactcgctcacgctgacccgcctcggccgcccggcctcgccgccgctgctggcgcacatcgaccgcctcgtcctcgccaccatgaggggctgggaccgccccggcgccggcgccatgcgcctcctcgacgaggccaagaagatcaccttcaacctcaccgtgtggcagctcgtcagcatcgagcctgggccgtggaccgagagcgtccggcgcgagtacgtgaagctcgtcgacggcttcttctccatccccttccccttcgcctccctcctcccgttcaccgtctacggccaggccctcaaggcgaggaagaaggtggccggagctcttcgggaggtggtaaggaagaggatggacgacaaggcggaggacgactgtggcgccagtaagaagaacggggagaagaaggacatggtggaggagctcctagaagcggagggcgggagcttctccgtggaggagatggtggacttctgcctgtccctgctggtggctgggtacgagaccacctccgtgctcatgacgctcgccgtcaagttcctcaccgagacacccaccgcactggcgcagctcaaggaagagcacgacagcatcagaggggtaaaaggcaaaggccaagctctggaatggagcgattacaagtcgatgccgtttacacaatgcgtgataagcgaaacgctgcgcgtggccaacctgatcagcggggtgttcaggcgtgcgaacaccgacatccacttcaaaggccacgtgatcccaaagggctgcaagatcttcgcgtcgttccgagccgtgcaccttagcctggaccactacgagaacgcccggaccttcgacccttggagatggcagcagggcaagagcaagctgcagagcgcggaaggggccagtctgttcacgccgttcggcggcgggccgcgcctgtgcccgggctacgagctcgcccgggtggtggtttccgtcttcctccaccacctcgtcacgcgctttagctgggaggaagccgaggaggacaggattgtcttcttccccaccacccggaccctcaagggataccccatcatcctacggcggcgaccggattgcgatgatctctgacctcatggctaggttccccccttatcttcttcggatcaaggctgaaggctaagcattagatagagtaaggtggatgtcgtcgtggctagtaggtgcatggtggtttctgccactcactcactcactcactctgttgtctgtttgttcctgttcctctctgttttctcttgctctgtaacctggacctggtacgagtcagcactcagcagccagcagcaaactcgcgttttgcttgtaaaaaaaaaaaaaaag

SEQ ID NO: 192 - DNA, 1843 bp, Zea mays
gcctctcctcctctcccctgccctcgcaaacgcacgcaccacagcatcgtccttcgttccattcccatccataccccctcgatcggccgggatgctgggtgtggggatggccgcggcggtgctgctcggggccgtggcgttggtgctcgcggacgccgctgcgaggagagcgcactggtggtacagggaggcggctgaggcggtgctggtcggcgccgtggctttggtggtggtggacgccgcggcgcggagggcgcacgggtggtacagggaagcggcgctgggctcggcgcggcgggcgcggctgccgccgggggagatggggtggcccttggtcggcggcatgtgggccttcctccgcgccttcaagtccggcaagcccgacgccttcatcgcctccttcgtccggcggttcggtcgcacgggcgtgtaccgaagcttcatgttcagcagcccgactgtgctggtgacgacggcggaggggtgcaagcaggtgctgatggacgacgacgcgttcgtgacggggtggcccaaggcgacggttgcgctggtcgggccgcggtcgttcgtggcgatgccgtacgacgagcaccggcgcatccgcaagctgactgccgcgcccatcaacggcttcgacgcgctgacggggtacctgcccttcatcgaccgcaccgtcacgtcgtcgctgcgcgcgtgggcggaccacggcggcagcgtcgagttcctgacggagctgcggcgcatgacgttcaagatcatcgtgcagatcttcctgggcggcgcggaccaggccaccacgcgcgcgctggagcgcagctacacggagctcaactacggcatgcgcgccatggccatcaacctgcccggcttcgcgtaccgcggggcgctgcgcgcgcgccgccgcctcgtggccgtgctgcagggcgtgctggacgagcgccgcgccgccagggccaagggggtctcgggcggaggagtggacatgatggaccggctgatcgaggcccaggacgagcgcgggcggcgcctggacgacgacgagatcatcgacgtgctcgtcatgtacctcaacgccggccacgagtcgtccggccacatcaccatgtgggccaccgtgttcctgcaggagaatccggacatgttcgcgagagcaaaggcggagcaggaggcgatcatgaggagtatcccgtcgtcgcagcaggggctgacgctcagggacttcaggaagatggagtacctgtcgcaggtgatcgacgagacgctgcggctcgtcaacatctccttcgtctccttccgtcaggccaccagagacgtcttcgtgaacggatacctcatccccaagggctggaaggttcagctctggtaccggagcgtgcacatggacccacaggtgtaccctgaccccaccaagttcgacccgtcgaggtgggagggccactcgccgagagccggcacgttcctggcgttcgggctgggcgccaggctctgccccggcaacgacctcgccaagctggagatttccgtcttcctccaccacttcctcctcggctacaagctggcgaggacgaaccctaggtgccgggtgaggtacctgccgcacccgaggccggtggacaactgcttggccaagatcaccagagtcggtagctagctgctagattgtgatggaagtacgaatgaaaaaaaagcccagcagaaaactctagcggctgggccggctggaaattatgggccgggccattgtggttgcccccccctgtctgtgcaaaaataaaacaagcagaaaggaataaaaaaaaggaaaagtattacttcgaaaaaaaaaaaaaaaaaaaaaaaaaaa

SEQ ID NO: 193 - DNA, 1795 bp, Zea mays
attcggctcgagcccatctcatctcttgctcctcgtccgtagttgcagttgcagtgtcctcggccgcctctagtcctagccgtttactccttcctttcaccgcatcaagcagagagcaagcgaggcaagagccatgggcgcctttctgctcttcgtctgtctcctggcgccggtcgtcgtgctcgcctgcgccgtccgcggcaggaagcggcgggcgtcctccgcggcggcgggcggcaaggcgctgccgctgccgcccgggtcgatggggtggccgtacgtgggcgagacgttccagctctactcgtccaagaaccccaacgtgttcttcgcccggaagcagaaccggtacgggccaatcttcaagacgcacatcctgggctgcccctgcgtgatggtgtccagcccggaggcggcgcgcttcgtgctcgtcacgcaggcccacctcttcaagcccaccttcccggcgagcaaggagcgcatgctggggccgcaggccatcttcttccagcagggcgactaccacgcccacctccgccgcctcgtctcccgggctttctcccccgaggccatccgcggctccgtgccggccatcgaggccatcgcgctgcgctcgctcgagtcctgggacggccgcctcgtcaacaccttccaagagatgaagctgtacgcgctgaatgtggcattgctgtccatcttcggcgaggaagagatgcggtacatagaggagctgaagcagtgctacctgaccctggagaaggggtacaactcgatgcccgtgaacctgccgggcaccctgttccacaaggccatgaaggcccgcaagcgcctgggcgccgtcgtggcccacatcatcgaggcccggcgcgagggcgagcggcagcgcgggagcgacctcctggcctccttcctggacgaccgcgaggcgctcaccgacgcccagatcgccgacaacgtgatcggcgtcatcttcgccgcccgcgacaccaccgccagcgtgctcacctggatggtcaagttcctcggcgaccaccccgccgtcctcaaggccgtcatcgaggagcagcaggagatcgcgcggtccaaaggctcctccggcgagcccctgacgtgggcggacaccaggcggatgcgcacgacgagccgtgtgatccaggagacgatgcgggtggcgtccatcctgtccttcaccttccgggaggccgtggaggacgtggagtaccaagggtacctgatccccaagggctggaaggtgatgcccctgttccggaacatccaccacagccccgaccacttcccctgcccggagaagttcgacccctcccgattcgaggttgctcccaagcccaacacgttcctgccgttcggcaacgggacccactcgtgcccgggcaacgagctcgccaagctggagatgctcgtgctcttccaccacctcgccaccaagtacaggtggtccacctccaagtccgagagcggcgtgcagttcggccccttcgcgctgccgctcaacggcctgcccatgaccttcgtccgcaaggactgatgagccgccgacagatgtgtggatcgtggacggagccacaccaaaaccacggcaggccgacggaaccaaaccaaagccaacaacaaacaggcggatggatatggtatggcggtatatgctagctagtactactataggagccgcgaaaaccgcttccgggatttggcgttgcggcggtcgccatcggacgggacggggacaggcatcaggcaagcatgggatgatcacagaggaaaaaaaaaaaaaaag

SEQ ID NO: 194 - DNA, 7001 bp, Oryza sativa
tactacagggcaccgcacagtgcagcggccagcagtgcagtacaccactgcagagtgcagacgaaggcaagcgtggctgcaaccgcaagcagcaaaagcaaaaccccggaagcttcccccaaaatctctctctccctctccccactataaatcctcccctctcgtcgatcgccatggctcccatgctctcgatcgcctcccgctcgccctcgccggcgttgattgcacctcacgcctccgcccgcgccaccggtcttcgtgctccgttcgccggcaaccgcattgtggggtgggggtggggggatcaaaccaaatcaggtacggatcgtaatcgcgcatcgatctgtgtcgtcctgttcctgcgcgtccgctccggcgagcccacgcaggcgccgcgggatccccctgctgcggtaggcggcggcggctgctacgtccggctgccggcgccgccgcgagaccgggacgcggttttggtaagcacgatccatttctttctcccccgaattccgacccgctcgtttggttgattggtttcgattcggtcgtgcggcctcgggtcacgtacatttacttctactacgagcaagcctaataatacagccgacttgttggttataaggttctgtgtagcattctctcagcctacccatataatagttagctccttacaattaatacagggctcacatgtctctctcgtagagtttcttggttcctgtgtctaagccggctgtaagtttatagcccgcttctcctctctctcctctcttttctcctccacctcaatatttaaccggcttatagtctactattatacttgctctactacgaccatagcagtacaagcgtgcagttttggagtttattaaactttaaagttggagtagttgtactactatccgaaacgtaattagtaagcgcaagtcaattctactatcggacaagtaattacgtttcggttagtagttttttaatatatctctcgtttaatgcgagtagcggcttataagacaaagacatgtgtacaagcggcgataaataactatagactatagagtatggaccttatatttctactagctaaataatcatgcttttatacggattaaaacaaattaaggtttttgggacaatttcattctagatgaaataagatagaatcatatgtagaaggattattttataacattaaagcatgtagagtaattggaagaaaacatgatggggtagtcggtaaataaaaaaaaacttggtgaggtggcaacattgctctcttttataaggagtatagattcttagcggcccaaaactaaagttaaaaatggaaaattacgaaaaccttaaattaattatatatctcatgggatttaaatttggttgctgcttataagccaacgagggtctaggaaccgataaaatttgtaaaaccaaagggcgataaataaatctcagggatacgaacacatatgcttcagccagtgcccggtggatagaaaggctatacataggaaagggaaaagagacttgcaaaaatactattgttctagtagaaagtttcatgttggtaattaatttaactttttttttgatcaaagggccttaaccctccatttccattaaaagaaatgtcacagtttacagcagaaaaaaaaaacagacttaatttaacatttgtctcagttcttcagcaattgaaagttgtttcgtctggagttgggataattttactagttttacaaaggattattctgtgggacttgaatatattaacttgcggttttgagtttgtgccgtgtgatgtcgattgaagtgtggattggtcctttctttcttgaatatgttgccatctgcttttgaaatgttggcactcttgacaaattgacaaagaaaatattaggcttgtttgctaatcatttcttattttcttgtagttgtatgtagtcgacggttccagaaaactgagtagctgacaggtgctgcctttttcttgttgcaggatttatttctcaaagactaccatttcagattactgaagttgggcgatctgcataactagcacggtgccacggtttttgagaagaagaacgagcaatggttcgacaggtacctggtttaagttctttctttcagctgtttgcctggacacttcattgcattgggtcgatgttctgggctgtcaagaactctgctgcctgaacaatgatgttttttttgtttatctagttagtttgcatgtgaaaatatcattagtttattcatatttatattgaatttttattagacatatttactgcatttctttagctttgctattacatttacttcatttgttgagcagatatgcataagctagattcttctatctaaaaatatgtataagctggacagcccccaaatacatagccttgagtagaaaacaatactatatctcaaaatataagattcatagtatcagctatgcctataccatacacatcaaattcactgtatcataaaaaacgagatttggagggagaggcgttcctccaacaattaaataagaaattgtgagcgtgttggggattgaacacgggattttggggttaaaaccacacatcccttgcgctgcattatcaagtgcatctcaaattcactgtatcatagtctacctgtaattgctgagcatttgcaaattagaaccttgaacataagtcaagtgttataattctttccttcagctgttggtattgttattgattttgttacctgaataacgatgcctttcattgtaactctccctttcctttttccagtatcacgtttgcttgttcactctacttctctgcttcatccctatcactgctttggcggaatccgatatcaagaatttatttgctctgaggaaagcaatcgctgttggaaaaggcttcctccacaactggtttgagctagaaactcctccatgcaactggtcaggtatatcatgcgtggggcttactgttgtggccatagacctgtcatctacgccactctacgtcgattttccatcacagatcattgcattccagtcactcgttcggctcaatgtaagcgggtgcgggttttccggtgagcttccagaagccatggtgaatctgcagcatctccagcacctagatttgagtgataatcagcttggtggccctctacctgcctcattatttgacttgaagatgctgaaagttatggtgcttgacaacaacatgttctctggacaactaagccctgccattgctcaccttcagcagctcaccgtgctatccatatccacgaattccttctctggaggcctccctccagagctaggcagtctgaagaacctggagtacctcgacattcacacaaatgcatttagtggatcaataccggcatctttcagtaatctatctcggctcttgtaccttgatgcaaacaataacaatctcaccggatcaatattcccgggaataagagcgttagtcaaccttgtcaagctcgatttatcgtcaaatggtttggtgggggcaatccccaaggagctttgtcaactgaaaaatctgcaaagtttaatcctatcagacaatgagttaactggaagcatcccagaagagattggtaatctgaagcagcttgaagtactcaatctcctcaaatgcaatctcatggacaccgtccctttgtcgatcggcaatctcgaaatcttggaagggctttatatatcattcaacagcttcagtggtgagcttccagcatctgttggtgagctacgcaatctgaggcagctgatggcgaagagtgcagggttcactgggagcataccgaaagaactcggcaattgcaagaagcttactactctagttctgtccggcaataacttcactggcactatacctgaagaacttgcagatttagttgccgttgtcttgtttgatgtggaaggaaacagactctcaggccacattcctgattggattcagaactggagtaatgtttcatctatatcgcttgcgcagaacatgttcgacggacctctaccgggtcttccattacatctggttagtttctctgcagaatccaaccggctgtcaggatctatccctgccaagatatgtcaaggcacctttctgcagatacttagattgaatgataacaatctgaccgggagtatcgatgagacatttaagggatgcaagaaccttactgagctaagcttgctagataaccatctccacggagagataccagaatacttagctttgctaccactggtgtcacttgatttgtcacataacaatttcacagggatgatccctgacaggttatgggaatcatcaaccatcttggacatctctctcagtgataaccagctaactggcatgatcacagagagcattggtaagctcttgagcttgcaatcgttgagcatcgacagaaactacttgcaaggacctctccctcgatcgatcggcgctctaaggaatctgacagcactgtctctcagtggcaacatgctatctgaggacattccaatacagctcttcaactgcagaaaccttgtcacattggacttgagctgtaacaatctgacagggcacatccccaaggccatatctcacttgacaaagctcaacaccttggtcctgtcccggaatcggctgtcaggcgctatcccttctgagctatgcgtggctttctcgcgcgagtcccattctgaattggagtacgtgcaacacattggattgattgatctgtcgcggaacagattgactggtcacatcccgagagcaatcaacaattgttctatactggtagagctacacctgcaagacaacttgttaagtggcactatacctgtggaacttgctgagctgagaaacataacaaccattgatctatcttccaatgcattggttggacctgtccttccatggcctgtaccattggcaagcctccaaggccttcttctgtctaacaacagactcagtggctccattccttctggcattggcaacattcttccccagatcacaatgctggacttatcgggtaacgcgcttaccggcactcttccattggatctactctgcaaagagagcctaaaccacctggatgtcagtgacaacaacatctctggacaaatcccattttcctgtcatgaggacaaagaatccccaatcccactgatcttcttcaatgcaagcagcaaccatttctcagggagcctggatgaatcgatctccaacttcacaaagctgacctatcttgatctccacaacaacagcctcactggaagattgccatcagcaatagcaagggtcacttctttgtactatcttgacctatcaagcaatgatttcagtggcaccatcccttgtggtatctgcggtatgtttggcctgaccttcgcaaacttctccggtaaccgcgacggtggcactttcaccttggcagattgtgctgctgaagaaggcggggtttgcgccgctaaccgtgtcgatcgaaagatgccggatcatccgttccatgtactggaagcaaccatttgttgcattgcaacggccattgtcattgtgctggtggtgatcctggtggtttatctgagacgacggaggaagatgttgagaaggaggcagtttgtccttgtccctgccggtgacaacgccatggctgaccatgagacaaccttgagtaacaatcttttggggaggaggaggatgaagaagagggagccaccgagcatcaacctcgcgacgttcgagcacgcgcctgtgagggtcaccgtggacgagatcatgagagccaccgggaatttcgacgggatgcacgtcgtcggcgacggcggcttcggcaccgtgtacagggcggagctccccggcggccggagggtcgccgtcaagaggctccacggcgtcggccgccggttccagggcggcgaacgcgagttccgcgccgagatggagaccgtcggcaaggtgaggcaccccaacctcgtccccctcctcggctactgcgccgccggcgacgagcggttcctcgtctacgagtacatggagcacggcagcctggaggaccggctgcgcggcggcggcggcgcggcgctcgggtggccggagcggctcacgatctgcggcggcgccgcccgcgggctcgcgttcctgcaccacggcttcgtgccgcacgtcatccaccgcgacgtcaagtccagcaacgtcctcctaggcgagggcctccagccgcgggtgtccgacttcggcctcgcgcggatcatcagcgcgtgcgagacccacgtcagcaccgtcctcgccggcacgctcggctacatcccgccggagtacgcgctggcgatgcggtgcaccgccaagggcgacgtgtacagcttcggcgtcgtcatgctggagctgctcacggggcggccgccgacgtggtcgtcggcggaggtgacggcggagggtgacgacgagcgcggcggcggcgggagcctcgtcgggtgggtgcggtggatggcggcgcgcgggcgtggcggcgaggtgttcgacgcttgcctgccggtgtccggcgcggagcgggagcagatggcgcgggtgctcgacgtcgcccgcgactgcaccgccgacgagccgtggaggaggccgaccatggcggaggtggccaggagggtgggggcgatcgaggcgatggagtacgggcctctggtggtggcagtgtccagtggcgagccgccggcgatgccatgatcttgctgctgctatactgtatactgtagtgcatcatgctcctttttgtgaattaaggtgttttgatctcatcttatatgcggacacagagatgcagcagaaactcaattttttaacaagttcatacctcacaggcatttcatcaaacacctgttatgcgtgcaaccaacccgctcattataacctcatctttttttttaatgcttatccttataagttaatatttaaaattttcaaccttaaatttgaatttcattttaggttttt

SEQ ID NO: 195 - DNA, 1558 bp, Glycine max
attcggctcgagccctaatccaccctttctgaacaaaaataaaaaaataaaaaaaaacccatcgatttcttggacctccatgacttctttgtctacccatcacacctatagccgaaagcaaaaatctctcggcctcctctgcaccaattttctgagtttgtacaacaaagaaggtgtgcgcctggtcggtctcgatgacgcagcttcgcggttaggtgtagaaagacgtcggatctacgacatcgttaatgttttagagagtgtcggtgtgctaaccagaaaagctaagaatcagtatacttggaaaggattttgtgcaattcctgctgccttacaagaacttaaggatgaaggtttgaaggagaatcctggatcatttgatgactccaatgacaatgcaaaagtgtctgatgatgaggaggaggaagaagaaacatttcctaatattaacattgggagtcagagtgagaaggaaaatcctgattacactgctactgtcaaatcctccaagaatgaaaacagaagggaaaaatctctggcattgcttactcagaattttgtcaagctttttgtctgctctaattttgaaatgatctcccttgacgaagctgcaaagttgttgcttggaaatgccaacaatagaacaaaagtcagacgtctatatgatattgcgaatgtgttatcctccatgaacctaatcgagaagacccatacaacaaacacaagaaaaccagcattcaggtggttgggtgtgaggggaaaaacatggggtggatcagttgacttggctcaaaattcaaatgtcaaagagtcacggaaaaggatgtttggaactgacattggaaacataagttttaaaaggaacaaagttgatttgtccatggatggccagaattctaaaatgcaaaatcaacacgaaaatattagtccacgagctcagttagagaaaatcatcataaaaaaagatgctaagcagacttcagagagctatcagtttggcccttttgctccagcttatgtgcccaaagttggaacctctgaaaataatagtgtgaaaaaggtgcatgactgggacagcctcgcacaggagcatcgtcctcaatatcaaaaccaaggttagagctttaaaagatctattttcccactacatggaagcatggaaatcttggtactctgaagctgctgggaaaaagtcaacgaaaactttataattgacttgtccaaagtcagtccagataattgtagcttttctagaaaataaatgatccattactgagtgtatgttccacatatgttggcatattctcaaaatgaaatgatccattactgaatgcatgttctccatgcgttactgtattctcaaaagaaaatgatccattgttgaatccatgttctccaggggttagcgtacagctaccctgtgctgatttattaaccgtcacatgtcatgttaaagatcagttaacagttcttatagattatttatcatgttttttataaaaaaaaaaaaaaaaaaaaaaaaaaaaaaaaaaaaaaaaaaaaaaaaaaaaaaaaaagg

SEQ ID NO: 196 - DNA, 3996 bp, Zea mays
cgtagcactgccctcttcctctctgtcctctcccctgctgccgccccctttcccaaatctggccgcacgacgcaccagccaccaaccgcacacaccccaaacttgaaggcacaacccgagcgctcgcccgcctcgcctctgcgccgcgtccggccgccggtagcgggccggtcacttaccgggagggagaggtgctttggttcctggatgagctgtgaaggaactgggagcaagaagaattgatgtttactccgcagggcaaaggatggaccggctggtcgacgccaactccggccaaccagcggagcggtggtggggctcctgctgcgtcggcgccccttggaaagggcaaaggaagggtcgccgagctcgagcaggagttgcatgaatatcagtacaatatggggcttcttttgattgaaaagaaagaatgggcagcaaaatttgaagaaatcagtgaagtgctgacacagaaagaggagatactgaagagggagcaggcggcacatctgaatgctatatcagagtatgaaaggcgggaggagaacatgcggaaagcactaggtgttgagaagcaatgtgtcgctgatcttgaaaaagccttgcgtgatatacgagcagagatagctgaggttaaatttacatctgagaaaaagataacagatgctcagtctcttgaggctagtttggaggaaaaatccttggagatcgagggaaaacttcatgctgcagatgccaaacttgcagaggcaaaccgcaagaagtctcaagctgaccgtgatttagaagaggcggaagctcgtcaacgtagactggagaaggagaaactgtattttgagacagagcggaaggcccgagaaaagcaacttaaggagcaggaggaatcactgcaggaatgggagaaaaagctgaaggaaagtcagaatagacttaatgagttgcagagatctataaatgagcgagaggagagagcaaataagaatgatcaacttttcaagataaaacaggacgaactggaggaggcacgaaggacagtggaggccgctaaagttactctgaaagtcaaagaggatgatattaacaaaagactaaatgaattacatttacaggaaaaggatgctgactcaaagcgcagtgcattggaagagcaggggaaaaaattggatgagagagaggcaaaggtcactaatagagaaaaggaggggctccagaagcttcttgaggatcatcaggtggagcttgaatccaaaagacgggattttgaattagaattagagagggaaaggaaatcttttgatcaaaatatgacacagaagcaagcggatttattgaaaagggagaaagatgttaaatctttggaggctaaactttctaaaagtgagcaggcattgaatgataagaagaaatcaatggaaaacttgcagaatgatcttgatgccaaatctaaggctctgaagagttgggatgaatcattgaaaaatgacgagaaaaggttactgaaagaaaagcagcaaatggatcatgaaagagaacaattggagacatacaaattggagcttgaaaagatcaaatcagcattagaagctgagaaggaaaaaatatcagaagagcagaataatctgaaactcacagcgcaagagaggcaggagcatagcttgttgatagcaaaacttaagaaggagattgaggaatacagaatgcgaagcaactccctatctgaggaaatggaggatttaaggaagcaacggcagaaatttgaagaagagtgggaacaactagacgaaaagagagccctccttgtagaggaggacaaaaggttgaacattgagaggatgaatttagaacggtggcgtgacaacgaagaaaaaaggttaaatgatatgaaactcaaaatggatgaagaatacaagcagcagctggagagtcttgagcgcaaggaaaaggctttgagtgatgatatgaagcacaagcaaatggaaaatgatgaatttctgaagggagaacgtgctgatgttcaacgtaaattgcaactcaaacggcatgaattggagatggagatggagcaaaaacaagccacgaaggagaaggaactggaagaaaaggaaaatgagttaaataagaaaatagattttgtggaaaataaactccgacatgcaattgagttgaatgagtccaagattgagaagttattattggagaaaagggaggtgcagatggaaagagaattactgctggaggaaagaaagaaaacggagactgacaaggcagatattagaagggatattgagagtctgcactcattgagcaagagtttgaaggaacgtcgagaggcatataacagggacaggagcagactcatcgaactatttgaaaagtacaaggcgtgcaaaaactgtgggatttctatttttgagggattggattctctgctgcttaaagacagtgctgaaattgagcatccaagtttggctgttgagggagatgatcatgccttgaccaccgatacatcaggtccagatacaggaacccttgttaattcaggtggtcgtttttctttgttacagaagtgttcaaggcttttcaagttctcccctagaaaaaagggtgagcagtcatcagaacaaccatcagagaggaatatatcttttggtgcaagactcgaggaagcaacacagagcgatggagattatgtgccaactcctgtctatgagatagcccacgattctttcaatgcagaggatgagctcccttctgacggtgaaaccagggagaatgaagagtctgaaaggcatgacatagctgataatgcccagatggagtcttctgttggtgtagcagataacagtatagatattctcggtactaagtcatttgatggtgctaacgacatggcagttgaagcaactattgtctctgttgatcaaaatggcgaggactctgtagttcctgctgaagcaggtgtagagcctgaaacatcagagcaaggtcggcgccagcaaaaccagagaggcagaagaaaaggtggtatgaaaagaacacggtctgttaatgctgtagttgaagatgctaagatgatacttggcgaggtttttgaggagaagactgatgatcagggagatacagtcaaggtgggtgctacacgaaagcggcggtttgctggagctacaataagtgaacaagatgaagaagggagcgaagcacattcagaaagtgtttcacttggagggcagcgccgtaagaggcggcaaactgctggggcagtgacagatgccccaggagaaagacgttacaatttgagacacagtagagctgcaaatgctggcgctgcaacagcccaagcagacaaaaaaaaaatcttcaaaagcaagaaataaacatacagtagaagcttctgctgatgacaccgaaggaacatcaaaggttgttgaggaacctgcccctgagagcaagagggtatctgaatctgcagactacgatgcatcccagttgcatgagttttcccaggttgaagttggtgatgcccatgctgtagacggtgagggtgctggtgaggaagatggtgatattttggatggccaagatgcactgcctgatgtgccaatgacaccttctggaagcgagtttggagcggaacaggaagatgaggacgatgatgattcagagaggcgaaaccaatcaatcagcaagaagctatggtcattcttcactacatgacttgctgaagaggtcgtcatgtaggttatttctagcttttgtggtttcgattcatgataccccattcttggaactgtaggtcgtgtgcttttggtgattatgtactagatctcccacttgattgtgcttctctcccgtgtaattgaaatatatttgtagtggacatagtttgatggcactcacagaagtagctgatgagatgtacaatggcgatgatggtatgccctgtaaggctgtaacaccagtagcttggtttgtaaaaaaaaaaaaaaaaaaaaaaaa

SEQ ID NO: 197 - DNA, 1984 bp, Oryza sativa
ctggatctatggagtacatcgagacagtcccactaaaccagtaaggatgggaatatggtgtttgtttgttctttatatgttgtctagcatccatggattctgttgttaggacccacattggtcatatgcttaagatgatacatttttgttctatgtttctcattacttttagcgactataaaatacaagctattctctcttcacagcaaaaaagaaaagcaccagaagaaagtgatgttgctgagtctagcgactgtatgattactagccctggatttgctgtcagtccaatgctcactccagtctctgggaaagctgttaagacttccaagtcaaagactaagaacaacaaagctgggcctcagacacctacatcaaatgttggttcaccacttaatcccccaactcctgttggtacatgccgttatgacagttcgttagggcttctcacaaagaagttcataaatttgctgaagcaggctccggatggcattctagatttgaataatgctgcagaaacactagaggttcaaaaacggcgtatatatgatattaccaatgtacttgaaggaatagggttgattgaaaagacactcaagaacagaatccgttggaagggcttggatgattcaggagtggaattagataatggtctttcagctttgcaggcagaagttgaaaatcttagtctgaaggagcaagcattagatgagcgcataagtgatatgcgtgaaaaactaagaggtttaactgaagatgaaaacaatcaaagatggctctatgtgacagaagatgatatcaagggattaccctgctttcagaatgaaacactaattgcaataaaagctcctcatggcactacacttgaagtcccagatcctgacgaggctggtgattatctccagagaagatatagaatcgtattaagaagtacaatgggcccaatagatgtctacttagttagtcaatttgatgagaaatttgaggacttgggtgggggtgcaacaccatcagggcatgcaaatgtaccaaaacatcaacctactgaagtcttcaatacaacaaatgctggggttgggcaatgtagcaactcagttgctgtggacaataatattcagcacagccagacgattcctcaggatcctagtgcttcacatgattttggaggaatgacaaggattatcccttcagatattgatactgatgctgattactggctcatatcagaaggggatgtcagcattactgatatgtggaaaacagcaccagatgtgcagtgggatgagagcctggatacggatgtcttcctatctgaagacgttagaacgccaagttcacacaatcagcagccatctgcagtgggcgggccacagatgcaggtctcagacatgcataaaccctaggatcacaggggttacagaagtgaaaagatgacatctggaattcctggagcggtgtttgtagtgaaaagtgaaagcatgacagcaaatgctcattgccaaattgtaaagagccgggtggtcttcatcagaatatctgcatcttctcgagacaccaagtccgtgcgagagatcaggatgacaccattccggattcacatctgctgtggaggctggtggcgtcaactaacttaccagcctgctgtttcagcaccctgcttcagtcgaacgggagtaaatcttgctgctgctttcgctgtgaagcctgctgcggtgctcattaaggcactgatatattttttgcattcaaaactaactagtcatcagcaaggaaacggtgggctttgctgtgctctgtcgagtattctttgaaaattctttgtacattgggaggtataagggcatgcagggctcgagttattggtttgacgggagcaatgagctgagttaatgatgtaaccgagccgtctttgtaaattgttccatgctcttcctcaaatacaatggatagactttcattttgaaaaaaaaaaaaaaaaaaaaaa

SEQ ID NO: 198 - DNA, 1184 bp, Zea mays
ccacgcgtccgcggacgcgtgggcggacgcgtgggttttcacttgacatcccccgtcccatagatcgccggcgatggctccggccgtttccgcggcggcgtcggcggcgatgaggcaggcactgcgggaccggcagatcctcgatgccgtgggcactggcgctgcggcgctctcgctggcaggctcttccttcatcgtgatctgctacctcctcttccgcgagctccgcaagttctccttcaagctcgtcttctacctagccgtctcggatatgttttgcagcttattcactatattgggggggccatcgaatgcattttactgctttgcacatgactacagtgcccatttcttctgtgtggcttcttttctatggacaaccaccatatcattcactctgcatcgcacagttgtaaaacacaaaactgatgttgaagaatttggatctattttccacttatatgtgtggggaacttcactatctaccactgtattacgttcgataggaagtgactatggaagaccaggcacctggtgctggattcagcagggaagcatggcaaaggtcctacatttaataaccttttatcttccactttggggtgccattttgtacaatgggtttacatactatgaagtaaaccgcatgctgaataatgcaacacagatggctgctggcataagtgatcgatcaaatcagtctgacattagggcagacaggaaggcatttaaccgatggggttattaccctctaattctaatcggttcatgggcttttgcaactatcaatcgtctttatgactttgccaatccagggcacaggatagtctggctctcctttcttgatgttgggttcgctggacttatgggcctattcaattccattgcttatgggctaaactcttctgtgcgccgagctatttcagagagaatcgacacgttcctacctgagagaataaaaaggagcctccctgctttgtcaaggctgaggagtcaacaggaaaatgaactcacttctcttatcgttgagggtaactgatatgtaatggattttccatgcacacgaagctttttttttttgtttatctgttcgttcatcaatctccaacaagggaatgcaacatcactgtaggagcagtgggttagtaacacgtcgaattggttcaaaaaaaaaaaaaaaaaag

SEQ ID NO: 199 - DNA, 1734 bp, Glycine max
attcggctcgaggaatgagtggcggaggagaagagggagcaactctggagttcactccgacgtgggttgtggccgccttttgcacagtcatcgtcgccatttccctcgccgctgagcgcctccttcattatggcggaaagtttctcaaagccaaggaccagaagccgctctacgaagctctccagaagatcaaagaagagctgatgcttttggggttcatttccctgcttttgacggttacacaaaacggcattaccaaaatctgcgttcgaccctctttgacgctccacatgctcccgtgtaatctccacgacgctccagcaaaccacgaatctcatttccagacatttttccctggaacagccaggcgccttctctctggggaacactccacccccgagtccgcctctaaaattggttattgctctcgcaagcacaaggtgcctttattatctgtggaagcacttcaccaccttcacatcttcatttttgtcctcgctgtcgtacacgtctccttttccgtgctcaccgttgtctttggaggcgccagaatacgtcagtggaaacactgggaagattctattgcaaaacagaactacgagactgaccgagttctcaaaccaaaggtcactcaggttcaccagcatgattttatcaggggtcgttttgctggttttggcaaagactctgctatagtcggttggttgctatcctttctaaagcaattttatggatctgtgacaaaatcagattatgtgacattgcgacatggtttcattatgacccactgcaggacaaatccgaagtttaattttcacaagtacatgattcgtgccctcgaagatgatttcaagcaagttgttggtataagttggtatctttggctctttgtggttatcttcttgttacttaatatcaatggttggcatacgtatttctggattgcttttattcctgtcattcttttacttgctgtgggcactaagctggagcacataataacccaactagctcatgaagtagctgagaagcatgctgccatagaaggtgatttagttgtgcagccatcagatgatcacttttggtttcaccggccccgtgttgtcctctttttgattcactttatccttttccaaaatgcttttgagatagcattttttttctggatatgggttacatatggatttgactcctgtataatgggacaagttcgatacattgttccaaggcttgttattggggtatttattcaggtactatgtagctacagcaccctgccactgtatgcaattgttacgcagatgggaactcactataagcgggcaatatttaatgatcatttgcaacaaaacattgttggttgggcacagaaggcgaagaagaggaaaggactaaaagctgatggcaatcctggccaaggaagttctcaggagagtgctaatacaggaatccagcttgggtcaattttcaagaaggcaactgctccaggagacagttcttctgcccccaaagctgacggaatcagctcagtgtagctatttaagtgaagatttacagtcttattttgtaaagttgctcacagattgcagttttctttatattattttctttgctaacataatgtagcattgtgggacatgtgtttgacttggtgtacgcataaggtcgaagtactatatgagtagatgctagtaatgctattgtcaaaaaaaaaaaaaaaaaaaaaaaaaaagg

SEQ ID NO: 200 - DNA, 1906 bp, Glycine max
gttttctccttcattctagtctagtctttttcttctttttttcccccatgtatagctccaagttcagaaagctgttttgttctgtgttgttttcatggctctgttttggaggtttggccatggcagcaggtgaaagtagcagcagctccagagacctagaccagacaccaacgtgggccgttgctgctgtctgtactgttttcatcttggtatccatagcactcgaaaagagtctccacaaagttgggacgtggcttggacaaaagaaaaagaaggctttgcttgaagctctggagaaggtcaaggctgagttgatgattttaggtttcatttcactgcttttgactttcgggcagagttacattgtcagaatatgtattcccgaaaagctggcagacaatatgttaccatgtccgtataaatataaggaggacaaaaaggcatcagatagtgaagaggaacatcgtaggaaacttttatcttatgaacgtagatatttagctgctgatactacctcgttcaaatgcagcagggagggacacgagccacttttatctgtcaatggattgcaccagttacacatcctcgtattcttcttagcagtcattcatgtgctttacagtgctattacaatgatgcttggaagactaaagatacgtggatggaaggcatgggaagcggagacttcaactcataattatgagttcgccaatgctgcttcaagatttagacttactcatgaaacatcattcgtgagagcccattccagttttttgactaggattcccatcttcttctacattcgctgcttctttaggcagttctataggtctgtaaataagactgactacctcactttgcgcaatgggtttatcactgtccacctggctcctggaagtaaatttaatttccaaaagtatatcaaaagatcattagaagatgacttcaaggtggtcgtgggagttagtcctatcctctgggcatcagttgtagtttaccttctcatcaatgttaatggatggcacaccgtactttgggcagccttaattcctgttgttataattttggctgttggaacaaaacttcaagccatattggcaaatatggctcttgaaatcacggaaagacatgcagttgtccaaggaatgcctcttgtccaaggctcagacaaatacttttggtttggtcagccacagttagttctacatcttatccattttgctttgttccagaatgcgttccaaataacatatatcttgtggatatggtattcttttgggttgagaaactgtttccgtactgactacaagcttgcagtagtaaaagtagctctagggattttgatgctatgcctctgcagctatatcacccttccattatatgctcttgtaactcagatgggttcaaggatgaaaacagcaatatttgacgagcaaacaaacaaggctctgaagaaatggcacatggctgcgaagaagaagcagggaggagcagtgacgctaggaaagtcgagtgcacgaatcatggatggaagccccattggtaattcttcaacagtgcactccactggccccacactacaccgtttcaaaactactggccactcaacccgctcctcatcaacagcgtacgaggatcaagatcaagatcatgaatatgaatccgatggtgttgagttgtctccgttggcgtcgcaaacaacaagcttcattgtaagagttgatcatggcgaccaacaacaagcagaacatagacaagatagtgagggagaaaccaacagtagtagtgaaggtgaattctcatttgtcaaacctgaccctgtggaaattagaaccaccacatagcatatgatcatatattcatctctattcttatacataaatctttacataaaaaaaaaaaaaaa

SEQ ID NO: 201 - DNA, 1537 bp, Oryza sativa
ggatcctgagatctagacgtgaacgtgcttggtgggaagagagaggctcaggcatgagagcatgcctctaaaataatgtccgtgcttacctgtgtgtttgataacatgggctcatcctgtagcagatctcattctttaagtgaggctgaaacaacaaaaaatgcaaaatctgcagacattgacaggcgaattttgcaagagacaaaagcagagcaacacatccacaagctcttacttcttggtgcgggagaatcagggaagtctacgatatttaaacagattaagctccttttccaaactggctttgatgaggcagaacttaggagctacacatcagttatccatgcaaacgtctatcagacaattaaaatactatatgaaggagcaaaagaactctcacaagtggaatcagattcctcaaagtatgttatatccccagataaccaggaaattggagaaaaactatcagatattgatggcaggttggattatccactgctgaacaaagaacttgtactcgatgtaaaaaggttatggcaagacccagccattcaggaaacttacttacgtggaagtattctgcaacttcctgattgtgcacaatacttcatggaaaatttggttcgattagccgaagcaggttatgtgccaacaaaggaggatgtgctttatgcaagagtacggacaaatggtgttgtacaaatacaatttagtcctgttggagaaaacaaaagaggtggagaggtatataggttgtatgatgtaggaggccagaggaatgagaggagaaagtggattcatctttttgaaggtgttaatgcggtaatcttttgtgctgccattagcgaatatgatcagatgctatttgaagatgagacaaaaaacagaatgatggagaccaaggaactctttgactgggttttaaagcaaagatgttttgagaaaacatcattcattctgtttctcaacaaatttgatatatgcgagaagaaaatacaaaaggttcctttaagtgtgtgcgagtggtttaaagactaccagcctattgcacctgggaaacaggaggttgaacatgcatatgagtttgtcaagaagaagtttgaagagctctacttccagagcagcaagcctgaccgtgtggaccgcgtcttcaaaatctacagaactacggccctagaccagaaacttgtaaagaagacattcaagttgattgatgagagcatgagacgctccagggaaggaacttgattcagagctaagactaggttgtaagtcacacagggaaggtaattaggacggcgagaggaacaaagtttcacactgtcacagctttatctgttgtaattcttttacacgtggaccattgattgaccttttggttcttactgtgggctgttcaggtctgtaccctattttttgttctctagttagccattgtgcaaattttccttgaatcagattctctacctgttgtctatgtgtgttatcttggtctgttaatttgcatagcccacttgttcattaaaaaaaaaaaaaa

SEQ ID NO: 202 - DNA, 1183 bp, Glycine max
cggctcgaggagaaagggcttttttgagtaataggattattatcagtgaaaagagttcccttttttctctgtaaataaaagggttgttgttattattattattgcctagtgtttgttttcagatctgtgtcgtattattaagcagaacaagcaagggtgcaaagtgggggtgtttttttcgctggatgagtggtagctgacactcacttatggcgtctgaaacggcgtcgtcggcggatgaagaaaccgttgttgttgtttcggctgctgcgggtgcaggaggaactgataagagaggcaagcaccggattcttgccgaactgaagcgtctcgaccaagaatccaagtttcttcaggaagaattggaagagcttgagaaaacagaaaatgtgtcgaccatatgcacagaattgctacaaaacatagacactaggcctgatccattactcccagaagtccatggacccgtaaatctcttatgggatagatggtttgaagggcctcaagatccacaggcatgtagatgttggatactttgatttgaagctgtgtcaattgccttgcgttgcaaataggatgccacatataactgcattaaagtgactctggagctgaagaaaatgtttgatgacatgttataccacgcacactaattctataatggatccttgcttttattacattagattctgttccgaatactgtttatgtgtaatcacattcatatactgcattcaactgagaagtatcattatttgtgcttgtaatcccaatccaactgttaatgcacctgaccttggtggactttcatgtgtgcacgagacgttagagacattttagcatcattcagccttgaaggtggtgtggcttttggaaaggcctttacaatgcaatggtttgacgagtcatcaactagtcctgaatgataacgagattttttgggcagagacctcttggggttgggagagcaaagaaagctcataatcccttgtttgagtcatttcacaattaaatgttatgataagattttgtaatcatgttacttctaagcctttttaagttttggtgttttatttaacaagccattactttttgcgtgccaaaaaaaaaaaaaaaaaaaaaaactaaaaaaaaaaaaaaaaaaaaaaaaaaaaaaaaaaaaaaaaaaaaaaaaaaaaaaaaa

SEQ ID NO: 203 - DNA, 1225 bp, Triticum sp.
cccacgcgtccgccaagagcgaactgagatcatcctaggaccaggcgcgaccacacaggacaagatgctgctgcttaatccggcgtccgaggcggcggcggcggcgctggacagcatccggcagcagctcctggaggagccaatggcgccggcgcggccggcgtactgccggagcgcgagcttcggcagcctggtggcggaccagtggagcgagtctctcccgttccggcccaacgacgccgacgacatggtcgtctacggtgccctccgcgacgccttctcctgcggctggctccccgacggctccttcgcggccgtcaagcccgagcccctgccctcccccgactcctacgacggctgctgcctcggcagcttcctcgcgtcgccgcccgggctggacgcgccgtgggcggaggaggccgaggtcgcagcgacggcgtcaagggggaagcacttcagaggcgtgaggcagcggccgtggggcaagttcgcggcggagatccgggacccagccaagaacggcgcgcgcgtgtggctcggcaccttcgacagcgccgaggacgccgctgtggcgtacgaccgcgccgcctaccgcatgcgcggctcccgcgcgctcctcaacttcccgctccgcatcggctcggagatcgccgcagccgcgggtcagaagcgtccgtctccccagccagcgagccccgactctcctcctccctcctccagcgcacccgggtcgtcgaagcggagaaagagaggcgaggccgcagcagagtccatgtccatggctctggtgccgcccccgccggtgcaggctccggtccagctgaccctcccagtccagccgtggctcgccaccggcgccgtccagcagctagtgagctgaagcggcgaaagcaacaagtgatcgttctcatgaccgatggccattagttcttccttcatggcttcatgtgttgagcccatggaggaacagagcatcaagatggcgtcaatggcgtaatgcgtcgctcgaagaaaccttgatcagttggaggcaattacgcgccacgccattgtgaaatttgtgtggctccgtgtgaaacttgtcgctagggttagtggcgttggcacagtagcaagtgggtgcagtggaatcccgaagctggtttgtaagaggtggtgagggtgcaggtgcaaaagttgcacagaccttctcctctccaatggagaatcttctttgttaaaaaaa

SEQ ID NO: 204 - DNA, 1690 bp, Sorghum bicolor
agagatagaggagcaatggctggttcgtcttcaatggacactgaagctgcaggccaacagctcaagcatggcagcggctacagcatcccggctactgctcatgcggtggacacagactcgtggcagcaggtgagcctgctgatggtgatcggcttcaactgcgcctacgtgctcagcttctccaacctcatgatggtgcccctgggctgggcatggggcgtcgcctgcctgctgctcgtcggcgccgccgcatggtacgccaactggctcctcgccggcctccatttcgtcgacggacagaggttcatccgctacagggacctcatgggcttcgtattcgggaggaacatgtactacatcacttggttcctgcagttcaccactctacttttgtgcaacatgggcttcattctactaggagcaagagcactcaaggcaatcaacagcgagtttacccacacccctgccaggctgcagtggttcgtcaccgcgacgggattcatctacttcgccttcgcctacttcgtgcccacgatttctgccatgaggaactggctcgccacgtcggccgcgctgacattagcttacgacgtcgctctgctggctatcctcatcagagatgggaaatcgaacaagcagaaggactacaacgtccatgggacccaagccgagaaggtgttcaacgcgttgggcgccgtcgccgccatcctcgtctgcaacacgtccgggctgctcccggagatacagtcgacggtgcgggagccggcggtgcgcggcatgcggcgggcgctgcttctgcagtacaccgccggcgccgcggggtactacggcatcagcgtggcggggtactgggcgtacgggtcggcggtgtcggagtacctccccaacgagctcggcgggccaaggtgggccgccgtgctcatcaacgccaccgccttcctgcagagcatcgtctcccaacacctgttcacggtgccgatccacgaggcgatggacacgcggctgcagcggctggacgagggcatgttctcccggtacaacctcacgcgacgcctctgcgcgcgggggctcgtcttcggcttcaacgtcttcgtcaccgcgctgttcccgttcatgggggacttcgtcaacctcgtcggctccttcgcgctcgtcccgctcaccttcacgttccctagcatggccatcctcaagatcaaagggaagagcggcgggagatgtaacagactttggcattgggggatcatcgttttctcctcggttctctgcgtcgctaccaccgccgccgccgttcgtctgatcttcaacaatgctaggatctaccacttcttcgctgacatgtagtaaggagtccaaaaaaaacacgattaggtgatattgccacttctcaattttttttttttgttttggtgaggaatgaaagggtcacctcatgtttggtaaggacgaccacatgcatgatcaataagcatcatgtagtcatcctatcgaaatttagaaatgagcttattgtggtggaccacctcctcaaaacaaagatctctgttcttaattaatgcgagcttaaagacaactcatgcctatatatatatatatatatatatatgctctcaagctcatgcctatatatatatatatatgtaatcgccctcaagtttattaatcaattattgtgtatttagttcaaaaa

SEQ ID NO: 205 - DNA, 1609 bp, Oryza sativa
cacacttcctcaaatcctccaacacctcgatccattcgcagtagctgcgaggtgtctgacatggcgtcggggcagaaggtggtgaagccgatggaggtgtcggtggaggccgggaacgccggggaggcggcgtggctggacgacgacgggcgggcgcggcggacgggcacgttctggacggcgagcgcgcacatcatcaccgccgtcatcggctccggcgtgctgtcgctggcgtgggcgatcgcgcagctgggctgggtggccggccccgccgtgatgctcctcttcgccttcgtcatctactacacctccaccctcctcgccgagtgctaccgcaccggcgaccctgccaccggcaagcgcaactacacctacatggacgccgtgcgcgccaacctcggcggcgccaaggtcaccttctgcggcgtcatccagtacgccaacctcgtcggcgtcgccatcggctacaccatcgcgtcgtccatcagcatgcgcgccatcaggagggccggctgcttccaccacaacggccatggtgacccgtgccgcagctccagcaacccttacatgatcctcttcggcgccgtgcagatcgtcttctcgcagatccctgacttcgaccagatttggtggctgtccatcgtcgccgccgtcatgtccttcacctactccggcatcggcctctccctcggcatcgtccagactatctccaatggcgggatccagggcagcctcaccggcatcagcatcggagtcggcgtcagctcgacgcagaaggtgtggcgcagcttgcaggcattcggcgacatcgccttcgcatactccttctccaacatcctcatcgagatccaagacacgatcaaggcgccgccgccgtcggaggcgaaggtgatgaagagcgcaacgaggctgagcgtggcgacgaccacggtgttctacatgctgtgcgggtgcatgggctacgcggcgttcggcgacgcggcgcccgacaacctcctcaccggcttcgggttctacgagcccttctggctgctcgacgtcgccaacgtcgccatcgtcgtgcacctcgtcggcgcctaccaggtgttcgtccagccaatcttcgccttcgtcgagcgctgggcctcccgccggtggccggacagcgcgttcatcgccaaggagctccgcgtggggcccttcgcgctcagcctcttccgcctgacgtggcgctcggcgttcgtctgcctcaccaccgtcgtcgccatgctcctccccttcttcggcaacgtggtgggtctcctcggcgccgtctccttctggccgctcaccgtctacttccccgtcgagatgtacatcgcgcagcgcggcgtgccacgtggcagcgcgaggtgggtctcactcaagacgctcagcgcgtgctgcctcgtcgtctccatcgccgccgccgcgggctccattgctgacgtcatcgacgcgctcaaggtgtacaggccgttcagcggatgattcttctgattctctcttgctgctttgagcagagcatccactggtaaaaagtggacagtaattttctttttttacagtctatggacgtagtacagtaaaaaagtgtgtacaactgtaaaaa

SEQ ID NO: 206 - DNA, 3480 bp, Zea mays
gcctgatctgcgcgtccctgtcctcggctcctgagcactcgcgtactcgctcgtcgcatctgcccacactaccactggccacaccgaaaccctagctgcgcacccaaatcgatcgatccagggacggcagcggcacgacgcgccaaaataggttcagaactagcgtcgcgacaaaatcggttcacgaccgccacggttggaccagctgcgccgtggccgtgcggctgtgcggccggcattggcgcgctgcgcgctgcttcaggccggtgtgccgcgcggctgggcgacgtgaaacggattcacatcgtaggagcagaacttgctggtcgaggtggaggcttgctgcgtgcagcaggacagggagtcagggacaacagattttagcaaagtatgagctgtgaactagtgttagaggaaagcacgaaggaaatagtggcataaaacttgatttgtctaaagataaattggtttcttaaaatggctcagcaaatggcttcagttcatttgaatgatacaacagttgttgatgccaagcccttgcgtacattgactcccatgttccctgcaccactagggcttcacacgttcactcctcagaactcaccttcagttgtttgtgtgaccccatttggaccatatggtggagggactgaattggggatgcctgctgttccaccaatgtttgcagcgcctgtacctgctgcaggagcagaacccagccagagacagccgcatacagctaatatgaacggaggagacactgaattggggatgcctgctgttccaccaatgtttgcagcgcctgcacctgctgcaggagcagaacccaaccagggacagccacatacagctaatatgaacggaactgcagtcaacagttcggtcacatctttgcaaactccttcagctgccacacaggaatctggtaagaggaagaggggcaggccaaagcgtgtgcctgatactactgtttcttcggctccttcagctcctctggctcctactatttctccagttccttcacttcctgtggttactccagttccttcagctcctcaggaattgaacactattgtttccctgacgccttcttcagacgccccacaagaatctggcaagaggaagaggggacggcccaaacgtatacaagacgttcctgtaatggttcctctgacctcgcaaggagatagcacatctgttattcagacacttccagggtccagtgtacatgaatctggtacgagaaggggacgtcccaaacgtttgcaggatagttcagatattgtcactccaattgactcaaaagatagtgagtcctctccccagccacctattgccgcacctgccgaaagtggtaagaggaagaggggacgtccaaagcgcattgatggttccgtgactccttcaagtcattctgttttttcaatagatgatgatgctgttgacacgatgaaacgtggacgacctaggaaaattgataccaaactgttacagtttccatctttattttcagatgatcctagacaaactgcagataatgtactcatgatgtttgacgccctgcgacgcagacttatgcagatggatgatgtgaaacaagctgcaaagcagcagcctaacttgaaagctgggagcatcatgaacaatgctgaacttcgtgtcaataaggacaagaggataggagaggttccaggtgttgaggttggtgatatgttctacttcagaattgagatgtgcttagtggggttgaatagtcagagcatggcagggatagattacatgtctgccaagttcggtaatgaggaggaccctgtagctattagtgttgtgtcagctggtgtatatgataacactggagatgatccagatgttctagtttatactggacatggcatgtcgggtaaggatgaccaaaaacttgagaggggtaatcttgcactagagaggagtttgcatagaggtaatccaatcagagtcattcgtagcgtaaaagacttgacttgtccaactggcaagatttacatatatgatggtctttacaagatcaaagaagcctgggtagagaaagggaaatctggtttcaatgtgtttaaacacaagttgcttagggaacctggccaacctgatggcattgcagtgtggaagaagactgaaaaatggagggaaaatccatcatctagagaccatgttatattacttgacatatcatatggtgtggaaaataaccctgtctgccttgtaaatgaggttgacgatgaaaagggccctagccgcttcacttatacaactaatttgacatatgggaattctctcagctcgatgagaaagatgcaaggttgcaaatgcataagtgtatgcctccctggtgataacaactgctcctgtacgcatcgaaatgctggtgaccttccttacagtgcttcaggcatacttgttagccgaatgcccgttttatacgagtgtggtgattcctgcacatgttcacaaaattgccggaaccgagttgtacagaaaggtacgcagatccgttttgaagtttttaagacaggagatcgtggttggggcctccgtagttgggatccaattcgagcaggcacatttatctgtgaatatgcaggtgaaatcattgacataaatagagtgaatggtgaagatgactacatatttgagacttctcctttagagcagaatttaagatggaactatgcaccggaattgctgggtgagcctagtctttctgactcaaatgaaacaccaaagcagctgcctatagtcatcagtgcaaaacgaaccggcaacatagctcgctttatgaaccacagctgctcacctaatgtgttttggcaaccagttctgtatgatcatggtgatgagggatatccacatattgcattctttgcaattaagcatattcctccaatgacagagcttacctatgattatggtcagaaccagcgtaatagtattcaaatgggaacccattctggttttcggaagtctaaaagttgcttatgttggtccccgaagtgtagaggttcctttggctaataaccagccctataaggaatatattggatcataatactccatttcaaagttacacctaagatatctgctggtcgacttttatattcagctcccaaaaatctgtcacaagtttgtgagagcaactgaattgtctttaccagcagaagcagcccgccatggtggcctgtatgaagcagcaggggtctcctatgtcctaggtgttccatgcaccatcgaataaatccacccctcttcatgttagaatgggaaacggggatgtgttttgcacaaattatctgtcatgcagtcgtcgtattaagttttcttgaactagtttgtagtcatcctcagagaatgcatgatgtgcactttgtagtaatatatgcaggttgttatcccacctaaaaaaaaaaaaaaaaaaaaaaaaaaaaaaaaaaaaaaaaaaaaaaaaaa

SEQ ID NO: 207 - DNA, 2537 bp, Zea mays
ggccgcgaattcgcccttcgcggatccgacactcgtttgctggctttgatgggcgagctggaaggacggggttcgggcttaggctccagtgcctgttcggtggtcgcggtgctgatggcgatgaatgaacactgtggcactggaattagtccagcacgaacccaagttccaccagagccacacgttttcactgctcccacgaaggcacaccgcacacagccgcggcctgcaggcgacggtgacggcggcggcggcgctccatcctccgccccttcccttactcgcgttcggcacgcaggcgacggtgacggcggcggcgctcaggatcgggctctcagcgacggcggcggcggttttccctcccggctctcgccagtcgcctcgcgttctcgcctccggtcctccgaacgccggccggtgaccctgctggatgacatgagcacactaaatacaatcctgatgaagatggcaggattagcttcctgctgagttttgtcctacaagattgcaaagggcagaatgtcagctagggattctaatcattcatataaatgttcggatgattctcaaatgccgtactacaataactcagcacctgtaggagaaaatggtaggatccatatggcagaaaacagtctaggacatcattactcatcctccgatattggatcacaaaggatcaacaattccaaccctcaagtatttgaagcacagtactgcactctggaatcatcctcagcaaatggtgtttatcctgcacaaagctccacatcttctcatagcatctcccctttaagtgggagccccctgtctcagcatgacagccactcagaccacacatatagttctcctccaagtgcttcctgtctaactgaggttgcaggtctcctgattaaacaaaaagaattagagaattccattgttggacctggactggacattagttctgactgctctcggagcttgttgcaagcccatgttccagtgagaccagacaactggagacaacttctgggaattaatggaggagacttgatgcaagtagtcatagcatgtggtaaggctgttgcagagaatgatgtctttgcaacagaactgttaatatctgagcttggtcacctggtatctgtatctggagatccaatgcaacgacttggagcctatatgcttgaaggaattgttgctagactttcttcctccggcagtatgctatataaatctttgaaatgtaaagaacctacaagctctgagctcatgtcatatatgcatctcctttacgagatctgcccattctacaagtttggttacatgtcagcaaatggtgccattgccgaggctattaagggcgagaactttgttcacataattgatttccaaattgctcaggggagccagtgggttactctgctacaggcccttgctgcaagacctggggggccaccatacattagaatcactggtatagatgactcaaattctgcttatgccagaggaggcgggcttgatatagttgggaggacgttgtgtgatgttgctaattcatgtggtcttccttttgagttcaatgccgttccagctgctagccatgaggttgagcttcagcatcttgctataagacatggggagattattgctgtgaattttgcctatcagctacatcatgttcctgacgaaagtgtaagtacagaaaatcatcgggataggattataagaatgatcaagagcatcaatcctagggttgttactctcgttgaacaggagtcaaatacaaacacagctccattcttcccaaggtacatggaaactctcaactactatacagccatgtttgagtcgatagatgttgctctcccaagggatgataggaggcggatgagcgcagaacaacactgtgttgcaagggatattgttaatttaatcgcatgcgagggtgctgaaagggttgagaggcacgagctgtttggaaaatggaagtcaagatttgcaatggctggatttagaccgtacccactgagttcagttgtgaacaacactatcaacacattgttgcatacctacaacagctactacaggcttgaggagagagatggtgtcctttaccttggatggaaaaacagagtattggttgtatcttcggcatggtgttgacatttcctctgcaggttccatcgcactttggcctccatctgacgtttctaaggcaccattatgcttgtctggtatactcagtatatgcttgtatgtaatttgcaaccataccttacccaatggttatcttaccaactagatcttcatggcaaggtgaagtgtcacttaaaatctagaagttgtaactgtcgtgttgacgctagatatagatagttctgctttggtttgacatatgcagatgtgctgtaatgctcaggggttatgctaggcaggcccaagagggtgcctgtttgttatctatcaggctactgtgttgccgcctgctttgtgtgtgcatatatatttggaatgctactgtcctttctcaaaaaaaaaaaaaaaaaaaaaag

SEQ ID NO: 208 - DNA, 964 bp, Zea mays
cggacgcgtgggtgccgttgaggcataccgcatacgtttctcccccattcctctccccactccgaaccctagccaccgtgctcacttcccaggtcgaacccgccgcggcgcgagtccacggcagtgcaggacctgatcctgcggtctaggccgcggcggtgagatggtgatggtgtcaggcggcggggggaacgcgtgggcgaaggagatgaccctccgccgcaggatagccagcatattcaacaagacgcaggaacacttccctactctgaaagactacaacgattatctggaagaagttgaggatatgactttcaacctgatcgaagggatagatgtcgaggagattgaagcaaaaattgcaagataccaacaggaaaatgcggagcagatatacttgtccagagctaaaagggcggaagatcttgcggcagcacttaaagcaagcaggatgaaccctgtaaaggccgaagcaaatgatacggctgctgggagttctcagggtattagtggcggggcaggagttcagggccagtatgcacctgccgctgttcttgggggagtggctcagcctcgccccacaggtatggcgccccaactaatcggcagtgggtcggatcctctgcaaggagacgacgaggagaccaggagactacgcgcagagcgagcagcacgggctggcggatggactgctgaattgagcaagagaagagcgctggaggaggcgtttagcgccatattcatctaggattagatcaaaaagcaacacatggcctggaggaaagccagcatacttaaaatggctgtcaaactacaaagcgttggatgatctgtgtcgtgattatctttgggacatggaattctcacaaattgtggtgaagcaccctttgtgtgcctttggttgcaaaaaaaaaaaaaaaaaaaaaaaaaaaaaaaaaaaaaaaaaaaaaaaaaaaaaaaaaaa

SEQ ID NO: 209 - DNA, 804 bp, Oryza sativa
gcaaacgtgtcgcccattctacaccgtctccatccatctcatctcgtcgtcttcccccccgcgagtccgcgaccccccgcgctataaaatccaaggccgcgatcgagatgcggaaatatcgagtcgccggattggtagccgccctgctcgtgctgcattcgctagccacgccgtccgctcaggccgaggcgcatcgcgcagggggagaaggggaggagaagatgtcgagcgacggagggccggtgcttggcggcgtcgagccggtggggaacgagaacgacctccacctcgtcgacctcgcccgcttcgccgtcaccgagcacaacaagaaggccaattctctgctggagttcgagaagcttgtgagtgtgaagcagcaagttgtcgctggcactttgtactatttcacaattgaggtgaaggaaggggatgccaagaagctctatgaagctaaggtctgggagaaaccatggatggacttcaaggagctccaggagttcaagcctgtcgatgccagtgcaaatgcctaaggcccatctcgtatcctatgtgtatcaagttatcaagaagatggggaataatatggtgtggatatagctattggacatgttaattatccacatgataatatggcttggatataaggatctcacacgataatatggcttggatatatagctattaaagattttacctatggcatatttcaatgtgtattagtactaagtaagaatgattgcaaggtgtattaactacaaatattgcaataaaagtccctgttactacaacttacaagtaaaaaaa

SEQ ID NO: 210 - DNA, 1038 bp, Oryza sativa
cgaagggaaagtttgggatgcgcgttgctgcgacgacgcggcccgcctcctcctccgccgccgctccgctccccctcttcctcctcctcgccgtcgccgccgccgccgccgccctgttcctcgtcggctccgcgtccctcgccatggccggccacgtcctcggcggcgcgcacgacgccccctccgccgccaacagcgtcgagaccgacgcgctcgcccgcttcgccgtcgacgagcacaacaagcgcgagaacgcgctgctggagttcgtgcgggtggtggaggcgaaggagcaggtggtggccggcacgctgcaccacctcacgctcgaggccctcgaggcggggaggaagaaggtgtacgaggccaaggtctgggtcaagccgtggctcgatttcaaggagctccaggagttccgcaacactggggatgcaaccaccttcaccaacgccgacctcggcgccaagaaaggtggacatgagcctgggtggcgtgatgttccagtacatgatcctgtagtcaaagatgctgcagaccatgctgtgaaatcaatccagcagaggtcaaactccctgtttccatatgaacttctcgagatcgttcgtgcaaaggcagaggttgttgaagacttcgtaaagtttgacattctgatgaaacttaagaggggaaacaaggaggagaagttcaaagccgaggtccacaagaaccttgaaggggcatttgtactgaaccagatgcaacaagagcatgatgaatcgagcagccagtgaaccttgccacattaagctgtagttatgtagtttgtgttcaataagaaaacagtgaacatgcacccttccgtttctatcgggacataggctggaacttgttcctaacatcgatgaaaagaagacactacactatccttttgttcctgttgctcttagtgtgataatacgatactggtcgtgtaacttctcaagggaaccgtgggtctatgccatacagcttgtgaatgtgaaatcctatgttgatacttctcaaaaaaaaaaaaaaaaa

SEQ ID NO: 211 - DNA, 756 bp, Sorghum bicolor
cgcgatctagaggagcaacaaccattcggcggtgcaagtgctactcctgctccttcccactagcggtagtgcccgtcgtctcgccgccgcctcctctccctccgggctcccgccgccggaccgcgtcgtcagcgatggccgaggcacacagcgggcggcgcgtggggatggtaggcgacgtccgggacgcgccggagggccacgagaacgacctcgaggccatcgagctcgcgcgcttcgccgtcgacgagcacaacagcaagaccaacgcgatgctggagttcgagaggctggtgaaggtgaggcaccaggtggtggccgggaccatgcaccacttcaccgtccaggtgaaggaggccggcggcggcaagaagctgtacgaggccaaggtgtgggagaaggtgtgggagaacttcaagcagctgcagagcttccagccggtcggggacgccgcggtcgcctgaggtagtgaaggtatcatcttccagtgccatgatgtgtttttcccctcgaggctcacaagcttttggctgggggctggagcacaagaatgaaagaatttagccgtcggacatggaatacatcccccactgggaaagtatatatgatatgatgaataaaccagcatcttaccacatgtattgtacgctgtatgaaatatcgactcctgtaatggaatgagctgtgctaagaaaaaaaaaaaaaaaaaaaaaaaaaaaaaaaaaaaaaaaaaaaaaaaaaaaaaaaaaaaaaaac

SEQ ID NO: 212 - DNA, 1505 bp, Zea mays
atcacctccgccgctctccaccatgaatcccatccaccagcacggcatcgtacccaatccttcgtgactgttgcctccgcgcatctccgggagcaatggaaggaggccgagatgtgttcttaggtgcggcggcaagggcgccgccgccgccgccgtcttgcccgtttcacggatccgctaccgccacccgctccggtggagcgcagatgctcagcttctcctccaatggcgtagcagggttgggtctgtgctcaggtgccagcaagatgcagggtgtgttgtcgagggtgaggaggcccttcactccgacgcagtggatggagctggagcaccaggccctgatctacaagcacttcgctgtgaatgcccctgtgccgtccagcttgctcctccctatcaaaagaagcctcaatccatggagcagccttggctccagctcattgggatgggcaccatttcgttccggctctgctgatgcagaaccaggaagatgccgccgcacagatggcaagaagtggcggtgctctagagatgctgtcggggaccaaaaatactgtgagcgacacataaaacgtggttgccaccgttcaagaaagcatgtggaaggccgaaaggcaacaccgaccactgcagatccaaccatggctgtttctggtggttcattgttgcacagccatgctgttgcttggcagcagcagggcaaaagctcagctgctaatgtgactgatccattctcactagggtccaacaggaatttgctggataagcagaatctaggtgaccagttctctgtatccacttccatggactcctttgacttctcatcatcacattcttccccaaaccaagccaaagttgcattttcaccggtggccatgcagcacgaacatgatcagctgtatcttgtgcatggagccggcagctcagcagaaaacgttaacaagtctcaggatggtcagctgctagtctcgagggaaacaattgacgacggacctctgggcgaggtgttcaagggcaagagttgccagtcagcatccgcagacatcttaactgaccattggacttcgactcgtgacttgcgtcctccaaccggagtcctacaaatgtctagcagcaacacagtgccagcagagaatcacacgagtaacagtagctatctcatggcgaggatggcgaattctcagaccgtcccaacactccactgagtgttcatcaggctggtctttgttgggaccacaaaataactgaagccatgttgatgtcctgagtttgctgatactaggttttcagtcgagtcttgtaactcctgttttagagctgttatatgttcacgtcatgtcgcctttcattttcggttcattcagatgggtgttctaataatttctttccttcttacctgtgaaggatttgagttccaatctgagacgtgggtttgttctaacttggaggtatttatgaatattaggcacttctgatttccattgaagcgagatttctttaaaaaa

SEQ ID NO: 213 - DNA, 2363 bp, Zea mays
cccacgcgtccgcgccaggcgcagatggaatgagcgaccgggctctgctccgccgctagcctgccgccgcaccgcgccgtcgatcgccgcgccatgaacggtccccgcggctaccccctttctccaccggcaccttacccccgtatggcgtgatccaatgatagcaccaagagcgcaccttcccctctccctgacggcgtcgtcctccccgcacggcggcgcgcgcacccgcaccaagaagaggaagaaaccatgtcccccaacctggacagcgccatcaagagccaggtgccggcgctgctcctgaggcgtctcttcggcgcgtcccggcgggacgaggccaagcagctccagcggaccccggcgccggtggggaggcggagggtgttcgtgcagacggagaccggctgcgtgctcggcatggacctggaccgcggggacaacgcgcacaccgtcaagcgccggctgcagctcgcgttcaacatgcccaccggcgggacctcgctcaccttcggcgatcgcgtcctggagaacgacctctccttcttacgcccggactcgccgctactgctcacccggaacagcatcaaccggagctgctccaccccgtgcctctgccccgtctccaaggacttcgagcacaaggactgcagcggactggttgagatgctcggctgctccagcagctgtgcccgggtgaagcgcctcgtggacgacgtggtgactgccatcaggagcggcgtggatccggtccccattagcagcggccttggtggctcgtactacttcaggaacgtcttgggcgacagggttgctattgtgaagccgacggacgaggagccctttgcgccaaacaatcccaaggggttcgtcgggagggcgctcggtcagccgggcctcaagagatctgtgcgagtgggagagacggggtttagggaggttgcggcgttcctgttggaccatgacaacttcgccaacgttcctgccacggctctggtgaagataacacactccattttcaacataaactgcccggtaaatggaggaaacctggcaccggctcatgaccagcaacagcaagttaacagcaagattgcttcgttccagcagttcatagcccatgacttcgacgccagcgaccatggcacgtcaagcttccctgtcgctgctgttcataggatcggcatactagatatccggattttcaacactgacaggcacgccggcaatgtgctggtgaggaagcttaacggtggcacaggccgctttggttgccagacagagctgttcccaattgatcatggcatgtgcttgccggagaacttggaggacccttacttcgagtggatccattgggctcaggcttctattccgttctctgaggaagagctcgagtacatcagaaatcttgatccaaggaaagatgtgcagatgctgcgccgggaacttccgatgatacgtgaggcctgcctacatgtactggccctgtgcacaatcttccttaaggaggctgcagctttcggactctgcttggccgagataggcgagatgatgaccagggagttcagagggatggaggaggaaccaagccagctggagcttatgtgtatggaggccaggaagagagtagcagagtgggagcccttctctgccacagctgaacatggagaagataccgatttccagttctcggtggatatgctaggagaatacagtgatgtagtgcgatcaccaaggttcaatggctcaggttccaaagtgtccagtttcagaagccctttgtctaagctcgtcgagagcgtcgacgagggcagtgatggccatgaagatcaaaacgagtctgatcgagtcttgtatgctggatggaatacatctagcgttcctagcaaagctatgggccatagtggcaatgcctcaaaaagtgcaatgaacaggagtgccgatgaacaacttccatcaagtatgtgttttgtcaggctgtcggatatgagtgcagatgagtgggatgtattcctcgaaaaattccaggagctgctgaaagagacactgcacgagagcgcaagggcagcagcaggtcaaaggatgaagcagcggctaggcacttcatgcaagttttgagcagggcaatagcgcatcagagaagaaaaaatatgcagtgctacttgtattgcttgcttatggagtgagtacaggatgaagatatcatcgtatgcggcaccttcaaccttgtgcaacgatctaggttgcagcagccatgtccagcaggtagataggaccacaagcatatgtagtgacggtgtggagaactgctacgcgtgtttattagctatatgtttacgaaggggaatgcttaataataaaaa

SEQ ID NO: 214 - DNA, 1505 bp, Zea mays
aggctgctgtctcacggctgcggctgcggcggttcgggctccagactccagggatggccgccggtgcgggaggcggcgaactggaggcgctggagggcgtgcgctccatcgtgctcaagccgtcggagtcgctcgacgagtcgcgtttcacgaggatcgccggcgccgacttcaacgacccggccatcggactccaggggctgctcgcctcgctcgcgtccaccgggttccaggcatccaacctcggcgacgccatcgacgtcgtcaaccagatgttagactggaggttgtcgcatgagaagcccagcgaggattgtgatgaagctgaacttgaccctaaatatagagcatctgtgaagtgcaagatatttctgggcttcacctcgaacctcgtgtcttctggcatccgggatataatccgttttctagctcagcatcacatggtggatgttattgttacaagtgctgggggtatagaggaggatctcattaaatgccttgcaccaacttacagaggcgatttttctttacctggagcactgctgcggtcaaaaggactgaaccggataggaaatctgttggtgcccaatgacaactattgcaagtttgagaactggatcatgccactcttcgaccagatgctacaggagcaatctactgagaatgtttggacaccgtcgaaggtgatagcgcgccttggcaaagaaataaatgatgaaagctcctatctttattgggcatacaagaataacatccctgtatactgcccagcattgactgatggatcacttggagacatgctgttctgtcatgcagttcgtaatcctggccttattattgacattgtacaagatatacggctgatgaatggggaagccatccatgcaacaccaaggaagacagggattatagttcttggtggaggccttccaaagcatcatatatgcaatgccaatatgttccgcaatggtgcagattatgctgtctatattaacacggctcaagagtttgatggtagcgattctggagcacaccccgatgaagcagtctcatggggcaagatcaagggttcagcaaaacctgtaaaggtgcattgcgatgcaagtatcgctttcccgcttcttgttgcagcaacatttgcacgtaaggttcataactccaaatgaacagactgaatcggattcggtggagtgaatgggcaacagaattttgttgaactctccaaatgaccttttggagcacgaggtctacttcacctgcacagggatcatgtgcaagttttttcggtgactcgcggcaaccacatgccatcattattcgatgttcacttgatgctgtactagctggttgatagcatttttgttacaactgataatttattgaaatacagacatacgattgttcatccgagtcgtctgcttacgaattttttgtagacgaaacatctgcttacgaaattgacaaatggcctgttttatgaacacattttttttcacctgaaaaaa

SEQ ID NO: 215 - DNA, 2385 bp, Zea mays
ccctcccctaccctttccttccccactcgcacttcccaaccctggatccaaatcccaagctatcccagaaccgaaaccgaggcgcgcaagccattattagctggctagctaggcctgtagctccgaaatcatgaagcgcgagtaccaagacgccggcgggagtggcggcgacatgggctcctccaaggacaagatgatggcggcggcggcgggagcaggggaacaggaggaggaggacgtggatgagctgctggccgcgctcgggtacaaggtgcgttcgtcggatatggcggacgtcgcgcagaagctggagcagctcgagatggccatggggatgggcggcgtgggcggcgccggcgctaccgctgatgacgggttcgtgtcgcacctcgccacggacaccgtgcactacaatccctccgacctgtcgtcctgggtcgagagcatgctgtccgagctcaacgcgcccccagcgccgctcccgcccgcgacgccggccccaaggctcgcgtccacatcgtccaccgtcacaagtggcgccgccgccggtgctggctacttcgatctcccgcccgccgtggactcgtccagcagtacctacgctctgaagccgatcccctcgccggtggcggcgccgtcggccgacccgtccacggactcggcgcgggagcccaagcggatgaggactggcggcggcagcacgtcgtcctcctcttcctcgtcgtcatccatggatggcggtcgcactaggagctccgtggtcgaagctgcgccgccggcgacgcaagcatccgcggcggccaacgggcccgcggtgccagtggtggtggtggacacgcaggaggccgggatccggctcgtgcacgcgctgctggcgtgcgcggaggccgtgcagcaggagaacttctctgcggcggaggcgctggtcaagcagatccccatgctggcctcgtcgcagggcggtgccatgcgcaaggtcgccgcctacttcggcgaggcgcttgcccgccgcgtgtatcgcttccgcccgccaccggacagctccctcctcgacgccgccttcgccgacctcttacacgcgcacttctacgagtcctgcccctacctgaagttcgcccacttcaccgcgaaccaggccatcctcgaggcctccgccggctgccgccgcgtccacgtcgtcgacttcggcatcaaacaggggatgcagtggccggctcttctccaggccctcgccctccgccctggcggccccccgtcgttccggctcaccggcgtcgggccgccgcagcccgacgagaccgacgccttgcagcaggtgggctggaaacttgcccagttcgcgcacaccatccgcgtggacttccagtaccgtggcctcgtcgcggccacgctcgccgacctggagccgttcatgctgcaaccggagggcgatgacacggatgacgagcccgaggtgatcgccgtgaactccgtgttcgagctgcaccggcttcttgcgcagcccggtgccctcgagaaggtcctgggcacggtgcgcgcggtgcggccgaggatcgtgaccgtggtcgagcaggaggccaaccacaactccggcacgttcctcgaccgcttcaccgagtcgctgcactactactccaccatgttcgattctctggagggcgccggcgccggctccggccagtccaccgacgcctccccggccgcggccggcggcacggaccaggtcatgtcggaggtgtacctcggccggcagatctgcaacgtggtggcgtgcgagggcgcggagcgcacggagcgccacgagacgctgggccagtggcgcagccgcctcggcggctccgggttcgcgcccgtgcacctgggctccaatgcctacaagcaggcgagcacgctgctggcgctcttcgccggcggcgacgggtacagggtggaggagaaggacgggtgcctgaccctggggtggcatacgcgcccgctcatcgccacctcggcgtggcgcgtcgccgccgccgccgctccgtgatcagggaggggtggttggggcttctggacgccgatcaaggcacacgtacgtcccctggcatggcgcaccctccctcgagctcgccggcacgggtgaagctagacgtcattgagcgctgaatcgcagttagcgaccgggccaaggttctcgccggcgtgatgagatggaacactttgactcccgcggccggatcggcctgtgttcgttcttgtttccgatctcccttctctttcccgttgcttcgatcccgtcaagtatggtagaccgtagcctattgttatgtttaaatgtcaattattatgtgtaattcctccaagcgccgatatccaataaggacgaaccggattttcgttaaaaaaaaa

SEQ ID NO: 216 - DNA, 2315 bp, Zea mays
cgtttccgcccgcgtcctcgcctcttctttcttcgcctcttctgcaccgcgctctcgctcgcccctccgccgcttggcctccaccctcccgctgccggctccgccgactggacttccgcccgtcgctggccgtcggcgcgcccgttcctcgcaggtgaattgttcaggctgaattgatcggtggaagctgtgcattgactatttttttaatctcagaatcaaagagagaaattgaactgggaggctgctaattgcgagagaagtgatgtctttcgttaggcaagcagacccatcagtgtcctgtgccgagaccacttacatccacaaatttgtgccaccaggaccagttttcccagcacagagatttgtctctggcaccgacttgcttcaccacgggcctcaaccatataatgctgagggctacaagcagtctggtttcaatggcacagcgcctcatgcatttcagagcttttacaatactgatagctatgctgaatctcactttaatgaagcaccatattctcctgcaatcttcgatatatctcagcagaactctcaatctttatcagacaaccaggcctctgatcttgtagagttcgatgaggatgagatgagagtaaagcttcaggagcttgagcatgctttacttgacgatggtgatgagatcttttttgacttgtcagggagcattaacgatgagtggaatgataacattaagacaaacaatgaatgggtcaataccatgaagaatattgtgagccccgactctccaaaagaggcatcacctgagtcaagcatctgctgtctcgacaacaatgttggagaagcgcggaacccgaaacagttgctttttgactgcgcagaagcgatatccgaaaatagcatcgatgaagcacagtcaatcatagcagaactacggcagaaggtggcaattcaaggagaaccttctcagagacttgcggcctatctcgtggagggccttgctgccacactacagtcttcaggaaagggcatctacagggccctgaggtgcaaggaggcccctactctgtaccagctttcagccatgcagatcctcttcgaaatctgcccatgcttcaggctaggcttcatggctgctaactatgctattctcgaagcctgcaaaggcgaagatgtcgtgcacatcattgactttgacatcaaccagggtagccagtacataactcttatccagttcctaaagaataacagtaacaagccacgccttttgaggataactggtgtcgatgatccagagtcagtgcacagagctgttggaggactgaatgttgttgggcagcgactagagaagcttgcagaggactgtgaggtacggtttgagttcagggcagtggctgctaacattgaagatttgacgcctggaatgctaggtcgccgtcccggagaggccctcattgttaactttgcattcctgctgcaccaccttcctgatgaaagtgtctcaattatgaaccaaagggatcggcttctccgtatggtgaagggtctccgaccaaaactagtgacgttggtggagcaggacgcaaatactaacaccaccccattcccttccaggttccgggaggtctatgactactattcggcactttttgattcactggatgccacccttccaagggaaagcccagatagaatgaacgtggagcgccagtgcctcgcacgggaaatcgtcaacatcttagcttgtgaaggtcctgaccgtgtggaaaggtatgaagtggctgggaaatggagagctagaatggcaatggcgggctttgtgtcgtccccatttaacagcggcgcgattgatggcataagatctctactgaaatcgtactgcgataagtacaggttcgagaaggtccaggacggtctccactttggctggggcgacaagacgctcgtcttctcttcggcgtggcaatagaagcttgcttgtactattgcctatctgagcactttccagcgtttttaggagcatctggggcaagggctgtaaagagatttctgtcgccgtattgttgacctaccatataagtacactcgtagctaaccttagcgtgctgcctgcctgtaggcttgtgacttgtgaggtctacggtttacctagtttcttagatgaaagtatgttgtgcattgtacacctactgaactacatgtagactgtagagtcgcgggtgtatttaattttgcccttcttttggaggggcagaatcacaatacgcgtgattggatacctggccgcgtgcgtctgggctctccacattccgttaaaaaaaaaaaaaaaaaaa

SEQ ID NO: 217 - DNA, 849 bp, Zea mays
ctcaagtgctcagtgctcaccgctctgcccctgcctcatcacacgcgcgcacggcgcacagataccttttctctcctctcccgtcccactctcctgggcaatcccggcccggcatggcgagcccgtcctcgtccccctcgcggaaggctctgagcaagatcgcctgcagccgcctgcagaaggagctcgcggagtggcaggtcaacccgcccgcgggcttcaagcacagggtcaccgacgacctccagaggtgggtcatcgatgtagcgggggcagcaggcacgctctacactggcgaaacctacaagttgcaggtggatttccccgagcattatccgatggaggcacctcaggttatatttctgcatccagcaccgatgcatccacacatttacagcaatggacacatctgtttagatatactgtatgactcgtggtccccagcgatgactgtcagttctatctgtatcagcatattatctatgctgtccagctcgccagaaaagcaacgcccagctgataatgatcgctatgtcaagaactgtcgcaatgggaggtctccgaaagagaccaggtggtggttccatgatgacaccgtgtgatcggtgttccgattattgttgtcctgtatgcatttagttgccagactatgggagatggacttatttcgaacgacccatttgaccagaaattaacatgctcttgtggtttgtagatgaatgtgcatcagcgtcaggcctgtactttctgattcttacaccgtcgatgatatatagaataatgtttgtatcttgtcaatttacggaacagacatgaaattcaatgcaggtcactggtttctgaaaaaaa

SEQ ID NO: 218 - DNA, 1131 bp, Zea mays
cacgcccgcagcgcctcgcctcggctgctctacctctatcccgcgacccgcgagatcggaatcgcggcgccccgccgccctcctccaaaatggcaccgtctctgctcggggggttcaccaagtcgttggccatgacggtgctctccgagatcggggacaagaccttcttcgccgccgcgattctggctatgcgccatcccaggaaactcgtattggcaggctgtttaactgcactaatagtcatgacagctctatcggcttctctaggttgggttgcaccaaatctgatttcacgtaaatggactcatcatttgaccactctattgttctttctatttggcatttggtcattgtgggaaggcttcaaggaagatggagattcggaagaattggctgaagttgaagcagagctggatgctgcctttaagagtaataaaggtgaatctaaaaataaatttaaggcgaatgatgatatgaagaaacagcaaagaccatttctcatgcagttcttctcaccaatttttctgaaggcattttctattacattctttggtgagtggggtgacaagagccagattgctacaattggcttggctgctgatgaaaacccgttcggtgttgtcctgggtggaatcatagcgcaagcactctgcactactgctgccgttcttggtggaaagagcctagcgtcccagatatctgagaagatggttgaactgtcaagcggagtgctcttcctgctcttcggtatcatgtccttactctctggaccagaaggagaattgtaatccctgcttgagcctttttcagctagctgattaacatggctttctcttcttagacctatcttatttcagtacatgaatgatggcaacgaaagccatccatccatggcgaacaggatggtgatttaacagtttagccgacacgctgtaaacatttcagtcgcccttcaaaaattactacatgttacagaagtctgtagcgattgtatatttgtattctgtcgtgcccagcacgtgaaattttgttatcgcaattacatgcgttaacaaagctttgttcgtgaacctattcaggcaattaatatggggcttatagcaggcctttgtctttaaaaaaaaaaaaaaa

SEQ ID NO: 219 - DNA, 1533 bp, Oryza sativa
ccaacgcaaaccgcatcgatcaactccttccccaagtcgaagcaaaatccctagcgatgtcgtcgccgccgcccgccgccgccgccgcgatggccgtcgacgacgccgacgacgaccagctcgcctccatgtccacggaggacatcgtcagggcaacccgcctcctcgacaacgagacccgcgtcctcaaggatgagctgcagcggacgaaccttgaggtggaatcctacaaggagaagatcaaggagaaccaggagaagatcaaactcaacaagcagctgccttaccttgtcggcaacatcgtcgagatattggaaatgaaccccgaggatgaggctgaagaggatggtgcgaacatcgatctggattcacaaaggaaaggaaaatgcgttgttttgaagacatccacaagacaaacaatattccttcctgtaatcgggcttgttgaccctgaaaagctcaagcctggggatttggttggagtcaacaaagacagctacttgatactagacacgctaccttcagaatatgattcacgggttaaggcaatggaggtagatgaaaagcctacagaggattacaatgacattggtggccttgagaaacagattcaagagcttgttgaagcaatagtattgcccatgactcacaaggaccggtttcagaagttgggaattcgccccccgaaaggtgttcttttgtacggaccacctggcactggaaagaccctaatggctcgtgcatgtgctgcccaaactaacgccacatttctgaaacttgctggtccacagcttgtccagatgttcatcggtgatggtgcaaagcttgtccgtgatgcctttcagcttgcaaaggagaaatccccctgcatcatttttattgatgaaattgacgcaattggaacaaagcgttttgatagtgaagttagtggtgacagagaagtgcagcgcacaatgttggagttgctgaatcagctagatggattcagtagtgacgagaggataaaggtgatagctgcaactaatcgcgcggacattcttgatcctgctttgatgaggtctggtaggctggaccgaaaaattgagttccctcatccatccgaagaagcacgagctagaattttgcaaatccattcaagaaaaatgaatgtaaaccctgatgtcaactttgaagagttggcacgatctacggacgacttcaatggtgcacaactgaaggccgtttgtgtagaagcaggcatgcttgccctacgccgagatgctacagaggtgacacacgaggatttcaatgaagggatcatacaagtgcaagccaaaaagaagtccagtttaaattattacgcttaattcttccgagagagttattaggcctaaggaaacgctccgtccaaaattgtttgtttgtaacactaccgttttatatatttgtgtggttcaagatgtgattgtacgaaacatgtcttgcgctgttccttctctgcttgatatatactgatagaagttgactcgtcccttgcgtagaaaaaaaaaaaaa

SEQ ID NO: 220 - DNA, 1126 bp, Oryza sativa
aaaacctcgcaaaaccctcggccctcacccgccgccgccgccgtcgcctccaccggtaaacggcagcatgagtcggcaccctgaagtgaagtgggctcagaggattgacaaggtttacataactgtacaattagctgatgctaaggatgctaaggtcaatctggaaccagaaggtgtattctctttctctgctacagctggaactgatgggaacttatacgaatcaaagctagagttgaacgacaaagtaaatgttgaggagagcaaaataagtgtaggtgttaggtccatattctgtattgtagaaaaagctgaggccaaatggtggaagaagcttgttcgagatgatcaaaaggcaccacactttgtgaaagttgactgggacaaatgggttgatgaagatgatgatggtgctgatgtcaacgtggatggaatggacttttcgaattttggtggcatgggtggaatgggtggaatgggcggaatgggtgatatgatgggtggcatgggtggtatgggtggcatgggtggcatggctgagatgatgggtggcatgggtggtatgggcggtatgggtggcatgggtggcatggatgagttcgaggacgagagtgacgatgaagaagaagtgtctaaacctcaagacgcagagaaggctgctgaagccggaaaatcccaggagtcggacgctaaagccgagacaagttagagcaatcgaaggcccctctacataattcctttctctgttgcatcccgtcttttatggatctggtgaactgaagaaaacattttacgttatgacggtagggatgggtgctcccttgtagaacgatgctatgaaactggagctccaactgagtacgcaaaccattcttggattgtttttcttaatgcgctttgatgcttcatcgctctgcaatcatatattaagctttggatgctttaatctgcttttgtgagatactgctgtgcccgtgctagagtccactgagcatgcaacaattcatgtgatctgacgatgcttgtgctagacgagtgaggcagtagcactgttagttcccaagcttgttttgaaaggatgcatagtgaatccctatttatttgtttaaaaaaaaaaaaaaaaaaa

SEQ ID NO: 221 - DNA, 870 bp, Zea mays
ttctcgtttcaccgtgcgccacaagcacacaactagggcgaccgccgccgacctacggccagctgtgcccatgtcttcgtcgggccctttgctggcgacgggaacccaccacaccggccgccaacctgaggttttgtgggctcagcgctccgagaagattttcttgactatctcattgccagatgcgaaagatgttgtgttaaagaccgatcctaagggcctctttaacttctctgctgttgtccatggggaaccttttagcttcactttggagctttttgattcaatactgtcagagggaagtaaaacgaagacaaagatgggcctgcgaaacataatctgctcaatccagaaagaaaagaaaggttggtggaagcgcttgctaaagtcagaggaaaagcatccatacatcaaagttgactggaacaaatggtgcgatgaggatgaagagtctgagttctctggggattcagatggtggctttgatgaggcaaatgaaggagatgaaagtgatgatgatgatgggatgctttatctccccgaccttgaaaagctaaggggcaagtgatctggctgcttcggtgaagggagtagggttgatgtaacaagttaccgttgacgtgacagagtaggcttatcatcgacgtagttggggtcttacttgctgagcatctgcgacggcttgagacttttaggcatgtcttctatctccgaagcactctttcggtctttcctgatcagtgagctagcgctctgaaaacgtagcgatgagctgtcccattttcgactaactatttagtgccagtgaatggcctaattctacaactatcacgatgtgcctatatgttaggggattatggattcaaaaaa

SEQ ID NO: 222 - DNA, 870 bp, Oryza sativa
cggacgcgtgggaaaaaaaaccctaatccatccactccaaatcgccacgcaggaagggaggaaaggaccaccagccaccgcgcgcgcccaaatcgtcgcagctgcttccccgaggagaagaacatgagtcgccacccgagcactaagtgggcgcagaggtccgacaaggtgttcttgacgatcgagctgcccgatgccagggatgtgaagctcaacctgaagcctgagggccagttcatcttctcggcgaagggccctgccgacgacaccccttatgagcttgatcttgagctctttgatgctgtgaatgttgaggagagcaaggcagctgttgcggcaaggtccatatgctatcttatcaagaaagcagagagcaagtggtggcctaggctgctgaagaaggaaggcaagccacctgtgttcctcaaggttgattgggataagtggcaagatgaggatgatgaagacattgggcttggtgacttcggtgatatggacttctcgaagctgggcatgggaggtcctgatgatgatcttgaggacgatgacgaagatgacacggctgacagtgctaacaaagatgatgaagacattaaggcagaggggagcggggaacaggaagctgctggtgaagcgaagccgtgaaatacctgagagttttagaacgctatgcttgacttgtttgtgacgctgccaggtcttaagatttttttggtgtaaactctggagagtggatcactgccactaaagtaaagtagtagttatggtttagtagctccattttgttaaaaaactttgtgcattgcacactgttctgttatgtgaatcgccatatttgcatcaaccattgcaaagctatccagccaaaaa

SEQ ID NO: 223 - DNA, 845 bp, Zea mays
ggcagtcttcccccaagacgtctaaaccccaatccctaaatccccgacgcagaccacacgacgcgcacctccgttcacgaggcggaagcatgagtcgccacccgatcactaagtgggcacagaggtccgacagggtgttcttgacgatagagctgcccgacgcccaggatgtgaagctgaacttgaagcctgaaggccatttcaacttctcagctaagggctcagatgacttgcgctatgagtttgacattgagctgtttgatgctgtgaatgtggaggagagcaaagcagctattgccccaaggaccatatgctacctgataaagaaagctaagagcgggtggtggccaaggctgctgaagcaggagggcaaaccacctgtgttcttgaaggttgattgggacaaatggcaggacgaggatgatgaagacgctggatttaatgactttggtggtatggacttctcgaaactggacataggaggtgctgatgacgacgatattggggatgatgaagatgatgtggttgaaagtgctaacaaagatgaagaaggaggtaagacagaagagagcaaggaggaggaagcagctcctgcggctgcagaggaagtgaagccatgaagaatcatttgactttgctccgcgccatgggtgtccacggtatctagctaggctagacgttcccttggatttttggtgtaaaatctggaggtcgaaccactcactgcctattgaagtaaaggatacaaaaacagttgtgctgtcttagtttttggctgaaccctgtgaactgctgctacaatatttggtcagagtttatatgcatccatcatgcgacgcaaaaaa

SEQ ID NO: 224 - DNA, 1271 bp, Oryza sativa
gcagtgcaggtgtcgctggccatggcgaggaggagcagcagcagagcgtgcgcggccatggcgacggccgccgtctttgcgctgctggccgcgacggcgacggcgtcggggctcgtacgggtggagcacccggccaagagcgacgggtcgctgagcctgctcgtcgtcggcgactggggccggaagggcacgtacaaccaatccagggtcgccgagcagatggggaaggttggggagaagctaaatatagacttcgtcatatccaccggtgacaatttctacgaggatggactcactggcgtcgatgaccaggcgtttgaggaatcgtttaccgatatctacacggcaaagagcttgcagaagccatggtacctggtgctgggaaatcatgactacaggggtgatgtgctagcacagcttagcccagtcttgcgaaagatcgaccagcgattcatttgcatgaggtcgttcattgttaatgcagagattgtggatttcttctttatcgacacaactccatttcagctgaaatattggactcgccctaaagaccatcattatgactggagaggagtggcacctcgacaaaaatacataactaatctacttaaggatatggatgaggcaatgaagaaatcaacagcgaagtggaagattgctgttgggcatcataccattaggagcgtcagtgaccatggtgacaccaaggagcttctgcaacttctacttccagttctgaaggtcaatggcatcgacttctacatcaatgggcacgaccactgcctggaacacattagcagcagagacagtcctatccaatacttcacaagtggaggtggttcaaaagcatggagaggagtcttgcagccaaattctgataagctccagttcttttacgatggacaagggttcatgtccctccagataaaccaggaccaagctgacttcatattttatgatgtttctgggaacatcttgtacaagtggagcaagagcaaagcaaactacctccagccctccacctatatcactgaagcatgaggcagatgcaaaaccacaaaacggagaattagcttggctaagatatttgtatcaaatttgaatgcattattgtggcacgcaagggaagaggaccggaaaggaaataggaaagtatttaagcatggcatgtgattgatctactaaagaaatttgagacaaggccgagaccatcctactagactaggaaaagagatgttcagtatggtatccattagatctgattcaaaaaa

SEQ ID NO: 225 - DNA, 1441 bp, Zea mays
cccacgcgtccgctcgtacgccgtcgcttcctgcggtacgtactctctgtccgcagcgttcctccagctagtagcagtagcagctagctagctagctagcaactggccatcggggctgctagcagcgtacgtacgtggcgcgatggctcctccagctcatgataggctccgccgcctggtgctgctcctcgtcgttgccaccgccgcggcggctttgcttctggcgccgacgacggcggatgctgcgctgccgcgggtgcagcacacgcccaccaaggccgacgggtcgctcgccatcctcgtcgtcggcgactggggccgccgtggacagttcaaccagaccttggttgcccagcagatgggcgtggtggggcagaagctggacatcgacttcgtcatctccaccggcgacaacatctacgacgacggcatcgccaacactagcgaccccctcttcaaggaatcgttctccaatatctacactgccaacagccttcagaagccttggtacctggtccttggtaaccatgactacacgggaaacgcgctcgcgcagctcgaccctgccattcgcaaagtggatagccggtacaccgccattgccaagtccttcattgtcaactcaggggttgcggattttttcctcgtcgacacaacgccgttcattgtccactactggaacaacaccaagttcgattggagaggcgtcgctcctcgagacacctacatcgcgaatctcctcaaggacttgaagtgtgcactgacagcgtccaaggctccctggaagatcgtcgtgggtcaccaccccatcagcagcgcctgcgggcatgggaacaacactgagctcgaggagttgcttctcccggtcctcaggacacacggggttgacatgtacttgaatggccatgaccactgcctgcagcgcgtcagcagcagagacagtcgtcttcagctactaaccagcggcggcgggtccaaggcatgggctggcaagttcaagcccaccctcgacaaggtggagttcctctacgacggccaggggttcatgtcgatgcgcctgagcaggacggaggcccgcctcgcgttcttcgacgtcgctggcagcgtcctgcactgctggaccatgcatgcccaaaaattaaagacgacgacgacgacgactgctgctgctgctgcagccgggcactaaagctttgctggatcggagttattaatgttcgttgctgcctcgcggcggtacgatgagttgatgatgcaattaattatttggttttgtcgtcttttcgtgcgtgagagggaagcaataataattatttgctgctgcttccgttgtgtgcacatgcatgtgagggtgtcaagtatgttcagcctcttgcaagataaaatctctcgtcttctatggaataaactgggaaaagagttttttttggtaaaaaaaaaa

SEQ ID NO: 226 - DNA, 1078 bp, Oryza sativa
gccaagacgacgacgacttgggaattcatttgcatcggcaacgacgatgaagctcgccgtggtcgccgtcgcggcgctcctcctcgccgccggcgtcgcctccgccgatgaattcgacttcttctacctcgtccagcagtggcctggctcgttctgcgacacgcaggctgggtgctgcttcccggacaccggcaagccggcggcggagttcggcatccacggcctgtggcccaactacgccaagtgccgtcccgccgccggcgccgtcgccgacgacgacgacggcgtggtggagatggtggtcgacggcggcgccgccgtcgagcgccaccaccggcggcggcagaagtgctggccggagtactgcgacgacggcaacaagctgcggccgtgggagatcaaggacctcgtggcggagctcgatgcgaactggccgacgctgtcgtgcaagggcggcaagagcttcgagttctggagctacgagtggaagaagcacggcacctgctcgggcatgggccagcacggctacttcgcggcggcgctggagctcaagaagcggcacgacctcgccgccgtcctcgccggcgccggcatcgtcccctccgacgacgagagctactccctcggcagcatccgcgacgccatcgccgccgccacgggcgcggtgcccaacctcgagtgcaaccgcgacgccgccggcgagacgcagctgttccaggtgtaccagtgcgtcgaccgctccgggaagaagctcgtcgactgccaactcccgatgcagggcaagtgccgcgacaaggtcaagctgcccacgttctagctagctagctcccccgtcgccatcgtcgccggcgagagctcgccgtcgccggcatggcggcgcgccggcggctggctggtcttggatgtctgatggatgtcacgtgcgtttgcgttgttgcgtggtgcggttttcagattacgagagattcgaggatttgtccagttggattgctacatgtgtacgttacatttggcactatctgctgacttgctgaacagttgaataataacatatcaagttttaccagttgaaaaaaaa

SEQ ID NO: 227 - DNA, 1145 bp, Zea mays
ttctaggagttgtactgagctgagctgccggaggcagaataggagaggcaggcgatgacgatggcgacgaaggcggcgtgcgtgctggcggtgtgggtgctcgtcgcctcgggcctgtgcgacctgggctcagcgcgcgcgcccctgggcagcaagccgcagcgggagttcgactacttcgcgctctccctccagtggcccggcaccatctgcgcctccacccgccactgctgcgccaccaacggctgctgccgctcggagccgctccagacgttcacgatccacgggctatggccggactacgacgacgggacctggccgtcgtgctgccgccgcacccaattcgagatggacaagatattgccactgaaggaggtgcttgacaagtactggccgtccctctactgctccaaatctggaacatgcttcagcggcaagggactcttctgggctcacgagtgggagaaacatggaacctgctctgcccctgtggttcaggatgaattacagtatttcacccttgcccttgacctctactccaagtataacgttacggaaatgctgtcaagtggagggatacaggtttcaaatggtaaggaatatgcactgagcgatgtcatcgataccatcaaacatgcttttgggggatcgccacaaattgtttgcaagaggggttcaatcgaagaacttaggttatgcttcgacaaagaattgaagcctcgtgattgccttaccacttctttggcgaatggaagtgtatcaaaaagcaagcactgcccgcggtacatcaccttgccaacatatgatccccttgtgcttgccaattcaactgtagagatcatgacacagttcgatgaatttgatgtgcctgcagctctttatacagcttaaaatgcaattgttgcaatagcagaaggtgctcgcgtgagcacctagaaccaggcacatttatcctgggatattcaatcatttgtacatgtacacttgaaagagaactgacatcttttcaacctgaaaatttataagctttatgtaaccgtgaaggtcggatattgcacatgtaattcgctaaatcaaaactgtatcttgaggtagaattttcaagtagtaataatagagatataagaaacttatcgcccaaaaaa

SEQ ID NO: 228 - DNA, 951 bp, Zea mays
cgtccacgttccatatggcttcctgcaggatggcactcctccttggcttgctgctgctagtagtagcttcgcccgcgatcgctgatgacgactccggtatctactaccagctggctcttatgtggccaggagcatactgcgagcagaccagcgctgggtgctgcaagccgaccaccggcgtctcgccggcgcgcgacttctacataacgggcttcaccgtccttaacgcgaccaccgacgctgcagtgacgggatgcagcaacaaagttccttacgaccctaacctgattaccggcatccaaggcctgaatcagtactggagcaacatcaggtgccccagcaacaacgggcagagcagctggaagaacgcctggaagaaggccggcgcctgctccggcctcagcgagaaagactacttcgagactgccctctccttccgtagccggatcaacccactcgttcgcctcaaagccaaaggtatcgagccggacttcgggctctacggcctcaaggcgatcaccaaggtcttcaagagcggcatcaacgcgacgccggtgatccagtgcagcaagggccccttcgacaagtacatgctgttccagctctacttctgcgcggcggggaacggcacgttcatcgactgccccgcgccgcagcagtacacctgctccaaggagatcctcttccaccccttcaagaagtggatgctcaagcagcagctcaaccaggacgacgaccctttccagctgcctggcgtcgccatggacaactgatacaccgtaccgtcgtctctgtttgcgtttctgtcaagtgtgcatggaataatactgtaactgtgtttcctgccgggcaatgcactgtgatatgatgcccaacgaataaatgtcgcttttatttttattcgacttcccccctgtaccgtgtggaaataaacctattataagcaaaaaa

SEQ ID NO: 229 - DNA, 976 bp, Zea mays
tcgatccctgcgctgcaagcaacaaagttctactctgtccacccgtccatctagctctcaagaaccaacccgtaccagcgctatccggccggccatggcggcggcgcgccggctctccctgcccctcgtcctgctggtcgtcctggccgtcgccgggcgcgcggcggcgcaggactacgacttcttctacctcgtgctgcagtggccgggggcctactgcgacaccaagcagagctgctgctaccccaagtccggcaagccggcggcggacttcgggatccacggcctctggcccaaccgcgacgacggcacgtacccgcagaactgcagccccgacaacgccttcaacccgtcgaaggtgagcgacctaatgagcagcctccgcgccaagtggccgacgctggcgtgcccgtccaacgacgggctgcgcttctggggccacgagtgggagaagcacggcacctgcgcagccgacgtcttcgacgagcacggctacttccaggccgcgctgcgcctccgcgaccagctgggagtcctcggcgcgctcacctccgccggcgtcaagcccgacggcggctactacacgctgagccagatcaagggcgccatccgccagggcaccggcttcgagccctacgtggagtgcaaccgcgacgaggccggcaacagccagctctaccagctctacttctgcgtcgacgccgccggcgacagcttcgtcgactgccccgtcctccccagcggcaggccctgtggcaaccggatcgagttcccggctttctaagctaactcactcttcacgtcagttgctgcaatatactgctagtccttttgcttgcattctatgcaagaggataatggaatgttcattccccattcttcatttttttttgcaaataaaaggagggcgatcggtgttccatatttattatgttgatcataacatgacattcagagaacaaaaaaaaaaaaaaaa

SEQ ID NO: 230 - DNA, 988 bp, Zea mays
ccaggccatcaggttatcgagaaagctctcgtctcttccatttctaggctagcctaggtctggaccagttaggcacgcaagtatcaatcgattcataagaggaggaggccattgagggagccaagtagaaggcagtcacggcaaaccacgtatcttgttgttagaaagctggtgagcaactttgtcaagcctcaagagctcatggaagatggcagtgctccaagacggtctactccacccgcccgcagaagcagatctgctgagttccacaatttttcagaaaggaggagaagggataagatcaacgagaagctgaaagcattacaggagcttcttccaaactgcaacaagaccgacaaagtttcgatgctagacgaagcaatcgactacctaaaatcacttcagctacagcttcagatgctggtcatggggaagggaatgtcaccagtggttccacttgagctgcagcaatacatgcattacatcacggctgaccctgcgcagttgcctccgttgcgcccctccggccagcagcaccggcaatttcagataactcaagccaatccccagagacaatctaacgtcgagtcggatttcttgagccagatgcagaacttgcactcttctgagccgcctcagaactttctcaggccaccgaaattgcaactttatacaccggaacagaggggtggcctacccagcacgagccacaacactggatggatttctgggagttcctcgtataacttcatggagtgatgtgctcctaatgacaaaatttgacacggcaagcgtgcaggcgtgcagccttgtactggcaagagattattcagtttgggacctgcagcatggttcacctgagagaattccatgaatgtgtagtactagttaactagctagctagttgtgttattaaataaaacgttgtgattgtgatgctgctcaaaaaaaaaaaaaaaaaaaaaaaaaaaaaaaaaaaaaaaaaaaa

SEQ ID NO: 231 - DNA, 949 bp, Zea mays
cccagttgcccccaaaccccagccaccagctaccaatggcggccaccgcgatggaccatgacggcggcgacgacgtggtcacaccaggggagcttctcggaaactcattaaccctcgcggccggacgtggcgcctacgccgacggtcgctctgtgcgcgcgtcggtcaccgggcgccgccgcatcgtgccgcccgcacctgcctccgacgaccagagatccacggtggaggtggtggggcacaaggcccatggagctgtgccgcagccgggaagcgtcgtcatcgcccgagtaacaaaggttatggctagaatggcctctgcagatatcatgtgtgttgactcaaaggctatcagagaaaagttcactggcatgataaggcagcaagatgttcgtgcaactgaaattgacaaggtggatatgtaccaatcatatcgtcctggggacattgttaaagctatggttctttctcttggtgatgcaagggcatattacctttccactgcgaaaaatgaacttggagtcgtttcagcacaaagcatagctggtggtacattggttccaatcagttggactgagatgcaatgtgatttgaccggtcaaattgagcaaaggaaagttgcaaaggtggaatagatgtgctgtggccctcctgataaatggtaaacatgtggtggcggtatacaaattgtggaccagtgacaccaggtccttgggcggactacccaattctgcgacgtccaacttcattacagctgcattgagcatgggtttttaaaaccctggctgaatttaactagacatgaatcgtagccatgggtcctgtaacccaaccttgggatctgaatcatagccatgggttctgtaacccagtaaccttgcccttgtgatttgttactctgtgagctaatgacattgcagttttccaccttgtgatttctaaaaaaaaa

SEQ ID NO: 232 - DNA, 1311 bp, Zea mays
cgacgcgcccaaagctcacgccggacctgctcctctccgacggcggcatcggcttcgtgctccgctactttcccaaggcgttcaagccccgcccccgcccaggccacgaggtggacgacctcgccaacctcatcaagctctacgcggactggcactcccgcctgatcccctactactccttcgaacagttcgtgcgcaaactcgagaaattgggtgccggcaaccgcgtcagggacgatggtgggcctctctgaaggggagaaacacttcatccgcggcggcattgcacaagacgttcgcactgatggacgtaggcggctgcagttccggtccctctccgtccaaaccggagtcattccacaggcgaatggctcagcgcgtgttaggttgggggccactgaaataatcgctagtgtcaaggctgaactaggaaaaccaagcattcttcaccctgacaaaggaaaagttgctatttttgtcgactgtagtccaaccgctgagcctctgtttgagggtagaggctctgaagaattgtctgctgagctctctgtttccctgcaaagatgcttgttgggtggtaaaagcggtgctggtgctgcaattgatctgtcatccctaattgttgttgatggaaaggtctgctgggatctgtacattgatgggcttgtggtcagttctgatggtaatttgctagatgcgctagctgttgcgataaaggttgctttgagtgatacaggtataccaaaagttaatgtttctgttagtgctgcatctgatgaggaacctgaagttgatgtaagtgatgaggaatttctgcagtttgacacatccggtgtgcctgttattattacattaaccaaggtgggtcggcactacatcgttgatgccacctcagaggaagaatcccagatgagttctgcagtgtcggtgtcagtcaacaggcatggccagatatgcgggcttaccaagaggggaggggcagggctggatccaagcgtcatcttcgacatgatatctgtcgccaagcatgtgagccagcagttcatctccctcttggattcagagattgccgccgccgaagctgaagaagaggctcagtgattgatgaaaaggaaaaaggactggttgcgtaaatgctcgtgtgttccaacttcaaccaaatgctgtagaaatcttcaggaacactctatatttacaaagtcattttgctctctatatttacaaagtcattttgctctctatatttacaaagcatgaatgaagatacccaagaacactcccgcacctaaaaaaaaaaaaaaaaaaaaaaaa

SEQ ID NO: 233 - DNA, 1172 bp, Oryza sativa
agcattcgcatccacgagaccactcgaacccgacccgcctcgccgccgccgccaccgaagtaatcccttaattggtcaaaatgtctcgggaggagaatgtctacatggccaagctggccgagcaggctgaaaggtatgaggagatggttgagtacatggagaaggttgcaaagactgtagatgtggaagagctcactgttgaggagcgcaacctcttgtctgttgcttacaagaatgtgattggtgcccgccgtgcctcctggcgtattgtctcatccattgaacagaaggaggagggtcgtggcaatgaggaacatgttactctgatcaaggagtaccgtggcaagattgaagctgagctgagcaagatttgcgatggtatcctgaagttgcttgactcacaccttgtgccctcatctactgctgcagaatctaaggtgttttacctcaagatgaagggtgattaccacaggtaccttgcggaatttaagactggtgccgagagaaaggaagctgctgagagcacaatggtggcttacaaggctgctcaggatattgctctggcggatcttgctcccacccatcccataaggcttggactggcacttaacttctctgtgttctactacgagattctaaactctccagacaaggcttgcaaccttgctaagcaggcgtttgacgaagccatctccgagttggataccctcggggaggagtcttacaaggacagcactttgatcatgcagctcctgagggacaacttgaccctctggacctctgacctcacggaggacggtggtgatgaggtgaaagaagcctccaagggcgacgccggcgagggccagtaaaatgggaagatcgatcgatcgatggctccgcatgttattggagaccatcgatttagatgcctcatgctgctgtcaccatgatggatggattcttctcctgttctactagaatgtttttcttcctgtccccccttcctctctcttctctggtttttactagggtggtagcggtcgaattagttcttcccattgctttgcatttggtgctagtggtccgtctgggctgattgttttcctctggatatgactctcgtgtgtgttgtctccagatagtgttttattgagcaatatttaaagttgtcgtccacctcaaaaaaaaaa

SEQ ID NO: 234 - DNA, 1004 bp, Oryza sativa
gaaaaatgtcgcctgctgaggcatcgcgtgaggagaatgtgtacatggcaaagcttgccgagcaggctgagcgttacgaggaaatggtcgaattcatggagaaggtggcaaagaccactgatgttggtgagctcaccgttgaggagcggaacctgctttctgtggcttacaagaacgtgattggtgctcggagggcatcgtggaggatcatctcttctattgagcagaaggaggagagccgtgggaatgaggcatatgttgcatcaattaaggagtaccgtagcaggattgaaactgagctcagcaagatctgtgatggtatccttaagcttctggattcccaccttgtcccatctgccactgctgcagagtccaaggtgttctacctgaaaatgaagggtgactaccacaggtaccttgctgagtttaagtcaggagctgagaggaaggaagcagctgagaacactcttgtggcatacaagtctgcccaggatattgcactcgctgacctgcctacaactcacccgataaggcttggacttgcactgaacttctcagtgttctactatgagatactgaactcaccagaccgtgcttgcaaccttgcaaagcaggcgttcgacgatgctattgctgaactggacactcttggcgaggagtcttacaaggacagcaccttgatcatgcaacttcttcgtgacaatctgactctctggacctctgacaatgcggaggatggtggtgacgagatcaaggaagcagcgaagcctgaaggagagggccactaatctgtcctgaagtctatttctgagtccatttactcagctacctgctgtattactggatcataagatgtactaggatcaattgctatgtggaatcataagattagggctgcgtatgtcaaaatgtgtcgagctgaagtacccagtggacacagtttatgtgcactacattgcttccgtgacttatttactagttaattagcaactttcaaccaaaaa

SEQ ID NO: 235 - DNA, 964 bp, Oryza sativa
gcggcttctcccttctcttctctctctcgcatcgcctactcgttcgttttccctcgaggaggagcagaggcggcggcggcggcggcggagcggacatggctgaggtggaggcagcgccgattgcggcggcggagaccccggaggtggcggcggcggagggagcggcggcggcgaaggcgccgcacaagctgcataggcagtgggcgttctggtacgacatccagtccaagcccaagcccggcgccgcgtgggggacctcgctccgcaaggcctacaccttcgacaccgtcgaggagttctggggcttgtatgatcagattttccgtccaagcaaggtgacagtaaatgctgattttcatttattcaaggctggtgtagaaccaaagtgggaagacccagagtgtgcaaatgggggcaaatggactgtgccatgtagcaggaagaccacccttgagaacatgtggcttgaaacgctgatggctctgattggagagcagtttgatgaaagtgaggaaatttgtggagttgttgctagtgtccgccagagaggagacaagcttgcattgtggactaggactgccagcaatgaagccgttcaggtaaacattggcaagaaatggaaggagattgttgactacaatgataagatggtctacagcttccatgatgacgccaagagggagaaaccaagcagaggtggacggtacaacgtgtaagtcaccgcaaaacgttgcagcttggatagtggccatcgagtggtgtgccgataccggcgcctgttctttacagcctcagctagtgttgttgtccgaggcaatttttccgacctattgtgttgctttcctctctgatagcttatggtaaaagatacaaagatgttgaggagtttgtacgccacttaattttgctcgtaacatacattgacaatcaagaggagccatggcattgcgatctaaaaaaaaaa

SEQ ID NO: 236 - DNA, 961 bp, Oryza sativa
gctaattaaggcgcaacacagaaaccctcaccgccgcccgcatccatggcggaggagcacgagacgaggccgccgtccgccggaaggccgccgtcgtccggccgcggcagggccgacgacgctgacgagagggaggagggggagatcgccgacgacgactccggccacgcgccgccgcaggccaaccccgccgcgccgcacccgctcgagcacgcctggaccttctggttcgacaacccgcagggaaagtccaagcaggcaacctggggaagctccatccgccccatccacaccttctccaccgtcgaggacttctggagcctttataacaatatccatcacccaagcaagttggttgtgggagctgacttccattgctttaagaataaaatcgagccaaaatgggaagatcctatctgtgctaatggaggtaaatggaccttcagctgtggcagaggaaagtccgacacaatgtggttgcatactttattggcaatgattggcgaacaattcgattatggggatgaaatttgtggagcagttgttagtgtgcgtggcaagcaggaaagaatagctatctggactaaaaatgctgccaatgaagctgctcagataagcattgggaagcagtggaaagaatttctggattacaaggactcgattgggttcattgttcatgacgatgcaaaaaagatggacaaaggtctcaagaaccgctacacagtttgatctgagcactcctgtccagatatccaagagagtagtatatccacatgtaggatgggttttcttcgatgctttagtgtttgtcattcgcttgtagcgagcgcttgaaggctataatattgccgtgaactgtttaaacttgaaacgtaatataatgacgtatcagaggtgtctctgtactctataaatcagtccagttcttccttaaaaaaaaaaaaaaaaaaaaaaaaaaaaa

SEQ ID NO: 237 - DNA, 949 bp, Sorghum bicolor
cgcaaacctctctccctcgtctggtatcgtctctcccacacccaaaaaaaaccctcgaaaagcggcggcggcgcgacatggcggaggtcgaggttccagctgctgcggtcgcgacgacgatccctgaggcggcggaggctaccgagggcggagccgctgcggaggcgaagggtccgcacaagctgcacaggcagtggaccttctggtacgacatccagtcgaagcccaagcccggcgctgcgtggggcacctccctcaaaaaggcctacaccttcgacaccgtcgaggagttttggagcttgtatgatcagatttttcgtccaagcaagttgtctgggaatgctgattttcatctgttcaaggctggagtagagccaaaatgggaagacccagagtgtgcaaatggtggcaaatggactgtcccatgcaacagaaaggcaacctttgagaacatgtggcttgaaacgttgatggctcttattggggagcagtttgatgaaacagaggacatttgtggaattgttgctagtgtccgtgcaagaggagataagctcgcattatggactaggactgccagcaacgaagctgtccaggtgaacattggcaagaaatggaaggatgtcatcgactacaatgacaagatcacctacactttccatgacgactccagaagagagaagccgagcaggggcggacggtacaccgtgtaagctgcacatcaacaaggttgcttggactggatagcgggcggagtggaattttctgctgagatcagcaccaactttcatttgataagccttggcttacctgaggcaattttcgcacctattgtgatgttattttgctttcagatagcttatgtagtacaagaaagagaggttggagacattgacgattttgtatgcaactgaatttctatctgaatctgccccgattcaactgcaaaaaa

SEQ ID NO: 238 - DNA, 890 bp, Sorghum bicolor
ctgccgccatggccgacgagatcgacacgaggccggcctccgcgggctcccggggccgccccgcgcacgctacggaggacgacgacagggaggagggagagatcgccgacgacacccccgcgcccgccctccccgtcacgcacccgctcgagcactcatggaccttctggttcgacaacccgcagggcaagaacaagcaggccgcctgggggagctccatccgacccatccacaccttctccaccgtcgaggacttctggggcctttacaataatattcatcaccctagcaagttggtcattggagctgacttccattgcttcaagaacaagattgaaccaaaatgggaagaccctatttgtgctaatggcggtaaatggaccatcagctgtggaagagggaaatctgacacactgtggctgcacactctgttggctatgattggcgaacaattcgactatggtgatgaaatttgtggagcagtcgtcagcgtgcgtggcaagcaggaaagaatagctatctggacaaaaaatgctgctaatgaagctgctcagataagcatcgggaagcagtggaaggaattcctggattacaaggactccattggattcattgttcatgacgatgcaaagaaggcggacaagggaccaaggaaccgatacacggtttgatcctgttgctggaaatctcagagtgtagcatgcgcacgtgtagggtggttctatccgaatctaatgcagacatgcagtagcaccttgcagagtttagactctagtgttgaaggttctctatttgctgaggagttgcttaagcataatctaacatgttgaatgtatttcctgtatgttccataaacataatctaacactcgggtgttgtttcgtcaaaaa

SEQ ID NO: 239 - DNA, 1267 bp, Oryza sativa
caccctcccggcggccggagcggcgcgacttcccatctaacatattgcttccggcagccgccgccggacaccatggctgactctccgagcccacgcctggacgaggaggacgccttcggccgcgacttcaactcgtccccttcgcccacagccccacccgcccgctccggcgagaagaggccgttcggcgatctggacgacgatgacgaggacgttttcgcttccaagaagggaaagacaaaggtggaagaaagtgcgccaggtgctgccacgggaatgattctgtctcttcgcgagagtttgcagaactgtaaagataatcttgcgtcatgtcaggtggaacgggaggctgccaaatcagaagttcaaaagtggcattcagcatttcagaacattccagctgtacctgctggaaccaatccagatcctgtttcggttgtttcttatctcaataacctgaagtcgtcggaagaatcattgaaggagcagctggagaaagctaagaaaagagaggcggctttcattgtaacatttgcgaaacgtgaacaagaaattgcagaactgaagtctgcagttagggatttgaaaactcaattaaggccaccatcgatgcagacaaggagattattgcttgatccagcaatccacgaggaatttacacgattaaagaatcttgtggaggagaaggagaaaaagatcaaggaactacaggacaatgttgctgctgtcaattttactccatccagtaaacatgggaaaatgctaatggccaagtgtagaacattgcaagaggaaaatgaagagattggggcgatggcttctgaaggaaaaatccatgaacttggaatgaaaattgcagttttgaagactcggaacaatgaactcaggaatcagttcaatgagctgtataaacacatggatggtctaacaaatgacgttgaaagatcaaatgaaatggtggccattcttcaagatgagttagaaacaaaagatgtagagctgagaagattgaaggagatgcttgcccagaaagaagcaactgatgagaacaaaatacctcaagaaaatgacgtcgctggagatgatatagttgctgccgccgagagtcagccaataaaagtagaaacataagctacgccttcagcagtcatttctagagtagcttgcgttctcaacattcttattattttttgtatcatgtatcagaagtgtttacttgtgtaatttatctaatgtcgtttattctaaaaaaaaaaaaaaaaaaaaa

SEQ ID NO: 240 - DNA, 2396 bp, Zea mays
aacaattcgcccttactactatagggctcgagcggccgcccgggcaggtgccaccactaccagcctgcccgtgccgtgcccacgccccactgcacagcgcaccatccgcgcctcttctcttctcttctcctccccaaggccaagccccagccccagctaccgcgccccctcctgtctgttccaattccaccagcgtcggcctagctacctggccgtcccctctccgagtacggtcggaagcctcagctgaaggatctggacgacgggacaggttctgtttggtcttcataaagtagagcactagctagaagacatattcacacgcatcagctatcaaattgcaagcttagaattgacctcaaagttgggacatgcttgtcttaccagaagcaactgatagcttggagttgtagtccgtccggactgtctgctggaccagtatggctgacactccaacttcccgcatggtgcacccctttggcgacgtcccaaggcagactcccaagcaattcctgtattctggcaacccgcagcacctctgccatccgtaccagtcagctccggacacccatgtcgtgccgcagcgctgttacaccgtgaggtctcagtctcactcgccaaataatgctggttctcaagaccatgagactcacaagcagtacacgctggagtcctcggcggcttccggttgttcaaggcatggttctccctccagccaaagcgtccatgccgggagtggcagccctgtgtctcacgacgacagccactccggctccacgaacggccatggatcacctgtgagcgcgtcgtgtgtcaccggcgaggaccctactgatctcaagcagaaactgaaggatcttgaggctgtaatgctggggacgtctgagactgaccccgagatagtcaacagtctcgagatctccgcggcaaaccaactctcgttggagcccgaggagtgggagcacatggtgagcatgcccagagggaacctgaaggagctgctgattgcctgcgctagggcagtggaacgtaacaacagctacgccattgatctgatgatcccagagctgaggaagatggtttcggtgtccggcgagccgcttgagaggctgggagcctacatggtggaaggtcttgttgccaggctcgcggcctccggcagctcaatctacaaggctttgaagtgtaaggagcccaggagctctgatctcctctcctacatgcacttcctgtatgaggcctgcccctacttcaagttcggctacatgtcagccaacggcgcgatcgcggaggccatcaagggagaggacaggatccatatcatcgacttccacatcgcgcaaggggctcagtgggtctctctcctccaagcccttgcagccaggcctggcgggccaccgttcgtgagggtcaccggcattgatgattcagtctcagcttacgctcgaggcggcggtctggagttggttggcaggaggttgacacatattgctggcctctacaaggtgccctttcagttcgacgcagtcgctatctcaggcagtgaggtggaggaggagcatctaggcgtcgtcccaggcgaagccgtcgccgtcaacttcacccttgagctgcaccacatccccgacgagaccgtgagcacggcgaaccaccgggaccggatcctgaggctggtgaagggcctgtcgcccaaggtgctcacgctggtggagcaggagtccaacaccaacacggcccccttcgcgcagcggttcgcagagacgctggactactacacggccatcttcgagtccatcgacctggcgctgccgagggacgacagggagcggatcaacatcgagcagcactgcctggcccgggagatcgtgaacctggtggcctgcgagggcgaggagcgggtggagcggcacgaggtgttcggcaagtggaaggcgcggctgatgatggccgggttcagcccgtccccgctcagcgcgctggtgaacgccaccatcaagacgctgctgcagagctactcgccggactacaagctcgccgagagggacggcgtgctctacctcggctggaagaacaggcccctgatcgtctcatcggcatggcactagtgttgacttcagagaatgttgacctgatggagaatgtttcttgtaaccttcgaagtacctcttagtggtttagatatgtttggctggtcactggaactatctataggaagcctatggtgatagatactgagttgtagtagaacacatatagcctaaatgcctaatgctgtgatggcagtcactaccagcctagcctagaacaggttgatgatgtgtagtagtaagtttgggtatatgtttcagttaatcagtttaaaaaaaaaaaaaaaaaaaaaaaaaaaaaaaaaaaaa

SEQ ID NO: 241 - DNA, 2035 bp, Zea mays
ccacgcgtccgcgaactgagcaagcttttcgacagagaacgtatccctgaacgtgttgtgcatgcacggggagccagtgccaagggtttctttgaggtcactcatgttttctccccccttctcgccttctccttctcccccctagtctagaggcgttgctccccaatcccttcggcccgcccgctcgacgtgatcccaccggcagccatggatccatacaagcaccgcccgtctagtgggagcaactccagcttctggaccaccaactccggcgcccccgtctggaacaacaactctgccctcaccgtcggacagcgaggtccaatcctccttgaggattatcatctaatcgaaaagcttgctcagttcgacagagaacgtatccctgaacgtgttgtgcatgcacggggagccagtgccaagggtttctttgaggtcactcatgatgtctctcaccttacatgtgctgattttctccgtgctcctggggtccagacacctgttattgtccgtttctctacagttgtgcatgagcgtggaagccctgagaccttgagggatccacgtggttttgctgtcaagttctacaccagagagggtaactttgacctcgtgggtaacaacatgcctgtgtttttcatacgagatgggatgaaattccctgacatggtccacgctttcaagccgaatccaaagaccaatttgcaggagaactggagaatagtagatttcttctctcaccacccagagagcctacacatgttcaccttcctctttgacgatgttggcatcccactcaactacaggcacatggagggctttggtgtcaatacctacaccttgatcaacagggatggaaagcctcaccttgtgaaattccattggaagcctacttgtggtgtgaaatgcttgctcgacaatgaagctgtgactgttggaggcacctgccacagccatgcgacgaaggatctatatgattccatcgcagctgggaattaccctgaatggaagctctacatccagactattgatcttgaccatgaggataagtttgactttgacccgctcgatgtcaccaagacctggcctgaggatatcatcccgctgcagcccgttggacggatggtcctgaacaagaacgtcgacaacttctttgcagagaatgaacagattgctttctgcccagcgattattgttcctggaattcactattctgatgataagctgctccagacgagaatcttctcctatgctgatacccagaggcaccgccttggtccaaactatctgatgcttcctgtgaatgcaccaaaatgtgcccaccacaataaccaccatgatgggttcatgaacttcatgcacagggacgaagaggtgaactacttcccttcgaggtttgatcccgcccgtcacgcggagaaggtccccattcctccccgtgttctaacaggctgtcgtgagaagtgcatcattcagaaggagaacaacttcaagcaggctggcgagagatatcgttccttcgaccctgcaaggcaagaccggttcatccagcgatgggttgacgcactgacagaccctcgcgtgacccatgaacaccgtaccatttggatctcctactggtcccagtgcgacgccgctcttggccagaagctggcttctaggctgaacctgaagccgagcatgtaagatcgacgaggaagaaagcaggcaccggtggccaaggatgcaacgcaacatggagcgtgtgatgtttacaccaatataattgaataaacaggggatgtgcgcgtcgttgtacttatgctgatgctgatggtcggtggtcgattatatatactggaacttctggtgtatgctcttctcttctggggagacgtaatgtaacgaagaagaatgtgtcattgtggcctgtggtacaaaccctgctgtgtatgggcctgtctataagaaacagcgatgagctgtgacgttatgtttctgacagtttatttactaatgagcacatctttaatttactagaaaaaaaaaaaaaaag

SEQ ID NO: 242 - DNA, 2164 bp, Zea mays
ccacgcgtccgctagctagctgaatcacaatggatcctaccaagttccgtccgtccagtagccacgacacgacggtgacgacgacgaacgctggcgctcctgtgtggaacgacaacgaggcgctgactgtggggcctcgcggtcccatcctgctggaggactaccacctgatcgagaaggtggcgcacttcgcgcgcgagcgcatcccggagcgcgtggtgcacgcgcgcggcgcctcggccaagggcttcttcgagtgcacccacgacgtgacgtcgctgacgtgcgccgacttcctgcgcgcgcccggcgtgcggacgcccgtgatcgtgcgcttctcgacggtgatccacgagcgggggtccccggagacgatccgcgacccgcgcgggttcgccgtgaagttctacacccgcgagggcaactgggacctgctgggcaacaacttccccgtcttcttcatccgcgacggcatcaagttccccgacgtgatccacgcgttcaagcccaacccgcggtcgcacgtgcaggagtactggcgggtgttcgacttcctgtcgcacctccccgagagcctgcacaccttcttcttcctcttcgacgacgtgggcgtgccgtccgactaccgccacatggaagggttcggcgtgaacacgtacacgttcgtgagcgcggcggggaaggcgcagtacgtgaagttccactggaagccgacgtgcggcgtgcggtgcatcctgacggacgaggaggcggcgctggtcgggggacggaaccacagccacgcgacgcaggacctgtacgactccatcgcggcggggagcttcccggagtggacgctgtacgtgcaggtgatggacccggacacggaggagcagtacgacttcgacccgctggacgacaccaagacgtggccggaggacctgctgccgctcaggcccgtggggaggctggtgctggacaggaacgtggacaacttcttcaacgagaacgagcagctggcgttcgggccggggctggtggtgccagggatctactactcggacgacaagatgctgcagtgccgggtgttcgcctacgccgacacgcagcgctacaggctgggaccaaactacctgatgctgcccgtcaacgcgccgcgctgcgcgcaccacaacaaccactacgacggcgccatgaacttcatgcaccgcgacgaggaggtggactactacccgtccaggcacgcgccgctgcggcaggcggcgccgcccacgccactgccgcccaggccagtcgccgggaggagggagaaggccaccatacgcaagcccaacgacttcaagcagccaggggagaggtaccgctcctgggacgccgaccgacaggaccgattcgtgaggcgattcgccgactcgctcggacacccaaaggtcagccaggagctcaggtccatctggatagacctcctcgccaagtgcgacgcgtcgctggggatgaagattgccacccggctcaacatgaagccaaacatgtgatgcttctgctgaataataatgaagacacgcatgcatgtcgtcgtcaggaacaagagaaataatacaagaccagcacgcatgggcatactctatattatagatggccaaaaagcacgaggcccgtgagcccggcacgaagcccgctttttgggcccggtccgagcacggcacggtagaataagcgggcgggcttgaacaggaaactaggcacggcgggctagcccggcacggcctgtttacctctaagcccgttaaacccgtttttttttacactaaaacgtgcttaccggcccgtttagcccgcttttcggcccgttatttcgtgctaaacgggccggcccggcccgtttaggcccgctgcgggccgggcttggacagaaacttaagcccgctggctcagcaggcccggcccggttttggccgggcttcaccggcccgtttggccatctctactctatatatatgtatagcccgtgcccgtgtccgcatttgtaccaatacaagccaagcctagtcaagtggatgtgtattattgttgcgctatcacatacatgtacccctgctacctgaagatggatgtgtatcgagttatcaaattaaggcaccagcagcaaacgctatatatatattgcataaaaaaaaaaaaaaag

SEQ ID NO: 243 - DNA, 1294 bp, Zea mays
ccacgcgtccgcaactggaggccaatagaatcgctcgcttgcgttatcttgttcgcctcgtcagttgttgtttcctcccttcccatcccccactgctcagcagtcagtcagcactcgccacccacacgcctccgctccgcccacggttccactccaactctccgatctccaggaatccgcggctgaggcgccggcgatggcggctcccatggtcgacgccgaatacctgcgccaggtcgacagggcgcgccgccacctccgcgccctcatctccaacaagggatgcgccccgatcatgctccgcctcgcatggcatgatgctggaacttatgacctgaagacaaaaactggtggtgcaaatggttcgattagatatgaagaagagtacactcatggttcaaatgctggtttaaagattgctatcgatctccttgagcctatcaaagcaaagaatccaaagataacatatgcagacctgtatcagcttgctggagtggttgcagtcgaagtgactggggggccaactgttgaatttattcctggcagacgtgattcgtcggtgtgcccccgtgaagggcgtctgccagatgctaagaaaggtgcaccacatctgagggacatcttttatcggatgggcttatcggacaaagatattgtagctctatcagggggacatactctgggaagggctcaccctgagaggtctggattcgatggtgcctggacaaaggagcctcttaagtttgataactcatactttcttgagctgttgaatgaggaatctgagggacttttaaagctcccaactgacaaggcactgttatcagatcctgaatttaggcgctatgtggagctctatgcaaaggatgaagatgcgttcttcaaagattatgctgaatcacacaagaaactctctgagcttggcttcacgcctcgcagcacagcaccatccaaatcagatcttccaaccgccgccgtgcttgcacagagtgcctttggggtagcagttgctgcagccgtagttatcgctggctacttgtacgaggcttccaagaaggccaagtagagggcgaagttcttctccacatggctttgctttagtaagtctgaagatcgaataacaggaccatatctgaagatcgaataacggatcatataaatgagttactcggaaaatgttctgaaatccttacgaacagaacgttgccttcatgtttacactgtactcatgagtcacagtgatatggagatggcatagcctactattggaagtaaaaaaaaaaaaaaaaaaaag

SEQ ID NO: 244 - DNA, 1595 bp, Zea mays
gcgtgagatcgaggagaagaaggcaagcaggcagagaaagagagagagagagagagatggatgaggagtacgacgtgatcgtgttggggacggggctcaaggagtgcatcatcagcggcctcctctccgtcgatggcctcaaggtccttcacatggacaggaatgactactacggaggagaatcttcgtccctgaatctaaccaagctctggaacaggttcaagggcaacgacagccctcccgagcacctgggcgtcagcaaagagtacaacgtcgacatggtgcccaagttcatgatggcaaacggcgcgctggtccgcgtcctgatccgcaccagcgtgaccaagtatctcaacttcaaggctgttgacgggagctttgtgtacaacaatggcaagatccacaaagtcccggcaaccgacgtggaggccctcaagtcgaacctgatgggcctgttcgagaagcggcgcgcccggaagttcttcatatacgtgcaggactacgaggaggacgaccccaagtcccacgagggcctggacctcaacaaggtcaccaccagggaagtcatctccaaatacggattggaggatgatacggtggactttatcgggcatgcgctagcacttcaccgggacgacagctaccttgacgagcctgcaatcgacactgtcaagaggatgaagctctatgcagaatcactcgcacgctttcaaggagggtccccttacatctaccctctatacggtctgggagagctccctcaggcctttgcccgcctgagcgctgtttacggtggcacgtacatgctgaacaagccagaatgcaaggtcgagtttgatgagagtggaaaagcgtatggagtcacttctgaaggggagaccgccaagtgcaagaagatcgtctgcgatccttcgtatttgccagacaaggtgaagaaggttggaagggtggcccgcgcgatatgcatcatgaagcatcctatcccggacaccaaggactcgcactccgtgcagatcatcctccccaagaagcagctaaagcgcaaatccgacatgtacgtgttctgctgctcctacgcccacaacgtcgcgcccaaaggcaagttcatcgccttcgtctccaccgaggccgagaccgacaagcctgagatcgagctcaagcccgggatcgacctgcttggccctgtagaggagaccttcttcgacatctacgacagatatgaacccgtcaacaaccctgacgacgactgctgtttcctcacaaatagctatgactccaccacccattttgagacgacggtcaaggatgtgctcgccttgtacaacaagatcactggaaaggagcttgatctctcagtcgatttgaacgcggctagtgctactgagcaagaagctgcttgaacaccccggcggcctctttttttgcagctctacacaatagctatttcttcgattttttttttaaaatgttccatagatggataagtttattgatgaaatccattattgtatgttttttggagttccgtttttgtcacatgcatgtaatgaacaacggtggcaatcatctataaaggttccattattcgctcgcga

SEQ ID NO: 245 - DNA, 1675 bp, Glycine max
gaaaccctaaaccccgttttcggtgagatcgagatcgatcgaacatggatgaggagtacgatgtgatcgtgttgggcacgggtctcaaggagtgcattctcagcggtcttctctccgtcgatggcctcaaggttctgcatatggataggaacgactattacggaggagaatccacttcgctcaatcttattcagtttgaactgcgaaatgatgattttctctgtcctcctcttcagctttggaagagattcaggggagatgacaagcctcctccacatttgggcgctagcagggactacaacatcgatatgaaccccaagtttattatggctaatggcaatttggtgcgggttctcatacataccgatgttactaagtatctctatttcaaagctgtggatgggagctatgtgtttaataaaggaaaggttcataaggtgcctgcaaacgacatggaggccttgaagtccccacttatggggctatttgaaaaacgccgggcacgcaagtttttcatttatgtgcaaaactacaacgagagcgatcccaagacccacgaggggatggacttgacaagagtgtctactaaagagttgatagcaaaatacggccttgatgataacactatagacttcattggtcatgctttggcgcttcatagcgatgatcgctacttggctgagccagcactggacaccgtgaagagaatgaagttatatgcagagtctcttgcacgctttcaaggagggtcaccttacatatatcctttgtatggtttaggagagcttccccaggcatttgcacggcttagtgctgtttatggtggaacatatatgttgaataagcctgagtgcaaggtagaatttgatgaggaaggaaaggttgttggtgttacatctgaaggggaaactgcaaagtgtaaaaaagttgtttgtgatccatcatatttgcctggcaaggtgaggaaggttgctagggttgcaagggcgatagccatcatgagccacccaatccccagcactgatgattcccattcggtgcaaattattttaccacagaaacagttgggtcggaagtcagacatgtacctattttgttgttcgtatactcacaatgttgctccaaagggaaaatttattgcatttgtatcaaccgaggcagagacagatcagccggcaattgaactgaaacctggaattgaccttctaggacctgttgatgagatattttttgatatctatgacagatatgaaccagtcaacgaacccactttggacaactgctttatatcaacaagttatgatgctactactcactttgagtcgactgtggatgacgttctcaacatgtatacattgataactggaaaggttattgacctcagtgtggatcttagtgctgctagtgctgcagaagagtaaagaaaactcggtgatgatctgttgctgatgggttccgtgatgatggacttgacaacgaatgttattaacgttttataataaatattttctttttttaaaacaagatttgtgtggctggggaactttttcccgtccagaagctctgttgtgtgttcacatacattgccttctgcagtggttttagtttggtaatgtagtgttattttcatattgttaaatgttaattgcacgtctctccaaccatttcaaaaaaa

SEQ ID NO: 246 - DNA, 1696 bp, Zea mays
cggacgcgtgggcgcggcgccggcgcgtcgggtcgtgcccatcacgttgtctccactccgtcgcctctcctctcctctccgtccctgcgccacgcgggggagattaaagcgaagcgcctccccgctcacctctcctctcgtcgtgcgttggatcaaagtatcaaaccaatctcccctcgccgtccggccggcgtgcgcgcggggcctctttttttggagccttgcgccgcggcccgttcctcctgtccgaaataatccgcctcgacgtgttcgcctccccctccccctccctctctcccctcccctcgcgactcgtctcgtgcgtgactgcgtgctcgctctccttttcgctgcgctcatctcggtatctgtgccagcgctcgcctctccccgccggcccgccctccttcctttccttgtctagccgaaggccgaagccactgcgcgcgcgtgcgtgcgacgatgtcgtcggcggtggaggccatctcctgccccaaggtcgacgtccccgccggcccggagccgggggagccggccaaggaagcggcgccgcccgcggagcactgcgacacggcgcccaacggcaagtgcgcgccgcgttgtcacggggaggaggaggaggaggaggaggacgaggaggacgaggagaaggcccccaaggccatcgacctcggtcccatggtcagcatcaaggagcagctcgagaaggacaaggacgacgagagcctgcggcgatggaaggagcagctcctcggcggcgtggacttgaactccgtgggagagacgctggagccggacgtgaagataatgagcctgtccatcctgtcgcccgggcggcccgacatcgtgctgccgctgccggtggagcccaacggcaagggcgtgtggttcaccctcaaggaaggctccccgtaccggctcaagttcaccttctccgtcagcaacaacatcgtctccggcctccgctacaccaacaccgtctggaagacggggctcaaagttgacagagccaaggagatgctcggcacgttcagcccccagctggagccctacacgtacgtgacgccggaggacaccaccccgtcgggaatgtttgcccgggggtcctactctgccaggaccaagttcctcgacgacgaccgcaagtgctacctggagatcaactacaccttcgacatccgccgggagtggccgtcgacgagctgaccatccttccctccctccatcggtggcctgagcagaccagtcgtttcgttctgtgttcttccttttctatgttgcctcgtcctgtcctgtcactaggttttttgtttgttcaccgtcagcttgttcgctgcggcttgctgcggctgcaatccggctgcggctgcggcttctacagtatttttctctctatggattgcagctgcagcagtccaaacagctgcaacagtgtcggcttgtagccagccgaacacgccccgtgttgctgcgtgcgtgacgcacggtgcgtctatgtgccctttcccatgcgccagttgtctgctgtgttgacaccgttactagacagtgcaaatgtcaggtcggtctaccggactgtgcgtgcgtcagcgtgttcaacttgtcgatcagggtctcgttttttccgaaccgcctgttgagttaagacttcagagcaatgaagctgcgttctgcgtagtaaaaaaaaaaaaaaaaa

SEQ ID NO: 247 - DNA, 660 bp, Zea mays
tagagcgccgccatggctcaggtaaggggcagtgctcgtggcactggcagtggcagcagcgccgccgcgctggcgctggtcctcctgtgcgcgctcctccgcggcgagttcgccgagtcggcggtgtacacggtcggcgaccgcggcgggtggagcttcaacaccgctagctggcccaacggcaagcgtttccgcgccggcgacgtcctcgtgttcaggtacgacgccagggcgcacaacgtggtgcccgtgagcgcggcggggtacagctcgtgcagcgcgcccgagggcgccagggcgctcgccaccgggaacgaccgcgtcacgctgaggcgcggcgccaactacttcatctgcagcttcccaggccactgccaggccggcatgaaggtcgccgtcaccgccgcctaggcactgcagggcggccaatcagccggcggagagcgccgcgctcacggagtaaagcacgtagctaattagacggtgctgccttgctgttcaataatatcgtctgtcgtcgcgtacttcataacctgcgcggcgtgttagtagttgtttggtggtgtttggcgactggcactacagagaagtgtcagatcgagtgatgtacttgctaccaacaataaaggtatacacggtttgtgtgttcacttgaaaaaa

SEQ ID NO: 248 - DNA, 724 bp, Zea mays
ccgatctgcatttcactcgttccacaccgtcgttggccggcccatagctctccccctcctggttagtgtagtgagcgcagcgacgagtgcaacggtgagagtaccgagatggctgagggaagaggcagtgcaagggccatcggcgccatggcgttcgccgttgcctgctgctactgctgcgtcgccatcgccgacgcagccaccacctactacgtcggggacagcaacggctggtccttcagcagccccagctggcccaacggcaagcacttccgcgccggagacactctcgtgttcaggtacatcccctggatccacaacgtggtggccgtggacgaggacgggtacaacggctgcacgacgccgccggggtcgcggacctacacgtccggcgccgacagcgtgacgctcgccaggggggacaacttcttcatctgcacccggttcggccactgcaacctcggcatgaagctcgtcgtctatgccgcgtgatctgtcagagctagcgactggtggtggtattgttgactgggtgcgctcaatgatcggctgtgcttgctctcgagcgaactggtctgtttgatttgtgctatttcgtgtaggctcagtcagtcgcttggttctaatccgtaacggcttctactacttttacaatgttgttgtaacaatacaaacatccagctttaattgaagctaacggatatcgcatgtttgaacaaaaaaa

SEQ ID NO: 249 - DNA, 863 bp, Glycine max
ggacacaatcaatcccattattaaagggataagccttcaaccttgcaacacaacactacaacctaaggtctgcactacgagaatgtctcagggaagaggcagtgcatctttacctattgtggtcactgtggtttcactactgtgccttttggttcttttggaacgtgctgatgcagcaacttacaccgttggaggacctgggggatggaccttcaacactaatgcttggcccaaaggaaaaagattcagagctggtgatatcctaatcttcaattatgattcaacgacccacaatgtggttgctgtggacagaagtggatacaacagctgcaaaacgccagggggtgctaaagtgttcagttcagggaaggaccaaatcaaactagcaagagggcagaactacttcatatgcaactaccctggtcactgcgaatctgggatgaaagttgccattaatgcagtgtgatggtgcttaatacttcttgagttgaagtgaaaattaagttaatggtcaattagctagcattagtaaatgttagtgtgtgctcatgtatgtactttttttatatgaagctgttatatatatttattaatcactatagttttgtgaagcaaagtgggagtgagctggcttggtagatcaattgttcctatgtttggtatgtgttgtgtagtgggagtataaaaatggtccattagtcacgggctcttcttattagacattggatctacatattttgaagttattgaaagtctcagagccaattatctgtatctgtgtgtcggtgtcacagtgtatggttctattactgattttgtttgcttcaataaattaaatttcctaaaaaaaaaaaaaaaaaaaa

SEQ ID NO: 250 - DNA, 1075 bp, Zea mays
gcattcatcactttcctgactcacctcactcgatcatcctccagtcttgtcgtcgcctgctagcttgaatattacgccagcatctcgccaggaaaatggcgggcactactccgcgccgcttgctcctggtcatcgtccccctcgtcgccgtcgtgccggcgtccgcaaaagactacatggtcggcgactcgtccgggtggaagtccggagtggactacgctgcctgggccaagggcaagccgttcgccatcggcgacacgctctgtacgtgccaaataaagctcgtcgtcagattcagatacgtacagtacagtagccgccaatgctgtgtccatgcatgcatcatgttctcgtatataatgtcagtggcacgttcgttcgatcgtccgcgtgtatatctcagtatctcgtgaaggagaaatccagtgaccccgcgcggcctgccggttcttgcgttgcagcgttccagtacagctcggcgcactcggtgctggaggtgagcgaggcggaccacggcgcgtgctcggcgagcaacccgctgcggtcgcaccagggccagagcaccaccatcccgctcaccaaggccggcacccgctacttcatctgcggcgcccccggccactgcgcctcgggcatgaaggtcgccatcaccgtctccggcggcggcggcggcggcagcagcagcgccgacaacaccgcgactccgtcgggtccctccgtgcgggcgatgaacacgaagccggcgttcggtctccggtccggtggcgcgacgacgacggacgagtcggactccagcgcggctggcagcggcgcccgcctcgcgatgggcctgctgttcggggccgcgggcctcgctgcaataatgggctgaattgaggacccgctagggaaaaggcagtgcggtttcacgaatttcctatttagtttcctgcgttctctgcttgcgtccccgagtcgcgaggctgagtgttcggccgtgcatatttttcgtatacttttgctgtgtttttttggggctattcgttgttcaatactgttgtttcagaataaaatttcatccttgaccattcaaaaa

SEQ ID NO: 251 - DNA, 1003 bp, Zea mays
ccacgcgtccgctgcaagctcatccgtctctgtcgatcagcaagaggccggggtcagaggaatggcggcgacgtcgcggctggcgctggccctcctgctggccgccttggtggcggcgtggcagctgccggcggcggcggtggcggccaactacacggtgggcgacgagaaggggtggaacccggacgtggactacacggcgtgggtgaagaagcacaagccgttctacaagggagactggctcatcttcgagtaccagaacgggcggtcggacgtggtgcaggtggacgaggtcggctacgacaactgcgacaaggccaacgcgctgagcagctacagcaagggccacacctacgccttccagctcaaggacgccaaggactactacttcatctgcagctacggctactgctacaacggcatgaagctccacgtcacagcaaagtcatcatcctcatcctcctcttcctcgtccggatctgactcctcctcctcctcctctgacgacgactcttcctccccctcgccgcccgccaagaagtccaaggccaagaccagcgccgcgccgccaccgtcactcctcgctgccacgcccatggctgccgccgccgccgccgccgctgctctgctcctcaacaggatgctctgatctggtctggtctggtctgctctgcgtatgtagtcacgtcacgtggctccagatcttgcttgggcgctgatgagctacactacactacactagtttttttcttctgcttttagtttttttccccctcaccacttgagattggggaggcatcttctgcttctagcttgcttgctgcttcttgaattgcgtgactgttattggttggttcttgcttccattattttgcctttttctttctttctttcttgcttccagcttgttgttgatgcagttttttttttcaagagacaagattagtataatgtcaagtgtgaatgaagagctctatttatttatcaaaaaaaaaaaaaaaag

SEQ ID NO: 252 - DNA, 1264 bp, Zea mays
acttggcgggcgaaaggcgaaaccgacgtgctcccgggcgggcggcgacagcggcatggagcgagagcggcaggcagtggcgaggaacaggaaggtggtgctgcgcgggtacatcgaccgcgcgcccagggaggaagacatggagctcgtcgacggcggcgccgtggagctgcgcgtccccgagggcggcggcggccccgcggtgctggtgaagaacctctacctatcctgcgacccttacatgcgcggcaggatgcgggacttccgcaactcctacatcccgcccttcaaacctggatcacctattgaagggtttggcgtggggagggtggtcgactccactcatccaggattcagtgctggtgacgttgtttccgggatgactggatgggaggactacagtctgatcaccaagcctgaacagctcaggaagatccagcaaagcgacataccactctcctatcatctgggccttcttggcatgcctggctttacagcttatgttggattctatgagatctgttcaccaaagaaaggggagtttgtttttgtttctgctgcatcgggagcagttgggcaaattgttggtcaacttgcgaagctccatggttgctatgttgttggaagcgctgggacagatcagaaggttgagctcttaaaggaaaaattcggatttgatgcggctttcaattataaggaagagcctgacttgactgctgccctgaaaaggcacttccctgaaggcatagacatctacttcgagaacgtaggcgggccgatgcttgatgctgtactactcaacatgcgagtacatggccgcattgcggtatgtggcatggtttcccagcacggggtgactgctcctgccggaatccacaacctgttctccttgataagcaagaggatagagatgaaggggttcatccagagcgattacgtgcacctgttcccgcagttcgtcgatgacatcaccaggcattacagagacgggaagatcgtgtatgtggaagacatgagcgttgggctggagagtgggccggcttccttcgtcggtctgttcagcggtaaaaatgttggcaagcaggtcgtctgtgtgtcgcgggattgaaaggcctggattttgttccctactggccagtacccttaaataaaatcaggaaaacattattttcaactccgagaaggaccccactagccagtaccacggtcgtaaatctcaaggtcatgtttattttttctcctgtattaaaaaaaaaaaaaaaaa

SEQ ID NO: 253 - DNA, 1323 bp, Glycine max
attcggctcgagattactccctatattaacccaacaatgcaaaacaacacactgaactctcttcactgaaacgacacacacaaaaaaaagctttagtttaggatgacccaagtgaggaacaagcaagtggttctaagagattatgtcaccggattccctaaagaatccgacatgaacattgttgaaggcaccataatattgaaggttccagaaggttccaatgatgtccttctaaaaaatctctacttgtcatgtgatccatacatgcgactcctcatggccaaggaccgttctttcggagatggctccttcacccttgcctctccattgaaaggatatggtgtgtctcaagtgctggaatctggacgtccagattacaagaaaggtgatttagtgtgggggattactaaatgggaagagtatagcttggtcccctcatctctcatacatttcaaaattgagcacactgatgtcccactttcctactacactggaattcttggtatgccaggaatgactgcttatgctggtttctttgaggtaggttctcccaaaaaaggagacactgttttcgtttcagctgcctctggtgctgttggtcaacttgttggccaatttgctaagttgactggttgttatgttgttggaagtgctggaagtaaagagaaggtggatctgctgaagaataaattaggatttgatgaagcttttaactacaaagaagagccagacctcaatgcagctttgaaaaggtactttccagaaggcattgacatttactttgagaatgttgggggcaagacacttgatgcagtactcccaaacatgaaatttcatggccgcatacctgtctgtggaatgatctcgcagtacaatcttactcagttcgatggtgtaacaaatttggcaaatctcatatttaagcgggttaaaatggaaggttttattgcaactgatttctatcatttatatccaaaattcttggagtttgtcctgcctcatatcagagaagggaaggttgtgtatgtggaagacattgctgagggccttgagaagggccctgcagccttggttggcctctataccggtcgcaatgttggtaaacaagtggttgttgttactcacgagtaaaattatataaatatattgttattctctaagctttaattccgaattttcaattttctgttggatattgaaccttgcttttatggtttatgcagtcattcttctattttgttgatagaaattactacattagtgacattttgtgataaataaaacctctaatatatgctaatttgttaaaaaaaaaaaaaaagg

SEQ ID NO: 254 - DNA, 1216 bp, Zea mays
ccccgatggcgacgacggcgacgaaccggcgggtgatcctcaaggagtacgtggagggatatcctcgcgaggagcacatggagctgctccagggcgccgaggttcccctccgcctgacgggcgccgagccggccgggtccgtcctcgtcaggaacctctacctctcctgcgacccctacatgcggcccaagatgtcgcgcccgctgcgggagtcctacacggccgccttcgtcccgggcgacaccatcacaggctacggcgtcgcgcgcgtggtcgactcctccgacccgcgcctcgcgcccggggacctcgtctggggcatcaccggctgggaggactacagcgtcgtgacgccgcccgccaccaggctcctctccaagatctcccaccacggggtcggggagggggcgggcgtgccgctgtcctactacaccggcatcctcggcatgccggggctcaccgcgtacgtgggcttccacgagatctgcgcgccgaagaagggcgagaccgtgttcgtgtccgccgcgtccggcgccgtcggccagctggtgggccagttcgccaggctcgccggctgccacgtcgtcggcagcgccgggtcccgggagaaggtggagctgctcaagaccaggttcggcttccacgacgccttcaactacaaggaggagcccgacctcggcgccgcgctcaagcgctgcttccccgacggcatcgacatctacttcgagaacgtcggcggcgccatgctcgacgccgtcctgctcaacatgcgcgtgcacggacggatcgccgtctgcgggctcatctcgcagtacaacctggcggacggggagaaggacgccgtgcgcaacctcgccgccgtcatctccaagcgcctccgcctgcaggggttcatcgagcccgaccacaagcacctctacccgcagtacgaggcgtgggtgctgccgtacatcagggacggcacgctcgcctacgtcgaggacgtcgccgaggggctcgagagcgcgcccaaggcgctcataggactcttccacggtcgcaacgtcggaaagcagctcgtccgcgtcgccgacgacgagtgagacgcgcctcacttcgattggaccagacgatccatgtgtcactgttgctatgtttcgattccccattttcattttaataattaattgtgccaatggatgcttttgttcggaaaaaaaaaaaaaaaaaaaaaaaa

SEQ ID NO: 255 - DNA, 1165 bp, Zea mays
ccacgcgtccgctttaacgcccgaaacgaacacctgaaactacaacatggcggatctgatcaaggcagtcgatatccgaggcggtaaaggcgagcgagatgccctcttcatcaaccctcagacgccaaagccctcgcctactgaaggacaggccctcgtccgtgtcaaagcctttggcataaaccgcatggatatagtccagcgacgcggcttttacccgcttccgcctcaagcccccgcaacgctgggcgtcgagttcagcggcaccatcgagtcccttgggcctggtgaccacggtgcctttaagcaaggtgacgaagtctttgggcttgcctacggtggcgcctacgccgagtaccttgccgtcagcacacgcatgttgctgcacaagccgtcgtccatggactttgtgacatgcgctggcatcccggaaacctggatcacggcgacacaggcactgcaccttgtgcttggcttcaccaaaggtaagtcgatcttgtggcatgctggtgcctcgggcgtgtctattgctggcatccagctgtcaaagattgccggtgcatcccaggtctttgccacggccgggtcccaggaaaagtgcgactttattacctcgaagctcggagccaccgcggccttcaactacaagacgcaggactgggcggaggagatcaagaaacacaccgacggtaacggcgtcgactatatcgtggactttgttggtgcaagctacttccagcagaaccagacggccgctgcacgggacggacgtatcgtcctcctgggtacgctgggtggtgtcaagatccccgaagccgacatctcgcagatcctgtacaagaggctccgaatcgagggcagcacgctgaggagccgggacgaggagtaccagggaaagcttcgtgaccgcctcgaagagtatctcccagactttgagtcgggcaagttgaagatccttgtggacaaggttctgccatgggaggagatccaggaggctcacaagcacatggaagaggccaagaatctgggcaagatcatatgtactatctcgtaggtaccatccataactcgaaaataggagacaactcttgacgacgccacgcttgtgttcgtcaaagcaaagaaatccatcgctttcctcaaaaaaaaaaaaaaaaaaaaaaag

SEQ ID NO: 256 - DNA, 3950 bp, Aspergillus nidulans
gaattcttgaggagctagccgagtacggcactagcgctgtttccccgggatccgctggttccggagcgtgcgcggtgcctggtacaagggtagtttgcaactccggggtggtgatcatacgatatacccgttatgatttagattcagccaatattggtaagtcctttcggcagagcgctcgtctctatcgccgatcatctttgtgtgcggatggtcgtcgtgcagtactctgtaccccgttctactctagtgtcgcggcggacacggaagctagtaattccgttccgaaggcgatctcggagcccggtcagcgagtcaccgagtcacctgcaaatgcaatgcggcggccatgatccgttcacatcgccctcgtgcctgctgaaatgagtccgctgaacggcgtcgctcgttcctttccgcggcccttccaggccgtgaccaggcggccttttcgagttgtccagccggccatcgcctgtccgtccaacagccggtcgtttaaccattctcgatcattacgatcaacggggtctcagtcccccgctccatccccacgcgactcctcgaatcccgcgctgtccttcccttgcctcgacgcccaggaggccaagtccgctcttctttccgcgcgatctcttggttcaggccctgaaccctcctataccgccggccaccacgaacgattccattccgacgaaccgctgctccttgattggggcggtttgcttccagaatttgatatcgcatatgagacatggggccagctgaacgagaagaaggataatgtcattctgctgcataccggtctgtctgcatctagccatgcgcacagcaccgaagcgaacccgaagcccggctggtgggagaaattcataggtcctgggaagacgctagatacggacaagtactttgtgatctgcaccaatgtccttggagggtgctacggtagcacggggccctcgacggtggacccgtcggatgggaagaagtatgctacgcggtttcccatcctgacaattgaagatatggtgcgagcgcagttccgccttttggaccatcttggggttcggaaactctacgcgtccgtcggctccagcatgggtggtatgcagagtcttgcagccggtgttctgttcccagagcgagtgggcaagattgtgtcgattagcggttgtgctcgaagccatccgtacagcattgctatgcgccatacccagcggcaggtgttgatgatggatccaaattgggctcgaggtttctactacgattcgatcccacctcattcaggcatgaagctcgctcgcgagattgccaccgtcacgtaccgcagcggaccagaatgggagaaacgctttggtcggaaacgggctgatccgagcaaacagcctgcgctttgccccgactttctcatcgagacgtatctcgaccacgccggtgaaaaattctgcttggaatacgatgccaacagcctgctctacatctccaaggcgatggatctgtttgacctagggttgactcagcaactcgcgacgaagaagcagagggcggaggcccaggcgaagattagcagcggaacaaacactgtcaatgatgcgtcgtgcagccttacacttcctgaacagccataccaggagcagccatctgcctcgacatccgccgagcagtctgcttccgcttcagagaccgggtcggctccgaacgatcttgttgccgggcttgcgccgctgaaagaccatcaggtgctggtaatcggagtcgcaagcgacattctcttcccggcgtggcaacagcgcgagatcgcggagactctgattcaagcagggaacaagaccgtggagcatattgagctgggcaacgacgtgtctctctttggtcatgacacattcctccttgatgtcagaacgtcggaggcgcagttcgcaagttccgtactagtcggctcgcacataattgtacaatagaggtcaatgataacgaagcgtatttttcagtggactccaggagagtcgttatattttcgcaggcaagacgatgtcttaattgcttattcccggttacaatgactggggtgcgctggtgtcttcccagcggaatatatactgtggcgctaatgacaaacaaaacatttctaagccgatattgcctccgacatgaactcgaccttgacgttaaatcatacggacagaaaagaatactatctggctcaatcagtggattactgcatccagcttcactgtgaagagcagatcaagtgtcctcttatcagtcgctagcggcaggctcactttggcggttctcattctttagaggtttaaccatatagaataaccgtgaaggttgtacccaagagcagaaagggacctttgtcctcccatattcggtgcaacatcattaatatatcaatcgcaatggaaatggatttgctttgtgcgactgagtttgttgcttacattctgttgcttacaatatacctccgtacattacatggmccaattgatcactgggtwgagsggtcctccgtacattacatggaccaatgatcactggtgarcgggtgtcasctcgcggcggctgtttttccaccttcacctccccgatgcctcttcgtctaaataccgattacccttcctatcttgtgttttcgtcttcgagttactgatggagttggacaggtgaaaaggaaccgaatgaaacatattacactggcgcatgactggcgatatgacgttcacacacgattcctacactattgcgtggatatgcgccttaccgatagagttggcggcggcaaagatattcctkggacgaagttcmtcctcgacttcatcaaccaaaatcggatctcaatgtctacactcttkggagtattggcggccataatatagtggtggtctgtctccctgcggtgtctatgggacaacttcggctactgcgcggtggcatacttgaagtctacctacccgaatatccagttcgccttgacggtcggcatcggcggcggggtcccattaggaaaacctgatatacgtctgggcgatattgtggtcagcaagccatctgataccttcggcggcgtcattcagtatgattatggcaaaacggtgggcaatggacacttttaccatacaggatcgctcaacaagcctccgccgatactgctcaagacgatcgcccagatggagagtgattatatgctcggcaaaatctcactttgcaatatcatggccagcagcctgcataaagaggaagtgcagacacagtttccgagaccatcaaaagatcagctcttcaatcaacttacgaaccacgttgggaacaagtccgactgctcggcttgtgatacgagcgagctagtggatcgccctgaacgcacgacagaagagcctcaggtccactatggtctaatcgcttctggaaatcaggtaatgaaagatgcgagaacacgcgactctatcgctcaaggccggaacattctgtgttttgagatggaagctgcaggactcatggatgaaatcccgtcgcttgtaatacgaggcatctgtgactactgcgactcccataaacataaggagtggcagggtacgcagcatttgttgccgctgcctatgcaaaggcttgctcacattaattccgatacatggcaagggtgctgttcgaaatggagtcaaagaggatccgmattggatggtcccctttcgaaagaacccgggatttgttggtcgrraaggaaaatcagcaaaatcgatggattgatccaggagatccatggacctttaaaaatcagcaatctgcggactaggcagacgttggaaagacccagattgctcttgaactagcttatcgcacgcgcgaacatattctggatcccatgtacgacctatgcgagtattgaacaagcttgcgtgaatatagcccaacttgttggaatgcagggattaaagccaggggaa

SEQ ID NO: 257 - DNA, 2001 bp, Synechocystis PCC6803
cattctcttcatctgttgttccgattcccgggtggaccccaatttaatcacccaatcggaagtgggcgacctgtttgttattcgcaacgctggcaatattattcccccctatggagcagccaacggtggggaaggggcagccatggaatatgccctagtggcgctggaaattaatcagatcatcgtctgtggccattcccactgcggagccatgaaaggtctgctcaaactcaactctctccaggaaaaacttcctctggtgtacgattggctcaaacatacggaagccacccgccgtctagttctagacaattacagccatctggaaggggaagatttgattgaagttgctgtggcagaaaatattctcacccaactcaaaaacctccagacctatcccgccatccattcccggttacatcggggagacctttccctccacggctggatttatcgcattgaagagggtgaagtactggcctacgacggtgtactccatgattttgtcgccccccaaagtcgcatcaatgccctggagccggaggatgagtacgctctccatcccaactcacccctgatttcctacgatgcgtttaaggttcccggcaaggaacgtcctggtcgtgagaaagcaacagaatccccagctccccaactgtctcctttacctggttttggccatttgcccagggaacaggcggagcgcatttatcgaggctcccgttagactgggttaaaccccattgcaacctttgtcggataaacgcaaacaatgccaattttaggtaggaattgaccggatgctgaattcactaattgctgactttaggattatttttgagcgagatcccgctgcccgcaattggttagaggtgctgttttgttatcctggcttgcaagctttactaatacatagattttctcatcgtctttatactctcgggctacctttctttcctcgcctaatgtcccaccttgcccgctttttcaccggcattgaaatccatccaggggcccagattggccagggcgtgttcattgaccatggcatgggggtagtgatcggtgaaacggcgatcgtgggggactattctttgatttaccaaggggtaactctggggggcacaggaaaagaaagtggcaagcgtcacccgaccctgggggaaaatgtggtggtgggagctggtgctaaggtattgggtaacattgccatcggtgataatgtccgcattggggcggggtcagtggtgttacgggacgtgccagcagattttacggtggtgggggtgccagggcgcatggtgcatccttccggggaaagggttaatcctttggaacatggtaagttaccagattcggagggcaaagtaattcgcctattattagaaagaattgaattactagagcaacaggtggccaccttacaacagcaacaatcggaacaggcctgggaatcggattatcgctcctgctctgaaactgaccgggaaccggtgctctgtcgccttggcgatcgcgaaattgaagaatttttggggggcaccctctgatattctcccggtagccataactgggatgggatgtggaggggcataggaggtgactatttgttggttcacttaggaattttggacagaactttggtggttaaccacacactgtcgccaaacttgccccattttgctccgagggaattttctggggttggtgttgcgggaaaagccttggcgatcgcctttttttgtcctcaatttttggccggatgttttttcctgtttaataaaatctttctaattgtcttaagatgtgaacgcaaggccgtcctcaagggcggggtttcagacccattttttcgatgaataaccaacaactttggcaacgttatcaagattggctttattaccatggtggcctcgatttttacctggatgtgagccgcatgggatttagtgatgctttggtagaagatttgcaacccaagtttgccaaagcttttcaaga

SEQ ID NO: 258 - DNA, 701 bp, Synechocystis PCC6803
tatttcaatactcaccaagttttaagcaaacagcaatgacagaggtattaagggtaggacagccggcaccggatttcaccgccacggcgatcgtcgatcaaagcttccagaccgtcaaattaagcacctaccgtggtaagtacctggtgctgtttttctatcccctagatttcacctttgtctgtcccacggaaatcattgcctttagcgatcgccatagcgaatttactgccctagatacggaagttgtgggcatctccgtagacagcgaattttcacacctggcctggattcagaccgaacggaaaatggggggcatcggcaacattaactatcccctagtgtcagatctcaaaaaagaaattagccaagcctataatgtcctcgaacccgatgcaggcattgccctgcggggactattcattattgaccgggaaggcatcttacaatacgccaccgtcaacaatctctcctttggccggagtgtggacgaaactctgagggtactaaaagccattcgccatgtgcaatctcaccccaacgaagtttgcccagtggattggcaggaaggagacaaaaccatgatccccgacccggaaaaggctaagacctacttcgagacagtggcggaaccttaggtttgcccagccaaaaatgccgaccctaaatggataattttgactactaggctgactggtgag

SEQ ID NO: 259 - DNA, 1001 bp, Saccharomyces cerevisiae
ttgttttttgctacttacattgtttatcttgaaatatccaaagtgaacactattactgttttttgctcaagaatatattagccttacaagaacgtaaaaaaccaatcatggtagcagaagttcaaaaacaagccccaccatttaagaaaaccgccgtagtcgacggtatcttcgaggaaatttcactggaaaagtataaaggtaagtacgttgttctagcttttgtcccattggctttttcatttgtctgtccaactgagattgttgcgttttccgatgccgccaagaaattcgaagatcagggcgcccaagttttatttgcctccaccgactctgaatattccttactggcatggaccaaccttcccagaaaagacggtggattaggtccagttaaagttcctttgcttgctgataagaatcattccttatccagagactatggcgttttgattgaaaaagaaggtatagctttaagaggtttgttcataatcgacccgaagggaatcattagacatatcactatcaatgatttatctgttggcagaaacgtcaatgaagctttgagattagtcgaaggtttccagtggactgacaaaaatggtacagttttgccatgcaactggaccccaggagccgccaccatcaaacctgacgttaaagattccaaggagtatttcaaaaatgccaataattaatcttcgcacgataacgctaggccctattaaataattaaaaatacatcaccctatatatgataagaaagatggttttgtattattatgaaattgacttgaaagaatagtgtaacaaaagaaaaagaaactgtaattgaagaatgatatgcatttctatgtgtatattaacttaatcatctttatatccagaagacgcaaatgaccattcgacgtatttttcccatgcaggtttgttttcgtataatctgcctgcaagatccaaataacttcctactgttaacgaatccattgagtatggtttct

SEQ ID NO: 260 - DNA, 1581 bp, Saccharomyces cerevisiae
gattgtttaactatctcgccatatttagtgagggaagcgcgaactgtcgttgattgtttatgtgtttattttatgtttatcgttcttagagggtggcgcgcactgtgcgcgcatatgtgggccatacgcagacatatataaagaactaagaaaaggtgaaatgggactctacgatggcgctaatggtaaggtctcttttctatttgcctaattcagatacaatatataattgccaacctcaaagaagaagaattatgggcatattgaccttctccggtttccctcccgcgctctcgtatccgtctgcatttgacctcgagcaagcgctccactatgtctatatgtttaccagtaaaacttcttaacgtttgtgatattttttgaacttcaaccacattcagtatgcgtgtgtatataaagatattcctgatagcactatgtttatctttatacaatatacaaaaggtcacccaggacgagcagcgcggctatttttctatcattccgtgaatagcgaccaacggtcggcggctatttttttttttgcaattttttcgggatgggttccccggcaaaagctagccccggagatttttaattacgtaaagaaacaaggggccggatgttgctgctattggtatataaagagagaaggagagatatagaaaattgtgcttctagattctcgcagtaggatgagataaatttcaaagaagcaggaagcaaaggatgtttagtagaatttgtagcgctcaattaaagaggacggcatggacccttcctaagcaggctcacttgcaatcacagacgattaaaacatttgccacagcacctattctgtgcaaacaattcaaacaaagtgatcaaccaagactaagaataaactctgatgctcctaactttgatgctgacacaacggttggtaaaatcaatttttacgactacttgggcgactcttggggggtcttgttttctcacccagcagatttcacccctgtctgcaccaccgaagtcagcgcattcgccaaattgaagccggaattcgacaagagaaatgttaaattgatcgggctttcagtggaagatgttgagtcccacgaaaaatggattcaagacatcaaggaaatagcaaaggttaaaaatgttggtttcccaataattggtgacacttttagaaacgtggcattcctatatgatatggtagatgccgaaggattcaaaaatatcaatgatgggtcactgaagaccgtgaggtctgttttcgtcatcgatcccaagaagaagattagactgatttttacctacccttccaccgtcggaagaaacacttctgaagtgttaagggtaatcgacgccttgcaattgactgacaaggagggcgtagtaactccaattaattggcagccagctgacgatgtcattattcctccctctgtctccaatgatgaggcgaaggctaaatttggtcaatttaatgaaattaaaccctatttaagattcaccaagtcgaaataagctttgaaataaacgactttactatatacaggtatatgaagtatctctaactaaaacttttatcta

SEQ ID NO: 261 - DNA, 1572 bp, Saccharomyces cerevisiae
ctgatatgagcgtgcgtgtgagtgactttacacttgtctatccacgtcctgaagttgttcgtgttctttggatattcgtgttcaagctaataatgagcctttaaggtaatacaatttataaaccaccaccttggcctcgatctattgcgcttatgttgtctattagtaatcaagaaaagaaccctaaatcatcggcgtcccctgtggggctctcggaaaaaccggtcctgacgtcactgaaaagatttcggcacatggtcatgggaccagagaaaaattaatccgacatgtggaatatttccttccgttaaggtagtgagcgcggattttttctgatttgtaattatacggggagctctggccaaaaaggtcagtatttggtgatgaagttgaatatcatcttttgattttcttctgtatcattctttttctttttccacaccccttccggacggtattcacatattgttgagaggttaaatgaaaaataaaggggtggaaaattaaggacgagatgtaagggaaaagcataaacgaaacattatataaaggagcacaatttcctctcccttgccaattgtgcatataccgtttctttataacgaaatttcaacaaaccagaacaacacaagtactaccaataaccacaacaaaacatgtctgacttagttaacaagaaattcccagctggcgactacaaattccaatacattgctatcagccaaagtgatgctgacagtgaatcttgtaagatgccacaaacagttgaatggtccaaattaatttctgaaaacaagaaggttatcattaccggtgctccagctgctttctccccaacctgtactgtcagccatattccaggttacatcaactacttggatgaattagttaaggaaaaggaagttgaccaagtgatcgttgttactgttgacaacccgttcgctaaccaagcgtgggctaagagtttaggtgttaaggacaccacacacatcaagtttgcctccgacccaggctgtgctttcaccaaatccattggtttcgaattagccgtcggtgacggtgtttactggagtggtagatgggccatggttgttgaaaacggtatcgttacttacgctgccaaggaaaccaacccaggtaccgatgtgaccgtttcctcagtcgaaagtgtcttggctcatttgtagatgctatgtaatagacaataaaaccatgtttatataaaaaaaattcaaaatagaaaacgattctgtacaaggagtattttttttttgttctagtgtgtttatattatccttggctaagaggcactgcgtatacttcaaggtacccctgtgttttgaaaaaaaacaacagtaaaataggaactccgcgaggttcaggaacctgaaacaaaatcaataaaaacattatatgcgtttcgaacaaaattaaagaaaaagaataaatatagattaaaaaaaaaaagaagaaattaaaagaatttctactaaatcccaattgttatatatttgttaaatgccaaaaaagtttataaaaaatttagaatgtataaataataataaactaagt

SEQ ID NO: 262 - DNA, 1129 bp, Glycine max
cgcgtttggctttagcatttagcattttctctctctctctctccacgctgttactttatcatataacctgactcaccccacccaatcctattcccatcccatttgaacctctccttctcgcagagtgagcgagcaagcgaatatcccaatcccacaccaatggcatgctcagccacctctgcttccctcttctccgcaaacccaacacccctcttctctcccaaaccctctctctccctccaccttaaccctctccccacgcgcccttctccctccctcacgcgcccttctctctccctcacgcgcccttctcactctcgccgctccttcgttgtcaaagcctcctccagcgagcttccgctggttggtaacaccgcaccggatttcgaagcagaggctgtgtttgaccaggagtttatcaacgtgaaactatctgattacattgggaagaaatatgttgtgctcttcttctacccgttggacttcacctttgtctgccccacagaaatcactgctttcagtgaccgacatgcagagttcgaggcactaaatactgagatattgggtgtttcagttgacagtgtgttctcgcaccttgcatggatccaaacagatagaaagtcaggtggccttggtgacttgaactatcctttgatttctgatgtcaccaaatccatatcgaaatcttatggtgttctcattcctgatcagggaattgcattgagaggattgttcattattgacaaggaaggggttattcagcattctaccattaacaacttggcaattggtagaagtgttgacgagacaaagagaactctccaggccttacagtatgtgcaggagaacccagatgaagtttgccctgctgggtggaagcctggggagaagtccatgaaaccagaccctaaacttagcaaagactactttgcagcggtgtagctaggataatagttaagagtggctatctgcatctgtatcaatcagtgaattgcaaaagggtcttgttttttttaatgttttgtaagtccttaaattttgagccgcagggtttggtaatatgcgtgctggtgtactggattttgaagtgtactatgtattaatttgcaatttctgttcattaaaaaaa

SEQ ID NO: 263 - DNA, 996 bp, Glycine max
atcctctctgtatctttggttcagcagccattagcgatttcccttatctctctccatcttaactccaagcacaagaatcatcttcccatttcgtttctgaccaatggcttccctcactgtcccaaaccattgtgttcccactttgcttcgcactcactctctcaactacccatcttcccaaaacctcccacttccttccgcgccatcaaattctcaattttttggcctcaagctatctcattcttccttttccacaattccctcttcttcttcttcactcaaaggctccattttcgccaaggtgactaaaggttcaaagccaccgaattttacgctaaaagatcagaacgggaagaatgttagcctctccaacttcaaaggaaaaccagtagttgtgtatttctaccctgctgatgagacccctggctgtaccaaacaggcttgcgctttcagggattcatatgagaagttcaagaaagcaggagcggtggttgttgggataagtggtgatgatgctgcctctcacaaggcatttgccagcaagtacaaacttccatttactttgttgagtgatgagggtaacaaggtgaggaaagaatggggagtgccaggtgatttctttggatcattgcctggaagagagacttatgttcttgacaaaaatggggtggttcagctcgtctacaacaatcagttccaaccagaaaagcatattggtgagaccctgaaaatacttcagagtctttgagacattctgattcttttgttggctatcttagctggcctgattcagagtcagacaagtatgtaactatgaattgtaagtttgtaaccactgtaattatgtagctgattttggagcctttgatcacattcacatgggggtgatgatatgtattctcctatagagagcaaacatttataacctctccggatggaataatgccttcatttgccacaaatacaatcagattatatctgtatcttttgcaaaaa

SEQ ID NO: 264 - DNA, 972 bp, Zea mays
aagcgcttcgcaagcacaggcagtgatcggcaaccaaatccggacagtcttgagctctctcagtctcagcatttcagttcccagattcacatagccccagccccacaagtagcgaaatggcagctgctccgttcgcgattgccggccggctctcccccgttgcgcgcctcccggtccgcgcctggaggccggcgcacgggtttgcgtcgtccgggagagcccgctcgctcgccgtggcgtccgcggcgcaggagaacagggacaacagtgtcgacgtacaggttagccagaacggcggcaacaggcagcagggcaacgccgtgcagcgccgcccgcgccgcgcgacagcgctcgacatctccccatccccgttcgggttagttgatccgatgtcgccgatgcggacgatgcggcagatgctggacacgatggacaggctgttcgacgacgccgtggggttccccatggggacacggaggtccccggcgaccaccggcgacgtacgcctgccgtgggacatcgtggaggacgagaaggaggtgaagatgcggatcgacatgccgggcctcgcgcgcgacgaggtgaaggtgatggtggaggacgacacgctggtcatccgaggggagcacaagaaggaggagggcgcggagggcggcagcggtggcgacggcgacgggtggtggaagcagcgcagcgtgagctcctacgacatgcggctggcgctgccggatgagtgcgacaagagcaaggtgcgggccgagctcaagaacggcgtgctcctcgtcaccgtgcccaagaccgaggtggagcgcaaggtcatcgacgtgcaggtccagtagacaaactgagctgtcacgacgggtctttgtgtagcactagcgtgggttgggctcttcgcgccgaccgtatcagtactcgtgacccaacgtgtggaataatgtgaataaataaacgcttcaattctgctattcc

SEQ ID NO: 265 - DNA, 943 bp, Zea mays
ccacgcgtccgacactgggtaggaagagcgcagaaaaaggaagcagcagctttgatcgggtggagtttcttgctcactgatcgtcgagtgaagcctttgtggtccgtgacgatgtcgaggagagccgcagcgttgttgctcgcgtgcctcgtcgccgtgacagcggcggcgctggcggacggcgcgctgctcccgtggttcggcgacggccggcgcgggctcgacgaggcagcggtgaccgacgtgggcctcctggcggccgacccgttccggatcctggagcacgtccccttcggcttcgaccgggacgacgtggccatggtctccatggcgcgcgtggactggcgcgagacccccgacgcgcacgagatcgtggtcgacgtgcccgggatgcgcagggaggacctcaggatcgaggtcgaggacaacagggtgctgcgcgtcagcggcgagcggcggcgcgctgaggagcgcaagggcgaccactggcaccgcgaggagcgctcctacggcaggttctggcgccggttccgcctccccgagaacgccgacctcgactccgtcgccgccagcctcgacagcggcgtcctcaccgtgcgattcaggaagctggcgcccgagcagatcaagggcccgcgcgtcgtcgggatcgccggaggagacggtggcgccgaggcgaaggagagcatcggaactggcgccggagatggtcatcagaccaagaaggtggagctctgaacagtgaggtgggaattgggatgactcaatgacggagatggctctgcgcgtgtgcgtagttttactagtttatgtgttcgcgtttttcttttttgtgacagcgtatatgcacttgtatggagtggaagtgtgccatgttttactgaggaataaaaacctacagtactagtgtactaaaaaaaaaaaaaaaaaaaaaaaaaaaaag

SEQ ID NO: 266 - DNA, 937 bp, Zea mays
cggacgcgtgggtaaacgtcgaccattatgggaccttacagcaccgccgtcgccgtaagcgcatcgccggtcctgcaggcttcctcactcttgacgcgagcccgtggttcttggaggcccacggtggcggcgttgcggctttctgcttccgtgaaatgccgtcggcgggcactcaccgtgacctgtgcgctcccggagaaagaacggccggcggcattcaacatcccgcccactgctctgctgtgccccgtgcccccgccggacggcaaggaacggtgggacatcaaggaggaagatgaccgcgtcacgctgtggctccaggtgccagggctgtcggcgagcgacatcgaggtgaccaccagcgaggacgtcctcgagatcaaacgcagggtcgtcgccccacagcagccggcgcccgtggacgcgcacggcgtcggcgcgttccacatccggctgctgttgaccaaggagtacgacggcagcaacgtcacggccgatctcaaggccggcatgctggaggtcaccgtccacaagaacccgcaacgccccggcgaacgcgccgtgatgatgggggcgaccaagcccccgcccgagccccgtcaaaacgaggagagcagtaccaaccaaaggtcctcgaccgcaagaaaggaaaccggaacccccatggggagacaaaatccaaatggagtctagctggttgagggctcggaccctgctttgaataagcttctcatttctagctgcggatggactcaaaccagcaatcgccttctgttatatcaattgcctggagagagcttacgctgcttgtagtatcatgtgtgtttccttaaaaaaacccttctttgtttctttatttattatgagggtttttttttggtgtgcggtcacacagagtgaaaacaattccattttctaagcaaaaaaaaaaaaaaaa

SEQ ID NO: 267 - DNA, 862 bp, Zea mays
ccacgcgtccggaatcacacaacagcagctcaaaaaacccaacacacctcaacaagcagagcaaagacccgggattcgccggcgcggtagcgagagcgagagatggacgggaggatgttcggtctcgagacccccctgatggtggcgctgcagcaccttctggacgtgcccgacggcgacgccggcgcgggcggcgacaaggcgagtggtgccgcggcgggcggcgggcccacgcgcacctacgtccgcgacgcgcgcgccatggcggccaccccggccgacgtcaaggagctcccgggcgcgtacgcgttcgtggtggacatgccggggctgggcacgggcgacatcagggtgcaggtggaggacgagcgggtgctggtgatcagcggcgagcggcgccgggaggagcgcgaggacgccaagtacctgcgcatggagcggcggatgggcaagttcatgcgcaagttcgtgctgccggacaacgccgacatggacaagatctcggcggtgtgcagggacggcgtgctcaccgtgaccgtcgagaagctgcccccgcccgagcccaagaaacccaagaccatcgaggtcaaggtcgcctgaggtgggactaggtcgaccgatcgtggctctgaagatgtgggagcagtgccagcgagttgtgaggacctctacctgtgtggaatgtggcgaggaataatcgtagtctgtagtgggggtgcttctggtgtgcgtgtttgcttccttcggtcgcggtgtctgtctaccaattcctatctgatgtatcggcttcggtttcgtatgaaccatgccggatgctttcagtaaaaaaaaaaaaaaaaaaaaaaaaaaaaaaaaaaaaaag

SEQ ID NO: 268 - DNA, 958 bp, Zea mays
attcggctcgaggagagaagtccagacgattcagcgaccgctcttgacgaagctataaaagcgtcaccccacaaggccacaactcgtcccaacccaatcccaatccagagcgaagatcgcgatcagagcaggagcaggcaacgcgcaccgaaatcttccaatccacaagactcgctacttcgcagttggcagactcgcccgcagcgagccgctagcaaccaagcagaaatgtcgctggtgaggcgcggcagcgtgttcgacccattctccgtggacctcttcgaccccttcgacagcgtgttccgctccatcgtgccgtcgtcgtcgtcggcggcggcggcctccgagaccgccgccttcgccagcgcccgcatcgactggaaggagacgcccgaggcgcacgtgttcaaggccgacctccccggcgtgaagaaggaggaggtgaaggtggaggtggaggacggcaacgtgctgctcatcagcgggcagcgcagcagggagaaggaggacaagggcgacaagtggcaccgcgtggagcgcagcagcggccagttcgtgcggcgcttccgcctccccgagaacgccaagaccgaggaggtgagggccgcgctggagaacggcgtgctcacggtcaccgtgcccaaggccgaggtcaagaagcctgaggttaagagcatccagatctccggctgaagaagacatggacgcgaggtgaatggtcgcgtcgcgttcgcgtcgcggcgtcgggtcttgggtttcagcgacgcgactcgtgtgtgtggtactgtggttgctctgctttggtatgtctggtgtgtacgtgtgctgttcagtgtttcgtggtcatcgtctgtacattgtgctgttcggtgagctccccgactcagtgtgttgtgttctgcgagtgaataaataaaaacaaaccagctgtcgtctcgtgtaaaaaaaaaaaaaaagg

SEQ ID NO: 269 - DNA, 904 bp, Zea mays
cttgctgatcacagctagtagggagcgagagttaccttgaaatcaaggcagtacgtacgagtacgatcgacaatgtcgacggtcacttcttgcacctttctgagcctcgggtccccagtgcggccggcagtctcctccgcgagaccggcggcggcggcggtggcttcccgacggaggccccggtccctttctgtgtgctgcgaggccggccggaaaggggatcacaacccaaagacggatctgcatccatttaacatccctgccttcgttctggtgcacccggtggcaccacgtgaggaacggtggcagctggaggaggacgccgacaaggtgaacctgtggttcgaggtgcctgggcagtccaaggatgacctcaccgtggagatcgacgaagacgtgctcgtcatcaagaagaggaaggagctggtgggccagcggagccctgctggcggtggcgtcgcagagtacggctcgcagtcccagcagcagagcaggaggggcaccgcagatggcaaggagctgccggcggcacagcagggccaggccggcgaggtggtctatgcccggatgctcctcccggcggggtacagcagggatggcgtgcaggccgagctcaagtccggcgtgctcagggtcactgtcgtcaaggtcacggagcgagcgcgcaggaagatcgacgtccccattcaagtcaagtagatatgcgtgtatgtgtatgcacattcgtcctgcgcacgtgtcagcaggggtgctttatttacatctgtctcatgtccaacatgcagactacagcggtcgatctcaccacgtactcgatcgcgtcgactacacatgttcatgggctttgtgttcccatgtactcatcaatcaataaaatgagcatatgtgttctccgccaaaaaaa

SEQ ID NO: 270 - DNA, 3598 bp, Saccharomyces cerevisiae
cttccgagacgttgcatcaaaggccaagacatggcattagtcacccttgttgcaacgatagacgcatactacggacccctcaaacctccctacctgcccgtcgctatcgcattaattttctttttttccactatttttccggcccgccacacctccgactacaagacgccacatctacgttttgtcacacaaaatccaggacaatagccgtctgcaaggcaccaaggttttcagcagttgcttgttgctgctgcctgttaatcacatcaaacccactgcaagggcagtcgatgggtctgtaaacgccttagcaatcgttgttgaagaaagagagctcttatcatcatggggtgcccatcatttttctttttttttcaaattttgggctattcaatgaattgtttcgactatatatggacaatcatcggaagctgtgtattcttggtaaaaagttttcgactgtgtggcagaaaataaccgcaacaattatataacgtcacagaacacatgagtaccatttatagggagagcgactcgttggagtcggagccctcgccaacgccaacaaccattcctatccagatcaatatggaagaggaaaagaaagatgctttcgttaagaatattgacgaggacgtcaataatctcactgcgactactgatgaggaggaccgcgatccggaaagccaaaaattcgacaggcattccatacaggaggaaggtctcgtttggaagggcgaccctacatacttgcccaattctccatatcctgaagtgagatcggcggtgtccatcgaggatgaccccaccatccgcctcaaccactggagaacgtggttcttgaccacggtgtttgtggtagttttcgccggtgttaatcaatttttttccctgagatatccatcgctagagatcaacttccttgttgcacaagttgtttgctacccaattggtaggatactggctctcttgcccgactggaagtgttctaaagtgccatttttcgatttaaacccgggcccatttaccaaaaaggaacacgccgtggtcacaattgccgtggcgcttacttcctctactgcatacgctatgtacattttgaacgcccagggaagcttttacaacatgaaacttaatgtcggatatcagttcttgttggtttggacatctcaaatgattggttatggtgctgcaggtcttaccagaagatgggtcgtcaaccctgcaagctctatctggcctcagactttaatttcagtgtccttgtttgattcgttgcactcgagaaaagttgaaaagacagtcgcaaatggttggacgatgccccgttacaggttcttcttaatcgtccttatcggatcgttcatctggtattgggtacctggattcctctttaccggtctgtcctatttcaacgttatcctatgggggtcgaagacaagacacaatttcatcgctaacacaatctttggtactcaaagtggtctcggtgcgttgccaattacatttgactacacccaggtttcccaagccatgtccggctctgttttcgccacaccattctacgtctccgccaacacctatgcatcagtgttgatattcttcgtcatagtgctgccatgtctttattttacgaatacctggtatgccaaatacatgcccgtcatttcaggttctacttatgacaacactcaaaacaaatacaacgtaacaaagattcttaacgaggattattccattaatcttgagaaatataaggaatactcaccggtattcgttccattttcctatcttttgtcgtatgctttaaattttgccgctgttatcgccgtttttgtccactgcatcttataccacggtaaagatattgtcgccaagtttaaagaccgtaaaaatggtggcactgacattcacatgagaatctactccaagaactataaggattgtcccgattggtggtatttacttttgcagattgtcatgatcggtttaggatttgtagcagtgtgctgtttcgatactaagttcccagcttgggcatttgttattgcaatattaatttcccttgtaaatttcatcccgcaaggtatcttggaagcaatgactaaccaacacgtaggtttgaatattatcacagaattgatctgcggttatatgctgcctttaagaccaatggcaaacttattattcaagctatacggatttattgtcatgagacaaggcttgaatttgagtagagatttgaaattagccatgtacatgaaggtttcccctcgtttgatctttgccgttcaaatctatgccactatcatatcaggcatggttaacgttggtgtccaggaatggatgatgcataatatcgatggcttatgtaccaccgatcaaccaaatggcttcacttgtgctaatggtcgcacggttttcaatgcttccattatctggtctttgccaaagtatcttttctcatcagggcgcatttataatccgctgatgtggttcttcttgattggtttgctattcccactagccgtttatgctgttcaatggaaattccctaaatttaaatttgctaagcacattcatactcctgtatttttcacaggcccaggtaatattccaccaagcacaccttataactactcattattttttgcaatgtcattctgcctaaacttgataagaaaaagatggagagcttggttcaataagtacaatttcgtcatgggggccggtgttgaagcaggtgtggcaatctccgtcgtcatcatcttcttgtgtgtacagtacccaggtggtaagctcagctggtggggaaacaacgtttggaaaagaacgtatgataatgattataaaaaattttataccttaaagaaaggtgagacatttggttatgataaatggtggtaatcatgaaaacataataataaacctgcagaggttcatatcaagttttaattcaaaatttggcacacgtaatagcaaactttagttcatattctgtaatattaagaaattattttcttttctgtcatcctttcatattgcttaacttgaaatactttatctcaacgtttaattatactgttaataatgatatttctatattttagagcacattttggtcgaaacattcaaagcgacccctgcaatatttagcggaggcatctcatccgccttatttttgtaaattaacgatctttagcgcatgccaagtgttcgataacaaattccgactttaagaaaaaacgggcacgagcatacaataaaaaaacttttaaaatttatacctccttgaggtgttctattttatgatagatccgtatttcagataccaaatgttatatacacttttttaagcttggatttttttctgaatacacggaccttacaaatgctataaaaaaaaaaaagattctgtaacttgtaaaattaagggccctaaagggccatatccacctcacatttcactgtgatataagtaggatattttgacttcaatacttaaatttacaagccaaatattttattatgacttcaaaaaaaaaaaggcttctagcattcagaaataatgctgactgtgaaaacaactataactaca

SEQ ID NO: 271 - DNA, 2025 bp, Zea mays
cggacgcgtgggctctcctctgctaggcacttgtcacaggaaggccccctcgtgttcgcgtcctcttgccttcacacccgggacgggagttccttgctagggggagagcttcccttgctcgtgtcctcactcacgcactcacagactcactcattcaccgacggtcccagtggactgaggtgagacttcggtcggagccggccggacggaacatacaggatggccgccgcgccgccgcccaaggccgacgagctccagccgttcccgcccaaggagcagctgcccggcgtcgccttctgcatcaccagccccccgccatggccggaggccatcttgctagggttccagcatttcgtcgtcatgctgggcaccaccgtcatcatacccagcgcgctcgttcctcagatgggaggcggaaatgaagagaaggctcgggtggttcagaccatactgttcgttgctggcataaacaccctgttccagacgttattcgggacgcgccttccggtcgtgatgggcggctcgtacgtcttcgtcgggccgaccatctcgatcgtcttggctggacggtacagcaacgaagcagaccctcacgagggcgctctcctcgttgcgtcgacgattcagatcatacttgggttcagtggcctctggcgcaacgttgtcaaattactgagtccgctggcagctgttcctctggtatcactggtcgggttcgggctctacgagcttggctttccaggggtagcgaaatgcgtcgaagttggcctcccagaactgctcctgttggttgtgttttctcagtatctgcctcaggttctggacttcggcaagtccgtcttcagccggttcagcgttctcttcaccgtcgccatcgtgtggctgtacgcctacatcctcaccatcggcggcgcttacaagaactctccgcccaagacgcaggtgcattgccgcgttgatcggtcgggccttatttcaggagcaccttggataagtgttccctatccctttcagtggggtgctccgacgtttgacgccggagaagctttcgctatgatgatgacttcgttcattgctcttgtagagtcaactggcgccttcatcggtgcttcgagatatgcgagtgcaactatgattcctccatcgattatcagtcggggcgtgggatggcagggcattggtctgttgctcgattcatttttcgggacagcgaacgggacatcggtttcagtagagaatattggactgcttgcgttgacacgcattggcagccggagagtggtgcagatatctgcaggcttcatgattttcttctctgtccttggaaaatttggagctttgtttgcgtcgattccgctgcccgtatttgccggcatgtactgtctcttcttcgcatatgttggtggcgttggcctgagcctccttcagttctgcaacctaaacagctttaggaccaagttcatcatggggttcgctttcttcatgggcctatcggttcctcagtacttcaacgagtacacagccgttgcaagctatggtccggtgcacactggcgccagatggttcaatgacatgatcaacgtgccattcacgtcgaagccgttcgtcgctgggttggtagcctatatcctggacaacaccctccaggtaaaggagagcgcggtgcggaaggacaggggcaaccactggtgggagaagttcaggagcttcaagaaagacgcgaggagccaagagttctactcgctgccgttcaatctgaacaagttcttcccgtcggtctgatctcaaatggcgccgccgctgaatcaattctggaagcaacccttgttcatatgggcgttaatgaggaacataattctgctggtctggccagtggaagcttctgtgtctccattgttggtcaattttgtgtgttttcggacgagatgggagtaattgaactgtagaaattattacgattgaagtatatcgcgttctttttgtaatctaaaaaaaaaaaaaaaaaaaaaaaaaaaaaaaaaaaaa

SEQ ID NO: 272 - DNA, 2071 bp, Zea mays
ccacgcgtccggaaagggaaggcgaggaggaggatggccggaggaggggcggcgacgccgccgaagcaggaggagctgcagccacacccggtgaaggaccagcttcccagcgtgtcctactgcatcacaagcccaccgccctggcctgaggctgtcatccttggattccagcactacattgtgatgctgggcacatccgtcatcataccaagtgctcttgttccccagatgggaggaggaaacgaggagaaggcccgggtgattcagacgctgctgttcgttgccggcatcaacaccctatgccagtcattctttgggactcgcctcccagcggtgatgggtggatcctacaccatcgtcgcacccaccatttccatcatcatggccggccgttacagcaacgaagcagaccctcgtgagaaattcttgcggaccatgcgaggaacacaaggcgctctcatcatcgcgtcgacaattcagatcgtgcttggtttcagtggcctttggcgcaatgtcgttaaattgctgagcccattgtctgctgtacctctggtttcgctagctggatttgggctatatgagctaggttttccaggggttgctaagtgtgtggaaattgggcttccggaaatcatcctaatgctcatattttctcagtacttacctcatgctgtccatgcggcaaagcctgtgttcgaccggttttctgtgattttcacaattgcgattgtatggctgtatgcgtacattctcacggttagcggtgcctacaagaatgcccgaacaaagacacaactccattgccgagttgaccgctctggacttgttggtggagctccttggattagtgtcccatatcctttccaatggggggccccaacatttgatgctggtgaatcatttgcaatgatggtggccgcatttgttgctcttgttgagtcatctggggccttcattgctgtgtcaagatatgcaagtgcgactatgatacctccttcagttcttggtcgtggcattggttggcagggcatcggtactttactgggtgcgttttttgggacagctaatggaactgcagtgtcagttgagaatgctggtctgcttgctttgacacatgttggcagccggagagtagtccagatatctgcaggcttcatgatcttcttctctgtccttgggaaattcggggcgatctttgcttcaatcccactgccgatattcgctgccctgtattgcattctctttgcatacattggtgcttgtggcctgagcttccttcagttctgcaacctgaacagcttcaggaccaagttcatcatggggttctccttgttcatgggcctgtcagtaccccaatacttcaacgagtacacgtccgtggctggctatggccccgtgcacaccggcgcccgatggttcaacgacatgatcaacgtgcccttctcgtcgaagccgttcgtggctgtgctggtggccttcttactggacaacacgatccaggtgcgtgacagcggcgtgaggagggacaggggctaccactggtgggacaagttccggagcttcaagacggacagccgcagcgaggagttctactcgctgcccttcaacctcaacaagtttttcccttccgtctgatcctgcagggtctgcacactcttcctcgcagccgcagtagctcgggctggagtcaggcaagaaatgatcctatgcagatgatgctggagcatggactgatggcgttttgtacattcaggggtgaactgaactgtgcaggttgcaggggatagtgctctgggtagcatcagtattccctagtaaccgaaattgaaaaggccgcctgttaaacttctgcaaacactagcatgattacgtctcctagtgctactgttgtttagattggaaaacatggaactcaacggtaagcatagatttaccttgaagcaacccttttcttttgcttagaaagaatttgtgttggggatttttttttcaccatgtaagaactgagagcacttagattacaagggagggtgaataggtgatcctgcaaaaaaaaaaaaaaaaaaaaaag

SEQ ID NO: 273 - DNA, 2255 bp, Zea mays
gcaaggcaagtagccgctgcgcggtgctgccacctgacctgactgccgtcccggtccccggtccatccgaacgccgttacggggccgcccaccgcgacggaacggaaaggtgcggtcaacccaccccgtcccagtcccatcaccgccgggggccgggtggataaacaaacccagcggccccggccccctgtccgcctcattcccttccttcctttgctcctcccctgcctcgcctctctcccctctcctcgcctccagctcctgctcggcccgctcgcgtccagctgcgcgcgcgcctgcggtggccgtgaaggacagcccgagggacgcgccgggtgcactgatctgggggccgcgtgtccccggtggtggggcgaggcggcgccggcttccaggaatgggcagcttgtagtggctgtttcttttgcatatgcgctttctattgttgttgtcatttcaaaggaggccatagtctcctggattttgtatgccttgttatctggaattggtgaccatagatgtcatttcgtagcatagtccgtgatgttagggatggcttcggcagcttgtcaaggagaagctttgaggtgaccctcgcaagcatttatggccttactgggcatcacaaagggaagacccagagctcatcacatgtgctcgacgactcaccttccataattcgtgaaagtcgatgggcgaatctacctcctgaactcatccgtgatatcatacggagactggaggctgatgagagcacctggccagcgcggaagcacgtcgtttgcttcgcagctgtttgtaggacatggagagaaatgtgtaaagagattgtgttgagcccggagttttgtggcaagctcaccttccctgtgtctctaaaacagcctggtcctcgagatggaaatacaatggtccagtgttttataaagaggaataagtcaaaatccacttaccatctctacctgtgccttagcaatgttgttacttcagaaagtgggaaattcctcttatcagctaaacgacaccgcaaaaccacatgcaccgagtacactatatcaatggattctggcaacatctcaagatcaaaaagaacctacattggaaaaataaggtctaacttccttggcacaagatttttaatttatgatacacaaccgccctataatggggctgtagttcctcctgccggaaggacaagcaggaggttcaactccacaaaagtctctccaaagctgccttcagtcagttacaacatcgcacaggtatcgtatgagttaaatgtccttggcacgagaggtcctaggcggatgcgttgcatcatgcactccatacctgcatcatcagtggagccaggtggcacagtgcctggacagccagagcagattgtacctcgagccctggaggattcattccgcagcacggcttccttctcgcagtcgttccgtagcactgcctcattctccaagtccatcatggactcatccatggatttcaatagcgctcgcttctctgacatcgctggcagcagcgctcgcttcacgggcgttcctggtagcagcgctcgcttcgcgggcgttcctggcagcagcgctcgcttctcgggcattgctggcgccagactggacaacgacgaggagagtgaaaccaaggagaggccactggtgcttcgtaataagccgcctaggtggcacgaacagctgcagtgttggtgcctcaacttccgtggccgtgtgacaattgcctcggtgaagaacttccagctgatcgccgcggctaccccgccaccggcaggtgcgccaaccccctctcagcctgccccgtcagatcccgacaaggtgattctccagtttggcaaagtggcaagggatatgttcacgatggactatcgctaccctctctcggctttccaggcctttgccatttgtctgagtagctttgatacaaagttagcctgtgaataaatggagaagaacaaaggtaaaggagaacatcaggttgcttgcattaggccatcagtgtacctctttccatctggctctcgtgttgccttggttgtatttgtgcttaatgtagccatgaatttggtggcccatatatggacgcatgtgttgttgttggccctctcccttagaagtgattaaaagttgcatttggaccacatgttacccgatctgtaatatacttgcagtggcatcgcatgccgcgtgataacaaagttcccgttcgtgattggacttgtatggttaaaaaaaaaa

SEQ ID NO: 274 - DNA, 1562 bp, Zea mays
attcggctcgaggtgggattgtgggaagatgcctcgggatggcgcgcaggcggcgccgccaccggagcgcggcgagatggacgaggtggtagaggcggacccggatacggaggcggaggatcaggaggagaggtgggcgaggctgctgccggagctgctctccgacgtggtgcggcgcgtcgaggcgtccggcggcgagcggtggccggcgcggaaggacgtcgtctcctgcgcctgcgtgtgccgccggtggcgggaggccgccgtctccgtcgtgcgtccgccggcggagtccggcaagatcaccttcccctcctcgctcaagcaggtcgattgcatggcttcccttatatggcgtcatcagcggttttgatacgtaccggccattcagatatttaggatatagtttgagaagtttcctggccaattcagtgtcgtagtgttttttatttgacatctgtgtacctaaatcttacaccatttctcaaaacacagccagggccaagggagagaccaatgcagtgctttatcaagaggaataagaacaactctacattctacctctaccttggcttcacaagttcacctgtggataaagggaagtttctcatggctgctagaagatttaggcgtggtccccataccgagtacattatatctcttgatgcagaagacttatcacaagggagcaatgcatacatggggaaactgagatctgatttctgggggacaaacttcaaaatatatgatagcaagccaccatatgatggtgctaaagcatcaagtagtcgatctagtcgtcgtttcggaagcagaaggattagtccccaggtatcggctggcaattatgaagttggacaggtttcatacaaatacaacttgctcaaatccagaggccccaggagaatgtattgcactctcgaatgcccttcagcccaagagacttgggaaaactcactcaagacaaagttcaggcgccccctgggccccacaactttacgaaataaagcaccccgctggcatgagcacctgcaatgctggtgcttaaacttccatgggcgggtaacagttgcatcagtcaagaatttccagcttgtggctgctgccgaccccagtgagcctactaccaacgtggatgatgaaacggttctgctgcagtttggtaaggtcgatagcgatatgttcacaatggattaccggcaaccactctccgcgtttcaagcatttgccatcagcctcagcagctttgggaccaagctagcctgtgaatagcgatgcagtttgatgctcttcgtgtggctatatggtttgtgttggtggttgcttgcttgtttcttgttgttacgatgtgatccgttcttcgttttagttgagtatttatgtactatttgtaccacaagagatgtaataaactattgtattgtcaaacggatttgttcaaggaaattatgtgtaatgaacttttgctctagttccatgcaaaagacatttcaatgtacatctgttcatggtgaaaaaaaaaaaaaaaaaaaaaaaaaaaaaaaaaaaaaaaaaaaaaaaag

SEQ ID NO: 275 - DNA, 1695 bp, Glycine max
attcggctcgagcactatttaccccattttctctaaatccaaacaggccccaaaagaaagagagggaaaattctcttccatggcctcttcacgccctgccaatgtgggaatccttgccatggacatctacttccctcccacctgcgtcacccaggatgctttggagggtcatgatggggtgagcaaagggaaatatactattgggcttggacaggattgcatggccttctgctctgaggttgaagatgttatctcaatgagcttgacggtagttacttcacttcttgaaaaatttaatgttgatccaaagcaaattggacatttggcggttgggagtgaaactgttattgacaaaagcaaatcaattaagaccttcctgatgcaagtttttgaggcaagtggtaatactgacattgaaggtgttgattcaactaatgcatgctatggaggaacggctgctttgttcaactgtgtgaattgggtggagagtagctcatgggatggacgttatggacttgttgtttgtacagacactgcggtatatgctgaaggacctgctcgtcccactggaggagctgctgcaattgccatgcttgtagggccagatgctcctattgcttttgaaagcaaactcagaggcagtcacatgtctcatgcatatgatttttacaagccaaaccttgctagcgaatatccaattgttgatggaaaactctcacagacctgttatctcatggcacttgattcctgttaccggctttactgtgagaaatttgaaaaattggaggggaggcctttttcaatgtcagattctgattattttgtgtttcattctccatataacaagcttgtgcagaaaagttttggccgactatacttcaatgacttcttgagaaatgccagttttgttgatgaagttgccagggaaacccttgcaccatatgcatccttatctggtgatgagagttatcaaagtcgtgatcttgaaaaggcaaaccagcaagctgcaaaacatctatatgatgcaaaggtgcagcccagcacactaatcccaaagcaagttggtaacatgtacactgcatctctttatgcagcatttgcatctcttcttcacaataagaacagttcgttggtaggtaaacgggtagttatgttttcatatggaagtggtttaacagctacaatgttctccttccagcttcaagagggtcaacatccgtttaacttgtcaaacattgtaacagtgatgaatgtttcggacaagttgaagcagagagttgagattcctcctgaaaagttcgttgaaacattgaagatcatggaacaccgttatgggggtaaggactttgtgacaagcaaggactgtagctacttaactccaggcaccttctatctcaccaatgttgattccatgtacaggagattttatgccaagaaggactaggttattggttagttgatgatcgctgatatattcaaatatggagttaaaatgtattttcttatggttcacctgtatttgatcccataaggttgtgtatcaaaatgtttataagatgtttcatttttttgtggtgatcaggttgtaaccaaaataagaataagtttatttgcgaattggcaattgtttttaaatgcactaataatccaaatatattagtagtttcttcttgagtgcaaaaaaaaaaaaaaagg

SEQ ID NO: 276 - DNA, 2262 bp, Saccharomyces cerevisiae
aagcttcgtatatacaatagaaaaattttccatacaatattacataatactatagagtaatcatacccacaatctccatggctgcggtatcgtgtcgaaaatgaaccgggctattaattatacgagtgtgttgaaagtaggctccattcggcctcatcgggcggaactgtttgggtgcctcgccaattttcgtagccaaattactataaaaggtgcagcatgaaactctcaactaaactttgttggtgtggtattaaaggaagacttaggccgcaaaagcaacaacaattacacaatacaaacttgcaaatgactgaactaaaaaaacaaaagaccgctgaacaaaaaaccagacctcaaaatgtcggtattaaaggtatccaaatttacatcccaactcaatgtgtcaaccaatctgagctagagaaatttgatggcgtttctcaaggtaaatacacaattggtctgggccaaaccaacatgtcttttgtcaatgacagagaagatatctactcgatgtccctaactgttttgtctaagttgatcaagagttacaacatcgacaccaacaaaattggtagattagaagtcggtactgaaactctgattgacaagtccaagtctgtcaagtctgtcttgatgcaattgtttggtgaaaacactgacgtcgaaggtattgacacgcttaatgcctgttacggtggtaccaacgcgttgttcaactctttgaactggattgaatctaacgcatgggatggtagagacgccattgtagtttgcggtgatattgccatctacgataagggtgccgcaagaccaaccggtggtgccggtactgttgctatgtggatcggtcctgatgctccaattgtatttgactctgtaagagcttcttacatggaacacgcctacgatttttacaagccagatttcaccagcgaatatccttacgtcgatggtcatttttcattaacttgttacgtcaaggctcttgatcaagtttacaagagttattccaagaaggctatttctaaagggttggttagcgatcccgctggttcggatgctttgaacgttttgaaatatttcgactacaacgttttccatgttccaacctgtaaattggtcacaaaatcatacggtagattactatataacgatttcagagccaatcctcaattgttcccagaagttgacgccgaattagctactcgcgattatgacgaatctttaaccgataagaacattgaaaaaacttttgttaatgttgctaagccattccacaaagagagagttgcccaatctttgattgttccaacaaacacaggtaacatgtacaccgcatctgtttatgccgcctttgcatctctattaaactatgttggatctgacgacttacaaggcaagcgtgttggtttattttcttacggttccggtttagctgcatctctatattcttgcaaaattgttggtgacgtccaacatattatcaaggaattagatattactaacaaattagccaagagaatcaccgaaactccaaaggattacgaagctgccatcgaattgagagaaaatgcccatttgaagaagaacttcaaacctcaaggttccattgagcatttgcaaagtggtgtttactacttgaccaacatcgatgacaaatttagaagatcttacgatgttaaaaaataatcttcccccatcgattgcatcttgctgaacccccttcataaatgctttatttttttggcagcctgctttttttagctctcatttaatagagtagttttttaatctatatactaggaaaactctttatttaataacaatgatatatatatatattttttttataaagaattgtatatctatatttataacacaataaatctaatctcaacttttttctttaaagttaagcccaaccgattttttttctcattcataaccccgacgtgttttccatgtattcagacaatgctaatgttaaaggtggaatatcagccaatttatgtagaaccagtggcctgatgcgttgacaaaatgcggaaccagcaccatcatccgtgtcgttggataaaaggcacaaaaacgtacaggccactttagaaacatctgagagttcttgagggaatttgacctctggtatgctgttttgtcttgcaggtgtaatttccttagagtcattcaaaaatttggattttagtgccgaaatgggtacctgggattctctttccccgtctgcaatacccaaagctt

SEQ ID NO: 277 - DNA, 2181 bp, Zea mays
ccatcctaatacgactactatagggctcgagcggccgcccgggcaggtacacaaacgctagagagagagagagagagctggtggccggtgggacgtccgtggtggtggtggagttggatcggctgtgcttgttcctcgcttcttgctggatcagaggaggtcatgatcaactaatgcctattcatttattatggacttgcaccagttgttaaagtacagattaactggtgctaacgtctactacgaatttcctacagagaacaacttagcaaacactccttggccagctagtccactgaagtctgagttcagcagctcatcatacactcctctttcatcccagcttgagtgtgataatttgtctgcgctcagcaatactccagataaccagagctccacagaaaccatttcagcacaaccaatatcaccactggaagtagacagctcattcaaacaggcagctatccttcgggagaacacccaagtgagacctgatccattgtacacaacatcaaggcataatatgcaacacgctttacgagaaatagagactgttctgatggcacctgatgctgatgatgcagccactagcaccaagcatgaaattgaggaacataaacctgctcagctgatgaggcagcggtcaaggacatggagtcatgaatctaggcagccatcaccaggagttgtacggacacaacttgcatctggataccccacagcaagctatgagttccgcccagagaaacggctaagggagttaagggaggatccgcagagcatggtgaagcagctattaaccaagtgtgctgaagcattaagtgaggagaggatagaggagttccttaaccttgttcagcaagctcgtggagttgtatcaattactggggagccaatccagcggttaggtgcttacctccttgagggtttggttgctagacatgcaaactcaggtacaaacatatatcgtgccctgaagtgccgtgagccagagagtaatgaactcttgtcttacatgaagattctgtataacatctgtccgtactcgaagtttgggtatatggctgccaatggggcaattgcagaggcattaagaaatgaggacaggatccatattattgatttccagattgcccaagggacacagtggataacactgatacaagcgctagctgcaaggcccgggggtccaccacacgtgcggatcactggaatagatgacccagtgtcagagtatgcccgtggtgaaggtctggaccttgtagggaagatgttgaaaagcatgtctgaggaattcaggatacctttggagtttacccctctgcccggtatttacgcaactcaagttacaaaagaaatgctggacattaggtcaggcgaagcacttgctgtcaacttcactctgcagctgcaccacaccccggacgagagcgtggacgtgaacaacccacgggacgggctactccggatggtgaaaggcctgtctccgaaggtgaccacgcttgtggagcaggagtcgcacaccaacacgaccccgttcttgatgcggttcaccgagaccttggactactattcggccatgttcgagtcaatcgacacgaacctgccacgggacaacaaggagcggatcaacgtggagcagcactgtcttgccaaggacatcgtgaacatcatcgcctgcgaggggaaggaccgggtggagcgtcacgagctcctgggcaaatggcggtcgaggctgaccatggccgggttcagaccatacccgttgagctcgtacgtgaactcggtgatcaggaagctccttgcctgctactcggacaagtacaccctggaagagaaggatggcgcgatgctgctcggctggaagaacaggaagttgatatctgcttctgcttggcactgacagtaacgttttcagaagaccggaagtacacgtcaactcttacatatatgtatgtatgtatgtataatgaattacctggtctgctttccgcaaaaaaggacgccctttgttgtacatgtacatgatgctgtacccttagttttcctgaagtgcagaccagagaagagaatattgacattagattgtagctgctaagctgtatggtaattacagtttttcttttgctctcatgtattcacccctgtcatggacttcaaaaaaaaaaaaaaaaaaaaaag

SEQ ID NO: 278 - DNA, 1961 bp, Zea mays
ttcgcccttctactctgggctcagcggccgcccgggcaggtgccaaaagtccggaccacagctcgcgccgcccgccgcgccttgcccagacgtgcgctcccttctcccgcgccgtcgcctctgccctggccgacccgctgggcccagtgtgcgcagccctcccgggttaaggcggaggtgcttggggacccgctcccatggcgagcgccggcatcagcggcagcggggacgacgatgcaggagggaagctcttggcggatcgctaccagaagggcgaggtcctcggcgagggcacgtacggagtcgtcttcaaggccttcgacaccaagactggaaatacagtcgcggtaaagagaatctgggtagggaaggacaagaaggaaggtgttaacttcaccacattgagggaaattagactacttaaggagctgaaaggtcctaatattatagagctgattgattgtttcccttacaaggaaaatttgcaccttgtatttgagtttatggaaactgatctggaagctctcataaaagataagaacataatactgtctccagctgacacaaaatcatatctccagatgctgttaaaaggtctatcgttctgtcataagaaatgggtgatacacagggatatgaagccaaataatttactcattggtgccgatgggcagctcaagcttgctgactttggtctggcccggatgtttgggagtccaggaaggaacttcactcaccaggtctttgcacgttggtaccgggcaccagaattattatttggttcgaagcagtatggatctggggtggatatttgggccgctggatgtatttttgctgaactgcttactcgcagagcctttctccagggttctagtgacattgatcaacttgggaagattttcgcagcacttgggaccccaaaatcttctcaatggcctgacatggtttatcttcctgattatgttgaataccaatatgttgctgcaccaccgctacgtacattgcttccgatggccagtgatgatgctttggatcttttgtcaaaaatgcttacgtatgatccaaaagcaagaatcagtgctcagcaggctctagagcacaggtacttttcatcgttacctgctccaacaagaccatcacagcttctaaggtcacggtggaaaggagatcaagggaataacaagatgcccgatctgaacctgcagcatggccctctggtgctctctccgccaagaaagctacgtagggtgatagcgcatgaatggatggaaggtatgcacagggcagataaagtggacgagcatccttctgggatgaggcacaccgatgacatgcccagtcagaagagttctagaattccaatgtcagttgatgttggagctgtgtttggcacacgacctgcacctaggccaacattgaacagtgcggacaagtctcgtttaaaacggaaacttgatatggatccagagtttggatttgcggagtaaaagaaactttgttaacatgcaccattcttttcttactgagatgttggtttcgaaaatattctttgggagatatttccacagttcactcagaaaagaggatttgcattgaagccacaaaactgcaccgaaggattctgacacaatcaactgggctgttaccgacatcggctcacgaagaggaaaacaaaggagaggccattctaatttatcctgagtcgcatggggcattatagctaaccgattccgtaaagaaggctcttagaaacagcatgctctatgccatgcgagtggagagtgttatgtggaattgggggcatagaaacgctcgctccagttagaaatgtgtgtttgtgctaaatgtgatctactagtcctccattctccgtggtttcaatttccttcaattcttgtacggacacttaggtttgagcattcttcactcagtcactttacgtataaaaaaaaaaaaaaaaa

SEQ ID NO: 279 - DNA, 3154 bp, Zea mays
ctcgtccaatgagcgggacggggggcggtgagactagagagtggtggtgttcgagcagctgaaatgcacccgcgaggggctgagctccagcgagggccagcagcgtctcgagatctttggccccaacaggctcgaggagaagaaggagagcaaggtcctcaagttccttgggttcatgtggaacccgctgtcatgggtcatggagatggctgccatcatggctattgcactcgccaacggtggtggcaagcccccggactggcaggacttcgtcggtatcatcgtgctcttggttatcaactccaccatctccttcattgaggagaacaatgccggcaacgccgccgccgcactcatggccaaccttgctcccaaaaccaaggttctgagagatggccgatggggcgagcaagaggctgcaatcttggttcctggtgacatcatcagcatcaagcttggcgatatcgtccctgccgacgctcgtctcctcgagggtgatgcactcaaggttgaccagtctgcgcttactggagaatccctcccggttaccaagggcccaggggacgaagtcttctcgggttccacttgtaagcagggtgagatcgaggccgtggtcattgccaccggagtgcacaccttcttcggcaaggccgctcatcttgtggacagcaccaaccaggtcggacacttccagcaggtgctgacagcaatcggtaacttctgcatctgctccattggggtcggcatcctcgtcgagatcatcgtcatgttcccaatccagcaccggaagtaccgcagcggaatcgagaacctgttggtcctcttgatcggtggtatcccaatcgccatgcctaccgtgctttcagttaccatggccattggttcgcacaagctgtcacagcagggtgccatcactaagaggatgactgccattgaggagatggctggtatggacgtgctttgcagtgacaaaaccggcacactcaccctcaacaagcttagcgtcgataagaacctcgtcgaggtgttctgcaaaggcgtcgacaaagaccatgtgttgctgttggctgcaagggcttcaaggactgagaaccaggacgctatcgatgccgccatggttggcatgcttgctgatcctaaggaggccagggctggtataagggaaatccacttcttgcccttcaaccctgttgataagaggactgctctgacgtacattgatgccgatggcaactggcaccgtgtcagcaagggtgctcctgaacagattcttgacctgtgccactgcaaggaggatctgaggcggaaggtgcactctattatcgacaagtatgccgagcgtggtcttcgttcgcttgctgttgccagacaggaagtacctgagaaaaacaaggagtcccctggtggaccatggcagttcgttggtctgttgcccctgtttgatccgcctaggcatgacagcgctgagacaattcgcaaggctcttgttcttggtgttaacgtcaagatgatcacgggtgatcagcttgctattggtaaggagactggaaggaggcttggcatgggtaccaacatgtatccatcctctgcgctgctcggccaaaacaaggatgctacgcttgaagcgcttcctgtagatgagctcattgagaaggccgatggttttgccggagtcttccctgaacacaagtacgagatcgtgaagagactgcaggagaagaagcacatcgttggtatgactggagatggtgtcaacgatgccccggctcttaagaaggctgacatcggtattgctgttgcggatgctactgacgctgcgaggagtgcttccgatattgtccttactgagccaggtcttagcgtcattatcagcgccgtcctcaccagcagatgcatcttccagaggatgaagaactacaccatctatgcagtttccatcacaatccgtatagtgctcggatttatgctcattgcgttgatctggcaatacgatttctctcccttcatggttcttatcattgccattctcaatgacggtactatcatgaccatctctaaggacagagttaagccatctccgttgcccgacagttggaagctgaaggagatctttgctacgggcatcgtgcttggaagctaccttgctctgatgactgtcattttcttctgggctatgcacaagaccgacttcttctcggacaaattcggtgtgaggtcgatcagggacagcgagcatgagatgatgtccgccctgtacctccaagtcagtatcgtgagccaggctctgatcttcgtcacccgttcccgtagctggtccttcgtggagcgccctggtctgctcctggtcaccgcgttcctgctcgctcaacttgttgccaccttcctcgctgtctacgccaactggggcttcgccaggatcaagggtatcggctggggctgggcaggtgtggtctggctctacagcatcgtcttctacttccccctggacctgctcaagttcttcatccgcttcgtgctcagcggcagggcatgggacaacctcctcgagaacaagaccgccttcaccaccaagaaggactacgggcgggaagagagggaggcgcagtgggccaccgcgcagaggacgctgcacgggctccagccgccggaggcttcctccaacacgctgttcaacgacaagagcagctaccgcgagctgtccgagatcgccgagcaggccaagagacgagctgagatcgcgaggctgagggagctcaacaccctcaagggccacgtggagtcggtggtcaagctcaagggcctggacatcgacaccatccagcagaactacacggtgtgagagcccctctgctgcgatgtcgacgacaacacctttgctgcccgacgggagccatctgattacagataaaaattttcctagctgtaaagctctctataccaccagatactgccatatgatggtatggttgggtacccgtctttctagggagtttcttttctctctctcttttcttattgttatgtttttcaatagtggagtgtgcgcgtgttgtaatcgtttttacctgcgttttcctctaactagccggtgatctcgcgggaagcgaggtgaagaaataatgcaactaaaattctctgccaaaaaaaaaaaaaa

SEQ ID NO: 280 - DNA, 2253 bp, Zea mays
ccacgcgtccgggggattccacatcgtaaccactgaagacgaggcggcggacgagacggagagcagaaccgcgcagcgaagcagcagcggcgacaagccctcgcgtcggtagaggcgccgtccgccgtccgccccctcaactccggtagccgctggccgctgcaggtcgagtcccgtcgagccgactcgcgcttcccgatctgggtggccgcggcgccggcatggcgcggttcgaggtgaacggcaagtcggtgcaaggcgtggacttgctgcggcggcgccactggccgtcgcgcctcgacttctggcccttccttgcactctatgcgctctggctgctgcttgctgtcccggcgctcgacttcactgacgctctcatcatccttgccgcgctctccgctgctcacattctcaccttcctcttcaccgcctggttcgtcgatttccgtgccttcgtcgggtactctaaggtcaaggatatccatgccgctaacacgtgtaaggtgactcctgctaagttctcggggtcaaaggagattgtacctctgcacaaacagaaaaatgtggcctcaacttcagctgcaggtgagacagaggagatttactttgattttcggaagcagaggttcatctactcggctgagaaagataactttttaaaactccggtacccaacgaaggaattgatcggtcattatggcaagggcactggttatggaactgaggccaagattagcaccgcagtggacaagtggggcagaaatgtattcgaatatccacagcccacatttcagaaattaatgaaggagcaaatcatggaaccattttttgttttccaggttttttgtgttgctctatggtgcctggatgcgtattggtactacagtttgtttacacttttcatgcttttcctgtttgagtctactatggcaaagaataggctgaagacattgactgagctaagacgtgtgaaagttgatagccagattgtgttgacctatagatgtgggaaatgggttaaagtccctggaactgaactactaccaggagatattgtgtcaataggccgctcaactagtggtgaagatagatctgtaccagcagatatgctattgttagctgggtctgcaatagtaaatgaagctattcttacaggagaatctactccacagtggaaggtttcaattgctggacgtggtcctgatgatatgctatctataaggcgagataagaaccatatcctatttggtggcactaaagtattgcaacacactgcagataagtctgtaaatcttcgatcacctgatggtggctgtctagcttttgtattgaggactggatttgagactagccaagggaaattgatgaggactatcttattttcaactgagagggttactgcaaataacaaagaaagtggcctgtttatactctttttgcttttctttgcaatcattgcgtccggttatgtgcttgtgaagggattagaggacccaacaaggagcagatataaacttttattgagctgttcgttgattattacttctgtgataccaccggaattgccaatggagctctccatagcagtcaatacatctttaattgcattggctcggcatggtattttctgcacagagccattcagaataccatttgctgggaaggttgacatatgctgctttgataagacagggactctgacatcagatgatatggaatttcaaggtattgttacatcggaaggtgatgacttaatatctgatgcaaataagctgcctctccgaactcaagaagtgctttccagttgccatgcactggtatttgttgacaacaagctggttggcgatcccctagaaaaggctgctataaagggcatagactggatctacacatctgatgagaaggccatgtccaaaaagcctggtggtcaacctgttcaaattgtgcacagataccattttgcttctcacttgaagagaatgtctgttatcgtccgtattcagcagaaattttacgctttcattaagggtgcaccagagaccatccaagagaaattagttgatttacctgctgcatatgtggagacatataagaaatacacacggcaaggttctcgggtcttggctcttgcatataaattgcttcctgagatgcctgtaagtttctgttgatattaatcatgtttgcctatagcctttcttatctagtattctgttattcttttgtcaaaaaaaaaaaaaaaaaaaaaaaaag

SEQ ID NO: 281 - DNA, 4406 bp, Saccharomyces cerevisiae
tttgccagaaaacccaaatctgtttattgccactaagttgaagaaacatataatcaacaattgttggcaattctaaggggaatagtgcaacaagaagccagtaacgccaaatagaggttagcgccaagcaataatttactggtaggttctttcattccctgattttaccatgaatgacgacagagaaacccccccaaagaggaaacctggggaggacgacacgcttttcgatattgacttcttagacgacacgacttctcattctggatcccgttcaaaggtcaccaactcacatgcgaacggatattatataccaccaagtcatgtacttcccgaagagactatcgacttagacgctgatgatgataacattgaaaatgatgtccatgaaaatctatttatgagcaataaccatgacgaccaaacgtcttggaatgccaatagattcgactcagatgcatatcaaccacaatccctacgagcagtcaagcctcccggtttatttgctaggtttggtaatggtctcaaaaatgcctttacgttcaaacggaagaaagggcccgaaagtttcgaaatgaatcattacaatgcggtgactaataacgaattagacgataattatctagactcgaggaataagttcaacattaaaattcttttcaaccggtacattttaagaaagaacgttggcgacgcagagggcaatggtgaaccaagagtcatccacatcaacgattctctcgctaattcctccttcggttatagtgacaaccatatatctaccaccaagtataattttgcgacctttctgcctaaatttttgttccaagaattttccaaatacgctaatctgttttttttatgtacatctgccattcaacaggtgcctcacgtctcgccaactaatagatacaccacaattggtactttattagtggttttgattgtttctgccatgaaggaatgtatcgaagatatcaagagagctaattctgataaagaattaaataattcgacagcagaaatattttcagaagcacatgatgactttgttgagaaacgatggattgatattcgtgtaggtgacataattagagtaaaatcagaggaacctattcctgctgataccataattttgtcatcttcggaaccggagggtctttgctacattgaaactgccaacttggatggtgaaacaaatttgaaaatcaaacagtcgagagtagaaactgccaaatttatagacgttaaaactttgaagaacatgaacggaaaagttgtttccgaacagccgaactctagcttgtatacttatgaaggtacaatgactttaaatgatcgtcaaataccgttatctcctgaccaaatgattttaagaggtgcaactttaagaaatactgcatggatatttggtttagttatcttcactggtcatgaaactaagttattgcgtaatgctactgcaaccccaattaaaagaaccgcggttgagaaaattatcaacagacagattattcgattgttcacagttttaatcgtgctaattttaatttcttcaattggtaatgttattatgtctactgcagatgccaaacatttatcgtacctttacctggagggtaccaacaaggctggcttattcttcaaagactttttaacattttggattctattttcgaatctagttcctatttctctatttgtcaccgttgaattaatcaaatattatcaggcttttatgataggttcagatctagatttgtactacgaaaaaactgataccccaactgtggttcgtacatcctctttggttgaagaacttggtcaaatagaatatatattcagtgacaagacaggaactttaacaagaaatattatggaatttaaatcctgctctattgcaggccattgctatattgataaaatacctgaagataaaacggccactgttgaagatgggattgaagttggttatagaaaatttgacgatttgaagaaaaagttaaatgatccctctgatgaggattcacctattatcaatgacttcttaacattactggctacctgtcatactgtcattccagaatttcaaagcgatggatctattaaatatcaagcagcctctccagatgaaggtgccctcgttcaaggtggtgcagatttagggtataagtttatcatccgtaaaggaaactctgtaactgttttattggaggaaactggcgaggaaaaagagtatcaactacttaacatttgtgaatttaattccaccaggaagagaatgagcgctatatttagatttccggatggttcgataaagttattctgtaaaggtgctgatactgtcattctggaaagattggatgatgaagctaatcaatatgtagaagctacaatgagacatttagaagattatgcatctgagggtttgcggacgttgtgtttggcgatgagagatatctctgaaggagaatatgaagaatggaatagcatttataatgaggctgccacaacattagataacagagccgagaagctagacgaagccgcaaatctaatcgagaaaaatctaatattaattggtgcaactgctattgaagataagttacaggacggtgttccagaaactatccacacattacaagaagcgggtattaaaatttgggttttaactggtgacagacaggaaactgctattaacattggtatgagttgccgtttattgagtgaagacatgaatttgttgatcatcaacgaggaaaccagagatgatactgagagaaatttgttagagaagattaacgctctaaacgagcatcaattgtcaacacatgatatgaaatccttagcgctcgtcattgatgggaagtcattaggctttgccttggaaccagaattagaagattatttgctaactgtggcgaagctttgtaaagcggttatatgttgccgtgtatctccactacagaaagccttggttgttaaaatggtaaaaagaaagtcgtcttcactactgctagccattgcgagtggtgccaacgatgttagtatgatacaggcagctcatgttggtgtcggtattagtggtatggaaggtatgcaagcggctcgttcagctgatatagctcttggccaatttaaatttttaaaaaaactattacttgtccatggctcctggtcttatcaaagaatttctgtcgcaattttgtactctttttacaagaatacagcattatacatgacgcagttttggtacgtttttgccaatgccttttcaggtcaatccattatggaatcatggacaatgagtttctacaacttattcttcactgtttggcccccttttgtcattggtgtatttgatcaatttgttagtagtagattacttgagcggtacccacaattgtacaaattaggacagaagggtcaatttttctctgtttacatcttctggggatggattattaatggctttttccattctgcaatagtatttattggcaccatattgatttacagatatgggtttgccttaaatatgcacggcgaactagctgatcattggtcttggggtgtaactgtctacactacaagtgtcattattgttttgggaaaggctgctttggtaactaatcaatggacgaaattcaccttaattgccattcctggttccctcttattttggttaatattcttcccaatttatgcttctatatttcctcatgctaacatctcaagagagtattatggtgtggttaaacacacgtatggatccggtgtattttggttaactttgatcgttttaccaatttttgcactggtaagagattttctatggaagtactataaaagaatgtatgaaccagaaacgtatcatgttattcaagaaatgcagaaatacaatatcagcgactctaggccgcacgttcagcaatttcaaaatgccatcaggaaggtgaggcaagtgcaaagaatgaaaaaacaaagaggatttgccttttcacaggctgaagagggtgggcaagaaaaaattgtcagaatgtatgatactactcaaaagagaggtaagtacggtgaattacaagatgcttcggcgaacccctttaatgacaataatggactgggaagtaacgactttgaaagtgcagaaccgttcattgaaaatccatttgctgatggtaatcaaaattcaaatagattcagttcttcgagagatgatatttcatttgatatatgaggcacagaaacaaagagcagaagacaaaaaatacaaaaataaaaataagataaaaagaaaagtcattattaccattactgaaatatgtacatttaccataaaatatatccgttatatagaagttataatataagcctacactttgttatcggttttcattcctctgggg

SEQ ID NO: 282 - DNA, 4601 bp, Schizosaccharomyces pombe
tatctttgctttttctgcgcatatcatttgcattgttaatatcttgtaaatatcaatggcccgagatgtagataataagcaaaatgctaaaaggatatcacgagatgaagacgaggatgaatttgccggagaatcgatggttggtagaacgttagacaatccttttctgggtgaagatgaattcgaagatatttttggctctgaaagccaatatatatcttcttcaggccaaaattctaccaatccattccttgctgatacaagaatagagaatagtcctttaggaagtgaaagtaaggccaaccaacttaataagcaaggtacaaacgtaaatcacattgagatacctttgcgcgattttaatgaccctacacaacctgaatctttcctaccacctcctaagaatacatttacttcgcgtataaaaaaaataaagaacttatttaaaaaagagaagaaacaggttaagccagaagatcttggtcctcgacagatcattttaaatgattattcagcaaaccatttcttacacaacgctgtgtcaacttgtaaatacagcgctttcacatttttaccaaaattcctaaaggaacaattctcaaaatatgcaaatctatttttccttttcacggctgttgtgcagcaaattcctggaatcacaccagttaatcgttatacaacgattggccccatgttaattgtactttcagtttctggtattaaagaaatcatggaggatataaagcgcaaaaaacaagatcaagaattgaatgaatcgccttgctacgttttacaggggactggttttgttgagaaacaatggaaggatgtagttgttggtgacattgttaaaatcgtttctgaaacttttttccctgctgacttagtacttttatcatcatctgagccagagggactatgctatattgagactgcaaatttggatggcgaaactaatttaaaaattaagcaagctctcccagaaacagcaggtcttctaaaaccagtagagcttggtcagctatcaggagaagttaaatcggagcaaccgaataataatttatatacttttgatgccactttgaagcttcttcccagtgatcgagaacttccattatctcccgatcagttattgcttcgtggtgctcagcttcgtaatacgccttgggtgtatggcattgttgtatttactggtcatgaatctaaacttatgaagaacactacagaaacacccattaaacgaacttccgtcgagaagcaagtgaactcacagattctgtttttattatgcatctttgtgtttctttgttttgcctcttcacttggagctctcattcatcgttcggtttatggatcagctttatcttatgttaaatatacttccaacagggccggcatgtttttcaaagggttgctgactttctggattctctactcaaatcttgtgccaatttctttgttcgttacttttgagttagtccgatatatacaggcacagctaatcagcagtgaccttgatatgtacaatgaggaaactgatactccagctgcatgccgcacatcttctctagttgaagaattgggtcaggttggatatatttttagcgacaaaacaggtacattgacgagaaatcaaatggaatttcgtcaatgcactatagccggtgttgcatatgctgatgttattcctgaagatcgtcagtttacctcagaagaccttgattctgatatgtacatatacgattttgatacgcttaaagaaaatctcaaacatagtgaaaatgcaagccttatacatcagttcttactagttctttctatttgccatacggttatcccagagtatgatgaatccactaattcaattaaatatcaagcttcttcaccggatgaaggtgccttagtgaaaggtgctgcatccattggttataagtttctagcgaggaaaccgcatttagtgactgtaagtatttttggaaaagatgaaagttatgaactattacatatttgcgaatttaattctactcgcaaaaggatgtcaatagtttttcgttgtcctgatggaaaaattcgtttatacgttaaaggtgctgacacagtcattatggaaaggttagcatccgataacccgtacttacaaactacgattcatcatcttgaagattatgctaccgtgggtttacgtacgctttgtattgctatgcgggaagtcccggaagacgaatatcaaaggtggtcaacagtgtttgaaactgcagcctctagtctggttgaccgtgctcagaagcttatggatgctgctgaagaaattgaaaaggatttaatcttgctgggagctaccgctatagaagatagactgcaagatggagttcctgatactatctcaactttacaaacagctggaataaaaatctgggttctgaccggtgatcgacaagagaccgcaattaatattggcatgagttgcaagttgattgatgaagacatgggtttagttatagtgaacgaagaaacgaaagaggctactgctgaaagcgtaatggctaagttatcttctatatatcgaaacgaagctaccactggaaatgttgaatcaatggctttggttatagatggggtttcacttacttatgcattagattttagcctagaacgccgattctttgaactggcttctttatgccgtgccgtgatatgttgtcgtgtctcacctttacagaaggctttgatcgttaagatggttaaaagaaatacaggtgaagtgctattagctattggagatggcgctaatgatgtgccgatgattcaagctgcccatgttggggttggaatcagcggtatggaagggttacaagcagttcgaagctctgatttttcaatttcccaattttgctatttaaaaaaattgttacttgttcacggatcttggtgttatcagcgtctcagcaaacttattttgtactcgttttacaaaaacattgctctctacatgactcagttttggtacgctttttgcaatgcattttccggccaggtaatttttgagtcttggtctatttcactgtataatgtgctttttactgttcttccaccggtggtaataggtatatttgatcagtttgtaagcgctggtcaactttttcagtatccgcaactttatcaattaggtcaaagaagtgaattttttaacttaaaaaggttttggtcttggataacaaatgggttttatcattcacttcttctatttctttgttccattgctgtgttttactatgatggtcctaataaggatggtctcgcgtcaggtcattgggtgtggggtactacactttacgctgcaatactagctactgttttaggtaaggctgccttaattagtaatcattggactcaatacactgtaattgctaccctcggatctttcttgctatggatagtgtttatgcccatttatgctgttgcagcacccgctatcggattttcaaaggagtactacggaataattccacatctttacgggaatctaaaattttgggcttccctacttgttttgccaacaatagcactgatgcgtgactttgtgtggaaatattcatccagaatgtattatcctgaggagtatcattacgttcaagaaattcagaaatataatgtcacagactatagacctcgtattgtcgggtttcataaagctatcaggaaaataagacagatgcagagaatgcgtaaacagagagggtatgctttttctcaaggtgaagaggaccagtcaaggattttagatgcatatgatactacacatactcgtggagcatacggtgaaatgcgttagatacgtatttttctctattattttatattacattcgcttttggtttctagatctcagatttcgatgagttttacgatgttaagttgttttagtttatcactcgtttagaattattatgttattcatcctattaatcgattaacaagacgttttttctgtattactgtaagaatttcttaaagcataaagacgcattggtaccaccaaatccaaagctgtttgacaaagcaacattaatgcggctctctttagccacattcggcacataatcgcactgaaactgctgaggaatatcagagtattcgaaatttaacgtagggggtaagacgccctatacagttttgttagcaatagaaagtttgagtagaataaaataccttttggacagtcaagaccgtatagacagattcgattgcacctgctgctcctaaaagatggccaatagagcctttgctactagatacaggaaatgcctcaggattccggttcacatcacaaagtaacctagtaatcgctatgctttctgctacatctccaagcttggttgaagttgcatgagcattgatataatccaattgacttgcagaaagaccagcttgttttaaggaacgcttcatagcatagtaagcagcatccccatttggatttggagctgtaatatgatatgaatcagatgccaaaccataaccgactatttcagcatatatatgagcatttcgatttttggcatgctccaattcctcaaggactaaggcagcggagccttctc

SEQ ID NO: 283 - DNA, 6501 bp, Oryza sativa
ccggtggtggcccactagccctgctcgctccggcttccccgactccatggcttccgggcgcccgctgctcgacgcctcgccgcggccgacgcagcagccgccggcgtcatcgctgctcccgccgccgcagccggagccgcccctccgagccgaccgcctcgcgttctccctcgaggtgcccgaccccttccgccgggagcccgacccgtcgtcggccgcgtcgcagcggggggaggaggaggggggcggcgaggaggagtcccgcgcggttgttgtcggggagccctcgtcttcggaggcggcggcggggttcgccgggaacggcgtacggacggcgaagtactcggtgctgacgttcctgccgcggaacctgttcgagcagttccggcggctgtcgtacgtctacttcctcgccatcaccgtgctcaaccagctcccccaggtcgccgtcttcggccgcggcgcctccgtgctcccgctcgccttcgtcctcttcgtcaccgccgtcaaggacgcctacgaggacctccgccgccaccgctccgaccgccaggagaacaaccgcctcgccagggtcctcctggcgccgcccgccgcgggggagttcgcgcccaagaaatggaagcacatccgcgtcggggacgtcgtccgcgtcgcctccagcgagacgctccctgccgacatggtgctcctcgccaccagcgacccctccggcgtcgcgcacgtccagaccgtcaatcttgacggggagaccaacctcaagacgaggtatgctaagcaggagacgcaactgaggttctcgcaggacggtggaatcggcggtgtccttcattgtgagcggccaaacaggaacatctatggatttcaggcgaatttggagattgatggcaagcgtgtctcgctagggccatcgaacattgtgctccgtggatgtgagctcaagaataccacctgggcgataggggttgttgtgtatgctggaaaggagaccaaggtcatgcttaatagctccggggcgccgtcgaaacggagccggttggagacacagttgaaccgggagactgtcatactgtccattatgctcattgggatgtgcacgaccgcaagtgtgctcgcggggatttggatactgaatcaccgtggggatttggaattcacccagttctttagggagaaggattacacgacagggaagaactacaattactatggcatggggatgcagatattcattacattcctcatggcggtgattgtatatcaggtcatcattccgatctctttgtatatatcaatggagttggtacggcttgggcaggcatatttcatgggtgctgacagagatttgtatgatgagtcatcaaggtcaaagttccaatgcagggccctgaatataaacgaggatctaggacagattaaatatgtattttctgataagacagggacgctgacagagaacaagatggagttccagtgtgcatcaattcggggggttgattactgttctggcaaagattcatgcggatactcagttgtaggtacgatgtctttaatgtatatttctggttttcatgttgaactttcctagtatggctgcttattttctggttttggacagtcgatgatctcctatggacacccaagatggcagtcaagattgatcatcggcttttgaagttactgaggggtggtggcacagatgaggaaacaaagcttgtcctcgaattcttccttgctcttgctgcatgtaataccattgtgccacttgtcctagatactcgtgattctaagcaaaagttgattgattatcagggtgagtcccctgatgagcaggcactagtgtatgctgcggcatcttatggcattgtgcttgttgagcgaacatctggttatgtggtgattgatgtccttggtgacagacagaggtaaggtagtctttcatcatttgctttatggacatgctaattttcaactctgcatgagtgtgttttcaataataattagtggcattatgcaatttagctaataccaattttggtgtatcaacatcattatgtgactaggagtggatgtctgctacagtgctagtgtgctacctgatccatgatgtttacatctctggaaaattatacctacaaaactttattcaactgcaatgtcatatagtcatcaacagttggtagcataacttattcaataacgattttcacaagtgttttatgcactttgctttatggtgtttagtgacgtcattcttttgtcttatcttattggtttgctggtgtgaatgctaactttgagttgtatcttgctagttatcttcctattcctattcttagcatacagttaatatttattcaaaataaaaataataatttggaatattttgggatgcaacgtgccaactccaaatgatttgtggcattaccccacatgagcgaaatttcagtacttagtttatcaggcttacctcttggagatatgttacaactctccaagtgcatgtcttgacttttccttgtgtttatagacatgcttgcatatcctattatagtaagctagtttgtggagccaatactgtaatatattggttgaatatatttgatgaatggagctctttttattggttaatcaccaactgtagagagttaaatgtgtttgctgtaagtccatgtcaaacacctgggctataggcaaaaccaagttaattatcactttgaacccagttattgtgatgagcacatatctgcactagggccataaatttgtaaggagctgcattgaacaggctggcatttataaacaaagcaaatttaggatgtgcatatggatttgcagctgaatttctggataatttggataaaaccatatcatttttcaccaaaccaaatgtttatctaacatttttaataacactattccaaaaggcattcttagttacctcatatgtacgaagtacgctagctttgtttataaatgcccgctttgttactacattgactactctgctccattctttcagttcgttgttctttatgtgtaaattttattttcaatatcttgtttacaagaatggcttatagttccaatttatcttctggtatgggatgtgcagatttgatatattaggacttcatgagtttgatagtgatcgtaagaggatgtctgtcatagttggctgccccgataagactgttaagctatatgtgaaaggtgcggacagttcattgtttggaattaccaaaaattcattagatctggacattgttcgtgctacagaggcacacctccacaaatattcatcgtttggtctaagaactctcgttattggcatgcgtgaattgagtcaacctgagtttgaggagtggcaattggcatatgaaaatgctagcacgtcagtacttggaaggggaaatttactccgatcagttgcggccaatatagagaacaatatccgcatattgggggctactgggatagaagataagcttcaagatggggttccagaaacaatagaatctcttcgacaagcagacataaaggtttggattttaacaggagataagcaggagacagcaatttctattggctactcttgtaaactgctgaccaatgacatgacacaaattgtgataaacaacaactcaaaggagtcttgtaagaggagtctcgaggaagcacatgcaacgattaagaagctcagaattgcttcaactggcacacagagtccagaattagcatcagaatctgctggtgtaactcttgcgttaattgtagatggtaacagcctggtttacatacttgagacagagttgcaagaagaggtactcatctaaatatgattcttttttttcatttcctttcatccttggtataaaatcatagttgatgcatggactttcttcttttgtttgtgtagcttttcaaagtggcaagagaatgtagtgttgtattgtgttgtcgggtggccccgttacaaaaggcagggatagttgcacttatcaaaaaccgaacagatgacatgaccttagcaattggtgatggtattattccctcctggttctgctattatggcatataatattctgtgagaaccaatttatgtacatgtgatatatgctaattaatcttttgttgttcaggtgcaaatgatgtttcaatgattcaaatggctgatgttggtgttggcatcagtggtcaagaaggacggcaggctgtaatggcatcagattttgcgatgggccaattcagattcttggtccctcttctattagttcatggccattggaattatcaaagaatgtcatatatgatcctctacaacttttacaagaatgcgacatttgtcttggttcttttctggtaagagcccttttgcattgaagttttcacactttgaaaaaaaaaactgtttttatgtagaaaattatctaaacgttactgtggaaacccccatgttagtaagacctagtgaaaagaagtggactctatttatgttcagttgaattaccaaagttgttgctttcttaatttttgcaatattcagagacattgtctccaaaatataacacttaattttgtgatctcaggtatgtactttatacagcattcactctgacaactgctatcacagaatggagtagccttttgtatactgtgctatatacatcccttccaacaattgttgttggtattcttgacaaggatcttagtaaggaaacactactagcttatccaaagctatatggatctggccaaagggatgagaagtataatgtaaatttgtttgtcctcaatatgctcgaagcgctatggcaaagtctggttgttttctacatgccatattttgcatatagacaaagtacgatagatatgtctagtctgggagatctatgggcacttgcccctgtcattgttgtaaatatgctactagccatggacatctttcggtggaattggatcgtacatgcttttgtgtggggaacaatagcagcaacaaccatttgcctctttgtgatcgactccatttggtttcttcctggatatgggtaagtacttcatttccagctttcttttatttataggcgaaccctcttttttttaaaatgttttggtgctaaaaatgtagtaaccaacctgatgtttggaactggcaatggctttttaaattctttcctgcaaggcattttgtaaatttcataactgtaaatttctgaaatatgtgttaatatcagttatcctaggaagtaaaatgacttttgagcttatgcaactgttatgggaggagctcctgagtactcttttcgtactcgtaaaggaagtcgtttaggataatgtttaagtcaaaccttgggaatataaatcatgaataactctcaagtcgttgagtttgaaaatgtaaaaattatataaatagatttgtcttgaaaaatactttcataaaagtatacatatatcacttttcaataaatatttttatagaaacaagaagtcaaagttgtgttacgacttcctttatgagtacggagggagtatgtggtctctattttctcatttgtagtattttgtgttgccttgttgctgttcacgttaatccttgtagagttcttttattcctaggaggatattgagaagtagagatatattcaagtggtaactatgatttattgagagggataagtgttcagattaagatatatagaaaattaacatagatgctgctacctctcaatatctcctatgtaaaagggataaaagttgtcctgatacatagttagattaaatgcctctttctttgcaagcatgtttgtgctacatccatcatgtaatgcgagcaccatgatcatgttttcttgaatggatctcctaaagtgaaataggagttctttttgcaatttcttgattgattgcatactgactcaatataactatttcagggccatctttcatataatggggacaggtttgttttggttactgctgcttatcattgttgttgcagcaatggtaccacattttgtaatcaaggcctttacagagtattttacccccagtgatattcaagttgcccgagagatagaaaaattcgagaatgtaaatcaggtgaaccgttcagaagttccaatgacacgtctgcatgacccaaggagatagctatagaaaattctcctttatagaaatttctttttttttctgttgtttttcgcctctttggtgtgtatacgagtaaattcatttagcactaaggtgataggtttagcctccaagatgtatgtatgtaggcatgtgttcatctaacatttactgaaaaggaaatataaattgtttgatgtatgcaagtttctcatccttgtgtcgaccagcacaactgtaaggtgaagagtgttatatacctatattacctcttactctatcactacgatgatcctgtcctattgcataagctgatttatctttgtatttttagtttcttagcttcagtttattcatgctatctgtcac

SEQ ID NO: 284 - DNA, 1522 bp, Oryza sativa
cccacgcgtccgcgtactacggaaacttgtacactatcaagctcagcaactgcctgcccctctctttccctcgccattaagttttctcgtccggcggcgtcacccctgcgaattaactaactagctaggccggccatggagacggtggccgcggccagctacacccgcggggcggcgacgcgctcgccagcgtgctgcgccgccatgtccttctcgcagtcctacaggcccaaggccgctagaccgccgagcacgttctacggcgagtcgctgcgggttaacacggcgaggtcgctgccgtctgggaggcagtccaaggcggcgagccgggcggcgctcagcacccggtgcgagatcggggacagcctggaggagttcctgaccaaggcgacgccggataagaacctcatcaggctgctcatctgcatgggggaggcgatgaggacgatctcgttcaaggtcaggacggcgtcgtgcggcggcaccgcctgcgtcaactccttcggtgacgagcagctcgccgtcgatatgctcgccgacaagctcctcttcgaggctctggaatactctcatgtctgcaagtatgcgtgctccgaggaagtcccggagctgcaagacatgggtggaccagtcgatggtggtttcagtgtagcattcgaccctcttgatgggtccagcattgtcgacacgaacttcacagttggaaccatatttggtgtctggcctggtgacaagctgacaggcgtcaccggtggagaccaagttgctgctgccatgggcatctatggccctcgcactacttacattatcgctctcaaagattgtcctggaactcatgaattccttcttcttgatgaaggaaaatggcagcatgtcaaggacaccacaaccattggagaggggaaaatgttctctcctggtaacctgagggctacatttgataatcctgaatatgacaagctcatcaactactatgtcaaggagaagtacacattgcgttacactggaggaatggttcctgatgtcaaccagatcatagttaaggagaagggcatcttcaccaacgtgacgtctccgacagccaaggccaagctgaggctcctgttcgaggtggcgccgttgggtttcttgatagagaaagccggcgggtacagcagcgacggcaaacagtcggtgctggacaaggtgatcaacaacctcgacgagcggactcaagtggcctacggttccaagaacgagatcatccggttcgaggagactctctacggctcgtcgaggctcaccgccggcgccaccgtgggcgccgccgcctaatcttttgctgcaacgcgagcccagtgtctctgcaggcctcaaaaacgctgaaactgcagtcgttttagactcccatcctgtaatgcagattgggttgtagttgaagtgggacttgaaactgcaaagttatactcctttttgcaaggtacccgtttttttccccttttggtgtaaacagttgcatataaaggtaaattcgcattaaaaa

SEQ ID NO: 285 - DNA, 1440 bp, Oryza sativa
gtcagttcccgcgccgtgtgaccaatactcaacacttaaaccgcgcgctttttagccgacccgagcagccggagagtgaggcgaggcgaagcgaagggaagagcgcgaggcagagtaagcagacgagaagaacagcgcgcggcgcggtagctgaggagagtggtgcggagatggatcacgaggcggacgcgtaccggacggacctgatgacgatcacgcggtacgtgctgaacgagcagagccgcaacccggaggcacgcggcgacctcaccatcctcctctcccacatcgtgcttggctgcaagttcgtcgcctccgccgtcaacaaggccgggctcgccaagctcatcgggctggccggcgagaccaacgttcagggagaggagcagaagaagctggacgtgctgtccaacgaggtgttcgtcaaggctctcgtcagcagcggccgcacctgcgttcttgtctccgaggaggacgaggaagcgacgttcgtggaccctgcgctgcgtgggaagtattgcgtgtgctttgatccactcgacggctcctccaacatcgactgtggcgtctccatcggaacgatctttgggatctacatgatcaaagataaggagaatgtgactcttgaggacgtgttacagcctggaaaaaacatggttgctgctggatactgcatgtacggcagttcctgcacgcttgttctgagtactggaaatggtgtcaatggcttcacacttgatccatctctcggggagttcatattaactcatccagacatcaagataccaaagaaagggaagatttattcagtgaatgaagggaatgcgaaaaattgggacgagcctaccgcaaagtttgtggagaagtgcaagttccctaaggatggttcatcacctaaatccttgagatacattggaagtatggttgctgatgtccaccgtacgttgctatatggaggagtatttttgtaccctgcagacaagaagagcccaaatggaaaactccgtgttctgtatgaagttttccccatgtcattcctgatggagcaggctggaggccagtctttcacaggcaaagaacgggctcttgacctcgttcctaccaagattcacgagagatccccaatatttcttggaagcttcgaagatgtggaggagatcaaagggttgtacgctgcacaggcgaagtaagctcggtttgatcgatctggcaccatcaaggcgtgcgaatggactccctggccttactgtaacatgcatgattcgtcaggcacttcttttattcgtcttactgtacgtttgtaaaattcagtgtaatagtgttgaggcctggaacagcttcatgagcaactaaggccttttctactattatttacaaaatacatacaccgtgcatctctagcagctaaagcactaatacaacaagtcactaaggcaaaaa

SEQ ID NO: 286 - DNA, 1201 bp, Triticum sp.
ttctagagcagcaatggagaccgtcgcggctgccggctacgcccgcggggccgccacgcgctccccggcgtgctgcgccgccatgtccttctcgcagtcctacaggcccaaggctgccaggccggcgacctcgttctacggcgagtcgctgcgggcgaacacggcgaggacgtcgttcccggcggggaggcagtccaaggcggcgagccgggcggcgctcaccacccggtgcgcgatcggcgacagcctggaggagttcttgaccaaggcgacgccggacaagaacctcatcaggctgctgatctgcatgggggaggcgatgaggacgatcgccttcaaggtccggaccgcgtcctgcggcggcacggcctgcgtcaactccttcggcgacgagcagctcgccgtcgacatgctcgccgacaagctcctcttcgaggcgttggagtactcccatgtgtgcaagtacgcgtgctctgaggaagtccccgagctgcaggacatgggtggcccggtcgaaggcggattcagtgtggcgttcgacccccttgacggctccagcatcgtggacaccaacttcaccgtgggaaccatcttcggcgtctggcccggcgacaagctgaccggcgtcaccggcggtgaccaggttgctgccgccatgggcatctacggccctcgcaccaccttcgtagttgccctcaaggactgccccgggacacacgaattccttctcctcgacgaaggtaaatggcagcatgtcaaggacaccacgagcatcggagaagggaagatgttctcccttggcaatctgagggccacgttcgacaaccctgattatgacaagcttgtcaactactatgtgaaggagaagtacactctgcgttacaccggaggaatggtccctgatgtcaaccagatcatcgtgaaggagaagggcatcttcacgaacgtgacgtcgccgacggcgaaggcgaagctgcggctgctgttcgaggtggcgccgctggggttcttgatagagaaggccggcgggcacagcagcgacggcaagcagtcggtgctggacaaggtgatctccgtcctggacgagcggacccaggtggcctacggctccaagaacgagatcatccgcttcgaggagaccctctacggctcctccagactcgccgccagcgccaccgtcggcgccaccgcctaataatct

SEQ ID NO: 287 - DNA, 1301 bp, Chlorella sorokiniana
gtgacgaccacaaaagaattccctctatataagaaggcattcattcccatttgaaggatcatcagatactgaaccaatccttctagacgatgcaggccaccgctgtcgccaccgccgcccctgcggcccgcgtcgccaccactggcaaggccgccaccggcgtcaaggccgccccccgcgtggccgtgcgcgccgccggcgccagcgccagcagcagctttgccaccggcgcccgcctgagcgccaaggccagccgcaccgccgcccgccgcgccgccgtggccgcccaggccaagatcggcgacacgctggaggagttcctgctggaggccacccccgaccccaagctgcgccagctcatgatgtccatgtccgaggccatccgcaccatcgcctacaaggtgcgcaccgcctcgtccggcggcaccgcctccgtcaactcgttcggcgatgagcagctggccgtcgacctgctggccgacaagctgctgttcgaggccctcaagtactctggctgctgcaagctggcgtgctctgaggaggtgcctgagcccctggacctgggcggcgagggcttctccgtggcatttgaccccctggacggctcctccatcgtggacaccaacttctctgtgggcaccatctttggcgtgtggcccggcgacaagctgaccggcatcacgggccgccagcaggccgccgccggcatgggcatctacggcccccgcaccgtcttctgcatcgccctcaaggacgcccccggctgccacgagttcctgctgcaggacgatggcaagtggctgcacgtgaaggagaccgagaccatcggcgagggcaagatgttctcccccggcaacctgcgcgccacctttgacaaccccgcgtacgagaagctgatcgcctactacatcggcgagaagtacacgctgcgctacaccggcggcatggtgcccgacgtgttccagatcatcgtgaaggagaagggcgtgttcaccaacgtcatctccccctccaccaaggccaagctgcgcctgctgttcgaggtggcgcccctggccctgctggttgagaaggcaggcggcgcctcctcctgcgacggcctgtgcgtgagcggcctggacgtggaggtcaagcagcacgaccagcgcacccagatctgctatggctccaagggcgaggtgcggcggtttgaggagtacatgtacggcaactccccccgcttctccgaggtcaccgcctaagcggctggtcatcgcctgagcggctcagtgctgctgactatgcagccggcggctgactat

SEQ ID NO: 288 - DNA, 1585 bp, Glycine max
attcggctcgagtctgtctctttgctccatttcagtgctctgtcttctcccccaccaccgcactctctcagatattatcatttcatatcacacattcacatcctatcatcatcgacaacacgctatccccattgcttcttctcttctccctctctcgtttcctacttgacggcgccgtttcgttctccagaagatgcttctgagtacttcgcgctgcaactagacatgatgagttcaagtttcaagacatgggctgtgggatttgcacttggaaatgaaggagaggcaacgttggagagctgaagaggatgctttattacgttcttatgtcaaacagtatggtcctagggaatggaatcttgtgtctcagcgcatgaacacatatcttaacagggatgctaagtcgtgcttggagaggtggaagaactacctcaagcctggcatcaaaaaaggctctcttactgaagaagagcagcgccttgtcatccaccttcaagcaaaatatggaaacaaatggaagaaaatcgctgctgaagtcccagggcgcactgctaagcggttaggcaagtggtgggaagtcttcaaagagaagcagcagagagagaaaaaggagatcaatagaattgccgacccaattaacaatagtaagtacgagcacatactcgagagttttgcagagaaactagttaaggaacgcccttcaccatcatttgtcatggctgcttccgatggggcatttctgctcactgatacaccagcacctgcatcttccttgcgtccttcttggctttccaattctagtagtgctgcagccatcggcccaagttccctttctgtgaaactaagtctttcttcctcaacggtggccacacctccattttcatggttgccacccgagagaggaccagacaatgctccttttgttttggggaatgtatcagcgcttcatggagctattccaactctaagtgatagcatgcatatgtctcagatggtggagcactgtaaagagttgggagaggggcatcgtgctttggccacgcacaagaaggaggcagcttggaggttaagtcgggtggagttacagttggagtcagagaaggccaaccgaagaagggagaagattgaagaatttgaagcaaagattaaagctcttcaggaagaggagaaagctgctttaggtagaattgaagcagaatacagagaacagttagctgcattgaggagagatgctgaaaacaaggagcaaaagttggcagaacaatgggatgcaaagcatttacggtttactaggttactagagcaattaggatgcagagcagggctccttgagccaaatgcaagatgaagatatattttggcaaaatggatattggtgctcttctgactaaaattatatgcagtttgtgatcttggtatatttttattttagacgtgtatgaatttcctatctattcatacaacttgagtaacttccgttaacagttgaattacctgcatatggtatcacatccgagtttataaacttagttatattcctgaaaaaaaaaaaaaaaaaaaaaaaaaaaaaaaaaaaaaaaaaaag

SEQ ID NO: 289 - DNA, 1494 bp, Glycine max
ctcggtttccactttctctctgtttaagaactcaccacttcttcaacttggtgccgttgtttcatggaccagaactacgcctcatagctcctttctcatttcacacacacaaagaaccttgagacatcatgaagattccaagttccaagcaactggttgtgggatttgcacttggaaatgaaggataggcaacgttggagagctgaagaggatgctttactacgcgcatatgtcaaacagtatggtcctagggaatggaatctggtgtctcagcgcatgaacacacctcttaacagggatgccaagtcatgcttagaaaggtggaagaactacctcaagcccggcattaagaaaggatctcttacagaggaagagcagcgtctagtcatcaaccttcaagcaacacacggcaacaagtggaagaaaattgcagcacaagtccctggtcgcacagcaaagaggttagggaagtggtgggaagtgttcaaagagaagcagcaaagggaaacaaaggggaataactgcaccattgacccaattaacgatagcaagtacgagcatatccttgagagttttgcagagaagctagtgaaagaaaggccttcaacatcaacatcaacatcatttgttatggctacttccaacagttcttttctgcatgctgatgcaccggctcctgcaccagccttgcttccgtcttggctttccaattccaatggcactgcacctgtgaggccaccctccccttctgtgactcttagtctttctccctcgacggtggcagcgcctcctccatggatgcagccccccgtcagaggacaggacaatgctagtcctcttgttttggggaatgtggcgcctcacggggctgttctagcatttggtgagaacatggtgatgtctgagctagtggagtgctgcaaggagttggatgaagtgcatcatgctttggccgggcataagaaggaggcagcatggcggttaagcagggtggagctgcagttggagtctgagaaggccgggcgaaggagggagaagatggaggaaatcgaagcgaaaatcaaagctctgagggaggagcaaacggctgcattggatagaattgaagcagaatatagggagcagttggcagggctgagaagagatgctgaaagcaaggagcaaaagttggctgaacaatgggctgcaaaacacttgcgacttactaagtttctagaacaggtagggtgcagatcaaggctcactgaaccaaatggaagatagagtgacatcaatcattcacaaattgggaaaatctagtttgcttttacttattattatgtcttgaatttatatgatatgaactttatagtcatagtagttttgttcctgtcatttttctaaaatatgttgttacatatggttattgatatcatccctatcttttcatacaacttgaggacttgcattagcggttgagttatgtttaaatataacatcctttatgaaaaaaaa

SEQ ID NO: 290 - DNA, 1547 bp, Zea mays
gagagaatctaaagtgaccggacgctgtccttccttgctgatcggcgacacggtccatccctccctcgctcgctagggttccttttcgtccatggatcagagcttcgggaatctcggggccggagctgggagcagcagcgggggctccaactccaaggcggcggcagccgccgtgtcctcctcgtctttcctgcagctgccgctgtcgacggcgtcccccgcgtactacggcgcgccgctcgcgctcctgcaccacgccgccgcggccccgtcgtcgtcgcagcagcaccagcagcagcagcaccaccaccactacgccaggcacggcgccgagatgtcggcagcggaggccgaggccatcaaggccaagatcgtggcgcacccgcagtactcggcgctcctcgccgcctacctcgactgccagaaagtgggcgcgccgccggacgtgctggagaggctgacggccatggcggcaaagctggacgcgcgcccgccgggccgccacgagccgcgcgacccggagctggaccagttcatggaggcgtactgtaacatgctcgtcaagtaccgggaggagctcacccggccgatcgacgaggccatggagttcctcaagcgggtggaggcgcagctcgactgcatctccggcggcggcggctcctcctcagcgcgcctctcgctcgccgatggtaaatcagaaggtgttggctcttctgaagatgacatggacccgaatggtcgcgagaacgatccgccggagattgacccacgagcggaggacaaggagctcaagtaccagctgctgaagaagtacagtggctacctgagcagcctcaggcaggagttttccaagaagaagaagaaagggaagctcccaaaggaggccaggcagaaactcctccactggtgggagctgcactacaagtggccgtacccttcagagacggagaagattgcgctcgcagaatcaacgggcctagaccagaagcagatcaacaactggttcatcaaccagaggaaacggcactggaagccatcggaggacatgcctttcgtgatgatggaaggcttccacccgcagaacgccgctgctctgtacatggacgggccgttcatggccgacggcatgtatcgcctcggttcatgaactacacacttccatggacgactgtgggggcctatccaatcgtcggaccgtgggagtatatttcagtgttgcggtgcaaggacattgttgtggaatttttgttgctgattgccaaggggtgggtcggtcgatgtagcgtctatgcatggcttgtagttctcctgtaatgttgttgttaatttccgcttggcggcttgtaatctaggtgtatctctggaacttgaatcctgggtgattaatccggcaagcagctgcctgtttgtatgattgtatggttcgggttggtggaacatgatgcatgctaaggcgtggcctgtctggatcaaaaaaaaagaagatgtcttttgtaccagtggaatgattggaacttcagattgctgaacaaaaaaaaaaaaaaaaa

SEQ ID NO: 291 - DNA, 1214 bp, Glycine max
attcggctcgaggtggcagcataaccagaaaaaggttccagaaattctggtaaggaacgaagcaaagcaaacgcagcgtttcgtttcgtgtcgctgctggttatggatggaatgtacggagtgccggcggagtacgccgacaaggctctcatgacgccggagaatctgattttcccgccggactaccaccacgacttcctcgccgccggccggattccgctgttcggatccgacgagttcttctcctcctccgccggaattcaccggcagcaggaagatgacgtggcagccaccactgtcatgaaggccaaaatcgcctctcaccctcactaccctcgcctcctccaagcttacatcgagtgtcagaaggttggggcgcctccggaaatcgcgcgcttgttggaggaaatccggcgagaaaatgacccgtgcaagagcgacgccgtttcttcttccacgtgctttggagccgatcccgagcttgacgaattcatggaagcctactgcgacatgttggtgaagtataaatccgacttggctcgcccttttgatgaagcaaccactttcctcaacaagatcgaaatgcagctcagccatctctgcactggtgcttccgtttccaacgtttctgatgatgggggtgtgtcttcggacgaagatttgagtaccggagatggtgatgctcaagatggccaattaaagggtgaagatcgtgagctcaaggataggcttttacgaaagtttgggagtcacatcggtactttgaaactcgagttttcaaagaagaaaaagaagggtaagcttccaaaggaagcaagacaagcattgcttcaatggtggaatgttcactacaaatggccttaccctacggaagctgataagattgaactggctaagtcaacagggctggaccagaagcaaattaacaattggtttattaaccaaagaaaacgtcattggaaaccatcagagaatatgcagttttctatgatggaaaattttaacggacggatccttgctgatgaatgaatgaggtgcatgtacatgatattttcaaatgtatatcccgattaattattgcttgtattttcttttttgtaaattctaaattaaaagcagattactgacagtaaaatgcttattactttcccatgaaggaaaagggaaatgatcataatagtattcttgataaataactactgacattgtgaatt

SEQ ID NO: 292 - DNA, 1334 bp, Glycine max
gaattcccgggtcgacccacgcgtccgtacggctgcgagagacgacagaaggggagaattagatatacatattttatttatttgcttaggatattgtcctaaaacttacttgcttggaccccagtagttgagttgaggaagtgatggaagcagtttacaggttgaaacctcttttggatgtggttagagttgggaacgctaccacttctgagatgcgtcttgactcaacggctaattgttacctgcagctagaagctcctcaacctcaagagaataataatgtaaccgactcatcatcagatatgtcggatcggataatcaagatccagatcgccaatcaccctctttatccagatttactctctgcatatattgaatgccaaaaggttggagcaccgccagaactggcatgccttcttgaagaaataggccgagaaagccaccgcatgaatgctcgccgtgagataggggagggccctgaacttgaccacttcatggaaacattctgccaagttcttcatagatacaaggaggagttgtccaggcccttcaacgaagcgactttgtttttgggtgacatggaatcacaactcagcaacctttgtaatgaaacactaacaaagtcatcggataacaacaaccgctccgacgaggtagctagtggggcatcagaagaggaattaagttgtggggagatggaagcatttgaagataatgtatcttcagtaacttgtccaagtgatcaaaggcttaaagagatgctccttcgcaaatacagtggccattttagcggtttgagaaaggaatttctgaaacgaagaaaaaagggtaagctaccaaaggatgcaaggatggcactcatgggctggtggaacacccatcatagatggccttatcctacggaggaggagaaagtgaagttatcagaaattactggtctggatcaaaagcagatcaataattggttcatcaatcagagaaaacggcattggaaacctaccgaggacatgcgatttgccgtcatggacggattaagaggcggcggtggcggcggcataggagggcctatgttgttttagctctggaagtgctcctcaacgatctgaacttgtacccttcgtaattgcaggagcaatgtatgtgcattgcattcctgttacacgtgatatatatactaaattttagagactgaactgttgtttagctaatatacttgtcaaagttgtagttatagtagtgtaatgcgccattgttatgcagtattcctgaatctttgattatattataacaatgtcgtgctgaaaaaaaaaaaaaaaaaaaaaaaaagcggccgc

SEQ ID NO: 293 - DNA, 1723 bp, Glycine max
gaagcttcggtttctctctctctctctttctctttctcttagggttttcactttcaccaatttctccttctcttccgatctacgcccaaaggtatcacctcgcgtgcattcgttcctaatcctttcaaactctccgttctcccatctttaacttgtttaagctgctacgtttaattgaattcgccgtttccaaattgtcttttcatttctttcttttgttctgcaattagacattgctagggttctggagtactggattagctcattaaggattgagtactccatctatcttctgtcttcatggataaagacaaatctctaggtttgccacctccgtctggacgttattctggttactcgtccaccggaagtgttttcaacgtgaaatctgaaccgtccccgtcgtcgtcaaccacgttgtatccgccattggctccgggaactaccagttccgagtctagccattttggacatggattgtccacggattctagtggttttagtcatgatattagcagaatgcctgataatcccccgagaaatagaggtcataggcgtgctcattcggagattctcactttaccggatgatattagtttcgacagtgaccttggtgttgttggaggtggtgatggtccttccttctccgatgatgccgaggaggacttgctgtccatgtaccttgatatggataagttcaattcatcgtcggcaacgtccacgtttcaaatggttgagccgtctaatgctgtgggagcatcggcttcaacaccggcgtcaggggcacccacctcttctaccgagaatgttgttattgggactaatgaaaggcccagagttagacaccagcatagtcaatccatggacggctcaaccaccatcaagcctgagatgctggtttcaggttcagaagacatgtctgcggctgattccaaaaaagcaatgtcagctgccaagcttgctgaacttgccttgattgaccccaaacgtgcaaaaaggatatgggcaaataggcagtctgctgcaaggtcaaaagagagaaagatgcgatacattgctgagcttgaaaggaaggtgcaaacattgcaaacggaagcaacatctttgtctgcacaattaactctcttgcagagagatacaaatggcttaaattctgagaacaatgaactgaagctgcggttgcaaaccatggagcaacaagttcacttgcaagatgcattaaacgatgcattaaaagaggaaattcagcatttgaaaatattgactgggcaagctatgccacctaatggaggacctatgatgaactttgcttcttttggaggggggcagcaattctatcccaataatcatgccatgcacacccttttagctgcacaacagtttcaacagcttcaaattcaccctcaaaagcagcagcagcatcagtttcagcagcttcagcaacagcagcgggaacagcaccaacaatcaattgacttgaaaatgagagaagctacacctactccatgccccaaagacaatgcctcatcagatgtaaatccttctggggccaaggactgttgagagttgagactgctcattgtcttctctatttgctttatagattttcctttgtcttgtgtcctagtgtgtttagcctttgttatattttttcattcttaaacagtacaaatggtcctagttagagattgagtataatacatttgcatctttgttattatgt

SEQ ID NO: 294 - DNA, 1523 bp, Glycine max
attcggctcgaggtttcttctgcagctatggcgattcaagatcaaaatggatttttcagatcacagggtggtcctccagaaggaggtggtgtatctttgagttctgggcattctgtcacacatattcaacttaatgaccagttttcttgtgggaatgactatgctctgaaggtaaggaagccgtatactatcactaaacagagagagcgatggacagatgaagaacataagaagttccttgaagctttaaagctgtatggacgggcttggcgacgtattgaagaacatgttggcacaaagactgctgttcagattcgaagtcatgctcagaagtttttttctaaggttcttcacgatcctactgggaacaatacaaacacagtggagtcaattgaaattcctcctccaagaccgaaacgaaagccgatgcatccttaccctcgtaaactagttgagaccccaaataaggaaatttcgatcccagaacaacctatgaagtctaattctctgaagtcgtcagactttgatcaagaaaaccaatctccaaaatcagtattatcaggagttggttcagacagccttggctcctctgattcagacacaccaaatggaagtttgtcgcccatgtcatccattagtggcttccatacaagcagttttacacgtgccaaacccaaaacaacaacatctgaggaagaagctgggatggacactgattcaactcatgatgagaaacctcttatgaaattcaagcttcctccaaatggatgtgtttccatcaaagaagacaacacagcagaagaatcttccggtcggactttcaaactctttggaatgactctatttgtaacagacacctgcaaaccatctccaacaatcgaggaatgctaaagatacctctaaacattcgcgcgcaacgcctttcctcctccatggaggatggcaaattggaacttgttggacactctagagcaagtgaaacatcagcaatatccaagctaaaggtgagagtggaacctgaagcatgtgggaaagggtttgtgccatataaaagatgcatatctgttgtgacagctgatgatagagaagagcaatgtatccatctttccttgtagcttataccccactggatttttccttcaaaaagtgttccctttgtcatgatgagctgtaatggttgttttggttgctgctggatgtgagttggtatgatataggaaggaaaaaggggtggctgaaaattttgatatttccgttgaattgcactgcactgcacattctccagctgttcaaatccgtaaacttgccttttctatttttttgacttccaagtttcaacacattctccgcgggtccaagccgtgtctgtgcgcggcacttaggagctgtgtccgtgcttcctagtttaactgtgaataactgtgaattatatctagtgccttttttttaaaaaaaaaaaaaactttttatgctccctaagagtatgcaaagtgtaagtcacgtactaaaaaaaaaaaaaaagg

SEQ ID NO: 295 - DNA, 1656 bp, Oryza sativa
gcgtcgagctgcctagctatcgagatcttcgtacgtaaatacgtctccctcgtctccggcgagccaccggcttgggcgtacgtgagagatggcgccgccgtcagccatgaacacgtcgagggcggaggagaaggccatcgacgactggctccccatcacctcctcccgcaacgccaagtggtggtactccgctttccacaacgtcaccgccatggtcggcgccggcgtcctcagcctccccttcgccatgtccgagctcggctggggtcctggggtggcggcgatgatcatgtcgtgggtgatcacgctgtacacgctgtggcagatggtggagatgcacgagtgcgtgccggggcggcggttcgaccggtaccacgagctcgggcagcacgcgttcggggacaagctggggctgtggatcgtggtgccgcagcagctcatcgtcgaggtcggcgtctgcatcgtctacatggtcaccggcggcaagtcgctcaagaagttccacgacctcgtcgcgccgccctccgcgccgcccatccggacctcctacttcatcgtcatcttcggctgcctccacctcgtcctctcccagctccccaacttcaactccatcaccggcgtctccctcgccgccgccgtcatgtcgctcagctactccaccatcgcctgggccgcctcgctccaccaccacaaccacaacaatggcgccgccgccggaggcgtggactactcgctgacggcggcgacgccggcggggaggacgttcaacttcctgagcgcgctgggggacgtggcgttcgcgtacgcggggcacaacgtggtgctggagatccaggcaacgatcccgtcgacgccggagcggccgtccaaggggccgatgtggcgcggcgtcgtgctggcctacggcgtggtggccgtctgctacctccccgtggcgttcgcggggtactacgtgttcggcaacgccgtggacgacaacgtgctcatcacgctggagcggccggcgtggctgatcgccgccgccaacatattcgtcgtcgtgcacgtcgtcggcagctaccagatctacgccatgccggtgttcgacatgctcgagaccttcctcgtcaagaagctccgcttcaaacccggcatgcctctccgcctcatcgcccgatcactctacgtcttgttcaccatgttcgttgccatcgccgtccctttctttggtggattgctaggcttctttggtggctttgcgtttgctccaacgacctacttcttgccatgcattatgtggctgtcgatcatgaagccaaagaggtttggcttgtcctggtgcatcaactggttctgcatcatcatcggcgttcttctgtcggtgttcgcaccaatcggaggtctccgctcgatcatcgtgaatgcccagagttacaagttcttctcgtgagtgattaattgagaggtgttttaccattcaattaagtgtgttcttaattaattaggggattgttttagataatgcacagagttctatttaattagatgaaagagaaattcgtgtgtccctaaaaaaaaaaaaaaaaaaaaaaaaaaaaaaaaaaaaaaaaaaaaaaaaaaaaaaaaaaaaaaaaaaaaaaaaaaaaaaaaaaaaaaaaaaaaaaaaaaaaaaaaaaa

SEQ ID NO: 296 - DNA, 1671 bp, Zea mays
ctcggcagcaggacccgccgccgcctcctctccatctctttctctctctctcgccatatcgattccattggggacgcaagcaccgccccagacccagagcttctcttctcaaaagatgcaggagcaggacgtggacgatggcggcggcaggacgacccagcagcaggagaagtcgatcgacgactggctccctatcaactcctccaggaaggccaagtggtggtactccgccttccacaatgtcaccgccatggtcggcgccggcgtgctcggcctcccctacgccatgtccgagcttggctggggccctggcatcgcggtgatgatcctgtcgtggataatcaccctatacacgctatggcagatggtggagatgcacgagatggtgcctgggaagcggttcgaccggtaccacgagctcgggcagcacgtcttcggcgacaggctgggcctctggatcgtggtgccgcagcagctggcagtagaggtgagcctgaacatcatctacatggtcaccggcggccagtccctcaagaagttccacgacgtcatctgcgacggcggcaggtgcggcggcgacttgaagctctcctacttcatcatgatcttcgcctccgtccacctggtcctctcccagctccccaacttcaactccatctccgccgtgtcgctcgccgccgccgtcatgtcgctcagttactccaccattgcgtggggcgcgtcgctgcacagagggaggagagaggacgtggactaccacctgcgcgccacgaccaccccagggaaggtgttcggcttcctgggaggcctaggggacgtggcgttcgcctactcggggcacaacgtggtgctggagatccaggccaccatcccgtccacgccggacaagccgtccaagaaggccatgtggaagggcgcctttgtcgcctacgtcgtcgtcgccatctgctacttccccgtcacgttcgtcgggtactgggccttcggcagcggcgtcgacgagaacatcctcatcacgctctccaagcccaagtggctcattgccctcgccaacatgatggtcgtcgtccatgtcattggcagttaccaggtttatgccatgccggtgtttgacatgatagagacggtgctggtcaagaaaatgaggttcgctccgagcctcacgctccgtcttattgcccggagcgtctatgttgcgttcacaatgtttctaggcatcactttccccttcttcggtggattgctcagtttcttcggcggattagccttcgcaccgacaacttattttcttccctgcatcatgtggctcaaggtttacaagcccaaacggttcggcctttcatggttcatcaactggatctgcatcgttattggagtgctgctgttgattctgggtccgataggagggctccggcagatcattttgtcagccaccacatacaaattctaccagtaaaatcgatcaactggagtcgtatggcgtggctgttttgttagcattacatttcttagggtggattggcttttaatgtacacgagcgagtgagattgatgctagtagctcctaggagtatatatatttctatcatccacagagcttaatgtatcttgtagttgggacaaaaaaaaaaaaaaaaaaaaaaaaaaaaaaaaaaaaaaaaaaaaaaaaaa

SEQ ID NO: 297 - DNA, 2071 bp, Oryza sativa
cactcctctcccctccccacgcaaccgccttcctccgccgccgccgacgccgacgccgacgccgaccccttctcccaatctgcggattccagcgggggtcccccccccctcccaccggcggcgcccggtggtcgtggtcgtgggggaggggagtcaacgaacgagccgagccgcccgcttgccggagctctctatctatctctctatctctatctctatccctccagattccctcctccatcgaatctctgatatttggagggagcgactcgacgcagcatcgcatcgtaaggaaggtcccctccactgtcgatggatcagcaccagctcgacgaggagaaccagagagccgcgctcttccactcctctgccccatcttcctctttgggagctgacggggaggaggagagggagactgtgccgctgctgtcctgcaagatggccgacgataaatctgacactgtccaggtctccgaggatacggcgcaccagattagcattgatccctggtatcaagttggattcattctgacaaccggggtgaatagtgcatatgttctgggatattctgcatcaatcatggtccctttaggctggattggtgggacatgtggcttgattctagctgctgcaatatccatgtatgcaaatgctcttcttgctcaccttcatgaagttggtggcaaacgccatatcagatacagagatcttgctgggcacatatatggtagaaaaatgtattcgcttacatgggctctgcaatatgttaatctattcatgatcaacactggccttatcattttagctggtcaagccctgaaggcaatatatgtattatttagggacgatggagttctaaagctaccctactgcatagcattatctgggtttgtctgtgctctttttgcctttggaatcccttatctgtctgctctcaggatttggttgggattatcaacagttttcagtctcatctatataatgatagcatttgtcatgtcgcttagagatgggattaccacacctgcaaaggattatactattcctggatcacattcagatagaatcttcactacgataggtgctgtagcaaaccttgtgttcgcttacaacactggaatgctcccagaaattcaagcaaccataaggcctcctgtggtcaagaatatggagaaggctctatggttccagttcactgttggttcgttgcctctttatgctgtcacctttatggggtattgggcgtacgggtcctcaacatcaagctatctactgaatagtgtgaagggaccaatttggataaaaactgtggcaaatttatcggcgtttcttcagactgtcatagcattacatatatttgcaagcccaatgtacgaattcttggacacaagattcggcagtggacatggtggtccttttgcaatccacaacataatgttcagagtgggtgtcagaggaggctacctgaccgtcaacaccttggtggccgcgatgctccccttccttggcgacttcatgagcctgacgggtgcactcagcacctttcccctgacattcgttcttgcaaatcacatgtacctcacggtgaagcagaacaagatgtccatcttcaggaaatgctggcactggctgaacgttgttggcttcagctgcttgtccgtcgcagctgcggttgctgcggtgaggctaatcacggtcgactacagtacataccatttgtttgctgatatgtgaggctggaaagtgcaagcatgcagccctggatcagctgtaaattcgtcctcttcttttttatttttttggttaggggatgcatgtaggtcgatagaatgatggagattgcaataaataatttggctaaaatgttgtccagatttggttgtttgaggtgcaagatgtttgcctcaaaacgtaccgctatggttcactttttaagaactgtactgctacctctgtttgcggagatttttgtctgcaggcatgcaggatgaatattattcaaaaaaaaaaaaaaaaaaaaaaaaaaaaaaaaaaaaaaaaaaaaaaaaaaaaaaaaaaaaaaaaaaaaaaa

SEQ ID NO: 298 - DNA, 1840 bp, Zea mays
gcaagaagctgtccctccctccctcccctgtgcttctgctagctaggtgcctgcggaggagagatagggatacgatggccggcggtggcatcgtgaacacgggcggtggcaaggactaccccggcaagctcaccctcttcgtgttgctcacctgcatcgtcgccgccaccggcggtctcatcttcggatatgacatcggtatctcaggcggcgtgacgtccatgaacccgttcctggagaagttcttcccggaggtgtaccggaagaagcaggaggccaagacgaaccagtactgcaagtacgacaaccagctgctgcagaccttcacctcctccctctacctggccgcgctggtcgcctccttcttcgccgccaccgtcacccgcgccgtcggccgcaagtggtccatgctcgtcggcggcctcaccttcctcgtcggagccgccctcaacggcgccgcccagaacatcgccatgctcatcatcggacgcatccttctcggcgtcggcgtcggcttcgcaaatcagtccgtgcctgtgtacctgtcggagatggcgccggcgcgtctccggggcatgctcaacatcggcttccagctgatgatcaccatcggcatcctggcggcggagctcatcaactacggcaccaacaagatcaaggccgggtacgggtggcgcgtgagcctggcgctggcggcggtgccggcggccatcatcaccctgggctccctcttcctcccggacacccccaactcgctgctggagcggggccacccggaggaggcacgccgcatgctccgccgcatccgcggcacggacgacatcggcgaggagtacgcggacctggtggcggccagcgaggaggcccgccaggtgcgccacccgtggcggaacatcctgcgccgccggtaccgcgcgcagctcaccatggccgtcgcgatccccttcttccagcagctcacggggatcaacgtcatcatgttctacgcgcccgtgctgttcgacacgctgggattcaagaacgacgcctccctcatgtcctccgtcatcacgggcctcgtcaacgtcttcgccaccgtcgtgtccatcgtcaccgtcgaccgcgtcggccgccgcaagctgttcctccagggcggcgcgcagatgatcgtgtgccagctcatcgtgggcacgctcatcgccgccaagttcgggaccagcggcacgggggacatcgccaagggctacgccgcggtcgtcgtggtcttcatctgcgcctacgtcgccggcttcgcctggtcgtgggggcccctgggctggctcgtgccgtccgagatcttcccgctggagatccgcccggcggggcagagcatcaacgtctccgtcaacatgttcttcaccttctgcatcgcgcaggccttcctcaccatgctctgccacttcaagttcggcctcttctacttcttcgccggctgggtcgtcatcatgaccgtcttcatcgccttcttcctgcccgagaccaagaacgtgcccatcgaggagatggtgcttgtctggaagtcacactggttctggaaaaggttcatcgccgacgaggacgtgcacgtcggcattggcaacaaccacccggccaaaaacggcagcgacaccaagggggccgacgcgtgaacgtgatctcaacatctatattccatctacagtcacaactgaaatgtacatttaggcttccattgttccatcaactagtagctacatgtcctcctagtaaagtaccagtgtttgtttgtgtaatgtttgttacgcccattaaattcttcttggattggatgaaaaaaaaaaaaaaaaaaaaaaaaaaaaaaaaa

SEQ ID NO: 299 - DNA, 1923 bp, Glycine max
gtttccctgtctctgttctcttcaccattctctttcttctttgtttcaagtttcaacaacccagattcactctctctctcgtaattttctctcttattgaggctagaaaaagagagcaaaaaaactaaaaaatgcctgcggtcggaggtataaacaccggagggggcaaggagtaccctggaagcctcactctatttgtgacggtaacatgtatagttgcagccatgggtggtttaatcttcggttacgatatcggaatttcaggtggagtgacgtccatggatccgtttctgctcaagttttttccgtcagtgttccggaagaaaaactccgacaaaacggtgaaccagtactgccaatacgacagccagacactgacgatgttcacgtcgtccttgtacctcgccgctttgctgtcgtcgttggttgccgccaccgtcacgcgtaaattcggccggaaactctccatgcttttcggaggcttgcttttcctcgtcggtgccctcatcaacggtttcgcccaacacgtttggatgttaatcgtgggtcggatcttgctcgggttcggtatcggcttcgccaatcagtctgtgccactctacctatctgaaatggctccatacaaatatagaggagcattgaacattggctttcagttgtccatcactgttggtatccttgtggccaatgtgttgaactatttctttgctaaaatcaaaggtggttggggatggaggttgagtttgggaggtgctatggtccctgcccttataatcacagtaggatcactagtccttccagacactcccaattccatgattgaaaggggtgatcgcgagaaggccaaggctcagcttcagagaattcgcggcatcgacaatgttgatgaagagttcaatgaccttgtggcagcaagtgaatcctctagccaagtggagcacccttggaggaacttgttgcaaagaaagtacagaccccacctcaccatggcagtgttgattccattcttccagcaactcactggaatcaatgtcatcatgttttacgcgccggtcctgttcagctccatcgggtttaaggatgatgctgctctaatgtcagctgtgatcaccggcgttgttaatgttgtcgcaacttgtgtctcaatttatggtgttgacaagtggggtaggagagcccttttccttgaaggtggagtccaaatgctcatttgccaggctgtagttgcagctgcaattggagcaaagtttggaactgatgggaacccaggtgatttgccaaagtggtatgcaattgttgtggttctcttcatttgcatttatgtatcagcatttgcctggtcatggggtcccctaggttggttggtgcctagtgagatctttcccttggagattcgttcagctgctcagagtatcaatgtgtcggtgaacatgcttttcactttcttgattgcacaagtcttcttgacaatgctttgccacatgaagttcggcttgttcctcttctttgccttcttcgtgttgatcatgacattcttcgtctacttcttcttgcccgaaacaaagggcattccaattgaagaaatggggcaggtttggcaggcacaccccttctggtccagattcgtggagcatgatgattatggcaatggtgttgagatgggaaagggagctattaaagaagtgtagttagtcctcgtcttggtttatttttctcaatgactagcgttttagcttttgttggtaaatcatactattggtttcaatgtattgaattgttcctaaaaattaaaaagggttatttttcttatgtatcccctgcttcttcatatgaagcaagtttacaggatacttttctatattaatccaattgcacaaattgttatgcctttgaaaaaaaaaaaaaaaaaaaaaaaaaaaaaaa

SEQ ID NO: 300 - DNA, 1883 bp, Zea mays
gcgcgcgctagcctagctgctcctgcctggttcgccgtagcccgtagcccgtagcacaacaacaacaaaaaaaatctccgcggcgcggggggaggtggtctgttcaccttggggagcagcggcgggccgtcggccgagaaatgcccggtggcgccttcctcctcaacggcagcggcggcggcatggcggactacggcggcggcctcaccgtccccgtcgtcgtgacctgcctcatggcggcctccggcggcctcatcttcggctacgacattggcatctcaggaggtgtgtcggagatggaggatttcctgaacaagttcttccccgggttgctcaagaggacggcgcgcgccaacaaggacgtgtactgcatttacaacaaccaggcgctgacggccttcacgtcgtcgctgtacgcgttcggcatggtggggacgctgctggcgagccgcgtgacccggcggctggggcggcaggccgtcatgctgatcggcggcggcctgttcttggccggcgccctcgtcaacgccgccgcggccaacatcgccatgctcatcgtcgggaggatgctgctcggcctggggctcggcttctccggccaggccacgccggtgtacctcgccgaggtgtcgcccccgcgctggcgcggcggcttcatctcggccttccccctcttcatcagcgtcgggtacctggtggccaacctcatcaactacggcacctcgcggatcccgggctggggctggcgcctctcgctcggcctcgcctccgtcccggccgccgtcatggtggtcggcgccgcgttcatcccggacacccccagcagcctcgtcctgcgcgggaagcacgacgacgcccgcgccgcgctccagcgggtgcgcggcaagggcgtggacatcggccccgagttcgcggacatcctcgccgcggcggagaacgaccgccggaacgaggagggcgcgttccgccggatcctgcgccgggagtaccggccctacctggtgatggccgtggcgttcccggtgttcctcaacctcacaggggtggccgtcaccgccttcttctcgccgatactgttccggaccgtcggcttcgagagcgacgccgcgctcatgggcgccgtcatcctgggcctcatgaacatcggcggcatcctcgcgtcgggcttcgccatggaccgctacggccggaagctgctcttcatgatcggtggcgcgctcatgttcacgtgccaggtggcgatggcgagcataatcggatcacacctcggcaacgggagcaagatgcccaaggggtacgcggtgacggtgctggtggtggcgctgatcttctcggcgagcttcagctggtcgtggggcgcgctgtactggaccatccccggcgagatataccccgtggaggtgcggtcggcggggcagggcgcggccgtggcgctcaacctggggctcaacttcttgcaggcgcagttcttcctggccatgctgtgctgcttcaagtacggcaccttcctcttctacgcgtcgtggctggttgtcatgaccgccttcgccgtggcgttcgtgccggagaccaagggcgtgccgctcgagtccatggctcacgtcttcgcgcgccactggtactggggcaggttcgtcaaggaccaccagaagttgggcgaagagtccacctagctaagctaataattcggaatcagcgaacgacgtaccctactaccagtagcagattattgataagggagtcaaacacatattgcgtgtgtgtgtcttttaaagtgttcgtttagaatggcttgagaagctcatccgtgtagtaaatttggagacttcgaaatataataaatatgttcgtagttggcaagctaaaaaaaaaaaaaaaaaaaa

SEQ ID NO: 301 - DNA, 2127 bp, Glycine max
attcggctcgagatttcaccaatttctattttcataactttctctgcagtctcttcacctttatgttaatgatattatgtgtttagagagaaagagaacaagcatagttgagcttgattgtgttcttcaacattagaacaagaaaagaaagacaacaacatggaaggaggaggagtagaagttgatgcctctgctttcagagaatgcttgtctctgtcatggaaaaatccttacgttcttcgccttgctttttctgctggaattggtggccttctctttggctatgacactggagtcatatctggggctattttatatatcagagatgatttcaaagcagtggataggaagacttggcttcaggaagccatagtgagtatggctcttgctggagcaatcgtaggagctgcagttggtgggtggattaacgatcgatttggaaggagaaaagctattcttcttgcagacacactcttctttattggctctgctgtcatggctgccgctaccaatccatctattctcattgttggtcgagttttcgttggccttggtgttggaatggcctcaatggcatctcccttatacatctctgaagcttctccaactagagttcgaggtgctttagttagtctcaatggctttctcataactggaggacaattcctctcctacctcatcaacttggccttcacaaaagcaccaggaacatggagatggatgttaggagcagcagtagtaccagccctgatacaaatcgtattaatgatgatgctgccagaatcaccgcgttggctgttccgaaagggaagagaagaagagggtaaagaaattctaaggaagatttatccaccccaggaagttgaagcagaaattaatactttgagggaatcagttgaaatagaaatcaaggaagcagaggccacagataacatcagcatagtcaaaatgctgaaaactaaaactgtgagaagaggtttgtatgcaggaatgggccttcaaattttccaacagtttgtggggatcaacactgtgatgtactacagtcctaccatagttcagttagctggttttgcatccaaccgaacagcacttcttctgtcactagtcacatctggtctcaatgcatttggttctattttgagtatatacttcatagacagaacagggaggaaaaagcttgtgttgttcagtttgtgtggtgttgtgttctcccttgttgttctaaccgttgtgttccatcagagtacaactcactccccaatggttagtgcactcgaaacctctcacttcaataacacttgcccggattaccattcagctgcgaaccctggtggatgggattgcatgaagtgcctgaaggcttctccaaattgtggcttctgtgcttctggagccaataagctcttacctggggcatgtttgatctccaatgacaccacaaaagatcagtgccatgaagaagatagactatggtacaccgtggggtgtcctagtaaatttggatggcttgcaatagtagggcttgcactctacatcatattcttctcacctgggatgggaactgtgccatgggttgtcaactctgagatttatcccctaagatatcgaggaatatgtggaggaatggcatccacatccaattgggtctcaaatcttattgttgctcagtccttcctatcattgacacaagctattgggacctcatggacatttatgatatttatattcatcaccatagctgccattatctttgttattattttcgtgcccgaaaccaaaggacttccaatggaagaagtggagaagatgttggaaggaagagatctcaacttcaagttttggcagagaagttctcactgtggagaagaagtaccaccacaaaagactcaatcaaattaagtctattgtgttgcatcatttgtaatattggagtattaactaaagaagtataggtaataaaatcgtagaatgtagctattagattctaagtatatacaataaaatcgtagaatgtagctattagattctaagtatatacaatatcttgtttgtgtgaatttttttcttatcaacaaatattattttgttaattttgttacaaattaaaaaaaaaaaaaaaaaagg

SEQ ID NO: 302 - DNA, 1931 bp, Zea mays
cgcatttcgaaatccccaaacggaagcatcgccactcttccgaacctgaacaatcaccaccgttattaagaagatgatgcgctgcgctgcaacgggcggcgggtgcgtcgcttcgtggagcggcgatcggagattgccggcggtcaacccctgcagcgtgcggatgccgacgggcaacgatgggtggtgcgccggcctgaggtcgcgggcggcggatctcgccggcctcgagatggccaacctgcgcggcggcgtcggggggctcttccgcgcgagcccgcgctacgggcgcttgcaagccacggcggcagttgaccctgaagatattccattggagaaggttcaagttaaatcctcaggacatgttctgccatatgttggcgttgcttgtttgggggctattctgtttggttaccatcttggtgtggtcaatggcgcacttgaatatctcgcgaaggatcttgggattgctgaaaatgctgtcttgcaggggtgggtggttagcacatccttggctggtgcaacactaggttcttttactgggggttctttggcagataaatttgggcggacaagaacattcatcctggatgcagtcccacttgctctaggtgcattcttgagtgcaacagctcaagatatccgcacaatgattattggccgattgcttgctggaattggtatcggggtctcatctgctcttgtacccctttacatatctgagatctcaccaactgaaattcgtggaacacttggtaccgttaatcaactttttatttgcattggaattcttgcagctttgttagctggattgcctctggcaggaaatcctgcctggtggaggacaatgtttggaattgctgtagttccatccattctgctggctgtaggaatggccttttcgcctgaaagccctcgttggctattccagcaaggaaaggttactcaagcagaattagctgtaaaaagactgtatggaaaagaaatggttaccgaaattatgtttgatctgagagctagtggccaaagttcttcggagtccgaagccggctggtttgatcttttcagcaagcgttactggaaagttgtgagtgtgggggcagcactgtttttgttccagcagcttgctggtataaacgctgttgtatattactctacatcggtgttccgtagtgcaggcattgcatctgatgttgctgctagtgctcttgttggagcagccaatgtttttggtactatggttgcatcttctctaatggacaaacaaggaaggaaaagccttctgataacaagcttttctggaatgggtgcttcaatgctactcctagcattgtccttcacctggaaagctctggcaccttattctggtactcttgctgttgttggcactgttctgtacgtgctgtcatttgctctaggagcgggccctgttccagcgctacttcttcctgaaatatttgcctcgagaataagggccaaggctgtcgcattatctctaggcatgcactgggtatctaactttttcattggcctgtacttcctgagtgtcgtgagcaagtttgggatcagcaacgtgtatctgggatttgcatcagtatgtgcccttgcagttctgtacatagctgggaatgtggtcgagaccaaggggagatcacttgaagagattgaaagggagctaagtgtagcagaatgatgtacttttgctagtcatgctgtggcgccgttttggttatcgagaatgcaaccaagcgctcaaccgagcatccttggacctggagactctttctagtttcatgtagttttagaaataagcgaacggcaagagtaccaatcttaggtgacttggtgtgggttgtgtctgaaataagtgaattggattgtagaatttcagaaataagtgaattggattgtagaatttaaaaaaaaaaaaa

SEQ ID NO: 303 - DNA, 2051 bp, Zea mays
catcgacatcctctcacctccctcgcactccattggatttgggggagctcggggggcgcgggccactgatgatccccggaacgagcaccgatccgtggcgaggaaactccaccgggtagccggcccgggagcgcggggcacggcgatggcgggcgccggggcagcggccaatggcggcaggaacaagtacgcggttctcgatcggagcgaggagcgacagacggacgctaggacggagcggcggaggaggccgttggcgcccgagagcgagagggggagaagggagcggttcgtgtacgcctgcgcggtcttcgcctccctcaacgccgtcctgctcggctacgatgttggcgtaatgagtggcgcgatcatctacatgcagaaagacctccacataaccgagtttcagcaagaaatcctagtaggctgtctgagcgtggtctcactcttgggaagcctatcaggggggcgaacatctgacgcaattggcagaaaatggacaatgggcctcggtgcaattgtgttccagataggcgcgaccatcatgacgtttgctccatcattcactgtgcttatgatagggaggctccttgctggggttggcattggctttggtgccatggtatctggagtgtacattgctgagatctcccccgcaggtgcccgagggacgctcacatcccttcctgagatctgcatcaattttgggatccttcttggctacgtttccaattatgccttctcaggcctttctgagcacatcaattggaggattatgcttggtgtcggtatcctcccatcagtcttcattggctttgcgcttttcgtgatcccggagtcccctaggtggttgatgatggagaagagagtttcagaagcaagggcagtgctgctgcagattagcgagtctgaagctgaagctgaagaacggctggctgagatcgaggaagccgcaggtctgatgaaatcaatgaaatctgaggacaaagaagtgtggagggaacttttgaacccgtctcccgccgtccgtcggatgctgtacgctggttgcggtattcagttgttccaacagatcacaggaattgatgctactgtctattacagcccaacaattttcaaagatgctggcatcaagtctgatcaggagcttctcgctgcaactgttgctgtgggtttcactaagacagtgttcatcttggttgcaattttcctaattgatagagttggacggaagccacttctttatgtgagcaccattggcatgaccatctgcttatttctcttgggggttgcacttacactgcaaaaccatgcggtggggcttatgtctccacgtgttggtatcgacctagcaattttcgcagtttgtggcaacgtggcattcttttcaattggcatgggaccaatatgttgggtcttgtcctcagaggtatttcctttaagattacgagctcaagggtcagcgcttggtcaagtaggtggtagagtgagcagtggtttggtttccatgtcattcctttctatggcccgtgctatatcagtggcaggaatgttcttcgtctttgctgcaatatccactatctctgtactgtttgtgtacttttgtgtgccagaaacaaaagggaaaacactggagcagatcgaaatgatgtttgaaagtggggacgaatggggaggaggtgaaattgagcttgaggatacacagcatttaataccgagtatcaagaagtctgtgcctcttggttgatatttgtagcatcaataaaattcttattagctccatgtttcaatgacgagccaaccaaaccagctggattctgaactttggtttcgagtgatctggccacactgagccacgaccgatctgataaaagataagcttgatagacataggtgcaacgtagaagattaattgtgatgttagttcaaaatgtcaatgattttactgggaggcggtctgtaatgtatgatcttacatctcttgtaccttcttacatctctcgtacctcccagcggaagaatatactcgcagaaaagttttctaaaaaaaa

SEQ ID NO: 304 - DNA, 1768 bp, Glycine max
ttgctttctaattattcgtgttgtcagtgtctctttgaggccattttgctagctatttaataatggcaattgagaagcatgaggatgttgagagtggatatttgcacgagcccttcattcaaccagaggatgctgctgctgcttgtaaagaaaatggatcagataagagtgtgaaaaatggatccattggaatggttttgcttagcacacttgttgctgtttgtggttctttcacatttggaacttgtgtgggctattcagcacccactcaagcggctatcagggcagatcttaatctctctcttgctgagttttccatgtttggttcattagtgaccattggtgcaatgcttggagctataaccagcggcaggattacagatttcattggccgcaaaggggcaatgaggatttcaacaggattttgcattacaggatggatagctgtcttcttctctaagggttcttactcccttgacttcggaagatttttcacaggttacggcattggagttatctcatacgtggttcctgtatatatagcagaaatagcacccaaaaatcttcgaggaggactagcaacaacaaatcagcttttgattgttactggagggtcagtctcattcttattaggaagtgttataaattggagagaacttgcattagcggggctagtgccttgcatttgcttgctggttggtttgtgctttatccctgagtcccccagatggctggctaaggttggccgtgaaaaagaatttcaactagctttaagtagacttcggggtaaagatgctgatatttctgatgaagctgctgaaattctggattatattgaaactcttcaaagtcttcctaagactaagctgttggatttgttccaaagcaaatatgtgcactctgtagttattggggtcggcttaatggcatgtcaacaatctgttggaattaatggcataggattctacacagctgagatttttgtagcagctggactttcttcaggaaaagctggtaccatagcatatgcttgtatacagattccatttacattattgggagccattttgatggacaagtctggaagaagacctcttgtaatggtttccgcagctgggacattcttaggttgctttgttgctgcctttgctttctttctcaaggaccaaagcttattgcctgagtgggtacctatattagcatttgctggcgttctgatctacatagcagcattttcaattgggctcggatcagttccatgggtgataatgtctgagatatttcccatacatttgaaggggactgctggaagcttggtggttttggtggcttggctaggagcttgggtagtttcatatactttcaactttcttatgagctggagttctcctggtacattgtttttgtatgctggatgttccctcttaactattctatttgtagcaaaattagtcccagaaaccaaaggaaaaactttggaagagatccaggcttgtattagttcatagagataaaagatcaaaaacgcactgcaggacccagtcaaaccattaccaccatttttcaaattcttttacatccatttaggaccgtcaaggcataaaataacataatgttgccatatcgatccatttttgttgttgtataataataataataataataataatgtatcattagcttatttgataagaaaaaaaaaaaaaaaaaaaaaaaaaaaaaaaaaaaaaaaaaaaaaaaaaaaaaaaaaaaaaaaaaaaaaaaaaaa

SEQ ID NO: 305 - DNA, 1680 bp, Glycine max
ttgagagcgagaaaccacgtttctctcttgaggttaattattattattattgagtattgagcatggaggcgccatctctcaccaaacccaacgacccaacaaaaccttccaacacttccagcacccttagtctggagggggggccgggcgaagcgagcccactccgaaaaatgtttgcggtggcgtccatcgccgccggcatacagttcgggtgggctctgcagctgtctctcttaaccccctacgttcagctcttaggagtcccccacgcggcggcctccttcatctggctctgtgggcccatctcggggctggtggtgcagcccattgtgggctactacagcgaccactgcacctctcgcttcggccgaaggcgccccttcatcctcggaggcgccttagccgtcgccatcgccgtgttcctcatcggctacgcggccgacataggacactccgctggcgacgacataactaaaaaaacccgaccccgtgcagttggggtcttcgtcataggattctggatcctagacgtggccaacaacatgctccagggaccctgccgcgcctttttagctgacctcgctgccggcgaccagcaaaaaacgagaatcgccaacggtttcttctcgttcttcatggccgtcggcaacgtgcttgggtatgctgcagggtcctacagcggtctccacaagatcttccccttcacggagaccaaggcctgtgacgtcttctgcgcaaacttaaaaagctgtttctttttctcgatcctactgcttctctttttagcaactgttgctctgctctacgttaaggacaagcaagttgaagcaattcctctggatgatgccactcaaccctcttgtttctttcagcttttcggtgctctgaaagagctcaagagaccgatgtggatgctgatgctggtcacagctgtgaactgggtggggtggtttccttacttccttttcgacactgactggatgggtcgtgaggtctacggtggaactgctggggaggacgcgtacgcgaagggagtgcgcgtgggatcgttagggctgatggtaaacgccgtcgtgttgggcttcatgtcgttggcggtggagccgttggggaagatggttgggggagtgaagaggctttgggcgattgtgaactttattctcgcgattgggttcggaatgacggtggtgatcaccaaggtggcggagcaccagcgccggatgaaccccgccgccgtgggccacccctccgagggggtggtggttgggtccatggttttctttggggttcttggagttccccttgcgattactttcagtgtcccttttgctctagcatcaatatactgcagcgcttcaggagcaggacaaggtttatctttgggagttctcaatcttgcaattgtggtaccacagatggtggtgtctgcattaagtggtccttgggattccttgtttggtggtggcaacttgccggctttcatggtgggtgctgcggcagccgcgttgagcgccataatggcgattgtcttgctgccaactccaaagccagctgatgaggccaaggcttcaagcatgatggcagggggctttcactagttaatggagttttgcatgtttcagttttgtcccctgctttaatagaaaaaaaaaaaaaaaaaaaaaaaaaaaaaaaaaaaaa

SEQ ID NO: 306 - DNA, 1831 bp, Zea mays
ccacgcgtccgaaggtctcctccctcggtctccctcgggctaggctagctagctaggttaccactctggtacaacatggctggtgatggcatggaggtatctgccagcgggggtggcggcggcaacaagcagccgcagatcagccttttggggctgttcctcgcctgcatggtcgccggcggcgtgcagtacggatgggcgctgcagctctcccttctcaccccctacgtccagacactggggattcctcatgctcttacatcagtcatgtggctctgtggacctattgctggcttacttgtacaaccctgcgtcggcctctatagtgacaaatgcacttctaagcttgggagacggaggccattcatctttacaggatgcatcatcatctgtatatctgtgatagtcatcggtttctcctcagacatcggttacgctctcggtgacacgacggaagactgcaatgtttacacggggaagcggctgcacgcggccttgttcttcgtgatgggattctggctgctggacttttccaacaacacggtgcagggccccgcacgcgcgctgatggcggacctcgcaggcagccacggacccagcacggcgaacgccatcttcgtgtcgtggatggcgatcgggaacatcctgggctactcgtcggggtccaccgacaagtggcacacctggttcccgttcctgcagacgagggcatgctgcgaggcgtgcgccaacctcaaggccgccttcctggtgtcggtggtgttcctgggcctgtccacggtggtgaccatgatcttcgcccgcgaggtgccgctggacccggcggcggcggcgaagcaggacgaggccggggagtcgtcgggcccgttcgccgttttcaagggcatgaagaacatgccccccggcatgccgcaggtgctcatcgtcacgggcctcacctggctctcctggttccccttcatcctcttcgacaccgactggatgggccgcgagatgtaccacggcaggcccgacggcagccccgaggaggtggccaggttccaggagggcgtccggcagggcgccttcggcctgctcctcaactccgtcgtcctcggagccagctccttcctcatcgagcccatgtgccgcaagctcaccgccaaggtcgtgtgggtcatgagcagcttcctcgtctgcgtcgccatggccttggtcaccgtcctcagctcctggtcgctcggcgacatcgggggcaacgtgcaggacgccgccgccgtggataagggcctcaagaccaccgcgctcgccatcttcgtcttcctcggcttcccattcgcggtcctatgcagcgttccgttcgccgtgacggcacagctggcggcggccaagggcggcgggcaggggctgtgcacgggggtcctcaacatctccatcgtggtgccacagatggtcatcgccattggctctgggccgtgggacgagctgttcggcaagggcaacatcccggcgttcggccttgccgccgtcttcgccttcaccgctgccgtcgcagggatcatcatgctgccaaagcagcccaagaccagcttccggtccgtctccatgggaggaggccattgatgatcacaactctaggatgcatggtccactgtggttcacgattcttttacctttgggagttggacggccaggtgtttgttctcaaggccgcttccgaggcctaaaccggtgggtttatttctaggccggatcatgacgaacaatctgtttcgctgggttgtaaaggaaaagttttacacgaacacacaacgtgtcggctatttaacttttggaaaaaaaaaaaaaaaag

SEQ ID NO: 307 - DNA, 1996 bp, Zea mays
ccacgcgtccgcccacgcgtccgatacgtacgtgaagaaccaacaggagggccgggctctcgctcgccgcgcgcacccccctctctctatctctcccgccgccgttgatctatcaccgggccgccggtccgtgactgtcgccagcggctgctggttgttgcttggttgcgtcgccgcgggagccgtgtgacccgggcgcaatgccgggagccgtgatcgtgcaccaccacacgaggtacaagacgtaccccggcgaggtcaccggcatcgccatcttctcgtgcttcatcgcctccgtcgccggctgcatcttcggctatgacatcggcctcacatccgggctgacgtcgacggagccgttcctggtcaagttcttcccctccatctacgaggagatgaagaggcaggtggtcgtcaaccagtactgcaagttcgacagccaggtcctgacgctgttcagctcctccctcttcctcgccgcgacggtggccaccttcttcgccggcccgatgacccgcgccttcgggcgcaagtggaccctgttcgccgccgcgtccgcgtacgtggtcggcgcgtgcatcggcggcgtgtccgtgaacttcccgatgctgctcacgggccgcgtcctcgttggctccggcgtcggcatctccatccaggcggccccgctctacatctccgaggtggcgccggcgcagcagcgcgggatgctcaacatcctgttccagctcatgatcacggtgggcatcctgacggcgaacatgaccaactacctggcgtccaaggtctcgggcggctggggctggcgcatccccgtgacgttcggcgccatcccggccgccgtcatcgcgctgggcgcgctcgccatcccggacaccccggcgtcgctcgtcgagcgcggggacacggccacggcgcgcaagacgctgtcccagatccggggcgtcggcgacgtgcgcgaggagttcgacgacctggccgccgcgagcgaggacgccaaggccgtgcagtgcccctggcgggagctcttcttcggcggcaagtacaagccccagctcacgttcgcgctgctcatccccttcttccagcagctcaccggcatcaacgtcatcatgttctacgcgccggtgctcttcaagacagtcggcttcaagcagaacgccaccctcgtgtcctccgtcatcaccggcctcgtcaacgtcttctccaccttcgtcgccatcgccaccgccgacaagatcggacgccgcgcgctcttcctgcagggcggcacgcagatgatcatctcccagatccttgtggggacgttcatcgggctgcagttcggcatgagcgggacgggcgacatctcggagcagtacgccatgtgcatcgtgctgttcgtgtgcgtgtacgtggccggcttcgcgtggtcgtgggggcccatggggtggctggtccccagcgagatctacccgctggccgtgcggtcggcggcgatgagcgtcacggtggccgtcaacatgttcttcacggccttcatcgggcagatcttcctcacgctgctctgccacctccgcttcggcctcttctacttcttcggcgcctgggtgctgctcatgacactcttcatcgccatgctgctcccggagaccaagagcgtgcccgttgaggagatggcgcacgtctggaagaagcactggttctggcgcaagttcgtcatcgacaccggcaacgacgcccgcaacgccgagatgaggaagaggatagcgctagagatgagctgatcatcgtcgtccatgcatgcagtctccatcgcccatgcatcatatatatgcagtaggcaggcaggcagatgaaggaaattacgtacacaagcgccaactaaaactaaacccaagtcaattacttcatatatcactcaatagctgctagaacatatatgaatggttgttgtagactgatcgtaatcccagatagttatgatatacatctttcattttaaaaaaaaaaaaaa

SEQ ID NO: 308 - DNA, 2211 bp, Zea mays
ccacgcgtccgcccacgcgtccgccgttcctcgtcgtctcgtgttgtttctcgcgttgccattgccccagctgtccgcccgcgcccgcggcaatggcaggcggcgtggtggtgaacgcggccgggggcaagacgtaccccggccgcatgacgccgttcgtgttcttcacctgcctggtggcgtcatcgggcggcctcatcttcgggtacgacatcggcatctccggcggtgtcacgtccatggcgtcgttcctcaaggagttcttcccttccgtgtacgccaaggcggcggcgaacaaggacacgaaccagtactgcaagttcgacagccagctgctgacgctgttcacgtcgtcgctgtacctggcggcgctggcgacgtcgttcgtggcggcgtccgtgacgcgggtgttcgggcgcaagtggtccatgttctgcggcggggtgaccttcctggccgggtcggcgctaaacggcgccgccaccgacgtgatgatgctcatcatgggccgcatcctgctgggcgtgggcgtcggcttcgccaaccagtcggtgccgctgtacctgtcggagatggcgccggcgaagctgcgcggcatgctcaacatcgggttccagctgatgaccaccatcggcatcctggcggcgaacctgatcaacttctggacggcgggcatcgagggcgggtggggctggcgcatcgggctggggctcgcgggcgtgccggcgctcatcatcaccctgggcgcgctggtgctccccgacacgcccaactcccttatcgcccgcgggttcaacgacgacgccaaggcggtgctggtgaagatccgcggcacggacgacgtgcaggacgagtacgacgacatggtggcggcgagcgaggaggcgaacgccatcgagcacccgtggcgcaacatcctggagcgcaggtaccggccgcagctgacggtggcagcgctgatccccttcttccagcagctgacgggcatcaacgtgatcatgttctacgcgccggtgctgttcctgaccatcggcttcggcgacgacgcgtcgctgatggcggccgtcatcacggggctggtcaacatgttcgccaccgtggtgtccatcgtgtgcgtggaccgcctgggccggcgcgcgctgttcctgcagggcggcacgcagatgttcgtctcccagatcgtggtgggcacgctgatcgcgctccagttcggcaccgccggcgtgggcgagatgtcccgctccaacgcctggctgctggtgctcttcatctgcctctacgtcgccgggttcgcctggtcgtgggggccgctgggctggctcgtcccctcggaggtgttcgcgctggaggtccggtcggcggggcagagcatcgccgtgtgcgtcaacatgctgctcaccttcatcatcggccaggccttcctcagcatgctgtgctcgctcaagttcgggctcttctacttcttcgccgggtggatgttcatcatgaccaccttcatcgccctcttcctgccggagaccaagggggtgcccatcgaggagatgaacctcgtctggagccgccactggttctggggcaagtacgtcaacgtcgacacacaacacggcggcgccagcccgagatccaacggcgtctgatctgagcaagctgcagcaacacctcggcacctgacctggccatgcatgcacacgtatactataatctaacaacgtagctgacctgggcaaattgccagcctgacaggggccagggtgctcgaatgtctcactctcaccgccgactaactttccatcaaaattgattcttgttcatactccatagcatgcacagattgattgaactgctacttgagattcttgtcattgttattagagagagagacagagacagaacgattggcatagcatgcagaattgtttggaagaagctagcaaagcagttccttgtttgtatcctctgtaccagaagatgagtttgatctaggattaatccctgcaaggcaaggtaaagtaaattcatgttgtactcaaaactaacttctcccatatctgtacgtcgtataaaacaaatccctgcaatgtgcaaagattgtcccgcgtagtgattttttcgtctccagcaagatctcaaacaagccccaaatctaagtgtaacatgtttgcattcgaattaaaaaattgaatcccttattgtgaaaaaaaaaaaaaaaag

SEQ ID NO: 309 - DNA, 1709 bp, Glycine max
gcctcacaaaagcaaagatcaaacaaaccaaggacgagaacacgatgttgcttgaacttgcacttggtttattggttttggctctgtttctgcacttgcgtcccacacccactgcaaaatcaaaagcacttcgccatctcccaaacccaccaagcccaaagcctcgtcttcccttcataggacaccttcatctcttaaaagacaaacttctccactacgcactcatcgacctctccaaaaaacatggtcccttattctctctctactttggctccatgccaaccgttgttgcctccacaccagaattgttcaagctcttcctccaaacgcacgaggcaacttccttcaacacaaggttccaaacctcagccataagacgcctcacctatgatagctcagtggccatggttcccttcggaccttactggaagttcgtgaggaagctcatcatgaacgaccttctcaacgccaccactgtaaacaagttgaggcctttgaggacccaacagatccgcaagttccttagggttatggcccaaggcgcagaggcacagaagccccttgacttgaccgaggagcttctgaaatggaccaacagcaccatctccatgatgatgctcggcgaggctgaggagatcagagacatcgctcgcgaggttcttaagatctttggcgaatacagcctcactgacttcatctggccattgaagcatctcaaggttggaaagtatgagaagaggatcgacgacatcttgaacaagttcgaccctgtcgttgaaagggtcatcaagaagcgccgtgagatcgtgaggaggagaaagaacggagaggttgttgagggtgaggtcagcggggttttccttgacactttgcttgaattcgctgaggatgagaccatggagatcaaaatcaccaaggaccacatcaagggtcttgttgtcgactttttctcggcaggaacagactccacagcggtggcaacagagtgggcattggcagaactcatcaacaatcctaaggtgttggaaaaggctcgtgaggaggtctacagtgttgtgggaaaggacagacttgtggacgaagttgacactcaaaaccttccttacattagagcaatcgtgaaggagacattccgcatgcacccgccactcccagtggtcaaaagaaagtgcacagaagagtgtgagattaatggatatgtgatcccagagggagcattgattctcttcaatgtatggcaagtaggaagagaccccaaatactgggacagaccatcggagttccgtcctgagaggttcctagagacaggggctgaaggggaagcagggcctcttgatcttaggggacaacattttcaacttctcccatttgggtctgggaggagaatgtgccctggagtcaatctggctacttcgggaatggcaacacttcttgcatctcttattcagtgcttcgacttgcaagtgctgggtccacaaggacagatattgaagggtggtgacgccaaagttagcatggaagagagagccggcctcactgttccaagggcacatagtcttgtctgtgttccacttgcaaggatcggcgttgcatctaaactcctttcttaattaagatcatcgtcatcatcatcatatgtaatatttactttttgtgtgttgataatcatcatttcaataaggtctcattcatctaaaaaaaaataaaaa

SEQ ID NO: 310 - DNA, 1485 bp, Glycine max
attcggctcgagaacatttttgatcttccttcctctgaaacaagaaccaaaatggagaattcgaccgaagaatcccatctccgatcggaaaactccgtcacttacgagtccccttaccctatctacggcatgtcattctccccctcccacccccaccgcctcgccctcggcagcttcatcgaagaatacaacaaccgcgtcgacatcctctctttccaccctgacaccctttcggtaactccccacccttctctctccttcgaccacccttaccctcccaccaaactcatgttccacccccgcaaaccctccccttcctcttcctccgacctcctcgccacctccggcgactacctccgcctctgggagatccgtgataactccgtggatgccgtctccctcttcaacaacagcaagaccagcgagttctgcgcccccttaacctctttcgactggaacgacatcgaccccaaccgcatcgccacctccagcatcgacaccacctgcaccatctgggacatcgaacgcaccctcgtcgaaacccaactcatcgctcacgacaaggaggtttacgacatcgcctggggagaggccagagtcttcgcctccgtctccgccgacggctccgttagaatcttcgaccttcgcgacaaggagcactccaccatcatctacgagagcccccaccctgacacccctttgctccgcttggcttggaacaaacaggacctgaggtacatggccaccattttaatggacagtaataaagttgtgattttggatattaggtctcccactacccctgttgcggagttagagaggcaccgtgggagtgtgaacgccattgcttgggctcctcatagctccacgcatatttgttctgctggtgatgatactcaggctcttatttgggaattgcccacgcttgcttctcccactgggattgatcccgtctgcatgtactctgctggctgtgaaattaaccagctgcagtggtccgccgcccagcccgattggattgccattgcttttgccaacaagatgcagcttttgaaggtttgaggtcagaacaaacaattacacattctagccacttcattgtggcatagacatagcaacttctgatcacttgagtgactgagttatatatattattgtagttgtgcaaactagtttgccctcctcatgttttacttgtggcgaaattaacgatgttcaatttgtctgttaaagatggatttttaacctgttgtgaagtaagatttcttgtctgtgatgtggaagccatagctattagtttcttagttaacatgagaaatcacatgtagtatgtggaatcaattaccacacatccagattataggtcgtaaaatcttcagtgtttgtattcccatttgattttaaacaccctacctctgatatgtatggactatggatctgtattcttgagcttttgccataaaaaaaaaaaaaaaaaaaaaaagg

SEQ ID NO: 311 - DNA, 4014 bp, Zea mays
acgagcgcatgactccccgccgctgaactgaatcggtcctgggctggttttcggcttttgcgcgactgggcccgtgcgccgtgaccttattgcgcgggcgccgcgcggtttgcgcagggtaggtttggtgcgatggaaggggcggcggcggcggaggtgggcggcggcggcgaggatgtgcagatcaagggcgccaaggagagtgggcagcccgcggcggcggcgcagcagccgccgccgctgccgtccggcagcgaggcgctggagatgccggccacgccgcttccgcgggacatggactggtccgagcacttctccttcttcacctcgccgggcgggttcgcgggcagctcggagggcgcgaggggcctcgccagcgtcggcctgtccaactccgagtccaggccggacagcgtgacgcagcgcggcgtggaccacggcgcggaagagagggtggaggagctcacattgaagaactgcattagcgctgatgctgcccagcccgaagcctctgctggtgggagcacgagcggtggggataggcctgctgttattaagggcctgtggggtaacttcacacggatggcccggagaaccagctatttggccagcagggaaaacgccgcactgagctatggcgacattgcaagctcgagggctggtgatgcttctagcagggaaaatctggcgacgagccttgccaacaatatcatctcaaggaacaacgatgtgtctggcaatgaggcacctacgagtcgtgtcggatatgtgaataatgagttcaagacgccatttcacagccagcagattctcttgtccccttggtctaatcaggacaacgctcttaaagtaagcagcttctcgaataggattcttgatcagatgagaagtaagactgtggcacccccatctggggttctagggtcaccgcttaaaagcaaatcaaaaggtaaaggggttgcataccaacgtgcacgggaggagatccgagtgcaagctaatgcaagacccagagaccctctggacaagatcccgacaattcctacctcaattcatgattctgtggccagagtggacatgcttttcagtactagtggagatgtttcaaaatcccactctgagggaactagcctgagggaactgattaagcctgggcggcaaacgatgtccaagtttgagaaattgcatttgtttaagcagatccttgatcttgtggataactgtcatgcacagggttttactttacaacatttgcgaccatcatattttacgatcctatcttcaaatcaagttaaatatatcggttcttataccacacaagatttgccaacatcaatcaaacaagagtttgctagagaagatcttgtgagtagaaaaagagcttttggccatagaattgattaccaagactctaatggccatggaaatttgatgctgaagcatcaaaaggttggtgagcaaggcttagttgctgtcaggcggctggcaaatacatttttgactgacaaaatacgcgacaatcaaattgaagataacgatccaggtatttcaaggcaagaaaattttagttacactaccagagaacattttaagttcgtcgaatcatatggcagcaatatgtccagtgctcagcatgtatctagttctggaacccaacaaccagcatttgaattgaggaatattgaggaaagctggtacaaaagcccagaggagctcagtcaatttaaaggcacacccccatcaaacatctatagccttggggttcttctatttgagctcttttgctgttctgagacatgggagatgcactgtgctgcaatgtcaaatcttcgccaacgcatccttcctccaaattttctttcagaaagtcccaaggaggctggcttctgcctttggttactgcatccagatccttgttcaagaccaaaagcaaaagagattcttggatgtgacttgataaatgagggtcgggatttgtccttgttagataagtcaccagtttccatcagtgaagatgacactgaatctagtttgctacttaacttcctttctcaattgaaagaagaaaaggagatgcaggctgccaagttatcggcagagcttggaagcttacaaacagatatcacagagattgacagaagacactcagcaggaatgagattgagtttagaggatatggatgtactgccaagttctagtttgccaggagcttctgtgagtgccctacagggtgcattgctgtcaggtttgctaccggcatcgtgcaagtcgagcatatatgaggagagggtaatgaggaatttggtgcagcttgaaaatgcttactactccatgaggtcctctgtggacacctgtgaaactaatgtaatcaaacgtccagataacgaggctttgagggtccgtgaaaatttccatcagcgtcacagtgattctgatgcaaagggagagaaaacagaccgtcttggatgcttttttgatggtttatgcaaatatgcccggcacaataggtttgaagtacgaggaattttgaagaatgcagatgtacttagctctccaaatgtcatctgttcattgagttttgatagggatgaagaatattttgctgctgctggagtttcaaagaaaataaaaatatttgaatttgatgcactcttaaatgatcgtgttgatattcattacccactggtagaaatgcctagcaagtccaagctgagctgtgtctgttggaacagctatataaagaactacctggcatcaacagactatgatggtactgttcagctatgggatgctggctctggtcaaggattcacacagtttacagagcaccgcaaaagggcttggtctgtgagtttttcacaagtcgaccctactaagttggcaagtggcagtgatgattgttgcgtgaaagtatggagtattaatcagaaaaactctattgatacaatccgaaacgtggccaatgtatgctgtgtacaattctctccatactcctcccgcatgctagcttttggttcagctgattacaaaatatactgttatgatctgaggaacacaaggataccttggtgtactatttcgggacatggaaaggctgtcagttatgtaaggttcttggatccagaaacacttatctctgcatcaaccgacaacacattgaagatatgggatcttaaccagactaattgcagtggattatctgctgattcttgcagcctgactctgaatggtcatagcaacgagaagaattttgtagggctatctgttcatgatggatacataacttgtggctctgaaaccaatgaagtgttttcttactacaaagatttccccatgccaataacttctcataggtttggttccattgacccgataactggacaagtgacaaatgaagacaaccagcagtttgtgtcgagtgtttgctggagagggaagtcaaacatggtagtggctgccaactccagtggcagcatcaaagtgcttgagcttgtgtgaatgatccaacgagagtgtcatattggagagaagaaggttctagggttgccatgcgggcctgtgatgctctcgtgccctcggtgatgctccaatggccctgcttatccggtgtctgcatcctcaatggaagcactaagcgaactgggtacctcttctaggtctgcatttcactgttttgccagggcactaaaagatgcgactgctctgtgcaagcaacctacagcaccgatcattggtcattattggaagctttgcttgaaactcccaagcgaaccaaagaaaaataaaataaaatcaagagtatgttgtgtttggaaatctctggcattttggcacggtaccttattcatcatcgtaaggagggccccaggtctgtacagaattagggggccatggggctgatgaaatagaacatgtgatcatgcaaacttcttttgggctagagaggctgacggacgccgtggcgccttactgaatcagttgggaatttaactcagttttgatgtgcgccggact

SEQ ID NO: 312 - DNA, 1455 bp, Zea mays
ggcgccaacaaaagaggaagagtcaggccgaatgttctgcaagtcaagacgatgtaagcagaggatctgagatagggagtcggtggtatgtggctacgcacaccttgtacttactgctaacaattcgtaaaaaaatggttttgttcaggatcttgatgatgagtctggtgggatgcgaggatcaggcggcagaggtacgaagcgcagccgcaccgcggaggtgcacaatttgtccgaaaggaggagaagggacaggatcaatgagaaaatgcgcgccctgcaagagctcatccccaactgcaacaagattgacaaagcctccatgctggatgaagcgattgagtacctcaaaaccctccagcttcaagttcagatgatggccatgggaagtggactgtgcattcctcccatgctgctgccgcgagccatgcagctgcaaattccttcaattgctcatttccatcatctcggcatgggattgggttatgggatgggtgtcctcgatatgaacagcacagcggcagttccatttcagcccatccctggcgctcactatacttgtccgatgatcccaggcacgccaccacaaggtcttggaattggaatgcctggcacaaacacgatgccagtgtttggagtccctgggcaagcaatccatccctcagcgtctagcgtacagccattcccatcgttggcgggtcttcctgttaggccaaacctggcacctcaagtcccagccgtcatggctaacatggtgcaggagcaacagcaaggcgtagcgactcagcagcagcagagtctgaataatgaagctcaacagaaagcaaataccggagatccacaaatactacaaaaatagatgaagagatcttcgccagtaatcagtttctggatggtggtggcaacaggactaatactataggggaaaatgaggctgaaacattaaaaacggtcagcaagtgccagtgtgtaacctgactcgagctaaacttgacacaaatcatggaacttggcagagcgttattatcctaatagataacatggctgatgattttcaggtctcgactaacaagctgcaggtgtgaatatcagcaccaactcatcatggaagagcttaacaagtttcatgattcacgaagcagatctatcacttgaaaaaggtccaatcaatcaagatgtatttggtggcgggatgtctagcttagcgagataagatgctccaaagttttgtgtaaaatgtagatggaaccttgttacaagtaacatttcttgacagcggtgccgttttcaggtgtttttttttttgcttcactgaagttttcttgagtcaatatatcttattttcccaaaaaaaaaaaaaaaaaaaaaaaaaaaaaaaaaaaaaaaaaaaaaaaaaaaaaaaaaaaaaaaaaaaaaaaaaaaaaaaaaaaaaaaaaaaaaaaaaaaaaaaaaaaa

SEQ ID NO: 313 - DNA, 1355 bp, Glycine max
attcggctcgagtctcactcttcttgcagcatctctctccattaccttcataactcaatctcccattattattagagatgacggttgaaaaggaagatttgggtttgagtctaagcttgagcttccctcagaaccccccaactcatcttcatctcaatctcgtttcctcttctccttccagccacaaccctcagaaaccctcttggaacgaccctttcacttcttcagctggatcatcattccttcgaggaatcgatgtgaaccgtttaccttctgtggtcgattgcgaagaggaagcaggtgtgtcatctccaaacagcacggtttctagtgtcagtggaaaacgtagcgagagggaagaagccaatggtgaagaaaacgacacagacagagcttgttccagaggcatcatcagcgacgaagaagatgccgaaacctctagaaagaaacttagactctccaaagaccaatcaattatcctcgaagagagcttcaaagaacacaacactctcaaccccaaacaaaagttggcgctggcgaaacagctgggtcttcgagcgagacaagtggaggtgtggttccagaacagaagggcaaggaccaagctgaagcaaacggaagttgactgtgagtttttgaaaaggtgctgcgagaatctgaccgtggagaacaggaggttgcagaaggaagtgcaagagcttagagcactgaaactttccccgcagttctacatgcacatgaccccacccaccactctcaccatgtgcccctcgtgtgagcgtgtcgcggttcccccctcctccgccgttgatcctgccatgcgtcaccatcacgtgcctcctacacaacctcgggccttccccattggcccatgggccaccgctgccgccactatcccgcacaggcccttcgatgccctccgtcgcagatcttgactcgtcgaaacaaaatgacaaaatttgaaaaaaagaaaacggttgtaatagtaggaagccatgaattatgtgttcaaagtgtggtctaagatatggtggttaggaaaactgattttgtgggtctctaatgttttgtactagtttgacccttcgtctttgttttgggtttcggagcatgacctggtttagttagttagaggtttttttagtttgtaatacttactgcgttactctcatttctcatgattaaatcggagattctgtaaagttcagtagtcttaataaatattatatattacatataaaaaaaaaaaaaaaaaaaaaaaaaaaaaaaaaaaaaaaaaaaaaaaaaaaaaaaaaaaaaaaaaaaaaaaaaaaaaaaaaaaaaaaaaaaaaaaaaaaaaaaaaaaaaaaaaaaaa

SEQ ID NO: 314 - DNA, 2527 bp, Zea mays
cccacgcgtccgcttcactcccaatccgaatccagatccgcgaatgctggggcgggcggcggcactgtccgcgccacggtggcgcggcggggtgccagaccttcgcgccgcgctgcggtcggggggcaacctcctcttcgcgctcttcgtggcggccgtgctcgcattcacgctcctcgcggcgttccacagccccgacgatccgctcctccacccgtcctctcaccagctcaccgatttcctcacctccgccacttccacctccaccttcctcactgacgactccgtgctgcgcaccggggaggacttcaactcctcgtccaccggcgccgccggcgaggtcgccgctgggggtgtcgaagtcgtcgcggaggccgtcccgttcatcaagctctccgaagttggcgccgaggccgagaagacggagcccgagacggagcgggccgtcaccgtcgacactgatgcggccacgggcgagggtgcagcggtggcggaggaaaccgccgttgcggaggcggtttcctgcgacacggaggcgcccgtggactgcacaggagacagggaactcttcaacctgctcatgcgcgcggccatcgagcggttccccgacctccacttctaccgctttggccgtcccgtggcggtgccggggagtcccatggagtgtgacctcgcgtggcgcttccgccccgctgccgacgccatcggcaccggccggaccacatactacaaggactaccgccggttcacgcttacccgcgacgtcaacacctgcagcctcgtcgtcgacaccgtgggtgaataccactcgggtgtgggtgccaagcgcaatggacggcgcaaggggaagaaagggaagaagggaaagcaggatgcacctgtgactgacttcgtgccggttaagacacagattaggctggacgagaacaccgccaacaatgaggctgctggggctgcagcggagccggtgtttgttgttggtgaggctgtcaatgacagcttgccagtggttgcttctgagtctgatttcagccgtggtaagtaccttatttacattggtggtggcgagaggtgcaagagcatgaaccatttcatttgggggttcttgtgtgcccttggtgaggcacaattcttgaaccggactcttgtcatggacttgaatgtctgcctcaatgcacggtatacttcgagtggcaaggatgaagaaagagatttcaggctctactttgattttgagcatttgaagcaatctgcgtccgtgattgaccagagccagttctggcaagattggggacagtggcacaagaaagataggctcaagaacttctacactgaagacatcaggatgaccccaatgaaacttcgtgacatcaaggacacattgatcatgaggaagtttgggaatgttgagcctgataactattggtcacgtgtgtgcgagggtgagactgagggaataatcaagcgcccatggcatttcctgtggaaatctcgtcgcttgatggagattgtatctgccattgcctcacggatgaactgggactttgactcggtccatgttgtcagaggggagaaagcgcagaacacacaactttggccaaaccttgacagagatacctcaccagacagtctccttatggcacttaatgataaggttggtgctggccggtatttgtacattgctaccaatgaacctgacaaatcgttctttaacccactcaaggaaaagtataaaacacacttccttgatgatttcaagtacctgtgggatgagaatagtgagtggttcactgaaactaaggagctgagcaatggtcagccagtagaatttgatggctatatgaggattgcagttgacactgaggtattcttgagggggaagaggcatgtggagacattcaacgagcttacacgtgattgcaaggatggcgtgaatacatgctcagcttcttcctgaacatttggtgggctaaggaaccttggagaggactagtaaggacttgggaaaggccaagatgtcaaggacgagaagctaggatattcacaacaagagaaatccaagtctgactcaacttcgtctccacctcgaagtctaggactagtctacactaaaacagacgcccaagatgcatccgaactccgattaggttatgctttatatggatggaaacctaaggagatacgctttccaacccaactggaatcaccttaaaattcatccggagtcaacaggaatcgtcgaaacaagttagcgttcagattctgttttagtgttgcaacaccgtatgttgggctgttgggccatgtatcgtgttggagcatattagggatgcaaccaaaggtcatgcacgcccctaatctctattttatcagcaaccaccaccatattagtgtttgggttttgcttagatcatatttgtcatctaagaatttgtcgttcatcagtttgtgataccccaactcgtaatcaacacagttttggttgtgttctttcaaaaaaaaaaaaaaaaaaaaaaaaaaaaaaaaa

SEQ ID NO: 315 - DNA, 2016 bp, Glycine max
cctcaatttaattcccattccctctctcagaactcatcatcatggccgttgattctgaggtccctcgtgccgagaggagcgcaaaggctcttcagttcatcgaggaagttacaaaaaacactgactccgtccaggagagagtcctcaccgagattctcacccaaaacgccgagacggagtacctcaaacgcttcggcctcaacggcgccaccgaccgtgacactttcaagtccaaggttcccgtcgtgacctacgaggatctgcaacctgatattcagcgcattgcaaatggtgacagctctcccatcttgtgctctcacccaatctctgagtttctcaccagttctggaacatctgccggcgagagaaagttgatgccaaccattcatgaagaaatggaccgtcgtcagttactgtacagcctgctcatgcctgtgatgaaccaatacgtgtctgatttggacaaaggcaaggcgcttcacttcctgttcattaaggcagaggccaagacacccggcgggttagtggcgcgtccagtgctgacaagctactacaagagcgagcaattcaggaaaagaccattcgacccttacaacgtcctcactagccccaacgaagccatcctttgccccgattccttccagagcatgtacactcagatgctctgcggcctcatcatgcgccacgaggttctccgtgtcggagccgtcttcgcctccggccttctccgtgccataaggttccttcagctcaattgggaacaactttcccatgatatcctcaccggaaccctaaacccaaagatcactgaaccttccatcaaggaacgcatgtccaagatcttgaaacccgaccctcaactcgccgctttcattaaaaacgaatgctccgtggaaaactgggagcgtataattgtgaggatttggcctaacacaaaataccttgacgttatagtcactggagccatggctcagtatattcccacactcgattactacagtggtggcctacctaaaccctgtaccatgtacgcttcttctgagtgttttttcggcctcaacctcaaacccatgtccgaaccctctgacgtgtcttacaccattttacccaacatgggttacttcgagtttttaccccatgatgattcctctcctgttactctctccaaggactcaccgcctcgcttggtggaactcgctgacgtggaacttggtaaatactatgaactcattatcaccacctattcaggtctttgccgttacagggtcggtgacatactccaagtaactggtttccacaactccgaccctcaattccgtttcgtgaggcgaaagaacgttttgctgagcattgactcggacaaaaccgatgaagcggaactgcaaaaggccatcgagaatgcctcggagttgctgaaggagttcaataccagcgttgtggagtacacgagcttcgctgacacgaaatccattccggggcattacgtgatttactgggagctcatgatgaaggactcgtctcaccctccaacgaaccaagttctgaaccagtgctgcttggtgatggaagagtcgctgaactcggtttatagacaagggagagttgcggataactctattgggccgttggagatacgagtggtgaagaatggaacgtttgaggagttgatggactacgctatctcgcgtggtgcgtcgataaaccagtacaaagtgccaaggtgcgtgagcttcacgcccataatggagctacttgactctagggtggtttcttttcattttagcccagctgcaccgcactggaccccagaacgtcgtcgttgaaggaagctagggtaacgtacagcaataacatgcagtagtcatgcataagatctagtataataataaagagagaaaaaatgggtgacagaaaagggtagttgttcattgttgttgttatattatcactgccaaacccgaaagtgtctgtatttgttgatttgatatttccaatgagcttgtttttttcaaaaaa

SEQ ID NO: 316 - DNA, 1428 bp, Zea mays
cccacgcgtccgactcgccattcctaagtcctaactacctccaaccccgcacgcacaactggccgcgccaaggcaaagctagaagaagacaacgcaaagggagaggacagaggaggagcagaggacgatgggcagcggcggcgctaacactgcccccctcctcaccccctacaagatgggaaaattcgatgttacccacagggtagtcctcgcaccactgacgagacagcggtcctacggcaacgttccccagcctcatgccatactgtactatcagcagagggcgactaaaggaggtcttctgatcgctgaggccacgggggtttcagacactgctcaagggtacaaggacactcctggcatttggacccatgagcaagtcgaagcatggaagccgatcgtagacggggttcaccagaaaggagggatatttttctgtcagatttggcacgtagggagagtctccaattccacttttcagcctaatgggcaggctccaatttcaagcaccgataagccactaaagcctcaagtgagagccaatggtatagacgtggctactttcgcagttcctagacgcttagagactgatgaaatccctttggtcgtcaatgatttcagggtagctgctcgaaatgcgattgaagctggatttgatggtgtcgaaatccatggagctcacggttacctgattgatcagtttctaaaggacggggtcaacgaccgcacagacaaatacggtggcagtctggagaaccgctgccggtttgcactggaagtaactcaagctgtggtcgacgaaattggagctgacaaggtcgggataaggctgtcaccattcgctagctactcggaggcgccggactcagacccggaagctctgggcatgtacatggcgaacgcgctgaacgagttcgggattctctactgccacatggtggagccgcggatggtgaaactcggtgaaaagttcgaaaccccctacagccttcgcccgataagggacgctttcaggggaacgttcatcgttgccggcggctacggcagggaggatgggaatcgagcgatctccactgggtatgctgatttggtcgcgttcgggcgcttgttcttggctaatcctgacctgcctcggaggtttgaagtagacgctccccttaacaagtacaacagagacacgttttacatccctgatccggttgttggatacactgactacccatttctttcgtcagatgtataaatgttctcttttcagcaatctgcttttttagattgagtagtaactggttggtgtaccagtaaaatagtagaggaataaaccattggtctgaatgcctcattctcatatatatggacaaaagcaatatgatcgttgtaattgtgcctcaaatcttatagttgtaaaaaatattgtgaagaaaaaaa

SEQ ID NO: 317 - DNA, 1324 bp, Zea mays
gctccccgtttccctctccaactccaatccatggcctccacggatcgctccacgccggcggaggacgagcaacagcagaagcgcccgtctctcttctcgccgtaccagatgccccgcttccgcctcacccaccggtgagcctccatcgcggtggtgctggcgccgatgaccaggtgcagggcgcccgacgcgatcccaggccccgcgctcgcggagtactacgcgcagcggtccacggagggcggcttgctcatctccgagggcaccatcatctcgccgtccggccctgggttccctcgtgtccctgggatatacaatcaagaacagactgatgcatggagaaaggtggttgatgctgttcatgccaagggagctatctttttctgccaactatggcatgtaggccgagcttctcaccaagtatatcagccgggtgctgctgctccgatatcctcaactgataagccaatatcatcaagatggaggatactgatgcccgatggatcctatggcaagtatccaactccgaggcgcctagccacatccgagataccagaaattgttgagcaataccgtcaagcagccgtaaacgccatcaaagcaggtttcgatggcatcgagatccatggcgcccatggctacctcatcgatcagttcctcaagggcggtatcaacgaccggactgacgagtacggtggctcactctccaaccgttgccggttcctcctggaggtgacccgagccgtggtctctgcgataggggcagaccgcgtcgcggtccgagtgtccccggccatcgaccatctcgacgcctacgactccaaccccctgcagctcggcctggccgtggtggagcgtctcaacgctctccagcaggaggccgggcggctggcctacctccacgtgacgcagccacggtacacggcgtacgggcagacagagtctggccagcacgggagtgccgaggaggagagccggctgatgcgtgccgtgcgaggtgcctaccgtggcacgttcatgtgcagcggtgggtacacgcgggagctcggggtcgaggccatcgagtccggggacgctgacctggtgtcctacgggcggctgttcatcgctaatcccgacctggtggagcggtttcggcgcgacgccccgctgaacaaatacgtgcgcaagacgttctacacgccggaccccgtcgtcggttacacggactacacattcctcggccagcctaaggcacgcatgtgatttgattattagtgcgttgccgtaattataagaggcggagtattgtttgtatgttgtgacttgagaaaacaagcaaaaa

SEQ ID NO: 318 - DNA, 1376 bp, Zea mays
cccacgcgtccggcgagcaacagagcagaagcaaagcgcagagctagcaagtgaccgaccgagagcaaataggcaaggcaacgcaggcaagatggtgcagcaagccgcgaaggaggtgatcccgctgctgacgccttacaagatggggcagttcgagctctctcaccgggtggtgctggcgccgctgacgaggtgccgctcctacggcaacgtgccgcagccacacgccgccgtgtactactcgcaacgcgccaccaggggtggcctgctcatcgcggaggccacgggggtgtcggccaccgcgcaggggttcccggagtctcctggcatctggacgcaggagcaggtcgaggcgtggaagcccatcgtcgacgccgtccaccgcaagggcgccatcttcgtctgccagatctggcatgtgggcagggtctccaccaacgagctccagcccaacggcgacgcgcctatctcgagcacggacaagcagatctcccccgacgccaagtccggaacggcgtactcgaagccgcgccggctgcggaccgacgaggtccccgggatcgtcgacgacttcaggcgggccgcacggaacgcgatccaggctggtttcgacgccgtcgagatccacggcgcgcacgggtacctcctggagcagttcatgaaggacagctgcaacgaccgcacggaccagtacggcggcagcctggagaaccggtgccgtctcgccgtggaggtcgtggacgccgtcgtccgcgaggtgggcgcgcgccgcgtcggcatcaggctgtcgcccttcgtcgacttcgtggactgcgtggactcggacccggtggcgctcggccactacatggtgcagcagctcaacaggcatagcggcttgctctactgccacatggtggagccccgcattaccgcccacgggcgcaggcagatccctcacgggctcttgccgttccgaaaggcgtttcatggaacgttcatcgccgccggtgggtacgatcgggaggaaggcaacaaggtggtggcagaagggtatgctgacctcgtcgcgtatgggaagctgttcttggctaacccggacctgcctaggaggttcgagctggatgtggcactcaacaaatacgaccgctccaccttctacacgcaagatcctattgttggctacacagattaccctttctttgaagaagaagatggcaagaatgagaggtgaaatctgataatgtggagggttcatcaagtataagttcgtcattatttccaccattcattattggtcattgtggtggagtcattgtgtcatgttgtttcattctgtactagtgtggtgtgaagtgaaataaatctatttggtgaaattgttataaaataaaaaa

SEQ ID NO: 319 - DNA, 1789 bp, Zea mays
ctcaccaccaccacacacgggagatagctatagctagcatagcaagccagccagtcagcgacttagcagcagctagctagccatgctgccgtccttcgtgtcgccgacggcgagcgccgcggcctcggtgacgcctccgccgcggccgataccaggcagctacgggccgccggtgctgggcccgctgcgggaccggctcgactacttctggttccagagccaggacgagttcttccggaagcgcgcggcggcgcaccgcagcaccgtgttccgcaccaacatcccgcccaccttccccttcttcgtgggcgtcgacccgcgcgtggtcgccatcgtggacgccgccgccttcaccgcgctcttcgacccggacctcgtggacaagcgcgacatcctcatcgggccctacaacccgggcgccggcttcaccggcgggacgcgcgtcggcgtgtacctcgacacgcaggaggaggagcacgcgcgcgtcaagaccttcgccatggacctcctccaccgctccgcccgcacctggtccgccgacttccgcgcgagcgtcggcgccatgctggacgccgtggacgcggagttcggcaaggacgacggcagcgacaagaagccctccgccagctacctcgtccccctgcagcagtgcatcttccggttcctctgcaaggcgttcgtgggcgccgacccgtccgccgactggctggtggacaacttcggcttcaccatcctggacatctggctggcgctgcagatcctgcccacgcagaagatcggcctcgtccagccgctggaggagctgctcatccactcgttcccgctgccctccttcctcatctggccgggctactacgtgctctaccgcttcatcgagaagcacggcgccgaggccgtggcctacgccgaggcgcagcacggcatcggcaagaaggacgccatcaacaacatgctgttcgtgctcggcttcaacgccttcggcggcttctccgtgttcctgcccttcctcgtggccaaggtcggcggcgccccggcgctgcgcgagcggctgcgggacgaggtgcggcgcgccatggtgggcaaaggcaaagacggcgagttcgggttcgccaccgtccgcgagggcatgccgctggtgcggtcgacggtgtacgagatgctgcggatgcagccgcccgtgccgctgcagttcgggcgcgcgcgcagggacttcgtgctgcgctcccacggcggcgccgcgtaccaggtgtccgcgggcgaggtgctgtgcgggtaccagccgctggcgatgcgggaccccgaggtgttcgagcggcccgaggagttcgtgccggaacgcttcctcggcgacgacggcgccaggctgctgcagcacctcttctggtccaacgggccggagacggcgcagcccgggcccgggaacaagcagtgcgccgccaaggaggtggtggtggacacggcgtgcatgctgctggccgagctgttccggcgctacgacgacttcgaggtggagggcacctccttcaccaagctcgtcaagcgccaggcgtcgccgagcgtggcgcaggcagcagccgccgccggagcgcagcagtgagtgcgctgtataggatccatcggtggcgtgcgacgtcgccggcgccggccaagcaataaagtaaattgagtaggccctcctcgtcatccacatgctcgtctgtgttcgacttcgatcggtgtctcttcctcccggccggccgctggccgccggcggccgttgtggtaataaaaaaaacacttgtgcaaaaaa

SEQ ID NO: 320 - DNA, 1527 bp, Oryza sativa
cagaagcccgtggaagcttcggaagcggcgcggcgcggcgctgggcgggggagaagaccagagcggcgaggaaggaggcggcgcccagcggggagagcgagcggctcgacgccgacggccatggcgctgctgatggatcccggggcgggaggccccctgacggagagcgagaaggccgacctggacgccatcgccgccatcaaggagtcggcggcggcagagtacaaggagaagggcaaccggctcgtcaagatgggccggagccactacgccgacgccgtcgactgctacaccaaggccattgcccagatggagccgctgccgccgccgccggtgccatcccccgacgcctccgtcctcttcgccaaccgcgcccacgtcaacctcctcctcggcaaccaccgccgcgccctcgacgacgccgcccgtgccgtccagctctctccctccaacgtcaaggcgtactaccgggcggcgaaagcggcgattgctctcggcttgctgccggaggcggcggccttctgccggcgggggatcgagcaggaccctgctaatgaggagctcaagaaattgctcgcacaagtggacgcccaacagagtgagcaagatcgtcatagggccaaggttgcgcaggccgtgtccgctgcgaaggatattgttgccgctatagagaagagggggttgaagcttgggaaggcagcatatcaagagcttaccggtgtaaagaagccgaagttggatgagcagggtgtgcttcactggccagttcttctgctctacccggaggtcatgtcgagtgacttcatcgaggattttccggagacagatactttcgtgccccaccttgatgtcatgttctcagaaagttctccaccattaccatgggatgataaacacgcttacacacgggatgctgttgagttatattatcaggctggcgttggcacagttctgtccaaaagtgaaatattgaaaattcttttggaaggcactatggactcaaagtcacttcctgaaagcctgcttgatgaggaagatggagaaaatgatgatggcaagagcagcacaattacatcatcagataagggttctgtgaagtggatcaatgtaaaagagggaaaaactcttcaagaagtgctgcagcataaagacttcatcatccctgcaattcctgtgttctttgttgtttcaagaaaatccaccttttacagaaagttcaaggcaggaaactggtctttgccgtaatgcttagcgtgattcagtttggcacatttggaagatgattagtgcggtacgcgtatgatcagagaagaaaagctggccacctagtcattcttgtatggttttatatgttgctttatagaatgatgaggtgtgttctttcctgtatttggtacaattctcaagtattttcctatcctttgcttgagatgctcagtatgccgtttctggagaaacacactgagaatgtacttatgtatggacagctttgggcctgatttagcgcttggcacaaaaaaaaaaaaa

SEQ ID NO: 321 - DNA, 1306 bp, Zea mays
cgcctctccctcctcttcctctcaacaccaccggcatacccatggcgaagtacggcgagggcgacaagcggtggatcgtggaggagcgcgccgatggcaccaacgtccacaactggcactgggcggagcgcgactgcatcgagtggtcccgcgcgcggctctcctcgctgctcgcgggcctcaccgtcctcgacggcgaggacggcctcacgctccgcaccgtcgcgctcgacaatctcgacggcgaggcctacgtcaacatccgcaagggcaaggtcatcccagggtacgagctctcgctcaccctctcttgggaggccgaggccgcttcggagtccggagctgtgaaggtcgccggcaccgccgaggtcccctaccttgccgacgagaacgctgacgaggaccccgacctccacatcaccgtgcgcggtgacgagacgcccctcgcgctccgcgccaaagatgccttcctctcccgcggcaaacccatggtgctcgaaaagatccgggagttcgttgctgccatggccaagggtggaccggcgaaggacgagctggattccaagaaaactcctgcgaaggtcgccgctgcagcgcctggcgccgctccggcgaagaaagaggaggtggtggctcctgcaccggctgcggggaagaaaaaggccaaggggaaggacaaggaggggttcaagaccattaagatgacggagacgttctactgccgctcaaaggacatatatgagatcttgatggatgagaacagatggaaagggtttacacagagcaatgcgaagatcagtagagaggttggaggggaatttagcctctttgatgggtgcatcactggcgtcaacgaggatctgcaggaaggaaaactgattgcgcagaaatggcggtttggaagctggcctgacggcttgtactcctcggtccggttgatgttggatgagcccgagtctggagttacagtcataaaactcaaacaaactggtgtgccagaggaagacaagtatgggaattcaactgtggttgagaacacggagagaggctggagagatctcatattccagcggatacgtgggatgtttggttttgggatctaaagagtctatagagaggcgatttaatttggcatgatgtcctaattcaaatttttacggggtcaggccatgaatgctatagcaatccatgtttctcacccagttttttttcttcatgtcggcaaaacgcaaaactctgcatatgatggggatttgaaaacatctgttattcatcaggctaaaacgctgcagtattccttgccccc

SEQ ID NO: 322 - DNA, 2005 bp, Zea mays
accccaagcgcgcacccatcttctggcctttccagccgccaagccttctagaagcttcaagagctcgattcgatcggaaccctcgccatggccgacgaggcgaaggcgaagggtaacgcggcgttctcggccggccgcttcgaggaggcggcgcggcacttcacggacgccatcgcgcttgccccagacaaccacgtcctctactccaaccggtcggcggcgctcgcctcgctccaccgctactccgatgctctcgccgacgcgcagaagaccgtcgacctcaagcccgactgggccaagggctactcccgcctcggcgcggcgcacctcggcctcggcgacgcggccagcgccgtcgccgcctacgagaagggcctcgagctcgaccccagcaacgagggcctcaaagcggggctccaggacgccaagaaagccgccgccgcccctccgcgccgcgggtcgtccggccccgacgccatcggccagatgttccagggccccgagctgtggagcaagatcgcgtccgacccctccacgcgcgcctaccttaacgagcccgattttatgcatatgatgcgcgaagtgcagaggaaccccagcagcatcagtatgtatctctccgatccccgcatgatgcaggtgctcagcctcatgcttaatgtcaagatccagagacccgaggcctccgagccgtcgcagtctaccccgccgccgccgaagcagcagcagcagcagcagacgccgccttctgagacgaaggctagggatgtggagcccgagcccgaggcagagccgatggatttgactgatgaggaaaaggaccgcaagcagacgaaagctgctgctcagaaagagaaggagttaggtaacgcagcttacaagaagaaggacttcgaggtggcaatccagcattacaccaaagccttggaacttgacgacgaggatatttcctatctgactaaccgagcagcagtctacattgagatgggaaagtacgatgaatgcatcaaggactgtgataaggctgtggagaggggaagagaacttcgtgctgatttcaagatgatttcaagggcactgacaagaaaaggaacagctctggtcaaacttgctaagacctctaaggattttgatattgctatcgagaccttccagaaggctctgactgagcatcggaacccagacactcttaaaaagttaaatgaggctgagaaagcaaagaaagagttagagcaacaagagtattatgatccaaaattggcagatgaggagagagagaaaggcaatgagttcttcaaggagcaaaaatacccagaagcaataaaacactacacagaggctctcaagagaaacccgaaggatcctagggtttatagcaatagggccgcctgctacaccaagttaggagccatgcctgaaggtcttaaagacgcagaaaagtgtcttgaacttgaccccaccttcaccaaagggtatacgaggaaaggtgcaattcagttcttcatgaaagaatatgacaaggccgtggaaacctaccaggctggcttgaagcatgacccgaacaaccaggaactgcttgatggtgttaagaggtgtgttgaacagatcaacaaggccaacagaggtgaaataagccaggacgaattgcaagaaagacagaacaaagctatgcaagacccagagatccagaacattcttaccgaccctatcatgcgacaggttctaatagatttccaggagaacccaagtgcggcccaggagcacctgaagaaccccggggttatgcagaagattcagaagcttgtaagtgctgggatagttcagatgagatgatcgagcgatgcgatgattggctttgttcgttcacgtgcaccctggtcatacatatgttttaacaagcagcagcggcataagaatgaacctgttcgggggctaatcttattccttttggattgtaagtgcattgacattggataattcatgtttgtggcactgagtttcgagt

SEQ ID NO: 323 - DNA, 1554 bp, Aspergillus nidulans
ctccatcgtcaaggaaggaacacggccctaactaaaccctagctaagggaagggaaacaagaccatggatgcctccaagctccgcgagcttcgcgacttcgtcgaggcgtgcaagaagaatccttcgctcctcgccgaccccaacctctccttcttccgggattacctccagagtttgggtgccaaaattcccgccgccgccccctctttcgaaagtcccaagagatcttccatggacgacattgatgacgacggtgatgacgacgacgatttggatatgagggatcccactcctgagcgagacgagctcgatgaagagattgttgagtctgatcttgagctcgaaggagaaattgtacagtctgaccatgatgacccaccacagaagatgggaaatccttcagtggaggtgactgaggaaaaccgtgatgcttcccaagaagcaaaaggcaaggctatggaagcaatttctgaaggaaaacttgaagatgctattgaacaccttaccaacgcaatagtgctgaatccactctcagcaatcatgtatggtactagagcatctgtgtttataaaaatgaagaaaccagctgctgccattcgtgatgccaatgctgctctagagatcaacccagactctgcaaaaggctataaaactcgtggaatggcatatgccatgcttggcaaatgggaggaagctgctcatgatctgcacacagcatctaacatggattacgacgaggagatcaatgctgtgctcaagaaggtggagcctaatgctcacaagatagtggaacatcgcaggaagtatgagaggttgagaaaagagagggaggaaaagagagcgcagcgtgatcggcttcgtcaacgtgcagaggcgcaggctgcttacgacaaggccaagaggaaggagcaatcgtcaagtcgctcatcaggaggtgcatctcccagaggctttcctggagggatgcctggtggtggtttccctagagggatgcccggtggaggtttccccgggggtggcatgcctgggggtttccctgggggtggcatgcctggaggtttccctggtggtgttcccggtaatgttgatatgagtaaaatcctgaatgaccctgacctgatggcagcattcagtgacccagaggtcatggcggctttacaagatgtgatgaacaatcctgccaactttgctaagcaccaagcgaatcctaaggtgggccctatcatcgcaaagatgatggccaagttcaatgggtcccagtgatggttatgtcgcagtcaggttttgtgagcagcaagcaaaggtttgttggacagtgaacaggtgttcttttcgtgcatctggtctgggagtgtgtttagcttgtgatgaagaacatgagtgtgtgtgttggtcgtggtgcatctggaggtgcgatgagcatgtgatgaaaaaaaaccaaacggctctatggtgatgtatgcaaaaagttgctttcgaacttgatttctcaattcacagatggtttgacagtttcttgaattatagaatgcttgtgtgctgctagtttccct

SEQ ID NO: 324 - DNA, 1235 bp, Oryza sativa
gcttctccaattttccaagcctgcctccaagcgcacgccacgatcttctagaagcgattcgcgcgcgccgccgcctcctcccctccccttccccggagcgaagccgccccgccgggggggatgtcgccggcggcggacagcgcggcgtcgaagcggcaggcggagctgctcaagcaggagggcaacgccttcttcaagaaggaccgcatcagcgccgccatcgacgcctacaccggggccatagctctctgcccaaaggttgcagtatattggaccaaccgagcactttgctacaagaggcggaatgagtgggttagggctgaggaagattgtagaacagctattcagcttgacagccactctgttaaggcacattacatgctcgggcttgcacttctcaacaaggacgaattggccgagggaataaaagaactagagaagtcgttggagcttggaaggggtgcacatccagcaagttacatggttgaagagatctggcaagagctttctaaagcaaaatacatagaatgggaaaatttatcaagcgaacgagtccgtcaattgcataagctgaaggaagcatgtaaagaagctcttaggaattataacagccttgacaatcctcctgcatatgtccccgaggaacagctaaatgagcttgaggaagtttttcggaatgccaggaagtctgatattccaacagaagttcctgatcatctctgctgcaaaattactcttgatattttcagagacccggtgataaccccaagtggaatcacgtatgagagggcggtgattcttgatcatcttcatagggtggggaagtttgatcctgtgacccgtgagacacttgaaccacaccaactggttcctaaccttgccatcaaggaagctgtccatgcatttttgagtgaacatggttgggcttacaggatgagatgactactttgaattacacctgggcttggagctttggaggcaacatttcagattgcaatatacatgtttcggttagtcaacttaaatgtgtcattttgtttatctttacatatttattggtggaaaaggttttacctgggatggctgtgtacagattccccttctctagctatccctcctctctactctgttcatgtgtaatgcttggtatcagattatcacttatccacagtaaaagaaaattaaagtggctgtcatactccttgttctctgattattggtttttggcgcactcg

SEQ ID NO: 325 - DNA, 1131 bp, Zea mays
caagaagccacctcaggctcacgccgcggttccacacgagcaaatcccgccgcttcctccccacgcaccccttcccatccttcccgaagcacgaggcgagccgggccgccggatatggcgccggcggcgccgtacggcggggccgagtcgcagcggcaggcggacctactcaagcaggagggcaacgcctttttcaggaaggaacgcctcagcgccgccatcgacgcctacaccggggccataactctttgcccaaatgttgcagtatattggaccaaccgagcactttgctataggaagcggaatgagtggactagagttgaggaagattgcagaacagctatccagcttgacagccagtctgttaaggcacattacatgctcgggttatctcttgtcaacagccaaagattatcagaaggaataaaatcactggagaagtccttggagcttggaaggggtgcacatcctgcaagctacatggttgaagagatatggcaggagctttctaaagcaaaatacatcgaatgggagagcttatcaagagaccgaacttgtcaactgcaaaagctgaaggtagcatgtaaagaggccctaacgagttacaacagccttgataacccagccgcaggtgcgccagtagaacagctaaatgagctcgaggaagttttcaagaaggctgcaaagactgatactccagcagaagtacctgaccatctctgttgcaaaatcacacttgatatcttcagagacccggtgatcaccccgagcgggattacctacgagagggccgtacttctcgaccaccttcaaacggtggggaggtttgaccccgtgacccgtgaggctcttgaaccgcaccagctggttcctaatcttgccatcaaggaagctgtgcatgcgtttttgagtgagcatggttgggcttacaagattagatgatcgctttggaatacaggttttggatactgtcggatgtgacggtgggatttttttgttcactgttggggggcagattttaatctgggatggctgcgtacagattcaccttctccagttgtgtacatatgagatgctcattatgatagtaattgtgaacagtacaccaaaggaagtgaagttgagcgtctg

SEQ ID NO: 326 - DNA, 1036 bp, Triticum sp.
gggagagcagagagctagtcgctcgcgcgggcaatccaaacctttccctattcttgcaaggtctcggaaacggaaaggcccctgctccgctgcgcgtttgcgagtttgggaagaagccttgcctgccggagggggggaaacgggcgagatggggcgagggcgcagcgagataaagaggatcgacaaccccacgcagcgccagtccaccttctacaagcgcagggacggcctcttcaagaaggcccgggagctcgccgtcctctgcgacgccgacctcctcctcctcctcttctccgcctccggcaagctctaccagtacctcgcgcccaccgtcccctctgtcaaggagttcgtcgagaggtacgaggcttcgaggcacaccaaagtttggtccgacatccgccaggagaggcgccgcgagctggagaaggtggccaagatgtgcgacctcttggagaaggaactgaggttcatgacggtggacgacggggagcggtacacggtgccgtcgctggcggcgctggagcacaacctggaggcggccatgcacaaggtgcgctccgagaaggaccgcaagatcggcggcgagatgagctacctcgagaacatgatcagggggaaacaagcggagcgctacggtctgtgtgacaagctcgctcatgctcagagcctcaaggtcgttgaaggtggatccacctcgctgaacaacggcctggacctcaaacttggattcaactaggaacgggtgaaagcttctggccgtggggttctgctctagtgttgcttttgagctcgagtgttatgtcaggttgaaatattctgcaatttccttcgaagggattgtatgaacttgtaagagaccactgtcttatgagatgtttggcttaggctggactgggctgtgcgttgtacctccaataggtggaatgtgataccagtccagtattgcaataatgtagttaacggtcaccttatgctctagttcatgcgttctttgtcaatgtggactattcgtgtttttcttgatttctgccag

SEQ ID NO: 327 - DNA, 972 bp, Zea mays
tggagagccattcgtgggcgtaggacgagagagagaggatcggagcagtacgcggcggcggcggcgtgtgggagatggcgcgcgagaggcgggagatacggcggatagagagcgcggcggcgcggcaggtgaccttctccaagcgccggcgcgggctgttcaagaaggcggaggagctcgccgtgctgtgcgacgccgacgtcgcgctcgtcgtgttctccgccaccggcaggctctcgcagttcgcgagctccagtgtgaatgacatcgttgacaagtacagtacacattctaagaatctggggaaatcacatcagcagccttctattgatttgaatgtagagcagagcaaatacagcggcttgaacgagcaacttgctgaagaaactaatggacttagacagatgagaggtgaagaccttgagggattgagtgtagaggaattgcaccgaatggaaaggaaacttgaagcaggactgcatagagtgattagtacaaaggaccagctattcatgcaacaaatcggcgaattactgcaaaagggcacacagctagaagatgagaacaggcgtctaaaagaacaaatgcctcaggtgctaacggctggcacaatggtggttgctgctgctgcagaaaatatcctcactgaagacgggcagtcgtctgaatctgtaatgactgcattgcattcaggaagctcgctcgactgtgatgatggttccgatatatccttgaagttgtcgttgccttgaaaggaaggaccatcgcatcgcatgttatctgcatgagtggggctgacaccagtgcttctaagaagacaaagactgggatagtcccattcgcggcattatattggtttaaccagatgtgctgtccttgtgcatgtctgtacttcaaagtggctaacgcgaaatttgtatatataatagtgtatgcgctgcgttatcttcgttctaaaaatctgtattgttt

SEQ ID NO: 328 - DNA, 1419 bp, Zea mays
caccgctttaaatccgcctcctcccagcgtctccctcctcccggcctgtcccctcacctcctccccctatctctccaccgccgcagctagctgtgacgtcatgcactcgccggcgccaccgccaccgcatactatctacaattagccagccgtaggcttacctatcctgtgtcaagcaagcctctcgcaagcaacaaggaaggaagctagctagttttatagctgctgtcggcggcggcggctgaagcgacgtgcctgggctaggatttaggttgagatcaggagagggagaaggcggcggcgatggggcgcgggaaggtgcagctgaagcggatcgagaacaagatcaaccgccaggtgaccttctccaagcgccgctcggggctactcaagaaggcgcacgagatctccgtgctctgcgacgccgaggtcgcgctcatcatcttctccaccaagggcaagctctacgagtactctaccgattcatgtatggacaaaattcttgaacggtatgagcgctactcctatgcagaaaaggttctcatttccgcagaatatgaaactcagggcaattggtgccatgaatatagaaaactaaaggcgaaggtcgagacaatacagaaatgtcaaaagcacctcatgggagaggatcttgaaactttgaatctcaaagagcttcagcaactagagcagcagctggagagttcactgaaacatatcagaacaaggaagagccagcttatggtcgagtcaatttcagcgctccaacggaaggtaaattgttgagcttgctaaagttggctgttcgaacttcctcttttaagaattgtatgatttctttagctggccattagatgggcatggtttattgcaagtgttaactactttggttgccttgttacatccacaaaatatctctgctcttgcgctgtgctgcgatgcattgttaccgcaggagaagtcactgcaggaggagaacaaggttctgcagaaggagctcgcggagaagcagaaagaccagcggcagcaagtgcaacgggaccaaactcaacagcagaccagttcgtcttccacgtccttcatgttaagggaagctgccccaacaacaaatgtcagcatcttccctgtggcagcaggcgggagggtggtggaaggggcagcagcgcagccgcaggctcgcgttggactgccaccatggatgcttagccacctgagctgctgaaggtttgctctcatcgtcgcagtgtgctagcccaaaatccagcaagtcttccccggaccccggactggccaagcttctccgcctggtgcagtatcgtcgtgatcgcgagaagcagcagcagcggtttgccgtattttttaccaccgtgtataagtagcatatctgcaatgtgtatattttgttcaccgttcctgctg

SEQ ID NO: 329 - DNA, 979 bp, Zea mays
caaatctttcagccacccgatccccaaccgcccggcccgacattccctccaaccgccgctgcggctgcgccgcccaccgccgacaggcgcagcagtcaacaggaaccgagccatggcgagcgcggatctgctgcggagggaggaggagttctactcctccctgtttgattccgccaaaggcgatggcgccaggtcgcgctcacagctgatcgagaggaagatcgaggccctggaggacatggccaccagggtcagtaaccggagatcgcggaagtggtttaacgaccgtttgctgattgaactcgtcccgcgtctttacgttgaagagatcaaaggcctattcgctcctccgccgtggggtgagcaagtgcccttgtcagcattctacagggcaaatgttggtgaatgggattccttcaggagcattgacatggatgctgaggcaagattgatgcagcatatgaaaaaatcattggaaaaacccaggaatcatgtcgatgaaggggaatcgattgcgctgaatgcttggcatcgaatagatcgacacactagagaagcaataaagagaaatttccttcctgatctgcttggaatatatgaagaacgcgttagggccttcattgaagacgctagtgacaaagatgctcttgtgctgaatgttcaggacccatttcagagactactgctccacggtgtttgtgagttctacaacgtgagctcgacaaccaccagcagtgtgagagaagatgggaggccttggaaggcaaccaccatcaagaagaggcagggcaccggcgttccctctagaatcacactagttagctttctgagaatgaagaagaatggatcgcagtaacgttagttagcgttcaagaatacaacaaaattgctttagattccgtttaggctgttgcaagacaagtgagtggtcactggcaatgtgttcttatatcgcatcagcctgctggctacggtttgg

SEQ ID NO: 330 - DNA, 2437 bp, Zea mays
atcgtcgtcgtcgcccgccgctgctaggtttggggtttccggtggccaggacccaagccagctccgtcgggcgccgtggggaactgctgggaggggcggtcgaccggcggtgcctctgcttcgggttctccgtaccggcgtcggaggggatcggatggcataagttggagcaaatctaagtcgttaaattgagaatagtccaaggaaacctaattcatcctattttggcccaagacgacgctttccactagaatgaaggtggcaaatgggttgtctttgaggaaatctaatggtaggtttaaatcaaagcttatgatggaacttgttaaacaatggcgagaacatcaagcaaatatgaggtgcatgaatctatccaagcgtaataacaacatctatgttggggcagaaggagccaacataacttctcccaacgatagcaacatttggccaacgagtgctttagtagcaaagaatagcaacccaagatatgtgctagcctcaaagtgtgcaagccagcctcctacaatgtggctagagaatagcttgaatacttcatcgggtttcaagtgctctaagctctctatcgttaggaatgcacttccttcgaaaacacctaaggcgtctgtctcttggaagtcaaaggatgattcgaatgccataccaagacacctagagcaatctcactgtaaaaagacatctagagcaactcgaactcacttcaaggcgatgccgaatttgattcacaaggcaaagaatgttgatacctcaaatctaaacgatggtacctcgggttcaagttggaggggtcagtcggattcatataagggagaggacataaatatcgggaaggaatgcactaaaacttcagagttgttgaaaagtagagaagcctcaagaaaatcaaacatcctagtggtagatcggaaggatcctaacaaagatgagccagacaaagtgaaaggaatccaagatgaagttatgaccaaagaagagggagtgaaaggccatacctgtgaaggtcgtgcgacgtgttggagttgtcttaagcaggcgaacaccacaaagacaaatgatgctccaaatttaggttcattgttggttggtaacgaacacatgcaaggcctcatgagtaatttgagagataattcatcccatttgtttgaaaagaatcattcaagacaccaaagggatgatccatgtgaatatagagaaacaaacttgaagtttcctaataggatccaatcagttggaggcaatgggaaaaccaatgatgtcacatctaggaggaaacgactcttgttagaagaaaaggctagcgcacacgtgcaaaatgatcttacttatggaccgatgaagaggcggaggtacatagaagccaacgaagatgaagaagagcaaaatgatcttacttatggaccgatgaagaggcggaggtacatagaagccaacgaagatgaagaagattatgtcggcgaccaccatccggtgcatattgaagatgctaccactgaattgacaccgcaggattctatttcaaagcattgcgttgagcgacaatgctattgttgctcaaagcctattgacatacctagatggagtggaacctttaagatagatggaaaggaacacatatcactggctggacatttgtcatccaaatcttgtgagaaagtgtggaaattgtcatcattgccgaaggtggttcaagtgacaaaggttcctagaatggcagtgtggcctaagatatttaaagcatcagaacccagtggtgacaatattggcctatatttcttccctcctgaaatgaggcacgatgaagaactagatcaactagttaatgaagtcatggataaagatttgatcttgcgagctattattggtgaagctgagatgctgatattcccgtctgttctactacctgaaagatatcagacattccaaaccaaacactacctatgggcggccttcaaagcaaaggaggataaaggtgatgcaattgtagaggaggaggttgagaagggaaattgcgtttcaaaccagccagacaaggtacagtctgataatgcttcatttccttcaaaccatggactggaccgtccaagcatggaagctccccctcaaagcagtagcagtgtctttggtattgttgtccgacaagctccaaatcttgaaccagaagtgaagcgatttatccaggagatggaacgcaaaggtgcgttggtaacggttatgaggggggaggcaattggtggagggccatagccaagcaacaccacgaccactatgcattagttgtagagagagtagagagtaaaccatgtcaaactatgctgtagttgtatagagagtctgacacataacgtcgtggacttgagctcttgttcagtttttttgtaaggtacctacaagtttggtcatatgataatttctccggaac

SEQ ID NO: 331 - DNA, 1101 bp, Saccharomyces cerevisiae
ttatttagatcgtgattctctctactcaaacatttccttgaacttgtataacggggaaataaatctgaaaagcaatacatttgcgcactgttaaaactggaaaggaagaatgacaaccagcatactcgatacttatcctcaaatatgctcccccaatgctttgccaggtactcccggcaatttgactaaggagcaagaggaagcgcttttgcaatttaggtcaatcttgttagaaaagaattacaaagaaaggctggatgattctacgctattgcgatttctacgggcaaggaaatttgatatcaatgctagcgttgagatgtttgtagaaactgaacgatggagggaagaatacggtgccaacactattatcgaggattatgaaaacaacaaggaagccgaagacaaagaaagaatcaaattggccaaaatgtaccctcagtattaccatcacgttgataaggatgggagaccattgtacttcgaagaactaggaggaattaacttaaagaaaatgtacaagatcactaccgaaaaacagatgctaagaaacttagtcaaggagtacgaattatttgccacgtaccgggtcccagcgtgttcgagaagagctggctaccttattgaaacttcgtgcactgtgctggacttgaagggtatctcactttctaatgcttatcatgtgctttcctatattaaagatgttgcagatatcagtcaaaattattatcctgaaagaatgggtaagttttatattatacacagtccatttggtttctcgacgatgttcaagatggttaaacccttcttggatccagtaaccgtgtcaaaaatctttattcttggctcttcttataaaaaggaattattaaaacaaattccaatcgagaacttgcctgttaaatatggtggtacatctgtcttgcacaaccctaatgataagttctactattccgatattggtccctggagagaccctagatacatcggaccagaaggtgaaattcccaacatttttggtaaatttactgttaccagctaactatgatacaggccttcgtcgtagctttccgtgaatatagcatgcatactctataatat

SEQ ID NO: 332 - DNA, 1882 bp, Zea mays
ctcgtcagtcctcagtcctcactttcgggccgagctccggatatccagcggcggcaatggcagccgaagccagcgccgtccagcagctcgctggcctcctggaccaagtggacgcgccgctgaagaagacatttgagaatgtgcatcagggctacccaacagagacattattgcgtttccttaaagctagagagtggcatgtgaataaggctcacaggatgcttgaagattctttgaattggaggatgcaaaatgaaatcgatagtatattggagaaacctattatcccagtagatttgtatagatcaattcgtgatacacagcttattgggttatcaggatactccaaagagggcattcctgtatttgcagttggtgttgggctgagtacatatgacaaagcttcggttaactactatgtgcaatctcacattcagatcaatgagtaccgagatcgttttattttgcctacagtgacaaagaagtatgggagacctattaccacctgtataaaggttctcgatatgactggtctgaaattgtcagcactacaccaaatgaagattgtgactgcaatatctacagttgatgatttgaattaccctgaaaagactgagacctattatatagtaaacgctccatacatattttctgcatgttggaaggtcgtgaagcctctgttgcaagagagaacaaggaagaaagttcatgtgttgcgtggctgcgggagagacgagcttctacagatcatggactactcctccctcccccatttctgcagacaggagggctcgggctcatccaaacattcgtcaggcgacgccgataactgcttctctctcgaccacccgttccaccaggagctctacagcttcatccaggagcaggcgctgaaccaggagctcatcaagcagggctccttgcacgtgaaaatccccgagcaggaccctgaggacgcaaagatcgtggaggtcatcgaggccgagttccacaagcttggcgtgcagaacgggtccgccaatggcatcgaccaagcatagcacctttgtctaataaggccagcctgattcaaccgagacgttgcttgccacttctgatgcaactaatcctactgtttattttttttggtggggtgggcccacccccgttgctgtttcctggggggaggggggtgattggtattggtggtatacatagcaaagtcatttgcagatccatccatgatgcaggactgagatagacgatatcacctgtgtaaacttgcagatttgcaatgtgtcctcatctcatatgtatgctgagttgagatgaaatgaataaatcatcctacaagtttttttaaaaaaaaaaaaaaaaaaaaaaaaaaaaaaaaaaaaaaaaaaaaaaaaaaaaaaaaaaaaaaaaaaaaaaaaaaaaaaaaaaaaaaacaaaaaaaaaaaaaaaaaacaaacaaaaaaaaaaaaaaaaaaaaaggggggccccttttaaaggaaccaattttacttcccccgcgttgcgaatttataaatttttttttgggcccaaaaaattaaatttatgggccgtttttttataaccgggtggggggataaacccgggggtcccccatttaaaacttttgaaaaaaacccctttttacaggttgggggataaaaaaagagcccgacattaaccttttcaaattttgggcaccaaaagggaaaggacccccccttaccccgaattaaacgcggggtttggggttttctcccaaggtgcccttaacttttaacccctaaagccctttcttggtttctttccttttttttccaagttggcggtttttccccagaaattaaagaggccctttgggtctgttaatttttaagccccacccccaaaa

SEQ ID NO: 333 - DNA, 1066 bp, Zea mays
gttccgatcctccacaccagcacccgccgccgccgcctcttcccttgcgcacctgctgctgtgcggatcggtgaggcggaggagtaggatggcgagcgcggccggaggcggagcggcgggggaaggggagtggcttaaggtatcccagctcaggcccatggtggaagcgcaggaccccaacgccaaggcagtggacaacctgacgctgcgtcggttcctgcgcgcgcgcgaccacgacgtggacaaggcctccgccatgttcctcaagttcctcaagtggcggagggaggcggcgcccggcggctccgtgccggaggagcaggtgaggagggagctgtcgcaggacaagctgtgcatgggcggcgtcgacagggccggccgccccatcctcgtcgccttcgcggccaggcacttctccgccggccgtgacatggcagagttcaagagttttgttgtctacttcttcgacaagatctgtgccagaatccccagagggcaggagaaattcctctgcatcgttgatctcaagggctgggggtactcaaactgtgacgtccgggcatacattgccgctatagagatcttgcagaactactacccggagcggctcggcaaggcgctgatgatccacgtgccctacatcttcatgaaggcgtggaagatgatctaccccttcatcgacaccaacaccagggacaagttcgtgttcgtggaggacaagagcctgcaggagacgctgcggcgggagatcgacgaggggcagctcccggagttcctcggcggcaagatggacgtgatcccactcaaggactatggcgtgcagcagcagcctcaggccgtgtaatagccatgccatgcgtagcatacacgagttgtggctaggagcatagcatggcaataactgtgtagctgctgtgaaagtgaaaatgaaacgttgcgctgtttagccgggtcaattgaccagcccaactgcagatctctgggctaccactatgaacagcaagaactgtttcccttatccttttcagccaaactaatcaaaccagaaaatgtttcttgtaaaaaa

SEQ ID NO: 334 - DNA, 1407 bp, Zea mays
cgagattcgagagaaatggcgatggcgacgccagctgccaaacaatcacttctcaccgtccaaccgtgcacaatgaattgaagcgccacgcggttccaataatctattgccacgggcaggtgcgtcgcgtcgattcctggtcttcgagaggagcggaggaggagggcggcgagtgcggaggagaggcgagttcagctgtagcgtttcgcttcttgcccgtggcggcggcggtgccacctcgaacgctgctccctgttctggggcttactgcggatcctgatctgagcatcattcagagaggaagaaatatgtttaggagaaagcatggctctgatttcaactcagatgatgctgagcaaagagaagcaaagattagtgaactgaaagctgctcttgggactttgtctgcccgtggcgagaagtactgcagtgaagcatgcttgagaagatatctggaagcccgtaactggaatgttgctaagtcgagaaaaatgttggaagaaagtctcaagtggagggcagcttacaagccagaggatattcgttggcctgatgtttctgttgaagcggaaacaggtaaaatgtacagggcaagtttccgagacagggagggcagaactgttgttgtcatgaaacctacaaaacaaaatacttcatcccatgaagggcagatacggttcctagtatatactttggagaatgcaatcttcagcctgcctgaaggccaagaaaaaatggtatggctgattgatttcacaggatggacagtgtcccatgcttcgccgataaagacttgtagagaaactgcaaatatactgcaaaatcattttcctgaaaggctggccattggatttctatttaatccccccaaagtatttgaagctttttataaggtcatcaagattttcctcgatccaaaatcagtcgagaaggtgaacttcgtgtacgagaaggatgaggagagcatgaaggtcatgtacaaatacatcgatccggaagtccttcctgtagagtttggggggaagagcaatgtggtgtacaaccacgaggagtactccgagttaatgagacaagatgacatcaaaacagcaagcttttgggcggttgatgcgaaaactaaccatgctaaccctgccatcaatgggaccttggttcctgaggttgcgccacagtcgtcgctggctgctaaagctagttgaagagtatctgcattctctgagaaaattgagaagccgaggactaatggaaccttgagagaaacatatgaaataagaaacatggtatactcgttcatcctcaagagttgtttaagtactggaagtttattcagcacacaataagctactagagaatgtcaccatgtgtgatttgatgcccaaaagagatggtttacaaggtagaaaaaaa

SEQ ID NO: 335 - DNA, 1147 bp, Glycine max
attcggctcgagggggaagaaacatttaatttgggttgataatagtttatgttaagatatcactactgctatatatatgttgccatagccaagttagccttataaagggaaactcacttgccttatttttggttttgagattgagctaaaggccaactcaaccatcgaatttgttggtgattgaaagagaaggaagaagaagcaggaaatggaagcagtgagagctggtcgagaaggagcaataggtctaggtcaaggtgatggcgtagccaaggacagcactgagactgaactcaccaaaatccgtctcctcagggcaattgttgaaacccgtgatccctcttccaaggaagaggatgattttatgattagaagattcctgcgtgctcgtgatttagatgtagagaaggcttcggcaatgctcctcaagtacttgaaatggagaaattcatttgttccaaatggctctgtatctgtgtcagatgttcctaacgaacttgcacaagataaggtgttcatgcaaggacacgacaagataggtcgacctatacttatggtcttcggtggaagacattttcagaacaaggatggtcttgatgaattcaagcgatttgttgtttatgttcttgataaagtatgtgcaagtatgccacctgggcaagaaaagtttgtcggtatagcagaacttaagggatggggatactcaaacagtgacgtgcgtggatatcttagtgctctatccattttgcaggattactacccagagagattggggaagttgtttattgtgaacgcaccatacatctttatgaaagtgtggcaaattgtttacccattcattgacaacaaaaccaagaaaaagatagtatttgtggagaaaaataaggtgaaatcaacactgctagaagagatggaggaaagtcaggtcccagagatattcggtggctcactgccattagtcccaattcaagatagctaattaattaagtaaccgctgacagaataaggagaggcgggcctaaaaataaatattgttatttcttatttatgtgtttctatgccgttttctttttacccaattactttacactgttgtatcagctatcaatattcagtagtaaatgagtacgaaaaaaaaaaaaaaagg

SEQ ID NO: 336 - DNA, 1684 bp, Glycine max
gtagagataaaattatagaacaagaatgaaggtagcacaggtactgcacatgaacggtggcgttggacacgcaagctatgcaaacaactcccttcttcagcaaaaggtgatttgtttgacaaagcccataagagaggaagccataacaagcctctattgcaacaccgtccccagaagcttggcggttgcagatttgggttgctcttctggaccaaacactttgcttgttgtgtctgaattcatcaaaattgtggagaagctttgtcgggagctaaaccataaatctccagaatacaaggtctttctgaatgatcttcctgggaatgacttcaacaacatcttcaagtcccttgatagcttcaaaaagaagttgtgtgatgaaatggaaagtgggattggtccatgctacttctctggggttcctggttctttctatggcagggttttcccaaatcaaagtcttcattttgtccattcctcttatagccttcactggctatctaaggttccggagggtgtagacaacaacaggggcaatgtttacattggcagtacaagcccgacaaatgttgcaagagcttactatgagcaatttcaaagagatttctctctttttctcaagtgtcgtgcagaggaattagttaaaggaggtcgtatggttctaacatttttgggaagaagaagcgatgatccctctagcaaagatggtggctacgtttgggagcttatggctactgctcttaacgatatggtcttgcagggaatcataaaagaagagcagttagatacttttaacattcctctatacactccatctccatctgaagtgaaattggaagttcttaaagaaggttcatttgccagcaatcgtctagaggtgtctgaagtgaattggaatgcttttgatgactggaacgctcttgaatttgaatctgaaaggtctgatacacttagtgatggcggatacaatgtggcacagtgcatgagggctgtggcagaaccaatgcttgtcagccactttggtgaagctatcattgaagaggtttttagccgctaccaacaaatcttgactgatcgtatgtccaaggagcaaactaagtgcatcaatgtcaccgtattattgactagaaaagcataagcaagaagtttgcatctatatagggtttctcaaaatgggattgttgtagtcatagtttaaaaatatggctcgactaggcttgtcggatcgagatctgatgacataacccgtccgatttgattattggaccggttatgcatttggtccagaataatccggtccaacccgcccgatttggagtaaattcggcgatcctgtccgatatttccatttcgcctaaaaaagaaaacaaaaaaaaatgttaaaaaaacctaagacttaagtatttgtgttatactccaaagattaaggcagtcgatgtgagacttaagtatttttcaataatatatattggatcaaatcgagctaataactggcctaccggttagaacactgactcactacctcaactgggtcaatgacaggaagagattaactttggctgctctgagttgtgactttttgcttgttcgtttttcttctagcaattagctagatgttaagttggagaaaaataaaactagtattgtgtggttcagtaaaaaaaaaaaaaaaaaaaaaaaaaaa

SEQ ID NO: 337 - DNA, 1410 bp, Zea mays
cttgtcactcatcagcacggttagtatagctagccaccatgaaggtagagcgcgatctccacatgagccggggcgacggcgaggacagctacgcctccaactcaaggcttcaggagaagtccatactgaagacgaggccggtgctgcacaaggccgtggcggcggcgcacgccttgtcgctctcctcaggaggacccggcggcggcgccatggtcgtcgcggacctcggctgctcgtcggggcccaacacactgctcgtcgtctcggaggtgctagcagcggtggcgatggtggccggcggcagcgcccaaccgcagcacgtgcagttcttcctgaacgacctccccgggaacgactttaacctcgtcttccggtcgctggacctgttgaagaacaagaagctggccgccaaggacaggcgggaggagtcgctgctaccgccgtactacgtggccgggctgccgggctccttctacacccggctgttcccggaccactgcgtccacctcttccactcctcctactgcctcatgtggcgctccaaggtccccgacgagctcgccggtggcgcggtcctcaacgagggccacatgtacatctgggaaaccacgccgcaggcggtggtggccctgtacaggaggcagttccaggaggacatgtcgctgttcctcaggcttcgccacagggagctcgtgcccggtggccacatggtgctggcgttcctgggcaggaagaagagcaaggacgtgcttcgtggcgaggtcagctacacgtgggggctcctcgcgcaggctctccagtccctcgtcaaacagggccgtgtgaagaaggataagctggactccttcaacctgccgttctacgcaccttcgatggacgaggtgagggacgtgatcacgcggagccaggcgttcgacatcacccacatccagctcttcgagtccaactgggatccacacgacgacgacgacgtggagatgaagatggaagaagacgtcgccgccgtccagagcggcgtcaacgtcgccaggtccatcagggccgtgatcgggcccctcatcgcccgccactttggcgagcacatactcgacgatctcttcgagctgcatgccaaaaatgtcgcagtgcacctgcagaaagtgaagaccaagtaccctgtcatcgtcgtttccctccaggcgaaatgagccgcgcgccaaataaaggaccaagctagctgatgcaaaatctggcgtcaagttagctattagtaccgctactattatatgcatgcagaataattagtcaaacaatcagaaaaataaagtgcctcagagactgttagtggcagatccaatgtttcgttaattatatgtagtgtaatggtaatggtaatggtaatggtagacatcaggtttcatcgtccaaaaa

SEQ ID NO: 338 - DNA, 1494 bp, Zea mays
gaattcccgggtcgacccacgcgtccgcggcgcaccgctgaagcctaaactcgcagccagccatgtcgatgagaatcgagcgtgatctccacatggccacagggaacggagaaactagctacacaaaaaattctaggattcaagagaaagctatgtttcagatgaagtcggtacttgaggaggccactagagcagtatgcacagctctcctcccacaaaccatggttgtggccgacttaggctgctcatcagggcctaacacactgcgcttcgtcactgaggtgactagaatcatagctcaccattgcaagctggagcacaaccgacgacatgaccacccgttgcagcttcagttctttctgaatgacctgcccggtaacgacttcaacaatctcttccagctcatcgagcagttcaataagtcatcgacgacacacaagggagatgcagcaactgaggcactacagcctccttgctatatctccggattgccgggctcctactacactaggatcttccctagcgaaagcgttcatcttttccactctctgttctgccttcagtggcgctctcaggcaccagagcaactgaagggcacccaaaaatcatgcctagatatctacatcacaaagactatgtcaccatcgatggtgaagttgtttcaacagcagtttcagaaggacttctccctcttcctcaggctacgctatgaggaactcgtgtctggtggccaaatggttctaacatttattggaaggaagcatgaggatgtgttcactggagagtccaaccatctttacggattgcttgcgcagtcactgaaatccctagttgatgagggtcttgtggagaaagaaaaacttgagtcattctatcttccgatctactcaccgtcggttggtgaagtggaggcgatagtgaagcaacttgggttgttcaacatgaatcatgttaaagtatttgagataaattgggacccctacgatgactcagaaggtgatgatgtgcataacaatattgagagcggtgaaaatgttgctaagtgcctacgcgcagttatggagccgctggtcgcaagccaatttggagaacgcatactcgacaagttattcaaagagtacgctcgccgtgttgccaaacaccttgagaatgagaaaacaaagcatgctgttcttgtcctatccatcaagaaagcaataattcatgtgtgaagtgtcttgtttctcactatatatctttccattagtatcacatggtaatgtatgtttgttttgaatgtgcatgtttgtgtcactagctggtgtattgaatgtcatggtgtttttgttgttttctttatcgcttctcctatattttagatgcctgaattttaaggtgatttcaggcaacactcttgtacaaggaattaataccaataaattgctccttttatgatcaaaaaaaaaaaaaaaaaaaaaaaaaaaaaaaaaaaaaaaaaaaaaaaagggcggccgc

SEQ ID NO: 339 - DNA, 2438 bp, Zea mays
ggcctcctccctgagacaatccccacgccaccgcgcaccggagacgaacctgaggagagaaaaaatctgcgcccgtcagtgtgctcgcctacttctacgctccgctcgttcccccaaatagttcctcggcttcgctcccttcccctccctgctccggctccggttcgcacacagtaagaaaagatggcgctgccatccatgagtcttgtggcaaagggtgtgcttcccttctcagcacgtacctcgagtggtgtcacacaaaggccggtgtcagtgactgcttccttggagcacaaaaccagcgatgccagaaggaagttcctaaaacttgcgcttgggaaccttggagttggactgcccaccttgttgggcgctaagaaagctctcgctgatgagcaaggcgtctcgtcctcgaggatgtcttattcgaggttccttgagtatcttgacaaggatagagtgaagaaggttgatttgtttgagaatgggacaattgctattgtggaggccatttctcctgagcttggtaaccgcgtgcaaagagtccgtgtgcagcttcctggtctaagccaggagcttcttcaaaagttgagggagaagaacatcgattttgctgctcacagcaaccaggaggactctggttctcttctgttcaaccttattggaaatttggcattcccgcttatccttatcggtggtctgtttttactttcaagaagggcacagggtggcctcggtggacccaatggtcctggctttccccttggttttggtcaatctagggccaagtttcagatggaacccaacactggtgttacatttgatgatgttgctggtgtcgatgaagcgaagcaagacttcatggaagtggttgagttcttgaagaaacccgaaaggttcactgctgttggtgctcgcattcctaagggtgttctgcttgtcggtcctcctgggacgggtaaaactttgcttgccaaggcaattgcaggagaggctggcgtgccatttttctcaatttcaggttctgaatttgtggagatgtttgttggtgttggagcttccagagttcgtgaccttttcaagaaggccaaggagaatgctccttgcatagtgtttgttgatgaaattgatgctgttggaaggcaaagaggtacaggtattggtggtggaaatgatgaaagggagcagactctcaatcaactactaactgagatggatggtttcgagggcaacactggaattattgttattgctgccactaaccgggctgacatattggattccgctttacttagacctgggcgttttgatagacaggtgtctgtcgacgttcctgatgtacgtggaaggacagagattctaaaagtgcatggtagcaacaagaaatttgattctgatgtttctcttgatgtcatagcaatgagaacacctgggttcagcggagcagacttggcaaaccttctgaatgaagcagccattctggctggaagacggggaaggacagcaatttcttcaaaagagattgatgattctattgacagaattgtagctggtatggaagggaccgtgatgacagacgggaagagcaaaagtcttgttgcttaccatgaagttgggcatgcaatttgcggaactttgacgcctggccatgatcctgtccaaaaggttaccttagttccaaggggtcaagctcgtggtcttacatggtttatcccgatggatgacccaacactcatctccaggcagcaactttttgccagaattgttggcggccttggtggtagagctgctgaggaggtcatatttggagagcctgaggtgaccactggagctgctggtgacttgcagcaaattactggcttagccaagcagatggtggtgacattcggtatgtctgaaattggtccatggtctctgatggagggtggagcgcagagtggggacgtcatcatgagaatgatggcaaggaactccatgtcagagaagctcgcggaggacattgattcggccgtgaagcagttgtcggatgaggcctacgagatcgctttgaggcacattagaaacaacagggaggccattgacaaaatcgttgaggtgctcattgagaaggagacagtgaccggagacgagttccgggcgatcctttctgagtttgccgagatccctgttgagaaccgggttcccccagccacaccggcggctgcgctcccagcctaaaccctagccttgtaggggaggattttcttgttgtatggtgttcatattttggattcttggtgtactctaactctactaaatctgccggattttcggtactcgacatgtaagatgtaacttactcatggtgaattaatagtaaaatgtaattagattaaaataataggcctggcgcaacattttcagtttggaaaaaaaaaaaaaaaaaaaaaaaaaaaaaa

SEQ ID NO: 340 - protein, 983 aa, Zea mays
MMESAAAQSCAACGDDARAACRACSYALCRACLDEDAAEGRTTCARCGGDYAAINPARASEGTEAEEEVVENHHTAGGLRERVTMGSHLNDRQDEVSHARTMSSLSGIGSELNDESGKPIWKNRVESWKEKKNEKKASAKKTAAKAQPPPVEEQIMDEKDLTDAYEPLSRVIPISKNKLTPYRAVIIMRLIVLGLFFHYRITNPVNSAFGLWMTSVICEIWFGFSWILDQFPKWYPINRETYVDRLIARYGDGEESGLAPVDFFVSTVDPLKEPPLITANTVLSILAVDYPVEKISCYVSDDGSAMLTFESLAETAEYARKWVPFCKKYAIEPRAPEFYFSQKIDYLKDKIHPSFVKERRAMKRDYEEYKVRINALVAKAQKTPDEGWIMQDGTPWPGNNPRDHPGMIQVFLGETGARDFDGNELPRLVYVSREKRPGYQHHKKAGAMNALVRVSAVLTNAPYILNLDCDHYVNNSKAVREAMCFMMDPTVGRDVCYVQFPQRFDGIDRSDRYANRNVVFFDVNMKGLDGLQGPVYVGTGCCFNRQALYGYGPPSLPALPKSSICSWCCCCCPKKKVERSEREINRDSRREDLESAIFNLREIDNYDEYERSMLISQMSFEKSFGLSSVFIESTLMENGGVPESANPSTLIKEAIHVISCGYEEKTEWGKEIGWIYGSVTEDILTGFKMHCRGWRSIYCMPVRPAFKGSAPINLSDRLHQVLRWALGSVEIFFSRHCPLWYGYGGGRLKWLQRLSYINTIVYPFTSLPLVAYCCLPAICLLTGKFIIPTLSNAATIWFLGLFMSIIVTSVLELRWSGIGIEDWWRNEQFWVIGGVSAHLFAVFQGILKMIAGLDTNFTVTAKATDDTEFGELYLFKWTTVLIPPTSILVLNLVGVVAGFSAALNSGYESWGPLFGKVFFAMWVIMHLYPFLKGLMGRQNRTPTIVVLWSVLLASVFSLLWVKIDPFVGGTETVNTNNCNTIIC

SEQ ID NO: 341 - protein, 352 aa, Arabidopsis thaliana
MDSSCIDEISSSTSESFSATTAKKLSPPPAAALRLYRMGSGGSSVVLDPENGLETESRKLPSSKYKGVVPQPNGRWGAQIYEKHQRVWLGTFNEQEEAARSYDIAACRFRGRDAVVNFKNVLEDGDLAFLEAHSKAEIVDMLRKHTYADELEQNNKRQLFLSVDANGKRNGSSTTQNDKVLKTCEVLFEKAVTPSDVGKLNRLVIPKQHAEKHFPLPSPSPAVTKGVLINFEDVNGKVWRFRYSYWNSSQSYVLTKGWSRFVKEKNLRAGDVVTFERSTGLERQLYIDWKVRSGPRENPVQVVVRLFGVDIFNVTTVKPNDVVAVCGGKRSRDVDDMFALRCSKKQAIINAL

SEQ ID NO: 342 - protein, 365 aa, Oryza sativa
MGVVSFSSTSSGASTATTESGGAVRMSPEPVVAVAAAAQQLPVVKGVDSADEVVTSRPAAAAAQQSSRYKGVVPQPNGRWGAQIYERHARVWLGTFPDEEAAARAYDVAALRYRGRDAATNFPGAAASAAELAFLAAHSKAEIVDMLRKHTYADELRQGLRRGRGMGARAQPTPSWAREPLFEKAVTPSDVGKLNRLVVPKQHAEKHFPLRRAASSDSASAAATGKGVLLNFEDGEGKVWRFRYSYWNSSQSYVLTKGWSRFVREKGLRAGDTIVFSRSAYGPDKLLFIDCKKNNAAAATTTCAGDERPTTSGAEPRVVRLFGVDIAGGDCRKRERAVEMGQEVFLLKRQCVVHQRTPALGALLL

SEQ ID NO: 343 - protein, 317 aa, Oryza sativa
MEQEAAMVVFSCNSGSGGSSSTTDSKQEEEEEEELAAMEEDELIHVVQAAELRLPSSTTATRPSSRYKGVVPQPNGRWGAQIYERHARVWLGTFPDEEAAARAYDVAALRFRGRDAVTNRAPAAEGASAGELAFLAAHSKAEVVDMLRKHTYDDELQQGLRRGSRAQPTPRWAREPLFEKAVTPSDVGKLNRLVVPKQQAERHFPFPLRRHSSDAAGKGVLLNFEDGDGKVWRFRYSYWNSSQSYVLTKGWSRFVREKGLRPGDTVAFSRSAAAWGTEKHLLIDCKKMERNNLATVDDDARVVVKLFGVDIVGDKTR

SEQ ID NO: 344 - protein, 225 aa, Oryza sativa
CFFCYVRCGSKRRVWLGTFETAEEAARAYDEAAILMSGRNAKTNFPVARNATGELTPAAAVAGRDGRVGGGSGSSSSMTANGGGNSLSQILSAKLRKCCKTPSPSLTCLRLDPEKSHIGVWQKRAGARADSSWVMTVELNKDTAVSSAATVAAATAVSSSDQPTPSDSTVTTTSTSTTGSPSPPPPAMDDEERIALQMIEELLGRSGPGSPSHGLLHGGEGSLVI

SEQ ID NO: 345 - protein, 213 aa, Zea mays
MTENLHSRKMVQPKKFRGVRQRHWGSWVSEIRHPLLKRRVWLGTFETAEEAARAYDEAAVLMSGRNAKTNFPIQRSSTGEPTPAAGRDARSNFSSGSSTTNLSQILSAKLRKCCKAPSPSLTCLRLDPEKSHIGVWQKRAGARADSNWVMTVELNKDAASTDAASQSTSATTAPPATPMDEEERIALQMIEELLSSSSPASPSNGDDQGRFII

SEQ ID NO: 346 - protein, 446 aa, Zea mays
MAATRRAFFHSAVDGIARAGPGEAERLPAPPQVGRPVEGASSMVLGFPVPRPTMPDRRPAAVTQQFFPPTTTAAQQATMEEQCHVPAGSAAEQWVRSSASRKSRRGPRSRSSQYRGVTFYRRTGRWESHIWDCGKQVYLGGFDTAQAAARAYDQAAIKFRGLNADINFTLDDYKDEMKKMKDLSKEEFVLVLRRQGAGFVRGSSRFRGVTQHKCGKWEARIGQLMGKKYVYLGLYDTETEAAQAYDKAAIKCYGKEAVTNFDAQSYDKELQSQPWDGELDLELSLGCASSDPSTVAVEAFSPATSSSSRKQRTMTLTLGLPEEEETGAGYPHPAAGMFGRPADGHVHVAPPPHRQWQQQQQGQHAAPDAAPERRAAEPADRQRWGRGARWPIASASGINWAWAPPYATARAGTDDDDASSAAAAASSGFPLWQLGAASSRSSWPSC

SEQ ID NO: 347 - protein, 249 aa, Zea mays
MVKLAFGSVGDSFSVTSIKAYVAEFIATLLFVFAGVGSAIAYGQLTNGGALDPAGLVAIAIAHALALFVGVSVAANISGGHLNPAVTFGLAVGGHITILTGVFYWVAQLLGATVACLLLGFVTHGKAIPTHAVAGISELEGVVFEVVITFALVYTVYATAADPKKGSLGTIAPIAIGFIVGANILAAGPFSGGSMNPARSFGPAVAAGDFAGNWVYWVGPLVGGGLAGLVYGDVFIGGSYQQVADQDYA

SEQ ID NO: 348 - protein, 356 aa, Oryza sativa
MGVLCFGASNILLCAEDSSSVLGLGGFGGGGGEVAAELGCGGGGGFDFFGFGGGAVFPIDSDEFVALLVEKEMDHQPQRGYLEKLELGGLECSWRKDAIDWICKVHSYYNFGPLSLYLAVNYLDRFLSSFNLPHDESWMQQLLSVSCLSLATKMEETVVPLPMDLQVFDAEYVFEARHIKRMELIVMKTLKWRLQAVTPFSFIGYFLDKFNEGKPPSYTLASWCSDLTVGTLKDSRFLSFRPSEIAAAVVLAVLAENQFLVFNSALGESEIPVNKEMVMRCYELMVEKALVKKIRNSNASSSVPHSPITVLDAACFSFRSDDTTLGSSQSNSNNKDYNSQDSAPASKRRRLNTTPI

SEQ ID NO: 349 - protein, 652 aa, Oryza sativa
MMDGAAPLLPETSPESRQQRDPERGKRRTPVLPAVVASAVVLLGLAALFLVYGFHDGGDGRAAVLAPGTVEVAASSSRGVVEGVSEKSTTPALRLGGGAVRDYAWTNSMLSWQRTAFHFQPPNNWMNGPLYYKGWYHLFYQWNPDSAVWGNITWGHAVSRDLIHWLHLPLAMVPDHWYDINGVWTGSATQLPDGRIVMLYTGATEESVQVQNLAEPADPNDPLLREWSKAEANPVLVPPPGIGLTDFRDPTTAWRNPADSAWRITIGSKDRDHAGLALVYKTEDFLHYDLLPTLLHVVKGTGMWECVDLYPVSTSPAVEDGLETSTPPGPGVKHVLKASLDDDRNDYYAIGTYDGETDTWTPDNADIDVGIGLRYDYGKFYASKTFYDPVGRRRVLWGWIGETDSERADILKGWASLQSIPRTVMLDTKTGSNLLQWPVVEVENLRMRGKSFDGLDVSPGSVVPLDVGKATQLDIEAVFEVDTSAADGVVTEAGAAAYSCGTGGGAVGRGLMGPFGLLVLADDQLSERTAVFFYLVKGVDGNLTTFFCQDELRSSKANDLVKRVYGSLVPVLDGENLSIRILVSLSSNVDHSIVEGFAQGGRTCITSRVYPTKAIYESAKIFLFNNATNVRVTAKSLKIWELNSAYIRPYVD

SEQ ID NO: 350 - protein, 328 aa, Oryza sativa
MAASAAAAAAVSQALRDRDVLDAVGTSAAALSLAGSSFIVLCYLLFRELRKFSFKLVYFLAVSDMFCSLFTIMGGPSNAFYCFAHDYSAHFFCVASFLWTTTIAFTLHRTVVKHKTDVEEFGSIFHLYVWGTSLATTVLRSIGSDYGRPGTWCWIQQGSMGKACDLLCFVLHLVTFYLPLWGAILYNGYTYFQVNRMINNATRMAVGISDRSIQSDVRADKKAFNRWGYYPLILIGSWAFATINRVHDFANPGHKIFWLSILDVGFAGLMGLFNSIAYGLNSSVRRAIAERLDMYLPERFKRSLPTLTRFKSQQENELTSLIVDASNT

SEQ ID NO: 351 - protein, 359 aa, Zea mays
MEEITQHFGVGASSHGHGHGQHHHHHHHHHPWASSLSAVVAPLPPQPPSAGLPLTLNTVAATGNSGGSGNPVLQLANGGGLLDACVKAKEPSSSSPYAGDVEAIKAKIISHPHYYSLLTAYLECNKVGAPPEVSARLTEIAQEVEARQRTALGGLAAATEPELDQFMEAYHEMLVKFREELTRPLQEAMEFMRRVESQLNSLSISGRSLRNILSSGSSEEDQEGSGGETELPEVDAHGVDQELKHHLLKKYSGYLSSLKQELSKKKKKGKLPKEARQQLLSWWDQHYKWPYPSETQKVALAESTGLDLKQINNWFINQRKRHWKPSEEMHHLMMDGYHTTNAFYMDGHFINDGGLYRLG

SEQ ID NO: 352 - protein, 810 aa, Zea mays
MASQGEPSASASDPKEKKDYSTAILERKKSPNRLVVDEATNDDNSVVALHPDTMERLQLFRGDTVLLKGKKRKDTVCIVLADETCEEPKVRMNKVVRQNLRVRLGDVVSVHQCQDVKYGKRVHILPIDDTVEGITGNLFDAFLKPYFLEAYRPVRKGDLFLVRGGMRSVEFKVIETDPSEYCIVAPDTEIFCDGEPIKREDEERLDEVGYDDVGGVRKQMAQIRELVELPLRHPQLFKSIGVKPPKGILLYGPPGSGKTLIARAVANETGAFFFLINGPEIMSKLAGESESNLRKAFEEAEKNAPSIIFIDEIDSIAPKREKTNGEVERRIVSQLLTLMDGLKSRSHVIVMGATNRPNSIDPALRRFGRFDREIDIGVPDEVGRLEVLRIHTKNMKLAEDVNLELISKDTHGYVGADLAALCTEAALQCIREKMDIIDLEDETIDAEILNSMAVTNDHFKTALGTSNPSALRETVVEVPNVSWEDIGGLENVKRELQETVQYPVEHPEKFEKFGMSPSKGVLFYGPPGCGKTLLAKAIANECQANFISVKGPELLTMWFGESEANVREIFDKARQSAPCVLFFDELDSIATQRGSSVGDAGGAADRVLNQLLTEMDGMNAKKTVFIIGATNRPDIIDPALLRPGRLDQLIYIPLPDEQSRLQIFKACLRKSPVAKDVDLNALAKYTQGFSGADITEICQRACKYAIRENIEKDIERERRMKDNPEAMEEDEVDEIAEIKAAHFEESMKYARRSVSDADIRKYQAFAQTLQQSRGFGSEFRFSEQSATAGAAAADPFASAGAAADDDDLYS

SEQ ID NO: 353 - protein, 408 aa, Oryza sativa
MSSRMAGATLLRHLGPRLFAAEPVYSGLAASARGVMPAAARIFPARMASTSSAGADVKEGAAEKLPEPAATAAAAATDPQNKKAVVSYWGIQPPKLVKEDGTEWKWLSFRVSAHQPLMCALLFLFFCTVNSRFDRVHDVCFFCIVTQPWDTYTSDTSIDVTKHHEPKGLPDKLAYWTVRSLAVPRDLFFQRRHASHALLLETVAGVPGMVGGMLLHLRSLRRFEQSGGWIRALLEEAENERMHLMTFLEVMQPRWWERALVLAAQGVFFNAYFVGYLVSPKFAHRFVGYLEEEAVSSYTEYLKDLEAGKIENTPAPAIAIDYWRLPADATLKDVVTVIRADEAHHRDLNHFASVRICQPENNQSRLLNFCVNGFELTDRVSRVGTSLVQDIQQQGMKLKDTPAPIGYH

SEQ ID NO: 354 - protein, 354 aa, Aspergillus nidulans
MNSMSTTGPIRVAAIPKHYLQFTVRTYTRSMASAGLRYSNPPLVKKCYDQPTGKRFISSTPQSQIKDYFPPPDAPKIVEVKTAWAHPVYSEEEMRAVTVGHREAKNWSDWVALGSVRLLRWGMDLVTGYKHPAPGQEDIKKFQMTEKEWLRRFVFLESVAGVPGMVGGMLRHLRSLRRMKRDNGWIETLLEEAYNERMHLLTFLKMAEPGWFMRLMVLGAQGVFFNGFFLSYLISPRTCHRFVGYLEEEAVLTYTRAIKDLESGRLPHWEKLEAPEIAVKYWKMPEGNRTMKDLLLYVRADEAKHREVNHTLGNLKQAVDVNPFAVEWKDPSKPHPGKGIKHLKTTGWEREEVV

SEQ ID NO: 355 - protein, 484 aa, Zea mays
MDKSGGEAAAAAAAADDVERRGGDYEQDEHERRGTVWTATAHIVTAVIGSGVLALAWSVAQLGWVAGPLALAGFACVTYYTSTLLAGAYRAPHPVTGHRNRTYMDAVRSYLSPREVFMCGVAQYVNLWGTMVGYTITATISMAAIRQADCLRRDGAGAGARCDAPGTVLMLAFSVVQVVLSQFPGLEHITWLSVVAAAMSFAYSFAGLGLSVGHWVSRGGGGLGGRVAGAAAASSTRKLWNVLLALGNIAFAYTFAEVLIEIQDTLKSPPPENRTMKKAAMYGIGATTIFYISVGCAGYAAFGSNAPGNILAAGGLGPLWLVDIANMCLILHLIGAYQVYAQPVFASVERWAASRWPEAKFMSSAYTVSVSIPLLQRGSVTVAPHKLVLRTAIVGATTAVALAIPFFNAVLGLLGAFSFWPLTVYFPISMHIAQGKIARGTKWWCLLQALSMVCLVISVAVGVGSVTDIVDSLKASSSPFKIVG

SEQ ID NO: 356 - protein, 650 aa, Zea mays
MSRDLDCPVQTQMAVAVLDRSFSSEYPGGSRIEGRQLSWKRVFVQTDNGSVLGIELERGENVQTVKKKLQIALNVPTDESSLTFGDLVLNNDLSSIRNDSPLFLKRNQIHRSNSTPCLSPTGKNVLQRDRSGPIEILGCSSPSSRMKQLAKDVIKAIMNDVDPVAVNSGMGGAYYFKNIWGERVAIVKPTDEEPFAPNNPKGFVGKALGQPGLKRSVRVGETGFREVAAYLLDYGHFANVPPTMLVKITHTIFNVNDCVGCKSKVFCNKSEAVSKIASLQEFIPHDFDASDHGTSSFPVSAVHRIGILDIRIFNTDRHAGNLLVKKLGPGADNFGEQTELIPIDHGLCLPECLEDPYFEWIHWPQASVPFSEEELEYIARLDPVKDAEMLRMELPMIRDACLRVLVLSTVFLKEAAASGLCLSEIGDMMSRQFTAKEEEPSQLELLCMEARKWVEERESFLPNEAGVEDDDDDFTQFLIDGEDDYPDALEPSAFCKFGSMKASSRNPLSKLDERDEEDGDGTEEDDDDDILTGALPQRISSISKLSSSMKGLGFIGKPKPYRTCLRKGKATGRTKYTGKASEHQSGSRSANELLPPSASFVKLSDMSPKQWSAFLDKFQELLPGALSARKHAAGVVGQRSMPRLGTSCQF

SEQ ID NO: 357 - protein, 472 aa, Zea mays
MSSARVRGPFTPPQWIELEHQALIYKYLSANSPVPHSLLVPIRRSGSLASSPYPPPYFGTSTFGWGSFQLGYSGNADLEPGRCRRTDGKKWRCSRDAVADQKYCERHMNRGRHRSRKHVEDQPGHAAKAMSAVAVAAAAAAATQHAAALAGAGATAAAGLAVNRHRQPGKSYATGATDPCSLQYSRELANKLSNESENMQDSDNVSMLTSMNTGNTAGSVFPFSKQNTALFEVSSSRPEFGLVPSDSLTSSPHSSLKSVKNLLSSRSLSEHQSSASLQHFVDWPRTPPAQGGLSWPEAEDMPRAQRSQLSVSAPMASSELSSASTSPIHDHEKLILSPLKLGREYTPSGVVSAAANRYEVSQLEATWATMFRDSSTGGPLGEVLAKNNSNAEARGCPSAAPPLTDYYCWDSGHGMQSSPVGVLQRTTAFGSVSSSTGSSPRVENHGACCDGTSNLMDDLGSVVVRHPSIRLL

SEQ ID NO: 358 - protein, 396 aa, Oryza sativa
MMMMSGRPSGGAGGGRYPFTASQWQELEHQALIYKYMASGTPIPSDLILPLRRSFLLDSALATSPSLAFPPQPSLGWGCFGMGFGRKAEDPEPGRCRRTDGKKWRCSKEAYPDSKYCEKHMHRGKNRSRKPVEMSLATPPPPSSSATSAASNSSAGVAPTTTTTSSPAPSYSRPAPHDAAPYQALYGGPYAAATARTPAAAAYHAQVSPFHLHIDTTHPHPPPSYYSMDHKEYAYGHATKEVHGEHAFFSDGTEREHHHAAAGHGQWQFKQLGMEPKQSTTPLFPGAGYGHTAASPYAIDLSKEDDDEKERRQQQQQQQQHCFLLGADLRLEKPAGHDHAAAAQKPLRHFFDEWPHEKNSKGSWMGLEGETQLSMSIPMAANDLPITTTSRYHNDE

SEQ ID NO: 359 - protein, 453 aa, Glycine max
MATWVLSECSLKPLAPVIPRPRTGAVLSSTSKVGFLETNKVLEGSKFQPLRCNLRERNWGLKVSVPLRIASIEEEEQKSVDVINGSNGVEHEKLPEFDPGAPPPFNLADIRAAIPKHCWVKDPLKSMSYVVRDVIAVFGLASAAAYLNNWLVWPLYWAAQGTMFWALFVLGHDCGHGSFSNNPKLNSVVGHLLHSSILVPYHGWRISHRTHHQHHGHVENDESWHPLPEKLFRSLDTVTRMLRFTAPFPLLAYPVYLWGRSPGKTGSHFDPSSDLFVPNERKDVITSTACWAAMLGLLVGLGFVMGPIQLLKLYGVPYVIFVMWLDLVTYLHHHGHEDKLPWYRGKEWSYLRGGLTTLDRDYGLINNIHHDIGTHVIHHLFPQIPHYHLVEATEAAKPVFGKYYREPKKSSPLPFHLIGELIKSFKTDHFVSDKGDVVYYQTDSEINGSSKSE

SEQ ID NO: 360 - protein, 446 aa, Arabidopsis thaliana
MANLVLSECGIRPLPRIYTTPRSNFLSNNNKFRPSLSSSSYKTSSSPLSFGLNSRDGFTRNWALNVSTPLTTPIFEESPLEEDNKQRFDPGAPPPFNLADIRAAIPKHCWVKNPWKSLSYVVRDVAIVFALAAGAAYLNNWIVWPLYWLAQGTMFWALFVLGHDCGHGSFSNDPKLNSVVGHLLHSSILVPYHGWRISHRTHHQNHGHVENDESWHPMSEKIYNTLDKPTRFFRFTLPLVMLAYPFYLWARSPGKKGSHYHPDSDLFLPKERKDVLTSTACWTAMAALLVCLNFTIGPIQMLKLYGIPYWINVMWLDFVTYLHHHGHEDKLPWYRGKEWSYLRGGLTTLDRDYGLINNIHHDIGTHVIHHLFPQIPHYHLVEATEAAKPVLGKYYREPDKSGPLPLHLLEILAKSIKEDHYVSDEGEVVYYKADPNLYGEVKVRAD

SEQ ID NO: 361 - protein, 435 aa, Arabidopsis thaliana
MASSVLSECGFRPLPRFYPKHTTSFASNPKPTFKFNPPLKPPSSLLNSRYGFYSKTRNWALNVATPLTTLQSPSEEDTERFDPGAPPPFNLADIRAAIPKHCWVKNPWMSMSYVVRDVAIVFGLAAVAAYFNNWLLWPLYWFAQGTMFWALFVLGHDCGHGSFSNDPRLNSVAGHLLHSSILVPYHGWRISHRTHHQNHGHVENDESWHPLPESIYKNLEKTTQMFRFTLPFPMLAYPFYLWNRSPGKQGSHYHPDSDLFLPKEKKDVLTSTACWTAMAALLVCLNFVMGPIQMLKLYGIPYWIFVMWLDFVTYLHHHGHEDKLPWYRGKEWSYLRGGLTTLDRDYGWINNIHHDIGTHVIHHLFPQIPHYHLVEATEAAKPVLGKYYREPKNSGPLPLHLLGSLIKSMKQDHFVSDTGDVVYYEADPKLNGQRT

SEQ ID NO: 362 - protein, 1128 aa, Oryza sativa
MSSSRPTQCSSSSSRTRQSSRARILAQTTLDAELNAEYEEYGDSFDYSKLVEAQRTTGPEQQARSEKVIAYLHHIQRAKLIQPFGCLLALDEKTFNVIALSENAPEMLTTVSHAVPSVDDPPKLRIGTNVWSLFTDPGATALQKALGFADVSLLNPILVQCKTSGKPFYAIVHRATGCLVVDFEPVKPTEFPATAAGALQSYKLAAKAISKIQSLPGGSMEVLCNTVVKELFDLTGYDRVMAYKFHEDDHGEVFAEITKPGLEPYLGLHYPATDIPQAARFLFMKNKVRMICDCRARSIKIIEDESLHLDISLCGSTLRAPHSCHLQYMENMNSIASLVMAVVVNENEDDDEVGADQPAQQQKRKKLWGLLVCHHESPRYVPFPLRYACEFLAQVFAVHVNKEFELERQVREKSILRMQTMLSDMLLRESSPLSIVSGTPNIMDLVKCDGAALLYGGKVWRLQNAPTESQIRDIAFWLSDVHRDSTGLSTDSLHDAGYPGAAALGDMICGMAVAKINSKDILFWFRSHTAAEIRWGGAKHDPSDKDDSRRMHPRLSFKAFLEVVKMKSLPWNDYEMDAIHSLQLILRGTLNDDIKPTRAASLDNQVGDLKLDGLAELQAVTSEMVRLMETATVPILAVDSNGLVNGWNQKVAELTGLRVDEAIGRHILTVVEESSVPVVQRMLYLALQGKEEKEVKFEVKTHGSKRDDGPVILVVNACASRDLHDHVVGVCFVAQDMTVHKLVMDKFTRVEGDYKAIIHNPSPLIPPIFGADEFGWCSEWNAAMTKLTGWHRDEVINKMLLGEVFDSTNASCLVKNKDAFVSLCILINSALAGDETEKAPFSFFDRNGKYIECLLSVNRKVNADGVITGVFCFIQVPSHELQHALHVQQASQQNALTKLKAYSYMRHAINNPLSGMLYSRKALKNTGLNEEQMKEVNVADSCHRQLNKILSDLDQDSVMNKSSCLDLEMVEFVLQDVFVAAVSQVLITCQGKGIRVSCNLPERYMKQTVYGDGVRLQQILSDFLFVSVKFSPVGGSVEISCSLTKNSIGENLHLIDLELRIKHQGKGVPADLLSQMYEDDNKEQSDEGMSLAVSRNLLRLMNGDVRHMREAGMSTFILSVELASAPAK

SEQ ID NO: 363 - protein, 1131 aa, Sorghum bicolor
MSSSRPAHSSSSSSRTRQSSQARILAQTTLDAELNAEYEESGDSFDYSKLVEAQRSTPSEQQGRSGKVIAYLQHIQRGKLIQPFGCLLALDEKSFRVIAFSENAPEMLTTVSHAVPNVDDPPKLGIGTNVRSLFTDPGATALQKALGFADVSLLNPILVQCKTSGKPFYAIVHRATGCLVVDFEPVKPTEFPATAAGALQSYKLAAKAISKIQSLPGGSMEALCNTVVKEVFELTGYDRVMAYKFHEDEHGEVFAEITKPGIEPYLGLHYPATDIPQAARFLFMKNKVRMICDCRAKSVKIIEDEALSIDISLCGSTLRAPHSCHLQYMENMNSIASLVMAVVVNENEEDDEPGPEQPPQQQKKKRLWGLIVCHHESPRYVPFPLRYACEFLAQVFAVHVNKEFELEKQIREKSILRMQTMLSDMLFKEASPLSIVSGSPNIMDLVKCDGAALLYGDKVWRLQTAPTESQIRDIAFWLSEVHGDSTGLSTDSLQDAGYPGAASLGDMICGMAVAKITSKDILFWFRSHTAAEIKWGGAKHDPSDKDDNRRMHPRLSFKAFLEVVKMKSLPWSDYEMDAIHSLQLILRGTLNDALKPVQASGLDNQIGDLKLDGLAELQAVTSEMVRLMETATVPILAVDGNGLVNGWNQKVAELSGLRVDEAIGRHILTLVEDSSVSIVQRMLYLALQGKEEKEVRFELKTHGSKRDDGPVILVVNACASRDLHDHVVGVCFVAQDMTVHKLVMDKFTRVEGDYKAIIHNPNPLIPPIFGADQFGWCSEWNVAMTKLTGWHRDEVIDKMLLGEVFDSSNASCLLKSKDDFVRLCIIINSALAGEEAENAPFGLFDRNGKYIECLLSVNRKVNADGVVTGVFCFIHVPSDDLQHALHVQQASEQTAQRRLKAFSYMRHAINKPLSGMLYSRETLKSTGLNEEQMRQVHVADSCHRQLNKILADLDQDNITDKSSCLDLDMAEFVLEDVVVSAVSQVLIGCQGKGIRVACNLPERFMKQKVYGDGIRLQQILSDFLFVSVKFSPVGGSVDISSKLTKNSIGENLHLIDFELRIKHQGAGVPAEILSQMYEEDNKEPSEEGLSLLVSRNLLRLMNGNIRHIREAGMSTFILTAELAAAPSAVGQ

SEQ ID NO: 364 - protein, 1171 aa, Oryza sativa
MASGSRATPTRSPSSARPAAPRHQHHHSQSSGGSTSRAGGGGGGGGGGGGGAAAAESVSKAVAQYTLDARLHAVFEQSGASGRSFDYTQSLRASPTPSSEQQIAAYLSRIQRGGHIQPFGCTLAVADDSSFRLLAYSENTADLLDLSPHHSVPSLDSSAVPPPVSLGADARLLFAPSSAVLLERAFAAREISLLNPLWIHSRVSSNPFYAILHRIDVGVVIDLEPARTEDPALSIAGAVQSQKLVVRAISRLQALPGGDVKLLCDTVVEHVRELTGYDRVMVYRFHEDEHGEVVAESRRSNLEPYIGLHYPATDIPQASRFLFRQNRVRMIADCHAAPVRVIQDPALTQPLCLVGSTLRSPHGCHGQYMANMGSIASLVMAVIISSGGDDDHNIARGSIPSAMKLWGLVVCHHTSPRCIPFPLRYACEFLMQAFGLQLNMELQLAHQLSEKHILRTGTLLCDMLLRDSPTGIVTQSPSIMDLVKCDGAALYYHGKYYPLGVTPTEVQIKDIIEWLTMCHGDSTGLSTDSLADAGYSGAADLGDAVSGMAVAYITPSDYLFWFRSHTAKEIKWGGAKHHPEDKDDGQRMHPRSSFKAFLEVVKSRSLPWENAEMDAIHSLQLILRDSFRDSAEGTSNSKAIVNGQVQLGELELRGIDELSSVAREMVRLIETATVPIFAVDTDGCINGWNAKVAELTGLSVEEAMGKSLVNDLIFKESEETVNKLLSRALRGDEDKNVEIKLKTFGPEQSKGPIFVIVNACSTRDYTKNIVGVCFVGQDVTGQKVVMDKFINIQGDYKAIVHNPNPLIPPIFASDENTCCSEWNTAMEKLTGWSRGEVVGKLLVGEVFGNCCRLKGPDALTKFMIVLHNAIGGQDCEKFPFSFFDKNGKYVQALLTANTRSRMDGEAIGAFCFLQIASPELQQAFEIQRHHEKKCYARMKELAYIYQEIKNPLNGIRFTNSLLEMTDLKDDQRQFLETSTACEKQMSKIVKDASLQSIEDGSLVLEKGEFSLGSVMNAVVSQVMIQLRERDLQLIRDIPDEIKEASAYGDQYRIQQVLCDFLLSMVRFAPAENGWVEIQVRPNIKQNSDGTDTMLFPFRFACPGEGLPPEIVQDMFSNSRWTTQEGIGLSICRKILKLMGGEVQYIRESERSFFHIVLELPQPQQAASRGTS

SEQ ID NO: 365 - protein, 1178 aa, Sorghum bicolor
MASGSRATPTRSPSSARPEAPRHAHHHHHHHSQSSGGSTSRAGGGGGGGGGGGGTAATATATATESVSKAVAQYTLDARLHAVFEQSGASGRSFDYSQSLRAPPTPSSEQQIAAYLSRIQRGGHIQPFGCTLAVADDSSFRLLAFSENAADLLDLSPHHSVPSLDSAAPPPVSLGADARLLFSPSSAVLLERAFAAREISLLNPLWIHSRVSSKPFYAILHRIDVGVVIDLEPARTEDPALSIAGAVQSQKLAVRAISRLQALPGGDIKLLCDTVVEHVRELTGYDRVMVYRFHEDEHGEVVAESRRDNLEPYLGLHYPATDIPQASRFLFRQNRVRMIADCHATPVRVIQDPGMSQPLCLVGSTLRAPHGCHAQYMANMGSIASLVMAVIISSGGDDEQTGRGGISSAMKLWGLVVCHHTSPRCIPFPLRYACEFLMQAFGLQLNMELQLAHQLSEKHILRTQTLLCDMLLRDSPTGIVTQSPSIMDLVKCDGAALYYHGKYYPLGVTPTESQIKDIIEWLTVCHGDSTGLSTDSLADAGYLGAAALGDAVCGMAVAYITPSDYLFWFRSHTAKEIKWGGAKHHPEDKDDGQRMHPRSSFKAFLEVVKSRSLPWENAEMDAIHSLQLILRDSFRDAAEGTSNSKAIVNGQVQLGELELRGINELSSVAREMVRLIETATVPIFAVDTDGCINGWNAKIAELTGLSVEEAMGKSLVNDLIFKESEEIVEKLLSRALRGEEDKNVEIKLKTFGSEQSNGAIFVIVNACSSRDYTQNIVGVCFVGQDVTGQKVVMDKFINIQGDYKAIVHNPNPLIPPIFASDENTSCSEWNTAMEKLTGWSRGEVVGKFLIGEVFGSFCRLKGPDALTKFMVVIHNAIGGQDYEKFPFSFFDKNGKYVQALLTANTRSKMDGKSIGAFCFLQIASAEIQQAFEIQRQQEKKCYARMKELAYICQEIKNPLSGIRFTNSLLQMTDLNDDQRQFLETCSACEEQMSKIVKDATLQSIEDGSLVLEKSEFSFGDVMNAVVSQAMLLLRERDLQLIRDIPDEIKDASAYGDQFRIQQVLADFLLSMVRSAPSENGWVEIQVRPNVKQNSDGTDTELFIFRFTYPGEGLPADIVQDMFSNSQWSTQEGVGLSTCRKILKLMGGEVQYIRESERSFFLIVLELPQPRPAADREIS

SEQ ID NO: 366 - protein, 1137 aa, Oryza sativa
MSSSRSNNRATCSRSSSARSKHSARVVAQTPMDAQLHAEFEGSQRHFDYSSSVGAANRSGATTSNVSAYLQNMQRGRFVQPFGCLLAVHPETFALLAYSENAAEMLDLTPHAVPTIDQREALAVGTDVRTLFRSHSFVALQKAATFGDVNLLNPILVHARTSGKPFYAIMHRIDVGLVIDLEPVNPVDLPVTATGAIKSYKLAARAIARLQSLPSGNLSLLCDVLVREVSELTGYDRVMAYKFHEDEHGEVIAECKRSDLEPYLGLHYPATDIPQASRFLFMKNKVRMICDCSATPVKIIQDDSLTQPISICGSTLRAPHGCHAQYMASMGSVASLVMSVTINEDEDDDGDTGSDQQPKGRKLWGLMVCHHTSPRFVPFPLRYACEFLLQVFGIQINKEVELAAQAKERHILRTQTLLCDMLLRDAPVGIFTQSPNVMDLVKCDGAALYYQNQLWVLGSTPSEAEIKNIVAWLQEYHDGSTGLSTDSLVEAGYPGAAALGDVVCGMAAIKISSKDFIFWFRSHTAKEIKWGGAKHEPIDADDNGRKMHPRSSFKAFLEVVKWRSVPWEDVEMDAIHSLQLILRGSLQDEDANKNNNAKSIVTAPSDDMKKIQGLLELRTVTNEMVRLIETATAPILAVDITGSINGWNNKAAELTGLPVMEAIGKPLVDLVIDDSVEVVKQILNSALQGIEEQNLQIKLKTFNHQENNGPVILMVNACCSRDLSEKVVGVCFVAQDMTGQNIIMDKYTRIQGDYVAIVKNPSELIPPIFMINDLGSCLEWNEAMQKITGIKREDAVDKLLIGEVFTHHEYGCRVKDHGTLTKLSILMNTVISGQDPEKLLFGFFNTDGKYIESLMTATKRTDAEGKITGALCFLHVASPELQHALQVQKMSEQAAMNSFKELTYIRQELRNPLNGMQFTRNLLEPSDLTEEQRKLLASNVLCQEQLKKILHDTDLESIEQCYTEMSTVDFNLEEALNTVLMQAMPQSKEKQISIDRDWPAEVSCMHLCGDNLRLQQVLADFLACMLQFTQPAEGPIVLQVIPRMENIGSGMQIAHLEFRLVHPAPGVPEALIQEMFRHSPGASREGLGLYISQKLVKTMSGTVQYLRESESSSFIVLVEFPVAQLSTKRCKASTSKF

SEQ ID NO: 367 - protein, 1135 aa, Sorghum bicolor
MSSPLNNRGTCSRSSSARSRHSARVVAQTPVDAQLHAEFESSQRNFDYSSSVSAAIRPSVSTSTVSTYHQTMQRGLYIQPFGCLLAVHPDTFTLLAYSENAPEMLDLTPHAVPTIDQRDALAVGADVRTLFRSQSSVALHKAATFGEVNLLNPILVHARTSGKPFYAILHRIDVGLVIDLEPVNPVDVPVTAAGALKSYKLAAKAISRLQSLPSGNLSLLCDVLVREVSELTGYDRVMAYKFHEDEHGEVISECRRSDLEPYLGLHYPATDIPQASRFLFMKNKVRMICDCSATLVKIIQDDSLAQPLSLCGSTLRASHGCHAQYMANMGSVASLVMSVTISNDEEEDVDTGSDQQPKGRKLWGLVVCHHTSPRFVPFPLRYACEFLLQVFGIQLNKEVELAAQAKERHILRTQTLLWDMLLRDAPVGIFTQSPNVMDLVKCDGVALYYQNQLLLLGSTPSESEIKSIATWLQENHDGSTGLSTDSLVEAGYPGAAALREVVCGMAAIKISSKDFIFWFRSHTTKEIKWGGAKHEPVDADDNGRKMHPRSSFKAFLEVVKWRSVPWEDVEMDAIHSLQLILRGSLQDEDANRNNVRSIVKAPPDDTKKIQGLLELRTVTNEMVRLIETATAPVLAVDIAGNINGWNNKAAELTGLPVMEAIGRPLIDLVVVDSIEVVKRILDSALQGIEEQNLEIKLKAFHEQECNGPIILMVNSCCSRDLSEKVIGVCFVGQDLTTQKMIMDKYTRIQGDYVAIVKNPSELIPPIFMINDLGSCLEWNKAMQKITGIQREDVIDKLLIGEVFTLHDYGCRVKDHATLTKLSILMNAVISGQDPEKLLFGFFDTDGKYIESLLTVNKRINAEGKITGAICFLHVASPELQHALQVQKMSEQAATNSFKELTYIHQELRNPLNGMQFTCNLLEPSELTEEQRKLLSSNILCQDQLKKILHDTDLESIEQCYMEMNTVEFNLEEALNTVLMQGIPLGKEKRISIERDWPVEISRMYLYGDNLRLQQVLADYLACALQFTQPAEGPIVLQVIPKKENIGSGMQIAHLEFRIVHPAPGVPEALIQEMFRHNPEVSREGLGLYICQKLVKTMSGTVQYLREADTSSFIILIEFPVAQLSSKRSKPSTSKF

SEQ ID NO: 368 - protein, 213 aa, Oryza sativa
MATEEDASTMAAAEADPKPAATPSYPEMILAAIEALDDRNGSNKTAISQHIEGKYEGLLPPAHPSLLTAHLARMKQTGELAFSKNNYFRGDDPSLPPKRGRGRPPKPKDAAAAAAAPAPAPAAPAASSPRPRGRPPKPKDPLAEAVAKATSGMPRARGRPPKKAKVEQEDPIGAPAAASAPAAAAEAAPPVKRGRGRPPKVRPAAPVGEPAAA

SEQ ID NO: 369 - protein, 737 aa, Oryza sativa
MQQHQGGGSQYGAVPPDMGPFSPTHHASAPAPLPLSTATAAALSQPPPPQQQQQQPRTSYDELAAATSAGAGGFPDDDMLGDAGGSGGGGGSGAAGNRWPREETLALIRIRSEMDATFRDATLKGPLWEEVSRKLAELGYKRSAKKCKEKFENVHKYYKRTKEGRAGRQDGKSYRFFTELEALHAAAPQTPQPQQQQQQQLPPVTSSAPAMHAFAPPVPAPPPMSAMPPPPGPIQPAPISSAAPAVPLELPPQPPINLQGLSFSSMSGSESDDESEDDEMTAETGGSQDRLGKRKQAPAAKGWRLSSRGSSSKSSTGRRRCSGGFWRLWRSERRTHGREEAWRRQEVARLNREQEQLAQERAAAASRDAAIISFLQRIGGQSVQVPPAATVIQMPTPVQLQTPPPVKQPARQHQPQPTPPPPQAAPIPAAPLQQQPPQPQHKETIHHEAVTPRRAPPTSGSSLELVPAAEQHVESGLGGGEGGSASSSRWPKTEVQALIQLRMELDMRYQETGPKGPLWEEISSGMRRLGYNRSSKRCKEKWENINKYFKKVKESNKKRPEDSKTCPYFHQLDVIYRRKHLTGGGGGGASAANVAATAIEHQNPNRHEIEGKNINDNDKRKNGGGGGAQVPTSNGDTAPTTATFDVDSGMKKPEDIVRELSEQPPREFTTDETDSDDMGDDYTDDGEEGEDDGKMQYRIQFQRPNPGGANTAPPPATTPASAVPTSTPTSTFLAMVQ

SEQ ID NO: 370 - protein, 328 aa, Synechocystis PCC6803
MSENFAVATPVRVGIVGTGYAAQRRAEVFRGDRRSQLVSFWGNSEANTAKFADTFGVRPQQSWQALINDPEIDLVLIATINQLHGAIAEAALQAGKHVVLEYPLALTYAMGKKLQQLAREKGKLLHVEHIELLGGVHQAIRQNLGKIGEVFYARYSTIMGQNPAPQRWTYHHQQFGFPLVAALSRISRFTDLFGTVQQVDAQCRFWDQPNPEYFRACLATAYLQFNNGLKAEVIYGKGEVFHQNERIFTLHGDRGTLIFVGETGRLIQGQTETEITVGSRRGLFRQDTEAVLDYLTTGKPLYVDLEASLYALEVADLCAQACGYKVEN

SEQ ID NO: 371 - protein, 344 aa, Zea mays
MGILCLGASSTLLCGEDRNNVLGLGCGNELVEVGSGHDGLDSVVGAVFPVDTDEAVRALLEKETDHKPQDGYAERLERGGLEYSWRRDAMDWICKVHSYYRFGPLSLYLAVNYLDRFLSSYDLPHDKPWMRQLLSVACLALAVKMEETVLPLPVDLQVCDVKFEFEARTIGRMELLVLATLKWRMQAVTPFTFISYFLDKFNGGKPPSMALASRCTEIIIGTLKGSTFLSFRPSEIAAASALAAVSENQVVGSSSALSASEVPINKEMIARCYELLQEQALVRKTGHINGSPSVPQSPIGVLDATCFSFRSEDVRLGSSQSNNISSSSNDNQVSKRRRLSISPI

SEQ ID NO: 372 - protein, 911 aa, Zea mays
MAFKGLPRDSRGSLEVFNPDAPVSDRATTSPFLLPPAVASHPSLLAAGDGGDADVGRATQRAAEWGLVLQTDEHTGRPQGVVARPSGSNRTSESGNSIDERAAAAGAGRALPRVSEELRAALSAFQQTFVVSDATRPDHPILYASAGFFNMTGYSSNEVVGRNCRFLQGSGTDPVEISKIRQALAAGSNYCGRILNYKKDGTPFWNLLTVAPIKDEDGRVLKFIGMQVEVSKYTEGNKDTALRPNGLPESLIKYDARQKDHARSSVSELLLALKDPRSLSESRNNTLKRKSQESAGSALVPGKRSSETGSRRNSHSGMRNSLQKISEVPEGGNKTRKSGLRSFMGLIGMGHGNVEKNILKPREDPLLDSDDERPDSFDDDFRKKEMRKGIDLATTLERIEKNFVITDPRLPDNPIIFASDSFLRLTEYCREEILGRNCRFLQGPETDRGTVKKIRDAIDNQTEVTVQLINYTKSGKKFWNLFHLQPMRDQKGDVQYFIGVQLDGTERVREAAAKDGAILVKKTADNIDEAAKELPDANLRPEDLWANHSKPVLPKPHMKDTASWRAIQKVLENGESIDLKHFRPVRPLGSGDTGSVHLVELLGTGEYFAMKAMDKSVMLNRNKVHRATAERQILDMLDHPFLPTLYASFQTKTHICLIVDYCAGGELFMLLDRQPMKVLKEDAVRFYAAEVVTALEYLHCQGIIYRDLKPENILLHRDGHISLTDFDLSCLTSCRPQVFLPHDIDKKKKRRKSRSNPIFFAEPMRASNSFVGTEEYIAPEIITGAGHTSAVDWWALGILLYEMLYGYTPFRGKTRQRTFANILHKDIRFPASIQVSLAARQLIYRLLHRDPANRLGSYEGAMEIKQHPFFRGINWALVRAATPPELEAPLQDTLEATLPPPAADAAHTDMF

SEQ ID NO: 373 - protein, 165 aa, Zea mays
MALAEADDGAVVFGEEQEALVLKSWAVMKKDAANLGLRFFLKVFEIAPSAKQMFSFLRDSDVPLEKNPKLKTHAMSVFVMTCEAAAQLRKAGKVTVRETTLKRLGATHLRYGVADGHFEVTGFALLETIKEALPADMWSLEMKKAWAEAYSQLVAAIKREMKPDA

SEQ ID NO: 374 - protein, 419 aa, Oryza sativa
MENMRSENFNQGVSMEGVKHAPEMANTNRRALRDIKNIIGAPHQHMAVSKRGLLDKPAAKNQSGHRPMTRKFAATLANQPSIAPLAPIGSERQKRTADSAFHGPADMECTKITSDDLPLPMMSEMDEVMGSELKEIEMEDIEEAAPDIDSCDANNSLAVVEYVDEIYSFYRRSEGLSCVSPNYMLSQNDINEKMRGILIDWLIEVHYKLELLDETLFLTVNIIDRFLARENVVRKKLQLVGVTAMLLACKYEEVSVPVVEDLILICDRAYTRTDILEMERMIVNTLQFDMSVPTPYCFMRRFLKAAQSDKKLELMSFFIIELSLVEYEMLKFQPSMLAAAAIYTAQCTINGFKSWNKCCELHTKYSEEQLMECSKMMVELHQKAGHGKLTGVHRKYSTFRYGCPAKSEPAVFLLKSVAL

SEQ ID NO: 375 - protein, 257 aa, Oryza sativa
MAANFWTSSHCKQLLDQEDVDKVPQADSDRGITLEEFRLVKIHMSFHIWRLAQQVKVRQRVIATAVTYFRRVYTRKSMTEYDPRLVAPTCLYLASKVEESTVQARLLVFYIKKMCASDEKYRFEIKDILEMEMKLLEALDYYLVVYHPYRPLLQLLQDAGITDLTQFAWGIVNDTYKMDLILIHPPYMIALACIYIASVLKDKDITLWFEELRVDMNIVKNISMEILDFYDTYKIDPQRGLPEDKIAPVMNKLPSKA

SEQ ID NO: 376 - protein, 420 aa, Oryza sativa
MDRASENRRLAAVGKPVPGIGEMGNRRPLRDINNLVGAPSHPSAIAKKPMLEKSGKEEQKPALVVSHRPMLRNFAASLTRKEQLDHQVSVADAAVVCTDPQKNPIPDGTVDDDVESCESNDYIAVDECNDTDEDESMMDIDSADSGNPLAATEYVEELYKFYRENEEMSCVQPDYMSSQGDINEKMRAILIDWLIEVHHKFELMDETLFLTVNIVDRFLEKQVVPRKKLQLVGVTAMLLACKYEEVAVPVVEDLVLISDRAYTKGQILEMEKLILNTLQFNMSVPTPYVFMRRFLKAAQSDKQLQLLSFFILELSLVEYQMLKYRPSLLSAAAVYTAQCALTRCQQWTKTCELHSRYTGEQLLECSRMMVDFHQKAGAGKLTGVHRKYSTFKFGCAAKTEPALFLLESGAGGYNLQKQPC

SEQ ID NO: 377 - protein, 508 aa, Oryza sativa
MSSNLAASRRSSSSSSVAAAAAAKRPAVGEGGGGGGGKAAAGAAAAKKRVALSNISNVAAGGGAPGKAGNAKLNLAASAAPVKKGSLASGRNVGTNRASAVKSASAKPAPAISRHESATQKESVLPPKVPSIVPTAALAPVTVPCSSFVSPMHSGDSVSVDETMSTCDSMKSPEFEYIDNGDSSSVLGSLQRRANENLRISEDRDVEETKWKKDAPSPMEIDQICDVDNNYEDPQLCATLASDIYMHLREAETRKRPSTDFMETIQKDVNPSMRAILIDWLVEVAEEYRLVPDTLYLTVNYIDRYLSGNEINRQRLQLLGVACMLIAAKYEEICAPQVEEFCYITDNTYFRDEVLEMEASVLNYLKFEVTAPTAKCFLRRFVRVAQVSDEDPALHLEFLANYVAELSLLEYNLLSYPPSLVAASAIFLAKFILQPTKHPWNSTLAHYTQYKSSELSDCVKALHRLFSVGPGSNLPAIREKYTQHKYKFVAKKPCPPSIPTEFFRDATC

SEQ ID NO: 378 - protein, 470 aa, Oryza sativa
MASRRQWGAGAGAVDVPAQERKGGKAATDHLLRAFFAVFFVLEGLSWRRRRRRDGEGVFLLRYVACLLCLQAAKIARRPKTTTVVAQQPPRIRRALADVSNLVNGRAALPVVNRQKAAAAAADKCRKPIKQRNENNKAAKPEVIVISSDSEKHKKNPAQRAASRRAPIQTLTSILTKCSRASDGVISPKKELIYDIDASDSHNELAVVDYVEDIYRFYRNTENTYRPLCTYMVSQTEINERMRAILTDWLIEVHYRLMLMPETLYLTVYIIDQYLSLENVPRKELQLVGVSAMLIACKYEETWAPLVKDFLVISDNSFSRQQVLSTEKSILNKLQWNLTVPTMYMFILRYLKAALGDEELEHMTFFYAELALVQYSMLFFAPSVIAAAAVYAARCTLGLSPLWSDLLEYHTGLAEPQLLECARRLVSLHAAAPESRQKVVYKKYASPKLGAVSLHSPAKKLLPPPSPVAA

SEQ ID NO: 379 - protein, 228 aa, Zea mays
MARERREIKRIESAAARQVTFSKRRRGLFKKAQELSVLCDADVALIVFSSTGKLSQFASSSMNEIIDKYNTHSKNLGKTEQPSLDLNLEHSKYANLNEQLAEASLRLRQMRGEELEGLNVEELQQLEKNLESGLHRVLQTKDQQFLEQINDLERKSTQLAEENMQLRNQVSQIPPAGKQAVADTENVIAEEGQSSESVMTALHSGSSQDNDDGSDVSLKLGLPCVAWK

SEQ ID NO: 380 - protein, 233 aa, Zea mays
MVGTGKRERIAIRRIDNLAARQVTFSKRRRGLFKKAEELSILCDAEVGLVVFSATGKLFHFASSSMKQVIDRYDSHSKTLQRSEPQSSQLQSHMDDGTCARLKEELAETSLKLRQMRGEELQRLSVEQLQELEKTLESGLGSVLKTKSQKILDEISGLERKRTQLIEENSRLKEQVTRMSRMETQLGADPEFVYEEGQSSESVTNTSYPRPSTDTDDCSDTSLRLGLPLFSSK

SEQ ID NO: 381 - protein, 206 aa, Glycine max
MTRKRIQIKKIDNISSRQVTFSKRRKGLFKKAQELSTLCDADIALIVFSATSKLFEYASSSMHQVIERHDRYSAIHRLDRPSIELQIESDSNNILRKKVEDKTRELRQMNGEDLQGLTLQELQKLEEHLKRSLTNVSKVKDAKFMQEISTFKRKGVELMEENQRLKQVPSLIHAHSYRQSSESILSNSSNLPEDGGSNTSLKLGLP

SEQ ID NO: 382 - protein, 205 aa, Glycine max
MTRKRIQIKKIDNISSRQVTFSKRRKGLFKKAQELSTLCDADIALIVFSATSKLFEYASSSMHQVIERRDSHSAMNRLDRPSIELQIENDSNEILRKKVEDKNRELRQMNGEDLQGLTLQELHKLEEHLKRGLINVSKVKDEKLMQEISTLKRKGVELMEENQRLKQVVPSLIHVHRQSSESILSNSSNLPEDGGSDTSLKLGLP

SEQ ID NO: 383 - protein, 509 aa, Zea mays
MSTIAASRRSSSSSSSATAKRPAIADGPGGPKATAAQAKKRVALGNITNVAARGGRASVGGSLGNVMAPTSSAKLNPTVPLKKPSLATSARSVSSSIRGSADKPASIKPAPPVARHGSATQRHNNVPPPKVPTIADVPSRAPALVSCTGLVSPGRSGDSVSSDETMSTCDSMKSPDFEYVDNQDTSMLASLQRRTSEHLRISEDRDVEENKRKKNAVAPMEIDRICDVDSEYEDPQLCATLASDIYMHLREAETKKRPSTDFMETIQKDVNPSMRAILIDWLVEVAEEYRLVPDTLYLTVNYIDRYLSGNEISRQRLQLLGVACMLIAAKYEEICAPQVEEFCYITDNTYFRDEVLDMEASVLNYLKFEMTAPTAKCFLRRFARAAQACDEDPALHLEFLANYIAELSLLEYSLLSYPPSLIAASAIFLARFILQPTKYPWNSTLAHYTQYKPSKLSECVKALHRLCSVGSGSNLPAIREKYSQHKYKFVAKKQCPPQIPTEFFRDTTC

SEQ ID NO: 384 - protein, 372 aa, Zea mays
MENSAAAAAARPRLTRAAAKRSAVVTAVAVAAKRKRVALSQLPTLPNAVLGAHDDDDDKPVRKQRLLPAAKPKPKPKAAPAPAAPAAADDTDDDIQLCKPYASDIYSYLRSMESQAKRRLAVDYIAAVQIDVTPNMRGILIDWLVEVAEEYKLVSDTLYLTVSYIDRFLSAKVLNRQKLQLLGVSAMLIASKYEEISPPNVEDFCYITDNTYTKQEVVKMESDILNVLKFEVGSPTAKTFLRMFIRSAQEDNKKYPSLQLEFLGSYLSELSLLDYGLIRSLPSLVAASAVFVARLTLDPHTHPWSKKMQTLTGYKPSELKDCVAAIHNLQLNRTCQSMVAIREKYRQHRFKGVSALLPPVEIPASYFNTLKE

SEQ ID NO: 385 - protein, 424 aa, Zea mays
MAARAADENRRPAAGKPAPGVRDMASRRALTDIKNLVGAAPYPYAVAKKPMLQKSKRDEKQPALASSRPMTRKFAASLASKGQPECQPIVADPEPEVCQQKESVGDGTVDIDVELYELVDGSDSDIDMGATENKDIMNEDELLMDIDSADSGNPFAATEYVKELYTFYRENEAKSCVRPDYMSSQQDINSKMRAILIDWLIEVHYKFELMDETLFLMVNIIDIFLEKEVVPRKKLQLVGVTAMLLACKYEEVSVPVVEDLVLISYRAYTKGQILEMEKLILNTLQFNMSVPTPYVFMKRFLKAADADKQLELASFFMLELCLVEYQMLNYRPSHLAAAAVYTAQCAINRCQHWTKVCESHSRYTSDQLLECSRMMVDFHQKAGTSKLTGVHRKYSTYKFGCVAKILPAQFLLESGGTPPPSGAN

SEQ ID NO: 386 - protein, 479 aa, Zea mays
MECARELRVRSTFTAAAMASKKQVGPGGAVPAQEQMNGGDAARLVRKPMDTFPQPAAARGRRALVDVGNLMNGRPSLVNHQKQAVAAAATSHKPLNVGNKKPLVPQAAARGLRPLADVTNLMIKDRAAPANRQKPVDAVFNRNGKAVKLKECKVKPEVIVIIPDSEKEKKGKFPGGQRVCRRVPTLFDNLTKCSRASDGITTPKKKDPYDIDAPDSCNELAVVEYVEDIYRFYKSTEGTCLPLSSYMSSQAEISERMRAILIDWIIEVQYRLTLMPETLYLTVYIIDQYLSMESVPRKELQLVGISAMLIASKYEEIWAPLVKDLMCLCDNAFTRDQILTKEKAILDMLHWNLTVPTMYMFIVRYLKAAMCDAELENMTFFYSELALVQYAMLVYPPSVTAAAAVYAARSTLGMNPQWTDILEHHTGLAEPQLLDCARRLISFHALAPESKQKAVYRKYSKPKLGSVALQSPDKKLLSG

SEQ ID NO: 387 - protein, 424 aa, Zea mays
MENLRSQNCHQGVAMEGVKFAPEKANTNRRALSDIKNIIGGPHQHLAVSKRALSEKPAAAAAANAKDQAGFVGHRPVTRKFAATLATQPTVALLDPIGSERLKRNADTAFHTPADMESTKMTDDSPLPMVSEMDEMMSPELKEIEMEDIEEAAPDIDSGDAGNSLAVADYVDEIYRFYRKTEGASCVPTNYMSSQTDINEKMRGILIDWLIEVHYKLELLEETLFLTVNIIDRFLARENVVRKKLQLAGVTAMLLACKYEEVSVPVVEDLILIGDRAYTRADILEMERRIVNTLNFNMSVPTPYCFMRRFLKAAQSEKKLELLSFFMIELSLVEYEMLQFCPSMLAAAAIYTAQCTINGFKSWNKCCELHTRYSEEHLMVCSRMMVELHQRAAHGKLTGVHRKYNTSRYSYAAKSEPATFLLDA

SEQ ID NO: 388 - protein, 442 aa, Zea mays
MASRNHNAAAPQLHHHNRAGVPALGKAKAVPARADALNRRPPLGDIGNLVSVRPATGNPQEQVNRPITRSFGAQLVKKAQAKAAIKNAAILPARHAPRQERKAPVKQQPPPEDIIVLSSDSEQSRAQSESSASSVRSRRKAINTLSSVLSARSKAACGIAGKPRQVVDDIDKLDVNNELAVVEYIEDIYTFYKIAQHERRPCDYIDAQLEINSKMRAILADWIIEVHHKFELMPETLYLTMYIIDQYLSLQPVLRKELQLVGVSSMLIACKYEEIWAPEVNDFILISDSAYSREQILSMEKGILNRLEWNLTVPTVYMFLVRFLKAATLGGKVEKEMENMVFFFAELALMQYDLVTRLPSLVAASAVYAARLTLKRAPLWTDTLKHHTGFRESEAELIECTKMLVIAHSTAPESKLRVVYKKYSSEQFGGVALRPPAEEICK

SEQ ID NO: 389 - protein, 387 aa, Zea mays
MAAFAALFDPLYCPEEHLDLYHEGPVEVVDEQWQDQRGQQQPAALDDELPALFEALRDKEGVVLAGDGEEDGYGGSAGREAAVGWASRAAARLGFSALTSALSAAYLDRCFLPGGALRLGDQPWMSRLAAVACVALAAKVEETRVPLLLDLQLCAAASSDADAADADVFEAKTVRRMELLVLSALGWRMHPVTPFSYLQPVLADAAMRLRNCEAVLLAVMADWRWPRHRPSAWAAAALLTTAGGGDDDSELLALINAPEDETAECAKIISEVTGMSFLVCDVGGMIAGNKRKHAAARMYSPPLSPSGVIGALSCFSCESSLSATADSRTLATTAAGVGPWAPSAPVSVSSSPEPPGRAPKRAAAAGVPHPLPPDEESRDAWPSTCAA

SEQ ID NO: 390 - protein, 321 aa, Zea mays
MPGDAYDLLCAEDDAAGSALLCTTDDDDGCCSAVEEDSAAAAASIAELIGGEAQYSPRPDYPDRLRSRSIDPAARAESVAWILKVQEYYGFLPLTAYLAVNYMDRFLSLHRLPEDGWAMQLLAVTCLSLAAKMEETLVPSLLDLQVEGTSRYDCFEPGTVGRMELLVLMALNWRLRSVTPFTFVDFFACKVDPGGRHTRCLIARATQVILAAMHDVEFLDHCPSSMAAAAVLCAIGETPSLESVSPGAAVSWCIGLAEEGISSCYRLMQRLVIGNVRTRVASTTTMAAVNLCCSDEALSSHSSATSSPPPAKRRKRSPTAT

SEQ ID NO: 391 - protein, 349 aa, Zea mays
MGDAAASTSAPTTPTSILICLEDGSDLLADADDGAGTDLVVARDERLLVVDQDEEYVALLLSKESASGGGGPVEEMEDWMKAARSGCVRWIIKTTAMFRFGGKTAYVAVNYLDRFLAQRRVNREHAWGLQLLMVACMSLATKLEEHHAPRLSEFPLDACEFAFDRASVLRMELLVLGTLEWRMVAVTPFPYISCFAARFRQDERRAVLVRAVECVFAAIRAMSSVEYQPSTIAVASILVARGRETPAGNLDALKAILGSSFPQLDTGHVYSCYSAMIREDDKSPTQSTSTSTGVASSGVSVAAHAGGSGSPSPPGASVSVGANNAAGTAPPATTDNRNKRRRLRSPQRQ

SEQ ID NO: 392 - protein, 222 aa, Zea mays
METMSALARTAPPLAGTIRRPSCALRPTASLSFAAASTTPRGRLGLGLSTAPAGSGRAARARAVPRRIVASSEVEQSYIMIKPDGVQRGLVGEIISRFEKKGFLLKGLKLFQCPKDLAQEHYKDLKDKPFFPKLIDYITSGPVVCMAWEGDGVVASARKLIGATNPLQAEPGTIRGDLAVQTGRNVVHGSDSPDNGKREIELWFKEGEVCQWESVQAPWLIE

SEQ ID NO: 393 - protein, 238 aa, Zea mays
MSAASKKLFQAARSLVLSASNRSVLAAEGRTAALATLTNFGRKTLPTAYLSYHKQGSHHAASGWGAIAAAVPAAVYMLQDQEAHAAEMERTFIAIKPDGVQRGLISEIMSRFERKGYKLVAIKLIVPSKEFAEKHYHDLKERPFFSGLCDFLSSGPVLAMVWEGEGVIKYGRKLIGATDPQKSEPGTIRGDLAIVVGRNIIHGSDGPETAKDEIALWFEPKELVSYTSNAEKWIYGVN

SEQ ID NO: 394 - protein, 150 aa, Zea mays
  unsure (1)..(150): unsure at all Xaa locations
MESTFIMIKPDGVQRGLIGEIISRFEKKGFYLKALKLVNVERSFAEKHYAXDLASKPFFQGXVDYIISGPVVAMVWEGKSVVTTGRKIIGATNPLASEPGTIRGDFAVDIGRNVIHGSDSIESANKEIALWFPEGPADWQSSQHPWIYEK

SEQ ID NO: 395 - protein, 149 aa, Zea mays
MEQTFIMIKPDGVQRGLIGDIISRFEKKGFYLKGMKFMNVERSFAQQHYADLSDKPFFPGLVEYIISGPVVAMVWEGKDVVLTGRRIIGATRPWEAAPGTIRGDYAVEVGRNVIHGSDSVENGKKEIALWFPEGVAQWKSNLHPWIYEA

SEQ ID NO: 396 - protein, 1039 aa, Synechocystis PCC6803
MATIHGNWQPSHGENGGKLFLWADTWGHPLPETIGDRHPFALDLPDLLQAWSNLPLAFPKADGVTEAALTLHLPSHRQQKIPLPFVTGQDPVAMDAKYLHWRSWQVTGVNLTPSQTLTLLQSIPLGGQALANLGSEFYFYGQLHRWCLDLVLRGKFVPGLEQRGEDGNYYAQWIPILDSIQDQTHLAQFSQRVPACALANLTDSQEPQMLVVDLLQKLLQAQIGAVSPSLANVKEVWLNDWLRGLTHGGQTSLGTGKALQRLATSLDHWYLPVQNYLGQKNNQALAQRQWRGALRLQPPADDGGGTWQLDYGLQALDDGEFWLPAASLWAMAGDRLVWQGRRVDQGAESLLRGLGVAAQIYEPIAASLTERCPTGCGLDAIQAYEFILAIAHQLRDRGLGVILPPGLERGGTAKRLGVKVVGEVQRQRGQRLTLQSLINYDLQLMMGSGDNARLLTAKDFEALLAQKSPLVVLDGEWITLQPADVRAAKVILQQQQSAPPLTVEDALRLSIGDLQTVSKLPVTQFAARGILQELIDTLRNPEGVKAIADPPGFQGTLRPYQARGVGWLAFLERWGLGACLADDMGLGKTPQLLAFLLHLAAEDMLVKPVLIVCPTSVLSNWGHEINKFAPQLKTLLHHGDRRKKGQPLVKQVKDQQIVLTSYALLQRDFSSLKLVDWQGIVLDEAQNIKNPQAKQSQAARQLPAGFRIALTGTPVENRLTELWSILEFLNPGFLGNQSFFQRRFANPIEKFGDRQSLLILRNLVRPFILRRLKTDQTIIQDLPEKQEMTVFCDLSQEQAGLYQQLVEESLQAIADSEGIQRHGLVLTLLTKLKQVCNHPDLLLKKPAITHGHQSGKLIRLAEMLEEIISEGDRVLIFTQFASWGHLLKPYLEKYFNQEVLYLHGGTPAEQRQALVERFQQDPNSPYLFILSLKAGGTGLNLTRANHVFHVDRWWNPAVENQATDRAFRIGQTRNVQVHKFVCTGTLEEKINAMMADKQQLAEQTVDAGENWLTRLDTDKLRQLLTLSATPVDYQAEASD

SEQ ID NO: 397 - protein, 181 aa, coliphage T4
MTIEKEIEGLIHKTNKDLLNENANKDSRVFPTQRDLMAGIVSKHIAKNMVPSFIMKAHESGIIHVHDIDYSPALPFTNCCLVDLKGMLENGFKLGNAQIETPKSIGVATAIMAQITAQVASHQYGGTTFANVDKVLSPYVKRTYAKHIEDAEKWQIADALNYAQSKTEKDVYDAFQAYELT

SEQ ID NO: 398 - protein, 178 aa, Zea mays
MAGATTPASGALVRLCLPSLLLFLYRCEAVEMERTLAMIKPDGLSGKYTEAIKEVILDSGFHIVKETEVQLDAERASVFYAEHSQRSFFDSLVKYITSGPVLAMVLERPDAVAQWRTLIGPTDAKKAKTSHPNSIRAMCGLDSEKNCVHGSDSPESADREISFFFGEAESVTVEHDEL

SEQ ID NO: 399 - protein, 2470 aa, Saccharomyces cerevisiae
MEPHEEQIWKSKLLKAANNDMDMDRNVPLAPNLNVNMNMKMNASRNGDEFGLTSSRFDGVVIGSNGDVNFKPILEKIFRELTSDYKEERKLASISLFDLLVSLEHELSIEEFQAVSNDINNKILELVHTKKTSTRVGAVLSIDTLISFYAYTERLPNETSRLAGYLRGLIPSNDVEVMRLAAKTLGKLAVPGGTYTSDFVEFEIKSCLEWLTASTEKNSFSSSKPDHAKHRALLIITALAENCPYLLYQYLNSILDNIWRALRDPHLVIRIDASITLAKCLSTLRNRDPQLTSQWVQRLATSCEYGFQVNTLECIHASLLVYKEILFLKDPFLNQVFDQMCLNCIAYENHKAKMIREKIYQIVPLLASFNPQLFAGKYLHQIMDNYLEILTNAPAKKIPHLKDDKPQILISIGDIAYEVGPDIAPYVKQILDYIEHDLQTKFKFRKKFENEIFYCIGRLAVPLGPVLGKLLNRNILDLMFKCPLSDYMQETFQILTERIPSLGPKINDELLNLVCSTLSGTPFIQPGSPMEIPSFSRERAREWRNKSILQKTGESNDDNNDIKIIIQAFRMLKNIKSRFSLVEFVRIVALSYIEHTDPRVRKLAALTSCEIYVKDNICKQTSLHSLNTVSEVLSKLLAITIADPLQDIRLEVLKNLNPCFDPQLAQPDNLRLLFIALHDESFNIQSVAMELVGRLSSVNPAYVIPSIRKILLELLTKLKFSTSSREKEETASLLCTLIRSSKDVAKPYIEPLLNVLLPKFQDTSSTVASTALRTIGELSVVGGEDMKIYLKDLFPLIIKTFQDQSNSFKREAALKALGQLAASSGYVIDPLLDYPELLGILVNILKTENSQNIRRQTVTLIGILGAIDPYRQKEREVTSTTDISTEQNAPPIDIALLMQGMSPSNDEYYTTVVIHCLLKILKDPSLSSYHTAVIQAIMHIFQTLGLKCVSFLDQIIPTILDVMRTCSQSLLEFYFQQLCSLIIIVRQHIRPHVDSIFQAIKDFSSVAKLQITLVSVIEAISKALEGEFKRLVPLTLTLFLVILENDKSSDKVLSRRVLRLLESFGPNLEGYSHLITPKIVQMAEFTSGNLQRSAIITIGKLAKDVDLFEMSSRIVHSLLRVLSSTTSDELSKVIMNTLSLLLIQMGTSFAIFIPVINEVLMKKHIQHTIYDDLTNRILNNDVLPTKILEANTTDYKPAEQMEAADAGVAKLPINQSVLKSAWNSSQQRTKEDWQEWSKRLSIQLLKESPSHALRACSNLASMYYPLAKELFNTAFACVWTELYSQYQEDLIESLCIALSSPLNPPEIHQTLLNLVEFMEHDDKALPIPTQSLGEYAERCHAYAKALHYKEIKFIKEPENSTIESLISINNQLNQTDAAIGILKHAQQHHSLQLKETWFEKLERWEDALHAYNEREKAGDTSVSVTLGKMRSLHALAEWEQLSQLAARKWKVSKLQTKKLIAPLAAGARGGSGEWDMLDEYISVMKPKSPDKEFFDAILYLHKNDYDNASKHILNARDLLVTEISALINESYNRAYSVIVRTQIITEFEEIIKYKQLPPNSEKKLHYQNLWTKRLLGCQKNVDLWQRVLRIRSLVIKPKQDLQIWIKFANLCRKSGRMRLANKALNMLLEGGTILVYQIRSKPPPPVVYAQLKYIWATGAYKEALNHLIGFTSRLAHDLGLDPNNMIAQSVKLSSASTAPYVEEYTKLLARCFLKQGEWRIATQPNWRNTNPDAILGSYLLATHFDKNWYKAWHNWALANFEVISMVQEETKLNGGKNDDDDDTAVNNDNVRIDGSILGSGSLTINGNRYPLELIQRHVVPAIKGFFHSISLLETSCLQDTLRLSTLLFNFGGIKEVSQAMYEGFNLMKIENWLEVLPQLISRIHQPDPTVSNSLLSLLSDLGKAHPQALVYPLTVAIKSESVSRQKAALSIIEKIRIHSPVLVNQAELVSHELIRVAVLWHELWYEGLEDASRQFFVEHNIEKMFSTLEPLHKHLGNEPQTLSEVSFQKSFGRDLNDAYEWLNNYKKSKDINNLNQAWDIYYNVFRKITRQIPQLQTLDLQHVSPQLLATHDLELAVPGTYFPGKPTIRIAKFEPLFSVISSKQRPRKFSIKGSDGKDYKYVLKGHEDIRQDSLVMQLFGLVNTLLKNDSECFKRHLDIQQYPAIPLSPKSGLLGWVPNSDTFHVLIREHRDAKKIPLNIEHWVMLQMAPDYENLTLLQKIEVFTYALDNTKGQDLYKILWLKSRSSETWLERRTTYTRSLAVMSMTGYILGLGDRHPSNLMLDRITGKVIHIDFGDCFEAAILREKYPEKVPFRLTRMLTYAMEVSGIEGSFRITCENVMRVLRDNKESLMAILEAFALDPLIHWGFDLPPQKLTEQTGIPLPLINPSELLRKGAITVEEAANMEAEQQNETRNARAMLVLRRITDKLTGNDIKRFNELDVPEQVDKLIQQATSIERLCQHYIGWCPFW

SEQ ID NO: 400 - protein, 160 aa, Zea mays
MSDSEEHHFESKADAGASKTYPQQAGTVRKNGFIVIKNRPCKVVEVSTSKTGKHGHAKCHFVAIDIFNGKKLEDIVPSSHNCDIPHVNRTEYQLIDISEDGFVSLLTSDGNTKDDLRLPTDETLVAQIKEGFESGKDLVVTVQSAMGEEQICALKDVGPK

SEQ ID NO: 401 - protein, 157 aa, Saccharomyces cerevisiae
MSDEEHTFENADAGASATYPMQCSALRKNGFVVIKGRPCKIVDMSTSKTGKHGHAKVHLVTLDIFTGKKLEDLSPSTHNLEVPFVKRSEYQLLDIDDGYLSLMTMDGETKDDVKAPEGELGDSMQAAFDEGKDLMVTIISAMGEEAAISFKEAPRSD

SEQ ID NO: 402 - protein, 387 aa, Saccharomyces cerevisiae
MSDINEKLPELLQDAVLKASVPIPDDFVKVQGIDYSKPEATNMRATDLIEAMKTMGFQASSVGTACEIIDSMRSWRGKHIDELDDHEKKGCFDEEGYQKTTIFMGYTSNLISSGVRETLRYLVQHKMVDAVVTSAGGVEEDLIKCLAPTYLGEFALKGKSLRDQGMNRIGNLLVPNDNYCKFEEWIVPILDKMLEEQDEYVKKHGADCLEANQDVDSPIWTPSKMIDRFGKEINDESSVLYWAHKNKIPIFCPSLTDGSIGDMLFFHTFKASPKQLRVDIVGDIRKINSMSMAAYRAGMIILGGGLIKHHIANACLMRNGADYAVYINTGQEYDGSDAGARPDEAVSWGKIKAEAKSVKLFADVTTVLPLIVAATFASGKPIKKVKN

SEQ ID NO: 403 - protein, 297 aa, Saccharomyces cerevisiae
MAFQKDAKSSAYSSRFQTPFRRRREGKTDYYQRKRLVTQHKAKYNTPKYRLVVRFTNKDIICQIISSTITGDVVLAAAYSHELPRYGITHGLTNWAAAYATGLLIARRTLQRLGLDETYKGVEEVEGEYELTEAVEDGPRPFKVFLDIGLQRTTTGARVFGALKGASDGGLYVPHSENRFPGWDFETEEIDPELLRSYIFGGHVSQYMEELADDDEERFSELFKGYLADDIDADSLEDIYTSAHEAIRADPAFKPTEKKFTKEQYAAESKKYRQTKLSKEERAARVAAKIAALAGQQ

SEQ ID NO: 404 - protein, 466 aa, Saccharomyces cerevisiae
MSSTQVGNALSSSTTTLVDLSNSTVTQKKQYYKDGETLHNLLLELKNNQDLELLPHEQAHPKIFQALKARIGRINNETCDPGEENSFFICDLGEVKRLFNNWVKELPRIKPFYAVKCNPDTKVLSLLAELGVNFDCASKVEIDRVLSMNISPDRIVYANPCKVASFIRYAASKNVMKSTFDNVEELHKIKKFHPESQLLLRIATDDSTAQCRLSTKYGCEMENVDVLLKAIKELGLNLAGVSFHVGSGASDFTSLYKAVRDARTVFDKAANEYGLPPLKILDVGGGFQFESFKESTAVLRLALEEFFPVGCGVDIIAEPGRYFVATAFTLASHVIAKRKLSENEAMIYTNDGVYGNMNCILFDHQEPHPRTLYHNLEFHYDDFESTTAVLDSINKTRSEYPYKVSIWGPTCDGLDCIAKEYYMKHDVIVGDWFYFPALGAYTSSAATQFNGFEQTADIVYIDSELD

SEQ ID NO: 405 - protein, 799 aa, Oryza sativa
MSSMESLAQLELLCEKLYNSRDSAERAHAESTLKCFSENSDYISQCQYILDNASTPYALMLASSSLLNQVNDRSLSLQLRLDILNYVINYLAMRGPKLQTFVIKSLIQLVCRITKFGWFDDDKFRDIVKEAADFLSLASQDHYFIGLKILYHLVGEMNQANAMPLTLHRKIACSFKDQFLLQIFQISLTSLHQLKSEVPDDFRRDPLSLALRCLSFDFVGCPVDESSEEFGTVQLPASWRPLLQDPSTVQIFFDYYKVNDTCVSKEKECLFKAKYFLQERSRLPAPGDANELSVIEGQLTWLVHIIEAILKIRQTIGCSQESQELIDAELAARVLQLINVTDTGVHAQRYRVLSKQRLGRAILIFVQNFRRSYVGDQAMHSSKQLYARLSELLGLNDHLVLLNAIVGKIATNLKCYAENVAISGPVQIVAVNLEATADAAFWTDVVKYAFIGLMRDLRGIAMATNRTYGLLFDWLYPSRMPLLLKAISLCADEPEVTTPLLKFMCEFVLNKAQRLTFDSSSPNGILLFQEVSKLIVAYGSRILLLPNGTDIYGSKYKGIWISLAVLSRALCGNYVNFGVFELYGDRALADALDISLKMSLSVPLSDILAFKKLSKAFYGYIEVLFSSHITFVLNLDTNTFVHIVSTLESGLKGLDTGISTQCASAIDSLAAFYFNNITAADGPPSPAALNLARHIGEFPTLFPQILKTLFEIIIFEDAGNQWSLSRPILSLIMISEQMFSNLRAQILASQPVDQQQRLSQCFEKLMSDVARNLEPKNRDKFTKNLTTFRHDFRVKNIQA

SEQ ID NO: 406 - protein, 396 aa, Saccharomyces cerevisiae
MTVTIKELTNHNYIDHELSATLDSTDAFEGPEKLLEIWFFPHKKSITTEKTLRNIGMDRWIEILKLVKCEVLSMKKTKELDAFLLSESSLFVFDHKLTMKTCGTTTTLFCLEKLFQIVEQELSWAFRTTQGGKYKPFKVFYSRRCFLFPCKQAAIHQNWADEVDYLNKFFDNGKSYSVGRNDKSNHWNLYVTETDRSTPKGKEYIEDDDETFEVLMTELDPECASKFVCGPEASTTALVEPNEDKGHNLGYQMTKNTRLDEIYVNSAQDSDLSFHHDAFAFTPCGYSSNMILAEKYYYTLHVTPEKGWSYASFESNIPVFDISQGKQDNLDVLLHILNVFQPREFSMTFFTKNYQNQSFQKLLSINESLPDYIKLDKIVYDLDDYHLFYMKLQKKI

SEQ ID NO: 407 - protein, 368 aa, Zea mays
  unsure (1)..(368): unsure at all Xaa locations
MAVLSAAGAPPASAIGFEGYEKRLEITFSEAPVFVDPHGSGLRALSRSQIDSVLDLARKIVIKTCGTTKLLLTIPRILELAEELSMPLAAVKYSRGTFIFPGAQPAPHRSFSEEVAVLNRYFGGLKSGGNAYVIGDAARPGQKWHIYYATEYPEQPMVNLEMCMTGLDTKKASVFFKTNADGNTTCAKEMTKLSGISEIIPEMEICDFDFEPCGYSMNAIHGSAFSTIHVTPEDGFSYASYEVMGLDATALSYGDLVKRVLGCFGPSEFSVAVTIFGGRGQAGTWGKELGAEAYDCNNMVEQELPGGGILIYQSFCAAEDAVASSPKSVLRCFDGENAAPFAKDCKLANLVCLEEXDAIEEKDGVLDE

SEQ ID NO: 408 - protein, 400 aa, Zea mays
MAVLSAADASPVSAIGFEGYEKRLEITFSEAPVFVDPHGRGLRALSRAQIDSVLDLARCTIVSELSNKDFDSYVLSESSLFIYPLKIVIKTCGTTKLLLTIPRILELAEELSMPLAAVKYSRGTFIFPGAQPAPHRSFSEEVAALNRYFGGLKSGGNAYVIGDPARPGQKWHVFYATEYPEQPMVNLEMCMTGLDKKKACVFFKTNADGNTTCAKEMTKLSGISEIIPEMEICDFDFEPCGYSMNAIHGSAFSTIHVTPEDGFSYASYEVMGLDATALSYGDLVKRVLRCFGPSEFSVAVTIFGGRGHAGTWGKALGAEVYDCNNMVEQELPGGGLLVYQSFCAAEDAVATSPKSVFHCFDGENVESAPPPMKKDYKLANLLCWEEEADAMEEKAGVLDE

SEQ ID NO: 409 - protein, 866 aa, Zea mays
MSSLDPSPATSTQQKQLESLVNLLTQGSRFYRKAYNELFSGVTTEQDPDSSTNIPEYMLFGWHLFLMLHSRSPELFKDLVSCIHGLVAVLAILLIHVPAKFRSFTIEGSSHLIKQTEKGVDLIASLCHNYHTSEERLKEMLHKSYNAIEDIFHMKALSASECKPENLDKIDTDDLMYFKGLIDMECFQSNLEKMEKLCNSNSCKGELDFKSILINNDYIPYDENSTGDSTNLGRSKCAFETLASPTKTIKNMLTVPSSPLSPATGGSVKIVQMTPVTSAMTTAKWLREVISSLPDKPSSKLQQFLSSCDRDLTNAVTERVSIVLEAIFPTKSSANRGVSLGLNCANAFDIPWAEARKVEASKLYYRVLEAICRAELQNSNVNNLTPLLSNERFHRCLIACSADLVLATHKTVIMMFPAVLESTGLTAFDLSKIIENFVRHEETLPRELKRHLNSLEEQLLESMAWEKGSSLYNSLIVARPSVASEINRLGLLAEPMPSLDDLVSRQNVRIEGLPATPSKKRASGPDDNADPRSPKRSCNESRNTVVERNLQTPPPKQSHMVSTSLKAKCHPLQSTFASPTVCNPVGGNEKCADVTIHIFFSKILKLAAIRIRNLCERVQCVEQTERVYNVFKQILEQQTTLFFNRHIDQLILCCLYGVAKVCQLELTFREILNNYKREAQCKPEVFSSIYIGSTNRNGVLVSRHVGIITFYNEVFVPAAKPFLVSLISSGTHPEDKKNASGQILGSPKPSPFPNLPDMSPKKVSASHNVYVSPLRQTKLDLLLSPSSRSFYACIGEGTHAYQSPSKDLAAINSRLNYNGRKVNSRLNFDMVSDSVVAGSLGQINGGSTSDPAAAFSPLSKKRETDT

SEQ ID NO: 410 - protein, 264 aa, Wheat dwarf virus
MASSSAPRFRVYSKYLFLTYPECTLEPQYALDSLRTLLNKYEPLYIAAVRELHEDGSPHLHVLVQNKLRASITNPNALNLRMDTSPFSIFHPNIQAAKDCNQVRDYITKEVDSDVNTAEWGTFVAVSTPGRKDRDADMKQIIESSSSREEFLSMVCNRFPFEWSIRLKDFEYTARHLFPDPVATYTPEFPTESLICHETIESWKNEHLYSVSLESYILCTSTPADQAQSDLEWMDDYSRSHRGGISPSTSAGQPEQERLPGQGL

SEQ ID NO: 411 - protein, 399 aa, Saccharomyces cerevisiae [sequence omitted]

SEQ ID NO: 412 - protein, 199 aa, Arabidopsis thaliana
MVQTKKFRGVRQRHWGSWVAEIRHPLLKRRIWLGTFETAEEAARAYDEAAVLMSGRNAKTNFPLNNNNTGETSEGKTDISASSTMSSSTSSSSLSSILSAKLRKCCKSPSPSLTCLRLDTASSHIGVWQKRAGSKSDSSWVMTVELGPASSSQETTSKASQDAILAPTTEVEIGGSREEVLDEEEKVALQMIEELLNTN

SEQ ID NO: 413 - protein, 525 aa, Oryza sativa
  unsure (1)..(525): unsure at all Xaa locations
MPGAAGYSGSVKLKYVKLGYQYLVNHFLTLLLVPVMAATALELARMGPGELLSLWRSLQLDLVHILCSVFLVVFVGTVYFMSRPRPVYLVDYSCYKPPPSCRVPFATFMEHTRLITDDEKSVRFQTRILERSGLGEETCLPPANHYIPPNPSMEASRAEAQLVIFSAIDDLVRRTGLKPKDIDILVVNCSLFSPTPSLSAMIINKYKLRSNIRSFNLSGMGCSAGLISLDLARDMLQVSTSQLFDVTTVXLTNXSGEPLTSDMDGHAQVHPNSNALVVSTEIITPNFYWGTRRDMMLPNCLFRMGAAAILLSNRRREARRAKYRLMHVVRTHKGADDRAYRCVYEEEDEQGHSGISLSKELMAIAGDALKSNITTIGPLVLPMSEQLLFFFRLVGRKLINKKWKPYIPDFKLAFEHFCIHAGGRAVIDELQKNLDLSAQHVEASRMTLHRFGNTSSSSLWYELAYIEAKGRMRRGDRVWQIGFGSGFKCNSAVWKCLRTVKTPADGPWDDCIHRYPVDIPEVVKL

SEQ ID NO: 414 - protein, 445 aa, Zea mays
MATRNHRAAAAPQPANRGAARVAGKQKAAAAGTRRALGDIGNVVSDALDRAIKLPEGIHRPITRSFGAQLMKAALANKNADAAVAPAQPVAARAVTKPARKVTTKNVPRPGAGQAPKENKKPSAEGAAAASGRSVQKNRRKKPACTLSTVLSARSKAACPVTEKPKEPIEDIDKFDGDNQLALVDYVEDIYTFYRPPMHESRPIDYMGQTSPELSPRMRSILADWLIESHRRFQLMPETLYLTIYIVDRYLSLQPTPRRELQLVGVAALLIACKYEEIWAPEVNDLIHIADGAFNRSQILAAEKAILNSMEWNLTVPTPYHFLLRFAKAAGSADEQLQHTINFFGELALMDYGMVMTNPSTAAACAVYAARLTLGRSPLWTETLKHHTGPQRAADTGRAKTLVGSHAASASPDARLKAVYQKYATEQFGRVALHPPAPAALPDLV

SEQ ID NO: 415 - protein, 1511 aa, Saccharomyces cerevisiae
MPEAKLNNNVNDVTSYSSASSSTENAADLHNYNGFDEHTEARIQKLARTLTAQSMQNSTQSAPNKSDAQSIFSSGVEGVNPIFSDPEAPGYDPKLDPNSENFSSAAWVKNMAHLSAADPDFYKPYSLGCAWKNLSASGASADVAYQSTVVNIPYKILKSGLRKFQRSKETNTFQILKPMDGCLNPGELLVVLGRPGSGCTTLLKSISSNTHGFDLGADTKISYSGYSGDDIKKHFRGEVVYNAEADVHLPHLTVFETLVTVARLKTPQNRIKGVDRESYANHLAEVAMATYGLSHTRNTKVGNDIVRGVSGGERKRVSIAEVSICGSKFQCWDNATRGLDSATALEFIRALKTQADISNTSATVAIYQCSQDAYDLFNKVCVLDDGYQIYYGPADKAKKYFEDMGYVCPSRQTTADFLTSVTSPSERTLNKDMLKKGIHIPQTPKEMNDYWVKSPNYKELMKEVDQRLLNDDEASREAIKEAHIAKQSKRARPSSPYTVSYMMQVKYLLIRNMWRLRNNIGFTLFMILGNCSMALILGSMFFKIMKKGDTSTFYFRGSAMFFAILFNAFSSLLEIFSLYEARPITEKHRTYSLYHPSADAFASVLSEIPSKLIIAVCFNIIFYFLVDFRRNGGVFFFYLLINIVAVFSMSHLFRCVGSLTKTLSEAMVPASMLLLALSMYTGFAIPKKKILRWSKWIWYINPLAYLFESLLINEFHGIKFPCAEYVPRGPAYANISSTESVCTVVGAVPGQDYVLGDDFIRGTYQYYHKDKWRGFGIGMAYVVFFFFVYLFLCEYNEGAKQKGEILVFPRSIVKRMKKRGVLTEKNANDPENVGERSDLSSDRKMLQESSEEESDTYGEIGLSKSEAIFHWRNLCYEVQIKAETRRILNNVDGWVKPGTLTALMGASGAGKTTLLDCLAERVTMGVITGDILVNGIPRDKSFPRSIGYCQQQDLHLKTATVRESLRFSAYLRQPAEVSIEEKNRYVEEVIKILEMEKYADAVVGVAGEGLNVEQRKRLTIGVELTAKPKLLVFLDEPTSGLDSQTAWSICQLMKKLANHGQAILCTIHQPSAILMQEFDRLLFMQRGGKTVYFGDLGEGCKTMIDYFESHGAHKCPADANPAEWMLEVVGAAPGSHANQDYYEVWRNSEEYRAVQSELDWMERELPKKGSITAAEDKHEFSQSIIYQTKLVSIRLFQQYWRSPDYLWSKFILTIFNQLFIGFTFFKAGTSLQGLQNQMLAVFMFTVIFNPILQQYLPSFVQQRDLYEARERPSRTFSWISFIFAQIFVEVPWNILAGTIAYFIYYYPIGFYSNASAAGQLHERGALFWLFSCAFYVYVGSMGLLVISFNQVAESAANLASLLFTMSLSFCGVMTTPSAMPRFWIFMYRVSPLTYFIQALLAVGVANVDVKCADYELLEFTPPSGMTCGQYMEPYLQLAKTGYLTDENATDTCSFCQISTTNDYLANVNSFYSERWRNYGIFICYIAFNYIAGVFFYWLARVPKKNGKLSKK

SEQ ID NO: 416 - protein, 330 aa, Oryza sativa
MADFRTSTHRERWIFQTNDLMDRWGAANQRATETLVQYGTTRLKVDPVDGSLSYPEPAPDHVVGSSGVKPLSCEEERLMRVFYEQKIQEVCSAFKFPHKIQATAIIYFKRFYLQWSVMEHHPKHIMLTCIYSSCKVEENHVSAEELGKGIQQDHQIILNNEMIVLKSLDFDLIVYAPYRSIEGFVDDMEDFCRAGNGEHQRLQDLRQTAISQVDKMMLTDAPLLYTPGQLALAALHKSNDMHKILNFERYLESVFSRQHSDCPIEQFVGSINMINYLVEQLKIPTPKDMRHIDRKLKHCLDPSSQDEHKKKEKKSKHKSKRAANEAQLDS

SEQ ID NO: 417 - protein, 424 aa, Oryza sativa
MASGDGGDDAGVKRVADRYLKREVLGEGTYGVVFKAVDTKTGNTVAIKKIRLGKYKEGVNFTALREIKLLKELKDSNIIELIDAFPYKGNLHLVFEFMETDLEAVIRDRNIVLSPADTKSYIQMMLKGLAFCHKKWVLHRDMKPNNLLIGADGQLKLADFGLARIFGSPERNFTHQVFARWYRAPELLFGTKQYGSAVDIWAAGCIFAELLLRRPFLQGSSDIDQLGKIFAAFGTPKSSQWPDMVYLPDYVEYQFVSAPPLRSLFPMASDDALDLLSRMFTYDPKARITAQQALEHRYFLSVPAPTKPSQLPRPPPKGDSGNNKIPDLNLQDGPVVLSPPRKLRRVTAHEGMEVHMHRADRTEEHPSGARHMDDMSSQSSRIPMSVDVGAIFGTRPAPRPTLNSADKSRLKRKLDMDPEFGYTE

SEQ ID NO: 418 - protein, 409 aa, Glycine max
MDPPPKSWSIHTRSEIIAKYEVMERVGSGAYADVYRGRRLSDGLTVALKEIHDYQSAFREIDALQLLEGSPNVVVLHEYFWREDEDAVLVLEFLRTDLATVIADTAKANQPLPAGELKCWMIQILSGLDACHRHMVLHRDLKPSNLLISEHGLLKIADFGQARILMEPGIDASNNHEEYSRVLDDIDNKDTITSTHDGNATCNTSDVDREEEELGCFTSCVGTRWFRAPELLYGSRNYGLEVDLWSLGCIFAELLTLQPLFPGTADIDQLSRIIGVLGNLDENAWAACSKLPDYGIISFSKVENPAGLEACLPNRSPDEVALVKKLVCYDPAKRATAMELLHDKYFSDEPLPVLVSELRVPLTRKEQDGDSPGGWGDINDMDSDSDSQFDEFGPLNITRTGTGFSIQFP

SEQ ID NO: 419 - protein, 590 aa, Arabidopsis thaliana
MSLPETKSDDILLDAWDFQGRPADRSKTGGWASAAMILCIEAVERLTTLGIGVNLVTYLTGTMHLGNATAANTVTNFLGTSFMLCLLGGFIADTFLGRYLTIAIFAAIQATGVSILTLSTIIPGLRPPRCNPTTSSHCEQASGIQLTVLYLALYLTALGTGGVKASVSGFGSDQFDETEPKERSKMTYFFNRFFFCINVGSLLAVTVLVYVQDDVGRKWGYGICAFAIVLALSVFLAGTNRYRFKKLIGSPMTQVAAVIVAAWRNRKLELPADPSYLYDVDDIIAAEGSMKGKQKLPHTEQFRSLDKAAIRDQEAGVTSNVFNKWTLSTLTDVEEVKQIVRMLPIWATCILFWTVHAQLTTLSVAQSETLDRSIGSFEIPPASMAVFYVGGLLLTTAVYDRVAIRLCKKLFNYPHGLRPLQRIGLGLFFGSMAMAVAALVELKRLRTAHAHGPTVKTLPLGFYLLIPQYLIVGIGEALIYTGQLDFFLRECPKGMKGMSTGLLLSTLALGFFFSSVLVTIVEKFTGKAHPWIADDLNKGRLYNFYWLVAVLVALNFLIFLVFSKWYVYKEKRLAEVGIELDDEPSIPMGH

SEQ ID NO: 420 - protein, 584 aa, Oryza sativa
MDSSYQHDKPLLDEENSSQVTLEYTGDGSVCIRGHPALRKHTGNWKGSSLAIVFSFCSYLAFTSIVKNLVSYLTKVLHETNVAAARDVATWSGTSYLAPLVGAFLADSYLGKYCTILIFCTIFIIGLMMLLLSAAVPLISTGPHSWIIWTDPVSSQNIIFFVGLYMVALGYGAQCPCISSFGADQFDDTDENERTKKSSFFNWTYFVANAGSLISGTVIVWVQDHKGWIWGFTISALFVYLGFGTFIFGSSMYDFRNLEEAPLARICQVVVAAIHKRDKDLPCDSSVLYEFLGQSSAIEGSRKLEHTTGLKFFDRAAMVTPSDFESDGLLNTWKICTVTQVEELKILIRMFPVWATMILFAAVLDNMFSTFIEQGMVMEKHIGSFEIPAASFQSIDVIAVLILVPVYERVLVPVFRKFTGRANGITPLQRMGIGLFFSMLSMVSAALVESNRLRIAQDEGLVHRKVAVPMSILWQGPQYFLIGVGEVFSNIGLTEFFYQESPDAMRSLCLAFSLANVSAGSYLSSFIVSLVPVFTAREGSPGWIPDNLNEGHLDRFFWMMAGLCFLNMLAFVFCAMRYKCKKAS

SEQ ID NO: 421 - protein, 303 aa, Zea mays
MNTSPSRYRAMMGGWGGSDGYEGSKRTRMMMESNPYFAVNAGSPLDVSKRARMMEPGAPYFGAMGSSASGAGGGFYQPFNSNLAGAGSSTGIQSFPCVRLRGLPFDCNDIDVCKFFVGLDIVDCLLVNKNGRFTGEAFVVFPTSMQAEFALHRDRQNMGRRYVEVFRCKKHEYYCAIANEVNQGGYFEPEYRRSPPPPRPRKPSEDKGSMEYTEVLKLRGLPYSATTEDIIKFFLEYELAEENVHIAYRTDGKATGEAFVEFPTAEVAKTAMCKDKMTIGTRYVELFPSTPEEASRAKSRGRH

SEQ ID NO: 422 - protein, 339 aa, Zea mays
MVRVGLSSAPGVNLTEQIDNVFDQLINKIEHADFDTRPFLKQLNVLGRYEPIKRNVYCTKRRIEDYGISCHCKPSPGSSVVCGRDCHCGMLFSCCSSQCECDDTCTNKSFQHRPLKKTKLIKTEKCGHGLVAEDEIKKGEFVIEYVGEVIDDRTCENRLWTMKRLLDTDFYLCEVSSNMVIDATNKGNRSRFINHSCEPNTAMQKWTVDGETRVGIFALRDIKIGEELTYDYKFVQFGAAQVCHCGSSNCRKMLGTTKYSGSSQNHHAKKKKRKTSCENCIQQFLRLWHPHKKMYVGCWIIDFDQETKMHTLKFNDLHTEKFNLKEEEWHFLEVDFDED

SEQ ID NO: 423 - protein, 833 aa, Saccharomyces cerevisiae
MNNAANTGTTNESNVSDAPRIEPLPSLNDDDIEKILQPNDIFTTDRTDASTTSSTAIEDIINPSLDPQSAASPVPSSSFFHDSRKPSTSTHLVRRGTPLGIYQTNLYGHNSRENTNPNSTLLSSKLLAHPPVPYGQNPDLLQHAVYRAQPSSGTTNAQPRQTTRRYQSHKSRPAFVNKLWSMLNDDSNTKLIQWAEDGKSFIVTNREEFVHQILPKYFKHSNFASFVRQLNMYGWHKVQDVKSGSIQSSSDDKWQFENENFIRGREDLLEKIIRQKGSSNNHNSPSGNGNPANGSNIPLDNAAGSNNSNNNISSSNSFFNNGHLLQGKTLRLMNEANLGDKNDVTAILGELEQIKYNQIAISKDLLRINKDNELLWQENMMARERHRTQQQALEKMFRFLTSIVPHLDPKMIMDGLGDPKVNNEKLNSANNIGLNRDNTGTIDELKSNDSFINDDRNSFTNATTNARNNMSPNNDDNSIDTASTNTTNRKKNIDENIKNNNDIINDIIFNTNLANNLSNYNFNNNAGSPIRPYKQRYLLKNRANSSTSSENPSLTPLISNLIMTAKFQKFLLMTKKKKKPDFRPFTSRDPNNQTSENTFDPNRFTMLSDDDLKKDSHTNDNKHNESDLFWDNVHRNIDEQDARLQNLENMVHILSPGYPNKSFNNKTSSTNTNSNMESAVNVNSPGFNLQDYLTGESNSPNSVHSVPSNGSGSTPLPMPNDNDTEHASTSVNQGENGSGLTPFLTVDDHTLNDNNTSEGSTRVSPDIKFSATENTKVSDNLPSFNDHSYSTQADTAPENAKKRFVEEIPEPAIVEIQDPTEYNDHRLPKRVKK

SEQ ID NO: 424 - protein, 912 aa, Zea mays
MNPDNFTHKTNEAIVGAHEIAVEAGHAQLTPLHLAAVLAADKGGILRQAITGASGGDGAAGDSFERVLNNSLKKLPSQSPPPDSVPASTALIKVIRRAQSAQKKRGDSHLAVDQLLLGLLEDSQISDCLKEAGVSAARVRAELEKLRGGEGRRVESASGDTNFQALKTYGRDLVEQAGKLDPVIGRDEEIRRVVRILSRRTKNNPVLIGEPGVGKTAVVEGLAQRIVRGDVPSNLLDVRLIALDMGALVAGAKYRGEFEERLKAVLKEVEEAEGKVILFIDEIHLVLGAGRTEGSMDAANLFKPMLARGQLRCIGATTLEEYRKYVEKDAAFERRFQQVFVAEPSVPDTVSILRGLKEKYEGHHGVRIQDRALVVAAQLSARYIMGRHLPDKAIDLVDEACANVRVQLDSQPEEIDNLERKRIQLEVELHALEKEKDKASKARLIEVRKELDDLRDKLQPLTMKYRKEKERIDEIRKLKQRREELQFTLQEAERRMDLARVADLKYGALQEIDAAISKLESETGENLMLTETVGPEQIAEVVSRWTGIPVTRLGQNDKERLVGLADRLHQRVVGQTEAVSAVAEAVLRSRAGLGRPQQPTGSFLFLGPTGVGKTELAKALAEQLFDDENLLVRIDMSEYMEQHSVARLIGAPPGYVGHEEGGQLTEQVRRRPYSVILFDEVEKAHVAVFNTLLQVLDDGRLTDGQGRTVDFRNTVIIMTSNLGAEHLLAGMVGKNSMKVARDLVMQEVRRHFRPELLNRLDEIVIFDPLSHEQLRKVARLQMKDVAVRLAERGIALAVTDAALDIILSLSYDPVYGARPIRRWIEKRVVTQLSKMLIQEEIDENCTVYIDAAPGKDELVYRVDRSGGLVNAETGMKSDILIQVPNSSTRSDAAQAVKKMRIMEEDEDGMDEE

SEQ ID NO: 425 - protein, 861 aa, Escherichia coli
MGGVMRLDRLTNKFQLALADAQSLALGHDNQFIEPLHLMSALLNQEGGSVSPLLTSAGINAGQLRTDINQALNRLPQVEGTGGDVQPSQDLVRVLNLCDNVAQKRGDNFISSELFVLAALESRGTVADILKAAGATTANITQAIEQMRGGESVNDQGAEDQRQALKKYTIDLTERAEQGKLDPVIGRDEEIRRTIQVLQRRTKNNPVLIGEPGVGKTAIVEGLAQRIINGEVPEGLKGRRVLALDMGALVAGAKYRGEFEERLKGVLNDLAKQEGNVILFIDELHTMVGAGKADGAMDAGNMLKPALARGELHCVGATTLDEYRQYIEKDAALERRFQKVFVAEPSVEDTIAILRGLKERYELHHHVQITDPAIVAAATLSHRYIADRQLPDKAIDLIDEAASSIRMQIDSKPEELDRLDRRIIQLKLEQQALMKESDEASKKRLDMLNEELSDKERQYSELEEEWKAEKASLSGTQTIKAELEQAKIAIEQARRVGDLARMSELQYGKIPELEKQLEAATQLEGKTMRLLRNKVTDAEIAEVLARWTGIPVSRMMESEREKLLRMEQELHHRVIGQNEAVDAVSNAIRRSRAGLADPNRPIGSFLFLGPTGVGKTELCKALANFMFDSDEAMVRIDMSEFMEKHSVSRLVGAPPGYVGYEEGGYLTEAVRRRPYSVILLDEVEKAHPDVFNILLQVLDDGRLTDGQGRTVDFRNTVVIMTSNLGSDLIQERFGELDYAHMKELVLGVVSHNFRPEFINRIDEVVVFHPLGEQHIASIAQIQLKRLYKRLEERGYEIHISDEALKLLSENGYDPVYGARPLKRAIQQQIENPLAQQILSGELVPGKVIRLEVNEDRIVAVQ

SEQ ID NO: 426 - protein, 872 aa, Synechocystis PCC6803
MQPTDPNKFTEKAWEAIAKTPEIAKQHRQQQIETEHLLSALLEQNGLATSIFNKAGASIPRVNDQVNSFIAQQPKLSNPSESIYLGRSLDKLLDNAEIAKSKYGDDYISIEHLMAAYGQDDRLGKNLYREIGLTENKLAEIIKQIRGTQKVTDQNPEGKYESLEKYGRDLTELAREGKLDPVIGRDEEVRRTIQILSRRTKNNPVLIGEPGVGKTAIAEGLAQRIINHDVPESLRDRKLISLDMGALIAGAKYRGEFEERLKAVLKEVTDSQGQIILFIDEIHTVVGAGATQGAMDAGNLLKPMLARGALRCIGATTLDEYRKYIEKDAALERRFQEVLVDEPNVLDTISILRGLKERYEVHHGVKIADSALVAAAMLSNRYISDRFLPDKAIDLVDEAAAKLKMEITSKPEELDEVDRKILQLEMERLSLQRENDSASKERLEKLEKELADFKEEQSKLNGQWQSEKTVIDQIRTVKETIDQVNLEIQQAQRDYDYNKAAELQYGKLTDLQRQVEALETQLAEQQTSGKSLLREEVLESDIAEIISKWTGIPISKLVESEKEKLLHLEDELHSRVIGQDEAVTAVAEAIQRSRAGLSDPNRPTASFIFLGPTGVGKTELAKALAKNLFDTEEALVRIDMSEYMEKHAVSRLMGAPPGYVGYEEGGQLTEAIRRRPYSVILFDEIEKAHGDVFNVMLQILDDGRLTDAQGHVVDFKNTIIIMTSNLGSQYILDVAGDDSRYEEMRSRVMDVMRENFRPEFLNRVDETIIFHGLQKSELRSIVQIQIQSLATRLEEQKLTLKLTDKALDFLAAVGYDPVYGARPLKRAVQKYLETAIAKGILRGDYKPGETIVVDETDERLSFTSLRGDLVIV

SEQ ID NO: 427 - protein, 861 aa, Xylella fastidiosa
MRMDKLTSRFQNALADAQSLAVGRDHTIIEPVHVFSALLDQQGGSTRPLLMQAGVNVPLLRERLTEILEALPKVSGQTVNVSPSNELSRLFHRTDKLAQQHGDQFMASEWFVLAVVDDSGGLGQALRAAGAEKKKIEAAIDKLRGGETVQTENAEEQRQALEKYTIDLTARAESGKLDPVIGRDEEIRRTIQVLQRRTKNNPVLIGEPGVGKTAIVEGLAQRIVNGEVPEGLRSKRLLSLDLGALIAGAKFRGEFEERLKGVLNDLAKNEGRVILFIDELHTMVGAGKADGAMDAGNMLKPALARGELHCIGATTLDEYRKYIEKDAALERRFQKVFVGEPTVEDTIAILRGLKEKYALHHGVEITDPAIVAAATLSNRYITDRQLPDKAIDLMDEAASRIRMEIDSKPEELDRLERRLIQLKIQREMLKKEKDEASKQRLADLERDIEVLDREFSDLEEVWRSEKAALQGATKIKESIEQAKLDLEAAQRRQDYAKMSEIQYGVLPALEKQLVAASQAEQHDFTLVQEKVTAEEIAEVVSRWTGIPVSKMLEGERDKLLRMEADLGRRVVGQEEAIKVVSDAVRRSRTGLSDPNRPSGSFLFLGPTGVGKTELCKALAEFLFDSQDAMVRIDMSEFMEKHSVARLIGAPPGYVGYEEGGYLTELVRRRPYSLILLDEVEKAHSDVFNILLQVLDDGRLTDGQGRTVDFRNTVIVMTSNLGSHQIQELSGDDSPEVYTQMKAAVMEVVQAHFRPEFINRLDDIVVFHPLDKAQIKQIARIQLQGLEKRLAESELKLDLDDRALELLGNVGFDPVYGARPLKRAIQSQLENPLAQQILAEAFVSGDTVQVGVDGGKLVFAKV

SEQ ID NO: 428 - protein, 391 aa, Zea mays
MAAFAALFDPLYCPEEHLDLYRDEPGEGADEQWPGQHGQQEPAVLDDELPALFEAHRAKEGVVLAEDGGYGGAAGREAAVGWVSRAAARLGLSALTAALAAAYLDRCFLPGGALRLGDQPWMARLAAVTCFALAAKVEETRVPPLLDLQLYAAADAADPYVFEAKTVRRMELLVLSALGWRMHPVTPFSYLQPVLADAATRLRSCEGVLLAVMADWRWPRHRPSAWAAAALLITAAAGDGGDGDGDTELLALINAPEDKTAECAKIISEVTGMSFLACDVGVSAGNKRKHAAAQLYSPPPSPSGVIGALSCFSCESSTSATAMAAAVGPWAPSASVSVSSSPEPPGRAPKRAAAASASASASAGVAPPVQVPHQLPPDEESRDAWPSTCAA

SEQ ID NO: 429 - protein, 347 aa, Aspergillus nidulans
MPSTTSRAAFEAVFPSLAEAMLDHARKYNLPQNAQEWFSKAIHTNVPGGKLNRGLSVPDTGVALLQKELSEEQYKDLATLGWLTELLQAFFLVSDDLMDGSITRRGQPCWYRHQGVGLIAINDAFLLESGIYVILKKQFRSHPAYVDFIELFHETTWQTELGQLCDLITAPEDKVDLNNFSMEKYMFIVTYKTAYYSFYLPVALALHYLQLATPENLRQAHDILIPLGQYFQVQDDYLDAYGDPEVIGKIGTDIQDNKCSWLVNQALQRCSAEQRKVLDAAYGRKDAEQEAKVKAIFRELDLESVYKEYEEKIVGELKTKIAAVNESEGLKKEVFEAFLGKIYKRSK

SEQ ID NO: 430 - protein, 353 aa, Oryza sativa
MAAAVVANGASGDSSKAAFAEIYSRLKEEMLEDPAFEFTDESLQWIDRMLDYNVLGGKCNRGISVIDSFKMLKGTDVLNKEETFLACTLGWCIEWLQAYFLVLDDIMDNSQTRRGQPCWFRVPQVGLIAVNDGIILRNHISRILQRHFKGKLYYVDLIDLFNEVEFKTASGQLLDLITTHEGEKDLTKYNLTVHRRIVQYKTAYYSFYLPVACALLLSGENLDNFGDVKNILVEMGTYFQVQDDYLDCYGDPEFIGKIGTDIEDYKCSWLVVQALERADENQKHILFENYGKPDPECVAKVKDLYKELNLEAVFHEYERESYNKLIADIEAHPNKAVQNVLKSFLHKIYKRQK

SEQ ID NO: 431 - protein, 355 aa, Zea mays
MATAEVVVANGSGGADTKTAFKEIYSKLKQEMLEDPAFEFTDESLQWIDRMLDYNVLGGKCNRGLSVVDSYKILKGVDVLSKEETFLACTLGWCIEWLQAYFLVLDDIMDNSQTRRGQPCWFRVPQVGLIAVNDGIILRNHISRILQRHFKGKPYYVDIIDLFNEVEFKTASGQMLDLITTHEGEKDLTKYNLTVHRRIVQYKTAYYSFYLPVACALLLAGENLENFVDVKNILVEMGTYFQVQDDYLDCFGDPEFIGKIGTDIEDYKCSWLVVQALERAAENQKSILFENYGKSDPACVAKVKDLYKELKLEEVFHEYERESYNKLIADIEAQPSKAVQTVLKSFLHKIYKRDK

SEQ ID NO: 432 - protein, 349 aa, Zea mays
MGERGAEEDGSGGSSLSLMCLEDGADLDAGGSAESADDGEPAVVAHSDAGEDQEEEYMDYLVSKESSFCCSPSSSPVSSDAGAETRPSSTASSSDEWFRCARHATVAWVLETRAYFGFSHRAAYLAVSYMDRFCLRRCMDVSVMPWAARLLAVACLSLAAKMEEYRAPALSEFRAHDDYDFSSVCIRRVELLVLSTLGWRMGGVTPLDYLPCLSFRLRRGGGGGLIAAKAAALIFSAAEAASVLDYRPSTVAVAAVLAAAHGAMTKEALECNMSSLTPSCLLDKDDVHACYSTMLSESSSPTPSKLADKRPPPSSSGSTMYESVDAASSFAATAGRSKRARLEMPAIGP

SEQ ID NO: 433 - protein, 349 aa, Zea mays
MMPVAAVDDWSERGFSLTCEEDCADLGNGVVDDDEFLPLYNAGEEEEEEYLEQLVFKETSLCSSSDSAADCDGDGEGDEEYPSLASEEWFRQARLAAVKWILETRGCFGFGHRTAYLAIAYFDSFLLRRRVDREAMPWAAQLLSVACVSVAAKMEECQVPALSEFHAGGYDFDSASIRRMELLVLSTLGWRMGAVTPLDFLPCFSSRVHPHGGAGAGGHVAHKAIGFIFATAEAGSVLDHRPSTVAAAAILAATYGPLLTKEALDSKMSYLSPSCLIEKEHVHACYSMMVGDNNRRGSKRSLPCSVSNEIATSTYHSVLVDDVTDTAAAFATAVSARNKRIRLELTGIS

SEQ ID NO: 434 - protein, 247 aa, Arabidopsis thaliana
MNIAHTIFGVFGNATALFLFLAPSITFKRIIKNKSTEQFSGIPYPMTLLNCLLSAWYGLPFVSKDNTLVSTINGTGAVIETVYVLIFLFYAPKKEKIKIFGIFSCVLAVFATVALVSLFALQGNGRKLFCGLAATVFSIIMYASPLSIMRLVVKTKSVEFMPFFLSLFVFLCGTSWFVYGLIGRDPFVAIPNGFGCALGTLQLILYFIYCGNKGEKSADAQKDEKSVEMKDDEKKQNVVNGKQDLQV

SEQ ID NO: 435 - protein, 291 aa, Oryza sativa
MEHIARFFFGVSGNVIALFLFLSPVVTFWRIIKKRSTEDFSGVPYNMTLLNCLLSAWYGLPFVSPNNILVTTINGTGSVIEAIYVVIFLIFAERKARLKMMGLLGLVTSIFTMVVLVSLLALHGQGRKLFCGLAATIFSICMYASPLSIMRLVIKTKSVEFMPFLLSLSVFLCGTSWFIYGLLGRDPFIAIPNGCGSFLGLMQLILYAIYRNHKGATPAAAAGKGDAADDVEMAEGRNNKVADGGAADDDSYGRRQGGHRSVALACVSNRLRFPACVLLLQVVILARPLLL

SEQ ID NO: 436 - protein, 244 aa, Oryza sativa
MVSNTIRVAVGILGNAASMLLYAAPILTFRRVIKKGSVEEFSCVPYILALFNCLLYTWYGLPVCLPSMGLAYCLRSHSSAYTHGLHPEKERQKFVLRMVLPVLAFFALTAIFSSFLFHTHGLRKVFVGSIGLVASISMYSSPMVAAKQVITTKSVEFMPFYLSLFSFLSSALWMIYGLLGKDLFIASPNFIGCPMGILQLVLYCIYRKSHKEAEKLHDIDQENGLKVVTTHEKITGREPEAQRD

SEQ ID NO: 437 - protein, 752 aa, Zea mays
MDSSGEELLKKIRELEVGQAQLKQEMSKLIPGAGERRRSQSVSPRRGVPVPPPPPAKAKAGAPGRRLSGGFEGGQRAWARGSASFPHSSPLQREGRAGAGDASTSARLPERQYSRVLQSMGQSVHILDLDGRIIYWNQSAENLFGYPASEALGQDALMLLVDSHDHNAVNNIFQRISMGESWTGKFPVKNKQGHRFSAVATNTPFYDEDGSLMGFICVSSDSRQLEQIFCKPPTSARSQSESSMTSCDGSCSNTSHRINSLNRSSFDSNLPLQSTLASKITNLATKVTNKVRSRVRTDENDDGGSGESHCLDRGAKEEPTSSGTSTPRGDAPHGPFATEENSPGKSTNPNSDESEGKVGLHKILGSKAEALLNKKGISWPWKGRENEGPDERNHVILPWLHGGQENGVNHQKVSDSSISPDAQGAEHNQPSKNEASGSWSSFNNNSTGSASSTGSTNSSALYKVDHEADCLDYEILWEDLVIGEQIGQGSCGTVYHALWYGSDVAVKVFSKQEYSEEVILTFRQEVSLMKKLRHPNILLFMGAVMSPQRLCIVSEFLPRGSLFRLLQRSATKLDVRRRVHMALDIVRGMNYLHHSSPPIIHRDLKSSNLLVDKNWIVKVADFGLSRLKRETFLTTKTGKGTPQWMAPEVLRNEPSDEKSDVYSYGVILWELVTQKIPWENLNSMQVIGAVGFMNQRLDIPSEVDPQWKSIILSCWESDPQQRPSFQELLERLRELQRHYAIQHRNTKNSIEE

SEQ ID NO: 438 - protein, 271 aa, Zea mays
PEELLPHGSSLPWEGFHYITNRVMDSSLIDSENSMPGCACSHPECSPENCGHVSLFDGVYNSLVDINGTPMHGRFAYDEDSKIILQEGYPIYECNSSCICDSSCQNKVLQKGLLVRLELFRSENKGWAIRAAEPILQGTFVCEYIGEVVKADKAMKNAESVSSKGGCSYLFSIASQIDRERVRTVGAIEYFIDATRSGNVSRYISHSCSPNLSTRLVLVESKDCQLAHIGLFANQDIAVGEELAYDYRQKLVAGDGCPCHCGTTNCRGRVY

SEQ ID NO: 439 - protein, 242 aa, Zea mays
MGQGGEVKAAPAVRVLVVDDSPVDRKVVELLLRNHNHQGGAAPFHVTAVDSGKKAMEHLRLMEQGGQLDSCAADANRITIDIVLTDYCMPEMTGYDLLKAIKALSSPNPIPVVVMSSENEPQRISRCLTAGAEDFILKPLKTKDVQRLRNCSSAARPRDDAAHQCESLRRSSRKLRSDQVAAPGHRSQPTTGLTMVLHASSIELSHYFQFLLKFVLLAYAVLCLTELLHRWSNGSVLSLWSA

SEQ ID NO: 440 - protein, 686 aa, Zea mays
MAAAEARGGEFPVGMKVLVVDDDPTCLVVLKRMLLECRYDVTTCPQATRALTMLRENRRGFDVIISDVHMPDMDGFRLLELVGLEMDLPVIMMSADSRTDIVMNGIKHGACDYLIKPVRMEELKNIWQHVIRKKFNENKDHEHSGSLDDTDRNRPTNNDNEYASSANDGGDGSWKSQRKKREKEDDETDLENGDPSSTSKKPRVVWSVELHQQFVNAVNHLGIDKAVPKKILELMNVPGLTRENVASHLQKFRLYLKRIAQHHAGIPHPFVAPVSSANVAPLGGLEFQALAASGQIPPQALAALQDELLGRPTSSLALPGRDQSSLRVAAIKGNKHHEEREIAFGQPIYKCQNNAYGAFPQNSPAVGGLQPFAAWPNNKVGMTDSTSTLGNVGNSQNSNMLLHELQQQPDTLLLGTLHNIDAKPSGVVMPSQSLNTFPASEGISPNQNPLIIPSQPPSFVSSIPPSMKHESLLGLPSTSTSLLGGLDMVNQASTSQALISSHGTNLPGLMNRSSNAIPSPGISNFQSGNIHYVVNQNAMGVSSKPPGVLKTESTDSLSCSYGYIGGSTSVDSGLFSSQSKNPQYGLLQNQNDVNGSWSPSQDFDSFGNSLGQGHPGTTSSNFQSSALGKLPDQGRGRNHGFVGKGTCIPSRFAVDEVESPTNNLSHSIGNSGDIVNHDIFGFSGHM

SEQ ID NO: 441 - protein, 746 aa, Zea mays
GNAALENGHHQAEADADEWREKEEDLANNGHSAPPPGMQQVDEHKEEQRQSIHWERFLPVKTLRVLLVENDDSTRQVVSALLRKCCYEVIPAENGLHAWRYLEDLQNNIDLVLTEVFMPCLSGIGLLSKITSHKICKDIPVIMMSTNDSMSMVFKCLSKGAVDFLVKPLRKNELKNLWQHVWRRCHSSSGSESGIQTQKCAKLNTGDEYENGSDSNHDDEENDDGDDDDFSVGLNARDGSDNGSGTQSSWTKRAVEIDSPQPISPDQLVDPPDSTCAQVIHPRSEICSNKWLPTANKRNVKKQKENKDESMGRYLGIGAPRNSSAEYQSSLNDVSVNPIEKGHENHMSKCKSKKETMAEDDCTNMPSATNAETADLISSIARNTEGQQAVQAVDAPDGPSKMANGNDKNHDSHIEVTPHELGLKRSRTNGATAEIHDERNILKRSDQSAFTRYHTSVASNQGGARYGESSSPQDNSSEAMKTDSTCKMKSNSDAAPIKQGSNGSSNNDVGSSTKNVAARPSGDRERVASPLAIKSTQHASAFHTIQNQTSPANLIGEDKADEGISNTVKMSHPTEVPQGCVQHHHHVHYYLHVMTQKQPSTDRGSSDVHCGSSNVFDPPVEGHAANYSVNGGVSVGHNGCNGQNGSSAVPNIARPNIESINGTMSQNIAGGGIVSGSGSGNDMYQNRFLQREAALNKFRLKRKDRNFGKKVRYQSRKRLAEQRPRVRGQFVRQSEQEDQTAQGSER

SEQ ID NO: 442 - protein, 631 aa, Zea mays
MGGGADEVVKVVDSEDGEGEEEEAEAAAAEGSSKETPMLPRMPVRVLLAEGDDSTRHVISALLRKCGYRVAAASDGVKAWDILKEKSFNIDLVLTEVELPLMSGFLLLSTIMEHDASKNIPVIMMSSHDSVSMVFKCMLKGAADFLVKPLRKNELRNLWQHVWRKQLANGGPDVQHIQEENLAERMEQKTGVTKADNLNSDGPHKNRECSEQESDAQSSCTRSELEAESKQTNNILEYMQSTERHLFIRSHKDLELNGETKTRTKGNNLIPTREDDLLPKKRTCLNDNDSERTSRDMELVHIMDNQQKHDTQRDVDTMRTTSRGNDEKNSIPAHQLELSLRRTDYGKLENHEKNDRRTLNHSTSSAFYLYNCRTASSLGNAGDGQLCSTSETLVDVENRNGDLAALSEDTTETNRPPIRVVPFPVPVQCFTFDGQPFWNGTPVASPFYPQSAPPIWNSKTPTWQESTPQATSLPQKSQQNEPVEMDAKPVENAEEQFVVGPPSASGKQLHVEIPKDGLRHISPVTGESGISTVLDSTRNTLSSSGCDSTSNRITASTEPSSNVYRGVPETARAEGLRHLSQREAALNKFRLKRKDRCFEKKVRYQSRKLLAEQRPRVKGQFVRQDHSIQGS

SEQ ID NO: 443 - protein, 631 aa, Zea mays
MTVDELKLQARASGGHGAKDQFPVGMRVLAVDDDPTCLKILENLLLRCQYHVTTTGQAATALKLLREKKDQFDLVISDVHMPDMDGFKLLELVGLEMDLPVIMLSANGETQTVMKGITHGACDYLLKPVRIEQLRTIWQHVVRRRSCDAKNSGNDNDDSGKKLQVVSAEGDNGGVNRNKRISRKGRDDNGDDGDDSDDNSNENGDSSSQKKPRVVWSVELHRKFVAAVNQLGIDKAVPKKILDLMNVENITRENVASHLQKYRLYLKRLSADASRQANLTAAFGGRNPAYVNMGLDAFRQYNAYGRYRPVPTTNHSQPNNLLARMNSPAFGMHGLLPSQPLQIGHNQNNLSTSLGNVGGMNNGNLIRGAHMPLQDTSKCFPTGPSGNSFANISNSTQLVTTNNLPLQSLEPSNQQHLGRLHSSADPFNSFVGEPPQFADLGRCNTTWPTAVSSSNVQEIGQKDRIVNRPKLEPLSSFTEASSQIPLLGSEMQSHQVASLASNGLPMPFTQEAVPFAYGSSTNSREMLNNNLALSNSGVNSTLPNLRIDGSVVPGQTLGGSNSGGCVVPPLQDGRIDHQAVSSHLNYNNELMGTGRLQRGLSGGLDDIVVDMFRPDRADDGVSFIDGDWELV

SEQ ID NO: 444 - protein, 584 aa, Zea mays
MALTDATAFPYGLRVLVVDDDPTWLKILEKMLRKCSYEVTTCGLASVAIQILRERRNKFDIVISDVNMPDMDGFKLLELIGLEMDLPVIMMSIDGETSRVMKGVQHGACDYLLKPVRMKELRNIWQHVYRKKMHEVKEIEGNDSYDDLQMFRNGVEGFDERDLFMRADSDTMRKRKDVNKDHADQDSSDGATVKKARVVWSVDLHQKFVNAVNQIGFDKVGPKKILDLMNVPGLTRENVASHLQKYRLYLSRLQKQNEERIMGAARQDFNQKGPSDHLNLRSSFQEQPGNLSNGCQHSSQKVEAQTNILDPHLDDTKTSMPLKVPDKNGISASDAVDPHNITTASPLSGVFSFERMPVNQDRKLSETMILECESWSGSVPPKQFMQYPKHNHERCDLLGDYSCLPKPDLEHPIAPGHLYAPPPVISMSYNVEKDVRDFSDVKPDLLGCMKSLSPALTCTVESVSAQLSDSVVTSTNSDRKFSSVEGLSSIKDCDFDQERNGAILFTSEEASILCGTDFTCLPEDLSGYQLQGVSFGNKGLNSIDLYQCNDTMLIPGLQNNWYDDDVEFSSETVEFPLLDGGLFA

SEQ ID NO: 445 - protein, 242 aa, Zea mays
MTVPDAESRFHVLAVDDSLVDRKLIEMLLKTSSYQVTTVDSGSKALELLGLRDASSPSPSSPDHQEIDVNLIITDYCMPGMTGYDLLKRVKGSSSLKDIPVVIMSSENVPARISRCLQDGAEEFFLKPVKLADMKKLKSHLLKRKQPKEAQAQAQAQAQQGQAVELEPEQQLDPRTQPAHDAEETAAEPPPAASNGTTDGGNKRKAAAMEEEGMLAVMTVAAPESSTKPRLSTTTSSLAVET

SEQ ID NO: 446 - protein, 244 aa, Zea mays
MEAGGAGAEGVMRVLLVDDSPVDRRVAQLLLSSNSCAGSFHVIAVDSAKKAMEFLGLKDGGKEQAIDMVLTDYCMPEMTGYDLLKAIKALNPLKPIPVIVMSSEDEPQRISRCLNAGAEDFIVKPLQSKDVQRLRNCSTVGRPSNKGGATLPCEENAVAKWSNNKLPPSAGAGAGASATSPSGRRANLAGVAMRQVLHSSSVEISQYLPLLLKLVVLAYAALCLGELLHRWSSGGSCSLSPWCA

SEQ ID NO: 447 - protein, 235 aa, Zea mays
MPSQSTHTSSSLSSSTAPILPCSSAAALFRSVMAAVATETPFHVLAVDDSLPDRKLIERLLKTSSFQVTTVDSGSKALQFLGLHDQDSTVPPVHTHQLDVAANQDVAVNLIITDYCMPGMTGYDLLKKIKESSSLRDIPVVIMSSENIPSRINRCLEEGADEFFLKPVRLSDMNKLKPHILKSRCNQEQHQQSDSHSGERRNPTISSSDSINNRKRKGAGTEEILPQLANRSRHS

SEQ ID NO: 448 - protein, 157 aa, Zea mays
MAAAATATPAVAPEAGDRKAVAPPVDAVDLELELEEKHVLAVDDSSVDRAVIAKILRSSKYRVTTVDSATRALELLALGLVPDVNMIITDYWMPGMTGYELLKHVKESSALRAIPVVIMSSENVPTRISRCLEEGAEDFLLKPVRPADVSRLCSRIR

SEQ ID NO: 449 - protein, 517 aa, Zea mays
MVGGGEGDRVGGGVGVGGGQQFVDRSKVRILLCDGDASSSREVLRLLCNCSYHVTCAKSPRQVINILNYEGGEIDIILAEVDLPVSKCFKMLKYIARNKDLRHIPIIMMSNRDEVSVVVKCLRLGAAEYLVKPLRTNELLNLWTHVWRRRRMLGLPEKNFFNDNFELVLSEPSDANTNSATLLSDETDDRPKENTNQETGTSNQLEYESNPSVAERDQRDKIGAPGSALDASQSSTPGRMFSRPIKTNLKVAESSAFLAYVKSSTPATSSFDSGLQRGDSRLDSLDNHGNCSSATDRSDTGTDVNIRNKEAFEMPVQYPMVCFSSSSMHMERSNEGHNDTSGTPPAYHFPFYYPGMVEHNMALSSVQNFQANINSAQAHTPPAMLHQYNVFSQCHSLPMISPFQFNTSGMSMHSSHLPTQNVWSSASSTPTPDETCNRSERRAAALAKFRQKRKERCFDKKVRYVNRKKLAETRLRVRGQFVRHASNMDIISTGDDISEDEDDDPTSREVDMISSPE

SEQ ID NO: 450 - protein, 181 aa, Zea mays
  unsure (1)..(181): unsure at all Xaa locations
PTRPPTRPAPHGTPGAESDEEIRRXVPEMGGASASASSGAGADERPKGEDGKQXAGGGGGAAXAGGKKRGRTAGDKEQNRLKRLLRNHVSAQQARERKKAYLTELEAKAKGLELRNAELEQRVSTLQNENNTLRQVIDVSGKEFKFTWASGRGELCDIYEERQSGEDGNGLLLECGSTWRK

SEQ ID NO: 451 - protein, 545 aa, Zea mays
MPIKFALENMSTQASNRSYRYPDRTQLPYHNGNPMHVGGNGNYCVQQNHDDVNYISSDDGSQSSSSRVQDFQAQFCTLDSSSANCVYPAHSSTSSQSISGSPLSQQESHSDHAYGSSPSASCITQVPTWTLKDLENVMLGPDSDIGSPDSSFLLDTALHGNNWRELLGIQTGDLRQVIVACGKAVDENAVYMDALMSELREMVSVSGEPMQRLGAYMLEGLIARLSFTGHALYKSLKCKEPVATSSELLSYMHLLYEICPFFKFGYMSANGAIAEAVKGEDIIHIIDFQIAQGSQWMTMIQALASRPGRRPYLRITGIDDSNSAHARGGGLDMVGQRLHRMAQSCGLPFEFNAVPAASHEVVFEDLCLRSGEAIVVNFAYQLHHTPDESVGIENHRDRILRMVKSLSPKVVTLVEQEANTNTAPFFLRYMETLDYYTAMFEAIDVACPRDDKKRISTEQHCVARDIVNLIACEGAERIERHEPFGKWRARLVMAGFRPYPLSPVVNRTIKTLLDSYHSHYRLEERDGILYLGWKNRKLVVSSAWC

SEQ ID NO: 452 - protein, 620 aa, Zea mays
NPLPCYHFDLEQAHSSCCRLAAVAAYMDTLFRLVSLQASEQQQQQQSASYNSRSTTSSGSRSSSHQTNASYNYYYHSNSSGGGGGGQYYYGQQHPQQHQHQQYYLEPYQQEECGNTHHLYMDEDFSSSSSSRQHFHSHGAVVQPPTSSTATPTAPTPSLSTSSTAAGAAHALFEAADLSFPPDLNLDFSSPASSSGGGAASSAAVGGGGGGRWASQLLLECARAVAGRDSQRVQQLMWMLNELASPYGDVEQKLASYFLQGLFARLTASGPRTLRTLAAASDRNTSFDSTRRTALRFQELSPWSSFGHVAANGAILESFLEAAAASPEPQRLHILDLSNTFCTQWPTLLEALATRSADDTPHLSITTVVSSAPSAPTAAVQRVMREIGQRMEKFARLMGVPFSFRAVHHAGDLAGLDLDALDLRDGGATTALAINCVNSLRGVVPGGARRRDAFAASLRRLDPRVVTVVEEEADLVAFDPGAPEESGDTEAAFLKVFGEGLRFFSAYMDSLEESFPKTSNERLALERGAGRAIVDLVSCPASESMERRETAASWARRMRSSGFSPVAFSEDVADDVRSLLRRYREGWSMRDAGLDDSAAGAGVFLAWKEQPLVWASAWRP

SEQ ID NO: 453 - protein, 380 aa, Zea mays
MASVAELKEKHAAATASVNSLRERLRQRRETLLDTDVARYSKSQGRVPVSFNPTDLVCCRTLQGHSGKVYSLDWTPEKNWIVSASQDGRLIVWNALTSQKTHAIKLHCPWVMACAFAPNGQSVACGGLDSACSIFNLNSQADRDGNMPVSRILTGHKGYVSSCQYVPDQETRLITSSGDQTCVLWDVTTGQRISIFGGEFPSGHTADVQSVSINSSNTNMFVSGSCDTTVRLWDIRIASRAVRTYHGHEDDVNSVKFFPDGHRFGTGSDDGTCRLFDMRTGHQLQVYSREPDRNSNELPTVTSIAFSISGRLLFAGYSNGDCYVWDTLLAEVVLNLGNLQNSHDGRISCLGMSSDGSALCTGSWDKNLKIWAFSGHRKIV

SEQ ID NO: 454 - protein, 259 aa, Glycine max
MSVEKERETQVYLAKLAEQAERYEEMVECMKKVAKLDLDLTVEERNLLSVGYKNVIGARRASWRIMSSIEQKEESKGNEHNVKLIKSYCQKVEEELSKICGDILTIIDQHLIPSSGSAEASVFYYKMKGDYFRYLAEFKTDQERKEAAEQSLKGYEAASATANTDLPSTHPIRLGLALNFSVFYYEIMNSPERACHLAKQAFDEAIAELDTLSEESYKDSTLIMQLLRDNLTLWTSDLPEDGGEDNIKAEEAKPSEPEH

SEQ ID NO: 455 - protein, 261 aa, Glycine max
MTASKDRENFVYIAKLAEQAERYEEMVESMKNVANLDVELTVEERNLLSVGYKNVIGARRASWRILSSIEQKEETKGNELNAKRIKEYRQKVELELSNICNDVMRVIDEHLIPSAAAGESTVFYYKMKGDYYRYLAEFKSGNEKKEAADQSMKAYESATAAAEADLPPTHPIRLGLALNFSVFYYEILNSPERACHLAKQAFDEAISELDTLNEESYKDSTLIMQLLRDNLTLWTSDIPEDGEDAQKVNGTAKLGGGEDAE

SEQ ID NO: 456 - protein, 262 aa, Glycine max
MAASAPTPREEFVYMAKLAEQAERYEEMVEFMEKVSASAESEELTVEERNLLSVAYKNVIGARRASWRIISSIEQKEESRGNEDHVAVIRDYRSKIEAELSNICDGILKLLDTRLVPSAASGDSKVFYLKMKGDYHRYLAEFKTGADRKEAAESTLSAYKAAQDIANTELPPTHPIRLGLALNFSVFYYEILNSPDRACSLAKQAFDEAIAELDTLGEESYKDSTLIMQLLRDNLTLWTSDMQDDGADEIKEAAPKGDGEQN

SEQ ID NO: 457 - protein, 708 aa, Oryza sativa
MPFSYAAAASGSASSSRKPVPVAAAAARRPAPSPAAAAAPAPSPSNPSAVSDSDPSSYSSSGEETDLTASDPAAASVISSYLSVAGDGADLSKVGIFLSSAARRRSPPCLICFDPIRPSDPVWSCSASCFALLHLHCIQSWAHQSSSAAPSPTWGCPKCRFPYPKSQTPTSYLCFCSKTVDPAPDPWILPHSCGDVCGRRLNADRDSGCEHNCLLLCHPGPCPPCPAIVPNAMCFCGSHRETRRCSHQRYSCSGKCNKRLGCGIHRCPVDCHDGPCPPCAVRGKHKCECGETMEERLCSERVFQCKRECGGMLQCGKHSCERGCHAGKCGGCPLQGRRTCPCGKKDYPSLDCDAEAATCGSTCEKVLGCGRHKCPERCHRGSCVETCRLVITKSCRCGGLKKEVPCYQELTCERKCQRLRNCGRHACRRRCCEGDCAPCPEPHKCHYGACPPCKLICGEELSCGHRCKLRCHGPIAPPNPEFTLKPIKRKKGKHIDSTPGTPCPPCQEVVLVPCFGHHLGQERAILCSKRRQFPCQNLCENYRIVPICAQKYVTLVNVRCACNNLKKEWICQDVLKEYRQSGRDPKQIPKNQYAVGLLACGEDCVKKVKAADSELHLRKIQEIKTPAVEVENVPKRRKRRNRGQESVESSKFQEIKAVALKFLLVIFLCIIVVAGLYLLWKGVYRLSDWMNDMEEQRARQRHLKPGRL

SEQ ID NO: 458 - protein, 379 aa, Oryza sativa
MVEVEEVSNKMQVQMRLHPAAAAEEEDADLPLPALFDKASHLHSLASSSSLDQEGIRKGVDLLRRCDEMVSKVGLFSSNETKDDISTANLKYLLVPYYLGEMTERVAQEDRIPVLKASQDHLKEFISICEALELISEDELEISRQKNLIPWQIEEHRRLHGSSAKRLQKQSSRIKERKERRRRHESSCLSAPIELGGDLLRMMEKEREGMVSYYLIGSIEGFDLLDMLKKEEEIVPAVKEGKRRMVMHLLVKCLMNVQKGLKHGTIMLPTVHHTPNQLIQSLVQLTSERERMAAQVFQPSYRLPTMSIEEAGLREMKMMEKWQERTAKMIQESNSAWHKDGSRSAQEDEDAEEEKARGWDDWKDDNPRGAGNKKLTPCG

SEQ ID NO: 459 - protein, 267 aa, Saccharomyces cerevisiae
MSTSREDSVYLAKLAEQAERYEEMVENMKTVASSGQELSVEERNLLSVAYKNVIGARRASWRIVSSIEQKEESKEKSEHQVELICSYRSKIETELTKISDDILSVLDSHLIPSATTGESKVFYYKMKGDYHRYLAEFSSGDAREKATNASLEAYKTASEIATTELPPTHPIRLGLALNFSVFYYEIQNSPDKACHLRKQAFDDAIAELDTLSEESYKDSTLIMQLLRDNLTLWTSDMSESGQAEDQQQQQQHQQQQPPAAAEGEAPK

SEQ ID NO: 460 - protein, 406 aa, Oryza sativa
MAAAATTSSHLLLLSRQQAAASLQCGLSFRRQPGRLAGGSSAPSVRCMAAVDTASAPAATEASKKSSYEITTLTTWLLKQEQAGTIDGEMTIVLASISTACKQIASLVQRAPISNLTGVQGAVNVQGEDQKKLDVVSNEVFSNCLKSSGRTGVIASEEEDVPVAVEESYSGNYIVVFDPLDGSSNIDAAVSTGSIFGIYSPNDECLADIADDQNLDQVEQRCIVSVCQPGSNLLAAGYCMYSSSVIFVLTIGTGVYVFTLDPMYGEFVLTQEKVQIPKAGKIYAFNEGNYALWDDKLKSYMDSLKEPGPSGKPYSARYIGSLVGDFHRTLLYGGIYGYPRDQKSKNGKLRLLYECAPMSFIVEQAGGKGSDGHQRILDIMPTEIHQRVPLYIGSVEEVEKVEKFLA

SEQ ID NO: 461 - protein, 363 aa, Escherichia coli
FAGAIHLSATLRLFVKIVAVALLHKHCRESFMKTLGEFIVEKQHEFSHATGELTALLSAIKLGAKIIHRDINKAGLVDILGASGAENVQGEVQQKLDLFANEKLKAALKARDIVAGIASEEEDEIVVFEGCEHAKYVVLMDPLDGSSNIDVNVSVGTIFSIYRRVTPVGTPVTEEDFLQPGNKQVAAGYVVYGSSTMLVYTTGCGVHAFTYDPSLGVFCLCQERMRFPEKGKTYSINEGNYIKFPNGVKKYIKFCQEEDKSTNRPYTSRYIGSLVADFHRNLLKGGIYLYPSTASHPDGKLRLLYECNPMAFLAEQAGGKASDGKERILDIIPETLHQRRSFFVGNDHMVEDVERFIREFPDA

SEQ ID NO: 462 - protein, 388 aa, Synechocystis PCC6803
MDSTLGLEIIEVVEQAAIASAKWMGKGEKNTADQVAVEAMRERMNKIHMRGRIVIGEGERDDAPMLYIGEEVGICTREDAKSFCNPDELVEIDIAVDPCEGTNLVAYGQNGSMAVLAISEKGGLFAAPDFYMKKLAAPPAAKGHVDIDKSATENLKILSDCLNRSIEELVVVVMDRPRHKELIQEIRNAGARVRLISDGDVSAAISCAFSGTNIHALMGIGAAPEGVISAAAMRCLGGHFQGQLIYDPEVVKTGLIGESREGNLERLASMGIKNPDQVYNCEELACGETVLFAACGITPGTLMEGVRFFHGGVRTQSLVISSQSSTARFVDTVHMKGKPQSNPTALISLSATIPKKVKTWGNTSPFPLSPEVQTLGDLCFGWVIVTGV

SEQ ID NO: 463 - protein, 347 aa, Synechocystis PCC6803
MTVSEIHIPNSLLDRDCTTLSRHVLQQLNSFGADAQDLSAIMNRIALAGKLIARRLSRAGLMADVLGFTGETNVQGESVKKMDVFANDVFISVFKQSGLVCRLASEEMEKPYYIPENCPIGRYTLLYDPIDGSSNVDINLNVGSIFAIRQQEGDDLDGSASDLLANGDKQIAAGYILYGPSTILVYSLGSGVHSFILDPSLGEFILAQENIRIPNHGPIYSTNEGNFWQWDEALRDYTRYVHRHEGYTARYSGALVGDIHRILMQGGVFLYPGTEKNPDGKLRLLYETAPLAFLVEQAGGRASDGQKRLLDLIPSKLHQRTPAIIGSAEDVKLVESFISDHKQRQGN

SEQ ID NO: 464 - protein, 434 aa, Saccharomyces cerevisiae
MATLEELDAQTLPGDDELDQEILNLSTQELQTRAKLLDNEIRIFRSELQRLSHENNVMLEKIKDNKEKIKNNRQLPYLVANVVEVMDMNEIEDKENSESTTQGGNVNLDNTAVGKAAVVKTSSRQTVFLPMVGLVDPDKLKPNDLVGVNKDSYLILDTLPSEFDSRVKAMEVDEKPTETYSDVGGLDKQIEELVEAIVLPMKRADKFKDMGIRAPKGALMYGPPGTGKTLLARACAAQTNATFLKLAAPQLVQMYIGEGAKLVRDAFALAKEKAPTIIFIDELDAIGTKRFDSEKSGDREVQRTMLELLNQLDGFSSDDRVKVLAATNRVDVLDPALLRSGRLDRKIEFPLPSEDSRAQILQIHSRKMTTDDDINWQELARSTDEFNGAQLKAVTVEAGMIALRNGQSSVKHEDFVEGISEVQARKSKSVSFYA

SEQ ID NO: 465 - protein, 1729 aa, Saccharomyces cerevisiae
MVASTKRKRDEDFPLSREDSTKQPSTSSLVRNTEEVSFPRGGASALTPLELKQVANEAASDVLFGNESVKASEPASRPLKKKKTTKKSTSKDSEASSANSDEARAGLIEHVNFKTLKNGSSLLGQISAITKQDLCITFTDGISGYVNLTHISEEFTSILEDLDEDMDSDTDAADEKKSKVEDAEYESSDDEDEKLDKSNELPNLRRYFHIGQWLRCSVIKNTSLEPSTKKSKKKRIELTIEPSSVNIYADEDLVKSTSIQCAVKSIEDHGATLDVGLPGFTGFIAKKDFGNFEKLLPGAVFLGNITKKSDRSIVVNTDFSDKKNKITQISSIDAIIPGQIVDLLCESITKNGIAGKVFGLVSGVVNVSHLRTFSEEDLKHKFVIGSSIRCRIIACLENKSGDKVLILSNLPHILKLEDALRSTEGLDAFPIGYTFESCSIKGRDSEYLYLALDDDRLGKVHSSRVGEIENSENLSSRVLGYSPVDDIYQLSTDPKYLKLKYLRTNDIPIGELLPSCEITSVSSSGIELKIFNGQFKASVPPLHISDTRLVYPERKFKIGSKVKGRVISVNSRGNVHVTLKKSLVNIEDNELPLVSTYENAKNIKEKNEKTLATIQVFKPNGCIISFFGGLSGFLPNSEISEVFVKRPEEHLRLGQTVIVKLLDVDADRRRIIATCKVSNEQAAQQKDTIENIVPGRTIITVHVIEKTKDSVIVEIPDVGLRGVIYVGHLSDSRIEQNRAQLKKLRIGTELTGLVIDKDTRTRVFNMSLKSSLIKDAKKETLPLTYDDVKDLNKDVPMHAYIKSISDKGLFVAFNGKFIGLVLPSYAVDSRDIDISKAFYINQSVTVYLLRTDDKNQKFLLSLKAPKVKEEKKKVESNIEDPVDSSIKSWDDLSIGSIVKAKIKSVKKNQLNVILAANLHGRVDIAEVFDTYEEITDKKQPLSNYKKDDVIKVKIIGNHDVKSHKFLPITHKISKASVLELSMKPSELKSKEVHTKSLEEINIGQELTGFVNNSSGNHLWLTISPVLKARISLLDLADNDSNFSENIESVFPLGSALQVKVASIDREHGFVNAIGKSHVDINMSTIKVGDELPGRVLKIAEKYVLLDLGNKVTGISFITDALNDFSLTLKEAFEDKINNVIPTTVLSVDEQNKKIELSLRPATAKTRSIKSHEDLKQGEIVDGIVKNVNDKGIFVYLSRKVEAFVPVSKLSDSYLKEWKKFYKPMQYVLGKVVTCDEDSRISLTLRESEINGDLKVLKTYSDIKAGDVFEGTIKSVTDFGVFVKLDNTVNVTGLAHITEIADKKPEDLSALFGVGDRVKAIVLKTNPEKKQISLSLKASHFSKEAELASTTTTTTTVDQLEKEDEDEVMADAGFNDSDSESDIGDQNTEVADRKPETSSDGLSLSAGFDWTASILDQAQEEEESDQDQEDFTENKKHKHKRRKENVVQDKTIDINTRAPESVADFERLLIGNPNSSVVWMNYMAFQLQLSEIEKARELAERALKTINFREEAEKLNIWIAMLNLENTFGTEETLEEVFSRACQYMDSYTIHTKLLGIYEISEKFDKAAELFKATAKKFGGEKVSIWVSWGDFLISHNEEQEARTILGNALKALPKRNHIEVVRKFAQLEFAKGDPERGRSLFEGLVADAPKRIDLWNVYVDQEVKAKDKKKVEDLFERIITKKITRKQAKFFFNKWLQFEESEGDEKTIEYVKAKATEYVASHESQKADE

SEQ ID NO: 466 - protein, 995 aa, Oryza sativa
MGAANFAHSLADKPKQMPERLANTIFTSCASTLPKCSPSIDVLHIGHIKEHFSAEVIWHHKHYGQILPGDAYQNDSSQPSTSGSSSSLSAVWDQTTCSSAMRTLPMDSFSTVNGQNLSTNNKSLYPTTGQGPLLQQYIECEMKQETWSRSLEQSDQSNITTGNRDLYHAQIHPYINGEHKRDRCIQMKEKLGHTSDHEGFSREKSSNLSNHFMHHQQGFMTNYGACSPVSKTVDRAEQTSNSTVSKPTSPASDGSSGKHYPAKRLKVDVPHLVHVNEMEASKEQQPAANETYASAETVQSEVTNSPTKSPCCTSLGDNIACTDNVHGMDMVRLSGSAVQTEEEFRRENSDIEMKDAKVDLLDQTLSGDSLRARKRRGASVLYALTSEELKDHLCTLNHDTSQSKVPTEELLSVEGLPDQNTCNLCGMERLLFEPPPRFCALCFKIINSTGSYYVEVENGNDKSSICGRCHHLSSAKAKYQKRFSYAETDAEAEWWVQCDKCKAWQHQICALFNPKIVDPEAEYTCAKCFLKEKDNEDVDSLEPSTILGARELPRTRLSDHIEQRLSERLVQERQQRAIASGKSVDEVVPGVEGLTVRVVSSADRTLQVQPRFKDFFKKEQYPGEFPYKSKAILLFQKNEGVDVCLFAMYVQEYGSACPSPNQRHVYLAYIDSVKYFRPEIKSASGEALRTFVYHEILIGYLDFCKKRGFVSCSIWTCPSTKRDDYVLYCHPTIQKMPKSDKLRSWYQNLVKKAVKEGVVVERNTLYDFFLQPTNECKTNISAAWLPYCDNDFWPGEAERLLEKKDDDTSQKKETQLGRLLRVAKRDDRKGNLEDILLVHKLGERLRTMKEDFLMLCLQQFCKHCHHPIVSGSSWVCTSCKNFFLCERCYAEELNTPLKDRHPATTKQKHAFERIEEEPLPETDDVDPTMESKNCSSMVYDVIPVPVVEEVAICVYSCGNCCSRTHCFVTMQTVQLPDAGKVCITRNIDLPSGVVK

SEQ ID NO: 467 - protein, 833 aa, Oryza sativa
MVVVDASEFGAEGFDPKRWINAALDARHPSEPLDRFLADAEERLRSAADDAAAALERDSADALRRVPLACRDALRLRDDAVSLRSHLASVLQSLSQAEGSSAESITALARIDTVKQRMEAAYATLQDAAGLAQLSQSVEDVFSSGDLPKAAETLATMRHCLSAVGEVAEFANVRKQLEVLEERLDDMVQPRLVDALSNRKVDAVQDLRGILIRIGRFKSLEVQYTKIHVKPLKKLWEDFDLKQRAKRVEMEKYGGESINSLSFASWLPNFYDETLLYLEQEWKWCLTAFPEEYKSLVPKVLVETMSELNSSFVSRVNLATGDAVPETRSVAKGILDVLSGDLPKSTKLQNKHLGALIDLHNMTGTFARNIQHLFSESDLLVLLNTLKAIYSPYETFKARYGQMERALLSAEMAGIDIRGAIARGVGAQGIELSETVRRMEESIPQIIVLLEAAVERCISLTGGSEADELVLALDDIMLQYISNLQETLKSLRIVCGVDNTAHSDSSKKEAGLEKKEAQRLVDVSEEEEWSIVQGALQILTVADCLTSRTSVFEASLRATLARIGTNFSISGFGSSLDKSTAANGDENAEVPITGRAALDIAAIRLTDLPDKSKKLFTVLEQANNISVIQSKDPRFHALPLTSQRVAAFSDTVNELVYDVLISKVRQRLNEVARLPIWSSVEEPGGLPLPSFSAYPQAYVTSVGEYLLTLPQQLEPLAEGISGGEAGNEEAQFFATEWIFKVAEGATALFMEQLRGIHYITDRGAQQLAADIEYLSNVLSALSMPIPPFLATFHTCISTPRDQVRDLIKSDGGSQLDLPTAHLVCKIRRISSSD

SEQ ID NO: 468 - protein, 243 aa, Zea mays
MASADLLRKEEEFYSSLFDSAKGDGVKSRSQVIERKIESLEDMATKVSNRRSRRWLNDRLLIELVPRLHVEEIKGLFAPPPWGEELPLSAFCRTSVSDWEAFRSIDMDAEARLMQHMKRSSEKQRTHVDEDELIALNAWRRIGRQTREAIKKKFLPDLLQIYEEQVRAFIEGTGDSDVLVLNVQDPFQRLLLHGVCEFYNVTSMTTSSVRDGKPWKSTTIKKRHVTGLPPRITLVSFLRMRKN

SEQ ID NO: 469 - protein, 201 aa, Zea mays
MSRHPEVKWAQRIDKVYITVQLPDAKDAKVNLEPDGVFTFSGSVGTNLYELKLDLNDKVNVEASKISVGVRSIFCIVEKAEAKWWKKLVRDDQRAPHFVKVDWDKWVDEDDDGADVNLDGMDFSNFGGMGGMGGMGGMGDMAGLGGLGGMGGMGGMGGMGMDDFEDDSDEEEVSKPQAAGHAAEAEKTESAEAKTESAQSS

SEQ ID NO: 470 - protein, 553 aa, Zea mays
MDEDFEMPPAGADEMMGDDEMGDFGGDEGPVMKVGEEKEVGKEGLKKKLLKEGEGWETPEVGDEVEVHYTGTLLDGTKFDSSRDRGEPFKFKLGQGQVIKGWDQGIKTMKKGENAIFTIPPELAYGASGSPPTIPPNATLQFDVELLSWTSVKDICKDGGIFKKILKEGEKWENPKDPDEVLVKYEARLEDGTVVSKSEGVEFTVKDGYFCPALAKAVKTMKKAEKVLLTVKPQYGFGEKGRPAAGEEGAVPPNASLLIDLELISWKTVTEIGDDKKILKKVLKEGEGYERPNEGAVVEVKIIGKLQDGAVFTKKGHDEEPFKFKTDEEEVIAGLDRAVLNMKKGEVALVTIPPEYAFGSTESKQDLAVVPPNSTVIYEVELISFVKDKESWDLNNEEKIEAAGKKKEEGNALFKSGKYARASKRYEKAAKYIEYDTSFSEDEKKQSKQLKISCNLNNAACKLKLKDYKEAAKLCTKVLELDSQNVKALYRRVQAYIQLADLELAEADIKKALEIDPDNRDVKLEYKILKEKIKEYNKKDAKFYSNMFAKMTK

SEQ ID NO: 471 - protein, 589 aa, Saccharomyces cerevisiae
MSLTADEYKQQGNAAFTAKDYDKAIELFTKAIEVSETPNHVLYSNRSACYTSLKKFSDALNDANECVKINPSWSKGYNRLGAAHLGLGDLDEAESNYKKALELDASNKAAKEGLDQVHRTQQARQAQPDLGLTQLFADPNLIENLKKNPKTSEMMKDPQLVAKLIGYKQNPQAIGQDLFTDPRLMTIMATLMGVDLNMDDINQSNSMPKEPETSKSTEQKKDAEPQSDSTTSKENSSKAPQKEESKESEPMEVDEDDSKIEADKEKAEGNKFYKARQFDEAIEHYNKAWELHKDITYLNNRAAAEYEKGEYETAISTLNDAVEQGREMRADYKVISKSFARIGNAYHKLGDLKKTIEYYQKSLTEHRTADILTKLRNAEKELKKAEAEAYVNPEKAEEARLEGKEYFTKSDWPNAVKAYTEMIKRAPEDARGYSNRAAALAKLMSFPEAIADCNKAIEKDPNFVRAYIRKATAQIAVKEYASALETLDAARTKDAEVNNGSSAREIDQLYYKASQQRFQPGTSNETPEETYQRAMKDPEVAAIMQDPVMQSILQQAQQNPAALQEHMKNPEVFKKIQTLIAAGIIRTGR

SEQ ID NO: 472 - protein, 385 aa, Saccharomyces cerevisiae
MSSVNANGGYTKPQKYVPGPGDPELPPQLSEFKDKTSDEILKEMNRMPFFMTKLDETDGAGGENVELEALKALAYEGEPHEIAENFKKQGNELYKAKRFKDARELYSKGLAVECEDKSINESLYANRAACELELKNYRRCIEDCSKALTINPKNVKCYYRTSKAFFQLNKLEEAKSAATFANQRIDPENKSILNMLSVIDRKEQELKAKEEKQQREAQERENKKIMLESAMTLRNITNIKTHSPVELLNEGKIRLEDPMDFESQLIYPALIMYPTQDEFDFVGEVSELTTVQELVDLVLEGPQERFKKEGKENFTPKKVLVFMETKAGGLIKAGKKLTFHDILKKESPDVPLFDNALKIYIVPKVESEGWISKWDKQKALERRSV

SEQ ID NO: 473 - protein, 229 aa, Zea mays
MAAARRLSLPLVLLVVLAVAGRAAAQDYDFFYLVLQWPGAYCDTKQSCCYPKSGKPAADFGIHGLWPNRDDGTYPQNCSPDNAFNPSKVSDLMSSLRAKWPTLACPSNDGLRFWGHEWEKHGTCAADVFDEHGYFQAALRLRDQLGVLGALTSAGVKPDGGYYTLSQIKGAIRQGTGFEPYVECNRDEAGNSQLYQLYFCVDAAGDSFVDCPVLPSGRPCGNRIEFPAF

SEQ ID NO: 474 - protein, 701 aa, Zea mays
MRLSSSLQDLPTFTRIDALERGSSVGSDLSSGRPKPVRMLQRDGAVASFSKERTPPSSPTNRKKCMRAAGCAIALILLVFFAYGSWRYFHVFLSEGRSEYYVVLDCGSTGTRVYVYEWHINHNDANAFPIVLKPLGNAPKKKSGKLTRLYQRMETEPGLSKLVHNESGLKKAIEPLLQMAEKLIPRHAHKHTPLFLYATAGVRKLPSADSEWLLDKSWDILNNSSFLCSRDRVKIISGMDEAYYGWIALNHNMDMLGTSSSKMTYGSLDLGGSSLQVTFENDKSVQDETSIRLSIGSVEHHLSAYSLTGYGLNDAFDKSVAHLVKRLGGVASNGKVQVKHPCLQTGFKEDYICSYCHPLKQDGSPSVGEKNSGKEKQGIAVELVGAPQWNECSALAKVTVNLSEWSSASPGLDCNIHPCALASNFPRPYGQFFAISGFYVVFKFFNLTADATLGDVQKRGQEFCEKPWKVAKSSVPPQPFVEQYCFRAPYISSLLREGLQIKDSQVIIGSGSITWTHGVALLEAGQALSSRLDIQGYRILHREINPNILIVLFLISIVLVICAILCVSNSIPRSFRKSYLPIHRHNSGGSSVLGMGLPFKHLLWNPISSGDGRTKTPLSPTVAGSDPHPFAGLGGSSVELMESSRQSLGAYHSYSVGSLGQMQFSSGVRNPSRGQTTLQSRRSQSREDLSSSLADIHFPKV

SEQ ID NO: 475 - protein, 467 aa, Saccharomyces cerevisiae
MFKSVVYSILAASLANAGTIPLGKLADVDKIGTQKDIFPFLGGAGPYYSFPGDYGISRDLPEGCEMKQLQMVGRHGERYPTVSLAKTIKSTWYKLSNYTRQFNGSLSFLNDDYEFFIRDDDDLEMETTFANSDDVLNPYTGEMNAKRHARDFLAQYGYMVENQTSFAVFTSNSKRCHDTAQYFIDGLGDQFNITLQTVSEAESAGANTLSACNSCPAWDYDANDDIVNEYDTTYLDDIAKRLNKENKGLNLTSTDASTLFSWCAFEVNAKGYSDVCDIFTKDELVHYSYYQDLHTYYHEGPGYDIIKSVGSNLFNASVKLLKQSEIQDQKVWLSFTHDTDILNFLTTAGIIDDKNNLTAEYVPFMGNTFHRSWYVPQGARVYTEKFQCSNDTYVRYVINDAVVPIETCSTGPGFSCEINDFYDYAEKRVAGTDFLKVCNVSSVSNSTELTFYWDWNTTHYNASLLRQ

SEQ ID NO: 476 - protein, 533 aa, Glycine max
MAGELGVLNALDVAKTQWYHFTAIVIAGMGFFTDAYDLFCISLVTKLLGRLYYTEPGAPKPGSLPPRVQASVTGVALCGTLAGQLFFGWLGDKMGRKRVYGLTLILMVVCSLASGLSFGSTPEGVMASLCFFRFWLGFGIGGDYPLSATIMSEYANKKTRGAFIAAVFAMQGFGILAGGVVALIVSYAYDQKYKLPSYEQNPEASLDPAFDYVWRIVLMFGAVPAALTYYWRMKMPETARYTALVAKNAKQAAADMSKVLQVELEAEEEKVKKLTENESNKYGLFTKEFVKRHGLHLLGTTTTWFLLDIAFYSQNLFQKDIFSAIGWIPPAKEMNAIHEVYKIARAQTLIALCSTVPGYWFTVALIDYMGRFAIQLLGFFFMTVFMFALAIPYDHWSEKENRIGFVVMYSFTFFFANFGPNSTTFVVPAEIFPARLRSTCHGISAAAGKAGAIVGAFGFLYAAQSKDPSKTDAGYPTGIGIKNSLIMLGVINFIGMLFTLLVPESKGKSLEELSGENGENDAEHAVSARTVPV

SEQ ID NO: 477 - protein, 541 aa, Zea mays
MARGGDGLQVLSALDAAKTQWYHFTAIIVAGMGFFTDAYDLFCISLVTKLLGRIYYTDTSKDNPGSLPPNVAAAVNGVAFCGTLAGQLFFGWLGDKLGRKSVYGMTLMLMVICSVASGLSFGHTPTGVMATLCFFRFWLGFGIGGDYPLSATIMSEYANKKTRGAFIAAVLAMQGFGILAGGIVTLVISAAFRAGYPAPAYRDDHFNSTVPQADYVWRIILILGAAPAMLTYYWRMKMPETARYTALVAKNAKQAAADMSRVLQTEIVDEQEKLDEMVTAESNTFGLFSREFARRHGLHLVGTSTTWFLLDIAFYSQNLFQKDIFTSINWIPKANTMSALEEVFRISRAQTLIALCGTVPGYWFTVALIDVVGRFAIQLLGFFMMTVFMLGLAIPYHHWTTPGNHIGFVVMYAFTFFFANFGPNSTTFIVPAEIFPARLRSTCHGISAASGKAGAIIGAFGFLYAAQNQDKSKADAGYPAGIGVRNSLFVLAASNLLGFILTFLVPESKGKSLEEMSGEADDAEDDAVGTRAVRPSGTQMV

SEQ ID NO: 478 - protein, 429 aa, Xylella fastidiosa
MSDLDKVTLNAGETSLVLPVLKPTLGNGCVDIAKLTKETGLFTYDSGFTATASCKSAITYIDGEKGVLLYRGYPIEQLAEHSSFLEVAYLLMNGELPRKDEFAKFDDEITHHTMMHESLKNFLGGFHYDAHPMAMLAASVASLSAFYHDTLDLNDLEQRRLAAIRLIAKVPTLAAAAHRYSIGWPIRYPRNNLGYVERFLHMMFEVPSEPLQLNPVVTKALDLLFILHADHEQNASTSTVRLVGSTGANPYASVAAGITALWGPAHGGANEAVLKMLEEIGDAKNVDLVIAKAKTKDKNSPFRLMGFGHRVYKHFDPRAKIIREMAHTVLGELGVNDPLLEVALKLEEAALKDDYFVQRKLYPNVDFYSGIIYKAINIPLEMFTVMFAIARTAGWVSHWLEQQVDPEMKISRPRQIYTGHGERDYKDAR

SEQ ID NO: 479 - protein, 427 aa, Escherichia coli
MADTKAKLTLNGDTAVELDVLKGTLGQDVIDIRTLGSKGVFTFDPGFTSTASCESKITFIDGDEGILLHRGFPIDQLATDSNYLEVCYILLNGEKPTQEQYDEFKTTVTRHTMIHEQITRLFHAFRRDSHPMAVMCGITGALAAFYHDSLDVNNPRHREIAAFRLLSKMPTMAAMCYKYSIGQPFVYPRNDLSYAGNFLNMMFSTPCEPYEVNPILERAMDRILILHADHEQNASTSTVRTAGSSGANPFACIAAGIASLWGPAHGGANEAALKMLEEISSVKHIPEFVRRAKDKNDSFRLMGFGHRVYKNYDPRATVMRETCHEVLKELGTKDDLLEVAMELENIALNDPYFIEKKLYPNVDFYSGIILKAMGIPSSMFTVIFAMARTVGWIAHWSEMHSDGMKIARPRQLYTGYEKRDFKSDIKR

SEQ ID NO: 480 - protein, 472 aa, Oryza sativa
MAFFRGLTAVSRLRSRVAQEATTLGGVRWLQMQSASDLDLKSQLQELIPEQQDRLKKLKSEHGKVQLGNITVDMVLGGMRGMTGMLWETSLLDPDEGIRFRGLSIPECQKVLPTAVKDGEPLPEGLLWLLLTGKVPTKEQVDALSKELASRSSVPGHVYKAIDALPVTAHPMTQFTTGVMALQVESEFQKAYDKGMSKSKFWEPTYEDCLNLIARLPAVASYVYRRIFKGGKTIAADNALDYAANFSHMLGFDDPKMLELMRLYITIHTDHEGGNVSAHTGHLVGSALSDPYLSFAAALNGLAGPLHGLANQEVLLWIKSVIGETGSDVTTDQLKEYVWKTLKSGKVVPGFGHGVLRKTDPRYTCQREFALKYLPEDPLFQLVSKLYEVVPPILTELGKVKNPWPNVDAHSGVLLNHFGLSEARYYTVLFGVSRSIGIGSQLIWDRALGLPLERPKSVTMEWLENHCKKVAA

SEQ ID NO: 481 - protein, 503 aa, Zea mays
MDRADPARGRLAVLSSHLRGAGAEEAAGLERSPVSAPAPGPRAGALAVVDGRTGKRHEVKVSEDGTVRATDFKKITTGKDDKGLKIYDPGYLNTAPVRSSICYIDGDEGILRYRGYPIEELAESSSFVEVAYLLMYGNLPTQSQLAGWEFAISQHSAVPQGLLDIIQSMPHDAHPMGVLASAMSTLSVFHPDANPALQGQDLYKSKQVRDKQIVRVLGKAPTIAAAAYLRLAGRPPVLPLNTLSYSENFLYMLDSLGDRTYKPNPRLARALDILFILHAEHEMNCSTAAVRHLASSGVDVFTALSGGVGALYGPLHGGANEAVLKMLNEIGSMENIPDFIVGVKNRKRKMSGFGHRVYKNYDPRAKVIRKLADEVFSIVGRDPLIEVAIALEKAALSDEYFIKRKLYPNVDFYSGLIYRAMGFPTEFFPVLFAIPRMGGWLAHWKESLDDPDTKIIRPQQVYTGFWLRHYTPVRERVLSSQSEELGQVATSNATRRRRAGSAL

SEQ ID NO: 482 - protein, 513 aa, Glycine max
MSKTTTSSEQTARNRLATLAAHLLPSDATSAAAILHPHRLSAPTGDLPPANLKGTLTVVDERTGKKYQIEVTPDGTVRASDFKKISSGKNDKGLKLYDPGYLNTAPVISRISYIDGDAGILRYRGYPIEDLAEKSTFTEVSYLILYGNLPSESQLAEWEFALSQHSAVPQGVLDMIESMPHDAHPMGMLVNAMSALSVFHPDANPALKGLDIYNSKQVRDKQIARVIGKITTIAAAINLRLAGRPPVLPSNKLSYTENFLYMLDSFGNRSYKPNPRLTRALDIIFVLHAEHEMNCSTSAVRHLSSSGVDVYTAIAGAVGALYGPLHGGANEAVLKMLSEIGTVENIPAFIEGVKARKRKLSGFGHRVYKNYDPRAKVLRKLTEEVFSIVGRDPLIEIAVALEKIALSDEYFIKRKLYPNVDFYSGLIYRAMGFQPEFFTVLFAIPRMAGYLAHWRESLDDPDTKIMRPQQVYVGEWLRHYAPINQRTASSNTDKLGQLAVSNASKRRLAGSGA

SEQ ID NO: 483 - protein, 252 aa, Zea mays
MMLRVSASPAAAVANHLSGGAAATTAPARVTAQRSGVSLSAAAAAGKGKEVLSGVVFQPFEEIKGELALVPQSPDRSLARHKFVDDCEAAINEQINVEYNASYAYHSLFAYFDRDNVALKGFAKFFKESSDEEREHAEKLMEYQNKRGGRVRLQSIVAPLTEFDHPEKGDALYAMELTLALEKLVNEKLHSLHGVATRCNDPQLIDFIESEFLEEQVEAINKVSKYVAQLRRVGNKGHGVWHFDQMLLQEGA

SEQ ID NO: 484 - protein, 265 aa, Zea mays
ANAHAPTRHIQMMLRVSPSPAAAVPTQLSGAPATPAPVVRVAAPRGVASPSAGAACRAAGKGKEVLSGVVFQPFEEIKGELALVPQSPDKSLARHKFVDDCEAALNEQINVEYNASYAYHSLFAYFDRDNVALKGFAKFFKESSDEEREHAEKLMEYQNKRGGRVRLQSIVTPLTEFDHPEKGDALYAMELALALEKLVNEKLHNLHGVATRCNDPQLTDFIESEFLEEQVEAINKISKYVAQLRRVGKGHGVWHFDQMLLEEEA

SEQ ID NO: 485 - protein, 171 aa, Escherichia coli
PLWSTIMLKPEMIEKLNEQMNLELYSSLLYQQMSAWCSYHTFEGAAAFLRRHAQEEMTHMQRLFDYLTDTGNLPRINTVESPFAEYSSLDELFQETYKHEQLITQKINELAHAAMTNQDYPTFNFLQWYVSEQHEEEKLFKSIIDKLSLAGKSGEGLYFIDKELSTLDTQN

SEQ ID NO: 486 - protein, 195 aa, Zea mays
MASHQDKASYQAGETKARTEEKTGQAVGATKDTAQHAKDRAADAAGHAAGKGQDAKEATKQKASDTGGYLGKKTDEAKHKAGETTEATKQKASETTEATKQKAGETTEAARQKAADAMEAAKQKAAEAGQYAKDTAVSGKDKSSGVIQQATEQVKSAAAGAKDAVMSTLGMGGDDKQGDANTNTNKDSSTITRDH

SEQ ID NO: 487 - protein, 364 aa, Glycine max
MVKSNENGSGSVSVPPFLKKCYDMVEDRNTDSIIRWSDGGDSFVISDITQFSVTLLPTYFKHNNFSSFIRQLNIYGFRKIDTDCWEFANENFVRGQKHLLKNIRRRKHPHSADQQKALPQQDNCDEPSQEAPYHGLWKEVENLKLDKNSLTQELVKLRQHQESAENKLLLLSDRLQGMEKHQQQMLSFLVMVVQSPGFMVQLLHPKENNWHLAESWNILDQDKQDDKPVASDGMIIKYKPPVGEKLKPVVPLSPGFEKQTEPELSAEGLKDLCVSSEFLKVLLDEKLSPLENHSPFLLPDLPDDGSWEQLFLGSPFMGNIQDSNKESEGHTNGGMEMEPTISETPNENSRTFESMIVEMEKTRE

SEQ ID NO: 488 - protein, 300 aa, Glycine max
MAPPLEHNGVSTSGDSQRSIPTPFLTKTYQLVDDHTIDDVISWNDSGSSFIVWNTTAFAKDLLPKYFKHNNFSSFVRQLNTYGFRKVVPDRWEFSNEYFRRGEKRLLCEIQRRKILSASPPPAGATATVAVPSPLPLSAIPTAKPIVSPSNSAEEQVLSSNSSPARAPVELLDENERLRKENILLTKELVKMRSLCNNIFNLMSNYANAQADGSSAAAAKRCSGEDAVEEMNPKLFGVAIGKKRAREEEGHGAKYDTALSLHQPFHADVKSEALDLPGRGENKKTPWLNQCHRANQRVCN

SEQ ID NO: 489 - protein, 368 aa, Glycine max
MGEAKGKEEEVLASVHSTVFKESESLDGKCVKIEGYDFNRGVNYPLLLSSMVTTGFQASNLGDAIQVVNQMLDWRLVDEPVAEDCSDQERDLEYRKSVTCKVFLGFTSNLISSGVRDTVRFLLQHRMVDVVVTTTGGIEEDLIKCLAPTYKGDFSLPGAYLRSKGLNRIGNLLVPNDNYCKFEDWIIPIFDQMLGEQNNENVLWTPSKLIARLGKEIKNESSYLYWAYKNNIPVFCPGLTDGSLGDMLYFHSFRNPGLIVDIVQDIRAMNGEAVHASPRKTGMIILGGGLPKHHICNANMMRNGADYAVFINTAQEYDGSDSGARPDEAVSWGKIRDSAQTVKVHCDATIAFPLLVAETFASKVKPPH

SEQ ID NO: 490 - protein, 310 aa, Chlamydomonas reinhardtii
MRSAVLQRGQARRVSCRVRADGSGVDSLPSTSASSSARPLIDRRQLLTGAAASVITFVGCPCPLCKPGEAKAAAWNYGEVAGPPTWKGVCATGKRQSPINIPLNTSAPKVDAEMGEFDFAYGSFEKCDVLNTGHGTMQVNFPAGNLAFIGNMELELLQFHFHAPSEHAMDGRRYAMEAHLVHKNKSTGNLAVLGIMLEPGGLIKNPALSTALEVAPEVPLAKKPSPKGINPVMLLPKKSKAGTRPFVHYPGSLTTPPCSEGVDWFVFMQPIKVPDSQILDFMRFVGDNKTYATNTRPLQLLNSRLVEYEL

SEQ ID NO: 491 - protein, 264 aa, Nostoc PCC7120
MSSTLYRRQLLKLLGMSVLGTSFSSCVTSPARAKTVNWGYIGKVGPEHWGELSPDFALCQIGRKQTPIDLQIADVKDVHSSSQDLLVTNYQPTALHLINNGKTVQVNYQPGSYLKYAHQKFELLQFHFHHFSEHRVDGKLYDMELHLVHRSKSGDLAVMGIFLQAGAFNPTLQIIWDATPQNQGTDKRIEDINIDASQFLPAQHRFFTYSGSLTTPPCSENVLWCVMATPIEASPAQIAKFSQMFPQNARPVQPLNDRLVIEAI

SEQ ID NO: 492 - protein, 358 aa, Chlamydomonas reinhardtii
MSSDAMTINESLMEVEHTPAVHKRILDILPGISGGVARVMIGQPFDTIKVRLQVLGQGTALAAKLPPSEVYKDSMDCIRKMVKSEGPLSFYKGTVAPLVGNMVLLGIHFPVFSAVRKQLEGDDHYSNFSHANVLLSGAAAGAAGSLISAPVELVRTKMQMQRRAALAGTVAAGAAASAGAEEFYKGSLDCFKQVMSKHGIKGLYRGFTSTILRDMQGYAWFFLGYEATVNHFLQNAGPGVHTKADLNYLQVMAAGVVAGFGLWGSMFPIDTIKSKLQADSFAKPQYSSTMDCLKKVLASEGQAGLWRGFSAAMYRAIPVNAGIFLAVEGTRQGIKWYEENVEHIYGGVIGPATPTAAQ

SEQ ID NO: 493 - protein, 467 aa, Synechococcus PCC7942
MTVWQTLTFAHYQPQQWGHSSFLHRLFGSLRAWRASSQLLVWSEALGGFLLAVVYGSAPFVPSSALGLGLAAIAAYWALLSLTDIDLRQATPIHWLVLLYWGVDALATGLSPVRAAALVGLAKLTLYLLVFALAARVLRNPRLRSLLFSVVVITSLFVSVYGLNQWIYGVEELATWVDRNSVADFTSRVYSYLGNPNLLAAYLVPTTAFSAAAIGVWRGWLPKLLAIAATGASSLCLILTYSRGGWLGFVAMIFVWALLGLYWFQPRLPAPWRRWLFPVVLGGLVAVLLVAVLGLEPLRVRVLSIFVGREDSSNNFRINVWLAVLQMIQDRPWLGIGPGNTAFNLVYPLYQQARFTALSAYSVPLEVAVEGGLLGLTAFAWLLLVTAVTAVRQVSRLRRDRNPQAFWLMASLAGLAGMLGHGLFDTVLYRPEASTLWWLCIGAIASFWQPQPSKQLPPEAEHSDEKM

SEQ ID NO: 494 - protein, 242 aa, Zea mays
  unsure (1)..(242): unsure at all Xaa locations
MMEGGSRADGRNPNQLRPFTCTGNPLHRAHGSARWAQGDTVVLAAVYGPKPGTRKGENPEKASIEVVWKPKTGQIGRQEREYEMTLKRTLQSICLLTVHPNTTTSVVLQVVGDDGSLMPCAINASCAALAFAGIPMKHLAVAISCGVMDNGVVILDTSRAEEQQARSFAHLVFPNSRKSVESKDPTQRDEESERGLITCITHGAMSEDXLFQLHREGCHGVLEDLGFHEEDTAEGGVQGCLT

SEQ ID NO: 495 - protein, 1286 aa, Saccharomyces cerevisiae
MSEGFSSSSIQELYQSLKEITNNADVELFEDRITKLDFESTDEPKHANDIIKDRFLRPSNALPWSLLDMVQDVPHTSSPEDCSGKLDYKELLKVPDPINRTSYQFKRTGLEGKISGYKEEVDLKEVANANASNSLSITRSINHNQNSVRGSTAQLPFTPGGIPMKSVKTDSEQNGSSTMANATKLLHKDGQGLFDIPEGMNRGIKPMDSPAENEDQNGQFKELKQLNEIDNELDIRIEANEAKLKEEEKSAKSISEEIMEEATEETTADNADDAEIDELLPIGIDFGRTKPVSKSVPVKKEWAHVVDLNHKIENFDELIPNPARSCPFELDTFQKEAVYHLEQGDSVFVAAHTSAGKTVVAEYAIAMAHRNMTKTIYTSPIKALSNQKFRDFKETFDDVNIGLITGDVQINPDANCLIMTTEILRSMLYRGADLIRDVEFVIFDEVHYVNDQDRGVVWEEVIIMLPQHVKFILLSATVPNTYEFANWIGRTKQKNIYVISTPKRPVPLEINIWAKKELIPVINQNSEFLEANFRKHKEILNGESAKGAPSKTDNGRGGSTARGGRGGSNTRDGRGGRGNSTRGGANRGGSRGAGAIGSNKRKFFTQDGPSKKTWPEIVNYLRKRELLPMVVFVFSKKRCEEYADWLEGINFCNNKEKSQIHMFIEKSITRLKKEDRDLPQILKTRSLLERGIAVHHGGLLPIVKELIEILFSKGFIKVLFATETFAMGLNLPTRTVIFSSIRKHDGNGLRELTPGEFTLAGRAGRRGLDSTGTVIVMAYNSPLSIATFKEVTMGVPTRLQSQFRLTYNMILNLLRIEALRVEEMIKYSFSENAKETLQPEHEKQIKVLQEELQTIEYKSCEICDNDIEKFLELMLAYKEATVNLMQEMVKSPSILHILKEGRLVAFRDPNDCLKLGFVFKVSLKDAVCVIMTFTKPYKLPNGEPNHLIYFPKADGYRRRNFPKFQKTDFYMEEVPVTAIEVITKRKFAAPLGKVIKKDVAALNEFNAETNNILDGKTLKEAINIEKQGLKIHQILLDRTNIRDEIFKLKSIKCPNLSQHIVPKFKAHVIKKKIEELYHLMSDQNLSLLPDYEKRLAVLKDTEFIDQNHNVLLKGRVACEINSGYELVLTELILDNFLGSFEPEEIVALLSVFVYEGKTREEEPPIVTPRLAKGKQRIEEIYKKMLCVFNTHQIPLTQDEAEFLDRKRFAMMNVVYEWARGLSFKEIMEMSPEAEGTVVRVITWLDEICREVKTASIIIGNSTLHMKMSRAQELIKRDIVFAASLYL

SEQ ID NO: 496 - protein, 1432 aa, Saccharomyces cerevisiae
MSDIKQLLKEAKQELTNRDYEETIEISEKVLKLDPDNYFAHIFLGKALSSLPASNNVSSNRNLERATNHYVSAAKLVPDNLLAWKGLFLLFRTTEVVPDILSYDEYFDLCGQYADALLKQEQSQVELINDIKLLKKTHPDCQKAFYQHLKPGSLMAETIGRHLSTPQDALLNLIKILSNIETTEIGKTLSQNRLKLKASDPDYQIKLNSFSWEIIKNSEIDQLYNQLVNILADDQKRSEIENQWLEYRIKVLKSMPLDVKKDFFTKVKEMVEDMVLVNHQSLLAWQKYFEWTDYEDLDNMDAPLIIKYFKKFPKDPLAMILYSWLSSKLSKYDIKSLESANKPPEGHKKTEKETDIKDVDETNEDEVKDRVEDEVKDRVEDEVKDQDEEAKEDEEEDLDDIEIGLLEEEVVTVLTENIVKCKNNILAHRILCQYYLLTKEYEAALPYIKNGISLIAYNIKDLGVHLPLTKREFSLDLATVYTYVDAPKDHNAALKLYDNILSGDFSNIQAKMGKGIIFIERKNWKDAMTLLTQVHEQSPNNLEVLSELSWSKAHMGYMDEALAGLDTVIKGIKGMDLRSIDFRALNLWRQAKVYIMKHASINDAKQENVKCAFKLLIQSIKILDTFAPGFSTLGDIYCHYYKDHLRAFKCYFKAFDLDAGDYTAAKYITETYASKPNWQAASSIASRLIKGEKAKAELRSNNWPFRVVGIAHLEKQEESDSIEWFQSALRVDPNDVESWVGLGQAYHACGRIEASIKVFDKAIQLRPSHTFAQYFKAISLCDVGEYLESLDILEKVCQEAATEESFQIGLVEVLMRCSLDLYSQGFLLKSVSIAKDTIERIKIIISELKCENQQVWIYLSQVLRLFIWIESKVDTLPVESLVSIFENSQFSGSEEIDSVDNIKIDTLLDSTTDDNVSIACKFLILASKYSVSDQKFTDIAGTVRASYWYNIGISELTAFITLKEPQYRDAAIFAFKKSIQLQSNISETWIGLGIATMDINFRVSQHCFIKATALEPKATNTWFNLAMLGLKKKDTEFAQQVLNKLQSLAPQDSSPWLGMALILEEQGDIIGSSKLFAHSFILSNGRSKAAQFMYAKNVLENHINNGDDERDIETVEKLTTASIALEQFFKKSPDSQFALQCALLTLERLHHYENANELANRLIGILEKKFEKTQDERELFNFAIIKGQFARIHLGLGNFELSIENADLSQGIISESSDEKSMKTKISNHICLGLSYFFLNDFDQTLNQFQELLSISKDSKHLVVLIAKVLYDVGESDTKEIALQELTEYIATSGADLLVTLTIAAMSILDDKREDLSIILEELKALPLSKQIIDKHKDAPYLIEEITKRLYRNDTGKQVWQRSAYFFPNNLKVWERLDKNIQRRIASNGQNKVTAEEMSKLYCESKNLRSIQRGMFLCPWNVTAVKALNECF

SEQ ID NO: 497 - protein, 292 aa, Saccharomyces cerevisiae
MACNFQFPEIAYPGKLICPQYGTENKDGEDIIFNYVPGPGTKLIQYEHNGRTLEAITATLVGTVRCEEEKKTDQEEEREGTDQSTEEEKSVDASPNDVTRRTVKNILVSVLPGTEKGRKTNKYANNDFANNLPKEGDIVLTRVTRLSLQRANVEILAVEDKPSPIDSGIGSNGSGIVAAGGGSGAATFSVSQASSDLGETFRGIIRSQDVRSTDRDRVKVIECFKPGDIVRAQVLSLGDGTNYYLTTARNDLGVVFARAANGAGGLMYATDWQMMTSPVTGATEKRKCAKPF

SEQ ID NO: 498 - protein, 246 aa, Saccharomyces cerevisiae
MSRLEIYSPEGLRLDGRRWNELRRFESSINTHPHAADGSSYMEQGNNKIITLVKGPKEPRLKSQMDTSKALLNVSVNITKFSKFERSKSSHKNERRVLEIQTSLVRMFEKNVMLNIYPRTVIDIEIHVLEQDGGIMGSLINGITLALIDAGISMFDYISGISVGLYDTTPLLDTNSLEENAMSTVTLGVVGKSEKLSLLLVEDKIPLDRLENVLAIGIAGAHRVRDLMDEELRKHAQKRVSNASAR

SEQ ID NO: 499 - protein, 747 aa, Saccharomyces cerevisiae
MSLLEQLARKRIEKSKGLLSADQSHSTSKSASLLERLHKNRETKDNNAETKRKDLKTLLAKDKVKRSDFTPNQHSVSLSLKLSALKKSNSDLEKQGKSVTLDSKENELPTKRKSPDDKLNLEESWKAIKEMNHYCFLKNDPCINQTDDFAFTNFIIKDKKNSLSTSIPLSSQNSSFLSLKKHNNELLGIFVPCNLPKTTRKVAIENFNRPSPDDIIQSAQLNAFNEKLENLNIKSVPKAEKKEPINLQTPPTESIDIHSFIATHPLNLTCLFLGDTNAGKSTLLGHLLYDLNEISMSSMRELQKKSSNLDPSSSNSFKVILDNTKTERENGFSMFKKVIQVENDLLPPSSTLTLIDTPGSIKYFNKETLNSILTFDPEVYVLVIDCNYDSWEKSLDGPNNQIYEILKVISYLNKNSACKKHLIILLNKADLISWDKHRLEMIQSELNYVLKENFQWTDAEFQFIPCSGLLGSNLNKTENITKSKYKSEFDSINYVPEWYEGPTFFSQLYLLVEHNMNKIETTLEEPFVGTILQSSVLQPIAEINYVSLKVLINSGYIQSGQTIEIHTQYEDFHYYGIVSRMKNSKQILETNTKNNISVGLNPDILEVLVKIHNTEDFTKKQFHIRKGDIIIHSRKTNTLSPNLPNTLKLLALRLIKLSIQTHALSDPVDLGSELLLYHNLTHNAVKLVKILGTNDISINPNQSLIVEVEIIEPDFALNVIDSKYITNNIVLTSIDHKVIAVGRIACQ

SEQ ID NO: 500 - protein, 826 aa, Oryza sativa
MGSDVGPSTARLNGSCRHGPRAGVPCRSWAGYSAAVLGPARLGPAHLARYTSRLQSSSPQRPKPPPPSPRYRQRRLPSLRPSSSGGRAACRPSPRDRQRRLPSAVPPPPASVAASHQRRPVGVPQAPARDHQSSPLPELARLPCVSRMPRKVVSGPDYDDEYNDDYDEYDEDYDDYGGTGHSDDIQHPTKEKESSKKSSSMVPVLWRCSMCMFDNHESMVYCEMCGVFRESFMKSAKDGSIKVHGIPSDFGTPSMPKSDSTKMPVNTRTTDFGGDPEIKNASISHEKVGSTQYASVGSSSGAGKKVKHIALPEDVPVERTAQLISDHFQLKEDQSSRATSSAQNEDVAQKLSSDIQKLGLEKNEVDTAKPYLPEEYKPEKWMFANEESGVLSQLNLAIVGHVDSGKSTLSGRLLHLLGRISKKDMHKNEKEAKEKGKGSFAYAWAMDESSEERERGVTMTVAVAYLETNKYRVVLLDSPGHKDFVPNMISGATQADAAILVVDACTGSFEAGMDGEGGKSVGQTKEHAQLIRSFGVEQLIVAVNKMDAIGYSKERFEFIKVQLGSFLRACNFKDSSVTWIPLSAVENQNLIKIPSDVRLTSWYQGFCLLDAIDSLQLPSRDVSKPLILPICDVIKSQSTGQLAAFGKLETGAIRIGSKVLISPCGEVATVKSIERDSNSCDIARAGDNVAVSLQGIDGSKLIAGGILCNPGFPVPVSNFLELRVLVLDVTIPILIGYQVEFHIHHVKEAARVTKIVALLDKAGKPSKTAPRFLKSKQNAVVQVTLDAPVCVEEFSKCRALGRAFLRSGGSTIAVGVVTRVLGQDQN

SEQ ID NO: 501 - protein, 243 aa, Synechocystis PCC6803
MTGKVYLVGAGPGDPEYLTLQAQQCLQSAEVLIYDALIDPRILDLVPANCDRIAVGKRGGAESTPQATINQLLVEHCQQGRKVIRLKSGDPFVFGRAASELDALERSGCDYAVLPGLSTALAAPLLAGIPITDPVLSRGFAVYTVHEPDALNWEALAQLETLILLMGSRHLLTIGHELIRHGRSPDSPVALIQWAGHPQQTVLESSLSRMAQQWGDQPLSPCVIVIGEVVRLRKYWAHYRYDG

SEQ ID NO: 502 - protein, 257 aa, Xylella fastidiosa
MSVTLVGAGAGDAGLLTLNALRALNEADIILYDRLVSDTVLQVARRDAEQIEVGKSATGHSVRQEDIHSLMLQHARAGQRVVRLKGGDPFVFGRGGEELEFLRTHNIPYEVIPGITAALACAAYAGIPLTHRDHAQSLCLITAHCQSSLDTLDWAALAQERQTLAFYMGVAGLPTIQQRLCEAGRAETTPFALIENGARAQQRVLTGTLKTLAHTAQTYAVRPPALLILGEVTTLAEHLHWFGTAPLSAPCPPALIL

SEQ ID NO: 503 - protein, 423 aa, Zea mays
MALAVRTPRFQPRPASISAPTTPASTSLAAGNARPRPCAGAAVRASPFTEATSSSRYRRDAWSYAADGSSNSASPSSAAAAAAGRRDDEIALQLPELRRLLDVLRASRGRGAEEGGGPGEVALVGTGPGDPELLTLKAVRAIEAADLVLYDRLVSNDVLDLVGEGARLLYVGKTAGYHSRTQEEIHELLLSFAEAGANVVRLKGGDPLVFGRGGEEMDFLQQQGIKVEVIPGITSASGIAAELGIPLTHRGVATSVRFLTGHSRNGGTDPLYVAGNAADPDTTLVVYMGLSTLPSLAPKLMKHGLPPDTPAVAVERGTTPQQRTVFASLKDLVDEVKSADLVSPTLIIIGKVVSLSPFWVESSEHDALKVQSSYANEADDNRFSWFLVTGQYLRNARSQIWEHRFDLVYTETSQEAWILNGGW

SEQ ID NO: 504 - protein, 491 aa, Zea mays
MAPSPPRRAALLLTTVLLLAAAGSTPGATAAGIFQVRRKFTAGVGGGAGANISALRAHDGTRHGRLLAAADLPLGGLGLPTDTGLYYTEIKLGTPPKHYYVQVDTGSDILWVNCITCEQCPHKSGLGLDLTLYDPKASSTGSMVMCDQAFCAATFGGKLPKCGANVPCEYSVTYGDGSSTIGSFVTDALQFDQVTRDGQTQPANASVIFGCGAQQGGDLGSSNQALDGILGFGEANTSMLSQLTTAGKVKKIFAHCLDTIKGGGIFSIGDVVQPKVKTTPLVADKPHYNVNLKTIDVGGTTLQLPAHIFEPGEKKGTIIDSGTTLTYLPELVFKEVMLAVFNKHQDITFHDVQGFLCFQYPGSVDDGFPTITFHFEDDLALHVYPHEYFFANGNDVYCVGFQNGASQSKDGKDIVLMGDLVLSNKLVIYDLENRVIGWTDYNCSSSIKIKDDKTGATSTVNSHDLSSGWKFHWHMSPVLLLVTTVCSYLIC

SEQ ID NO: 505 - protein, 510 aa, Zea mays
MAQLAVRSLLLSLLLVSPVVASPGIVKLNSSSTLFGIEFPPFNTAVAATGCDSKLVAADEAGDEQKQPASSSPSLQLRMKHRSAEGGRTRKESFLDKAEKDAVRIETMHRRAARSGVARMPASSSPRRALSERMVATVESGVAVGSGEYLIDVYVGTPPRRFRMIMDTGSDLNWLQCAPCLDCFEQRGPVFDPAASSSYRNVTCGDQRCGLVAPPEAPRACRRPAEDSCPYYYWYGDQSNTTGDLALESFTVNLTAPGASRRVDGVVFGCGHRNRGLFHGAAGLLGLGRGPLSFASQLRAVYGHTFSYCLVEHGSDAGSKVVFGEDYLVLAHPQLKYTAFAPTSSPADTFYYVKLKGVLVGGDLLNISSDTWDVGKDGSGGTIIDSGTTLSYFVEPAYQVIRQAFVDLMSRLYPLIPDFPVLNPCYNVSGVERPEVPELSLLFADGAVWDFPAENYFVRLDPDGIMCLAVRGTPRTGMSIIGNFQQQNFHVVYDLQNNRLGFAPRRCAEV

SEQ ID NO: 506 - protein, 478 aa, Zea mays
MSSPAVRRVVLLSSLLCAGALGFLPCSHAAAVAPGYVAVSAASFVPSSTCSSPDRVPPHRRNGTSAVLRLTHRHGPCAPSRASSLAAPSVADTLRADQRRAEYILRRVSGRAPQLWDSKAAAAVATVPASWGYDIGTLNYVVTASLGTPGVAQTMEVDTGSDLSWVQCKPCAAAPSCYSQKDPLFDPAQSSSYAAVPCGGPVCAGLGIYAASACSAAQCGYVVSYGDGSNTTGVYSSDTLTLSASSAVQGFFFGCGHAQSGLFNGVDGLLGLGREQPSLVEQTAGTYGGVFSYCLPTKPSTAGYLTLGVGGPSGAAPGFSTTQLLPSPNAPTYYVVMLTGISVGGQQLSVPASAFAGGTVVDTGTVVTRLPPTAYAALRSAFRSGMASYGYPTAPSNGILDTCYNFAGYGTVTLPNVALTFGSGATVTLGADGILSFGCLAFAPSGSDGGMAILGNVQQRSFEVRIDGTSVGFKPSSC

SEQ ID NO: 507 - protein, 268 aa, Glycine max
QGQGSSAGSQRQNKGFRTRRKGEDKSASKSPGIYNSATADNKTGSKVGEYADYGSQKAKETKDATKEKAGEYTDYASQKAKETKDKTMEKAGEYTDYASQKAKETKDKTMEKAGEYTDYASQKAKEAKDKTMEKGGEYKDYAAEKAKEGKDATVNKMGEYKDYTAEKAKEGKDTTLGKLGELKDSAADAAKRAVGYLSGKTEETKEKVSETAEATANKAAEMKEATREKAAGTAEAAKNKAAEVKDRAAETAEAAKNKTAETAEAAKQ

SEQ ID NO: 508 - protein, 226 aa, Glycine max
MASYQKHYDDQGRKVDEYGNVEKQTDEYGNPVHAASVTYVATRTAAGGYSDDINKQHDTTNAYGVDTGRQHSSGGYDGDTNKHHGTTGGYNDDTNRHHGTTGVYGIDTDRQQHGTTGGYAGDTGRQHGNIGGPYYGTNTADTGTGPRSGTTGGTGYGGTGGTDYGTTGGTGYGSGTGYGVNTGGAHTEAGYRKEHRQHDQSHGDQNEKKGIMDKIKEKLPGGHSDK

SEQ ID NO: 509 - protein, 167 aa, Zea mays
MEYGQQGQRGHGATGHVDQYGNPVGGVEHGTGGMRHGTGTGGMGQLGEHGGAGMGGGQFQPAREEHKTGGILHRSGSSSSSSSEDDGMGGRRKKGIKEKIKEKLPGGHKDDQHATATTGGAYGQQGHTGSAYGQQGHTGGAYATGTEGTGEKKGIMDKIKEKLPGQH

SEQ ID NO: 510 - protein, 290 aa, Zea mays
MEDERNTQQHQGGEAQQDAADQVDVKDRGLLDSLLGRKKHDDDQEKKKQTDELATGMEKVTVSEPEKHGHKEEEHEVVGEKKEGLLAKLHRTSSSSSSSSDEEEEAIDENGEIIKRKKKKMGLKEKLKEKLPGHKDGHHTAAPSPAPAPVETHAHHQEEAHRPHVVPTPAPPPPPHVHQHDHGVVVQDDVKTGTPPHAPEEEKKGLLDKIKEKLPGGHNKKPEAAAAAAPAPPVHAPAPAPQAENVSSPDGKEKKGLLGKIMDKIPGYHKSSAEEADHKADAAGEHRTSS

SEQ ID NO: 511 - protein, 168 aa, Saccharomyces cerevisiae
MSNLLNKFADKLHGNDHDERYEDDNDDQTRQQRHEKHQQREFRNQGSKADPYGEENQGNFPQRQQPQSNLGGNTQFGGNDFQQQTTDYTAGTGGGTYTQTYRETNTQGQLDDDEDDDFLTSGQQQKQGRTRGAQSNRYQSSNIGSGRRDLSGSGNDEYDDDSGNQGVW

SEQ ID NO: 512 - protein, 84 aa, Saccharomyces cerevisiae
MTRTNKWTEREGKADPKYFSHTGNYGESPNHIKKQGSGKGNWGKPGDEIDDLIDNGEIPPVFKKDRRGSNLQSHEQKFENVQKE

SEQ ID NO: 513 - protein, 159 aa, Saccharomyces cerevisiae
MSNMMNKFAEKLQGNDDSHQKGKNAKSSNKERDDMNMDMGMGHDQSKGMKMGHDQSGTKMNAGRGIANDWKTYEHENMYVFGALTKSSYFFNGLFMNCLCLCSLYSKSISAYFSEFSSTNIYKSYLRLPSVLYYVCMMHTMMPNQLDAVGIQSSESLLM

SEQ ID NO: 514 - protein, 128 aa, Saccharomyces cerevisiae
MSANDYYGGTAGEKSQYSRPSNPPPSSAHQNKTQERGYPPQQQQQYYQQQQQHPGYYNQQGYNQQGYNQQGYNQQGYNQQGYNQQGYNQQGHQQPVYVQQQPPQRGNEGCLAACLAALCICCTMDMLF

SEQ ID NO: 515 - protein, 109 aa, Saccharomyces cerevisiae
MSDAGRKGFGEKASEALKPDSQKSYAEQGKEYITDKADKVAGKVQPEDNKGVFQGVHDSAEKGKDNAEGQGESLADQARDYMGAAKSKLNDAVEYVSGRVHGEEDPTKK

SEQ ID NO: 516 - protein, 510 aa, Zea mays
AFKPTNLSNCTQSAIHCRGRSNLLRASSMASSDHGSTTAPKDVPGSYGLPLVGAVRDRLDFYYFQGQDKYFESRVERYGSTVVRMNVPPGPFMARDPRVVAVLDAKSFPVLFDMDKVEKKDLFTGTYMPSTSLTGGYRVCSYLDPSEPTHTKVKQLLFSLLLSRKDDVIPTFRSNFSSLLATVEAELAKGGKAEFNKLNDVTSFDFIGEAYFGVRPSATDLGKGGPTKAAKWLIWQLHPLVTLGLPMVLEEPLLHTFHLPPFLVKGDYRALYKYFSTVAKQALDTAEGLGLSREEACHNLLFATTFNSYGGLKVLFPGLLANVASGGEKLHERLVAEIRGAVADAGGKVTLAAVERMELAKSVVWESLRLDPPVKFQYGHAKKDLLVESHDAVFQVRKGEMLFGYQPCATKDPRVFGDTAGDFVPDRFLGEEGSKLLQYVYWSNGRETENPSVDNKQCPGKNFVVLVGRLLLVELFLRYDTFTAEVGKELLGTSVIFTGVTKATSGPGSE

SEQ ID NO: 517 - protein, 591 aa, Zea mays
MGGEAEGGERRLGRVLSFGIPDTALGLVMGYVEDPWDRDAISLVCRHWCRVDALSRKHVTVAMAYSTTPERLFRRFPCLESLKLKAKPRASMFNLISDDWGGSASPWIRQLSATFHFLKKLHLRRMIVSNEDINILVRAKAHMLVALKLDRCSGFSTPSIALVARSCRKLETLFLEESTIDEKENDEWIRELATSNSVLETLNFFLTDLRASPEYLTLLVRNCQRLKTLKISECFMPDLVSLFRTAQTLQEFAGGSFEEQGQPVASRNYENYYFPPSLHHLSLLYMGTNDMQILFPYATALKKLDLQFTFLSTEDHCQIVQRCSNLETLEVRDVIGDRGLQVVAQTCKKLHRLRVERGDDDQGGLEDEQGRISQVGLMAIAQGCPELTYWAIHVSDITNAALEAVGTCSKNLNDFRLVLLDREAHITELPLDNGVRALLRGCTKLRRFAFYVRPGALSDVGLGYVGEFSKSIRYMLLGNVGESDNGIIQLSKGCPSLQKLEVRGCLFSEHALALAALQLKSLRYLWVQGFRSSPTGTDIMAMVRPFWNIEYIVPDQDEPCPEHKRQILAYYSLAGRRTDCPPSVTLLYPAF

SEQ ID NO: 518 - protein, 598 aa, Zea mays
MSEEDEDQPPAKRPSPSPPADQVLDNVLETVLQFLDAPRDRSAASLVCRSWHSAESATRESVAVRNLLAVSATRTARRFPNARSLLLKGRPRFADFNLLPHGWDASAFRPWAAAVAAGAFPALTSLYLKRIPVTDADLDLLSRSLPASFRDLTLHLCDGFTSRGLASIASHCRGLRVLDVVECDMAEEQEVVDWVAAFPQEPSNLESLSFECYEPPVAFAALEALVERSPRLRRLGVNLHVSLGQLCRLMAHAPRLSHLGTGSFRPADGGEEGTGFGEVVSAFVAAGRARTLVSLSGFRDLAQEYLPTIAVVCAHLKSLDLSYSAVTPNQILMFIGQCYNLETLWVLDSVRDEGLDAVGISCKKLQSLRVLPLNAHEDADELVSEVGLTAISRGCPALRSILYFCQTMTNAAVVDMSRNCPELKVFRLCIMGRHQPDHATGEPMDEGFGAIVQNCSKLTRLSTSGQLTDRAFEYIGRHGKSLRTLSVAFAGNSDVALQYILQGCPKLEKLEIRDCPFGDAGLFAGMHHFYNMRFVWMSGCNLTLQGCKEVAQVLPRMVVELINGQSDENERNESVDILYMYRSLDGPREDVPPFVKIL

SEQ ID NO: 519 - protein, 616 aa, Zea mays
ISDEPAPRCSRFAPRSRPMGGEVPEPRRLSRALSFGCGGVPEEALHLVFGYMDDPRDREAASLVCRLWHRIDALSRKHVTVGFCYAVEPARLLARFPRLESLALKGRPRAAMYGLIPEDFGAYAAPWVAELAAPLDCLKALHLRRMTVTDEDIAVLVHARGHMLQALKLDKCSGFSTDALRLVARSCRSLRTLFLEECIIEDEGSEWLHELAVNNSVLVTLNFYMTELKVEPADLELLAKNCKSLISLKMGDCDLSDLIGFFQTSKALQEFAGGAFFEVGEYTKYEKVIFPPRLCFLGGLTFMGKNEMPVIFPYSTMLKKLDLQFTFLTTEDHCQLIAKCPNLSVLEVRNVIGDRGLEVVAATCKKLRRLRIERGDDDPGQEEQGGVSQIGLTAVAVGCRELEYIAAYVSDITNGALESIGTFCKNLYDFRLVLLDKQKKITDLPLDNGVRALLRNCVKLRRFAFYLRPGGLSDVGLGYIGLYSGNIQYMLLGNVGESDNGLIQFATGCTNLRKLELRGCCFSERALAVAVLQMPSLRYIWVQGYRASRTGQDLMLMARPYWNIEFAPPIPESAYRVMADGQPCVDTHAQVLAYYSLAGRRPDCPQWLVTLHPASL

SEQ ID NO: 520 - protein, 660 aa, Zea mays
MSREAQKLDCTAAGGGIGVLSLDLLGQVLEHLREPRDRKTCRLVSRAFERAEAAHRRALRVLRREPLPRLLRAFPALERLDLSACASLDDASLAAAVADAGGGLAGLRSVCLARANGVGWRGLEALVAACPKLAAVDLSHCVSAGDREAAALAAASELRDLRLDKCLAVTDMGLAKVAVGCPKLEKLSLKWCREISDIGIDLLAKKCPELRSLNISYLKVGNGSLGSISSLERLEELAMVCCSGIDDEGLELLSKGSDSLQSVDVSRCDHVTSEGLASLIDGRNFLQKLYAADCLHEIGQRFLSKLARLKETLTLLKLDGLEVSDSLLQAIGESCNKLVEIGLSKCSGVTDGGISSLVARCSDLRTIDLTCCNLITNNALDSIADNCKMLECLRLESCSLINEKGLKRIATCCPNLKEIDLTDCGVDDAALQHLAKCSELRILKLGLCSSISDRGIAFISSNCGKLVELDLYRCNSITDDGLAALANGCKRIKLLNLCYCNKITDTGLGHLGSLEELTNLELRCLVRVTGIGISSVAIGCKNLIELDLKRCYSVDDAGLWALARYALNLRQLTISYCQVTGLGLCHLLSSLRCLQDIKMVHLSWVSIEGFEMALRAACGRLKKLKMLCGLKTVLSPELLQMLQACGCRIRWVNKPLVYKD

SEQ ID NO: 521 - protein, 394 aa, Glycine max
MSDHLPREVLTEILSRLPVRSLLRFRSTSKSWKSLIDSQHLNWLHLTRSLTLASNTSLILRVDSDLYQTNFPTLDPPVSLNHPLMCYSNSITLLGSCNGLLCISNVADDIAFWNPSLRQHRILPYLPVPRRRHPDTTLFAARVCGFGFDHKTRDYKLVRISYFVDLHDRSFDSQVKLYTLRANAWKTLPSLPYALCCARTMGVFVGNSLHWVVTRKLEPDQPDLIIAFDLTHDIFRELPLPDTGGVDGGFEIDLALLGGSLCMTVNFHKTRIDVWVMREYNRRDSWCKVFTLEESREMRSLKCVRPLGYSSDGNKVLLEHDRKRLFWYDLEKKEVALVKIQGLPNLNEAMICLGTLVPPYFLPRQICRKPRALGCERPRKTRDDFLSQGFKLTL

SEQ ID NO: 522 - protein, 563 aa, Glycine max
MGQSVSSAAVASRRERDQGHRSVNSSKTRFTASVSPMAGYSSGAAEEGENHRVEAVADESTDYISDLPNECLASVFQFLSSADRSRCSLVCRRWLQIEGQSRHRLSLNAELDLFPAIPSLFSRFDSVTKLALKCDRRSVSIRDDALVLISQRCPNLTRLKLRACRELTDAGMEAFAKNCKGLKKLSCGSCTFGSKGMNAVLDNCAALEELSVKRLRGIADTAAAEPIGPGVAAASLKTVCLKELYNGQCFGTLILGAKNLKTLKLFRCSGDWDRLFQLLVDRVTKIVEVHLERLQISDVGLQAIANYSSLEILHLVKTPECSDIGLVAIADRCKLLRKLHIDGWKANRIGDEGLIAVAKGCPNLLELVLIGVNPTKASLEMLASNCQNLERLALCGSDSVGDPEISCIAAKCVALKKLCIKSCPVSDQGMEALGNGCPNLVKVKVKKCKGVTPEGGDWLRRTRGSVAVNLDTGEAELQEASASDGGAQDNGVEFPQMPAQIAAASSSTRSSSSRFALMSARISAAALRSTRSGSSRLGLLPTRISAASTFRRWSGGSTSARHG

SEQ ID NO: 523 - protein, 317 aa, Zea mays
MAATVSSFPVVNMEKLETEERATAMEVIRDGCENWGFFELLNHGISHELMDEVERLTKAHYATFREAKFQEFAARTLEAGEKGADVKDVDWESTFFVRHLPASNLADLPDVDDRYRQVMEQFASEIRKLSERLLDLLCENLGLEPGYLKAAFAGSDGPTFGTKVSAYPPCPRPDLVDGLRAHTDAGGIVLLFQDDQVSGLQLLRGGEWVDVPPMRHAIVANVGDQLEVITNGRYKSVMHRVLTRPDGNRMSVASFYNPGADAVIFPAPALVGAAEEDRAEAAYPSFVFEDYMNLYVRHKFEAKEPRFEAMKSAIATA

SEQ ID NO: 524 - protein, 487 aa, Oryza sativa
MVSQVVAEEKPQLLSKKAGCNSHGQDSSYFLGWQEYEKNPFDPVSNPSGIIQMGLAENQLSFDLLEEWLEKNPHALGLRREGGGASVFRELALFQDYHGLPAFKNALARFMSEQRGYKVVFDPSNIVLNAGATSANEALMFCLADHGDAFFIPTPYYPGFDRDLKWRTGAEIVPVHCASANGFRVTRAALDDAYRRAQKRRLRVKGVLITNPSNPLGTASPRADLETIVDFVAAKGIHLISDEIYAGTAFAEPPAGFVSALEVVAGRDGGGAGVSDRVHVVYSLSKDLGLPGFRVGAIYSANAAVVSAATKMSSFGLVSSQTQYLLAALLGDRDFTRSYVAENKRRIKERHDQLVDGLREIGIGCLPSNAGLFCWVDMSHLMRSRSFAGEMELWKKVVFEVGLNISPGSSCHCREPGWFRVCFANMSAKTLDVAMQRLRSFVDSATGGGDNAALRRAAVPVRSVSCPLAIKWALRLTPSIADRKAER

SEQ ID NO: 525 - protein, 359 aa, Synechocystis PCC6803
MRLEISSPQTKLPYPKTEELPFTLQELRNAIPADCFEPSVVRSLGYFFLDVGLIAGFYALAAYLDSWFFYPIFWLIQGTLFWSLFVVGHDCGHGSFSKSKTLNNWIGHLSHTPILVPYHGWRISHRTHHANTGNIDTDESWYPVSEQKYNQMAWYEKLLRFYLPLIAYPIYLFRRSPNRQGSHFMPGSPLFRPGEKAAVLTSTFALAAFVGFLGFLTWQFGWLFLLKFYVAPYLVFVVWLDLVTFLHHTEDNIPWYRGDDWYFLKGALSTIDRDYGFINPIHHDIGTHVAHHIFSNMPHYKLRRATEAIKPILGEYYRYSDEPIWQAFFKSYWACHFVPNQGSGVYYQSPSNGGYQKKP

SEQ ID NO: 526 - protein, 585 aa, Saccharomyces cerevisiae
MLHRHGSKQKNFENIAGKVVHDLAGLQLLSNDVQKSAVQSGHQGSNNMRDTSSQGMANKYSVPKKGLPADLSYQLIHNELTLDGNPHLNLASFVNTFTTDQARKLIDENLTKNLADNDEYPQLIELTQRCISMLAQLWHANPDEEPIGCATTGSSEAIMLGGLAMKKRWEHRMKNAGKDASKPNIIMSSACQVALEKFTRYFEVECRLVPVSHRSHHMLDPESLWDYVDENTIGCFVILGTTYTGHLENVEKVADVLSQIEAKHPDWSNTDIPIHADGASGGFIIPFGFEKEHMKAYGMERWGFNHPRVVSMNTSGHKFGLTTPGLGWVLWRDESLLADELRFKLKYLGGVEETFGLNFSRPGFQVVHQYFNFVSLGHSGYRTQFQNSLFVARAFSFELLNSSKLPGCFEIVSSIHESIENDSAPKSVKDYWEHPQAYKPGVPLVAFKLSKKFHEEYPEVPQAILSSLLRGRGWIIPNYPLPKATDGSDEKEVLRVVFRSEMKLDLAQLLIVDIESILTKLIHSYEKVCHHIELASEQTPERKSSFIYEMLLALASPQDDIPTPDEIEKKNKLKETTTRNYRGTC

SEQ ID NO: 527 - protein, 498 aa, Zea mays
HASSDAWVSMDYLAAAVPVTLALGVGAILLVLRWTYCRRRTSAEEARLPPGSRGLLFLGETLHYLAASSTPGVLPPFFQRRLERYGPIFRTNLVGEDLVVSLDAELNAHVLKQEERGFQIWYPPSFMRVFGADNITAKLGVLHRHMRTLVLRLFGHQTVRSVLLHDVQRSARDELRSWLGRPDVEVRTATSRMIFGVTANKLISHDDAASGGTLWRCFHDWTSGLLSFPVSIPGTTFYRCMQGRKKVMTMLKQQLVERRRNAAERETTEDFFDLVIDELNKPDPMMDESTALDLLFTMLFASHETTSMVLTVILKYLTDNPKALQELTEEHERILESRADPGSDLTWEEYRSMKFTSHVIHESLRLANIALAMFRKANQDVHINGYTIPKGSKIMMCALASHLNTEVYEDPSVFNPWRWKDIPEPVGTSKDFMAFGGGLRLCAGAEFSKMQMAMFLHYLVTNYSWKPVSGGTMLFYPGLQFPEGFHIQLLPKIPNVVP

SEQ ID NO: 528 - protein, 499 aa, Zea mays
MAFFLALVCILILLAIASYVQYTRWQKGKGRFGGHGRSAPLKLPPGSMGWPYLGETLQLYSQDPSFFFASKQKRYGEIFKTHLLGCPCVMLASPEAARFVLVTQAHLFKPTYPRSKERMIGPSALFFHQGDYHLRLRKLVQGALGPDALRALVPEVEAAVRSTLASWDAGHVRSTFHAMKTLSFDVGIVTIFGGRLDERRKAELRKNYSVVEKGYNSFPNSLPGTLHYKAMQARRRLHGVLCDIMRERRGQAQAAGTGLLGCLMRSRGDDGAPLLSDEQIADNVIGVLFAAQDTTASALTWIVKYLHDHPKLLEAVRAEQAAVREATGGGRQPLAWAHTKSMALTHRVILESLRMASIISFTFREAVADVEYKGFLIPKGWKVMPLFRNIHHSPDYFQDPHKFDPSRFQVAPRPSTFLPFGHGVHACPGNELAKLEMLVLIHHLVTGYRWQIVGSSDEVEYSPFPVPKHGLPVRLWRQNNPVDRKGRETDDDHVERIFI

SEQ ID NO: 529 - protein, 518 aa, Zea mays
MCPVRGGGCSWPASVVGSVTAALLLAAVIVRLFVPRACSSGIIKGRRQVGAGAAGGARLPAGSLGWPLLGETLAFIRAAYSPRPESFVEKRRVLYGKVFKSHLWGSPAVVSSDPEVSRAVLQADASAFVPWYPRSLMELMGQSSILVLGGGLQRRVHGLAGAFFKSPQLKAQVTLDMQRRVGRAMDMWGRRHRSMGDDDSGGMPVRVQNEAKSIVFEILVRALIGLEEGDKMQYLRQQFQEFIAGLISLPVKLPGTQLYRSLKAKKRMTKLIKTIIQEKRKKMMSEGDEDLRGGTHPRDMIDVLLGNGNDELSDELISDNMIDFMIPAEDSVPVLITLAVKYLSECPLALQQLEEENMELKRQKSGAGETLEWTDYMSLAFTQHVITETLRMGNIINGIMRKAVRDVEVRGHLVPKGWRVLVYFRAVHLDAAVHDDPHAFNPWRWKERPDVVAMSGFTPFGGGQRLCPGLDLARLEASIFLHHLVTNFRWVAEEDTVVNFPTVRLKRGMPIAVTPRTC

SEQ ID NO: 530 - protein, 503 aa, Zea mays
MDAGGPPPLFLLGAVLAAALGWLLVVWRAAAGRRRSASARLPPGSTGLPLIGETLRLIAAYKSPNPEPFIDERVARHGSGVFTTHVFGERTVFSADPAFNRLLLAAEGRAVSCSYPSSIATLLGPRSLLLTSGPAHKRLHSLTLTRLGRPASPPLLAHIDRLVLATMRGWDRPGAGAMRLLDEAKKITFNLTVWQLVSIEPGPWTESVRREYVKLVDGFFSIPFPFASLLPFTVYGQALKARKKVAGALREVVRKRMDDKAEDDCGASKKNGEKKDMVEELLEAEGGSFSVEEMVDFCLSLLVAGYETTSVLMTLAVKFLTETPTALAQLKEEHDSIRGVKGKGQALEWSDYKSMPFTQCVISETLRVANLISGVFRRANTDIHFKGHVIPKGCKIFASFRAVHLSLDHYENARTFDPWRWQQGKSKLQSAEGASLFTPFGGGPRLCPGYELARVVVSVFLHHLVTRFSWEEAEEDRIVFFPTTRTLKGYPIILRRRPDCDDL

SEQ ID NO: 531 - protein, 519 aa, Zea mays
MLGVGMAAAVLLGAVALVLADAAARRAHWWYREAAEAVLVGAVALVVVDAAARRAHGWYREAALGSARRARLPPGEMGWPLVGGMWAFLRAFKSGKPDAFIASFVRRFGRTGVYRSFMFSSPTVLVTTAEGCKQVLMDDDAFVTGWPKATVALVGPRSFVAMPYDEHRRIRKLTAAPINGFDALTGYLPFIDRTVTSSLRAWADHGGSVEFLTELRRMTFKIIVQIFLGGADQATTRALERSYTELNYGMRAMAINLPGFAYRGALRARRRLVAVLQGVLDERRAARAKGVSGGGVDMMDRLIEAQDERGRRLDDDEIIDVLVMYLNAGHESSGHITMWATVFLQENPDMFARAKAEQEAIMRSIPSSQQGLTLRDFRKMEYLSQVIDETLRLVNISFVSFRQATRDVFVNGYLIPKGWKVQLWYRSVHMDPQVYPDPTKFDPSRWEGHSPRAGTFLAFGLGARLCPGNDLAKLEISVFLHHFLLGYKLARTNPRCRVRYLPHPRPVDNCLAKITRVGS

SEQ ID NO: 532 - protein, 470 aa, Zea mays
MGAFLLFVCLLAPVVVLACAVRGRKRRASSAAAGGKALPLPPGSMGWPYVGETFQLYSSKNPNVFFARKQNRYGPIFKTHILGCPCVMVSSPEAARFVLVTQAHLFKPTFPASKERMLGPQAIFFQQGDYHAHLRRLVSRAFSPEAIRGSVPAIEAIALRSLESWDGRLVNTFQEMKLYALNVALLSIFGEEEMRYIEELKQCYLTLEKGYNSMPVNLPGTLFHKAMKARKRLGAVVAHIIEARREGERQRGSDLLASFLDDREALTDAQIADNVIGVIFAARDTTASVLTWMVKFLGDHPAVLKAVIEEQQEIARSKGSSGEPLTWADTRRMRTTSRVIQETMRVASILSFTFREAVEDVEYQGYLIPKGWKVMPLFRNIHHSPDHFPCPEKFDPSRFEVAPKPNTFLPFGNGTHSCPGNELAKLEMLVLFHHLATKYRWSTSKSESGVQFGPFALPLNGLPMTFVRKD

SEQ ID NO: 533 - protein, 1319 aa, Oryza sativa
LSLSFFQYHVCLFTLLLCFIPITALAESDIKNLFALRKAIAVGKGFLHNWFELETPPCNWSGISCVGLTVVAIDLSSTPLYVDFPSQIIAFQSLVRLNVSGCGFSGELPEAMVNLQHLQHLDLSDNQLGGPLPASLFDLKMLKVMVLDNNMFSGQLSPAIAHLQQLTVLSISTNSFSGGLPPELGSLKNLEYLDIHTNAFSGSIPASFSNLSRLLYLDANNNNLTGSIFPGIRALVNLVKLDLSSNGLVGAIPKELCQLKNLQSLILSDNELTGSIPEEIGNLKQLEVLNLLKCNLMDTVPLSIGNLEILEGLYISFNSFSGELPASVGELRNLRQLMAKSAGFTGSIPKELGNCKKLTTLVLSGNNFTGTIPEELADLVAVVLFDVEGNRLSGHIPDWIQNWSNVSSISLAQNMFDGPLPGLPLHLVSFSAESNRLSGSIPAKICQGTFLQILRLNDNNLTGSIDETFKGCKNLTELSLLDNHLHGEIPEYLALLPLVSLDLSHNNFTGMIPDRLWESSTILDISLSDNQLTGMITESIGKLLSLQSLSIDRNYLQGPLPRSIGALRNLTALSLSGNMLSEDIPIQLFNCRNLVTLDLSCNNLTGHIPKAISHLTKLNTLVLSRNRLSGAIPSELCVAFSRESHSELEYVQHIGLIDLSRNRLTGHIPRAINNCSILVELHLQDNLLSGTIPVELAELRNITTIDLSSNALVGPVLPWPVPLASLQGLLLSNNRLSGSIPSGIGNILPQITMLDLSGNALTGTLPLDLLCKESLNHLDVSDNNISGQIPFSCHEDKESPIPLIFFNASSNHFSGSLDESISNFTKLTYLDLHNNSLTGRLPSAIARVTSLYYLDLSSNDFSGTIPCGICGMFGLTFANFSGNRDGGTFTLADCAAEEGGVCAANRVDRKMPDHPFHVLEATICCIATAIVIVLVVILVVYLRRRRKMLRRRQFVLVPAGDNAMADHETTLSNNLLGRRRMKKREPPSINLATFEHAPVRVTVDEIMRATGNFDGMHVVGDGGFGTVYRAELPGGRRVAVKRLHGVGRRFQGGEREFRAEMETVGKVRHPNLVPLLGYCAAGDERFLVYEYMEHGSLEDRLRGGGGAALGWPERLTICGGAARGLAFLHHGFVPHVIHRDVKSSNVLLGEGLQPRVSDFGLARIISACETHVSTVLAGTLGYIPPEYALAMRCTAKGDVYSFGVVMLELLTGRPPTWSSAEVTAEGDDERGGGGSLVGWVRWMAARGRGGEVFDACLPVSGAEREQMARVLDVARDCTADEPWRRPTMAEVARRVGAIEAMEYGPLVVAVSSGEPPAMP

SEQ ID NO: 534 - protein, 402 aa, Glycine max
  unsure (1)..(402): unsure at all Xaa locations
FGSSPNPPFLNKNKKIKKNPSISWTSMTSLSTHHTYSRKQKSLGLLCTNFLSLYNKEGVRLVGLDDAASRLGVERRRIYDIVNVLESVGVLTRKAKNQYTWKGFCAIPAALQELKDEGLKENPGSFDDSNDNAKVSDDEEEEEETFPNINIGSQSEKENPDYTATVKSSKNENRREKSLALLTQNFVKLFVCSNFEMISLDEAAKLLLGNANNRTKVRRLYDIANVLSSMNLIEKTHTTNTRKPAFRWLGVRGKTWGGSVDLAQNSNVKESRKRMFGTDIGNISFKRNKVDLSMDGQNSKMQNQHENISPRAQLEKIIIKKDAKQTSESYQFGPFAPAYVPKVGTSENNSVKKVHDWDSLAQEHRPQYQNQGXALKDLFSHYMEAWKSWYSEAAGKKSTKTL

SEQ ID NO: 535 - protein, 1043 aa, Zea mays
MFTPQGKGWTGWSTPTPANQRSGGGAPAASAPLGKGKGRVAELEQELHEYQYNMGLLLIEKKEWAAKFEEISEVLTQKEEILKREQAAHLNAISEYERREENMRKALGVEKQCVADLEKALRDIRAEIAEVKFTSEKKITDAQSLEASLEEKSLEIEGKLHAADAKLAEANRKKSQADRDLEEAEARQRRLEKEKLYFETERKAREKQLKEQEESLQEWEKKLKESQNRLNELQRSINEREERANKNDQLFKIKQDELEEARRTVEAAKVTLKVKEDDINKRLNELHLQEKDADSKRSALEEQGKKLDEREAKVTNREKEGLQKLLEDHQVELESKRRDFELELERERKSFDQNMTQKQADLLKREKDVKSLEAKLSKSEQALNDKKKSMENLQNDLDAKSKALKSWDESLKNDEKRLLKEKQQMDHEREQLETYKLELEKIKSALEAEKEKISEEQNNLKLTAQERQEHSLLIAKLKKEIEEYRMRSNSLSEEMEDLRKQRQKFEEEWEQLDEKRALLVEEDKRLNIERMNLERWRDNEEKRLNDMKLKMDEEYKQQLESLERKEKALSDDMKHKQMENDEFLKGERADVQRKLQLKRHELEMEMEQKQATKEKELEEKENELNKKIDFVENKLRHAIELNESKIEKLLLEKREVQMERELLLEERKKTETDKADIRRDIESLHSLSKSLKERREAYNRDRSRLIELFEKYKACKNCGISIFEGLDSLLLKDSAEIEHPSLAVEGDDHALTTDTSGPDTGTLVNSGGRFSLLQKCSRLFKFSPRKKGEQSSEQPSERNISFGARLEEATQSDGDYVPTPVYEIAHDSFNAEDELPSDGETRENEESERHDIADNAQMESSVGVADNSIDILGTKSFDGANDMAVEATIVSVDQNGEDSVVPAEAGVEPETSEQGRRQQNQRGRRKGGMKRTRSVNAVVEDAKMILGEVFEEKTDDQGDTVKVGATRKRRFAGATISEQDEEGSEAHSESVSLGGQRRKRRQTAGAVTDAPGERRYNLRHSRAANAGAATAQADKKKIFKSKK

SEQ ID NO: 536 - protein, 436 aa, Oryza sativa
MDSVVRTHIGHMLKMIHFCSMFLITFSDYKIQAILSSQQKRKAPEESDVAESSDCMITSPGFAVSPMLTPVSGKAVKTSKSKTKNNKAGPQTPTSNVGSPLNPPTPVGTCRYDSSLGLLTKKFINLLKQAPDGILDLNNAAETLEVQKRRIYDITNVLEGIGLIEKTLKNRIRWKGLDDSGVELDNGLSALQAEVENLSLKEQALDERISDMREKLRGLTEDENNQRWLYVTEDDIKGLPCFQNETLIAIKAPHGTTLEVPDPDEAGDYLQRRYRIVLRSTMGPIDVYLVSQFDEKFEDLGGGATPSGHANVPKHQPTEVFNTTNAGVGQCSNSVAVDNNIQHSQTIPQDPSASHDFGGMTRIIPSDIDTDADYWLISEGDVSITDMWKTAPDVQWDESLDTDVFLSEDVRTPSSHNQQPSAVGGPQMQVSDMHKP

SEQ ID NO: 537 - protein, 321 aa, Zea mays
MAPAVSAAASAAMRQALRDRQILDAVGTGAAALSLAGSSFIVICYLLFRELRKFSFKLVFYLAVSDMFCSLFTILGGPSNAFYCFAHDYSAHFFCVASFLWTTTISFTLHRTVVKHKTDVEEFGSIFHLYVWGTSLSTTVLRSIGSDYGRPGTWCWIQQGSMAKVLHLITFYLPLWGAILYNGFTYYEVNRMLNNATQMAAGISDRSNQSDIRADRKAFNRWGYYPLILIGSWAFATINRLYDFANPGHRIVWLSFLDVGFAGLMGLFNSIAYGLNSSVRRAISERIDTFLPERIKRSLPALSRLRSQQENELTSLIVEGN

SEQ ID NO: 538 - protein, 506 aa, Glycine max
MSGGGEEGATLEFTPTWVVAAFCTVIVAISLAAERLLHYGGKFLKAKDQKPLYEALQKIKEELMLLGFISLLLTVTQNGITKICVRPSLTLHMLPCNLHDAPANHESHFQTFFPGTARRLLSGEHSTPESASKIGYCSRKHKVPLLSVEALHHLHIFIFVLAVVHVSFSVLTVVFGGARIRQWKHWEDSIAKQNYETDRVLKPKVTQVHQHDFIRGRFAGFGKDSAIVGWLLSFLKQFYGSVTKSDYVTLRHGFIMTHCRTNPKFNFHKYMIRALEDDFKQVVGISWYLWLFVVIFLLLNINGWHTYFWIAFIPVILLLAVGTKLEHIITQLAHEVAEKHAAIEGDLVVQPSDDHFWFHRPRVVLFLIHFILFQNAFEIAFFFWIWVTYGFDSCIMGQVRYIVPRLVIGVFIQVLCSYSTLPLYAIVTQMGTHYKRAIFNDHLQQNIVGWAQKAKKRKGLKADGNPGQGSSQESANTGIQLGSIFKKATAPGDSSSAPKADGISSV

SEQ ID NO: 539 - protein, 598 aa, Glycine max
MYSSKFRKLFCSVLFSWLCFGGLAMAAGESSSSSRDLDQTPTWAVAAVCTVFILVSIALEKSLHKVGTWLGQKKKKALLEALEKVKAELMILGFISLLLTFGQSYIVRICIPEKLADNMLPCPYKYKEDKKASDSEEEHRRKLLSYERRYLAADTTSFKCSREGHEPLLSVNGLHQLHILVFFLAVIHVLYSAITMMLGRLKIRGWKAWEAETSTHNYEFANAASRFRLTHETSFVRAHSSFLTRIPIFFYIRCFFRQFYRSVNKTDYLTLRNGFITVHLAPGSKFNFQKYIKRSLEDDFKVVVGVSPILWASVVVYLLINVNGWHTVLWAALIPVVIILAVGTKLQAILANMALEITERHAVVQGMPLVQGSDKYFWFGQPQLVLHLIHFALFQNAFQITYILWIWYSFGLRNCFRTDYKLAVVKVALGILMLCLCSYITLPLYALVTQMGSRMKTAIFDEQTNKALKKWHMAAKKKQGGAVTLGKSSARIMDGSPIGNSSTVHSTGPTLHRFKTTGHSTRSSSTAYEDQDQDHEYESDGVELSPLASQTTSFIVRVDHGDQQQAEHRQDSEGETNSSSEGEFSFVKPDPVEIRTTT

SEQ ID NO: 540 - protein, 390 aa, Oryza sativa
MSVLTCVFDNMGSSCSRSHSLSEAETTKNAKSADIDRRILQETKAEQHIHKLLLLGAGESGKSTIFKQIKLLFQTGFDEAELRSYTSVIHANVYQTIKILYEGAKELSQVESDSSKYVISPDNQEIGEKLSDIDGRLDYPLLNKELVLDVKRLWQDPAIQETYLRGSILQLPDCAQYFMENLVRLAEAGYVPTKEDVLYARVRTNGVVQIQFSPVGENKRGGEVYRLYDVGGQRNERRKWIHLFEGVNAVIFCAAISEYDQMLFEDETKNRMMETKELFDWVLKQRCFEKTSFILFLNKFDICEKKIQKVPLSVCEWFKDYQPIAPGKQEVEHAYEFVKKKFEELYFQSSKPDRVDRVFKIYRTTALDQKLVKKTFKLIDESMRRSREGT

SEQ ID NO: 541 - protein, 109 aa, Glycine max
MASETASSADEETVVVVSAAAGAGGTDKRGKHRILAELKRLDQESKFLQEELEELEKTENVSTICTELLQNIDTRPDPLLPEVHGPVNLLWDRWFEGPQDPQACRCWIL

SEQ ID NO: 542 - protein, 271 aa, Triticum sp.
MLLLNPASEAAAAALDSIRQQLLEEPMAPARPAYCRSASFGSLVADQWSESLPFRPNDADDMVVYGALRDAFSCGWLPDGSFAAVKPEPLPSPDSYDGCCLGSFLASPPGLDAPWAEEAEVAATASRGKHFRGVRQRPWGKFAAEIRDPAKNGARVWLGTFDSAEDAAVAYDRAAYRMRGSRALLNFPLRIGSEIAAAAGQKRPSPQPASPDSPPPSSSAPGSSKRRKRGEAAAESMSMALVPPPPVQAPVQLTLPVQPWLATGAVQQLVS

SEQ ID NO: 543 - protein, 442 aa, Sorghum bicolor
MAGSSSMDTEAAGQQLKHGSGYSIPATAHAVDTDSWQQVSLLMVIGFNCAYVLSFSNLMMVPLGWAWGVACLLLVGAAAWYANWLLAGLHFVDGQRFIRYRDLMGFVFGRNMYYITWFLQFTTLLLCNMGFILLGARALKAINSEFTHTPARLQWFVTATGFIYFAFAYFVPTISAMRNWLATSAALTLAYDVALLAILIRDGKSNKQKDYNVHGTQAEKVFNALGAVAAILVCNTSGLLPEIQSTVREPAVRGMRRALLLQYTAGAAGYYGISVAGYWAYGSAVSEYLPNELGGPRWAAVLINATAFLQSIVSQHLFTVPIHEAMDTRLQRLDEGMFSRYNLTRRLCARGLVFGFNVFVTALFPFMGDFVNLVGSFALVPLTFTFPSMAILKIKGKSGGRCNRLWHWGIIVFSSVLCVATTAAAVRLIFNNARIYHFFADM

SEQ ID NO: 544 - protein, 475 aa, Oryza sativa
MASGQKVVKPMEVSVEAGNAGEAAWLDDDGRARRTGTFWTASAHIITAVIGSGVLSLAWAIAQLGWVAGPAVMLLFAFVIYYTSTLLAECYRTGDPATGKRNYTYMDAVRANLGGAKVTFCGVIQYANLVGVAIGYTIASSISMRAIRRAGCFHHNGHGDPCRSSSNPYMILFGAVQIVFSQIPDFDQIWWLSIVAAVMSFTYSGIGLSLGIVQTISNGGIQGSLTGISIGVGVSSTQKVWRSLQAFGDIAFAYSFSNILIEIQDTIKAPPPSEAKVMKSATRLSVATTTVFYMLCGCMGYAAFGDAAPDNLLTGFGFYEPFWLLDVANVAIVVHLVGAYQVFVQPIFAFVERWASRRWPDSAFIAKELRVGPFALSLFRLTWRSAFVCLTTVVAMLLPFFGNVVGLLGAVSFWPLTVYFPVEMYIAQRGVPRGSARWVSLKTLSACCLVVSIAAAAGSIADVIDALKVYRPFSG

SEQ ID NO: 545 - protein, 856 aa, Zea mays
MAQQMASVHLNDTTVVDAKPLRTLTPMFPAPLGLHTFTPQNSPSVVCVTPFGPYGGGTELGMPAVPPMFAAPVPAAGAEPSQRQPHTANMNGGDTELGMPAVPPMFAAPAPAAGAEPNQGQPHTANMNGTAVNSSVTSLQTPSAATQESGKRKRGRPKRVPDTTVSSAPSAPLAPTISPVPSLPVVTPVPSAPQELNTIVSLTPSSDAPQESGKRKRGRPKRIQDVPVMVPLTSQGDSTSVIQTLPGSSVHESGTRRGRPKRLQDSSDIVTPIDSKDSESSPQPPIAAPAESGKRKRGRPKRIDGSVTPSSHSVFSIDDDAVDTMKRGRPRKIDTKLLQFPSLFSDDPRQTADNVLMMFDALRRRLMQMDDVKQAAKQQPNLKAGSIMNNAELRVNKDKRIGEVPGVEVGDMFYFRIEMCLVGLNSQSMAGIDYMSAKFGNEEDPVAISVVSAGVYDNTGDDPDVLVYTGHGMSGKDDQKLERGNLALERSLHRGNPIRVIRSVKDLTCPTGKIYIYDGLYKIKEAWVEKGKSGFNVFKHKLLREPGQPDGIAVWKKTEKWRENPSSRDHVILLDISYGVENNPVCLVNEVDDEKGPSRFTYTTNLTYGNSLSSMRKMQGCKCISVCLPGDNNCSCTHRNAGDLPYSASGILVSRMPVLYECGDSCTCSQNCRNRVVQKGTQIRFEVFKTGDRGWGLRSWDPIRAGTFICEYAGEIIDINRVNGEDDYIFETSPLEQNLRWNYAPELLGEPSLSDSNETPKQLPIVISAKRTGNIARFMNHSCSPNVFWQPVLYDHGDEGYPHIAFFAIKHIPPMTELTYDYGQNQRNSIQMGTHSGFRKSKSCLCWSPKCRGSFG

SEQ ID NO: 546 - protein, 542 aa, Zea mays
MSARDSNHSYKCSDDSQMPYYNNSAPVGENGRIHMAENSLGHHYSSSDIGSQRINNSNPQVFEAQYCTLESSSANGVYPAQSSTSSHSISPLSGSPLSQHDSHSDHTYSSPPSASCLTEVAGLLIKQKELENSIVGPGLDISSDCSRSLLQAHVPVRPDNWRQLLGINGGDLMQVVIACGKAVAENDVFATELLISELGHLVSVSGDPMQRLGAYMLEGIVARLSSSGSMLYKSLKCKEPTSSELMSYMHLLYEICPFYKFGYMSANGAIAEAIKGENFVHIIDFQIAQGSQWVTLLQALAARPGGPPYIRITGIDDSNSAYARGGGLDIVGRTLCDVANSCGLPFEFNAVPAASHEVELQHLAIRHGEIIAVNFAYQLHHVPDESVSTENHRDRIIRMIKSINPRVVTLVEQESNTNTAPFFPRYMETLNYYTAMFESIDVALPRDDRRRMSAEQHCVARDIVNLIACEGAERVERHELFGKWKSRFAMAGFRPYPLSSVVNNTINTLLHTYNSYYRLEERDGVLYLGWKNRVLVVSSAWC

SEQ ID NO: 547 - protein, 194 aa, Zea mays
MVMVSGGGGNAWAKEMTLRRRIASIFNKTQEHFPTLKDYNDYLEEVEDMTFNLIEGIDVEEIEAKIARYQQENAEQIYLSRAKRAEDLAAALKASRMNPVKAEANDTAAGSSQGISGGAGVQGQYAPAAVLGGVAQPRPTGMAPQLIGSGSDPLQGDDEETRRLRAERAARAGGWTAELSKRRALEEAFSAIFI

SEQ ID NO: 548 - protein, 140 aa, Oryza sativa
MRKYRVAGLVAALLVLHSLATPSAQAEAHRAGGEGEEKMSSDGGPVLGGVEPVGNENDLHLVDLARFAVTEHNKKANSLLEFEKLVSVKQQVVAGTLYYFTIEVKEGDAKKLYEAKVWEKPWMDFKELQEFKPVDASANA

SEQ ID NO: 549 - protein, 250 aa, Oryza sativa
MRVAATTRPASSSAAAPLPLFLLLAVAAAAAALFLVGSASLAMAGHVLGGAHDAPSAANSVETDALARFAVDEHNKRENALLEFVRVVEAKEQVVAGTLHHLTLEALEAGRKKVYEAKVWVKPWLDFKELQEFRNTGDATTFTNADLGAKKGGHEPGWRDVPVHDPVVKDAADHAVKSIQQRSNSLFPYELLEIVRAKAEVVEDFVKFDILMKLKRGNKEEKFKAEVHKNLEGAFVLNQMQQEHDESSSQ

SEQ ID NO: 550 - protein, 109 aa, Sorghum bicolor
MAEAHSGRRVGMVGDVRDAPEGHENDLEAIELARFAVDEHNSKTNAMLEFERLVKVRHQVVAGTMHHFTVQVKEAGGGKKLYEAKVWEKVWENFKQLQSFQPVGDAAVA

SEQ ID NO: 551 - protein, 369 aa, Zea mays
MEGGRDVFLGAAARAPPPPPSCPFHGSATATRSGGAQMLSFSSNGVAGLGLCSGASKMQGVLSRVRRPFTPTQWMELEHQALIYKHFAVNAPVPSSLLLPIKRSLNPWSSLGSSSLGWAPFRSGSADAEPGRCRRTDGKKWRCSRDAVGDQKYCERHIKRGCHRSRKHVEGRKATPTTADPTMAVSGGSLLHSHAVAWQQQGKSSAANVTDPFSLGSNRNLLDKQNLGDQFSVSTSMDSFDFSSSHSSPNQAKVAFSPVAMQHEHDQLYLVHGAGSSAENVNKSQDGQLLVSRETIDDGPLGEVFKGKSCQSASADILTDHWTSTRDLRPPTGVLQMSSSNTVPAENHTSNSSYLMARMANSQTVPTLH

SEQ ID NO: 552 - protein, 621 aa, Zea mays
MSPNLDSAIKSQVPALLLRRLFGASRRDEAKQLQRTPAPVGRRRVFVQTETGCVLGMDLDRGDNAHTVKRRLQLAFNMPTGGTSLTFGDRVLENDLSFLRPDSPLLLTRNSINRSCSTPCLCPVSKDFEHKDCSGLVEMLGCSSSCARVKRLVDDVVTAIRSGVDPVPISSGLGGSYYFRNVLGDRVAIVKPTDEEPFAPNNPKGFVGRALGQPGLKRSVRVGETGFREVAAFLLDHDNFANVPATALVKITHSIFNINCPVNGGNLAPAHDQQQQVNSKIASFQQFIAHDFDASDHGTSSFPVAAVHRIGILDIRIFNTDRHAGNVLVRKLNGGTGRFGCQTELFPIDHGMCLPENLEDPYFEWIHWAQASIPFSEEELEYIRNLDPRKDVQMLRRELPMIREACLHVLALCTIFLKEAAAFGLCLAEIGEMMTREFRGMEEEPSQLELMCMEARKRVAEWEPFSATAEHGEDTDFQFSVDMLGEYSDVVRSPRFNGSGSKVSSFRSPLSKLVESVDEGSDGHEDQNESDRVLYAGWNTSSVPSKAMGHSGNASKSAMNRSADEQLPSSMCFVRLSDMSADEWDVFLEKFQELLKETLHESARAAAGQRMKQRLGTSCKF

SEQ ID NO: 553 - protein, 370 aa, Zea mays
MAAGAGGGELEALEGVRSIVLKPSESLDESRFTRIAGADFNDPAIGLQGLLASLASTGFQASNLGDAIDVVNQMLDWRLSHEKPSEDCDEAELDPKYRASVKCKIFLGFTSNLVSSGIRDIIRFLAQHHMVDVIVTSAGGIEEDLIKCLAPTYRGDFSLPGALLRSKGLNRIGNLLVPNDNYCKFENWIMPLFDQMLQEQSTENVWTPSKVIARLGKEINDESSYLYWAYKNNIPVYCPALTDGSLGDMLFCHAVRNPGLIIDIVQDIRLMNGEAIHATPRKTGIIVLGGGLPKHHICNANMFRNGADYAVYINTAQEFDGSDSGAHPDEAVSWGKIKGSAKPVKVHCDASIAFPLLVAATFARKVHNSK

SEQ ID NO: 554 - protein, 630 aa, Zea mays
MKREYQDAGGSGGDMGSSKDKMMAAAAGAGEQEEEDVDELLAALGYKVRSSDMADVAQKLEQLEMAMGMGGVGGAGATADDGFVSHLATDTVHYNPSDLSSWVESMLSELNAPPAPLPPATPAPRLASTSSTVTSGAAAGAGYFDLPPAVDSSSSTYALKPIPSPVAAPSADPSTDSAREPKRMRTGGGSTSSSSSSSSSMDGGRTRSSVVEAAPPATQASAAANGPAVPVVVVDTQEAGIRLVHALLACAEAVQQENFSAAEALVKQIPMLASSQGGAMRKVAAYFGEALARRVYRFRPPPDSSLLDAAFADLLHAHFYESCPYLKFAHFTANQAILEASAGCRRVHVVDFGIKQGMQWPALLQALALRPGGPPSFRLTGVGPPQPDETDALQQVGWKLAQFAHTIRVDFQYRGLVAATLADLEPFMLQPEGDDTDDEPEVIAVNSVFELHRLLAQPGALEKVLGTVRAVRPRIVTVVEQEANHNSGTFLDRFTESLHYYSTMFDSLEGAGAGSGQSTDASPAAAGGTDQVMSEVYLGRQICNVVACEGAERTERHETLGQWRSRLGGSGFAPVHLGSNAYKQASTLLALFAGGDGYRVEEKDGCLTLGWHTRPLIATSAWRVAAAAAP

SEQ ID NO: 555 - protein, 561 aa, Zea mays
MSFVRQADPSVSCAETTYIHKFVPPGPVFPAQRFVSGTDLLHHGPQPYNAEGYKQSGFNGTAPHAFQSFYNTDSYAESHFNEAPYSPAIFDISQQNSQSLSDNQASDLVEFDEDEMRVKLQELEHALLDDGDEIFFDLSGSINDEWNDNIKTNNEWVNTMKNIVSPDSPKEASPESSICCLDNNVGEARNPKQLLFDCAEAISENSIDEAQSIIAELRQKVAIQGEPSQRLAAYLVEGLAATLQSSGKGIYRALRCKEAPTLYQLSAMQILFEICPCFRLGFMAANYAILEACKGEDVVHIIDFDINQGSQYITLIQFLKNNSNKPRLLRITGVDDPESVHRAVGGLNVVGQRLEKLAEDCEVRFEFRAVAANIEDLTPGMLGRRPGEALIVNFAFLLHHLPDESVSIMNQRDRLLRMVKGLRPKLVTLVEQDANTNTTPFPSRFREVYDYYSALFDSLDATLPRESPDRMNVERQCLAREIVNILACEGPDRVERYEVAGKWRARMAMAGFVSSPFNSGAIDGIRSLLKSYCDKYRFEKVQDGLHFGWGDKTLVFSSAWQ

SEQ ID NO: 556 - protein, 162 aa, Zea mays
MASPSSSPSRKALSKIACSRLQKELAEWQVNPPAGFKHRVTDDLQRWVIDVAGAAGTLYTGETYKLQVDFPEHYPMEAPQVIFLHPAPMHPHIYSNGHICLDILYDSWSPAMTVSSICISILSMLSSSPEKQRPADNDRYVKNCRNGRSPKETRWWFHDDTV

SEQ ID NO: 557 - protein, 232 aa, Zea mays
MAPSLLGGFTKSLAMTVLSEIGDKTFFAAAILAMRHPRKLVLAGCLTALIVMTALSASLGWVAPNLISRKWTHHLTTLLFFLFGIWSLWEGFKEDGDSEELAEVEAELDAAFKSNKGESKNKFKANDDMKKQQRPFLMQFFSPIFLKAFSITFFGEWGDKSQIATIGLAADENPFGVVLGGIIAQALCTTAAVLGGKSLASQISEKMVELSSGVLFLLFGIMSLLSGPEGEL

SEQ ID NO: 558 - protein, 429 aa, Oryza sativa
MSSPPPAAAAAMAVDDADDDQLASMSTEDIVRATRLLDNETRVLKDELQRTNLEVESYKEKIKENQEKIKLNKQLPYLVGNIVEILEMNPEDEAEEDGANIDLDSQRKGKCVVLKTSTRQTIFLPVIGLVDPEKLKPGDLVGVNKDSYLILDTLPSEYDSRVKAMEVDEKPTEDYNDIGGLEKQIQELVEAIVLPMTHKDRFQKLGIRPPKGVLLYGPPGTGKTLMARACAAQTNATFLKLAGPQLVQMFIGDGAKLVRDAFQLAKEKSPCIIFIDEIDAIGTKRFDSEVSGDREVQRTMLELLNQLDGFSSDERIKVIAATNRADILDPALMRSGRLDRKIEFPHPSEEARARILQIHSRKMNVNPDVNFEELARSTDDFNGAQLKAVCVEAGMLALRRDATEVTHEDFNEGIIQVQAKKKSSLNYYA

SEQ ID NO: 559 - protein, 213 aa, Oryza sativa
MSRHPEVKWAQRIDKVYITVQLADAKDAKVNLEPEGVFSFSATAGTDGNLYESKLELNDKVNVEESKISVGVRSIFCIVEKAEAKWWKKLVRDDQKAPHFVKVDWDKWVDEDDDGADVNVDGMDFSNFGGMGGMGGMGGMGDMMGGMGGMGGMGGMAEMMGGMGGMGGMGGMGGMDEFEDESDDEEEVSKPQDAEKAAEAGKSQESDAKAETS

SEQ ID NO: 560 - protein, 165 aa, Zea mays
MSSSGPLLATGTHHTGRQPEVLWAQRSEKIFLTISLPDAKDVVLKTDPKGLFNFSAVVHGEPFSFTLELFDSILSEGSKTKTKMGLRNIICSIQKEKKGWWKRLLKSEEKHPYIKVDWNKWCDEDEESEFSGDSDGGFDEANEGDESDDDDGMLYLPDLEKLRGK

SEQ ID NO: 561 - protein, 173 aa, Oryza sativa
MSRHPSTKWAQRSDKVFLTIELPDARDVKLNLKPEGQFIFSAKGPADDTPYELDLELFDAVNVEESKAAVAARSICYLIKKAESKWWPRLLKKEGKPPVFLKVDWDKWQDEDDEDIGLGDFGDMDFSKLGMGGPDDDLEDDDEDDTADSANKDDEDIKAEGSGEQEAAGEAKP

SEQ ID NO: 562 - protein, 176 aa, Zea mays
MSRHPITKWAQRSDRVFLTIELPDAQDVKLNLKPEGHFNFSAKGSDDLRYEFDIELFDAVNVEESKAAIAPRTICYLIKKAKSGWWPRLLKQEGKPPVFLKVDWDKWQDEDDEDAGFNDFGGMDFSKLDIGGADDDDIGDDEDDVVESANKDEEGGKTEESKEEEAAPAAAEEVKP

SEQ ID NO: 563 - protein, 339 aa, Oryza sativa
MARRSSSRACAAMATAAVFALLAATATASGLVRVEHPAKSDGSLSLLVVGDWGRKGTYNQSRVAEQMGKVGEKLNIDFVISTGDNFYEDGLTGVDDQAFEESFTDIYTAKSLQKPWYLVLGNHDYRGDVLAQLSPVLRKIDQRFICMRSFIVNAEIVDFFFIDTTPFQLKYWTRPKDHHYDWRGVAPRQKYITNLLKDMDEAMKKSTAKWKIAVGHHTIRSVSDHGDTKELLQLLLPVLKVNGIDFYINGHDHCLEHISSRDSPIQYFTSGGGSKAWRGVLQPNSDKLQFFYDGQGFMSLQINQDQADFIFYDVSGNILYKWSKSKANYLQPSTYITEA

SEQ ID NO: 564 - protein, 348 aa, Zea mays
MAPPAHDRLRRLVLLLVVATAAAALLLAPTTADAALPRVQHTPTKADGSLAILVVGDWGRRGQFNQTLVAQQMGVVGQKLDIDFVISTGDNIYDDGIANTSDPLFKESFSNIYTANSLQKPWYLVLGNHDYTGNALAQLDPAIRKVDSRYTAIAKSFIVNSGVADFFLVDTTPFIVHYWNNTKFDWRGVAPRDTYIANLLKDLKCALTASKAPWKIVVGHHPISSACGHGNNTELEELLLPVLRTHGVDMYLNGHDHCLQRVSSRDSRLQLLTSGGGSKAWAGKFKPTLDKVEFLYDGQGFMSMRLSRTEARLAFFDVAGSVLHCWTMHAQKLKTTTTTTAAAAAAGH

SEQ ID NO: 565 - protein, 256 aa, Oryza sativa
MKLAVVAVAALLLAAGVASADEFDFFYLVQQWPGSFCDTQAGCCFPDTGKPAAEFGIHGLWPNYAKCRPAAGAVADDDDGVVEMVVDGGAAVERHHRRRQKCWPEYCDDGNKLRPWEIKDLVAELDANWPTLSCKGGKSFEFWSYEWKKHGTCSGMGQHGYFAAALELKKRHDLAAVLAGAGIVPSDDESYSLGSIRDAIAAATGAVPNLECNRDAAGETQLFQVYQCVDRSGKKLVDCQLPMQGKCRDKVKLPTF

SEQ ID NO: 566 - protein, 278 aa, Zea mays
MTMATKAACVLAVWVLVASGLCDLGSARAPLGSKPQREFDYFALSLQWPGTICASTRHCCATNGCCRSEPLQTFTIHGLWPDYDDGTWPSCCRRTQFEMDKILPLKEVLDKYWPSLYCSKSGTCFSGKGLFWAHEWEKHGTCSAPVVQDELQYFTLALDLYSKYNVTEMLSSGGIQVSNGKEYALSDVIDTIKHAFGGSPQIVCKRGSIEELRLCFDKELKPRDCLTTSLANGSVSKSKHCPRYITLPTYDPLVLANSTVEIMTQFDEFDVPAALYTA

SEQ ID NO: 567 - protein, 270 aa, Zea mays
  unsure (1)..(270): unsure at all Xaa locations
MASCRMALLLGLLLLVVASPAIADDDSGIYYQLALMWPGAYCEQTSAGCCKPTTGVSPARDFYITGFTVLNATTDAAVTGCSNKVPYDPNLITGIQGLNQYWSNIRCPSNNGQSSWKNAWKKAGACSGLSEKDYFETALSFRSRINPLVRLKAKGIEPDFGLYGLKAITKVFKSGINATPVIQCSKGPFDKYMLFQLYFCAAGNGTFIDCPAPQQYTCSKEILFHPFKKWMLKQQLNQDDDPFQLPGVAXWTTDTPYRRLCLRFCQVCME

SEQ ID NO: 568 - protein, 229 aa, Zea mays; identical to SEQ ID NO: 473

SEQ ID NO: 569 - protein, 185 aa, Zea mays
MEDGSAPRRSTPPARRSRSAEFHNFSERRRRDKINEKLKALQELLPNCNKTDKVSMLDEAIDYLKSLQLQLQMLVMGKGMSPVVPLELQQYMHYITADPAQLPPLRPSGQQHRQFQITQANPQRQSNVESDFLSQMQNLHSSEPPQNFLRPPKLQLYTPEQRGGLPSTSHNTGWISGSSSYNFME

SEQ ID NO: 570 - protein, 199 aa, Zea mays
MAATAMDHDGGDDVVTPGELLGNSLTLAAGRGAYADGRSVRASVTGRRRIVPPAPASDDQRSTVEVVGHKAHGAVPQPGSVVIARVTKVMARMASADIMCVDSKAIREKFTGMIRQQDVRATEIDKVDMYQSYRPGDIVKAMVLSLGDARAYYLSTAKNELGVVSAQSIAGGTLVPISWTEMQCDLTGQIEQRKVAKVE

SEQ ID NO: 571 - protein, 287 aa, Zea mays
MVGLSEGEKHFIRGGIAQDVRTDGRRRLQFRSLSVQTGVIPQANGSARVRLGATEIIASVKAELGKPSILHPDKGKVAIFVDCSPTAEPLFEGRGSEELSAELSVSLQRCLLGGKSGAGAAIDLSSLIVVDGKVCWDLYIDGLVVSSDGNLLDALAVAIKVALSDTGIPKVNVSVSAASDEEPEVDVSDEEFLQFDTSGVPVIITLTKVGRHYIVDATSEEESQMSSAVSVSVNRHGQICGLTKRGGAGLDPSVIFDMISVAKHVSQQFISLLDSEIAAAEAEEEAQ

SEQ ID NO: 572 - protein, 256 aa, Oryza sativa
MSREENVYMAKLAEQAERYEEMVEYMEKVAKTVDVEELTVEERNLLSVAYKNVIGARRASWRIVSSIEQKEEGRGNEEHVTLIKEYRGKIEAELSKICDGILKLLDSHLVPSSTAAESKVFYLKMKGDYHRYLAEFKTGAERKEAAESTMVAYKAAQDIALADLAPTHPIRLGLALNFSVFYYEILNSPDKACNLAKQAFDEAISELDTLGEESYKDSTLIMQLLRDNLTLWTSDLTEDGGDEVKEASKGDAGEGQ

SEQ ID NO: 573 - protein, 260 aa, Oryza sativa
MSPAEASREENVYMAKLAEQAERYEEMVEFMEKVAKTTDVGELTVEERNLLSVAYKNVIGARRASWRIISSIEQKEESRGNEAYVASIKEYRSRIETELSKICDGILKLLDSHLVPSATAAESKVFYLKMKGDYHRYLAEFKSGAERKEAAENTLVAYKSAQDIALADLPTTHPIRLGLALNFSVFYYEILNSPDRACNLAKQAFDDAIAELDTLGEESYKDSTLIMQLLRDNLTLWTSDNAEDGGDEIKEAAKPEGEGH

SEQ ID NO: 574 - protein, 206 aa, Oryza sativa
MAEVEAAPIAAAETPEVAAAEGAAAAKAPHKLHRQWAFWYDIQSKPKPGAAWGTSLRKAYTFDTVEEFWGLYDQIFRPSKVTVNADFHLFKAGVEPKWEDPECANGGKWTVPCSRKTTLENMWLETLMALIGEQFDESEEICGVVASVRQRGDKLALWTRTASNEAVQVNIGKKWKEIVDYNDKMVYSFHDDAKREKPSRGGRYNV

SEQ ID NO: 575 - protein, 227 aa, Oryza sativa
MAEEHETRPPSAGRPPSSGRGRADDADEREEGEIADDDSGHAPPQANPAAPHPLEHAWTFWFDNPQGKSKQATWGSSIRPIHTFSTVEDFWSLYNNIHHPSKLVVGADFHCFKNKIEPKWEDPICANGGKWTFSCGRGKSDTMWLHTLLAMIGEQFDYGDEICGAVVSVRGKQERIAIWTKNAANEAAQISIGKQWKEFLDYKDSIGFIVHDDAKKMDKGLKNRYTV

SEQ ID NO: 576 - protein, 210 aa, Sorghum bicolor
MAEVEVPAAAVATTIPEAAEATEGGAAAEAKGPHKLHRQWTFWYDIQSKPKPGAAWGTSLKKAYTFDTVEEFWSLYDQIFRPSKLSGNADFHLFKAGVEPKWEDPECANGGKWTVPCNRKATFENMWLETLMALIGEQFDETEDICGIVASVRARGDKLALWTRTASNEAVQVNIGKKWKDVIDYNDKITYTFHDDSRREKPSRGGRYTV

SEQ ID NO: 577 - protein, 220 aa, Sorghum bicolor
MADEIDTRPASAGSRGRPAHATEDDDREEGEIADDTPAPALPVTHPLEHSWTFWFDNPQGKNKQAAWGSSIRPIHTFSTVEDFWGLYNNIHHPSKLVIGADFHCFKNKIEPKWEDPICANGGKWTISCGRGKSDTLWLHTLLAMIGEQFDYGDEICGAVVSVRGKQERIAIWTKNAANEAAQISIGKQWKEFLDYKDSIGFIVHDDAKKADKGPRNRYTV

SEQ ID NO: 578 - protein, 352 aa, Oryza sativa
MADSPSPRLDEEDAFGRDFNSSPSPTAPPARSGEKRPFGDLDDDDEDVFASKKGKTKVEESAPGAATGMILSLRESLQNCKDNLASCQVEREAAKSEVQKWHSAFQNIPAVPAGTNPDPVSVVSYLNNLKSSEESLKEQLEKAKKREAAFIVTFAKREQEIAELKSAVRDLKTQLRPPSMQTRRLLLDPAIHEEFTRLKNLVEEKEKKIKELQDNVAAVNFTPSSKHGKMLMAKCRTLQEENEEIGAMASEGKIHELGMKIAVLKTRNNELRNQFNELYKHMDGLTNDVERSNEMVAILQDELETKDVELRRLKEMLAQKEATDENKIPQENDVAGDDIVAAAESQPIKVET

SEQ ID NO: 579 - protein, 554 aa, Zea mays
MADTPTSRMVHPFGDVPRQTPKQFLYSGNPQHLCHPYQSAPDTHVVPQRCYTVRSQSHSPNNAGSQDHETHKQYTLESSAASGCSRHGSPSSQSVHAGSGSPVSHDDSHSGSTNGHGSPVSASCVTGEDPTDLKQKLKDLEAVMLGTSETDPEIVNSLEISAANQLSLEPEEWEHMVSMPRGNLKELLIACARAVERNNSYAIDLMIPELRKMVSVSGEPLERLGAYMVEGLVARLAASGSSIYKALKCKEPRSSDLLSYMHFLYEACPYFKFGYMSANGAIAEAIKGEDRIHIIDFHIAQGAQWVSLLQALAARPGGPPFVRVTGIDDSVSAYARGGGLELVGRRLTHIAGLYKVPFQFDAVAISGSEVEEEHLGVVPGEAVAVNFTLELHHIPDETVSTANHRDRILRLVKGLSPKVLTLVEQESNTNTAPFAQRFAETLDYYTAIFESIDLALPRDDRERINIEQHCLAREIVNLVACEGEERVERHEVFGKWKARLMMAGFSPSPLSALVNATIKTLLQSYSPDYKLAERDGVLYLGWKNRPLIVSSAWH

SEQ ID NO: 580 - protein, 492 aa, Zea mays
MDPYKHRPSSGSNSSFWTTNSGAPVWNNNSALTVGQRGPILLEDYHLIEKLAQFDRERIPERVVHARGASAKGFFEVTHDVSHLTCADFLRAPGVQTPVIVRFSTVVHERGSPETLRDPRGFAVKFYTREGNFDLVGNNMPVFFIRDGMKFPDMVHAFKPNPKTNLQENWRIVDFFSHHPESLHMFTFLFDDVGIPLNYRHMEGFGVNTYTLINRDGKPHLVKFHWKPTCGVKCLLDNEAVTVGGTCHSHATKDLYDSIAAGNYPEWKLYIQTIDLDHEDKFDFDPLDVTKTWPEDIIPLQPVGRMVLNKNVDNFFAENEQIAFCPAIIVPGIHYSDDKLLQTRIFSYADTQRHRLGPNYLMLPVNAPKCAHHNNHHDGFMNFMHRDEEVNYFPSRFDPARHAEKVPIPPRVLTGCREKCIIQKENNFKQAGERYRSFDPARQDRFIQRWVDALTDPRVTHEHRTIWISYWSQCDAALGQKLASRLNLKPSM

SEQ ID NO: 581 - protein, 496 aa, Zea mays
ITMDPTKFRPSSSHDTTVTTTNAGAPVWNDNEALTVGPRGPILLEDYHLIEKVAHFARERIPERVVHARGASAKGFFECTHDVTSLTCADFLRAPGVRTPVIVRFSTVIHERGSPETIRDPRGFAVKFYTREGNWDLLGNNFPVFFIRDGIKFPDVIHAFKPNPRSHVQEYWRVFDFLSHLPESLHTFFFLFDDVGVPSDYRHMEGFGVNTYTFVSAAGKAQYVKFHWKPTCGVRCILTDEEAALVGGRNHSHATQDLYDSIAAGSFPEWTLYVQVMDPDTEEQYDFDPLDDTKTWPEDLLPLRPVGRLVLDRNVDNFFNENEQLAFGPGLVVPGIYYSDDKMLQCRVFAYADTQRYRLGPNYLMLPVNAPRCAHHNNHYDGAMNFMHRDEEVDYYPSRHAPLRQAAPPTPLPPRPVAGRREKATIRKPNDFKQPGERYRSWDADRQDRFVRRFADSLGHPKVSQELRSIWIDLLAKCDASLGMKIATRLNMKPNM

SEQ ID NO: 582 - protein, 289 aa, Zea mays
MAAPMVDAEYLRQVDRARRHLRALISNKGCAPIMLRLAWHDAGTYDLKTKTGGANGSIRYEEEYTHGSNAGLKIAIDLLEPIKAKNPKITYADLYQLAGVVAVEVTGGPTVEFIPGRRDSSVCPREGRLPDAKKGAPHLRDIFYRMGLSDKDIVALSGGHTLGRAHPERSGFDGAWTKEPLKFDNSYFLELLNEESEGLLKLPTDKALLSDPEFRRYVELYAKDEDAFFKDYAESHKKLSELGFTPRSTAPSKSDLPTAAVLAQSAFGVAVAAAVVIAGYLYEASKKAK

SEQ ID NO: 583 - protein, 447 aa, Zea mays
MDEEYDVIVLGTGLKECIISGLLSVDGLKVLHMDRNDYYGGESSSLNLTKLWNRFKGNDSPPEHLGVSKEYNVDMVPKFMMANGALVRVLIRTSVTKYLNFKAVDGSFVYNNGKIHKVPATDVEALKSNLMGLFEKRRARKFFIYVQDYEEDDPKSHEGLDLNKVTTREVISKYGLEDDTVDFIGHALALHRDDSYLDEPAIDTVKRMKLYAESLARFQGGSPYIYPLYGLGELPQAFARLSAVYGGTYMLNKPECKVEFDESGKAYGVTSEGETAKCKKIVCDPSYLPDKVKKVGRVARAICIMKHPIPDTKDSHSVQIILPKKQLKRKSDMYVFCCSYAHNVAPKGKFIAFVSTEAETDKPEIELKPGIDLLGPVEETFFDIYDRYEPVNNPDDDCCFLTNSYDSTTHFETTVKDVLALYNKITGKELDLSVDLNAASATEQEAA

SEQ ID NO: 584 - protein, 458 aa, Glycine max
MDEEYDVIVLGTGLKECILSGLLSVDGLKVLHMDRNDYYGGESTSLNLIQFELRNDDFLCPPLQLWKRFRGDDKPPPHLGASRDYNIDMNPKFIMANGNLVRVLIHTDVTKYLYFKAVDGSYVFNKGKVHKVPANDMEALKSPLMGLFEKRRARKFFIYVQNYNESDPKTHEGMDLTRVSTKELIAKYGLDDNTIDFIGHALALHSDDRYLAEPALDTVKRMKLYAESLARFQGGSPYIYPLYGLGELPQAFARLSAVYGGTYMLNKPECKVEFDEEGKVVGVTSEGETAKCKKVVCDPSYLPGKVRKVARVARAIAIMSHPIPSTDDSHSVQIILPQKQLGRKSDMYLFCCSYTHNVAPKGKFIAFVSTEAETDQPAIELKPGIDLLGPVDEIFFDIYDRYEPVNEPTLDNCFISTSYDATTHFESTVDDVLNMYTLITGKVIDLSVDLSAASAAEE

SEQ ID NO: 585 - protein, 247 aa, Zea mays
MSSAVEAISCPKVDVPAGPEPGEPAKEAAPPAEHCDTAPNGKCAPRCHGEEEEEEEDEEDEEKAPKAIDLGPMVSIKEQLEKDKDDESLRRWKEQLLGGVDLNSVGETLEPDVKIMSLSILSPGRPDIVLPLPVEPNGKGVWFTLKEGSPYRLKFTFSVSNNIVSGLRYTNTVWKTGLKVDRAKEMLGTFSPQLEPYTYVTPEDTTPSGMFARGSYSARTKFLDDDRKCYLEINYTFDIRREWPSTS

SEQ ID NO: 586 - protein, 132 aa, Zea mays
MAQVRGSARGTGSGSSAAALALVLLCALLRGEFAESAVYTVGDRGGWSFNTASWPNGKRFRAGDVLVFRYDARAHNVVPVSAAGYSSCSAPEGARALATGNDRVTLRRGANYFICSFPGHCQAGMKVAVTAA

SEQ ID NO: 587 - protein, 127 aa, Zea mays
MAEGRGSARAIGAMAFAVACCYCCVAIADAATTYYVGDSNGWSFSSPSWPNGKHFRAGDTLVFRYIPWIHNVVAVDEDGYNGCTTPPGSRTYTSGADSVTLARGDNFFICTRFGHCNLGMKLVVYAA

SEQ ID NO: 588 - protein, 127 aa, Glycine max
MSQGRGSASLPIVVTVVSLLCLLVLLERADAATYTVGGPGGWTFNTNAWPKGKRFRAGDILIFNYDSTTHNVVAVDRSGYNSCKTPGGAKVFSSGKDQIKLARGQNYFICNYPGHCESGMKVAINAV

SEQ ID NO: 589 - protein, 182 aa, Zea mays
MLCPCMHHVLVYNVSGTFVRSSACISQYLVKEKSSDPARPAGSCVAAFQYSSAHSVLEVSEADHGACSASNPLRSHQGQSTTIPLTKAGTRYFICGAPGHCASGMKVAITVSGGGGGGSSSADNTATPSGPSVRAMNTKPAFGLRSGGATTTDESDSSAAGSGARLAMGLLFGAAGLAAIMG

SEQ ID NO: 590 - protein, 195 aa, Zea mays
MAATSRLALALLLAALVAAWQLPAAAVAANYTVGDEKGWNPDVDYTAWVKKHKPFYKGDWLIFEYQNGRSDVVQVDEVGYDNCDKANALSSYSKGHTYAFQLKDAKDYYFICSYGYCYNGMKLHVTAKSSSSSSSSSSGSDSSSSSSDDDSSSPSPPAKKSKAKTSAAPPPSLLAATPMAAAAAAAAALLLNRML

SEQ ID NO: 591 - protein, 350 aa, Zea mays
MERERQAVARNRKVVLRGYIDRAPREEDMELVDGGAVELRVPEGGGGPAVLVKNLYLSCDPYMRGRMRDFRNSYIPPFKPGSPIEGFGVGRVVDSTHPGFSAGDVVSGMTGWEDYSLITKPEQLRKIQQSDIPLSYHLGLLGMPGFTAYVGFYEICSPKKGEFVFVSAASGAVGQIVGQLAKLHGCYVVGSAGTDQKVELLKEKFGFDAAFNYKEEPDLTAALKRHFPEGIDIYFENVGGPMLDAVLLNMRVHGRIAVCGMVSQHGVTAPAGIHNLFSLISKRIEMKGFIQSDYVHLFPQFVDDITRHYRDGKIVYVEDMSVGLESGPASFVGLFSGKNVGKQVVCVSRD

SEQ ID NO: 592 - protein, 342 aa, Glycine max
MTQVRNKQVVLRDYVTGFPKESDMNIVEGTIILKVPEGSNDVLLKNLYLSCDPYMRLLMAKDRSFGDGSFTLASPLKGYGVSQVLESGRPDYKKGDLVWGITKWEEYSLVPSSLIHFKIEHTDVPLSYYTGILGMPGMTAYAGFFEVGSPKKGDTVFVSAASGAVGQLVGQFAKLTGCYVVGSAGSKEKVDLLKNKLGFDEAFNYKEEPDLNAALKRYFPEGIDIYFENVGGKTLDAVLPNMKFHGRIPVCGMISQYNLTQFDGVTNLANLIFKRVKMEGFIATDFYHLYPKFLEFVLPHIREGKVVYVEDIAEGLEKGPAALVGLYTGRNVGKQVVVVTHE

SEQ ID NO: 593 - protein, 358 aa, Zea mays
MATTATNRRVILKEYVEGYPREEHMELLQGAEVPLRLTGAEPAGSVLVRNLYLSCDPYMRPKMSRPLRESYTAAFVPGDTITGYGVARVVDSSDPRLAPGDLVWGITGWEDYSVVTPPATRLLSKISHHGVGEGAGVPLSYYTGILGMPGLTAYVGFHEICAPKKGETVFVSAASGAVGQLVGQFARLAGCHVVGSAGSREKVELLKTRFGFHDAFNYKEEPDLGAALKRCFPDGIDIYFENVGGAMLDAVLLNMRVHGRIAVCGLISQYNLADGEKDAVRNLAAVISKRLRLQGFIEPDHKHLYPQYEAWVLPYIRDGTLAYVEDVAEGLESAPKALIGLFHGRNVGKQLVRVADDE

SEQ ID NO: 594 - protein, 335 aa, Zea mays
MADLIKAVDIRGGKGERDALFINPQTPKPSPTEGQALVRVKAFGINRMDIVQRRGFYPLPPQAPATLGVEFSGTIESLGPGDHGAFKQGDEVFGLAYGGAYAEYLAVSTRMLLHKPSSMDFVTCAGIPETWITATQALHLVLGFTKGKSILWHAGASGVSIAGIQLSKIAGASQVFATAGSQEKCDFITSKLGATAAFNYKTQDWAEEIKKHTDGNGVDYIVDFVGASYFQQNQTAAARDGRIVLLGTLGGVKIPEADISQILYKRLRIEGSTLRSRDEEYQGKLRDRLEEYLPDFESGKLKILVDKVLPWEEIQEAHKHMEEAKNLGKIICTIS

SEQ ID NO: 595 - protein, 525 aa, Aspergillus nidulans
MSPLNGVARSFPRPFQAVTRRPFRVVQPAIACPSNSRSFNHSRSLRSTGSQSPAPSPRDSSNPALSFPCLDAQEAKSALLSARSLGSGPEPSYTAGHHERFHSDEPLLLDWGGLLPEFDIAYETWGQLNEKKDNVILLHTGLSASSHAHSTEANPKPGWWEKFIGPGKTLDTDKYFVICTNVLGGCYGSTGPSTVDPSDGKKYATRFPILTIEDMVRAQFRLLDHLGVRKLYASVGSSMGGMQSLAAGVLFPERVGKIVSISGCARSHPYSIAMRHTQRQVLMMDPNWARGFYYDSIPPHSGMKLAREIATVTYRSGPEWEKRFGRKRADPSKQPALCPDFLIETYLDHAGEKFCLEYDANSLLYISKAMDLFDLGLTQQLATKKQRAEAQAKISSGTNTVNDASCSLTLPEQPYQEQPSASTSAEQSASASETGSAPNDLVAGLAPLKDHQVLVIGVASDILFPAWQQREIAETLIQAGNKTVEHIELGNDVSLFGHDTFLLDVRTSEAQFASSVLVGSHIIVQ

SEQ ID NO: 596 - protein, 241 aa, Synechocystis PCC6803
ILFICCSDSRVDPNLITQSEVGDLFVIRNAGNIIPPYGAANGGEGAAMEYALVALEINQIIVCGHSHCGAMKGLLKLNSLQEKLPLVYDWLKHTEATRRLVLDNYSHLEGEDLIEVAVAENILTQLKNLQTYPAIHSRLHRGDLSLHGWIYRIEEGEVLAYDGVLHDFVAPQSRINALEPEDEYALHPNSPLISYDAFKVPGKERPGREKATESPAPQLSPLPGFGHLPREQAERIYRGSR

SEQ ID NO: 597 - protein, 200 aa, Synechocystis PCC6803
MTEVLRVGQPAPDFTATAIVDQSFQTVKLSTYRGKYLVLFFYPLDFTFVCPTEIIAFSDRHSEFTALDTEVVGISVDSEFSHLAWIQTERKMGGIGNINYPLVSDLKKEISQAYNVLEPDAGIALRGLFIIDREGILQYATVNNLSFGRSVDETLRVLKAIRHVQSHPNEVCPVDWQEGDKTMIPDPEKAKTYFETVAEP

SEQ ID NO: 598 - protein, 196 aa, Saccharomyces cerevisiae
MVAEVQKQAPPFKKTAVVDGIFEEISLEKYKGKYVVLAFVPLAFSFVCPTEIVAFSDAAKKFEDQGAQVLFASTDSEYSLLAWTNLPRKDGGLGPVKVPLLADKNHSLSRDYGVLIEKEGIALRGLFIIDPKGIIRHITINDLSVGRNVNEALRLVEGFQWTDKNGTVLPCNWTPGAATIKPDVKDSKEYFKNANN

SEQ ID NO: 599 - protein, 261 aa, Saccharomyces cerevisiae
MFSRICSAQLKRTAWTLPKQAHLQSQTIKTFATAPILCKQFKQSDQPRLRINSDAPNFDADTTVGKINFYDYLGDSWGVLFSHPADFTPVCTTEVSAFAKLKPEFDKRNVKLIGLSVEDVESHEKWIQDIKEIAKVKNVGFPIIGDTFRNVAFLYDMVDAEGFKNINDGSLKTVRSVFVIDPKKKIRLIFTYPSTVGRNTSEVLRVIDALQLTDKEGVVTPINWQPADDVIIPPSVSNDEAKAKFGQFNEIKPYLRFTKSK

SEQ ID NO: 600 - protein, 176 aa, Saccharomyces cerevisiae
MSDLVNKKFPAGDYKFQYIAISQSDADSESCKMPQTVEWSKLISENKKVIITGAPAAFSPTCTVSHIPGYINYLDELVKEKEVDQVIVVTVDNPFANQAWAKSLGVKDTTHIKFASDPGCAFTKSIGFELAVGDGVYWSGRWAMVVENGIVTYAAKETNPGTDVTVSSVESVLAHL

SEQ ID NO: 601 - protein, 260 aa, Glycine max
MACSATSASLFSANPTPLFSPKPSLSLHLNPLPTRPSPSLTRPSLSLTRPSHSRRSFVVKASSSELPLVGNTAPDFEAEAVFDQEFINVKLSDYIGKKYVVLFFYPLDFTFVCPTEITAFSDRHAEFEALNTEILGVSVDSVFSHLAWIQTDRKSGGLGDLNYPLISDVTKSISKSYGVLIPDQGIALRGLFIIDKEGVIQHSTINNLAIGRSVDETKRTLQALQYVQENPDEVCPAGWKPGEKSMKPDPKLSKDYFAAV

SEQ ID NO: 602 - protein, 214 aa, Glycine max
MASLTVPNHCVPTLLRTHSLNYPSSQNLPLPSAPSNSQFFGLKLSHSSFSTIPSSSSSLKGSIFAKVTKGSKPPNFTLKDQNGKNVSLSNFKGKPVVVYFYPADETPGCTKQACAFRDSYEKFKKAGAVVVGISGDDAASHKAFASKYKLPFTLLSDEGNKVRKEWGVPGDFFGSLPGRETYVLDKNGVVQLVYNNQFQPEKHIGETLKILQSL

SEQ ID NO: 603 - protein, 240 aa, Zea mays
MAAAPFAIAGRLSPVARLPVRAWRPAHGFASSGRARSLAVASAAQENRDNSVDVQVSQNGGNRQQGNAVQRRPRRATALDISPSPFGLVDPMSPMRTMRQMLDTMDRLFDDAVGFPMGTRRSPATTGDVRLPWDIVEDEKEVKMRIDMPGLARDEVKVMVEDDTLVIRGEHKKEEGAEGGSGGDGDGWWKQRSVSSYDMRLALPDECDKSKVRAELKNGVLLVTVPKTEVERKVIDVQVQ

SEQ ID NO: 604 - protein, 208 aa, Zea mays
MSRRAAALLLACLVAVTAAALADGALLPWFGDGRRGLDEAAVTDVGLLAADPFRILEHVPFGFDRDDVAMVSMARVDWRETPDAHEIVVDVPGMRREDLRIEVEDNRVLRVSGERRRAEERKGDHWHREERSYGRFWRRFRLPENADLDSVAASLDSGVLTVRFRKLAPEQIKGPRVVGIAGGDGGAEAKESIGTGAGDGHQTKKVEL

SEQ ID NO: 605 - protein, 221 aa, Zea mays
MGPYSTAVAVSASPVLQASSLLTRARGSWRPTVAALRLSASVKCRRRALTVTCALPEKERPAAFNIPPTALLCPVPPPDGKERWDIKEEDDRVTLWLQVPGLSASDIEVTTSEDVLEIKRRVVAPQQPAPVDAHGVGAFHIRLLLTKEYDGSNVTADLKAGMLEVTVHKNPQRPGERAVMMGATKPPPEPRQNEESSTNQRSSTARKETGTPMGRQNPNGV

SEQ ID NO: 606 - protein, 165 aa, Zea mays
MDGRMFGLETPLMVALQHLLDVPDGDAGAGGDKASGAAAGGGPTRTYVRDARAMAATPADVKELPGAYAFVVDMPGLGTGDIRVQVEDERVLVISGERRREEREDAKYLRMERRMGKFMRKFVLPDNADMDKISAVCRDGVLTVTVEKLPPPEPKKPKTIEVKVA

SEQ ID NO: 607 - protein, 154 aa, Zea mays
MSLVRRGSVFDPFSVDLFDPFDSVFRSIVPSSSSAAAASETAAFASARIDWKETPEAHVFKADLPGVKKEEVKVEVEDGNVLLISGQRSREKEDKGDKWHRVERSSGQFVRRFRLPENAKTEEVRAALENGVLTVTVPKAEVKKPEVKSIQISG

SEQ ID NO: 608 - protein, 208 aa, Zea mays
MSTVTSCTFLSLGSPVRPAVSSARPAAAAVASRRRPRSLSVCCEAGRKGDHNPKTDLHPFNIPAFVLVHPVAPREERWQLEEDADKVNLWFEVPGQSKDDLTVEIDEDVLVIKKRKELVGQRSPAGGGVAEYGSQSQQQSRRGTADGKELPAAQQGQAGEVVYARMLLPAGYSRDGVQAELKSGVLRVTVVKVTERARRKIDVPIQVK

SEQ ID NO: 609 - protein, 799 aa, Saccharomyces cerevisiae
MSTIYRESDSLESEPSPTPTTIPIQINMEEEKKDAFVKNIDEDVNNLTATTDEEDRDPESQKFDRHSIQEEGLVWKGDPTYLPNSPYPEVRSAVSIEDDPTIRLNHWRTWFLTTVFVVVFAGVNQFFSLRYPSLEINFLVAQVVCYPIGRILALLPDWKCSKVPFFDLNPGPFTKKEHAVVTIAVALTSSTAYAMYILNAQGSFYNMKLNVGYQFLLVWTSQMIGYGAAGLTRRWVVNPASSIWPQTLISVSLFDSLHSRKVEKTVANGWTMPRYRFFLIVLIGSFIWYWVPGFLFTGLSYFNVILWGSKTRHNFIANTIFGTQSGLGALPITFDYTQVSQAMSGSVFATPFYVSANTYASVLIFFVIVLPCLYFTNTWYAKYMPVISGSTYDNTQNKYNVTKILNEDYSINLEKYKEYSPVFVPFSYLLSYALNFAAVIAVFVHCILYHGKDIVAKFKDRKNGGTDIHMRIYSKNYKDCPDWWYLLLQIVMIGLGFVAVCCFDTKFPAWAFVIAILISLVNFIPQGILEAMTNQHVGLNIITELICGYMLPLRPMANLLFKLYGFIVMRQGLNLSRDLKLAMYMKVSPRLIFAVQIYATIISGMVNVGVQEWMMHNIDGLCTTDQPNGFTCANGRTVFNASIIWSLPKYLFSSGRIYNPLMWFFLIGLLFPLAVYAVQWKFPKFKFAKHIHTPVFFTGPGNIPPSTPYNYSLFFAMSFCLNLIRKRWRAWFNKYNFVMGAGVEAGVAISVVIIFLCVQYPGGKLSWWGNNVWKRTYDNDYKKFYTLKKGETFGYDKWW

SEQ ID NO: 610 - protein, 520 aa, Zea mays
MAAAPPPKADELQPFPPKEQLPGVAFCITSPPPWPEAILLGFQHFVVMLGTTVIIPSALVPQMGGGNEEKARVVQTILFVAGINTLFQTLFGTRLPVVMGGSYVFVGPTISIVLAGRYSNEADPHEGALLVASTIQIILGFSGLWRNVVKLLSPLAAVPLVSLVGFGLYELGFPGVAKCVEVGLPELLLLVVFSQYLPQVLDFGKSVFSRFSVLFTVAIVWLYAYILTIGGAYKNSPPKTQVHCRVDRSGLISGAPWISVPYPFQWGAPTFDAGEAFAMMMTSFIALVESTGAFIGASRYASATMIPPSIISRGVGWQGIGLLLDSFFGTANGTSVSVENIGLLALTRIGSRRVVQISAGFMIFFSVLGKFGALFASIPLPVFAGMYCLFFAYVGGVGLSLLQFCNLNSFRTKFIMGFAFFMGLSVPQYFNEYTAVASYGPVHTGARWFNDMINVPFTSKPFVAGLVAYILDNTLQVKESAVRKDRGNHWWEKFRSFKKDARSQEFYSLPFNLNKFFPSV

SEQ ID NO: 611 - protein, 533 aa, Zea mays
MAGGGAATPPKQEELQPHPVKDQLPSVSYCITSPPPWPEAVILGFQHYIVMLGTSVIIPSALVPQMGGGNEEKARVIQTLLFVAGINTLCQSFFGTRLPAVMGGSYTIVAPTISIIMAGRYSNEADPREKFLRTMRGTQGALIIASTIQIVLGFSGLWRNVVKLLSPLSAVPLVSLAGFGLYELGFPGVAKCVEIGLPEIILMLIFSQYLPHAVHAAKPVFDRFSVIFTIAIVWLYAYILTVSGAYKNARTKTQLHCRVDRSGLVGGAPWISVPYPFQWGAPTFDAGESFAMMVAAFVALVESSGAFIAVSRYASATMIPPSVLGRGIGWQGIGTLLGAFFGTANGTAVSVENAGLLALTHVGSRRVVQISAGFMIFFSVLGKFGAIFASIPLPIFAALYCILFAYIGACGLSFLQFCNLNSFRTKFIMGFSLFMGLSVPQYFNEYTSVAGYGPVHTGARWFNDMINVPFSSKPFVAVLVAFLLDNTIQVRDSGVRRDRGYHWWDKFRSFKTDSRSEEFYSLPFNLNKFFPSV

SEQ ID NO: 612 - protein, 480 aa, Zea mays
MSFRSIVRDVRDGFGSLSRRSFEVTLASIYGLTGHHKGKTQSSSHVLDDSPSIIRESRWANLPPELIRDIIRRLEADESTWPARKHVVCFAAVCRTWREMCKEIVLSPEFCGKLTFPVSLKQPGPRDGNTMVQCFIKRNKSKSTYHLYLCLSNVVTSESGKFLLSAKRHRKTTCTEYTISMDSGNISRSKRTYIGKIRSNFLGTRFLIYDTQPPYNGAVVPPAGRTSRRFNSTKVSPKLPSVSYNIAQVSYELNVLGTRGPRRMRCIMHSIPASSVEPGGTVPGQPEQIVPRALEDSFRSTASFSQSFRSTASFSKSIMDSSMDFNSARFSDIAGSSARFTGVPGSSARFAGVPGSSARFSGIAGARLDNDEESETKERPLVLRNKPPRWHEQLQCWCLNFRGRVTIASVKNFQLIAAATPPPAGAPTPSQPAPSDPDKVILQFGKVARDMFTMDYRYPLSAFQAFAICLSSFDTKLACE

SEQ ID NO: 613 - protein, 370 aa, Zea mays
  unsure (1)..(370): unsure at all Xaa locations
MPRDGAQAAPPPERGEMDEVVEADPDTEAEDQEERWARLLPELLSDVVRRVEASGGERWPARKDVVSCACVCRRWREAAVSVVRPPAESGKITFPSSLKQVDXGFPYMASSAPGPRERPMQCFIKRNKNNSTFYLYLGFTSSPVDKGKFLMAARRFRRGPHTEYIISLDAEDLSQGSNAYMGKLRSDFWGTNFKIYDSKPPYDGAKASSSRSSRRFGSRRISPQVSAGNYEVGQVSYKYNLLKSRGPRRMYCTLECPSAQETWENSLKTKFRRPLGPTTLRNKAPRWHEHLQCWCLNFHGRVTVASVKNFQLVAAADPSEPTTNVDDETVLLQFGKVDSDMFTMDYRQPLSAFQAFAISLSSFGTKLACE

SEQ ID NO: 614 - protein, 454 aa, Glycine max
MASSRPANVGILAMDIYFPPTCVTQDALEGHDGVSKGKYTIGLGQDCMAFCSEVEDVISMSLTVVTSLLEKFNVDPKQIGHLAVGSETVIDKSKSIKTFLMQVFEASGNTDIEGVDSTNACYGGTAALFNCVNWVESSSWDGRYGLVVCTDTAVYAEGPARPTGGAAAIAMLVGPDAPIAFESKLRGSHMSHAYDFYKPNLASEYPIVDGKLSQTCYLMALDSCYRLYCEKFEKLEGRPFSMSDSDYFVFHSPYNKLVQKSFGRLYFNDFLRNASFVDEVARETLAPYASLSGDESYQSRDLEKANQQAAKHLYDAKVQPSTLIPKQVGNMYTASLYAAFASLLHNKNSSLVGKRVVMFSYGSGLTATMFSFQLQEGQHPFNLSNIVTVMNVSDKLKQRVEIPPEKFVETLKIMEHRYGGKDFVTSKDCSYLTPGTFYLTNVDSMYRRFYAKKD

SEQ ID NO: 615 - protein, 491 aa, Saccharomyces cerevisiae
MKLSTKLCWCGIKGRLRPQKQQQLHNTNLQMTELKKQKTAEQKTRPQNVGIKGIQIYIPTQCVNQSELEKFDGVSQGKYTIGLGQTNMSFVNDREDIYSMSLTVLSKLIKSYNIDTNKIGRLEVGTETLIDKSKSVKSVLMQLFGENTDVEGIDTLNACYGGTNALFNSLNWIESNAWDGRDAIVVCGDIAIYDKGAARPTGGAGTVAMWIGPDAPIVFDSVRASYMEHAYDFYKPDFTSEYPYVDGHFSLTCYVKALDQVYKSYSKKAISKGLVSDPAGSDALNVLKYFDYNVFHVPTCKLVTKSYGRLLYNDFRANPQLFPEVDAELATRDYDESLTDKNIEKTFVNVAKPFHKERVAQSLIVPTNTGNMYTASVYAAFASLLNYVGSDDLQGKRVGLFSYGSGLAASLYSCKIVGDVQHIIKELDITNKLAKRITETPKDYEAAIELRENAHLKKNFKPQGSIEHLQSGVYYLTNIDDKFRRSYDVKK

SEQ ID NO: 616 - protein, 571 aa, Zea mays
  unsure (1)..(571): unsure at all Xaa locations
MDLHQLLKYRLTGANVYYEFPTENNLANTPWPASPLKSEFSSSSYTPLSSQLECDNLSALSNTPDNQSSTETISAQPISPLEVDSSFKQAAILRENTQVRPDPLYTTSRHNMQHALREIETVLMAPDADDAATSTKHEIEEHKPAQLMRQRSRTWSHESRQPSPGVVRTQLASGYPTASYEFRPEKRLRELREDPQSMVKQLLTKCAEALSEERIEEFLNLVQQARGVVSITGEPIQRLGAYLLEGLVARHANSGTNIYRALKCREPESNELLSYMKILYNICPYSKFGYMAANGAIAEALRNEDRIHIIDFQIAQGTQWITLIQALAARPGGPPHVRITGIDDPVSEYARGEGLDLVGKMLKSMSEEFRIPLEFTPLPGIYATQVTKEMLDIRSGEALAVNFTLQLHHTPDESVDVNNPRDGLXPDGERPVSEGDHACGAGVAHQHDPVLDAVHRDLGLLFGHVRVNRXRTCHGTTRSGSTWSSTVLPRXIVNIIACEGKDRVERHELLGKWRSRLTMAGFRPYPLSSYVNSVIRKLLACYSDKYTLEEKDGAMLLGWKNRKLISASAWH

SEQ ID NO: 617 - protein, 429 aa, Zea mays
MASAGISGSGDDDAGGKLLADRYQKGEVLGEGTYGVVFKAFDTKTGNTVAVKRIWVGKDKKEGVNFTTLREIRLLKELKGPNIIELIDCFPYKENLHLVFEFMETDLEALIKDKNIILSPADTKSYLQMLLKGLSFCHKKWVIHRDMKPNNLLIGADGQLKLADFGLARMFGSPGRNFTHQVFARWYRAPELLFGSKQYGSGVDIWAAGCIFAELLTRRAFLQGSSDIDQLGKIFAALGTPKSSQWPDMVYLPDYVEYQYVAAPPLRTLLPMASDDALDLLSKMLTYDPKARISAQQALEHRYFSSLPAPTRPSQLLRSRWKGDQGNNKMPDLNLQHGPLVLSPPRKLRRVIAHEWMEGMHRADKVDEHPSGMRHTDDMPSQKSSRIPMSVDVGAVFGTRPAPRPTLNSADKSRLKRKLDMDPEFGFAE

SEQ ID NO: 618 - protein, 933 aa, Zea mays
RVVVFEQLKCTREGLSSSEGQQRLEIFGPNRLEEKKESKVLKFLGFMWNPLSWVMEMAAIMAIALANGGGKPPDWQDFVGIIVLLVINSTISFIEENNAGNAAAALMANLAPKTKVLRDGRWGEQEAAILVPGDIISIKLGDIVPADARLLEGDALKVDQSALTGESLPVTKGPGDEVFSGSTCKQGEIEAVVIATGVHTFFGKAAHLVDSTNQVGHFQQVLTAIGNFCICSIGVGILVEIIVMFPIQHRKYRSGIENLLVLLIGGIPIAMPTVLSVTMAIGSHKLSQQGAITKRMTAIEEMAGMDVLCSDKTGTLTLNKLSVDKNLVEVFCKGVDKDHVLLLAARASRTENQDAIDAAMVGMLADPKEARAGIREIHFLPFNPVDKRTALTYIDADGNWHRVSKGAPEQILDLCHCKEDLRRKVHSIIDKYAERGLRSLAVARQEVPEKNKESPGGPWQFVGLLPLFDPPRHDSAETIRKALVLGVNVKMITGDQLAIGKETGRRLGMGTNMYPSSALLGQNKDATLEALPVDELIEKADGFAGVFPEHKYEIVKRLQEKKHIVGMTGDGVNDAPALKKADIGIAVADATDAARSASDIVLTEPGLSVIISAVLTSRCIFQRMKNYTIYAVSITIRIVLGFMLIALIWQYDFSPFMVLIIAILNDGTIMTISKDRVKPSPLPDSWKLKEIFATGIVLGSYLALMTVIFFWAMHKTDFFSDKFGVRSIRDSEHEMMSALYLQVSIVSQALIFVTRSRSWSFVERPGLLLVTAFLLAQLVATFLAVYANWGFARIKGIGWGWAGVVWLYSIVFYFPLDLLKFFIRFVLSGRAWDNLLENKTAFTTKKDYGREEREAQWATAQRTLHGLQPPEASSNTLFNDKSSYRELSEIAEQAKRRAEIARLRELNTLKGHVESVVKLKGLDIDTIQQNYTV

SEQ ID NO: 619 - protein, 649 aa, Zea mays
MARFEVNGKSVQGVDLLRRRHWPSRLDFWPFLALYALWLLLAVPALDFTDALIILAALSAAHILTFLFTAWFVDFRAFVGYSKVKDIHAANTCKVTPAKFSGSKEIVPLHKQKNVASTSAAGETEEIYFDFRKQRFIYSAEKDNFLKLRYPTKELIGHYGKGTGYGTEAKISTAVDKWGRNVFEYPQPTFQKLMKEQIMEPFFVFQVFCVALWCLDAYWYYSLFTLFMLFLFESTMAKNRLKTLTELRRVKVDSQIVLTYRCGKWVKVPGTELLPGDIVSIGRSTSGEDRSVPADMLLLAGSAIVNEAILTGESTPQWKVSIAGRGPDDMLSIRRDKNHILFGGTKVLQHTADKSVNLRSPDGGCLAFVLRTGFETSQGKLMRTILFSTERVTANNKESGLFILFLLFFAIIASGYVLVKGLEDPTRSRYKLLLSCSLIITSVIPPELPMELSIAVNTSLIALARHGIFCTEPFRIPFAGKVDICCFDKTGTLTSDDMEFQGIVTSEGDDLISDANKLPLRTQEVLSSCHALVFVDNKLVGDPLEKAAIKGIDWIYTSDEKAMSKKPGGQPVQIVHRYHFASHLKRMSVIVRIQQKFYAFIKGAPETIQEKLVDLPAAYVETYKKYTRQGSRVLALAYKLLPEMPVSFC

SEQ ID NO: 620 - protein, 1355 aa, Saccharomyces cerevisiae
MNDDRETPPKRKPGEDDTLFDIDFLDDTTSHSGSRSKVTNSHANGYYIPPSHVLPEETIDLDADDDNIENDVHENLFMSNNHDDQTSWNANRFDSDAYQPQSLRAVKPPGLFARFGNGLKNAFTFKRKKGPESFEMNHYNAVTNNELDDNYLDSRNKFNIKILFNRYILRKNVGDAEGNGEPRVIHINDSLANSSFGYSDNHISTTKYNFATFLPKFLFQEFSKYANLFFLCTSAIQQVPHVSPTNRYTTIGTLLVVLIVSAMKECIEDIKRANSDKELNNSTAEIFSEAHDDFVEKRWIDIRVGDIIRVKSEEPIPADTIILSSSEPEGLCYIETANLDGETNLKIKQSRVETAKFIDVKTLKNMNGKVVSEQPNSSLYTYEGTMTLNDRQIPLSPDQMILRGATLRNTAWIFGLVIFTGHETKLLRNATATPIKRTAVEKIINRQIIRLFTVLIVLILISSIGNVIMSTADAKHLSYLYLEGTNKAGLFFKDFLTFWILFSNLVPISLFVTVELIKYYQAFMIGSDLDLYYEKTDTPTVVRTSSLVEELGQIEYIFSDKTGTLTRNIMEFKSCSIAGHCYIDKIPEDKTATVEDGIEVGYRKFDDLKKKLNDPSDEDSPIINDFLTLLATCHTVIPEFQSDGSIKYQAASPDEGALVQGGADLGYKFIIRKGNSVTVLLEETGEEKEYQLLNICEFNSTRKRMSAIFRFPDGSIKLFCKGADTVILERLDDEANQYVEATMRHLEDYASEGLRTLCLAMRDISEGEYEEWNSIYNEAATTLDNRAEKLDEAANLIEKNLILIGATAIEDKLQDGVPETIHTLQEAGIKIWVLTGDRQETAINIGMSCRLLSEDMNLLIINEETRDDTERNLLEKINALNEHQLSTHDMKSLALVIDGKSLGFALEPELEDYLLTVAKLCKAVICCRVSPLQKALVVKMVKRKSSSLLLAIASGANDVSMIQAAHVGVGISGMEGMQAARSADIALGQFKFLKKLLLVHGSWSYQRISVAILYSFYKNTALYMTQFWYVFANAFSGQSIMESWTMSFYNLFFTVWPPFVIGVFDQFVSSRLLERYPQLYKLGQKGQFFSVYIFWGWIINGFFHSAIVFIGTILIYRYGFALNMHGELADHWSWGVTVYTTSVIIVLGKAALVTNQWTKFTLIAIPGSLLFWLIFFPIYASIFPHANISREYYGVVKHTYGSGVFWLTLIVLPIFALVRDFLWKYYKRMYEPETYHVIQEMQKYNISDSRPHVQQFQNAIRKVRQVQRMKKQRGFAFSQAEEGGQEKIVRMYDTTQKRGKYGELQDASANPFNDNNGLGSNDFESAEPFIENPFADGNQNSNRFSSSRDDISFDI

SEQ ID NO: 621 - protein, 1258 aa, Schizosaccharomyces pombe
MARDVDNKQNAKRISRDEDEDEFAGESMVGRTLDNPFLGEDEFEDIFGSESQYISSSGQNSTNPFLADTRIENSPLGSESKANQLNKQGTNVNHIEIPLRDFNDPTQPESFLPPPKNTFTSRIKKIKNLFKKEKKQVKPEDLGPRQIILNDYSANHFLHNAVSTCKYSAFTFLPKFLKEQFSKYANLFFLFTAVVQQIPGITPVNRYTTIGPMLIVLSVSGIKEIMEDIKRKKQDQELNESPCYVLQGTGFVEKQWKDVVVGDIVKIVSETFFPADLVLLSSSEPEGLCYIETANLDGETNLKIKQALPETAGLLKPVELGQLSGEVKSEQPNNNLYTFDATLKLLPSDRELPLSPDQLLLRGAQLRNTPWVYGIVVFTGHESKLMKNTTETPIKRTSVEKQVNSQILFLLCIFVFLCFASSLGALIHRSVYGSALSYVKYTSNRAGMFFKGLLTFWILYSNLVPISLFVTFELVRYIQAQLISSDLDMYNEETDTPAACRTSSLVEELGQVGYIFSDKTGTLTRNQMEFRQCTIAGVAYADVIPEDRQFTSEDLDSDMYIYDFDTLKENLKHSENASLIHQFLLVLSICHTVIPEYDESTNSIKYQASSPDEGALVKGAASIGYKFLARKPHLVTVSIFGKDESYELLHICEFNSTRKRMSIVFRCPDGKIRLYVKGADTVIMERLASDNPYLQTTIHHLEDYATVGLRTLCIAMREVPEDEYQRWSTVFETAASSLVDRAQKLMDAAEEIEKDLILLGATAIEDRLQDGVPDTISTLQTAGIKIWVLTGDRQETAINIGMSCKLIDEDMGLVIVNEETKEATAESVMAKLSSIYRNEATTGNVESMALVIDGVSLTYALDFSLERRFFELASLCRAVICCRVSPLQKALIVKMVKRNTGEVLLAIGDGANDVPMIQAAHVGVGISGMEGLQAVRSSDFSISQFCYLKKLLLVHGSWCYQRLSKLILYSFYKNIALYMTQFWYAFCNAFSGQVIFESWSISLYNVLFTVLPPVVIGIFDQFVSAGQLFQYPQLYQLGQRSEFFNLKRFWSWITNGFYHSLLLFLCSIAVFYYDGPNKDGLASGHWVWGTTLYAAILATVLGKAALISNHWTQYTVIATLGSFLLWIVFMPIYAVAAPAIGFSKEYYGIIPHLYGNLKFWASLLVLPTIALMRDFVWKYSSRMYYPEEYHYVQEIQKYNVTDYRPRIVGFHKAIRKIRQMQRMRKQRGYAFSQGEEDQSRILDAYDTTHTRGAYGEMR

SEQ ID NO: 622 - protein, 1185 aa, Oryza sativa
MASGRPLLDASPRPTQQPPASSLLPPPQPEPPLRADRLAFSLEVPDPFRREPDPSSAASQRGEEEGGGEEESRAVVVGEPSSSEAAAGFAGNGVRTAKYSVLTFLPRNLFEQFRRLSYVYFLAITVLNQLPQVAVFGRGASVLPLAFVLFVTAVKDAYEDLRRHRSDRQENNRLARVLLAPPAAGEFAPKKWKHIRVGDVVRVASSETLPADMVLLATSDPSGVAHVQTVNLDGETNLKTRYAKQETQLRFSQDGGIGGVLHCERPNRNIYGFQANLEIDGKRVSLGPSNIVLRGCELKNTTWAIGVVVYAGKETKVMLNSSGAPSKRSRLETQLNRETVILSIMLIGMCTTASVLAGIWILNHRGDLEFTQFFREKDYTTGKNYNYYGMGMQIFITFLMAVIVYQVIIPISLYISMELVRLGQAYFMGADRDLYDESSRSKFQCRALNINEDLGQIKYVFSDKTGTLTENKMEFQCASIRGVDYCSGKDSCGYSVVVWLLIFWFWTVDDLLWTPKMAVKIDHRLLKLLRGGGTDEETKLVLEFFLALAACNTIVPLVLDTRDSKQKLIDYQGESPDEQALVYAAASYGIVLVERTSGYVVIDVLGDRQRFDILGLHEFDSDRKRMSVIVGCPDKTVKLYVKGADSSLFGITKNSLDLDIVRATEAHLHKYSSFGLRTLVIGMRELSQPEFEEWQLAYENASTSVLGRGNLLRSVAANIENNIRILGATGIEDKLQDGVPETIESLRQADIKVWILTGDKQETAISIGYSCKLLTNDMTQIVINNNSKESCKRSLEEAHATIKKLRIASTGTQSPELASESAGVTLALIVDGNSLVYILETELQEELFKVARECSVVLCCRVAPLQKAGIVALIKNRTDDMTLAIGDGANDVSMIQMADVGVGISGQEGRQAVMASDFAMGQFRFLVPLLLVHGHWNYQRMSYMILYNFYKNATFVLVLFWYVLYTAFTLTTAITEWSSLLYTVLYTSLPTIVVGILDKDLSKETLLAYPKLYGSGQRDEKYNVNLFVLNMLEALWQSLVVFYMPYFAYRQSTIDMSSLGDLWALAPVIVVNMLLAMDIFRWNWIVHAFVWGTIAATTICLFVIDSIWFLPGYGAIFHIMGTGLFWLLLLIIVVAAMVPHFVIKAFTEYFTPSDIQVAREIEKFENVNQVNRSEVPMTRLHDPRR

SEQ ID NO: 623 - protein, 392 aa, Oryza sativa
METVAAASYTRGAATRSPACCAAMSFSQSYRPKAARPPSTFYGESLRVNTARSLPSGRQSKAASRAALSTRCEIGDSLEEFLTKATPDKNLIRLLICMGEAMRTISFKVRTASCGGTACVNSFGDEQLAVDMLADKLLFEALEYSHVCKYACSEEVPELQDMGGPVDGGFSVAFDPLDGSSIVDTNFTVGTIFGVWPGDKLTGVTGGDQVAAAMGIYGPRTTYIIALKDCPGTHEFLLLDEGKWQHVKDTTTIGEGKMFSPGNLRATFDNPEYDKLINYYVKEKYTLRYTGGMVPDVNQIIVKEKGIFTNVTSPTAKAKLRLLFEVAPLGFLIEKAGGYSSDGKQSVLDKVINNLDERTQVAYGSKNEIIRFEETLYGSSRLTAGATVGAAA

SEQ ID NO: 624 - protein, 339 aa, Oryza sativa
MDHEADAYRTDLMTITRYVLNEQSRNPEARGDLTILLSHIVLGCKFVASAVNKAGLAKLIGLAGETNVQGEEQKKLDVLSNEVFVKALVSSGRTCVLVSEEDEEATFVDPALRGKYCVCFDPLDGSSNIDCGVSIGTIFGIYMIKDKENVTLEDVLQPGKNMVAAGYCMYGSSCTLVLSTGNGVNGFTLDPSLGEFILTHPDIKIPKKGKIYSVNEGNAKNWDEPTAKFVEKCKFPKDGSSPKSLRYIGSMVADVHRTLLYGGVFLYPADKKSPNGKLRVLYEVFPMSFLMEQAGGQSFTGKERALDLVPTKIHERSPIFLGSFEDVEEIKGLYAAQAK

SEQ ID NO: 625 - protein, 393 aa, Triticum sp.
METVAAAGYARGAATRSPACCAAMSFSQSYRPKAARPATSFYGESLRANTARTSFPAGRQSKAASRAALTTRCAIGDSLEEFLTKATPDKNLIRLLICMGEAMRTIAFKVRTASCGGTACVNSFGDEQLAVDMLADKLLFEALEYSHVCKYACSEEVPELQDMGGPVEGGFSVAFDPLDGSSIVDTNFTVGTIFGVWPGDKLTGVTGGDQVAAAMGIYGPRTTFVVALKDCPGTHEFLLLDEGKWQHVKDTTSIGEGKMFSLGNLRATFDNPDYDKLVNYYVKEKYTLRYTGGMVPDVNQIIVKEKGIFTNVTSPTAKAKLRLLFEVAPLGFLIEKAGGHSSDGKQSVLDKVISVLDERTQVAYGSKNEIIRFEETLYGSSRLAASATVGATA

SEQ ID NO: 626 - protein, 383 aa, Chlorella sorokiniana
MQATAVATAAPAARVATTGKAATGVKAAPRVAVRAAGASASSSFATGARLSAKASRTAARRAAVAAQAKIGDTLEEFLLEATPDPKLRQLMMSMSEAIRTIAYKVRTASSGGTASVNSFGDEQLAVDLLADKLLFEALKYSGCCKLACSEEVPEPLDLGGEGFSVAFDPLDGSSIVDTNFSVGTIFGVWPGDKLTGITGRQQAAAGMGIYGPRTVFCIALKDAPGCHEFLLQDDGKWLHVKETETIGEGKMFSPGNLRATFDNPAYEKLIAYYIGEKYTLRYTGGMVPDVFQIIVKEKGVFTNVISPSTKAKLRLLFEVAPLALLVEKAGGASSCDGLCVSGLDVEVKQHDQRTQICYGSKGEVRRFEEYMYGNSPRFSEVTA

SEQ ID NO: 627 - protein, 371 aa, Glycine max
VQVSRHGLWDLHLEMKERQRWRAEEDALLRSYVKQYGPREWNLVSQRMNTYLNRDAKSCLERWKNYLKPGIKKGSLTEEEQRLVIHLQAKYGNKWKKIAAEVPGRTAKRLGKWWEVFKEKQQREKKEINRIADPINNSKYEHILESFAEKLVKERPSPSFVMAASDGAFLLTDTPAPASSLRPSWLSNSSSAAAIGPSSLSVKLSLSSSTVATPPFSWLPPERGPDNAPFVLGNVSALHGAIPTLSDSMHMSQMVEHCKELGEGHRALATHKKEAAWRLSRVELQLESEKANRRREKIEEFEAKIKALQEEEKAALGRIEAEYREQLAALRRDAENKEQKLAEQWDAKHLRFTRLLEQLGCRAGLLEPNAR

SEQ ID NO: 628 - protein, 376 aa, Glycine max
RFQVPSNWLWDLHLEMKDRQRWRAEEDALLRAYVKQYGPREWNLVSQRMNTPLNRDAKSCLERWKNYLKPGIKKGSLTEEEQRLVINLQATHGNKWKKIAAQVPGRTAKRLGKWWEVFKEKQQRETKGNNCTIDPINDSKYEHILESFAEKLVKERPSTSTSTSFVMATSNSSFLHADAPAPAPALLPSWLSNSNGTAPVRPPSPSVTLSLSPSTVAAPPPWMQPPVRGQDNASPLVLGNVAPHGAVLAFGENMVMSELVECCKELDEVHHALAGHKKEAAWRLSRVELQLESEKAGRRREKMEEIEAKIKALREEQTAALDRIEAEYREQLAGLRRDAESKEQKLAEQWAAKHLRLTKFLEQVGCRSRLTEPNGR

SEQ ID NO: 629 - protein, 351 aa, Zea mays
MDQSFGNLGAGAGSSSGGSNSKAAAAAVSSSSFLQLPLSTASPAYYGAPLALLHHAAAAPSSSQQHQQQQHHHHYARHGAEMSAAEAEAIKAKIVAHPQYSALLAAYLDCQKVGAPPDVLERLTAMAAKLDARPPGRHEPRDPELDQFMEAYCNMLVKYREELTRPIDEAMEFLKRVEAQLDCISGGGGSSSARLSLADGKSEGVGSSEDDMDPNGRENDPPEIDPRAEDKELKYQLLKKYSGYLSSLRQEFSKKKKKGKLPKEARQKLLHWWELHYKWPYPSETEKIALAESTGLDQKQINNWFINQRKRHWKPSEDMPFVMMEGFHPQNAAALYMDGPFMADGMYRLGS

SEQ ID NO: 630 - protein, 308 aa, Glycine max
MDGMYGVPAEYADKALMTPENLIFPPDYHHDFLAAGRIPLFGSDEFFSSSAGIHRQQEDDVAATTVMKAKIASHPHYPRLLQAYIECQKVGAPPEIARLLEEIRRENDPCKSDAVSSSTCFGADPELDEFMEAYCDMLVKYKSDLARPFDEATTFLNKIEMQLSHLCTGASVSNVSDDGGVSSDEDLSTGDGDAQDGQLKGEDRELKDRLLRKFGSHIGTLKLEFSKKKKKGKLPKEARQALLQWWNVHYKWPYPTEADKIELAKSTGLDQKQINNWFINQRKRHWKPSENMQFSMMENFNGRILADE

SEQ ID NO: 631 - protein, 311 aa, Glycine max
MEAVYRLKPLLDVVRVGNATTSEMRLDSTANCYLQLEAPQPQENNNVTDSSSDMSDRIIKIQIANHPLYPDLLSAYIECQKVGAPPELACLLEEIGRESHRMNARREIGEGPELDHFMETFCQVLHRYKEELSRPFNEATLFLGDMESQLSNLCNETLTKSSDNNNRSDEVASGASEEELSCGEMEAFEDNVSSVTCPSDQRLKEMLLRKYSGHFSGLRKEFLKRRKKGKLPKDARMALMGWWNTHHRWPYPTEEEKVKLSEITGLDQKQINNWFINQRKRHWKPTEDMRFAVMDGLRGGGGGGIGGPMLF

SEQ ID NO: 632 - protein, 420 aa, Glycine max
MDKDKSLGLPPPSGRYSGYSSTGSVFNVKSEPSPSSSTTLYPPLAPGTTSSESSHFGHGLSTDSSGFSHDISRMPDNPPRNRGHRRAHSEILTLPDDISFDSDLGVVGGGDGPSFSDDAEEDLLSMYLDMDKFNSSSATSTFQMVEPSNAVGASASTPASGAPTSSTENVVIGTNERPRVRHQHSQSMDGSTTIKPEMLVSGSEDMSAADSKKAMSAAKLAELALIDPKRAKRIWANRQSAARSKERKMRYIAELERKVQTLQTEATSLSAQLTLLQRDTNGLNSENNELKLRLQTMEQQVHLQDALNDALKEEIQHLKILTGQAMPPNGGPMMNFASFGGGQQFYPNNHAMHTLLAAQQFQQLQIHPQKQQQHQFQQLQQQQREQHQQSIDLKMREATPTPCPKDNASSDVNPSGAKDC

SEQ ID NO: 633 - protein, 287 aa, Glycine max
MAIQDQNGFFRSQGGPPEGGGVSLSSGHSVTHIQLNDQFSCGNDYALKVRKPYTITKQRERWTDEEHKKFLEALKLYGRAWRRIEEHVGTKTAVQIRSHAQKFFSKVLHDPTGNNTNTVESIEIPPPRPKRKPMHPYPRKLVETPNKEISIPEQPMKSNSLKSSDFDQENQSPKSVLSGVGSDSLGSSDSDTPNGSLSPMSSISGFHTSSFTRAKPKTTTSEEEAGMDTDSTHDEKPLMKFKLPPNGCVSIKEDNTAEESSGRTFKLFGMTLFVTDTCKPSPTIEEC

SEQ ID NO: 634 - protein, 446 aa, Oryza sativa
MAPPSAMNTSRAEEKAIDDWLPITSSRNAKWWYSAFHNVTAMVGAGVLSLPFAMSELGWGPGVAAMIMSWVITLYTLWQMVEMHECVPGRRFDRYHELGQHAFGDKLGLWIVVPQQLIVEVGVCIVYMVTGGKSLKKFHDLVAPPSAPPIRTSYFIVIFGCLHLVLSQLPNFNSITGVSLAAAVMSLSYSTIAWAASLHHHNHNNGAAAGGVDYSLTAATPAGRTFNFLSALGDVAFAYAGHNVVLEIQATIPSTPERPSKGPMWRGVVLAYGVVAVCYLPVAFAGYYVFGNAVDDNVLITLERPAWLIAAANIFVVVHVVGSYQIYAMPVFDMLETFLVKKLRFKPGMPLRLIARSLYVLFTMFVAIAVPFFGGLLGFFGGFAFAPTTYFLPCIMWLSIMKPKRFGLSWCINWFCIIIGVLLSVFAPIGGLRSIIVNAQSYKFFS

SEQ ID NO: 635 - protein, 446 aa, Zea mays
MQEQDVDDGGGRTTQQQEKSIDDWLPINSSRKAKWWYSAFHNVTAMVGAGVLGLPYAMSELGWGPGIAVMILSWIITLYTLWQMVEMHEMVPGKRFDRYHELGQHVFGDRLGLWIVVPQQLAVEVSLNIIYMVTGGQSLKKFHDVICDGGRCGGDLKLSYFIMIFASVHLVLSQLPNFNSISAVSLAAAVMSLSYSTIAWGASLHRGRREDVDYHLRATTTPGKVFGFLGGLGDVAFAYSGHNVVLEIQATIPSTPDKPSKKAMWKGAFVAYVVVAICYFPVTFVGYWAFGSGVDENILITLSKPKWLIALANMMVVVHVIGSYQVYAMPVFDMIETVLVKKMRFAPSLTLRLIARSVYVAFTMFLGITFPFFGGLLSFFGGLAFAPTTYFLPCIMWLKVYKPKRFGLSWFINWICIVIGVLLLILGPIGGLRQIILSATTYKFYQ

SEQ ID NO: 636 - protein, 473 aa, Oryza sativa
MDQHQLDEENQRAALFHSSAPSSSLGADGEEERETVPLLSCKMADDKSDTVQVSEDTAHQISIDPWYQVGFILTTGVNSAYVLGYSASIMVPLGWIGGTCGLILAAAISMYANALLAHLHEVGGKRHIRYRDLAGHIYGRKMYSLTWALQYVNLFMINTGLIILAGQALKAIYVLFRDDGVLKLPYCIALSGFVCALFAFGIPYLSALRIWLGLSTVFSLIYIMIAFVMSLRDGITTPAKDYTIPGSHSDRIFTTIGAVANLVFAYNTGMLPEIQATIRPPVVKNMEKALWFQFTVGSLPLYAVTFMGYWAYGSSTSSYLLNSVKGPIWIKTVANLSAFLQTVIALHIFASPMYEFLDTRFGSGHGGPFAIHNIMFRVGVRGGYLTVNTLVAAMLPFLGDFMSLTGALSTFPLTFVLANHMYLTVKQNKMSIFRKCWHWLNVVGFSCLSVAAAVAAVRLITVDYSTYHLFADM

SEQ ID NO: 637 - protein, 523 aa, Zea mays
MAGGGIVNTGGGKDYPGKLTLFVLLTCIVAATGGLIFGYDIGISGGVTSMNPFLEKFFPEVYRKKQEAKTNQYCKYDNQLLQTFTSSLYLAALVASFFAATVTRAVGRKWSMLVGGLTFLVGAALNGAAQNIAMLIIGRILLGVGVGFANQSVPVYLSEMAPARLRGMLNIGFQLMITIGILAAELINYGTNKIKAGYGWRVSLALAAVPAAIITLGSLFLPDTPNSLLERGHPEEARRMLRRIRGTDDIGEEYADLVAASEEARQVRHPWRNILRRRYRAQLTMAVAIPFFQQLTGINVIMFYAPVLFDTLGFKNDASLMSSVITGLVNVFATVVSIVTVDRVGRRKLFLQGGAQMIVCQLIVGTLIAAKFGTSGTGDIAKGYAAVVVVFICAYVAGFAWSWGPLGWLVPSEIFPLEIRPAGQSINVSVNMFFTFCIAQAFLTMLCHFKFGLFYFFAGWVVIMTVFIAFFLPETKNVPIEEMVLVWKSHWFWKRFIADEDVHVGIGNNHPAKNGSDTKGADA

SEQ ID NO: 638 - protein, 518 aa, Glycine max
MPAVGGINTGGGKEYPGSLTLFVTVTCIVAAMGGLIFGYDIGISGGVTSMDPFLLKFFPSVFRKKNSDKTVNQYCQYDSQTLTMFTSSLYLAALLSSLVAATVTRKFGRKLSMLFGGLLFLVGALINGFAQHVWMLIVGRILLGFGIGFANQSVPLYLSEMAPYKYRGALNIGFQLSITVGILVANVLNYFFAKIKGGWGWRLSLGGAMVPALIITVGSLVLPDTPNSMIERGDREKAKAQLQRIRGIDNVDEEFNDLVAASESSSQVEHPWRNLLQRKYRPHLTMAVLIPFFQQLTGINVIMFYAPVLFSSIGFKDDAALMSAVITGVVNVVATCVSIYGVDKWGRRALFLEGGVQMLICQAVVAAAIGAKFGTDGNPGDLPKWYAIVVVLFICIYVSAFAWSWGPLGWLVPSEIFPLEIRSAAQSINVSVNMLFTFLIAQVFLTMLCHMKFGLFLFFAFFVLIMTFFVYFFLPETKGIPIEEMGQVWQAHPFWSRFVEHDDYGNGVEMGKGAIKEV

SEQ ID NO: 639 - protein, 510 aa, Zea mays
MPGGAFLLNGSGGGMADYGGGLTVPVVVTCLMAASGGLIFGYDIGISGGVSEMEDFLNKFFPGLLKRTARANKDVYCIYNNQALTAFTSSLYAFGMVGTLLASRVTRRLGRQAVMLIGGGLFLAGALVNAAAANIAMLIVGRMLLGLGLGFSGQATPVYLAEVSPPRWRGGFISAFPLFISVGYLVANLINYGTSRIPGWGWRLSLGLASVPAAVMVVGAAFIPDTPSSLVLRGKHDDARAALQRVRGKGVDIGPEFADILAAAENDRRNEEGAFRRILRREYRPYLVMAVAFPVFLNLTGVAVTAFFSPILFRTVGFESDAALMGAVILGLMNIGGILASGFAMDRYGRKLLFMIGGALMFTCQVAMASIIGSHLGNGSKMPKGYAVTVLVVALIFSASFSWSWGALYWTIPGEIYPVEVRSAGQGAAVALNLGLNFLQAQFFLAMLCCFKYGTFLFYASWLVVMTAFAVAFVPETKGVPLESMAHVFARHWYWGRFVKDHQKLGEEST

SEQ ID NO: 640 - protein, 580 aa, Glycine max
MEGGGVEVDASAFRECLSLSWKNPYVLRLAFSAGIGGLLFGYDTGVISGAILYIRDDFKAVDRKTWLQEAIVSMALAGAIVGAAVGGWINDRFGRRKAILLADTLFFIGSAVMAAATNPSILIVGRVFVGLGVGMASMASPLYISEASPTRVRGALVSLNGFLITGGQFLSYLINLAFTKAPGTWRWMLGAAVVPALIQIVLMMMLPESPRWLFRKGREEEGKEILRKIYPPQEVEAEINTLRESVEIEIKEAEATDNISIVKMLKTKTVRRGLYAGMGLQIFQQFVGINTVMYYSPTIVQLAGFASNRTALLLSLVTSGLNAFGSILSIYFIDRTGRKKLVLFSLCGVVFSLVVLTVVFHQSTTHSPMVSALETSHFNNTCPDYHSAANPGGWDCMKCLKASPNCGFCASGANKLLPGACLISNDTTKDQCHEEDRLWYTVGCPSKFGWLAIVGLALYIIFFSPGMGTVPWVVNSEIYPLRYRGICGGMASTSNWVSNLIVAQSFLSLTQAIGTSWTFMIFIFITIAAIIFVIIFVPETKGLPMEEVEKMLEGRDLNFKFWQRSSHCGEEVPPQKTQSN

SEQ ID NO: 641 - protein, 547 aa, Zea mays
TITTVIKKMMRCAATGGGCVASWSGDRRLPAVNPCSVRMPTGNDGWCAGLRSRAADLAGLEMANLRGGVGGLFRASPRYGRLQATAAVDPEDIPLEKVQVKSSGHVLPYVGVACLGAILFGYHLGVVNGALEYLAKDLGIAENAVLQGWVVSTSLAGATLGSFTGGSLADKFGRTRTFILDAVPLALGAFLSATAQDIRTMIIGRLLAGIGIGVSSALVPLYISEISPTEIRGTLGTVNQLFICIGILAALLAGLPLAGNPAWWRTMFGIAVVPSILLAVGMAFSPESPRWLFQQGKVTQAELAVKRLYGKEMVTEIMFDLRASGQSSSESEAGWFDLFSKRYWKVVSVGAALFLFQQLAGINAVVYYSTSVFRSAGIASDVAASALVGAANVFGTMVASSLMDKQGRKSLLITSFSGMGASMLLLALSFTWKALAPYSGTLAVVGTVLYVLSFALGAGPVPALLLPEIFASRIRAKAVALSLGMHWVSNFFIGLYFLSVVSKFGISNVYLGFASVCALAVLYIAGNVVETKGRSLEEIERELSVAE

SEQ ID NO: 642 - protein, 533 aa, Zea mays
MAGAGAAANGGRNKYAVLDRSEERQTDARTERRRRPLAPESERGRRERFVYACAVFASLNAVLLGYDVGVMSGAIIYMQKDLHITEFQQEILVGCLSVVSLLGSLSGGRTSDAIGRKWTMGLGAIVFQIGATIMTFAPSFTVLMIGRLLAGVGIGFGAMVSGVYIAEISPAGARGTLTSLPEICINFGILLGYVSNYAFSGLSEHINWRIMLGVGILPSVFIGFALFVIPESPRWLMMEKRVSEARAVLLQISESEAEAEERLAEIEEAAGLMKSMKSEDKEVWRELLNPSPAVRRMLYAGCGIQLFQQITGIDATVYYSPTIFKDAGIKSDQELLAATVAVGFTKTVFILVAIFLIDRVGRKPLLYVSTIGMTICLFLLGVALTLQNHAVGLMSPRVGIDLAIFAVCGNVAFFSIGMGPICWVLSSEVFPLRLRAQGSALGQVGGRVSSGLVSMSFLSMARAISVAGMFFVFAAISTISVLFVYFCVPETKGKTLEQIEMMFESGDEWGGGEIELEDTQHLIPSIKKSVPLG

SEQ ID NO: 643 - protein, 481 aa, Glycine max
MAIEKHEDVESGYLHEPFIQPEDAAAACKENGSDKSVKNGSIGMVLLSTLVAVCGSFTFGTCVGYSAPTQAAIRADLNLSLAEFSMFGSLVTIGAMLGAITSGRITDFIGRKGAMRISTGFCITGWIAVFFSKGSYSLDFGRFFTGYGIGVISYVVPVYIAEIAPKNLRGGLATTNQLLIVTGGSVSFLLGSVINWRELALAGLVPCICLLVGLCFIPESPRWLAKVGREKEFQLALSRLRGKDADISDEAAEILDYIETLQSLPKTKLLDLFQSKYVHSVVIGVGLMACQQSVGINGIGFYTAEIFVAAGLSSGKAGTIAYACIQIPFTLLGAILMDKSGRRPLVMVSAAGTFLGCFVAAFAFFLKDQSLLPEWVPILAFAGVLIYIAAFSIGLGSVPWVIMSEIFPIHLKGTAGSLVVLVAWLGAWVVSYTFNFLMSWSSPGTLFLYAGCSLLTILFVAKLVPETKGKTLEEIQACISS

SEQ ID NO: 644 - protein, 511 aa, Glycine max
MEAPSLTKPNDPTKPSNTSSTLSLEGGPGEASPLRKMFAVASIAAGIQFGWALQLSLLTPYVQLLGVPHAAASFIWLCGPISGLVVQPIVGYYSDHCTSRFGRRRPFILGGALAVAIAVFLIGYAADIGHSAGDDITKKTRPRAVGVFVIGFWILDVANNMLQGPCRAFLADLAAGDQQKTRIANGFFSFFMAVGNVLGYAAGSYSGLHKIFPFTETKACDVFCANLKSCFFFSILLLLFLATVALLYVKDKQVEAIPLDDATQPSCFFQLFGALKELKRPMWMLMLVTAVNWVGWFPYFLFDTDWMGREVYGGTAGEDAYAKGVRVGSLGLMVNAVVLGFMSLAVEPLGKMVGGVKRLWAIVNFILAIGFGMTVVITKVAEHQRRMNPAAVGHPSEGVVVGSMVFFGVLGVPLAITFSVPFALASIYCSASGAGQGLSLGVLNLAIVVPQMVVSALSGPWDSLFGGGNLPAFMVGAAAAALSAIMAIVLLPTPKPADEAKASSMMAGGFH

SEQ ID NO: 645 - protein, 508 aa, Zea mays
MAGDGMEVSASGGGGGNKQPQISLLGLFLACMVAGGVQYGWALQLSLLTPYVQTLGIPHALTSVMWLCGPIAGLLVQPCVGLYSDKCTSKLGRRRPFIFTGCIIICISVIVIGFSSDIGYALGDTTEDCNVYTGKRLHAALFFVMGFWLLDFSNNTVQGPARALMADLAGSHGPSTANAIFVSWMAIGNILGYSSGSTDKWHTWFPFLQTRACCEACANLKAAFLVSVVFLGLSTVVTMIFAREVPLDPAAAAKQDEAGESSGPFAVFKGMKNMPPGMPQVLIVTGLTWLSWFPFILFDTDWMGREMYHGRPDGSPEEVARFQEGVRQGAFGLLLNSVVLGASSFLIEPMCRKLTAKVVWVMSSFLVCVAMALVTVLSSWSLGDIGGNVQDAAAVDKGLKTTALAIFVFLGFPFAVLCSVPFAVTAQLAAAKGGGQGLCTGVLNISIVVPQMVIAIGSGPWDELFGKGNIPAFGLAAVFAFTAAVAGIIMLPKQPKTSFRSVSMGGGH

SEQ ID NO: 646 - protein, 521 aa, Zea mays
MPGAVIVHHHTRYKTYPGEVTGIAIFSCFIASVAGCIFGYDIGLTSGLTSTEPFLVKFFPSIYEEMKRQVVVNQYCKFDSQVLTLFSSSLFLAATVATFFAGPMTRAFGRKWTLFAAASAYVVGACIGGVSVNFPMLLTGRVLVGSGVGISIQAAPLYISEVAPAQQRGMLNILFQLMITVGILTANMTNYLASKVSGGWGWRIPVTFGAIPAAVIALGALAIPDTPASLVERGDTATARKTLSQIRGVGDVREEFDDLAAASEDAKAVQCPWRELFFGGKYKPQLTFALLIPFFQQLTGINVIMFYAPVLFKTVGFKQNATLVSSVITGLVNVFSTFVAIATADKIGRRALFLQGGTQMIISQILVGTFIGLQFGMSGTGDISEQYAMCIVLFVCVYVAGFAWSWGPMGWLVPSEIYPLAVRSAAMSVTVAVNMFFTAFIGQIFLTLLCHLRFGLFYFFGAWVLLMTLFIAMLLPETKSVPVEEMAHVWKKHWFWRKFVIDTGNDARNAEMRKRIALEMS

SEQ ID NO: 647 - protein, 514 aa, Zea mays
MAGGVVVNAAGGKTYPGRMTPFVFFTCLVASSGGLIFGYDIGISGGVTSMASFLKEFFPSVYAKAAANKDTNQYCKFDSQLLTLFTSSLYLAALATSFVAASVTRVFGRKWSMFCGGVTFLAGSALNGAATDVMMLIMGRILLGVGVGFANQSVPLYLSEMAPAKLRGMLNIGFQLMTTIGILAANLINFWTAGIEGGWGWRIGLGLAGVPALIITLGALVLPDTPNSLIARGFNDDAKAVLVKIRGTDDVQDEYDDMVAASEEANAIEHPWRNILERRYRPQLTVAALIPFFQQLTGINVIMFYAPVLFLTIGFGDDASLMAAVITGLVNMFATVVSIVCVDRLGRRALFLQGGTQMFVSQIVVGTLIALQFGTAGVGEMSRSNAWLLVLFICLYVAGFAWSWGPLGWLVPSEVFALEVRSAGQSIAVCVNMLLTFIIGQAFLSMLCSLKFGLFYFFAGWMFIMTTFIALFLPETKGVPIEEMNLVWSRHWFWGKYVNVDTQHGGASPRSNGV

SEQ ID NO: 648 - protein, 521 aa, Glycine max
MLLELALGLLVLALFLHLRPTPTAKSKALRHLPNPPSPKPRLPFIGHLHLLKDKLLHYALIDLSKKHGPLFSLYFGSMPTVVASTPELFKLFLQTHEATSFNTRFQTSAIRRLTYDSSVAMVPFGPYWKFVRKLIMNDLLNATTVNKLRPLRTQQIRKFLRVMAQGAEAQKPLDLTEELLKWTNSTISMMMLGEAEEIRDIAREVLKIFGEYSLTDFIWPLKHLKVGKYEKRIDDILNKFDPVVERVIKKRREIVRRRKNGEVVEGEVSGVFLDTLLEFAEDETMEIKITKDHIKGLVVDFFSAGTDSTAVATEWALAELINNPKVLEKAREEVYSVVGKDRLVDEVDTQNLPYIRAIVKETFRMHPPLPVVKRKCTEECEINGYVIPEGALILFNVWQVGRDPKYWDRPSEFRPERFLETGAEGEAGPLDLRGQHFQLLPFGSGRRMCPGVNLATSGMATLLASLIQCFDLQVLGPQGQILKGGDAKVSMEERAGLTVPRAHSLVCVPLARIGVASKLLS

SEQ ID NO: 649 - protein, 336 aa, Glycine max
MENSTEESHLRSENSVTYESPYPIYGMSFSPSHPHRLALGSFIEEYNNRVDILSFHPDTLSVTPHPSLSFDHPYPPTKLMFHPRKPSPSSSSDLLATSGDYLRLWEIRDNSVDAVSLFNNSKTSEFCAPLTSFDWNDIDPNRIATSSIDTTCTIWDIERTLVETQLIAHDKEVYDIAWGEARVFASVSADGSVRIFDLRDKEHSTIIYESPHPDTPLLRLAWNKQDLRYMATILMDSNKVVILDIRSPTTPVAELERHRGSVNAIAWAPHSSTHICSAGDDTQALIWELPTLASPTGIDPVCMYSAGCEINQLQWSAAQPDWIAIAFANKMQLLKV

SEQ ID NO: 650 - protein, 1121 aa, Zea mays
MEGAAAAEVGGGGEDVQIKGAKESGQPAAAAQQPPPLPSGSEALEMPATPLPRDMDWSEHFSFFTSPGGFAGSSEGARGLASVGLSNSESRPDSVTQRGVDHGAEERVEELTLKNCISADAAQPEASAGGSTSGGDRPAVIKGLWGNFTRMARRTSYLASRENAALSYGDIASSRAGDASSRENLATSLANNIISRNNDVSGNEAPTSRVGYVNNEFKTPFHSQQILLSPWSNQDNALKVSSFSNRILDQMRSKTVAPPSGVLGSPLKSKSKGKGVAYQRAREEIRVQANARPRDPLDKIPTIPTSIHDSVARVDMLFSTSGDVSKSHSEGTSLRELIKPGRQTMSKFEKLHLFKQILDLVDNCHAQGFTLQHLRPSYFTILSSNQVKYIGSYTTQDLPTSIKQEFAREDLVSRKRAFGHRIDYQDSNGHGNLMLKHQKVGEQGLVAVRRLANTFLTDKIRDNQIEDNDPGISRQENFSYTTREHFKFVESYGSNMSSAQHVSSSGTQQPAFELRNIEESWYKSPEELSQFKGTPPSNIYSLGVLLFELFCCSETWEMHCAAMSNLRQRILPPNFLSESPKEAGFCLWLLHPDPCSRPKAKEILGCDLINEGRDLSLLDKSPVSISEDDTESSLLLNFLSQLKEEKEMQAAKLSAELGSLQTDITEIDRRHSAGMRLSLEDMDVLPSSSLPGASVSALQGALLSGLLPASCKSSIYEERVMRNLVQLENAYYSMRSSVDTCETNVIKRPDNEALRVRENFHQRHSDSDAKGEKTDRLGCFFDGLCKYARHNRFEVRGILKNADVLSSPNVICSLSFDRDEEYFAAAGVSKKIKIFEFDALLNDRVDIHYPLVEMPSKSKLSCVCWNSYIKNYLASTDYDGTVQLWDAGSGQGFTQFTEHRKRAWSVSFSQVDPTKLASGSDDCCVKVWSINQKNSIDTIRNVANVCCVQFSPYSSRMLAFGSADYKIYCYDLRNTRIPWCTISGHGKAVSYVRFLDPETLISASTDNTLKIWDLNQTNCSGLSADSCSLTLNGHSNEKNFVGLSVHDGYITCGSETNEVFSYYKDFPMPITSHRFGSIDPITGQVTNEDNQQFVSSVCWRGKSNMVVAANSSGSIKVLELV

SEQ ID NO: 651 - protein, 242 aa, Zea mays
KNGFVQDLDDESGGMRGSGGRGTKRSRTAEVHNLSERRRRDRINEKMRALQELIPNCNKIDKASMLDEAIEYLKTLQLQVQMMAMGSGLCIPPMLLPRAMQLQIPSIAHFHHLGMGLGYGMGVLDMNSTAAVPFQPIPGAHYTCPMIPGTPPQGLGIGMPGTNTMPVFGVPGQAIHPSASSVQPFPSLAGLPVRPNLAPQVPAVMANMVQEQQQGVATQQQQSLNNEAQQKANTGDPQILQK

SEQ ID NO: 652 - protein, 315 aa, Glycine max
  unsure (1)..(315): unsure at all Xaa locations
MTVEKEDLGLSLSLSFPQNPPTHLHLNLVSSSPSSHNPQKPSWNDPFTSSAGSSFLRGIDVNRLPSVVDCEEEAGVSSPNSTVSSVSGKRSEREEANGEENDTDRACSRGIISDEEDAETSRKKLRLSKDQSIILEESFKEHNTLNPKQKLALAKQLGLRARQVEVWFQNRRARTKLKQTEVDCEFLKRCCENLTVENRRLQKEVQELRALKLSPQFYMHMTPPTTLTMCPSCERVAVPPSSAVDPAMRHHHVPPTQPRAFPIGXMGHRCRHYPAQALRCPPSQILTRRNKMTKFEKKKTVVIVGSHELCVQSVV

SEQ ID NO: 653 - protein, 637 aa, Zea mays
MLGRAAALSAPRWRGGVPDLRAALRSGGNLLFALFVAAVLAFTLLAAFHSPDDPLLHPSSHQLTDFLTSATSTSTFLTDDSVLRTGEDFNSSSTGAAGEVAAGGVEVVAEAVPFIKLSEVGAEAEKTEPETERAVTVDTDAATGEGAAVAEETAVAEAVSCDTEAPVDCTGDRELFNLLMRAAIERFPDLHFYRFGRPVAVPGSPMECDLAWRFRPAADAIGTGRTTYYKDYRRFTLTRDVNTCSLVVDTVGEYHSGVGAKRNGRRKGKKGKKGKQDAPVTDFVPVKTQIRLDENTANNEAAGAAAEPVFVVGEAVNDSLPVVASESDFSRGKYLIYIGGGERCKSMNHFIWGFLCALGEAQFLNRTLVMDLNVCLNARYTSSGKDEERDFRLYFDFEHLKQSASVIDQSQFWQDWGQWHKKDRLKNFYTEDIRMTPMKLRDIKDTLIMRKFGNVEPDNYWSRVCEGETEGIIKRPWHFLWKSRRLMEIVSAIASRMNWDFDSVHVVRGEKAQNTQLWPNLDRDTSPDSLLMALNDKVGAGRYLYIATNEPDKSFFNPLKEKYKTHFLDDFKYLWDENSEWFTETKELSNGQPVEFDGYMRIAVDTEVFLRGKRHVETFNELTRDCKDGVNTCSASS

SEQ ID NO: 654 - protein, 593 aa, Glycine max
MAVDSEVPRAERSAKALQFIEEVTKNTDSVQERVLTEILTQNAETEYLKRFGLNGATDRDTFKSKVPVVTYEDLQPDIQRIANGDSSPILCSHPISEFLTSSGTSAGERKLMPTIHEEMDRRQLLYSLLMPVMNQYVSDLDKGKALHFLFIKAEAKTPGGLVARPVLTSYYKSEQFRKRPFDPYNVLTSPNEAILCPDSFQSMYTQMLCGLIMRHEVLRVGAVFASGLLRAIRFLQLNWEQLSHDILTGTLNPKITEPSIKERMSKILKPDPQLAAFIKNECSVENWERIIVRIWPNTKYLDVIVTGAMAQYIPTLDYYSGGLPKPCTMYASSECFFGLNLKPMSEPSDVSYTILPNMGYFEFLPHDDSSPVTLSKDSPPRLVELADVELGKYYELIITTYSGLCRYRVGDILQVTGFHNSDPQFRFVRRKNVLLSIDSDKTDEAELQKAIENASELLKEFNTSVVEYTSFADTKSIPGHYVIYWELMMKDSSHPPTNQVLNQCCLVMEESLNSVYRQGRVADNSIGPLEIRVVKNGTFEELMDYAISRGASINQYKVPRCVSFTPIMELLDSRVVSFHFSPAAPHWTPERRR

SEQ ID NO: 655 - protein, 371 aa, Zea mays
MGSGGANTAPLLTPYKMGKFDVTHRVVLAPLTRQRSYGNVPQPHAILYYQQRATKGGLLIAEATGVSDTAQGYKDTPGIWTHEQVEAWKPIVDGVHQKGGIFFCQIWHVGRVSNSTFQPNGQAPISSTDKPLKPQVRANGIDVATFAVPRRLETDEIPLVVNDFRVAARNAIEAGFDGVEIHGAHGYLIDQFLKDGVNDRTDKYGGSLENRCRFALEVTQAVVDEIGADKVGIRLSPFASYSEAPDSDPEALGMYMANALNEFGILYCHMVEPRMVKLGEKFETPYSLRPIRDAFRGTFIVAGGYGREDGNRAISTGYADLVAFGRLFLANPDLPRRFEVDAPLNKYNRDTFYIPDPVVGYTDYPFLSSDV

SEQ ID NO: 656 - protein, 404 aa, Zea mays
  unsure (1)..(404): unsure at all Xaa locations
MASTDRSTPAEDEQQQKRPSLFSPYQMPRFRLTHRXASIAVVLAPMTRCRAPDAIPGPALAEYYAQRSTEGGLLISEGTIISPSGPGFPRVPGIYNQEQTDAWRKVVDAVHAKGAIFFCQLWHVGRASHQVYQPGAAAPISSTDKPISSRWRILMPDGSYGKYPTPRRLATSEIPEIVEQYRQAAVNAIKAGFDGIEIHGAHGYLIDQFLKGGINDRTDEYGGSLSNRCRFLLEVTRAVVSAIGADRVAVRVSPAIDHLDAYDSNPLQLGLAVVERLNALQQEAGRLAYLHVTQPRYTAYGQTESGQHGSAEEESRLMRAVRGAYRGTFMCSGGYTRELGVEAIESGDADLVSYGRLFIANPDLVERFRRDAPLNKYVRKTFYTPDPVVGYTDYTFLGQPKARM

SEQ ID NO: 657 - protein, 373 aa, Zea mays
MVQQAAKEVIPLLTPYKMGQFELSHRVVLAPLTRCRSYGNVPQPHAAVYYSQRATRGGLLIAEATGVSATAQGFPESPGIWTQEQVEAWKPIVDAVHRKGAIFVCQIWHVGRVSTNELQPNGDAPISSTDKQISPDAKSGTAYSKPRRLRTDEVPGIVDDFRRAARNAIQAGFDAVEIHGAHGYLLEQFMKDSCNDRTDQYGGSLENRCRLAVEVVDAVVREVGARRVGIRLSPFVDFVDCVDSDPVALGHYMVQQLNRHSGLLYCHMVEPRITAHGRRQIPHGLLPFRKAFHGTFIAAGGYDREEGNKVVAEGYADLVAYGKLFLANPDLPRRFELDVALNKYDRSTFYTQDPIVGYTDYPFFEEEDGKNER

SEQ ID NO: 658 - protein, 504 aa, Zea mays
MLPSFVSPTASAAASVTPPPRPIPGSYGPPVLGPLRDRLDYFWFQSQDEFFRKRAAAHRSTVFRTNIPPTFPFFVGVDPRVVAIVDAAAFTALFDPDLVDKRDILIGPYNPGAGFTGGTRVGVYLDTQEEEHARVKTFAMDLLHRSARTWSADFRASVGAMLDAVDAEFGKDDGSDKKPSASYLVPLQQCIFRFLCKAFVGADPSADWLVDNFGFTILDIWLALQILPTQKIGLVQPLEELLIHSFPLPSFLIWPGYYVLYRFIEKHGAEAVAYAEAQHGIGKKDAINNMLFVLGFNAFGGFSVFLPFLVAKVGGAPALRERLRDEVRRAMVGKGKDGEFGFATVREGMPLVRSTVYEMLRMQPPVPLQFGRARRDFVLRSHGGAAYQVSAGEVLCGYQPLAMRDPEVFERPEEFVPERFLGDDGARLLQHLFWSNGPETAQPGPGNKQCAAKEVVVDTACMLLAELFRRYDDFEVEGTSFTKLVKRQASPSVAQAAAAAGAQQ

SEQ ID NO: 659 - protein, 374 aa, Oryza sativa
MALLMDPGAGGPLTESEKADLDAIAAIKESAAAEYKEKGNRLVKMGRSHYADAVDCYTKAIAQMEPLPPPPVPSPDASVLFANRAHVNLLLGNHRRALDDAARAVQLSPSNVKAYYRAAKAAIALGLLPEAAAFCRRGIEQDPANEELKKLLAQVDAQQSEQDRHRAKVAQAVSAAKDIVAAIEKRGLKLGKAAYQELTGVKKPKLDEQGVLHWPVLLLYPEVMSSDFIEDFPETDTFVPHLDVMFSESSPPLPWDDKHAYTRDAVELYYQAGVGTVLSKSEILKILLEGTMDSKSLPESLLDEEDGENDDGKSSTITSSDKGSVKWINVKEGKTLQEVLQHKDFIIPAIPVFFVVSRKSTFYRKFKAGNWSLP

SEQ ID NO: 660 - protein, 353 aa, Zea mays
MAKYGEGDKRWIVEERADGTNVHNWHWAERDCIEWSRARLSSLLAGLTVLDGEDGLTLRTVALDNLDGEAYVNIRKGKVIPGYELSLTLSWEAEAASESGAVKVAGTAEVPYLADENADEDPDLHITVRGDETPLALRAKDAFLSRGKPMVLEKIREFVAAMAKGGPAKDELDSKKTPAKVAAAAPGAAPAKKEEVVAPAPAAGKKKAKGKDKEGFKTIKMTETFYCRSKDIYEILMDENRWKGFTQSNAKISREVGGEFSLFDGCITGVNEDLQEGKLIAQKWRFGSWPDGLYSSVRLMLDEPESGVTVIKLKQTGVPEEDKYGNSTVVENTERGWRDLIFQRIRGMFGFGI

SEQ ID NO: 661 - protein, 581 aa, Zea mays
MADEAKAKGNAAFSAGRFEEAARHFTDAIALAPDNHVLYSNRSAALASLHRYSDALADAQKTVDLKPDWAKGYSRLGAAHLGLGDAASAVAAYEKGLELDPSNEGLKAGLQDAKKAAAAPPRRGSSGPDAIGQMFQGPELWSKIASDPSTRAYLNEPDFMHMMREVQRNPSSISMYLSDPRMMQVLSLMLNVKIQRPEASEPSQSTPPPPKQQQQQQTPPSETKARDVEPEPEAEPMDLTDEEKDRKQTKAAAQKEKELGNAAYKKKDFEVAIQHYTKALELDDEDISYLTNRAAVYIEMGKYDECIKDCDKAVERGRELRADFKMISRALTRKGTALVKLAKTSKDFDIAIETFQKALTEHRNPDTLKKLNEAEKAKKELEQQEYYDPKLADEEREKGNEFFKEQKYPEAIKHYTEALKRNPKDPRVYSNRAACYTKLGAMPEGLKDAEKCLELDPTFTKGYTRKGAIQFFMKEYDKAVETYQAGLKHDPNNQELLDGVKRCVEQINKANRGEISQDELQERQNKAMQDPEIQNILTDPIMRQVLIDFQENPSAAQEHLKNPGVMQKIQKLVSAGIVQMR

SEQ ID NO: 662 - protein, 399 aa, Aspergillus nidulans
MDASKLRELRDFVEACKKNPSLLADPNLSFFRDYLQSLGAKIPAAAPSFESPKRSSMDDIDDDGDDDDDLDMRDPTPERDELDEEIVESDLELEGEIVQSDHDDPPQKMGNPSVEVTEENRDASQEAKGKAMEAISEGKLEDAIEHLTNAIVLNPLSAIMYGTRASVFIKMKKPAAAIRDANAALEINPDSAKGYKTRGMAYAMLGKWEEAAHDLHTASNMDYDEEINAVLKKVEPNAHKIVEHRRKYERLRKEREEKRAQRDRLRQRAEAQAAYDKAKRKEQSSSRSSGGASPRGFPGGMPGGGFPRGMPGGGFPGGGMPGGFPGGGMPGGFPGGVPGNVDMSKILNDPDLMAAFSDPEVMAALQDVMNNPANFAKHQANPKVGPIIAKMMAKFNGSQ

SEQ ID NO: 663 - protein, 273 aa, Oryza sativa
MSPAADSAASKRQAELLKQEGNAFFKKDRISAAIDAYTGAIALCPKVAVYWTNRALCYKRRNEWVRAEEDCRTAIQLDSHSVKAHYMLGLALLNKDELAEGIKELEKSLELGRGAHPASYMVEEIWQELSKAKYIEWENLSSERVRQLHKLKEACKEALRNYNSLDNPPAYVPEEQLNELEEVFRNARKSDIPTEVPDHLCCKITLDIFRDPVITPSGITYERAVILDHLHRVGKFDPVTRETLEPHQLVPNLAIKEAVHAFLSEHGWAYRMR

SEQ ID NO: 664 - protein, 275 aa, Zea mays
MAPAAPYGGAESQRQADLLKQEGNAFFRKERLSAAIDAYTGAITLCPNVAVYWTNRALCYRKRNEWTRVEEDCRTAIQLDSQSVKAHYMLGLSLVNSQRLSEGIKSLEKSLELGRGAHPASYMVEEIWQELSKAKYIEWESLSRDRTCQLQKLKVACKEALTSYNSLDNPAAGAPVEQLNELEEVFKKAAKTDTPAEVPDHLCCKITLDIFRDPVITPSGITYERAVLLDHLQTVGRFDPVTREALEPHQLVPNLAIKEAVHAFLSEHGWAYKIR

SEQ ID NO: 665 - protein, 196 aa, Triticum sp.
MGRGRSEIKRIDNPTQRQSTFYKRRDGLFKKARELAVLCDADLLLLLFSASGKLYQYLAPTVPSVKEFVERYEASRHTKVWSDIRQERRRELEKVAKMCDLLEKELRFMTVDDGERYTVPSLAALEHNLEAAMHKVRSEKDRKIGGEMSYLENMIRGKQAERYGLCDKLAHAQSLKVVEGGSTSLNNGLDLKLGFN

SEQ ID NO: 666 - protein, 225 aa, Zea mays
MARERREIRRIESAAARQVTFSKRRRGLFKKAEELAVLCDADVALVVFSATGRLSQFASSSVNDIVDKYSTHSKNLGKSHQQPSIDLNVEQSKYSGLNEQLAEETNGLRQMRGEDLEGLSVEELHRMERKLEAGLHRVISTKDQLFMQQIGELLQKGTQLEDENRRLKEQMPQVLTAGTMVVAAAAENILTEDGQSSESVMTALHSGSSLDCDDGSDISLKLSLP

SEQ ID NO: 667 - protein, 245 aa, Zea mays
MGRGKVQLKRIENKINRQVTFSKRRSGLLKKAHEISVLCDAEVALIIFSTKGKLYEYSTDSCMDKILERYERYSYAEKVLISAEYETQGNWCHEYRKLKAKVETIQKCQKHLMGEDLETLNLKELQQLEQQLESSLKHIRTRKSQLMVESISALQRKEKSLQEENKVLQKELAEKQKDQRQQVQRDQTQQQTSSSSTSFMLREAAPTTNVSIFPVAAGGRVVEGAAAQPQARVGLPPWMLSHLSC

SEQ ID NO: 668 - protein, 247 aa, Zea mays
MASADLLRREEEFYSSLFDSAKGDGARSRSQLIERKIEALEDMATRVSNRRSRKWFNDRLLIELVPRLYVEEIKGLFAPPPWGEQVPLSAFYRANVGEWDSFRSIDMDAEARLMQHMKKSLEKPRNHVDEGESIALNAWHRIDRHTREAIKRNFLPDLLGIYEERVRAFIEDASDKDALVLNVQDPFQRLLLHGVCEFYNVSSTTTSSVREDGRPWKATTIKKRQGTGVPSRITLVSFLRMKKNGSQ

SEQ ID NO: 669 - protein, 669 aa, Zea mays
MKVANGLSLRKSNGRFKSKLMMELVKQWREHQANMRCMNLSKRNNNIYVGAEGANITSPNDSNIWPTSALVAKNSNPRYVLASKCASQPPTMWLENSLNTSSGFKCSKLSIVRNALPSKTPKASVSWKSKDDSNAIPRHLEQSHCKKTSRATRTHFKAMPNLIHKAKNVDTSNLNDGTSGSSWRGQSDSYKGEDINIGKECTKTSELLKSREASRKSNILVVDRKDPNKDEPDKVKGIQDEVMTKEEGVKGHTCEGRATCWSCLKQANTTKTNDAPNLGSLLVGNEHMQGLMSNLRDNSSHLFEKNHSRHQRDDPCEYRETNLKFPNRIQSVGGNGKTNDVTSRRKRLLLEEKASAHVQNDLTYGPMKRRRYIEANEDEEEQNDLTYGPMKRRRYIEANEDEEDYVGDHHPVHIEDATTELTPQDSISKHCVERQCYCCSKPIDIPRWSGTFKIDGKEHISLAGHLSSKSCEKVWKLSSLPKVVQVTKVPRMAVWPKIFKASEPSGDNIGLYFFPPEMRHDEELDQLVNEVMDKDLILRAIIGEAEMLIFPSVLLPERYQTFQTKHYLWAAFKAKEDKGDAIVEEEVEKGNCVSNQPDKVQSDNASFPSNHGLDRPSMEAPPQSSSSVFGIVVRQAPNLEPEVKRFIQEMERKGALVTVMRGEAIGGGP

SEQ ID NO: 670 - protein, 310 aa, Saccharomyces cerevisiae
MTTSILDTYPQICSPNALPGTPGNLTKEQEEALLQFRSILLEKNYKERLDDSTLLRFLRARKFDINASVEMFVETERWREEYGANTIIEDYENNKEAEDKERIKLAKMYPQYYHHVDKDGRPLYFEELGGINLKKMYKITTEKQMLRNLVKEYELFATYRVPACSRRAGYLIETSCTVLDLKGISLSNAYHVLSYIKDVADISQNYYPERMGKFYIIHSPFGFSTMFKMVKPFLDPVTVSKIFILGSSYKKELLKQIPIENLPVKYGGTSVLHNPNDKFYYSDIGPWRDPRYIGPEGEIPNIFGKFTVTS

SEQ ID NO: 671 - protein, 327 aa, Zea mays
MAAEASAVQQLAGLLDQVDAPLKKTFENVHQGYPTETLLRFLKAREWHVNKAHRMLEDSLNWRMQNEIDSILEKPIIPVDLYRSIRDTQLIGLSGYSKEGIPVFAVGVGLSTYDKASVNYYVQSHIQINEYRDRFILPTVTKKYGRPITTCIKVLDMTGLKLSALHQMKIVTAISTVDDLNYPEKTETYYIVNAPYIFSACWKVVKPLLQERTRKKVHVLRGCGRDELLQIMDYSSLPHFCRQEGSGSSKHSSGDADNCFSLDHPFHQELYSFIQEQALNQELIKQGSLHVKIPEQDPEDAKIVEVIEAEFHKLGVQNGSANGIDQA

SEQ ID NO: 672 - protein, 251 aa, Zea mays
MASAAGGGAAGEGEWLKVSQLRPMVEAQDPNAKAVDNLTLRRFLRARDHDVDKASAMFLKFLKWRREAAPGGSVPEEQVRRELSQDKLCMGGVDRAGRPILVAFAARHFSAGRDMAEFKSFVVYFFDKICARIPRGQEKFLCIVDLKGWGYSNCDVRAYIAAIEILQNYYPERLGKALMIHVPYIFMKAWKMIYPFIDTNTRDKFVFVEDKSLQETLRREIDEGQLPEFLGGKMDVIPLKDYGVQQQPQAV

SEQ ID NO: 673 - protein, 296 aa, Zea mays
MFRRKHGSDFNSDDAEQREAKISELKAALGTLSARGEKYCSEACLRRYLEARNWNVAKSRKMLEESLKWRAAYKPEDIRWPDVSVEAETGKMYRASFRDREGRTVVVMKPTKQNTSSHEGQIRFLVYTLENAIFSLPEGQEKMVWLIDFTGWTVSHASPIKTCRETANILQNHFPERLAIGFLFNPPKVFEAFYKVIKIFLDPKSVEKVNFVYEKDEESMKVMYKYIDPEVLPVEFGGKSNVVYNHEEYSELMRQDDIKTASFWAVDAKTNHANPAINGTLVPEVAPQSSLAAKAS

SEQ ID NO: 674 - protein, 256 aa, Glycine max
MEAVRAGREGAIGLGQGDGVAKDSTETELTKIRLLRAIVETRDPSSKEEDDFMIRRFLRARDLDVEKASAMLLKYLKWRNSFVPNGSVSVSDVPNELAQDKVFMQGHDKIGRPILMVFGGRHFQNKDGLDEFKRFVVYVLDKVCASMPPGQEKFVGIAELKGWGYSNSDVRGYLSALSILQDYYPERLGKLFIVNAPYIFMKVWQIVYPFIDNKTKKKIVFVEKNKVKSTLLEEMEESQVPEIFGGSLPLVPIQDS

SEQ ID NO: 675 - protein, 370 aa, Glycine max
MKVAQVLHMNGGVGHASYANNSLLQQKVICLTKPIREEAITSLYCNTVPRSLAVADLGCSSGPNTLLVVSEFIKIVEKLCRELNHKSPEYKVFLNDLPGNDFNNIFKSLDSFKKKLCDEMESGIGPCYFSGVPGSFYGRVFPNQSLHFVHSSYSLHWLSKVPEGVDNNRGNVYIGSTSPTNVARAYYEQFQRDFSLFLKCRAEELVKGGRMVLTFLGRRSDDPSSKDGGYVWELMATALNDMVLQGIIKEEQLDTFNIPLYTPSPSEVKLEVLKEGSFASNRLEVSEVNWNAFDDWNALEFESERSDTLSDGGYNVAQCMRAVAEPMLVSHFGEAIIEEVFSRYQQILTDRMSKEQTKCINVTVLLTRKA

SEQ ID NO: 676 - protein, 382 aa, Zea mays
MKVERDLHMSRGDGEDSYASNSRLQEKSILKTRPVLHKAVAAAHALSLSSGGPGGGAMVVADLGCSSGPNTLLVVSEVLAAVAMVAGGSAQPQHVQFFLNDLPGNDFNLVFRSLDLLKNKKLAAKDRREESLLPPYYVAGLPGSFYTRLFPDHCVHLFHSSYCLMWRSKVPDELAGGAVLNEGHMYIWETTPQAVVALYRRQFQEDMSLFLRLRHRELVPGGHMVLAFLGRKKSKDVLRGEVSYTWGLLAQALQSLVKQGRVKKDKLDSFNLPFYAPSMDEVRDVITRSQAFDITHIQLFESNWDPHDDDDVEMKMEEDVAAVQSGVNVARSIRAVIGPLIARHFGEHILDDLFELHAKNVAVHLQKVKTKYPVIVVSLQAK

SEQ ID NO: 677 - protein, 382 aa, Zea mays
MSMRIERDLHMATGNGETSYTKNSRIQEKAMFQMKSVLEEATRAVCTALLPQTMVVADLGCSSGPNTLRFVTEVTRIIAHHCKLEHNRRHDHPLQLQFFLNDLPGNDFNNLFQLIEQFNKSSTTHKGDAATEALQPPCYISGLPGSYYTRIFPSESVHLFHSLFCLQWRSQAPEQLKGTQKSCLDIYITKTMSPSMVKLFQQQFQKDFSLFLRLRYEELVSGGQMVLTFIGRKHEDVFTGESNHLYGLLAQSLKSLVDEGLVEKEKLESFYLPIYSPSVGEVEAIVKQLGLFNMNHVKVFEINWDPYDDSEGDDVHNNIESGENVAKCLRAVMEPLVASQFGERILDKLFKEYARRVAKHLENEKTKHAVLVLSIKKAIIHV

SEQ ID NO: 678 - protein, 677 aa, Zea mays
MALPSMSLVAKGVLPFSARTSSGVTQRPVSVTASLEHKTSDARRKFLKLALGNLGVGLPTLLGAKKALADEQGVSSSRMSYSRFLEYLDKDRVKKVDLFENGTIAIVEAISPELGNRVQRVRVQLPGLSQELLQKLREKNIDFAAHSNQEDSGSLLFNLIGNLAFPLILIGGLFLLSRRAQGGLGGPNGPGFPLGFGQSRAKFQMEPNTGVTFDDVAGVDEAKQDFMEVVEFLKKPERFTAVGARIPKGVLLVGPPGTGKTLLAKAIAGEAGVPFFSISGSEFVEMFVGVGASRVRDLFKKAKENAPCIVFVDEIDAVGRQRGTGIGGGNDEREQTLNQLLTEMDGFEGNTGIIVIAATNRADILDSALLRPGRFDRQVSVDVPDVRGRTEILKVHGSNKKFDSDVSLDVIAMRTPGFSGADLANLLNEAAILAGRRGRTAISSKEIDDSIDRIVAGMEGTVMTDGKSKSLVAYHEVGHAICGTLTPGHDPVQKVTLVPRGQARGLTWFIPMDDPTLISRQQLFARIVGGLGGRAAEEVIFGEPEVTTGAAGDLQQITGLAKQMVVTFGMSEIGPWSLMEGGAQSGDVIMRMMARNSMSEKLAEDIDSAVKQLSDEAYEIALRHIRNNREAIDKIVEVLIEKETVTGDEFRAILSEFAEIPVENRVPPATPAAALPA

SEQ ID NO: 679 - protein, 450 aa, Hordeum vulgare subsp. vulgare
MAMPPAEKVIVVDANPSKNGHGDEIDDLPVADATSHQIGVDPWYQVAFVLTTGVNSAYVLGYSGSLMVPLGWVGGTVGLLLAAAVSMYANALLGRLHLLGGKRHIRYRDLAGHIYGPKMYRLTWAMQYVNLFMINTGFIIIAGQALKALYLLISNDGAMKLPYCIAVSGFVCALFAFGIPYLSALRIWLGFSTVFSLTYIVAACTLSLKDGMRSPPRDYSIQGDPSSRVFTTIGAAASLVFAYNTGMLPEIQATVRAPVVKNMEKALWFQFTAGCVPLYAIIVIGYWAYGNQTTTYLLNNVHGPVWIKAVANLSAFLQTVIALHIFASPMYEYLDTRFGSKVGGPFAMHNVIFRVGVRGGYLAVNTLMAAMLPFLGDFMSLTGALSTFPLTFVLANHMYLVSNRQRLSSLQKSWHWLNIVFFTILSITAAIAALRLIARDSKEYHIFADV

SEQ ID NO: 680 - protein, 276 aa, Auxenochlorella protothecoides
CFAYSFSSILVEIQDTLRQPPKAAKTMSKATNVSVTASFAFYFVVAIGGYASLGNDVPSYILGGLQGPEWVIFVANLCVLLHMWSAYQIYAHPMFDTLESHVKAFKLRQAKAKGDAELPAKVEELKRMSLAARQGSAAGTKTMDDTAPAAPPAANPLCRLSRVSAMAGEKLQRLSQNAAMYRVSTGFADTSVPSNDDHFVLPWWQRLITRRMYVVRTTLIAAIMPFFGAMAGLVGALAFFPLTSSSPSAAGAPCTSPLGGSITCCTSSSSAWRWCA

SEQ ID NO: 681 - protein, 453 aa, Atriplex hortensis
MSSYDPENAATNGVPPVKNDNSNHQQQHQQTVVVPETAHQISTDSWLQVGFVLTTGINSAYVLGYSGAIMVPLGWIPAVLGLIAATLISLYANSLVAKLHEYGGKRHIRYRDLAGFIYGPKAYSLTWALQYINLFMINTGFIILAGSSIKAAYHLFTDDPALKLPYCIIISGFVCALFAIGIPHLSALRIWLGVSTFFGLIYIIIAIALSLKDGINSPPRDYSVPTERGKVFTTIGAAANLVFAFNTGMLPEIQATVRKPVVGNMMKGLYFQFTAGVVPMYAIVFIGYWAYGNKTDSYLLNNVHGPVWLKALANISTFLQTVIALHIFASPMYEYLDTRFGITGSALNPKNLGSRVLIRGGYLAVNTFVAALLPFLGDFMSLTGAISTFPLTFILANHMYFKAKRNKLSMAMKIWLWINIVFFSCMAVASFIAALRLIATDSKQYHVFADLEG

SEQ ID NO: 682 - protein, 186 aa, Brassica napus
HDFVPPQPAFKCFDDDGRLKRTGTVWTASAHIITAVIGSGVLSLAWAIAQLGWVAGPAVMLVFSLVTLYSSTLLSDCYRTGDAVSGKRNYTYMGAVRSILGGFKFKICGLIQYLNLFGIAVGYTIAASISMMAIKRSNCFHKSGGKDPCHMSSNPYMIIFGVTEILLSQVPDFDHIWWISIVAAVM

SEQ ID NO: 683 - protein, 184 aa, Brassica napus
PYMAVFGIIQIFFSQIPNFHKLSFLSLMAAVMSFAYASIGIALAIAPVAGGKVGKTNMTGTVVGVDVTAAQKIWRSFQAVGDIAFAYAYATVLIEIQDTLRSSPAENKAMKRASFVGVSTTTFFYILCGCLGYAAFGNKAPGDFLTDFGFYEPFWLIDFANACIAVHLIGAYQVFAQPIFQFVE

SEQ ID NO: 684 - protein, 223 aa, Brassica napus
SGPVWTARAHIITAVIGSGVLSLAWAIGQLGWIAGPAVMFLFSFVTYFSSTLLSDCYRTGDPVSGKRNYTYMDAVQSILGTVNKTYISFTQYVLGCFTLSGSVVLTGGFRFKICGLIQFLNLFGITVGYTIAASISMMGVSLSQQEVSLATKKGVKTPFNLVKAFRAIKRSNCFHESGGKNPCHMSSNPYMIMFGVTEILLSQIKDFDQIWWLSIVAAIMSFT

SEQ ID NO: 685 - protein, 509 aa, Vicia faba
MLQRSRTLPSKIYQGVIEERKDGRHYIELEPLPKMETETKPITIQSKCLDDDGRVKRTGTFWTASAHIITAVIGSGVLSLSWAIAQLGWAVGPVVMVLFAVVNLYTSTLLTQCYRSDDSVAGPRNYTYTDAVKSILGGKKFKICGVIQYVNLFGVAIGYTIAASVSMMAIKRSNCYHESHGNDPCHMSSNVYMIAFGIAEVILSQIPDFDQVWWLSIVAAIMSFTYSAVGLGLGVAKVAENGTFHGRLMGISIGTVTPAGTVTGTQKVWRSLQALGAMAFAYSFSIILIEIQDTIKSPPAEHKTMKKATMLSIMVTTVFYILCGSMGYAAFGDHVPGNLLTGFGFYNPYWLLDIANFAIVVHLVGAYQVFSQPFFAFVEKWSAHKWPKNKFVTEEYDIPIPCIGVYKLNLFRLIWRTIFVLLTTLIAMLLPFFNDVVGLLGAFGFWPLTVYFPIDMYISQKKIGRWTNRWLGLQMLSGCCLIISTLAAVGSIAGVVLDLKTYKPFKTSY

SEQ ID NO: 686 - protein, 481 aa, Vicia faba var. minor
MVVEKNASNNHHQTFYVSIDQQIDSKFFDDDGRVKRTGTSWTASAHVITAVIGSGVLSLAWAIAQLGWIAGPIVMFLFAWVTYYTSVLLCECYRNGDPVNGKRNYTYMEVVHSNLGGFQVQLCGLIQYLNLVGVAIGYTVASAISMMAIVRSNCFHRSGGKDPCHMNSNIYMIAFGAVQIIFSQIPDFDQLWWLSIVAVVMSFTYSTIGLGLGIGKVIENKKFAGTITGINDVTKAQKTWGSLQALGDIAFAYSFSMILIEIQDTIKAPPPSESKTMKKATLISVIVTTFFYMLCGCFGYAAFGNSSPGNLLTGFGFYNPFWLLDIANAAIVIHLIGAYQVYCQPLFAFVENYTAKRFPDSDFVNKDVKIPIPGLDRYKLNLFRLVWRTVYVILTTLISMLLPFFNDIVGLLGAIGFWPLTVYFPVEMYIIQKKIPKWSTKWICLQLLSGACLIITIAATIGSIAGLILDLKVFKPFKTIY

SEQ ID NO: 687 - protein, 475 aa, Vicia faba var. minor
MTMEEKEEHSTEAAVTSHNDSKLFDDDDRVKRTGTVWTTSSHIITAVVGSGVLSLAWAIAQLGWIIGLSVMIFFSLITWYTSSLLSECYRTGDPHFGKRNYTFMEAVHTILGGFYDTLCGIVQYSNLYGTAVGYTIGASISMMAIKRSNCFHSSGGKDGCRISSNPYMISFGVIQIFFSQIPDFHEMWWLSIVAAIMSFTYSLIGLGLAIAKVAENGSFKGSITGVSIGTVTEAQKVWGVFQSLGNIAFAYSYSQILIEIQDTIKSPPSEMKTMKQATKISIGVTTIFYMLCGGMGYAAFGDLSPGNLLTGFGFYNPYWLIDIANAALIIHLVGAYQVYAQPLFAFVEKIMIKRWPKIKKEYKLTIPGFRPYHLNLFRLIWRTIFVITTTFISMLIPFFNDVLGLIGAAGFWPLTVYFPVEMYIKQKKITKWSYKWISMQTLSVICFVVSVVAFVGSVSSIVVDLKKYKPFTTDY

SEQ ID NO: 688 - protein, 486 aa, Vicia faba var. minor
MVENISRTNLSYRGDTGGIEEAIDDAPLQTDSKFYDDDGRVKRTGTVWTTCSHIITGVIGSGVLSLAWSVAQMGWIAGPATMIFFSIITLYTSSFLADCYRSGDTEFGKRNYTFMDAVHNILGGPSVKICGVVQYLNLFGSAIGYNIAAAMSMMEIRKSYCVHSSHGEDPCHVSGNAYMIAFGVAQLFFSQIPDFHNTWWLSIVAAVMSFFYSTIALALGISKVAETGTVMGSLTGISIGTVTPAQKVWGVFQALGNIAFAYSYSFILLEIQDTIKSPPSEGKAMKKAAKLSIGVTTTFYLLCGCTGYAAFGDAAPGNLLAGFGVSKAYILVDMANAAIVVHLFGAYQVYAQPLFAFVEKEAGKKWPKIDKGFEVKIPGLPVYNQNIFMLVWRTIFVIVPTLIAMLIPFFNDVLGVIGALGFWPLTVYFPVEMYIIQKKIPKWSRKWICLEIMSTFCLFVSVVAGLGSLIGVWIDLKKYKPFSLEN

SEQ ID NO: 689 - protein, 161 aa, Narcissus pseudonarcissus
LKKGSSTDQDVEVYRGEEFDDDGRPRRTGTVWTASAHIITAVIGSGVLSLAWSMSQLGWIAGSVTLFLFSIVTFFTSSLLTDCYRSPDPVHGKRNYTYMSAVKSNLGSTKVWFCGICQYVILVGTAIGYTITASISAAAISKSGCFHKKGHEADCAVSDSL

SEQ ID NO: 690 - protein, 154 aa, Narcissus pseudonarcissus
KVMKKASFIGVSTTTTFYLLCGCLGYAAFGNKAPGNILTGFGFYEPFWLVDIANLCIIIHLVGAYQVFSQPIFSAVETWITNRHPNINFLNHDRVLVIGKCFRYKINLFRLIWRTLFVIACTFIAILMPFFNDILGFLGAVGFWPLTVYFPTEM

SEQ ID NO: 691 - protein, 486 aa, Ricinus communis
MVENTAAKNHPHQVFDVSINMQTQVVGSKWLDDDGRTKRTGTVWTASAHIITAVIGSGVLSLAWAIAQLGWIAGPAVMFLFSLVTYYTSTLLSACYRSGDPVNGKRNYTYMDAVRTNLGGAKVKLCGFVQYLNLFGVAIGYTIASSISMMAIKRSNCFHKSGGKNPCHINANPYMIAFGIAEIIFSQIPDFDQLWWLSILAAVMSFTYSTIGLGLGIAQVVENGKAMGSVTGISIGANVTPTQKIWRSFQALGDIAFAYSYSIILIEIQDTVRSPPSESKTMKKATLISVAVTTLFYMLCGCFGYAAFGDMSPGNLLTGFGFYNPYWLLDIANVAIVVHLVGAYQVYCQPLFAFVEKAAAQRYPDSGFITKDIKIPVPGFRPFNLNLFRSVWRTLFVVFTTVISMLLPFFNDIVGLLGALGFWPLTVYFPVEMYIAQKKIPKWSTRWLCLQILSAACLVITIAAAAGSIAGVVGDLKSVKPFQTSY

SEQ ID NO: 692 - protein, 466 aa, Ricinus communis
MPPQAGSKWYDDDGKLKRTGTVWTASAHIITAVIGSGVLSLAWAVAQLGWVAGPAVMFLFSLVTYYTSTLLSACYRTGDPVNGKRNYTYMDAVRSNLGGAKFKICGYVQYVNLIGVAIGYTIASSISMMAVKRSNCFHKSEAKNPCHMKCQSLHDCILEVVESSSSQIPDFDQTMGGLSIVAAIMSFTYSTIGLGLGIAEVTKNGKAMGSMTGISIGTVTETQKIWRSFQALGDIAFAYSYSLILIEIQDTIRSPPAESKTMRKATLISVSVTTLFYMLCGCFGYAAFGDMSPGNLLTGFGFYNPYWLLDIANVAIVVHLVGAYQVYCQPLFAFVEKAAVQRFPDSEFILKDIKIPIPGCKPYNLNLFRMVWRTVFVIFTTVISMLLPFFNDIVGLLGALGFWPLTVYFPVEMYIAQKKIPKWSTRWLCLQILSAACLIITIAAAAGSIAGVIVDLKTVKPFQTTY

SEQ ID NO: 693 - protein, 284 aa, Ricinus communis
AIAQLGWVAGPVILMAFSFITFFTSTLLADSYRSPDPVTGKRNYTYMDAVRANLGGWKVTFCGISQYANLVGITVGYTITASISMVAVKRSNCFHRHGHAAKCHTSNNPYMIIFACIQIILSQIPNFHKLSWLSVLAAVMSFAYSSIGLGLSIAKVAGGEHVRTSITGTTVGVDVTAAQKIWRAFQSIGDIAFAYAYSTVLIEIQDTIKSGPPENKAMKKASFVGIVTTTMFYILCGCIGYAAFGNDAPGNFLTGFGFYEPFWLIDIANVCIAIHLIGAYQVFS

SEQ ID NO: 694 - protein, 284 aa, Ricinus communis
AIAQIGWIAGPAVMFLFSLVTYYTSTLLSACYRSGDPVNGKRNYTYMDAVRTNLGGAKVKLCGFVQYLNLFGVAIGYTIASSISMMAIKRSNCFHKSGGKNPCHINANPYMIAFGIAEIIFSQIPDFDQLWWLSILAAVMSFTYSTIGLGLGIAQVVENGKAMGSVTGISIGANVTPTQKIWRSFQALGDIAFAYSYSIILIEIQDTVRSPPSESKTMKKATLISVAVTTLFYMLCGCFGYAAFGDMSPGNLLTGFGFYNPYWLLDIANVAIVVHLVGAYQVFA

SEQ ID NO: 695 - protein, 465 aa, Oryza sativa (japonica cultivar-group)
MNKNAAPEDVESGEHERTGTVWTATAHIVTAVIGSGVLALAWSVAQLGWVAGPLALAGFACVTYYTSTLLANAYRAPHPVTGTRNRTYMDAVRSYLSPREVFMCGIAQYVNLWGTMVGYTITATISMVAIRRSDCIHRNGAGAAARCDNTSATVLMLAFSIVQVVLSQFPGLEHITWLSVVAAVMSFAYSFIGLGLSVAEWVSHGGHLSGRIQGATAASSSKKLWNVLLALGNIAFAYTFAEVLIEIQDTLKPSPPENKTMKKAAMYGIGATTIFYISVGCAGYAAFGSDAPGNILTASGMGPFWLVDIANMCLILHLIGAYQVYAQPIFATMERWISSRWPEAKFINSEYTVNVPLIQRGSVTVAPYKLVLRTVVVIATTVVAMMIPFFNAVLGLLGAFSFWPLTVYFPISMHIAQEKITRGGRWYLLQGLSMVCLMISVAVGIGSVTDIVDSLKVATPFKTVS

SEQ ID NO: 696 - protein, 462 aa, Nicotiana sylvestris
MVASPDNNAADGRTVKNKRPIDEWLPITSSRNGQNGGYSAFHNVTAMVGAGVLGLPYAMSELGWGPGVTVMVVSWVITLYTLWQMVECKKCPGMLAGTCIDDHKLAVSNVFGNKLGLWIVVPQQLVVEVGIDIVYMVTGGKSFQKSIVLVCKDNCKDIKLTYYIMIFASVHFVLSHLPNFNAISGVSLVAAIMSLSYCTIAWGASIVLGVQPDVEYEYRAENTGEGIFNFFSGLGEVAFAYAGHNVVLEIQATIPSTPEKPSKGPMWKGVLVAYIIVALCYFPVAIIGYWIFGNSVSNNILISLEKPTWLIVLANAFVVITLLGAYQLYAIPVFDMLETYLVRKLKFKPTWYLRFMTRNLYVAFTMFVGIIFPFLWGLLGFLGGFAFAPTTYFLPCIMWLSIYKPKRWGLSWTSNWICIIVGVMLTVLAPIGGLRTIIIQAKDYNFFYWDSLSGSLAFGKKG

SEQ ID NO: 697 - protein, 469 aa, Solanum tuberosum
MAPEFQKNAMYVSNELENGDVQKNFDDDGREKRTGTLLTASAHIITAVIGSGVLSLAWAIAQLGWVAGPAVLFAFSFITYFTSTLLADCYRSPGPISGKRNYTYMDVVRSHLGGVKVTLCGIAQYANLVGVTIGYTITASISMVAVKRSNCFHKNGHEASCSIESYPYMIIFAVIQIVLSQIPNFHKLSWLSILAAVMSFTYASIGLGLSIAKASGVGHHVKTALTGVVVGVDVSGTEKVWRSFQAIGDIAFAYAYSTVLIEIQDTLKSSPSESKVMKRASLAGVSTTTLFYVLCGTIGYAAFGNNAPGNFLTGFGFYEPFWLIDFANVCIAVHLVGAYQVFCQPLYGFVEGRCSERWPDSKFITSEYAMQVPWCGTYNLNLFRLVWRTTYVIVTAVIAMIFPFFNDFLGLIGAASFYPLTVYFPIEMYIAQRKIPKYSFTWVWLKILSWTCLISITCCSCWIDPGTCH

SEQ ID NO: 698 - protein, 385 aa, Solanum tuberosum
HIITAVIGSGVLSLAWAIAQLGWVAGPAVLFAFSFITYFTSTLLADCYRSPGPISGKRNYTYMDVVRSHLGGVKVTLCGIAQYANLVGVTIGYTITASISMVAVKRSNCFHKNGHEASCSIESYPYMIIFAVIQIVLSQIPNFHKLSWLSILAAVMSFTYASIGLGLSIAKASGVGHHVKTALTGVVVGVDVSGTEKVWRSFQAIGDIAFAYAYSTVLIEIQDTLKSSPSESKVMKRASLAGVSTTTLFYVLCGTIGYAAFGNNAPGNFLTGFGFYEPFWLIDFANVCIAVHLVGAYQVFCQPLYGFVEGRCSERWPDSKFITSEYAMQVPWCGTYNLNLFRLVWRTTYVIVTAVIAMIFPFFNDFLGLIGAASFYPLTVYFPVE

SEQ ID NO: 699 - protein, 376 aa, Solanum tuberosum
HIITAVIGSGVLSLAWATAQLGWVAGPTVLLLFFFVTYYTSALLSDCYRTGDPVTGKRNYTYMDAVRANLGGFQVKICGVIQYANLFGVAIGYTIAASISMVAVNRSNCFHKQGHRAACNVSSTPYMIIFGVMEIIFSQIPDFDQISWLSIVAAVMSFTYSTIGLGLGVAQVAETGKIEGSLTGISIGTEVTEMQKIWRSFQALGAIAFAYSYSLILIEIQDTLKSPPAEAKTMKRATLISVAVTTVFYMLCGCFGYAAFGDQSPGNLLTGFGFYNPYWLLDIANVAIVVHLVGAYQVYCQPLFAFVEKTATEWYPDSKIITKEIDVPIPGFKPFKLNLFRLVWRTIFVIITTVISMLMPFFNDVVGILGAFGFWP

SEQ ID NO: 700 - protein, 379 aa, Nepenthes alata
AVIGSGVLSLAWAIAQLGWVAGPAVLIAFSAITYFTSTMLADCYRAPDPVTGKRNYTYMDVVKAYLGGRKVQLCGLAQYGNLVGVTIGYTITASISMVAVKRSNCFHKHGHRDGCHTSNNPFMIAFACIQIVFSQIPNFHELFMASPIVAAAMSFAYSSIGIGLSIAKVAGGAHARTSLTGVAVGIDVTSTEKVWRTLQAIGDIAFAYAYANVLVEIQDTLKSSPPENKVMRRASLIGGRPPHSFYVLCGCMGYAAFVYDAPGNFLTGFGFYEPFWLIDFANVCIAIHLIGAYQVFGQPIFAFVEGWCRDMWPENKFITREHPIEVPFVGVYYLNLFRLVWRTTYVIITAIVAMLFPFFNDFLGLIGAASFWPLTVYFP

SEQ ID NO: 701 - protein, 377 aa, Nepenthes alata
AVIGSGVLSLAWAIAQLGWIAGPAVMLLFSFVIYYTSILLADCYRVDDPIFGNRNYTYMDAVRSNLGGVKVKVCGLIQYLNLIGVAIGYTIAASISMMAIRRSNCFHNSGAKKPCHMSSNPYMIMFGILEIILSQIPDFDQIWWLSIVAAVMSFTYSTIGLSLGIAQVAANKAFKGSLTGISIGAVTQTQKIWRSFQALGDIAFAYSYSIILIEIQDTVKSPPSEAKTMKKASLISIVVTTAFYMLCGCMGYAAFGDIAPGNLLTGFGFYNPFWLLDIANAAIVVHLVGAYQVYCQPLFAFVEKSASGKWPKNAFINKGIKIQIPGFGAYDLNIFRLAWRTAFVITTTIISMLLPFFNDIVGILGAFGFWPFTVYFP

SEQ ID NO: 702 - protein, 376 aa, Nepenthes alata
AVIGSGVLSLAWATAQLGWIAGPTAMLLFSFITFYTSRLLADCCRSGDSFTGERNPTYMDAVRSNLGGIQVKICGLVQYANLFGVSIGYTIAASISMMAIKRSNCFHASDDKNPCQYPASPFMIIFGLTEIIFAQIPDFHRLWWLSIVAAVMSFTYSTVGVSLGIAQVAENGKIKRSLTGISIGTVSQAQRIWRRFQALGDIAFAYSYSLVLVEIQDTIKSPPSEIKTMKKATVMSIAVTTLIYLLCGCMGYAAFGDLAPGNLLTGFGFYNPYWLLDLANAAIVVHLLGAYQVCCQPIFAFIETTASNAFPDNEFITKEVEIPIPGFKPYKLNLFRLVWRTSFVGVTTTISILLPFSNGVVGLLGALAFWPLTVYY

SEQ ID NO: 703 - protein, 651 aa, Oryza sativa
  unsure (1)..(651): unsure at all Xaa locations
MDSYRAYQQFQEPDILAYIYGITCQTIQRTITIHQRPVTGTGALPFYYCNVASRETETDQRDAFSSQSWKKASISAGNHRPAAHCVDRARTMIPHTRTCPANLSIGYRGRHLLQVCVVSFGYIIKIKIKFKFWANDEVLARQTHCIRTLPNGVRKSRTGALYWSKTRPHPSSPTLPHGTPAGLADNMNKNAAPEDVESGEHERTGTVWTATAHIVTAVIGSGVLALAWSVAQLGWVAGPLALAGFACVTYYTSTLLANAYRAPHPVTGTRNRTYMDAVRSYLSPREVFMCGIAQYVNLWGTMVGYTITATISMVAIRRSDCIHRNGAGAAARCDNTSATVLMLAFSIVQVVLSQFPGLEHITWLSVVAAVMSFAYSFIGLGLSVAEWVSHGXXHLSGRIQGATAASSSKIWNVLLALGNIAFAYTFAEVLIEIQDTLKPSPPENKTMKKAAMYGIGATTIFYISVGCAGYAAFGSDAPGNILTASGMGPFWLVDIANMCLILHLIGAYQVYAQPIFATMERWISSRWPEAKFINSAYTVNVPLIQRGSVTVAPYKLVLRTVVVIATTVVAMMIPFFNAVLGLLGAFSFWPLTVYFPISMHIAQEKITRGGRWYLLQGLSMVCLMISVAVGIGSVTDIVDSLKVATPFKTVS

SEQ ID NO: 704 - protein, 476 aa, Oryza sativa
  unsure (1)..(476): unsure at all Xaa locations
FKFWANDEVLARQTHCIRTLPNGVRKSRTGTVWTATAHIVTAVIGSGVLALAWSVAQLGWVAGPLALAGFACVTYYTSTLLANAYRAPHPVTGTRNRTYMDAVRSYLSPREVFMCGIAQYVNLWGTMVGYTITATISMVAIRRSDCIHRNGAGAAARCDNTSATVLMLAFSIVQVVLSQFPGLEHITWLSVVAAVMSFAYSFIGLGLSVAEWVSHGXXHLSGRIQGATAASSSKIWNVLLALGNIAFAYTFAEVLIEIQDTLKPSPPENKTMKKAAMYGIGATTIFYISVGCAGYAAFGSDAPGNILTASGMGPFWLVDIANMCLILHLIGAYQVYAQPIFATMERWISSRWPEAKFINSEYTVNVPLIQRGSVTVAPYKLVLRTVVVIATTVVAMMIPFFNAVLGLLGAFSFWPLTVYFPISMHIAQEKITRGGRWYLLQGLSMVCLMISVAVGIGSVTDIVDSLKVATPFKTVS

SEQ ID NO: 705 - protein, 518 aa, Lilium longiflorum
ASHQAMEVQSMPVTPRSGTPRVTPPISAPPSQLHSPSLTRSPLLGPATPRASRLTPLASPIRKAIVSMRGYLEEVGHVTRLDPQDEWLPITQSRNGNSYYSAFHTLSSGIGFQALVVPVAFTFLGWLWGIVLLSVGFCWQLYTLWLLVELHESVPGTRYSRYLHLAKDTFGEKLGKFMALVPIIYLSAGTCSALIIVGGSTMKGFFQIVCGPTCRYMPLTTVEWYLVFVCLAVVLAQLPHLNSIAGVSLIGAVTAVTYCTMIWVISVRKGKIPNISYEAVDTSWDVARVLSILNAIGIIAFAFRGHNLVLEIQGTMPSTQKHPARVPMWRGVKVAYVLIAFCLFPVALIGFWSYGNQIPPNGVLTALNQFHSHDTSRTILGLTTLLVVINCLSSFQIYAMPIFDNMEAGYTSKKNKPCPQWLRSGFRAFFGAVAFLISSAFPFLPQLAGLIGAVALPVTFAYPCFMWIVIKKPERFGVMWWLNWCLGCLGMGLSVVLVVAGVWRLVETGVNISFFDPQ

SEQ ID NO: 706 - protein, 447 aa, Avicennia marina
MESQGREDVVGCSGAGGRVHSDGHIDIEIPETAHQISNDSWFQAGFVLTTGINSAYVLGYPGAVMVPLGWIGGVIGLILATVVSLHANALVAKLHDFGGKRRIRYRDLAGSIYGGKAYSITWGMQYVNLVMINVGYIILAGNSLKAVYLLFRDDHVMKLPHFIAIAGLACGLFAISVPHLSALRNWLAFSTLFSMIYIVGGIALAIKDGFKAPPRDYSIPGTKTSRIFTTIGASANLVFSFNTGMLPEIQATVRPPVVENMMKGLYFQFTVGVVPMYAIIFAGYWAYGSTTSSYLLNNVHGPIWLKTTTNISAFLQSVIALHIFASPMYEFLDTKYGIKGSALAVRNLSFRILVRGGYVAMTSLVSALLPFLGDFMSLTGALSTFPLTFILANHMYLVANRNKMSLLQKNWHWLNVVLFSCMAVAAAVAALRLIAVDSRTYHVFADI

SEQ ID NO: 707 - protein, 446 aa, Avicennia marina
MDVRGGEDVTGGSGAGRKVHSEDMAVEVPETAHQISNDSWLQAGFVLTTGVNSAYVLGYSGAVMVPLGWIGGVVGLILATLVSLHANALVAQLHEYGGKRHIRYRDLAGRIYGRRAYSVTWGMQYVNLFMINVGFVILAGNSLKAVYTLFRHDHVMKLPHFIAIAAIACGLFAISIPHLSAMRIWLAFSMFFSLVYIIVGFALSLKDGIEAPPRDYTLPEKGADKVFTIIGAAAELVFSFNTGMLPEIQATVRPPVIGNMMKALYFQFTVGVVPMYSIIFVGYWAYGSKTTSYLLNNVHGPIWLMTVANIAAFLQSVISLHIFASPMYEIWIPDLESKEVLWPIRNLSFRVVVRGGYVATTAFVSALLPFLGDFMSLTGAISTFPLTFILANHMYLVAKGNKLSPLHKTGLWLNIGFFGCLAVAAAVAALREIVVDSKTYHLFADI

SEQ ID NO: 708 - protein, 442 aa, Arabidopsis thaliana
MTATEAKNRKINVGDGDDVVDIEIPDTAHQISSDSWFQVAFVLTTGINSAYVLGYSGTIMVPLGWIGGVVGLLIATAISLYANTLIAKLHEFGGRRHIRYRDLAGFIYGRKAYHLTWGLQYVNLFMINCGFIILAGSALKAVYVLFRDDHTMKLPHFIAIAGLICAIFAIGIPHLSALGVWLGVSTFLSLIYIVVAIVLSVRDGVKTPSRDYEIQGSSLSKLFTITGAAANLVFAFNTGMLPEIQATVRQPVVKNMMKALYFQFTAGVLPMYAVTFIGYWAYGSSTSTYLLNSVNGPLWVKALANVSAILQSVISLHIFASPTYEYMDTKYGIKGNPFAIKNLLFRIMARGGYIAVSTLISALLPFLGDFMSLTGAVSTFPLTFILANHMYYKAKNNKLNAMQKLWHWLNVVFFSLMSVAAAIAAVRLIAVDSKNFHVFADL

SEQ ID NO: 709 - protein, 442 aa, Arabidopsis thaliana
MTATEAKNRKINVGDGDDVVDIEIPDTAHQISSDSWFQVAFVLTTGINSAYVLGYSGTIMVPLGWIGGVVGLLIATAISLYTNTLIAKLHEFGGRRHIRYRDLAGFIYGRKAYHLTWGLQYVNLFMINCGFIILAGSALKAVYVLFRDDHTMKLPHFIAIAGLICAIFAIGIPHLSALGVWLGVSTFLSLIYIVVAIVLSVRDGVKTPSRDYEIQGSSLSKLFTITGAAANLVFAFNTGMLPEIQATVRQPVVKNMMKALYFQFTAGVLPMYAVTFIGYWAYGSSTSTYLLNSVNGPLWVKALANVSAILQSVISLHIFASPTYEYMDTKYGIKGNPFAIKNLLFRIMARGGYIAVSTLISALLPFLGDFMSLTGAVSTFPLTFILANHMYYKAKNNKLNAMQKLWHWLNVVFFSLMSVAAAIAAVRLIAVDSKNFHVFADL

SEQ ID NO: 710 - protein, 439 aa, Arabidopsis thaliana
MDTSEARNRKVVAVEQFDLEVPETAHQISSDSWFQVAFVLTTGINSAYVLGYSGTVMVPLGWIGGVVGLILATAISLYANTLIAKLHEFGGKRHIRYRDLAGFIYGKKMYRVTWGLQYVNLFMINCGFIILAGSALKAVYVLFRDDSLMKLPHFIAIAGVVCAIFAIGIPHLSALGIWLGVSTILSIIYIIVAIVLSAKDGVNKPERDYNIQGSSINKLFTITGAAANLVFAFNTGMLPEIQATVKQPVVKNMMKALYFQFTVGVLPMYAVTFIGYWAYGSSTSTYLLNSVSGPVWVKALANISAFLQSVISLHIFASPTYEYMDTKYGVKGSPLAMKNLLFRTVARGSYIAVSTLLSALLPFLGDFMSLTGAISTFPLTFILANHMYLVAMNDELSLVQKLWHWLNVCFFGLMSLAAAIAAVRLISVDSKNFHVFADV

SEQ ID NO: 711 - protein, 436 aa, Arabidopsis thaliana
MNSKNRINNVGEDVDIEIPDTAHQISSDSWFQAAFVLTTSINSAYVLGYSGTVMVPLGWIGGVVGLILATAISLYANTLVAKLHEFGGKRHIRYRDLAGFIYGRKAYCLTWVLQYVNFFMINCGFIILAGSALKAVYVLFRDDHAMKLPHFIAIAGLICAVFAIGIPHLSALGIWLAVSTILSLIYIVVAIVLSVKDGVKAPSRDYEIQGSPLSKLFTITGAAATLVFVFNTGMLPEIQATVKQPVVKNMMKALYFQFTVGVLPMFAVVFIGYWAYGSSTSPYLLNNVNGPLWVKALANISAILQSVISLHIFASPTYEYMDTKFGIKGNPLALKNLLFRIMARGGYIAVSTLLSALLPFLGDFMSLTGAVSTFPLTFILANHMYYKAKNNKLSTLQKLWHWLNVVFFSLMSVAAAIAALRLIAIDSKNFHVFADL

SEQ ID NO: 712 - protein, 436 aa, Arabidopsis thaliana
MNSKNRINNVGEGVDIEIPDTAHQISSDSWFQAAFVLTTSINSAYVLGYSGTVMVPLGWIGGVVGLILATAISLYANTLVAKLHEFGGKRHIRYRDLAGFIYGRKAYCLTWVLQYVNLFMINCGFIILAGSALKAVYVLFRDDHAMKLPHFIAIAGLICAVFAIGIPHLSALGIWLAVSTILSLIYIVVAIVLSVKDGVKAPSRDYEIQGSPLSKLFTITGAAATLVFVFNTGMLPEIQATVKQPVVKNMMKALYFQFTVGVLPMFAVVFIGYWAYGSSTSPYLLNNVNGPLWVKALANISAILQSVISLHIFASPTYEYMDTKFGIKGNPLALKNLLFRIMARGGYIAVSTLLSALLPFLGDFMSLTGAVSTFPLTFILANHMYYKAKNNKLNTLQKLCHWLNVVFFSLMSVAAAIAALRLIALDSKNFHVFADL

SEQ ID NO: 713 - protein, 452 aa, Arabidopsis thaliana
MTDPPRPDPFPVTRLDSDAGALFVLQSKGEWWHAGFHLTTAIVGPTILTLPYAFRGLGWWLGFVCLTTMGLVTFYAYYLMSKVLDHCEKSGRRHIRFRELAADVLGSGLMFYVVIFIQTAINTGIGIGAILLAGQCLDIMYSSLFPQGTLKLYEFIAMVTVVMMVLSQLPSFHSLRHINCASLLLSLGYTFLVVGACINLGLSKNAPKREYSLEHSDSGKVFSAFTSISIIAAIFGNGILPEIQATLAPPATGKMLKGLLLCYSVIFFTFYSAAISGYWVFGNNSSSNILKNLMPDEGPTLAPIVVIGLAVIFVLLQLFAIGLVYSQVAYEIMEKKSADTTKGIFSKRNLVPRLILRTLYMAFCGFMAAMLPFFGDINAVVGAFGFIPLDFVLPMLLYNMTYKPTRRSFTYWINMTIMVVFTCAGLMGAFSSIRKLVLDANKFKLFSSEVVD

SEQ ID NO: 714 - protein, 452 aa, Arabidopsis thaliana
MTDPPRPDPFPVTRLDSDAGALFVLQSKGEWWHAGFHLTTAIVGPTILTLPYAFRGLGWWLGFFCLTTMGLVTFYAYYLMSKVLDHCEKSGRRHIRFRELAADVLGSGLMFYVVIFIQTAINTGIGIGAILLAGQCLDIMYSSLFPQGTLKLYEFIAMVTVVMMVLSQLPSFHSLRHINFASLLLSLGYTFLVVGACINLGLSKNAPKREYSLEHSDSGKVFSAFTSISIIAAIFGNGILPEIQATLAPPATGKMLKGLLLCYSVIFFTFYSAAISGYWVFGNNSSSNILKNLMPDEGPTLAPIVVIGLAVIFVLLQLFAIGLVYSQVAYEIMEKKSADTTKGIFSKRNLVPRLILRTLYMAFCGFMAAMLPFFGDINAVVGAFGFIPLDFVLPMLLYNMTYKPTRRSFTYWINMTIMVVFTCAGLMGAFSSIRKLVLDANKFKLFSSEVVD

SEQ ID NO: 715 - protein, 423 aa, Arabidopsis thaliana
MTDPPRPDPFPVTRLDSDAGALFVLQSKGWWLGFVCLTTMGLVTFYAYYLMSKVLDHCEKSGRRHIRFRELAADVLGSGLMFYVVIFIQTAINTGIGIGAILLAGQCLDIMYSSLFPQGTLKLYEFIAMVTVVMMVLSQLPSFHSLRHINCASLLLSLGYTFLVVGACINLGLSKNAPKREYSLEHSDSGKVFSAFTSISIIAAIFGNGILPEIQATLAPPATGKMLKGLLLCYSVIFFTFYSAAISGYWVFGNNSSSNILKNLMPDEGPTLAPIVVIGLAVIFVLLQLFAIGLVYSQVAYEIMEKKSADTTKGIFSKRNLVPRLILRTLYMAFCGFMAAMLPFFGDINAVVGAFGFIPLDFVLPMLLYNMTYKPTRRSFTYWINMTIMVVFTCAGLMGAFSSIRKLVLDANKFKLFSSEVVD

SEQ ID NO: 716 - protein, 422 aa, Arabidopsis thaliana
MGGEERSGDGEKRGEEVVDAGSLFVLKSKGWAAGISCLVGGAAVTFYSYTLLSLTLEHHASLGNRYLRFRDMAHHILSPKWGRYYVGPIQMAVCYGVVIANALLGGQCLKAMYLVVQPNGEMKLFEFVIIFGCLLLVLAQFPSFHSLRYINSLSLLLCLLYSASAAAASIYIGKEPNAPEKDYTIVGDPETRVFGIFNAMAIIATTYGNGIIPEIQATISAPVKGKMMKGLCMCYLVVIMTFFTVAITGYWAFGKKANGLIFTNFLNAETNHYFVPTWFIFLVNLFTVLQLSAVAVVYLQPINDILESVISDPTKKEFSIRNVIPRLVVRSLFVVMATIVAAMLPFFGDVNSLLGAFGFIPLDFVLPVVFFNFTFKPSKKSFIFWINTVIAVVFSCLGVIAMVAAVRQIIIDANTYKLFADV

SEQ ID NO: 717 - protein, 440 aa, Arabidopsis thaliana
MVSSSPVSPSKETDRKSGEKWTAEDPSRPAKWWYSTFHTVTAMIGAGVLSLPYAMAYLGWGPGTFVLAMTWGLTLNTMWQMVQLHECVPGTRFDRYIDLGRYAFGPKLGPWIVLPQQLIVQVGCNIVYMVTGGKCLKQFVEITCSTCTPVRQSYWILGFGGVHFILSQLPNFNSVAGVSLAAAVMSLCYSTIAWGGSIAHGRVPDVSYDYKATNPGDFTFRVFNALGQISFAFAGHAVALEIQATMPSTPERPSKVPMWQGVIGAYVVNAVCYFPVALICYWAFGQDVDDNVLMNLQRPAWLIAAANLMVVVHVIGSYQVFAMPVFDLLERMMVNKFGFKHGVVLRFFTRTIYVAFTLFIGVSFPFFGDLLGFFGGFGFAPTSFFLPSIMWLIIKKPRRFSVTWFVNWISIIVGVFIMLASTIGGLRNIIADSSTYSFYA

SEQ ID NO: 718 - protein, 446 aa, Arabidopsis thaliana
MVAQAPHDDHQDDEKLAAARQKEIEDWLPITSSRNAKWWYSAFHNVTAMVGAGVLGLPYAMSQLGWGPGIAVLVLSWVITLYTLWQMVEMHEMVPGKRFDRYHELGQHAFGEKLGLYIVVPQQLIVEIGVCIVYMVTGGKSLKKFHELVCDDCKPIKLTYFIMIFASVHFVLSHLPNFNSISGVSLAAAVMSLSYSTIAWASSASKGVQEDVQYGYKAKTTAGTVFNFFSGLGDVAFAYAGHNVVLEIQATIPSTPEKPSKGPMWRGVIVAYIVVALCYFPVALVGYYIFGNGVEDNILMSLKKPAWLIATANIFVVIHVIGSYQIYAMPVFDMMETLLVKKLNFRPTTTLRFFVRNFYVAATMFVGMTFPFFGGLLAFFGGFAFAPTTYFLPCVIWLAIYKPKKYSLSWWANWVCIVFGLFLMVLSPIGGLRTIVIQAKGYKFYS

SEQ ID NO: 719 - protein, 809 aa, Arabidopsis thaliana
MGEGKMEHRRKVLVTAGCLGSGYLLYKLYNSHTRRLADLERELAHERENDEIIKTQLSSVLIKTDPLDFSSYGFSNGPVLFVLLFRMKAHFESIQMIVDSTTLPHAMQFLSIRISEEIDVSHVMDRLNQGKGMLSPPEKLQLWDELKILSFTRMVLSLWSVTMLSLYIRVQVNILGRHLYVDTARALGSSHLLEEVDLIDRDDEQKFLSSADFLVTNAMPSLISDMQGSAEEVLKGKQLKDVITTRVLQETVMQIVDVFMSTGSPHHWVDYLMMPQDTKLSRTTSDSSDEAVSKFHQLMVETREVLISTEFTNIVEISLKCFTDVLVEEMETQTEAGGLATGKPLAKVLPQIEKTMNVITAEPSKNRFLQIIRDLPEIDELERQKEIDDWLPITSSRNAKWWYSTFHNVTAMVGAGVLGLPFFMAQLGWGPGIAVLILSWIITLYTLWQMVEMHEMVPGKRFDRYHELGQFAFGERLGLYIIVPQQIIVEVGVCIVYMVTGGQSLKKFHEIACQDCSPIRLSFFIMIFASSHFVLSHLPNFNSISGVSLVAAVMSLSYSTIAWTATAAKGVQEDVQYGYKSGTTASTVLSFFTGLGGIAFAYAGHNVVLEIQATIPSTPSNPSKGPMWRGVVVAYVVVALCYFPVALVGYGVFGNAVLDNVLMSLETPVWAIATANLFVVMHVIGSYQIFAMPVFDMVETFLVKKLNFKPSTVLRFIVRNVYVALTMFIGIMIPFFGGLLAFFGGFAFAPTSYFLPCIMWLLIYKPKRFSLSWWTNWVCIVLGVVLMILSSIGGLRQIIIQSKDYSFFS

SEQ ID NO: 720 - protein, 453 aa, Arabidopsis thaliana
MYIQMTDGVPPPPEQSSLDHRIDELERQKEIDDWLPITSSRNAKWWYSTFHNVTAMVGAGVLGLPFFMAQLGWGPGIAVLILSWIITLYTLWQMVEMHEMVPGKRFDRYHELGQFAFGERLGLYIIVPQQIIVEVGVCIVYMVTGGQSLKKFHEIACQDCSPIRLSFFIMIFASSHFVLSHLPNFNSISGVSLVAAVMSLSYSTIAWTATAAKGVQEDVQYGYKSGTTASTVLSFFTGLGGIAFAYAGHNVVLEIQATIPSTPSNPSKGPMWRGVVVAYVVVALCYFPVALVGYGVFGNAVLDNVLMSLETPVWAIATANLFVVMHVIGSYQIFAMPVFDMVETFLVKKLNFKPSTVLRFIVRNVYVALTMFIGIMIPFFGGLLAFFGGFAFAPTSYFLPCIMWLLIYKPKRFSLSWWTNWVCIVLGVVLMILSSIGGLRQIIIQSKDYSFFS

SEQ ID NO: 721 - protein, 441 aa, Arabidopsis thaliana
MEKSQSSPTKDASTKQKNVDDWLPITSSRNAKWWYSAFHNVTAMVGAGVLSLPYAMSNLGWGPGVTIMIMSWLITFYTLWQMVQMHEMVPGKRFDRYHELGQHAFGEKLGLWIVVPQQLIVEVGVDIVYMVTGGKSLKKIHDLLCTDCKNIRTTYWIMIFASIHFVLAHLPNFNSISIVSLAAAVMSLSYSTIAWATSVKKGVHPNVDYSSRASTTSGNVFNFLNALGDVAFAYAGHNVVLEIQATIPSTPEKPSKIAMWKGVVVAYIVVAICYFPVAFVCYYIFGNSVDDNILMTLEKPIWLIAIANAFVVVHVIGSYQIYAMPVFDMLETFLVKKMMFAPSFKLRFITRTLYVAFTMFVAICIPFFGGLLGFFGGFAFAPTTYYLPCIMWLCIKKPKKYGLSWCINWFCIVVGVILTILAPIGGLRTIIISAKNYEFFS

SEQ ID NO: 722 - protein, 441 aa, Arabidopsis thaliana
MGNSEMSASEVAAAKQKNVDDWLPITSSRNAKWWYSAFHNVTAMVGAGVLSLPYAMSNLGWGPGVTIMVMSWIITLYTLWQMVEMHEIVPGKRLDRYHELGQHAFGEKLGLWIVVPQQLIVEVGVDIVYMVTGGASLKKVHQLVCPDCKEIRTTFWIMIFASVHFVISHLPNFNSISIISLAAAVMSLTYSTIAWAASVHKGVHPDVDYSPRASTDVGKVFNFLNALGDVAFAYAGHNVVLEIQATIPSTPEMPSKVPMWRGVIVAYIVVAICYFPVAFLGYYIFGNSVDDNILITLEKPIWLIAMANMFVVIHVIGSYQIFAMPVFDMLETVLVKKMNFNPSFKLRFITRSLYVAFTMIVAICVPFFGGLLGFFGGFAFAPTTYYLPCIMWLVLKKPKRFGLSWTANWFCIIVGVLLTILAPIGGLRTIIINAKTYKFFS

SEQ ID NO: 723 - protein, 446 aa, Arabidopsis thaliana
MVAQAPHDDHQDDEKLAAARQKEIEDWLPITSSRNAKWWYSAFHNVTAMVGAGVLGLPYAMSQLGWGPGIAVLVLSWVITLYTLWQMVEMHEMVPGKRFDRYHELGQHAFGEKLGLYIVVPQQLIVEIGVCIVYMVTGGKSLKKFHELVCDDCKPIKLTYFIMIFASVHFVLSHLPNFNSISGSFSCCCRYVSQLLNNRMGIISKQRCSRRRSIRLQSENNSRYVFNFFSGLGDVAFAYAGHNVVLEIQATIPSTPEKPSKGPMWRGVIVAYIVVALCYFPVALVGYYIFGNGVEDNILMSLKKPAWLIATANIFVVIHVIGSYQIYAMPVFDMMETLLVKKLNFRPTTTLRFFVRNFYVAATMFVGMTFPFFGGLLAFFGGFAFAPTTYFLPCVIWLAIYKPKKYSLSWWANWVCIVFGLFLMVLSPIGGLRTIVIQAKGYKFYS

SEQ ID NO: 724 - protein, 450 aa, Arabidopsis thaliana
MPKYLDQNDEENKGRSTDNNNHRQMDYNDWLPVTASREAKWYYSAFHNVTAMVGAGVLGLPFAMSQLGWGPGLVAIIMSWAITFYSLWQMVQLHEAVPGKRLDRYPELGQEAFGPKLGYWIVMPQQLLVQIASDIVYNVTGGKSLKKFVELLFPNLEHIRQTYYILGFAALQLVLSQSPDFNSIKIVSLLAALMSFLYSMIASVASIAKGTEHRPSTYGVRGDTVASMVFDAFNGIGTIAFAFAGHSVVLEIQATIPSTPEVPSKKPMWKGVVVAYIIVIICYLFVAISGYWAFGAHVEDDVLISLERPAWLIAAANFMVFIHVIGSYQVFAMIVFDTIESYLVKTLKFTPSTTLRLVARSTYVALICLVAVCIPFFGGLLGFFGGLVFSSTSYFLPCIIWLIMKRPKRFSAHWWCSWVAIVTGISIAILAPIGGMRHIILSARTYKLFS

SEQ ID NO: 725 - protein, 455 aa, Arabidopsis thaliana
MAGIPDHIQDQHLVEEDQPFDLEDWLPITASRNANWYYSAFHNVTAIVGAGVLGLPYAMSELGWGPGVVVLILSWVITLYTLWQMIEMHEMFEGQRFDRYHELGQAAFGKKLGLYIIVPLQLLVEISVCIVYMVTGGKSLKNVHDLALGDGDKCTKLRIQHFILIFASSQFVLSLLKNFNSISGVSLVAAVMSVSYSTIAWVASLRKGATTGSVEYGYRKRTTSVPLAFLSALGEMAFAYAGHNVVLEIQATIPSTPENPSKRPMWKGAVVAYIIVAFCYFPVALVGFKTFGNSVEESILESLTKPTALVIVANMFVVIHLLGSYQVYAMPVFDMIESVMIRIWHFSPTRVLRFTIRWTFVAATMGIAVGLPYYSALLSFFGGFVFAPTTYFIPCIMWLILKKPKRFSLSWCMNWFCIIFGLVLMIIAPIGGLAKLIYNIQKGTLPNSRCNLPKH

SEQ ID NO: 726 - protein, 479 aa, Arabidopsis thaliana
MAGIPDHIQDQHLVEEVYAFYDFVTLKNFILKEFLLLYLQDQPFDLEDWLPITASRNANWYYSAFHNVTAIVGAGVLGLPYAMSELGWGPGVVVLILSWVITLYTLWQMIEMHEMFEGQRFDRYHELGQAAFGKKLGLYIIVPLQLLVEISVCIVYMVTGGKSLKNVHDLALGDGDKCTKLRIQHFILIFASSQFVLSLLKNFNSISGVSLVAAVMSVSYSTIAWVASLRKGATTGSVEYGYRKRTTSVPLAFLSALGEMAFAYAGHNVVLEIQATIPSTPENPSKRPMWKGAVVAYIIVAFCYFPVALVGFKTFGNSVEESILESLTKPTALVIVANMFVVIHLLGSYQVYAMPVFDMIESVMIRIWHFSPTRVLRFTIRWTFVAATMGIAVGLPYYSALLSFFGGFVFAPTTYFIPCIMWLILKKPKRFSLSWCMNWFCIIFGLVLMIIAPIGGLAKLIYNIQKGTLPNSRCNLPKH

SEQ ID NO: 727 - protein, 434 aa, Arabidopsis thaliana
MPKYLDQNDEENKGRSTDNNNHRQMDYNDWLPVTASREAKWYYSAFHNVTAMVGAGVLGLPFAMSQLGWGPGLVAIIMSWAITFYSLWQMVQLHEAVPGKRLDRYPELGQEAFGPKLGYWIVMPQQLLVQIASDIVYNVTGGKSLKKFVELLFPNLEHIRQTYYILGFAALQLVLSQSPDFNSIKIVSLLAALMSFLYSMIASVASIAKGTEHRPSTYGVRGDTVASMVFDAFNGIGTIAFAFAGHSVVLEIQATIPSTPEVPSKKPMWKGVVVAYIIVIICYLFVAISGYWAFGAHVEDDVLISLERPAWLIAAANFMVFIHVIGSYQVFAMIVFDTIESYLVKTLKFTPSTTLRLVARSTYVALICLVAVCIPFFGGLLGFFGGLVFSSTSYFLPCIIWLIMKRPKRFSAHWWCSWVSLSFLIKRGLVTQSN

SEQ ID NO: 728 - protein, 519 aa, Arabidopsis thaliana
MDERPETELISIPATPRVSTPEILTPSGQRSPRPATKPSSATWTPTSFISPRFLSPIGTPMKRVLVNMKGYLEEVGHLTKLNPQDAWLPITESRNGNAHYAAFHNLNAGVGFQALVLPVAFAFLGWSWGILSLTIAYCWQLYTLWILVQLHEAVPGKRYNRYVELAQAAFGERLGVWLALFPTVYLSAGTATALILIGGETMKLFFQIVCGPLCTSNPLTTVEWYLVFTSLCIVLSQLPNLNSIAGLSLIGAVTAITYSTMVWVLSVSQPRPATISYEPLSMPSTSGSLFAVLNALGIIAFAFRGHNLVLEIQSTMPSTFKHPAHVPMWRGAKISYFLIALCIFPISIGGFWAYGNLMPSGGMLAALYAFHIHDIPRGLLATAFLLVVFSCLSSFQIYSMPAFDSFEAGYTSRTNKPCSIWVRSGFRVFFGFVSFFIGVALPFLSSLAGLLGGLTLPVTFAYPCFMWVLIKKPAKYSFNWYFHWGLGWLGVAFSLAFSIGGIWSMVTNGLKLKFFKPPN

SEQ ID NO: 729 - protein, 519 aa, Arabidopsis thaliana
MDERPETELISIPATPRVSTPEILTPSGQRSPRPATKPSSATWTPTSFISPRFLSPIGTPMKRVLVNMKGYLEEVGHLTKLNPQDAWLPITESRNGNAHYAAFHNLNAGVGFQALVLPVAFAFLGWSWGILSLTIAYCWQLYTLWILVQLHEAVPGKRYNRYVELAQAAFGERLGVWLALFPTVYLSAGTATALILIGGETMKLFFQIVCGPLCTSNPLTTVEWYLVFTSLCIVLSQLPDLNSIAGLSLIGAVTAITYSTMVWVLSVSQPRPATISYEPLSMPSTSGSLFAVLNALGIIAFAFRGHNLVLEIQSTMPSTFKHPAHVPMWRGAKISYFLIALCIFPISIGGFWAYGNLMPSGGMLAALYAFHIHDIPRGLLATAFLLVVFSCLSSFQIYSMPAFDSFEAGYTSRTNKPCSIWVRSGFRVFFGFVSFFIGVALPFLSSLAGLLGGLTLPVTFAYPCFMWVLIKKPAKYSFNWYFHWGLGWLGVAFSLAFSIGGIWSMVTNGLKLKFFKPPN

SEQ ID NO: 730 - protein, 451 aa, Arabidopsis thaliana
MKGIPSSSNQILNQDLVEDQSFELEDWLPITASRNANWYYSAFHNVTAIVGAGVLGLPYAMSELGWGPGVVVLILSWVITLYTFWQMIEMHEMFEGKRFDRYHELGQAAFGKKLGLYIVVPLQLLVETSACIVYMVTGGESLKKIHQLSVGDYECRKLKVRHFILIFASSQFVLSLLKNFNSISGVSLVAAVMSMSYSTIAWVASLTKGVANNVEYGYKRRNNTSVPLAFLGALGEMAFAYAGHNVVLEIQATIPSTPENPSKRPMWKGAIVAYIIVAFCYFPVALVGFWTFGNNVEENILKTLRGPKGLIIVANIFVIIHLMGSYQVYAMPVFDMIESVMIKKWHFSPTRVLRFTIRWTFVAATMGIAVALPHFSALLSFFGGFIFAPTTYFIPCIIWLILKKPKRFSLSWCINWICIILGVLVMIIAPIGGLAKLMNALKQPDSSCKST

SEQ ID NO: 731 - protein, 418 aa, Arabidopsis thaliana
MKTLRDLQDQSFELEDWLPITASRNANWYYSAFHNVTAIVGAGVLGLPYAMSELGWGPGVVVLILSWVITLYTFWQMIEMHEMFEGKRFDRYHELGQAAFGKKLGLYIVVPLQLLVETSACIVYMVTGGESLKKIHQLSVGDYECRKLKVRHFILIFASSQFVLSLLKNFNSISGVSLVAAVMSMSYSTIAWVASLTKGVANNVEYGYKRRNNTSVPLAFLGALGEMAFAYAGHNVVLEIQATIPSTPENPSKRPMWKGAIVAYIIVAFCYFPVALVGFWTFGNNVEENILKTLRGPKGLIIVANIFVIIHLMGSYQVYAMPVFDMIESVMIKKWHFSPTRVLRFTIRWTFVAATMGIAVALPHFSALLSFFGGFIFAPTTYFIPCIIWLILKKPKRFSLSWCINWASGTPPFGLFVN

SEQ ID NO: 732 - protein, 493 aa, Arabidopsis thaliana
MGETAAANNHRHHHHHGHQVFDVASHDFVPPQPAFKCFDDDGRLKRTGTVWTASAHIITAVIGSGVLSLAWAIAQLGWIAGPAVMLLFSLVTLYSSTLLSDCYRTGDAVSGKRNYTYMDAVRSILGGFKFKICGLIQYLNLFVIAIGYTIAASISMMAIKRSNCFHKSGGKDPCHMSSNPYMIVFGVAEILLSQVPDFDQIWWISIVAAVMSFTYSAIGLALGIVQVAANGVFKGSLTGISIGTVTQTQKIWRTFQALGDIAFAYSYSVVLIEIQDTVRSPPAESKTMKKATKISIAVTTIFYMLCGSMGYAAFGDAAPGNLLTGFGFYNPFWLLDIANAAIVVHLVGAYQVFAQPIFAFIEKSVAERYPDNDFLSKEFEIRIPGFKSPYKVNVFRMVYRSGFVVTTTVISMLMPFFNDVVGILGALGFWPLTVYFPVEMYIKQRKVEKWSTRWVCLQMLTVACLVISVVAGVGSIAGVMLDLKVYKPFKSTY

SEQ ID NO: 733 - protein, 475 aa, Arabidopsis thaliana
MDAYNNPSAVESGDAAVKSVDDDGREKRTGTFWTASAHIITAVIGSGVLSLAWAIAQLGWVAGTTVLVAFAIITYYTSTLLADCYRSPDSITGTRNYNYMGVVRSYLGGKKVQLCGVAQYVNLVGVTIGYTITASISLVAIGKSNCYHDKGHKAKCSVSNYPYMAAFGIVQIILSQLPNFHKLSFLSIIAAVMSFSYASIGIGLAIATVASGKIGKTELTGTVIGVDVTASEKVWKLFQAIGDIAFSYAFTTILIEIQDTLRSSPPENKVMKRASLVGVSTTTVFYILCGCIGYAAFGNQAPGDFLTDFGFYEPYWLIDFANACIALHLIGAYQVYAQPFFQFVEENCNKKWPQSNFINKEYSSKVPLLGKCRVNLFRLVWRTCYVVLTTFVAMIFPFFNAILGLLGAFAFWPLTVYFPVAMHIAQAKVKKYSRRWLALNLLVLVCLIVSALAAVGSIIGLINSVKSYKPFKNLD

SEQ ID NO: 734 - protein, 493 aa, Arabidopsis thaliana
MGETAAANNHRHHHHHGHQVFDVASHDFVPPQPAFKCFDDDGRLKRTGTVWTASAHIITAVIGSGVLSLAWAIAQLGWIAGPAVMLLFSLVTLYSSTLLSDCYRTGDAVSGKRNYTYMDAVRSILGGFKFKICGLIQYLNLFGIAIGYTIAASISMMAIKRSNCFHKSGGKDPCHMSSNPYMIVFGVAEILLSQVPDFDQIWWISIVAAVMSFTYSAIGLALGIVQVAANGVFKGSLTGISIGTVTQTQKIWRTFQALGDIAFAYSYSVVLIEIQDTVRSPPAESKTMKKATKISIAVTTIFYMLCGSMGYAAFGDAAPGNLLTGFGFYNPFWLLDIANAAIVVHLVGAYQVFAQPIFAFIEKSVAERYPDNDFLSKEFEIRIPGFKSPYKVNVFRMVYRSGFVVTTTVISMLMPFFNDVVGILGALGFWPLTVYFPVEMYIKQRKVEKWSTRWVCLQMLSVACLVISVVAGVGSIAGVMLDLKVYKPFKSTY

SEQ ID NO: 735 - protein, 466 aa, Arabidopsis thaliana
MDVPRPAFKCFDDDGRLKRSGTVWTASAHIITAVIGSGVLSLAWAIGQLGWIAGPTVMLLFSFVTYYSSTLLSDCYRTGDPVSGKRNYTYMDAVRSILGGFRFKICGLIQYLNLFGITVGYTIAASISMMAIKRSNCFHESGGKNPCHMSSNPYMIMFGVTEILLSQIKDFDQIWWLSIVAAIMSFTYSAIGLALGIIQVAANGVVKGSLTGISIGAVTQTQKIWRTFQALGDIAFAYSYSVVLIEIQDTVRSPPAESKTMKIATRISIAVTTTFYMLCGCMGYAAFGDKAPGNLLTGFGFYNPFWLLDVANAAIVIHLVGAYQVFAQPIFAFIEKQLAARFPDSDLVTKEYEIRIPGFRSPYKVNVFRAVYRSGFVVLTTVISMLMPFFNDVVGILGALGFWPLTVYFPVEMYIRQRKVERWSMKWVCLQMLSCGCLMITLVAGVGSIAGVMLDLKVYKPFKTTY

SEQ ID NO: 736 - protein, 480 aa, Arabidopsis thaliana
MVVQNVQDLDVLPKHSSDSFDDDGRPKRTGTVWTASAHIITAVIGSGVLSLAWAVAQIGWIGGPVAMLLFSFVTFYTSTLLCSCYRSGDSVTGKRNYTYMDAIHSNLGGIKVKVCGVVQYVNLFGTAIGYTIASAISLVAIQRTSCQQMNGPNDPCHVNGNVYMIAFGIVQIIFSQIPDFDQLWWLSIVAAVMSFAYSAIGLGLGVSKVVENKEIKGSLTGVTVGTVTLSGTVTSSQKIWRTFQSLGNIAFAYSYSMILIEIQDTVKSPPAEVNTMRKATFVSVAVTTVFYMLCGCVGYAAFGDNAPGNLLAHGGFRNPYWLLDIANLAIVIHLVGAYQVYCQPLFAFVEKEASRRFPESEFVTKEIKIQLFPGKPFNLNLFRLVWRTFFVMTTTLISMLMPFFNDVVGLLGAIGFWPLTVYFPVEMYIAQKNVPRWGTKWVCLQVLSVTCLFVSVAAAAGSVIGIVSDLKVYKPFQSEF

SEQ ID NO: 737 - protein, 480 aa, Arabidopsis thaliana
MVVQNVQDLDVLPKHSSDSFDDDGRPKRTGTVWTASAHIITAVIGSGVLSLAWAVAQIGWIGGPVAMLLFSFVTFYTSTLLCSCYRSGDSVTGKRNYTYMDAIHSNLGGIKVKVCGVVQYVNLFGTAIGYTIASAISLVAIQRTSCQQMNGPNDPCHVNGNVYMIAFGIVQIIFSQIPDFDQLWWLSIVAAVMSFAYSAIGLGLGVSKVVENKEIKGSLTGVTVGTVTLSGTVTSSQKIWRTFQSLGNIAFAYSYSMILIEIQDTVKSPPAEVNTMRKATFVSVAVTTVFYMLCGCVGYAAFGDNAPGNLLAHGGFRNPYWLLDIANLAIVIHLVGAYQVYCQPLFAFVEKEASRRFPESEFVTKEIKIQLFPGKPFNLNLFRLVWRTFFVITTTLISMLMPFFNDVVGLLGAIGFWPLTVYFPVEMYIAQKNVPRWGTKWVCLQVLSVTCLFVSVAAAAGSVIGIVSDLKVYKPFQSEF

SEQ ID NO: 738 - protein, 485 aa, Arabidopsis thaliana
MKSFNTEGHNHSTAESGDAYTVSDPTKNVDEDGREKRTGTWLTASAHIITAVIGSGVLSLAWAIAQLGWIAGTSILLIFSFITYFTSTMLADCYRAPDPVTGKRNYTYMDVVRSYLGGRKVQLCGVAQYGNLIGVTVGYTITASISLVAVGKSNCFHDKGHTADCTISNYPYMAVFGIIQVILSQIPNFHKLSFLSIMAAVMSFTYATIGIGLAIATVAGGKVGKTSMTGTAVGVDVTAAQKIWRSFQAVGDIAFAYAYATVLIEIQDTLRSSPAENKAMKRASLVGVSTTTFFYILCGCIGYAAFGNNAPGDFLTDFGFFEPFWLIDFANACIAVHLIGAYQVFAQPIFQFVEKKCNRNYPDNKFITSEYSVNVPFLGKFNISLFRLVWRTAYVVITTVVAMIFPFFNAILGLIGAASFWPLTVYFPVEMHIAQTKIKKYSARWIALKTMCYVCLIVSLLAAAGSIAGLISSVKTYKPFRTMHE

SEQ ID NO: 739 - protein, 485 aa, Arabidopsis thaliana
MKSFNTEGHNHSTAESGDAYTVSDPTKNVDEDGREKRTGTWLTASAHIITAVIGSGVLSLAWAIAQLGWIAGTSILLIFSFITYFTSTMLADCYRAPDPVTGKRNYTYMDVVRSYLGGRKVQLCGVAQYGNLIGVTVGYTITASISLVAVGKSNCFHDKGHTADCTISNYPYMAVFGIIQVILSQIPNFHKLSFLSIMAAVMSFTYATIGIGLAIATVAGGKVGKTSMTGTAVGVDVTAAQKIWRSFQAVGYIAFAYAYATVLIEIQDTLRSSPAENKAMKRASLVGVSTTTFFYILCGCIGYAAFGNNAPGDFLTDFGFFEPFWLIDFANACIAVHLIGAYQVFAQPIFQFVEKKCNRNYPDNKFITSEYSVNVPFLGKFNISLFRLVWRTAYVVITTVVAMIFPFFNAILGLIGAASFWPLTVYFPVEMHIAQTKIKKYSARWIALKTMCYVCLIVSLLAAAGSIAGLISSVKTYKPFRTMHE

SEQ ID NO: 740 - protein, 466 aa, Arabidopsis thaliana
MDVPRPAFKCFDDDGRLKRSGTVWTASAHIITAVIGSGVLSLAWAIGQLGWIAGPTVMLLFSFVTYYSSTLLSDCYRTGDPVSGKRNYTYMDAVRSILGGFRFKICGLIQYLNLFGITVGYTIAASISMMAIKRSNCFHESGGKNPCHMSSNPYMIMFGVTEILLSQIKDFDQIWWLSIVAAIMSFTYSAIGLALGIIQVAANGVVKGSLTGISIGAVTQTQKIWRTFQALGDIAFAYSYSVVLIEIQDTVRSPPAESKTMKIATRISIAVTTTFYMLCGCMGYAAFGDKAPGNLLTGFGFYNPFWLLDVANAAIVIHLVGAYQVFAQPIFAFIEKQAAARFPDSDLVTKEYEIRIPGFRSPYKVNVFRAVYRSGFVVLTTVISMLMPFFNDVVGILGALGFWPLTVYFPVEMYIRQRKVERWSMKWVCLQMLSCGCLMITLVAGVGSIAGVMLDLKVYKPFKTTY

SEQ ID NO: 741 - protein, 476 aa, Arabidopsis thaliana
MVVQNVQDLDVLPKHSSDSFDDDGRPKRTGTVWTASAHIITAVIGSGVLSLAWAVAQIGWIGGPVAMLLFSFVTFYTSTLLCSCYRSGDSVTGKRNYTYMDAIHSNLGGIKVKVCGVVQYVNLFGTAIGYTIASAISLVTSCQQMNGPNDPCHVNGNVYMIAFGIVQIIFSQIPDFDQLWWLSIVAAVMSFAYSAIGLGLGVSKVVENKEIKGSLTGVTVGTVTLSGTVTSSQKIWRTFQSLGNIAFAYSYSMILIEIQDTVKSPPAEVNTMRKATFVSVAVTTVFYMLCGCVGYAAFGDNAPGNLLAHGGFRNPYWLLDIANLAIVIHLVGAYQVYCQPLFAFVEKEASRRFPESEFVTKEIKIQLFPGKPFNLNLFRLVWRTFFVMTTTLISMLMPFFNDVVGLLGAIGFWPLTVYFPVEMYIAQKNVPRWGTKWVCLQVLSVTCLFVSVAAAAGSVIGIVSDLKVYKPFQSEF

SEQ ID NO: 742 - protein, 466 aa, Arabidopsis thaliana
MDVPRPAFKCFDDDGRLKRSGTVWTASAHIITAVIGSGVLSLAWAIGQLGWIAGPTVMLLFSFVTYYSSTLLSDCYRTGDPVSGKRNYTYMDAVRSILGGFRFKICGLIQYLNLFGITVGYTIAASISMMAIKRSNCFHESGGKNPCHMSSNPYMIMFGVTEILLSQIKDFDQIWWLSIVAAIMSFTYSAIGLALGIIQVAANGVVKGSLTGISIGAVTQTQKIWRTFQALGDIAFAYSYSVVLIEIQDTVRSPPAESKTMKIATRISIAVTTTFYMLCGCMGYAAFGDKAPGNLLTGFGFYNPFWLLDVANAAIVIHLVGAYQVFAQPIFAFIEKQAAASFPDSDLVTKEYEIRIPGFRSPYKVNVFRAVYRSGFVVLTTVISMLMPFFNDVVGILGALGFWPLTVYFPVEMYIRQRKVERWSMKWVCLQMLSCGCLMITLVAGVGSIAGVMLDLKVYKPFKTTY

SEQ ID NO: 743 - protein, 476 aa, Arabidopsis thaliana
MVQNHQTVLAVDMPQTGGSKYLDDDGKNKRTGSVWTASAHIITAVIGSGVLSLAWATAQLGWLAGPVVMLLFSAVTYFTSSLLAACYRSGDPISGKRNYTYMDAVRSNLGGVKVTLCGIVQYLNIFGVAIGYTIASAISMMAIKRSNCFHKSGGKDPCHMNSNPYMIAFGLVQILFSQIPDFDQLWWLSILAAVMSFTYSSAGLALGIAQVVVNGKVKGSLTGISIGAVTETQKIWRTFQALGDIAFAYSYSIILIEIQDTVKSPPSEEKTMKKATLVSVSVTTMFYMLCGCMGYAAFGDLSPGNLLTGFGFYNPYWLLDIANAAIVIHLIGAYQVYCQPLFAFIEKQASIQFPDSEFIAKDIKIPIPGFKPLRLNVFRLIWRTVFVIITTVISMLLPFFNDVVGLLGALGFWPLTVYFPVEMYIAQKKIPRWSTRWVCLQVFSLGCLVVSIAAAAGSIAGVLLDLKSYKPFRSEY

SEQ ID NO: 744 - protein, 476 aa, Arabidopsis thaliana
MVQNHQTVLAVDMPQTGGSKYLDDDGKNKRTGSVWTASAHIITAVIGSGVLSLAWATAQLGWLAGPVVMLLFSVVTYFTSSLLAACYRSGDPISGKRNYTYMDAVRSNLGGVKVTLCGIVQYLNIFGVAIGYTIASAISMMAIKRSNCFHKSGGKDPCHMNSNPYMIAFGLVQILFSQIPDFDQLWWLSILAAVMSFTYSSAGLALGIAQVVVNGKVKGSLTGISIGAVTETQKIWRTFQALGDIAFAYSYSIILIEIQDTVKSPPSEEKTMKKATLVSVSVTTMFYMLCGCMGYAAFGDLSPGNLLTGFGFYNPYWLLDIANAAIVIHLIGAYQVYCQPLFAFIEKQASIQFPDSEFIAKDIKIPIPGFKPLRLNVFRLIWRTVFVIITTVISMLLPFFNDVVGLLGALGFWPLTVYFPVEMYIAQKKIPRWSTRWVCLQVFSLGCLVVSIAAAAGSIAGVLLDLKSYKPFRSEY

SEQ ID NO: 745 - protein, 154 aa, Cicer arietinum
VKGLTMCYAVILVTFYSAAVSGYWVFGNKSNSNILKSLLPDSGPTLAPTWVLGLAVIFVLLQLFAIGLVYSQVAYEVMEKKSADVKQGMFSKRNLIPRLILRTIYMIFCGFLAAMLPFFGDINGVVGAVGFIPLDFVLPNDSYTTKHTSLQNHP

SEQ ID NO: 746 - protein, 453 aa, Glycine max
  unsure (1)..(453): unsure at all Xaa locations
KESHAGGEERFCGGRGGGTHDADFRCXENLADAEIPDTAHQISTDSWFQVGFVLTTGINSAYVLGYSGTIMVPLGWAGGVVGLILATAISLYANALIARLHEYGGTRHIRYRDLAGFIYGRKAYSLTWALQYVNLFMINAGYIILAGSALKAAYVLFREDDGMKLPYFIAIAGFVCAMFAICIPHLSALGIWLGFSTVFSLVYIVIAFVLSIKDGIKSPPGDYSIPGTSTSKISTTIGASANLVFAYNTGMLPEIQATIRQPVVKNMMKALYFQFTVGVLPLYLVTFAGYWAYGSSTATYLMSDVNGPVWAKAMANIAAFLQSVIALHIFASPMYEYLDTKYGIKGSALAFKNLSFRVLVRGGYLTLNTFVSALLPFLGDFMSLTGAISTFPLTFILANHMYLVANENKLTSIQKLWHWINICFFAFMSAAATIAALRLIDLDSKTYHVFADI

SEQ ID NO: 747 - protein, 453 aa, Glycine max
  unsure (1)..(453): unsure at all Xaa locations
KESHAGGEERFCGGRGGGTHDADFRCXENLADAEIPDTAHQISTDSWFQVGFVLTTGINSAYVLGYSGTIMVPLGWAGGVVGLILATAISLYANALIARLHEYGGTRHIRYRDLAGFIYGRKAYSLTWALQYVNLFMINAGYIILAGSALKAAYVLFREDDGMKLPYCIAIAGFVCAMFAICIPHLSALGIWLGFSTVFSLVYIVIAFVLSINDGIKSPPGDYSIPGTSTSKIFTTIGASANLVFAYNTGMLPEIQATIRQPVVKNMMKALYFQFTVGVLPLYLVTFAGYWAYGSSTATYLMSDVNGPVWAKAMANIAAFLQSVIALHIFASPMYEYLDTKYGIKGSALAFKNLSFRVLVRGGYLTVNTFVSALLPFLGDFMSLTGAISTFPLTFILANHMYLVTNENKLTSTQKLWHWINICFFALMSAAAAIAALRLIDLDSKTYHVFADL

SEQ ID NO: 748 - protein, 443 aa, Glycine max
MGKGNMELETNKVYDYEDARGDVEVPDTAHQISTDSWFQVAFILTTGINSAFVLGYPGTVMVPLGWIGGVIGLILATMVSLYANALIAYLHELGGQRHIRYRDLAGFIYGKKAYNLTWVLQYINLFMINTGYIILAGSALKATYVLFRDDGLLKLPYCIAIGGFVCAMFAICIPHLSALGIWLGFSTVFSLAYIVISFVLSLKDGLQSPPRDYEIPGDGVSKIFTIIGASANLVFAFNTGMLPEIQATIRQPVVKNMMKALYFQFTVGVLPLYLVAFTGYWAYGSSTEVYLLNSVNGPVWVKASANITAFLQSVIALHIFASPMYEFLDTKYGIKGSALNAKNLSFRVVVRGGYLAFNTFVAAFLPFLGDFMSLTGAISTFPLTFILANHMYLKAKKDKLNSSQKLWHRFNIGFFAIMSLAATISAIRLISVDSKTYHVFADL

SEQ ID NO: 749 - protein, 461 aa, Glycine max
  unsure (1)..(461): unsure at all Xaa locations
KRLTLAVKNVSAAAAEEEEQVNMTLISNSDVESHADVQIPDTAHQISTDSWFQVGFVLTTGINSAYVLGYSGTIMVPLGWAGGVVGLILATAISLYANALIARLHEYGGTRHIRYRDLAGFIYGRKAYSLTWALQYVNLFMINAGYIILAGPALKATFVLIQXEDDGMKLPYFLGXIAGFGCAMFAICIPHLSALGIWLGFSTVFSLVYIVIAFVLSIKDGIKSPPRDYSIPGTSTSKISTTIGASANLVFAYNTGMLPEIQATIRQPVVKNMMKALYFQFTVGVLPLYLVTFAGYWAYGSSTATYLMSDVNGPVWAKAMANIAAFXLQSVIALHIFASPMYEYLXDTKYGIKGSALAFKNXSFRVXVRXGYLTLNTFVSALLPFLGDFMSLPGAISPFPLTFILANHMSLVANANKLTSIQKLWHWINICFFAFMSVAATIAALRLIDLDSKTYHVFADI

SEQ ID NO: 750 - protein, 275 aa, Glycine max
  unsure (1)..(275): unsure at all Xaa locations
KEERARASLSLXTSSXGQQEKGTQNDDYGLASAHAIDQDSWQQVGLMLVTSFNCGWILSFSNLVMWPLGWTWGIICLIVVGFYTAYANWLLAAFHFIDDRRFIRYRDLMGYVYGKSMYHLTWVFQFFTLLLGNMGFILLGGKALKAINSEFSXXSPLRLQYYIVITGAAYFLYSFFIPTISAMRNWLGASAVLTFTYIILLLIVLVKDGKSRSNRDYDLSGSEVSKVFNAFGAISAIIVANTSGLLPEIQVISLILFSLNKLIVLTQDXIKKKKK

SEQ ID NO: 751 - protein, 144 aa, Glycine max
  unsure (1)..(144): unsure at all Xaa locations
XGYVYXSMYHLTWVFQFLTLLLGNMGFILLGGKALKAINSEFSXXSPLRLQYYIVITGAAYFLYSFFIPTISAMRNWLGASAVLTFTYIILLLIXLVKDGKSRSNRDYDLSGNEVSKVFNAFGAISAIIVANTSGLLPEIQSTL

SEQ ID NO: 752 - protein, 456 aa, Glycine max
MGTLLPDEKSENPNALEQLQHQKDVDAGALFVLKSKGSWMHCGYHLTTSIVAPPLLSLPYAFTFLGWTAGILSLVIGALVTFYSYNLISRVLEHHAQMGMRQLRFRDMARDILGPGWGRYFVGPIQFAVCYGAVVACTLLGGQCMKAIYLLSNPNGTMKLYEFVIIFGCFMLILAQIPSFHSLRHINLVSLVLCLAYSAGATIGSIYIGDSSKGPEKDYSLKGDSVNRLFGIFNAIAIIATTYGNGIIPEIQATLAPPVKGKMLKGLCVCYLVLIVTFFSVSVSGYWAFGNESEGLILSNFVDNGKPLVPKWFIYMTNIFTITQLSAVGVVYLQPTNEVLEQTFGDPKSPEFSKRNVIPRVISRSLAIAISTTIAAMLPFFGDINSLIGAFGFIPLDFILPMVFYNLTFKPSKRSPVFWLNVIIVVAFSALGAIAAVAAVRQIVLDAKNYQLFANV

SEQ ID NO: 753 - protein, 445 aa, Glycine max
MAEPPKGDEEDGGAAFVLQSKGEWWHAGFHLTTAIVGPTILTLPYAFRGLGWGLGFMCLTVMGIVTFYSYFLMSKVLDHCEKSGRRHIRFRELAADVLGSGWMFYFVIFIQTAINTGVGVGAILLAGECLQIMYSNISPHGPLKLYHFIAMVTVIMIVLSQLPSFHSLRHINLCSLLFALGYTILVVGACIHAGTSENAPPRDYSLEPKKSARAFSAFTSMSILAAIFGNGILPEIQATLAPPATGKMVKGLFMCYSVIFVTFYSAAVSGYWVFGNKSNSNILKSLLPDSGPPLAPTWVLGLAIIFVLLQLFAIGLVYSQVAYEIMEKKSADVRQGMFSKRNLIPRIILRTIYMIFCGVLAAMLPFFGDINGVVGAIGFIPLDFILPMLLYNMEYKPPKSSFTYWINVSIMVIFTGAGMMGAFSSIRKLVLDANQFKLFSSDVVD

SEQ ID NO: 754 - protein, 451 aa, Glycine max
MGSLEVESTNGHTSSPHKKTEKSERERRIDEWLPITSKRNGKWWYSAFHNVTAMVGAGVLGLPYAMSELGWGPGVTILILSWIITLYTLWQMVEMHEMVPGKRFDRYHELGQYAFGEKLGLYIVVPQQLVVEIGVNIVYMVTGGTSLKKFHDTVCSNCKNIKLTFFIMIFASVHFVLSHLPDFNSITGVSLAAAVMSLSYSTIAWVASVHKGVQENVQYGYKAKSTSGTVFNFFNALGTVAFAYAGHNVVLEIQATIPSTPEKPSKVPMWRGVVVAYIVVAICYFPVALIGYWMFGNEVDSDILISLEKPTWLIAMANLFVVIHVIGSYQIYAMPVFDMIETVMVKKLNFEPSRMLRFVVRNVYVAFTMFIAITFPFFDGLLGFFGGFAFAPTTYFLPCIMWLAIHKPKRYSLSWFINWICIVLGLCLMILSPIGGLRTIIIKAKTYEFYS

SEQ ID NO: 755 - protein, 483 aa, Glycine max
  unsure (1)..(483): unsure at all Xaa locations
LLNTANNHRHKSAYTSQPWEPRLRRVEILLLQGEKRLLSQQQRLIKXTAEQKAIDDWLPITSSRNAKWWYSAFHNVTAMVGAGVLSLPSAMASLGWGPGVVILVLSWIITLYTLWQMVEMHEMVPGKRFDRYHELGQHAFGEKLGLWIVVPQQLICEVGVGLVYMVTGGKSLQKIHDLVCQHRKDCKNIKTTYFIMIFASVHFVLSHLPNFNAIFGSSLAAAIMSLSYSTIAWVASVDKRVHNHVDVAVEYGYKASTSAGNVFNFFNALGDVAFAYAGHNVVLEIQATIPSSPEKPSKGPMWRGVLIAYLVVALCYFPVALIGYWVFGNSVDDNILITLNKPTWLIVTANMFVVIHVIGSYQLYAMPVFDMIETVMVKQLRFKPTWQLRFVVRNVYVAFTMFVGITFPFFGALLGFFGGFAFAPTTYFLPCIIWLAIYKPKKFSLSWITNWICIIFGLLLMILSPIGGLRSIILNAKNYGFYQ

SEQ ID NO: 756 - protein, 440 aa, Glycine max
  unsure (1)..(440): unsure at all Xaa locations
IKMVSDSCPPLKEPXXSDKKWEEKGPPRNAKWWYSTFHAVTAMIGAGVLSLPYAMAYLGWVPGTLILLMSWCLTLNSMWQMIQLHECVPGTRFDRYIDLGRHAFGPKLGPWIVLPQQLIVQVGCDIVYMVTGGKCLKKFMEIACTNCTQIKQSYWILIFGGIHFFLSQLPNFNSVAGVSLAAAVMSLSYSTISWVACLARGRVENVSYAYKKTTSTDLMFRIFNALGQISFAFAGHAVALEIQATIPSTPEKPSKIPMWKGAIGAYVINAICYFPVALVGYWAFGRDVEDNVLMEFERPAWLIASANLMVFIHVVGSYQVYAMPVFDLIESMMVKRFKFPPGVALRLVARSAYVAFTLFVGVTFPFFGDLLGFFGGFGFAPTSYFLPSIMWLIIKKPKRFSTNWFINWISIYIGVCIMLASTIGGLRNIATDASTYKFYT

SEQ ID NO: 757 - protein, 375 aa, Glycine max
  unsure (1)..(375): unsure at all Xaa locations
XLELSWIITLYTLWQMVEMHEMVPGKRFDRYHELGQYAFGEKLGLYIVVPQQLVVEIGVNIVYMVTGGKSLQKFHDTVCDSCKKIKLTFFIMIFASVHFVLSHLPNFNSISGVSLAAAVMSLSYSTIAWAASAHKGVQENVEYGYKAKSTSGTVFNFFSALGDVAFAYAGHNVVLEIQATIPSTPEKPSKGPMWRGVVVAYIVVALCYFPVALIGYWMFGNTVEDNILISLEKPKWLIAMANMFVVIHVIGSYQIYAMPVFDMIETVMVKKLNFKPSMTLRFIVRNLYVAFTMFVAITFPFFGGLLGFFGGFAFAPTTYFLPCVMWLAIYKPRRFSMSWWANWICIVFGLLLMILSPIGGLRSIIISAKDYKFYS

SEQ ID NO: 758 - protein, 372 aa, Glycine max
  unsure (1)..(372): unsure at all Xaa locations
LSWIITLYTLWQMVEMHEMVPGKRFDRYHELGQYAFGEKLGLYIVVPQQLVVKIGVHSLYVFTGENSVKKLHDTVCQSCKNIKLTFFIMIFACVHFVLSHXRHXLQVLRISSFLTDMSYSYSTIAWAASAHKGVQENVEYGYKAKSTSGTVFNFFSALGDVAFAYAGHNVVLEIQATIPSTPEKPSKGPMWRGVVVAYIVVALCYFPVALIGYWMFGNTVEDNILISLEKPKWLIAMANMFVVIHVIGSYQIYAMPVFDMIETVMVKKLNFKPSMTLRFIVRNLYVAFTMFVAITFPFFGGLLGFFGGFAFAPTTYFLPCVMWLAIYKPRRFSMSWWANWICIVFGLLLMILSPIGGLRSIIISAKDYKFYS

SEQ ID NO: 759 - protein, 439 aa, Glycine max
MGHSEENSDVAARQKAIDDWLPVTGSRNAKWWSSAFHNLTAMVGAGVLSLPFAMSNMGWGPGATVLILSWVITLYTLWQMVEMHEMVPGKRFDRYHELGQHAFGDKLGLWIVVPQQVVVEVGTCIVYMVTGGKSLKKVHDTLCPDCKDIKTSYWIVIFASVNIVLAQCPNLNSISAISFVAAAMSLIYSTIAWGASINKGIEANVDYGSRATSSADAVFNFFSALGDVAFAYAGHNVVLEIQATMPSSEDTPSKKPMWRGVILAYIGVAFCYLPVAFIGYYMFGNSVDDNILITLERPAWLIAAANLFVFVHVVGGYQVFAMPVFDMIETYMVTKLNFPPSTALRVTTRTIYVALTMLIGICIPFFGSLLGFLGGFAFAPTSYFLPCIIWLKLKKPKKFGLSWTINWICIILGVMLMIVSPIGALRNIILSAKNYEFFS

SEQ ID NO: 760 - protein, 505 aa, Glycine max
  unsure (1)..(505): unsure at all Xaa locations
GSRXVSSFIIFSFFLSFGTLERKHHQQEQHPKDAWLPITESRNGNAYYAAFHILNSNIGFQALMLPVAFATLGWAWGTVCLSLAFVWQLYAIFLLVQLHESVPGIRHSRYLFLAMAAFGKKLGKVAALFPVMYLSGGTCVMIIITGGGTLKQLLKTLCDKTCNAHALSGAEWFLVFTCVAILIAQLPNLNSMAMVSLVGAVTSVTYCTLFWVLSVKNGRPNNVSYSSSLQSQEHTPVAKINGVLNAIGIIVLAFRGHNVLPEIQGTLPSNFEQTSKRPMRRGVSISYVLISMCMFPLAIAGFWAYGNQINDGGLLTSFPQFHKRQITKFSMGAIYVLVIIHCLTSFQIYAMPVFDNLEIRYTSIKNQRCPRLVRTCIRLFFGGLTFFISVTFPFLPRLSALLGSMTLVPITYAYPCFMWLSLKKPRPRGFVWCFNVALGCVGMLLSALLVAAAIRTLALNGLDANFFKPXQLILCHPTATSILPTIYFNLLLVIYRKSFLNMILQ

SEQ ID NO: 761 - protein, 77 aa, Glycine max
FMGDFVNFLGSFSLVPLTFMFPSMVFIKVKGRTARIEKKAWHWFNIVFSFLLTIATTISAIRLIVNNIQKYHFFADA

SEQ ID NO: 762 - protein, 114 aa, Glycine max
  unsure (1)..(114): unsure at all Xaa locations
MELETNKVYDYXXDARGDVEVPDTAHQISTDSWFQVAFILTTGINSAFVLGYPGTVMVPLGWIGGVIGLILATMVSLYANALIAYLHELGGQRHIRYRDLAGFIYGYLCSIQGX

SEQ ID NO: 763 - protein, 117 aa, Glycine max
  unsure (1)..(117): unsure at all Xaa locations
LAPTSLSLXTSIKGXQQQAAQNDDDGLDSAHAIDQDSWQQERLALVTSXNRGSILSCSKMVMWPLGWTWSIICLIVVGLYTAYADRLSSACDFIHDRRFIRYTDLMGYVYSKSMYHL

SEQ ID NO: 764 - protein, 166 aa, Glycine max
  unsure (1)..(166): unsure at all Xaa locations
INGTKFLATKNVGNCFPPPTLVHDXNSVKACPREFQTCSQFFXXIKKTVFFVCADSWFQVAFILTTGINSAFVLGYPGTVMVPLGWFGGVIGLILATAVSLYANALVAYLHELGGQRHIRYRDLAGFIYGKPHYXLLPSSLHFVRSFPFSLCSVFILISGKKAYNX

SEQ ID NO: 765 - protein, 119 aa, Glycine max
  unsure (1)..(119): unsure at all Xaa locations
XEFLDTKYGIKGSAMNVKNMSFRMVVRGGYLAFNTFVAAFLPFLGDFMSLTGAISTFPLTFILANHMYLKAKKDKLNSSQKLWHWLNIGFFSIMSLAATISAIRLIAIDSKTFHVFADL

SEQ ID NO: 766 - protein, 515 aa, Glycine max
GEKMGEAKEIWSAPITPRTASVVGTPVVASPPVSCPPSQLHSPSLTRSPLLHPEDGDAPRLTPLGSPVRKALRFTKLDPQDAWLPITESRNGNKYYAAFHTLCSGIGIQALVLPVAFTFLGWTWGIISMTLAFIWQLYTLWLLVNLHESVEQGVRYCRYLQLCGATFGEKLGKILALFPILYLSAGTCTTLIIIGGSTARTFYQVVCGETCTAKPMTTVEWYLVFTCVAVVLSQLPNLNSIAGVSLIGAVTAVGYCTAIWVTSVARGALKDVSYNPVRTGSSIENAFGVLNALGIIAFAFRGHNLILEIQSTMPSSEKHPSHVPMWKGVKVSYTIIAACLFPMAIGGYWAYGQLIPANGVLTALYQYHSRDVSRFVLGLTSFFVVVNGLCSFQIYGMPAFDDMESGYTARMKKPCPWWLRAFIRVFFGFLCFFIGVAVPFLSQLAGLIGGVALPVTFAYPCFMWLKTKKPKKLSLMWWLNWFLGTLGVALSAILVAASLYVIVDTGVNVSFFNPQ

SEQ ID NO: 767 - protein, 515 aa, Glycine max
GEKMGEAKEIWSAPITPRTASVVGTPVVASPPVSCPPSQLHSPSLTRSPLLHPEDGDAPRLTPLGSPMRKALRFTKLDPQDAWLPITESRNGNKYYAAFHTLCSGIGIQALVLPVAFTILGWTWGIITMTLAFIWQLYTLWLLVNLHESVEQGVRYCRYLQLCGATFGEKLGKILALFPILYLSAGTCTTLIIIGGSTARTFYQVVCGETCTAKPMTTVEWYLVFTCVAVVLSQLPNLNSIAGVSLIGAVTAVGYCTAIWVTSVARGALPDVSYNPVRTGNSVEDAFSVLNALGIIAFAFRGHNLILEIQSTMPSSEKHPSHVPMWKGVKVSYTIIAACLFPMAIGGYWAYGQLIPANGVLTALYQFHSRDVSRFVLGLTSFFVVVNGLCSFQIYGMPAFDDMESGYTTRMKKPCPWWLRAFIRVFFGFLCFFIGVAVPFLSQMAGLIGGVALPVTFAYPCFMWLKTKKPKKYSAMWWLNWFLGTLGVALSAILVAASLYVIIDTGVNVSFFNPQ

SEQ ID NO: 768 - protein, 174 aa, Glycine max
  unsure (1)..(174): unsure at all Xaa locations
TTEFISFWFLGSRWLQGLCLVGAGSHRDAALRRRRQPSCDTSNNGXKGTWDSRTTKSMNSRMPRGDRXIPKSRSXKISTDSWVSSGLLSLTTXGINSAFXVLGYPGTVMVPLGWIGGVIGLILATMVSLYANALIAYLHELGGQRHIRYRDLAGFIYGRTHKLLSSSLHFAMLX

SEQ ID NO: 769 - protein, 179 aa, Glycine max
  unsure (1)..(179): unsure at all Xaa locations
XFSVAISGYWAFGNESGASILANFIGETKPLLPKWFFLMTNIFILLQVMALTAVYLQPTNEMFEATFGDPKMGQFSMRNVVPRVVLRSLSVAAATVLAAMLPFFPDIMALFGAFGCIPLDFILPMVFYNMTFKPSKNTIMFWVNNVIAAASSILVVIGGIASIRQIVIDAKTYNLFADM

SEQ ID NO: 770 - protein, 520 aa, Glycine max
  unsure (1)..(520): unsure at all Xaa locations
MEERPEAELISIPATPRVSTPEILTPGQRSPRAASKEGKSWTPTSFISPRFLSPIGTPMKRVLVNMKGYLEEVGHLTKLNPQDAWLPITESRNGNAHYAAFHNLNAGVGFQALFLPVAFAYLGWSWGILSLTIAYCWQLYTLWILVQLHEAVPGKRYNRYVELAQAAFGERLGVWLALFPTVYLSAGTATALILIGGETMKLFFQIVCGPTCTSNPLTTVEWYLVFTSLSIVLSQLPNLNSIAGLSLIGAVTAITYSTMVWVLSVSQQRPPSISYEPLSLSQPSASVFLAMNALGIIAFSFRGHNLALEIQSTMPSTFKHPARVPMWKGAKVAYFFIAMCLFPIAIGGFWAYGNQMPPGGILTALYAFHSHDISRGILALAFLLVVFNCLSSFQIYSMPAFDSFEAGYTSRTNRPCSIWVRSGFRVFYGFVSFFIGVALPFLSSLAGLLGGLTLPVTFAYPCFMWVLIKQPPKYSFNWYFNWILGWLGVGFSLAFSIGGIWSIVNDGLKFKFFKPNXNFQ

SEQ ID NO: 771 - protein, 531 aa, Glycine max
  unsure (1)..(531): unsure at all Xaa locations
MEERPETELISIPATPRVSTPEILTPGQRSPRAASKEGKSWTPTSFISPRFLSPIGTPMKRVLVNMKGYLEEVGHLTKLNPQDAWLPITESRNGNAHYAAFHNLNAGVGFQALVLPVAFAYLGWSWGILSLTIAYCWQLYTLWILVQLHEAVPGKRYNRYVELAQAAFGERLGVWLALFPTVYLSAGTATALILIGGETMKLFFQIVCGPTCTSNPLTTVEWYLVFTSLSIVLSQLPNLNSIAGLSLIGAVTAITYSTMVWVLSVSQQRPPSISYEPLSLAQPSASVFLAMNALGIIAFSFRGHNLALEIQSTMPSTFKHPARVPMWKGAKVAYFFIAMCLFPIAIGGFWAYGNQMPPGGILTALYAFHSHDISRGILALAFLLVVFNCLSSFQIYSMPAFDSFEAGYTSRTNRPCSIWVRSGFRVFYGFVSFFIGVALPFLSSLAGLLGGLTLPVTFAYPCFMWVLIKQPPKYSFNWYFNWILGWLGVAFSLAFSIGGIWSIVNDGLKLKFFKPNXIFNNRPCKCTCTIW

SEQ ID NO: 772 - protein, 518 aa, Glycine max
  unsure (1)..(518): unsure at all Xaa locations
VEPSQTNHTKYKQRVTTHISFSFPFFLGTAHALSNRNXEMNSDQFQKNSMFVETPEDGGKNFDDDGRVRRTGTWITASAHIITAVIGSGVLSLAWAIAQMGWVAGPAVLFAFSFITYFTSTLLADCYRSPDPVHGKRNYTYSDVVRSVLGGRKFQLCGLAQYINLVGVTIGYTITASISMVAVKRSNCFHKHGHHVKCYTSNNPFMILFACIQIVLSQIPNFHKLWWLSIVAAVMSFAYSSIGLGLSVAKVAGGGEPVRTTLTGVQVGVDVTGSEKVWRTFQAIGDIAFAYAYSNVLIEIQDTLKSSPPENKVMKRASLIGILTTTLFYVLCGCLGYAAFGNDAPGNFLTGFGFYEPFWLIDFANICIAVHLVGAYQVFCQPIFGFVENWGKERWPNSQFVNGEHALNFPLCGTFPVNFFRVVWRTTYVIITALIAMMFPFFNDFLGLIGSLSFWPLTVYFPIEMYIKQSKMQRFSFTWTWLKILSWACLIVSIISAAGSIQGLAQDLKKYQPFKAQQ

SEQ ID NO: 773 - protein, 486 aa, Glycine max
MVEKSSRTNLGHHQDFGMEAYSIDGVSSQSESKFYDDDGHVKRTGNVWTTSSHIITAVVGSGVLSLAWAMAQMGWVAGPVVMIFFSAVTLYTTSLLADCYRCGDPVTGKRNYTFMDAVQSILGGYYDTFCGVVQYSNLYGTAVGYTIAASISMMAIKRSNCFHSSGVKNPCHVSSNPYMIGFGIIQILFSQIPDFHKTWWLSIVAAIMSFAYSTIGLALGIAKVAETGTFKGSLTGVRIGTVTEATKVWGVFQGLGDIAFAYSYSQILIEIQDTIKSPPSEAKTMKKSAKISIGVTTTFYMLCGFMGYAAFGDSAPGNLLTGFGFFNPYWLIDIANAAIVIHLVGAYQVYAQPLFAFVEKWASKRWPEVDTEYKVPIPGFSPYNLSPFRLVWRTVFVIITTIVAMLIPFFNDVLGLLGALGFWPLSVFLPVQMSIKQKRTPRWSSRWIGMQILSVVCLIVSVAAAVGSVASIVLDLQKYKPFHVDY

SEQ ID NO: 774 - protein, 259 aa, Glycine max
  unsure (1)..(259): unsure at all Xaa locations
XLEIVLAFRGHNVLPEIQGTLPSNFEQTSKRPMRRGVSISYVLISMCMFPLAIAGFWAYGNQINDGGLLTSFPQFHKRQITKFSMGAIYVLVIIHCLTSFQIYAMPVFDNLEIRYTSIKNQRCPRLVRTCIRLFFGGLTFFISVTFPFLPRLSALLGSMTLVPITYAYPCFMWLSLKKPRPRGFVWCFNVALGCVGMLLSALLVAAAIRTLALNGLDANFFKPXQLILCHPTATSILPTIYFNLLLVIYRKSFLNMILQ

SEQ ID NO: 775 - protein, 486 aa, Glycine max
MVEKSSRTNLGHHQDFGMEAYSIDGVSSQSESKFYDDDGHVKRTGNVWTTSSHIITAVVGSGVLSLAWAMAQMGWVAGPVVMIFFSAVTLYTTSLLADCYRCGDPVTGKRNYTFMDAVQSILGGYYDAFCGVVQYSNLYGTAVGYTIAASISMMAIKRSNCFHSSGGKSPCQVSSNPYMIGFGIIQILFSQIPDFHETWWLSIVAAIMSFVYSTIGLALGIAKVAETGTFKGSLTGVRIGTVTEATKVWGVFQGLGDIAFAYSYSQILIEIQDTIKSPPSEAKTMKKSAKISIGVTTTFYMLCGFMGYAAFGDSAPGNLLTGFGFFNPYWLIDIANAAIVIHLVGAYQVYAQPLFAFVEKWASKRWPEVETEYKIPIPGFSPYNLSPFRLVWRTVFVIITTFVAMLIPFFNDVLGLLGALGFWPLSVFLPVQMSIKQKRTPRWSGRWIGMQILSVVCFIVSVAAAVGSVASIVLDLQKYKPFHVDY

SEQ ID NO: 776 - protein, 462 aa, Glycine max
  unsure (1)..(462): unsure at all Xaa locations
MDGKKSLQITRSGTGAYDDDGHAKRTGNLQSAVAHIITAVIGSGVLSLAWSTSQLGWIGGPVALLCCAIVTYISSFLLSDCYRTPDPVTGKRNYSYMDAVRVYLGYKRTCVAGFLQFLTLYGTSIAYVLTTATSLSAILRSNCYHKKGHEAPCKYGGXXLYMALFGLVQIVMSFIPDLHNMAWVSVVAALMSFTYSFIGLGLGIATVIKNGRIMGSLTGIPTDKIADKFWLVFQALGDIAFAYPYSILLLEIQDTLESPPPENQTMKKASMVAIFITTFFYLCCGCFGYAAFGNDTPGNLLTGFGFFEPFWLIDLANACIILHLVGGYQIYSQPIYSTVDRWASRKFPNSGFVNNFYKVKLPLLPGFQLNLFRFCFRTTYVISTTGLAIFFPYFNQILGVLGAINFWPLAIYFPVEMYFVQNKIAAWSSKWIVLRTFSFACFLVTGMGLVGSLEGIVSAKLK

SEQ ID NO: 777 - protein, 491 aa, Glycine max
AHHTPTQIIETEMNPDQFQKNSMFVETPEDGGKNFDDDGRVKRTGTWITASAHIITAVIGSGVLSLAWAIAQMGWVAGPAVLFAFSFITYFTSTLLADCYRSPDPVHGKRNYTYSDVVRSVLGGRKFQLCGLAQYINLVGVTIGYTITASISMVAVKRSNCFHKHGHHDKCYTSNNPFMILFACIQIVLSQIPNFHKLWWLSIVAAVMSFAYSSIGLGLSVAKVAGGGEPVRTTLTGVQVGVDVTGSEKVWRTFQAIGDIAFAYAYSNVLIEIQDTLKSSPPENKVMKRASLIGILTTTLFYVLCGCLGYAAFGNDAPGNFLTGFGFYEPFWLIDFANICIAVHLVGAYQVFCQPIFGFVENWGKERWPNSHFVNGEHALKFSLFGTFPVNFFRVVWRTTYVIITALIAMMFPFFNDFLGLIGSLSFWPLTVYFPIEMYIKQSKMQKFSFTWTWLKILSWACLIVSIISAAGSIQGLAQDLKKYQPFKAQQ

SEQ ID NO: 778 - protein, 489 aa, Glycine max
  unsure (1)..(489): unsure at all Xaa locations
THLHSHIEAERGHWLVSEMGSMHIEXXPETFADGSKNFDDDGRAKRTGTWITASAHIITAVIGSGVLSLAWAIAQMGWVAGPAVLFVFSLITYFTSTLLADCYRSPDPVHGKRNYTYSEVVKANLGGRKFQLCGLAQYINLVGVTIGYTITASLSMGAVKKSNCLHKHGHQDECKVKDNAFMIAFACIQILLSQIPNFHKLSWLSIVAAVMSFAYSSIGLGLSIAKIIGGGHVRTTLTGVEVSGTEKVWKMFQAIGDIAFAYAFSNVLIEIQDTLKSSPPENKVMKRASLIGIMTTTLFYVLCGCLGYAAFGNDAPSNFLTGFGFYEPFWLIDFANVCIAVHLVGAYQVFVQPIFGFVEKWSKENWTESQFINGEHTLNIPLCGSYNVNFFRVVWRTAYVIITAVVAMLLPFFNDFLALIGALSFWPLTVYFPIEMYIKKSNMQRFSFTWTWLKILSWVCLIISIISLVGSIQGLSVSIKKYKPFQAEQ

SEQ ID NO: 779 - protein, 462 aa, Glycine max
  unsure (1)..(462): unsure at all Xaa locations
MDGKNSLQITRSGIGAYDDDGHAKRTGNLQSAVAHIITAVIGSGVLSLAWSTSQLGWIGGPFSLLCCAIVTYISSFLLSDCYRTPDPVTGKRNYSYMDAVRVYLGYKRTCVAGFLQFLTLYGTSIAYVLTTATSLSAILRSNCYHKKGHEAPCKYGGXXLYMALFGLVQIVMSFIPDLHNMAWVSVVAALMSFTYSFIGLGLGIATVIKNGRIMGSLTGIPTDKIADKFWLVFQALGDIAFAYPYSILLLEIQDTLESPPPENQTMKKASMVAIFITTFFYLCCGCFGYAAFGNDTPGNLLTGFGFFEPFWLIDLANACIILHLVGGYQIYSQPIYSTVDRWASRKFPNSGFVNNFYRVKLPLLPGFQLNLFRFCFRTTYVISTIGLAIFFPYFNQILGVLGAINFWPLAIYFPVEMYFVQQKIAAWSSKWIVLRTFSFACFLVTVMGLVGSLEGIVSAKLK

SEQ ID NO: 780 - protein, 484 aa, Glycine max
MVENGVGSKYLQQTLNVSIDMHQHGISKCFDDDGRPKRTGTVWTSSAHIITAVIGSGVLSLAWAIAQLGWIAGPIVMVIFSAITYYTSTLLADCYRTGDPVTGKRNYTYMDAIQSNFGGIKVKLCGLVQYVNLFGVAIGYTIAASTSMMAIERSNCFHKSGGKDPCHINSNMYMISFGIVEILFSQIPGFDQLWWLSIVAAVMSFTYSTIGLGLGIGKVIENGGVGGSLTGITIGTVTQTDKVWRTMQALGDIAFAYSYSLILIEIQDTVKSPPSESKTMKKASFISVAVTSIFYMLCGCFGYAAFGDASPGNLLTGFGFYNPYWLLDIANAAIVIHLVGSYQVYCQPLFAFVEKHAAQMFPDSDFLNKEIEIPIPGFHPYRLNLFRLVWRTIYVMLSTVISMLLPFFNDIGGLLGAFGFWPLTVYFPVEMYIIQKRIPKWSTKWICLQILSMTCLLMTIGAAAGSIAGIAIDLRTYKPFKTNY

SEQ ID NO: 781 - protein, 447 aa, Oryza sativa (japonica cultivar-group)
MAASSLDAEAAAAGQQDKAGSGSYTTAATAHQIDTDSWQQVGVLLVVGFNCAYVLSFSNLMMAPLGWGWGIACLLFIGAASWYANWLLAGLHVIDGQRFIRYRDLMGFVFGRKMYYITWFLQFITLILGNMGFILLGGRALKAIHAEFSSSHSPARLQWFIAATGFVYFAFAYFVPTISAMRNWLATSAALTVAYDVALIVILIKDGKSNKQKDYNVHGTQAEKVFGAFGAIAAILVCNTSGLLPEIQSTLRKPVVSNMRRALLLQYTAGAAVYYGISVAGYWAYGAAVSEYLPDQLSGPSWATVLINATAFLQSIVSQHLFTVPIHEALDTQMQRLDEGMFSRYNLGRRLLARGLVFGANAFVTALFPFMGDFVNLFGSFVLFPLTFMFPSMVVLKIKGKDEAGRWNRIWHWGIIVASSVLSVVTTAAAVRLIVHNASVYHFFADM

SEQ ID NO: 782 - protein, 457 aa, Oryza sativa (japonica cultivar-group)
MGAPSREDEEAKKMEAGGDTVGQKLDAGALFVLQSKGSWLHCGYHLTTSIVAPPLLSLPFAFASLGWAAGLICLVIGAAVTFYSYNLISLVLEHHAQQGRRQLRFRDMATDILGPGWGRFYIGPIQFLVCFGAVVACTLLAGQSMKAIYLIANPGGTIKLYVFVAIFGVFMMILAQMPSFHSLRHVNLISLVLCLAYSFCAVAACIYLGSSKGAPEKDYSIAGANTRDRVFGVFNAIAVIATTYGNGIIPEIQATVAAPVTGKMFKGLCLCYAVVVTTFFSVAISGYWAFGNQSQGTLLSNFMVGGRAVIPEWLLLIIELFTLLQLSAVAVVYLQPTNEVLEGLLSDPKAGQYAARNVAPRVLSRTAAVALGTTIAAMVPFFGDMNALIGAFGFLPLDFAVPAVFYNVTFKPSKKGAVFWLNTTIAVVFSALAVVASVAAVRQIILDANSYKLFANV

SEQ ID NO: 783 - protein, 516 aa, Oryza sativa (japonica cultivar-group)
MAHAAFDAEAGAAAKPPAADAGAAFVLESKGRSHPSTPRPPSARNARADSAVICGWVPSRGDLAGTWWHAGFHLTTAIVGPTVLTLPYALRGMGWALGLTVLTAVGAVTFYEYSLMSRVLEHCEARGRRHIRFRELAADVLGITINSPDPFLSTAPHHHTHMTFPCIAPWSGWMFYFVVIVQTAINTGVSIGTILLAADCLEIMYTSLSPNGPLKLYHFIIIVAVALAFLSQLPSFHSLRHINFASLLLSLGYTILVSAACIGAGLSKDAPGKDYTLSSSKSEQTFNAFLSISILASVYGNGILPEIQATLAPPAAGKMMKALVLCYSVIAFAFYIPSITGYWAFGSHVQSNVLKSLMPDTGPALAPTWLLGLAVLFVLLQLLAIGLVYSQVAYEIMEKSSADATRGKFSRRNVVPRLLLRTLYLAFCAFMAAMLPFFGDIVGVVGAVGFIPLDFVLPVVMYNIALAPPRRSPMFLANTAIMVVFSGVGAIGAFASIRKLVLDAGQFKLFSNNVVD

SEQ ID NO: 784 - protein, 478 aa, Oryza sativa (japonica cultivar-group)
MGEGRSGVGQAETSASSGDTSMAQGPVERQRRGSGAALGMTTAVVDDAGEGEANPRRAKWWYATFHSVTAMVGAGVLSLPYAMAHLGWGPGTAALVVSWGMTLYTLRLLIELHECVPGVRFDRYRDLGAHALGPRLGPWLVVPQQLIVQLGCDVVYMVIGGKCLMKFAESVSSWSRAPQLHHQSYWICIFGASQFLLSQLPSLDSITAVSLAAAAMSVGYSTISWAACLARGTPAAAEGGGGGVSYAYKDGTAADSVFRVCSALGQVAFAYAGHGVVLEIQATIPSTPTKPSRGAMWKGAVAAYLVTALCYFPVAIAGYWAFGRDVSDNVLVALRRPPWLVAAANMMVVVHVLGSYQVYAMPIFETLETILITRIRLPPGALLRLVARSAYVAFTLFVAVTFPFFGDLLGFFGGFGFTPTSYFLPCILWLKIKKPPRFSASWFANWGCIVVGVLLMIASTIGGLRSIIQDASTFQFYS

SEQ ID NO: 785 - protein, 424 aa, Oryza sativa (japonica cultivar-group)
MADQKVILAEPLLPGKEADFADDDDVEAQLTSYHTGASFSRTCLNLTNAVSGIGVLSMPYAVSQGGWLSLLLFVLVGAVCYYTGTLIERCMRADGSIASYPDIGQYAFGATGRRAVAFFMYVELYLVAISFLVLEGDNLDKLFPGATMEILGYQLHGKQLFIVLAAAVILPTTWLKNLGMLAYVSAAGLIASVALTASLIWAGVAETGFHRNSNTLNLAGIPTSLGLYFVCFTGHAVFPTIYSSMKNSKHFSKVLLISSVLCSLNYGLTAVLGYMIYGDDVQSQVTLNLPSGKLYTKIAIVMTLVNPLAKYALLVAPITAAVEERLSLTRGSAPARVAISTAILASTVVVASTVPFFGYLMSFIGSFLSVMATVLFPCLCYLKIYKADGIHRTEMVAIAGILLLGVFVAVTGTYTSLLQIIATF

SEQ ID NO: 786 - protein, 443 aa, Oryza sativa (japonica cultivar-group)
MAADKSPIDEALLHGKHEEALLHGKHEHVEQQLLPTSGGSFCITGASFGRSCLNLSNVISGIGMLSVPYALSQGGWLSLALFAMVGAICFYTGKLIYRCMRADRCVRSYPDIGYLAFGRYGRTAIGLIMYVELYLVAISFLILEGDNLDKLLPGTVVKILGYQVHGKQLFMLVAAAVILPTTWLKNLSMLAYVSAVGLVSSVALTVSLVWAGVADKGFHMAGSSILNLSGLPTALSLYFVCFAGHGVFPTVYSSMRARKDFPKVLLISSVLCSLNYAVTAVLGYKIYGEDVQAQVTLNLPTGKLYTRIAILTTLITPLAKYALVIQPVTTAIEEKLSTAAAAVAADAENNRLTRVLTSTTVVFSTVVLACTVPFFGYLMSFIGSSLNVTVAVLFPCLSYLKIYMPRGGVGRFEVAAIVGILVIGVCVAVIGTYTSLHQIIGTF

SEQ ID NO: 787 - protein, 442 aa, Lycopersicon esculentum
MATTSFHHPLLPNVHNDDELAIHIPSSAHQVSNDSWFQVGVVLSTGINSAFALGYAGLIMVPLGWVGGVVGLILSSAISLYASTLIAKLHEYGGRRHIRYRDLAGFMYGQTAYSLVWASQYANLFLINTGYVILGGQALKAFYVLFRDDHQMKLPHFIAVAGLACVLFAIAIPHLSALRIWLGFSTFFSLVYICIVITLSLKDGLEAPPRDYSIPGTKNSKTWATIGAAANLVFAYNTGMLPEIQATVREPVVDNMIKALNFQFTLGVIPMHAVTYIGYWAYGSSASSYLLNNVSGPIWLKGMANIAAFLQSIIALHIFASPTYEFLDTKYGVTGSALACKNLAFRIIVRGGYIAITAFLSALLPFLGDFMNLAGAISTFPLTFILPNHMYIVAKRKKLSFLKKSWHWLNIIFFSCIAVAAFVAALRFITVDSTTYHVFADL

SEQ ID NO: 788 - protein, 439 aa, Lycopersicon esculentum
MGEEKEVISHVITTPPFEVEVPKTLHQIGQDSWFQVGLVLTTTVNCAYALGYAGTIMVPLGWIGGVTGMVLSTIISLYASTLMAKIHQYGEKRHIRYRDLAGFMYGYRAYAIVWGLQYANLFLINIGFIILGGQALKAFYLLFREDHEMKLPYFIIIAGLACVFFAVSVPHLSALGVWMAVSTFLSIVYFSIAFALCLKDGINAPPRDYSIPGSSSSRTFTTIGAAASLVFVYNTGMIPEIQATVRAPVVDNMLKALYFQFTIGAVPVHAVTYMGYWAYGSKSSSYLLYNVSGPVWLRGLANIAAFFQSIITLHIFASPTYEYLDTKYRISGSVLAFRNLSFRTVVRGGYLAITIFLSALLPFLGDFMSFTGAISTIPLTFILPNHMYIVAMRKQISSLQKSWHWFNIVFFSCLAVAALVAAVRLIAMDSKTYHAFADL

SEQ ID NO: 789 - protein, 441 aa, Lycopersicon esculentum
MGNNRYNSPSREDKNDEEASVIIPETAHQVSNDSWFQVGVVLSMGVNSAYALGYSGTIMVPLGWIGGVVGLVMSTIVSLYASTIMAKLHEVGGKRHIRYRDLAGFLYGRTAYLLIWALQYANLFLINIGYVIMSGSALKAFYMLFRDDHMLKLPHFIAIAGVACILFAIATPHLSALRVWLGFSTLFMILYLAIAFVLSVQDGVKAPPRDYHIPGSGENKIWAIIGAIGNLFFAFNTGMIPEIQATIRQPVVGNMVKALNFQFTVGVVPMHAVTYIGYWAYGSVVSSYLLNNVHGPAWVLGVAHLSAFFQAIITLHIFASPTYEYLDTKYGVKGSALAPRNILFRLVVRGGYLVMTTFLSALLPFLGNFMSLTGAISTIPLTFILPNHMYIIAKKDKLNSLQKSWHWLNIVVFGCVSVAAFVAALKLTVVQTQTYHVFADL

SEQ ID NO: 790 - protein, 465 aa, Lycopersicon esculentum
MGSGAIDDSSKFDDDGRPKRTGTVLTTSAHIITAVIGSGVLSLAWATAQLGWIAGPVALIAFSAITWFASILLADCYRAPDGSRSYTYMDAVRAHLGGRKVQLCGLAQYSNLFGVTIGYAITTSISMVAIKRSNCFHRKGHDAGCHESNNPFIIIFGVMQILLSQIPNFHKLSFLSIIAAAMSFAYSFIGLGLSIAKIAKDGVSANTSLTGTIVGKDVSSRDKMWNTFSALGDIAFAYAFSIVLIEIQDTLKSHPPENKSMKKATFTGISVSTIFYLLCGLLGYAAFGNKAPGNFLTGFGFYEPFWLIDFANVCIVIHLVGAYQVFCQPIFGFVEGWSRQKWPESKFITKEYMINLSHLGLFNFNFYRLVWRTLYVVFTTILAMLFPFFNDFVGFIGAASFWPLTVYFPIQMYIAQAKIPKYSFTWIWLNILSFVCLIISLLAAAGSVRGLIKSLQEFEPFQSRS

SEQ ID NO: 791 - protein, 476 aa, Lycopersicon esculentum
MGDSTNFAAKHPVSINITESKLFDDDGRIKRSGSVWTASAHIITAVIGSGVLSLAWAVAQLGWIAGPIVMLLFSFVTYYTSSLLSDCYRSGDPLFGKRNYTYMDVVQANLSGLQVKICGWIQYVNLFGVAIGYTIASSISLMAVKRSDCFHKHGHKAPCLQPNTPYMIIFGVIEIIFSQIPDFDQIWWLSIVAAVMSFTYSTIGLGLGIAHVAETGKIGGSLTGVSIGTVTEMQKVWRTFQALGAIAFAYSYSLILIEIQDTIKSPPSEAKTMKNATIISVSVTTVFYMLCGCFGYAAFGDHAPDNLLTGFGFYDPYWLLDIANIAIFVHLVGAYQVYCQPLFAFIEKTAAEWYPNSKIITKNISVPIPGFKSYNIYLFRLVWRTIFVIISTIISMLLPFFSDIVGILGAFGFWPLTVYYPVEIYIVQKKIPKWSRKWFGLQILSVTCLIVSIAAAVGSFAGVVSDLKVYKPFKFT

SEQ ID NO: 792 - protein, 449 aa, Oryza sativa
  unsure (1)..(449): unsure at all Xaa locations
MAASSLDAEAAAAGQQDKAGSGSYTTAATAHQIDTDSWQQVGVLLVVGFNCAYVLSFSNLMMAPLGWGWGIACLLFIGAASWYGNWLLAGLHVIDGQRFIRYRDLMGFVFGRKMYYITWFLQFITLILGNMGFILLGGRALKAIHAEFSSSHSPARLQWFIAATGFVYFAFAYFVPTISAMRNWLATSAALTVAYDVALIVILIKDGKSNKQKDYNVHGTQAEKVFGAFGAIAAILVCNTSGLLPEIQSTLRKPVVSNMRRALLLQYTAGAAVYYGISVAGYWAYGAAVSEYLPDQLSGPSWATVLINATAFLQSIVSQHLFTVPIHEALDTQMQRLDEGMFSRYNLGRRLLARGLVFGANAFVTAXLFPFIGRFVNLXSGILTSXFPLTFMFPSMVHSKGKGLKSGRWNRIWHWGIIVASSVLSVVTTAAAVRLIVHNASVYHFFADM

SEQ ID NO: 793 - protein, 473 aa, Oryza sativa; identical to SEQ ID NO: 636

SEQ ID NO: 794 - protein, 473 aa, Oryza sativa; identical to SEQ ID NO: 636

SEQ ID NO: 795 - protein, 420 aa, Oryza sativa
  unsure (1)..(420): unsure at all Xaa locations
XAFDAEAGAAGPPPTPAPXFVLESKGWALGLTVLTAVGAVTFYEYSLMSRVLEHCEARGRRHIRFRELAADVLGSGWMFYFVVIVQTAINTGVSIGTILLAADCLEIMYTSLSPNGPLKLYHFIIIVAVALAFLSQLPSFHSLRHINFASLLLSLGYTILVSAACIGAGLSKDAPGKDYTLSSSKSEQTFNAFLSISILASVYGNGILPEIQATLAPPAAGKMMKALVLCYSVIAFAFYIPSITGYWAFGSHVQSNVLKSLMPDTGPALAPTWLLGLAVLFVLLQLLAIGLVYSQVAYEIMEKSSADATRGKFSRRNVVPRLLLRTLYLAFCAFMAAMLPFFGDIVGVVGAVGFIPLDFVLPVVMYNIALAPPRRSPMFLANTAIMVVFSGVGAIGAFASIRKLVLDAGQFKLFSNNVVD

SEQ ID NO: 796 - protein, 457 aa, Oryza sativa; identical to SEQ ID NO: 782

SEQ ID NO: 797 - protein, 508 aa, Oryza sativa
  unsure (1)..(508): unsure at all Xaa locations
SSYPCKAVRCKCVQRDASFFLTSTXIHGRHRRQPSAPLSLSGDEHHADAALRXRCSTSRPRPALAALASSPPPTPAPPSCXESKGKWWHAGFHLTTAIVGPTVLTLPYALRGMGWALGLVALTAVAAVTFYAYYLMSRVLDHCEAHGRRHIRFRELAADVLGSGWVFYLVVTVQTAINAGITIGSILLAADCLQIMYSDLAPNGPLKLYHFIIVVAVVLSLLSQLPSFHSLRYINLGSLLLSFGYTILVSAACIRAGALSDVPEKDYSLSSSNSEKTFNAFLSISILASVFGNGILPEIQATLAPPAAGKMMKALVLCYTVVLFTFYLPAITGYWAFGSQVQSNVLQSLMPDKGPSLAPTWLLGLAVVLVLLQLLAIALVYSQVAYEIMEKSSADAARGRFSRRNVAPRVALRTAYVAACAFVAAMLPFFGDIVGVVGAVGFIPLDFVLPVVMYNMALAPPRRSPVYLANVAIMVVFTGVGLIGAVASVRKLVLDAGQFKLFSGNVVD

SEQ ID NO: 798 - protein, 424 aa, Oryza sativa
  unsure (1)..(424): unsure at all Xaa locations
STSRPRPALAALASSPPPTPAPXFVLESKGWALGLVALTAVAAVTFYAYYLMSRVLDHCEAHGRRHIRFRELAADVLGSGWVFYLVVTVQTAINAGITIGSILLAADCLQIMYSDLAPNGPLKLYHFIIVVAVVLSLLSQLPSFHSLRYINLGSLLLSFGYTILVSAACIRAGALSDVPEKDYSLSSSNSEKTFNAFLSISILASVFGNGILPEIQATLAPPAAGKMMKALVLCYTVVLFTFYLPAITGYWAFGSQVQSNVLQSLMPDKGPSLAPTWLLGLAVVLVLLQLLAIALVYSQVAYEIMEKSSADAARGRFSRRNVAPRVALRTAYVAACAFVAAMLPFFGDIVGVVGAVGFIPLDFVLPVVMYNMALAPPRRSPVYLANVAIMVVFTGVGLIGAVASVRKLVLDAGQFKLFSGNVVD

SEQ ID NO: 799 - protein, 421 aa, Oryza sativa
  unsure (1)..(421): unsure at all Xaa locations
XEEAKKMEAGGDTVGQKLDAGALFVLQSKGWAAGLICLVIGAAVTFYSYNLISLVLEHHAQQGRRQLRFRDMATDILGPGWGRFYIGPIQFLVCFGAVVACTLLAGQSMKAIYLIANPGGTIKLYVFVAIFGVFMMILAQMPSFHSLRHVNLISLVLCLAYSFCAVAACIYLGRFPGAPEKDYSIAGANTRDRVFGVFNAIAVIATTYGNGIIPEIQATVAAPVTGKMFKGLCLCYAVVVTTFFSVAISGYWAFGNQSQGTLLSNFMVGGRAVIPEWLLLIIELFTLLQLSAVAVVYLQPTNEVLEGLLSDPKAGQYAARNVAPRVLSRTAAVALGTTIAAMVPFFGDMNALIGAFGFLPLDFAVPAVFYNVTFKPSKKGAVFWLNTTIAVVFSALAVVASVAAVRQIILDANSYKLFANV

SEQ ID NO: 800 - protein, 516 aa, Oryza sativa; identical to SEQ ID NO: 783

SEQ ID NO: 801 - protein, 464 aa, Oryza sativa
SSIAAKEEEVDEGGGDQVIMGTQVADNYPPAKDGRSAQEKAIDDWLPITSSRNAKWWYSAFHNVTAMVGAGVLSLPYAMSELGWGPGIAVLILSWIITLYTLWQMVEMHEMVPGKRFDRYHELGQHAFGEKLGLWIVVPQQLVVEVGVNIVYMVTGGKSLKKFHDVLCDGCKNIKLTYFIMIFASVHFVLSQLPNFNSISGVSLAAAVMSLSYSTIAWGASVDKGKVADVDYHLRATTSTGKVFGFFSALGDVAFAYAGHNVVLEIQATIPSTPEKPSKKPMWKGVVVAYIIVALCYFPVALVGYWAFGNHVDDNILITLSRPKWLIALANMMVVIHVIGSYQIYAMPVFDMIETVLVKKLRFPPGLTLRLIARTLYVAFTMFIAITFPFFGGLLGFFGGFAFAPTTYFLPCIMWLAIYKPRRFSLSWFTNWICIILGVMLMILSPIGGLRQIIIDAKTYKFYS

SEQ ID NO: 802 - protein, 451 aa, Oryza sativa
VDPRVRLSMVTSSVLPKVVDDAGEGEANPRRAKWWYATFHSVTAMVGAGVLSLPYAMAHLGWGPGTAALVVSWGMTLYTLRLLIELHECVPGVRFDRYRDLGAHALGPRLGPWLVVPQQLIVQLGCDVVYMVIGGKCLMKFAESVSSWCAPQLHHQSYWICIFGASQFLLSQLPSLDSITAVSLAAAAMSVGYSTISWAACLARGTPAAAEGGGGGVSYAYKDGTAADSVFRVCSALGQVAFAYAGHGVVLEIQATIPSTPTKPSRGAMWKGAVAAYLVTALCYFPVAIAGYWAFGRDVSDNVLVALRRPPWLVAAANMMVVVHVLGSYQVYAMPIFETLETILITRIRLPPGALLRLVARSAYVAFTLFVAVTFPFFGDLLGFFGGFGFTPTSYFLPCILWLKIKKPPRFSASWFANWGCIVVGVLLMIASTIGGLRSIIQDASTFQFYS

SEQ ID NO: 803 - protein, 366 aa, Oryza sativa
  unsure (1)..(366): unsure at all Xaa locations
XVAGERWHAGGGGRWRRRRXXAAAETGGPWGYWYVSFFQQVASIGNNIAIQIAAGSSLKAVYKHYHTNGAMTLQQFIILFGAFELLLSQLPDIHSLRWVNAACTASTIGFAGTAIGVTIYDGHRIDRKEVDYSLQGSAASKIFRAFNALGTIAFSFGDAMLPEIQSSVREPVRMNMYKGVSTAYSIIVMSYWTLAFSGYWAFGSGVQPYILSSLTXXPRWTIVMANLFAVIQITGCFQIYCRPTFAQFEQRIQXXKDAGYRARMWRLVYTSAYMVVITLISAAMPFFGDFVSVCGAVGFTPLDFVLPALAFLKAGKLPENPGLRHAVKVITSAVAVLFSIVGALACIGAVRAIALDVKTYKFFHDM

SEQ ID NO: 804 - protein, 389 aa, Oryza sativa
  unsure (1)..(389): unsure at all Xaa locations
MSPARGGTPEEEGGGADVEKAAAETGGRGTWRHAAFHVATTIATPAAYAPLPFALASLGWPLGPMSPAWGYWYVSFFQQVASIGNNIAIQIAAGSSLKAVYKHYHTNGAMTLQQFIILFGAFELLLSQLPDIHSLRWVNAACTASTIGFAGTAIGVTIYDGHRIDRKEVDYSLQGSAASKIFRAFNALGTIAFSFGDAMLPEIQSSVREPVRMNMYKGVSTAYSIIVMSYWTLAFSGYWAFGSGVQPYILSSLTXXPRWTIVMANLFAVIQITGCFQAKDAGYRARMWRLVYTSAYMVVITLISAAMPFFGDFVSVCGAVGFTPLDFVLPALAFLKAGKLPENPGLRHAVKVITSAVAVLFSIVGALACIGAVRAIALDVKTYKFFHDM

SEQ ID NO: 805 - protein, 450 aa, Oryza sativa
  unsure (1)..(450): unsure at all Xaa locations
XEMAPPSAMNTSRAEEKAIDDWLPITSSRNAKWWYSAFHNVTAMVGAGVLSLPFAMSELGWGPGVAAMIMSWVITLYTLWQMVEMHECVPGRRFDRYHELGQHAFGDKLGLWIVVPQQLVVEVGVCIVYMVTGGKSLKKFHDLVAPPSAPPIRTSYFIVIFGCLHLVLSQLPNFNSISGVSLAAAVMSLSYSTIAWAASLHHHNHNNGAAAGGVDYSLTEATPAGRTFNFLSALGDVAFAYAGHNVVLEIQATIPSTAERPSKGPMWRGVVLAYGVVAVCYLPVAFAGYYVFGNAVDDNVLITLERPAWLIAAANMFVVVHVVGSYQIYAMPVFDMLETFLVKKLRFKPGMPLRLIARSLYVLFTMFVAIAVPFFGGLLGFFGGFAFAPTTYFLPCIMWLSIMKPKRFGLSWCINWVSSIIIIGVLLSVFAPIGGLRSIIVNAQSYKFFS

SEQ ID NO: 806 - protein, 470 aa, Oryza sativa
  unsure (1)..(470): unsure at all Xaa locations
LSRSSYVNTSPSSPASHRLGRTXEMAPPSAMNTSRAEEKAIDDWLPITSSRNAKWWYSAFHNVTAMVGAGVLSLPFAMSELGWGPGVAAMIMSWVITLYTLWQMVEMHECVPGRRFDRYHELGQHAFGDKLGLWIVVPQQLIVEVGVCIVYMVTGGKSLKKFHDLVAPPSAPPIRTSYFIVIFGCLHLVLSQLPNFNSITGVSLAAAVMSLSYSTIAWAASLHHHNHNNGAAAGGVDYSLTAATPAGRTFNFLSALGDVAFAYAGHNVVLEIQATIPSTPERPSKGPMWRGVVLAYGVVAVCYLPVAFAGYYVFGNAVDDNVLITLERPAWLIAAANIFVVVHVVGSYQIYAMPVFDMLETFLVKKLRFKPGMPLRLIARSLYVLFTMFVAIAVPFFGGLLGFFGGFAFAPTTYFLPCIMWLSIMKPKRFGLSWCINWFCIIIGVLLSVFAPIGGLRSIIVNAQSYKFFS

SEQ ID NO: 807 - protein, 638 aa, Oryza sativa
MLITLYALPTSASAHRGRGGSGPPHPRWAKIRQGPATSSVTPTKTKVGSPPPLPALVTTTSTAYPTHSYSSSYTFFPQITRIVLGGIVNPIQRRRDGIHAAPRSISSRAAKNGEGRRAATTIELILQNAGAHNVRTLTPMNAHTHTLPYEHLRKTRPRCRRITDGGSCRRRRRRHRRRGRTKMSATEVMEECTETARERREEERLRNVNLDDWLPITSSRTAKWYYSAFHNVTAMVGAGVLGLPFAMSQLGWPTGVAAIASSFAITLYTLWQLVELHEPAPGGGKRFDRYHELGQAAFGRRLGVCLIVPLQLIVQVGTDIVYMVTGGQTLKKFVELACDGRCADIRLTFYIMMFASAQFVLSQCPNFNSISAVSAAAAAMSLCYSMIAFFASVLKAHPAAAAAVDYGFKATTAAGRVFGAFNALGAVSFAFAGHNVVLEIQATIPSTPERPSKRPMWRGVVVAYAVVALCYFTVAFGGYHAFGNAVAPNVLISLEKPRWLVAAANLMVVVHVIGAYQVYAMPVFDMIETVLAKKLHLRPGLPLRVTARSAYVALTMFIGITFPFFDGLLGFFGGFGFAPTTYFIPCIIWLIMRKPAKYSLSWLMNWCFIIIGMLLMLVSPIGGLRQIILDASKYKFYS

SEQ ID NO: 808 - protein, 265 aa, Oryza sativa
  unsure (1)..(265): unsure at all Xaa locations
XPVSLAAAAMSVGYSTISWAASAAEGGGGGVSYAYKDGTAADSVFRVCSALGQVAFAYAGHGVVLEIQATIPSTPTKPSRGAMWKGAVAAYLVTALCYFPVAIAGYWAFGRDVSDNVLVALRRPPWLVAAANMMVVVHVLGSYQVYAMPIFETLETILITRIRLPPGALLRLVARSAYVAFTLFVAVTFPFFGDLLGFFGGFGFTPTSYFLPCILWLKIKKPPRFSASWFANWGCIVVGVLLMIASTIGGLRSIIQDASTFQFYS

SEQ ID NO: 809 - protein, 193 aa, Oryza sativa
  unsure (1)..(193): unsure at all Xaa locations
MDQHQLDEENQRAALFHSSAPSSSLGADGEEERETVPLLSCKMADDKSDTVQVSEDTAHQISIDPWYQVGFILTTGVNSAYVLGYSASIMVPLGWIGGTCGLILAAAISMYANALLAHLHEVGAKRHIRYRDLAGHIYGKYXYTQXSLIWQIFDIILFPFFLNLCMFFNHSPPPIFFVFFXGXCRXLTXXGAX

SEQ ID NO: 810 - protein, 517 aa, Oryza sativa
  unsure (1)..(517): unsure at all Xaa locations
XTRQRDSVPMRWRWRVPGVVVSEPEVVSIPPTPRGMSTPDGTATPPPAAGRGAATPARRVVEGLRGYLEEVGHLTRLNPQDAWLPITESRSGNARYAAFHTLNAGLGFQALLLPLAFPALGWSWGIISLTVAYFWQLYTLWILVKLHEAVPGRRYNRYVELAQAAFGEKLGMWLSLFPTIYLSAGSATALILVGGETMKLFYQIVCGPICSPSPISTIEWYLVFTSLAIVLSQLPNLNSIAGVSLIGGTTAITYCTMSWVLSVSQPQPPTVSYEPQAYTSLGSSLFSTLNALGIIAFAFRGHNLALEIQATMPSTFKHPAHVPMWRGAKVAYALIAMCLFPVAIGGYWAYGNMVPQGGMLTALYAFHSHDIPRGLLAATFLLGXVFNCLSSFQIYSMPVFDSFEAAYTGRTNRPCSFWVRSGFRVFYGFLSLFISVALPFLSSLAGLLGGLTLXPVTFAYPCFMWICIKKPERFSSGWYLNWGLGLLGTAFSLALCVGGVWSIISSGMKFKFFKPPS

SEQ ID NO: 811 - protein, 234 aa, Oryza sativa
  unsure (1)..(234): unsure at all Xaa locations
MSVGYSTISWAASAAEGGGGGVSYAYKDGTAADSVFRVCSALGQVAFAYAGHGVVLEIQATIPSTPTKPSRGAMWKGAVAAYLVTALCYFPVAIAGYWAFGRDVSDNVLVALRRPPWLVAAANMMVVVHVLGSYQVYAMPIFETLETILITRIRLPPGALLRLVARSAYVAFTLFVAVTFPFFGDLLGFFGGFGFTPTSYFXXCIVVGVLLMIASTIGGLRSIIQDASTFQFYS

SEQ ID NO: 812 - protein, 416 aa, Oryza sativa
  unsure (1)..(416): unsure at all Xaa locations
MAPPSAMNTSRAEEKAIDDWLPITSSRNAKWWYSAFHNVTAMVGAGVLSLPFAMSELGWGPGVAAMIMSWVITLYTLWQMVEMHECVPGRRFDRYHELGQHAFGDKLGLWIVVPQQLVVEVGVCIVYMVTGGKSLKKFHDLVAPPSAPPIRTSYFIVIFGCLHLVLSQLPNFNSISGVSLAAAVMSLSYSTIAWAASLHHHNHNNGAAAGGVDYSLTEATPAGRTFNFLSALGDVAFAYAGHNVVLEIQATIPSTAERPSKGPMWRGVVLAYGVVAVCYLPVAFAGYYVFGNAVDDNVLITLERPAWLIAAANMFVVVHVVGSYQIYAMPVFDMLETFLVKKLRFKPGMPLRLIARSLYVXLPCIMWLSIMKPKRFGLSWCINWFCIIIGVLLSVFAPIGGLRSIIVNAQSYKFFS

SEQ ID NO: 813 - protein, 503 aa, Oryza sativa
RAREREGLRLATRERRDGEGRGDGGAERRRRRRRRLLRPHPHGGAGGEDVDDDGKQRRTGNVWTASAHIITAVIGSGVLSLAWATAQLGWVVGPVTLMLFALITYYTSGLLADCYRTGDPVSGKRNYTYMDAVAAYLGGWQVWSCGVFQYVNLVGTAIGYTITASISAAAVHKANCYHKNGHDADCGVYDTTYMIVFGVVQIFFSMLPNFSDLSWLSILAAVMSFSYSTIAVGLSLARTISGATGKTTLTGVEVGVDVTSAQKIWLAFQALGDIAFAYSYSMILIEIQDTVKSPPAENKTMKKATLLGVSTTTAFYMLCGCLGYAAFGNAAPGNMLTGFGFYEPYWLIDFANVCIVVHLVGAYQVFCQPIFAAVETFAARRWPGSEFITRERPVVAGRSFSVNMFRLTWRTAFVVVSTVLAIVMPFFNDILGFLGAVGFWPLTVYYPVEMYIRQRRIQRYTSRWVALQTLSLLCFLVSLASAVASIEGVSESLKHYVPFKTKS

SEQ ID NO: 814 - protein, 487 aa, Oryza sativa
  unsure (1)..(487): unsure at all Xaa locations
MGENGVVASKLCYPAAAMEVVAAELGHTAGSKLYDDGRARRTGTVWTASAHIITAVIGSGVLSLAWAIAQLGWVAGPAVMLLFAFVIYYTSTLLAECYRSGDPCHXGKRNYTYMDAVRANLGGSKVRLCGVIQYANLFGVAIGYTIAASISMLAIKRADCFHEKGHKNPCRSSSNPYMILFGVVQIVFSQIPDFDQIWWLSIVAAIMSFTYSTIGLSLGIAQTVANGGFMGSLTGISVGPGVTSMQKVWRSLQAFRDIAFAYSYSIILIEIQDTIKAPPPSEAKVMKRATMVSVATTTVFYMLCGCMGYAAFGDKSPDNLLTGFGFYEPFWLLDVANAAIVVHLVGAYQVFVQPIFAFVERWAAARWPDGGFISRELRVXXPFSLSVFRLTWRTAFVCATTVVSMLLPFFGDVVGLLGAVSFWPLTVYFPVEMYIAQRGVRRGSARWLCLKVLSAACLVVSVAAAAGSIADVVDALKVYRPFSGXRE

SEQ ID NO: 815 - protein, 487 aa, Oryza sativa
MGMERPQEKVATTTTAAFNLAESGYADRPDLDDDGREKRTGTLVTASAHIITAVIGSGVLSLAWAIAQLGWVIGPAVLVAFSVITWFCSSLLADCYRSPDPVHGKRNYTYGQAVRANLGVAKYRLCSVAQYVNLVGVTIGYTITTAISMGAIKRSNWFHRNGHDAACLASDTTNMIIFAGIQILLSQLPNFHKIWWLSIVAAVMSLAYSTIGLGLSIAKIAGGAHPEATLTGVTVGVDVSASEKIWRTFQSLGDIAFAYSYSNVLIEIQDTLRSSPAENEVMKKASFIGVSTTTTFYMLCGVLGYAAFGNRAPGNFLTGFGFYEPFWLVDVGNVCIVVHLVGAYQVFCQPIYQFAEAWARSRWPDSAFVNGERVLRLPLGAGDFPVSALRLVWRTAYVVLTAVAAMAFPFFNDFLGLIGAVSFWPLTVYFPVQMYMSQAKVRRFSPTWTWMNVLSLACLVVSLLAAAGSIQGLIKSVAHYKPFSVSS

SEQ ID NO: 816 - protein, 424 aa, Oryza sativa; identical to SEQ ID NO: 785

SEQ ID NO: 817 - protein, 508 aa, Oryza sativa
  unsure (1)..(508): unsure at all Xaa locations
ARGPLPGFHTSSNPPTPRSIRSSCEVSDMASGQKVVKPMEVSVEAGNAGEAAWLDDDGRARRTGTFWTASAHIITAVIGSGVLSLAWAIAQLGWVAGPAVMLLFAFVIYYTSTLLAECYRTGDPATGKRNYTYMDAVRANLGGAKVTFCGVIQYANLVGVAIGYTIASSISMRAIRRAGCFHHNGHGDPCRSSSNPYMVLFGAVQIVFSQIPDFDQIWWLSIVAAVMSFTYSGIGLSLGIVQTISNGGIQGSLTGISIGVGVSSTQKVWRSLQAFGDIAFAYSFSNILIEIQDTIKAPPPSEAKVMKSATRLSVATTTVFYMLCGCMGYAAFGDAAPDNLLTGFGFYEPFWLLDVANVAIVVHLVGAYQVFVQPIFAFVERWASRRWPDSAFIAKEAXXVGPFALSLFRLTWRXSAFVCLTTVVAMLLPFFGNVVGLLGAVSFWPLTVYFPVEMYIAQRGVPRGSARWVSLKTLSACCLVVSIAAAAGSIADVIDALKVYRPFSGXFF

SEQ ID NO: 818 - protein, 419 aa, Oryza sativa
  unsure (1)..(419): unsure at all Xaa locations
HEHVEQXXLLPTSGGSFCITGASFGRSCLNLSNVISGIGMLSVPYALSQGGWLSLALFAMVGAICFYTGKLIYRCMRADRCVRSYPDIGYLAFGRYGRTAIGLIMYVELYLVAISFLILEGDNLDKLLPGTVVKILGYQVHGKQLFMLVAAAVILPTTWLKNLSMLAYVSAVGLVSSVALTVSLVWAGVADKGFHMAGSSILNLSGLPTALSLYFVCFAGHGVFPTVYSSMRARKDFPKVLLISSVLCSLNYAVTAVLGYKIYGEDVQAQVTLNLPTGKLYTRIAILTTLITPLAKYALVIQPVTTAIEEKLSTAAAAVAADAENNRLTRVLTSTTVVFSTVVLACTVPFFGYLMSFIGSSLNVTVAVLFPCLSYLKIYMPRGGVGRFEVAAIVGILVIGVCVAVIGTYTSLHQIIGTF

SEQ ID NO: 819 - protein, 484 aa, Triticum aestivum
  unsure (1)..(484): unsure at all Xaa locations
MDATKRQQQQHDEEALSNSSPPASSSWASTSSSSXXLPGSGDTDRAPLLPCKMADDEKVDRLDVSDDTAHQISVDPWYQVGFVLTTGVNSAYVLGYSGSIMVPLGWIGGTCGLILAAAISMYANALLGRLHEVGGKRHIRYRDLAGHIYGRKMYALTWALQYINLFMINTGFIILAGQALKAIYVLFRDDGLLKLPYCIALSGFVCALFAFGIPYLSALRIWLGFSTVFSLIYIVIAFVLSLRDGITAPAKDYSIPGSESTRVFTTIGAVANLVFAYNTGMLPEIQATIRPPVVKNMEKALWFQFTVGSLPLYAVTFMGYWAYGSSTSSYLLNSVHGPAWIKVVANLSAFLQTVIALHIFASPMYEYLDTRFGSGHGGPFAIHNVVFRVGVRGGYLAVNTLVAAMLPFLGDFMSLTGALSTFPLTFVLANHMYLMVKGPKLSAFQKGWHWLNVVGFSLLSVTAAAAALRLIILDSSTYHLFADM

SEQ ID NO: 820 - protein, 479 aa, Triticum aestivum
  unsure (1)..(479): unsure at all Xaa locations
FCPCYIYHPNQTKPNQTHRSIACLPAGVDGHAPAGEGATPPPQPVIVVDANPSKNGHGDKLDDLPVADESSHQIGVDPWYQVAFVLTTGVNSAYVLGDSGSLMVPLGPPXXAAVSMYANTLLGRLHLLGGKRHIRYRDLAGHIYGPNMYKITWAMQYVNLFMINTGFIIIAGQALKALYLLVSADGAMKLPYCIAVSGFVCALFAFGIPYLSALRIWLGFSTIFSLTYIFAACVLSLKDGFRTPPRDYSIQGDPSSRVFTTIGAAASLVFAYNTGMLPEIQATVQAPVVKNMEKALWFQFTAGSLPLYAIIVIGYWAYGNQTTTYLLNNVTGPLWIKAVANLAAFLQTVIALHIFASPMYEYLDTRFGSKVGGPFAMHNVIFRVGVRGGYLAVNTLMAAALPFLGDFMSLTGALSTFPLTFVLANHMYLVANRQRLSSLQKSWHWLNIVFFTVLSITAAIAALRLIARDSKTYHIFADV

SEQ ID NO: 821 - protein, 120 aa, Triticum aestivum
  unsure (1)..(120): unsure at all Xaa locations
MASSSLDTEAGAGVQHKAGGDGSGYTTAATAHAVDTDSWQQVGLLLVTGFNCAYVLSFSNLMMVPLGWGWGAACLLLLAAAAWYANWLLAGLHVVDGQRFIRYRDLMGFVXGRKMYYLTW

SEQ ID NO: 822 - protein, 156 aa, Triticum aestivum
  unsure (1)..(156): unsure at all Xaa locations
MATPPAEKVIVVDANPSKNGHGDKLDDLPVADETSHQIGVDPWYQVAFVLTTGVNSAYVLGXSXSLMVPLGWVGGTVGLLLAAAVSMYANALLGRLHLLGGKRHIRYRDLAGHIYGPKMYKITWAMQYINLFMINTGFIIIAGQALKALYLLVSAD

SEQ ID NO: 823 - protein, 487 aa, Triticum aestivum
  unsure (1)..(487): unsure at all Xaa locations
TTCPPSRPLTLPPQRPPSPTPPCSVSSPPFCKSPRWRSLGPRPRESCEPPGTLRTTRTHKGIDGWLPLTASRSAKPCFSSLRCVNARGGARVLTLPYRLSQLRWCSGIWVLTLSWMSTVNSSWEMGEMHNIFPGKPFDRYYEIWXKAFGEXLGLWRSVPQPLAVGVSRQXIVYMVTGGNXTLTKRKVVICCRWXKDIRLTKSIMIFSAVHFVRTKFPTFNSSSGISLTSSAIXLSYSTLAWGASLHQGTAQNPDYSMRAATTPGQVFGFLGGLGDVPASSSPRNVVLEIQATIPSTPGNPSKKPMWKGVVVAYIIIAACYMPVAFIGYWAFGNSVDDNILITLNKPKWLIAMANMMVVVHLIGSYQIYAMPVFDMMETFLVRKLEFAPGITLRLITRTIYVAFTMFVGMTFPFFGGLIGFFGGLAFAPTTYFLPCIMWLIICKPRRFSLSWFTNWICIVLGVILMIIAPIGGLRQIIISAKTYKFYS

SEQ ID NO: 824 - protein, 56 aa, Triticum aestivum
  unsure (1)..(56): unsure at all Xaa locations
XSPHLFTVPIHEGMDTGLQRLEEGMFSRYNMTRQLFARGLLFGVNVFVTALFPFMG

SEQ ID NO: 825 - protein, 377 aa, Triticum aestivum
  unsure (1)..(377): unsure at all Xaa locations
MGTQASPDNYTPPKDERTAREKAIDDWLPITSSRKAKWWYSAFHNVTAMVGAGVLSLPYAMSELGWGPGIAVMTLSWIITVYTLWQMVEMHEIVPGKRFDRYHELGQHAFGDKLGLWIVVPQQLVVEVSLNIVYMVTGGNSXLKKFHDVICDECKEINVTYLIMIFASVHFVLSQLPNFNSISGISLAAAVMSLSYSTIAWGASLHKGRAENVDYSLRASTTPGQVFGFLGGLGDVAFSYSGHNVVLEIQATIPSTPGNPSKKPMWKGXVVAYIIIAACXMPVAFIGYWAFGNSVDDNILITLNKPKXLIAMANMMVVVHLIGSYQIYAMPXFDMMETFLVRKLEFAPGITLRLITRTIYVAFTMFVGMTXPFFGXX

SEQ ID NO: 826 - protein, 508 aa, Triticum aestivum
  unsure (1)..(508): unsure at all Xaa locations
PLANQPRRQGETPASCHRFPDGEEAGDLREGRGQDGADGGVGGGRERQGVRLXLDDDGRPRRSGTVWTASAHIITAVIGSGVLSLAWAIAQLGWVAGPAIMLLFALVIYYTSTLLAECYRSGDPETGKRNYTYMDAVRSYLPGTKVKLCGVIQYANLVGVAIGYTIAASISMRAIGRADCFHYHGGKDECKSSSNPYMIVFGVVQILFSQIPDFDQIWWLSIVAAVMSFTYSTIGLGLGIAQTVANGGIQGSLTGLSVGPGVTSMQKVWRSLQAFGNIAFAYSYSIILIEIQDTVKAPPPSEAKVMKKATGISVATTTVFYMLCGCMGYAAFGDAAPDNLLTGFGFYEPFWLLDVANAAIVLHLVGAYQVFCQPLFAFVEKWAAARWPDSAFIARELRVGPFAISVFRLTWRTAFVCLTTVVSMLLPFFGDVVGLLGAVAFWPLTVYFPVEMYIVQRGVRRGSTRWVCLKMLSAACLVVSVAAAAGSIADVIGELKEYRPFSGXAIFV

SEQ ID NO: 827 - protein, 445 aa, Zea mays
MAGSSMDTEAAGKEQQGSGGGGGYTMPATAHAVDTDSWQQVGLLLVIGFNCAYVLSFSNLMMVPLGWAWGVACLLLVGAAAWYANWLLAGLHFVDGQRFIRYRDLMGFVFGRNMYYITWFLQFATLLLCNMGFILLGARALKAINTEFTHTPARLQWFITATGIVYFAFAYFVPTISAMRNWLATSAALTLAYDVALLAILIRDGKSNKQKDYDVHAGSQAEKVFNALGAVAAILVCNTSGLLPEIQSTVREPAVRGMRRALLLQYTAGAAGYYGISVAGYWAYGSAVSEYLPNELGGPRWAAVLINATAFLQSIVSQHLFTVPIHEAMDTRLQRLDEGMFSRYNLTRRVCARGLVFGFNVFVTALFPFMGDFVNLVGSLALVPLTFTFPSMAVLKIKGKSGGRCNRLWHWGIIVLSSALCVATTAAAVRLIFNNARIYHFFADM

SEQ ID NO: 828 - protein, 445 aa, Zea mays
MAGSSMDTEAAGKEQQGSGGGGGYTMPATAHAVDTDSWQQVGLLLVIGFNCAYVLSFSNLMMVPLGWAWGVACLLLVGAAAWYANWLLAGLHFVDGQRFIRYRDLMGFIFGRNMYYITWFLQFATLLLCNMGFILLGARALKAINTEFTHTPARLQWFITATGIVYFAFAYFVPTISAMRNWLATSAALTLAYDVALLAILIRDGKSNKQKDYDVHAGSQAEKVFNALGAVAAILVCNTSGLLPEIQSTVREPAVRGMRRALLLQYTAGAAGYYGISVAGYWAYGSAVSEYLPNELGGPRWAAVLINATAFLQSIVSQHLFTVPIHEAMDTRLQRLDEGMFSRYNLTRRVCARGLVFGFNVFVTALFPFMGDFVNLVGSLALVPLTFTFPSMAVLKIKGKSGGRCNRLWHWGIIVLSSALCVATTAAAVRLIFNNARIYHFFADM

SEQ ID NO: 829 - protein, 237 aa, Zea mays
MAGSSMDTEAAGKEQQGSGGGGGYTMPATAHAVDTDSWQQVGLLLVIGFNCAYVLSFSNLMMVPLGWAWGVACLLLVGAAAWYANWLLAGLHFVDGQRFIRYRDLMGFIFGRNMYYITWFLQFATLLLCNMGFILLGARALKAINTEFTHTPARLQWFITATGIVYFAFAYFVPTISAMRNWLATSAALTLAYDVALLAILIRDGDSASLSLSLFSAVLAFCIYALESAVLSFLVRE

SEQ ID NO: 830 - protein, 494 aa, Zea mays
  unsure (1)..(494): unsure at all Xaa locations
MMRATFGVGGSHRITVLCCGGLVLLLLPPALFIGRLRFVVLARPAPAPAILRQQGAAPPARQDHGRRXADDKPVSDDTAHQISVDPWYQVGFVLTTGVNSAYVLGYSGSIMVPLGWIGGTCGLLLAAAISMYANALLARLHEVGGKRHIRYRDLAGHIYGPKIYGLTWALQYINLFMINTGFIILAGQALKATYGLFSDDGVLKLPYCIAISGFVCALFAIGIPYLSALRIWLGFSTLFSLMYIVIAVVLSSRDGITAPARDYSIQSSQSTRVFTTIGSIADLVFAYNTGMLPEIQATIRPPVVKNMEKALWFQFTIGSLPLYAVVFVGYWAYGSSTSGYLLNSVTGPVWVKAVANLSAFFQTVIALHIFASPMYEFLDTKYGSGRGGPFEIHNVAFRVAVRGGYLTVNTLVAAVLPFLGDFMSLTGALSTFPLTFVLANHMYLMVKGPKLGAIQKSWHWLNVLGFTALAVAAAVSAIRLIMRDSSTYHFFADL

SEQ ID NO: 831 - protein, 489 aa, Zea mays
  unsure (1)..(489): unsure at all Xaa locations
GIEPPQSKKAVQCRERERDQEEKXEREREAKQWISSSSSSSSTASPCWRRSSCPSRSCAAADDKPXXISDDTAHQISVDPWYQVGFVLTTGVNSAYVLGYSGSIMVPLGWIGGTCGLLLAAAISMYANALLARLHEVGGKRHIRYRDLAGHIYGPKIYGLTWALQYINLFMINTGFIILAGQALKATYGLFSDDGVLKLPYCIAISGFVCALFAIGIPYLSALRIWLGFSTLFSLMYIVIAVVLSSRDGITAPARDYSIPKSSQSTRVFTTIGSIADLVFAYNTGMLPEIQATIRPPVVKNMEKALWFQFTIGSLPLYAVVFVGYWAYGSSTSGYLLNSVTGPVWVKAVANLSAFFQTVIALHIFASPMYEFLDTKYGSGRGGPFEIHNVAFRVAVRGGYLTVNTLVAAVLPFLGDFMSLTGALSTFPLTFVLANHMYLMVKGPKLGAIQKSWHWLNVLGFTALAVAAAVSAIRLIMRDSSTYHFFADL

SEQ ID NO: 832 - protein, 456 aa, Zea mays
  unsure (1)..(456): unsure at all Xaa locations
XSPAPAPAIXTTTGRRSSCPSRSCAAADDKPXXISDDTAHQISVDPWYQVGFVLTTGVNSAYVLGYSGSIMVPLGWIGGTCGLLLAAAISMYANALLARLHEVGGKRHIRYRDLAGHIYGPKIYGLTWALQYINLFMINTGFIILAGQALKATYGLFSDDGVLKLPYCIAISGFVCALFAMGIPYLSALRIWLGFSTLFSLMYIVIAVVLSSRDGITAPARDYSIPKSSQSTRVFTTIGSIADLVFAYNTGMLPEIQATIRPPVVKNMEKALWFQFTIGSLPLYAVVFVGYWAYGSSTSGYLLNSVTGPVWVKAVANLSAFFQTVIALHIFASPMYEFLDTKYGSGRGGPFEIHNVAFRVAVRGGYLTVNTLVAAVLPFLGDFMSLTGALSTFPLTFVLANHMYLMVKGPKLGAIQKSWHWLNVLGFTALXXVAAAVSAIRLIMRDSSTYHFFADL

SEQ ID NO: 833 - protein, 309 aa, Zea mays
  unsure (1)..(309): unsure at all Xaa locations
XFLPRVRPRVRPRVRLKLPYCIAISGFVCALFAIGIPYLSALRIWLGFSTLFSLMYIVIAVVLSSRDGITAPARDYSIPKSSQSTRVFTTIGSIADLVFACPAGWLPVFQATIRXPPVVKNMEKALWFQFTIGSLPLYAVVFVGYWAYGSSTSGYLLNSVTGPVWVKAVANLSAFFQTVIALHIFASPMYEFLDTKYGSGRGGPFEIHNVAFRVAVRGGYLTVNTLVAAVLPFLGDFMSLTGALSTFPLTFVLANHMYLMVKGPKLGAIQKSWHWLNVLGFTALAVAAAVSAIRLIMRDSSTYHFFADL

SEQ ID NO: 834 - protein, 238 aa, Zea mays
  unsure (1)..(238): unsure at all Xaa locations
XAWADAWADAWADASRVFTTIGSIADLVFAYNTGMLPEIQATIRPPVVKNMEKALWFQFTIGSLPLYAVVFVGYWAYGSSTSGYLLNSVTGPVWVKAVANLSAFFQTVIALHIFASPMYEYLDTKYGSGRGGPFEIQNLAFRVVVRGGYLTVNTLVAAVLPFLGDFMSLTGALSTFPLTFVLANHMYLMVKGPKLSAIQKLWHWLNVVGFTALAVAAAVSAIRLIMRDSSTYHFFADV

SEQ ID NO: 835 - protein, 248 aa, Zea mays
  unsure (1)..(248): unsure at all Xaa locations
PRVRGRVGGRVGGRVGGRVGGRVGXRVFTTIGSIADLVFAYNTGMLPEIQATIRPPVVKNMEKALWFQFTIGSLPLYAVVFVGYWAYGSSTSGYLLNSVTGPVWVKAVANLSAFFQTVIALHIFASPMYEFLDTKYGSGRGGPFEIHNVAFRVAVRGGYLTVNTLVAAVLPFLGDFMSLTGALSTFPLTFVLANHMYLMVKGPKLGAIQKSWHWLNVLGFTALAVAAAVSAIRLIMRDSSTYHFFADL

SEQ ID NO: 836 - protein, 456 aa, Zea mays
  unsure (1)..(456): unsure at all Xaa locations
MRPARPPTMEMQPPXDGHARPEKPATAXEESIESWLPISSSRNAKWWYSAFHNVTAMVGAGVLSLPYAMSQLGWEVGVTVLVLLRAITLYTLWQMVEMHECVPGKRFDRYHELGQHAFGERLGLWIVVPQQLVVEVGVNIVYMVTGGTSLKKFHDTVCGDSCTDIKLTYFIMIFASCHFVLSQLPSLHSISGVSLAAAVMSLCYSTIAWVASAHKGRSPDVHYGLRATTAPGKVFGFFGALGDVAFAYAGHNVVLEIQATIPSTPERPSKKPMWKGAVVAYAIVAACYFPASLVGYWAFGNQVNDNVLVSLSKPKWLIALANMMVVVHVIGSYQIXYAMPVFDMIETVLVKKLRFPPGLTLRLIARTLYVAFTMFIAITFPFFGGLLGFFGGFAFAPTTYFLPCVMWLAIYKPKRFSLSWLTNWICIILGVLLMILSPIGGLRQIIMDAKTYQFYS

SEQ ID NO: 837 - protein, 453 aa, Zea mays
  unsure (1)..(453): unsure at all Xaa locations
MGTQAPENYPAEKEDARSAREKAIDDWLPITSSRNAKWWYSAFHNVTAMVGAGVLSLPYAMSELGWGPGIAVLVVSWVITLYTLWQMVEMHEMVPGKRFDRYHELGQHAFGDRLGLWIVVPQQLVVEVGVNIVYMVTGGKSLKKFHDVLVCGDTGVCEGKDNIKTTYFIMIFASVHFVLSQLPNFNSISGVSLAAAVMSLSYSTIAWGASVHKGRMSGVDYHLRATTTPGKVFGFFGALGDVAFAYAGHNVVLEIQATIPSTPDKPSKKPMWKGVVVAYVVVALCYFPVALIGYWAFGSTVEDNILITLSKPKWLIALANMMVVVHVIGSYQIYAMPVFDMIETVLVKKLRFPPGLTLRLIARTLYVAFTMFIAITFPFFGGLLGFFGGFAFAPTTYFLPCVMWLAIYKPKXFSLSWLTNWMCIILGVLLMILSPIGGLRQIIMEAKTYQFYS

SEQ ID NO: 838 - protein, 453 aa, Zea mays
MGTQAPENYPAEKEDARSAREKAIDDWLPITSSRNAKWWYSAFHNVTAMVGAGVLSLPYAMSELGWGPGIAVLVVSWVITLYTLWQMVEMHEMVPGKRFDRYHELGQHAFGDRLGLWIVVPQQLVVEVGVNIVYMVTGGKSLKKFHDVLVCGDTGVCEGKDNIKTTYFIMIFASVHFVLSQLPNFNSISGVSLAAAVMSLSYSTIAWGASVHKGRMSGVDYHLRATTTPGKVFGFFGALGDVAFAYAGHNVVLEIQATIPSTPDKPSKKPMWKGVVVAYVVVALCYFPVALIGYWAFGNTVEDNILITLSKPKWLIALANMMVVVHVIGSYQIYAMPVFDMIETVLVKKLRFPPGLTLRLIARTLYVAFTMFIAITFPFFGGLLGFFGGFAFAPTTYFLPCVMWLAIYKPKRFSLSWLTNWMCIILGVLLMILSPIGGLRQIIMDAKTYQFYS

SEQ ID NO: 839 - protein, 452 aa, Zea mays
MGTQAPENYPAEKDARSAREKAIDDWLPITSSRNAKWWYSAFHNVTAMVGAGVLSLPYAMSELGWGPGIAVLVVSWVITLYTLWQMVEMHEMVPGKRFDRYHELGQHAFGDRLGLWIVVPQQLVVEVGVNIVYMVTGGKSLKKFHDVLVCGDTGVCEGKDNIKTTYFIMIFASVHFVLSQLPNFNSISGVSLAAAVMSLSYSTIAWGASVHKGRMSGVDYHLRATTTPGKVFGFFGALGDVAFAYAGHNVVLEIQATIPSTPDKPSKKPMWKGVVVAYVVVALCYFPVALIGYWAFGNTVEDNILITLSKPKWLIALANMMVVVHVIGSYQIYAMPVFDMIETVLVKKLRFPPGLTLRLIARTLYVAFTMFIAITFPFFGGLLGFFGGFAFAPTTYFLPCVMWLAIYKPKRFSLSWLTNWMCIILGVLLMILSPIGGLRQIIMEAKTYQFYS

SEQ ID NO: 840 - protein, 484 aa, Zea mays
SAAGPAAASSPSLSLSLAISIPLGTQAPPQTQSFSSQKMQEQDVDDGGGRTTQQQEKSIDDWLPINSSRKAKWWYSAFHNVTAMVGAGVLGLPYAMSELGWGPGIAVMILSWIITLYTLWQMVEMHEMVPGKRFDRYHELGQHVFGDRLGLWIVVPQQLAVEVSLNIIYMVTGGQSLKKFHDVICDGGRCGGDLKLSYFIMIFASVHLVLSQLPNFNSISAVSLAAAVMSLSYSTIAWGASLHRGRREDVDYHLRATTTPGKVFGFLGGLGDVAFAYSGHNVVLEIQATIPSTPDKPSKKAMWKGAFVAYVVVAICYFPVTFVGYWAFGSGVDENILITLSKPKWLIALANMMVVVHVIGSYQVYAMPVFDMIETVLVKKMRFAPSLTLRLIARSVYVAFTMFLGITFPFFGGLLSFFGGLAFAPTTYFLPCIMWLKVYKPKRFGLSWFINWICIVIGVLLLILGPIGGLRQIILSATTYKFYQ

SEQ ID NO: 841 - protein, 455 aa, Zea mays
METQAPEKENYLPEKDARSAREKAIDEWLPITSSRNAKWWYSAFHNVTAMVGAGVLSLPYALSELGWGPGIAVLVVSWVITLYTLWQMVEMHEMVPGKRFDRYHELGQHAFGEKLGLWIVVPQQLVVEVGVNIVYMVTGGRSLKKFHDVLVCGDGGASCEGKDNIKTTYFIMIFASVHFVLSQLPNFNSISGVSLAAAVMSLSYSTIAWGASVDKGRMAGVDYHLRATTTPGKVFGFFGALGDVAFAYAGHNVVLEIQATIPSTPEKPSKKPMWKGVVVAYVVVALCYFPVALIGYWAFGNSVQDNILITLSKPRWLIALANMMVVIHVIGSYQIYAMPVFDMIETVLVKKLRFPPGLTLRLISRTAYVAFTMFIAITFPFFGGLLGFFGGFAFAPTTYFLPCVMWLAIYKPKRFSLSWFTNWICIILGVILMILSPIGGLRQIIMDAKTYQFYS

SEQ ID NO: 842 - protein, 455 aa, Zea mays
MGTQAPEKENYPPEKDARSAREKAIDEWLPITSSRNAKWWYSAFHNVTAMVGAGVLSLPYALSELGWGPGIAVLVVSWVITLYTLWQMVEMHEMVPGKRFDRYHELGQHAFGEKLGLWIVVPQQLVVEVGVNIVYMVTGGRSLKKFHDVLVCGDGGASCEGKDNIKTTYFIMIFASVHFVLSQLPNFNSISGVSLAAAVMSLSYSTIAWGASVDKGRMAGVDYHLRATTTPGKVFGFFGALGDVAFAYAGHNVVLEIQATIPSTPEKPSKKPMWKGVVVAYVVVALCYFPVALIGYWAFGNSVQDNILITLSRPRWLIALANMMVVIHVIGSYQIYAMPVFDMIETVLVKKLRFPPGLTLRLISRTAYVAFTMFIAITFPFFGGLLGFFGGFAFAPTTYFLPCVMWLAIYKPKRFSLSWFTNWICIILGVILMILSPIGGLRQIIMDAKTYQFYS

SEQ ID NO: 843 - protein, 412 aa, Zea mays
  unsure (1)..(412): unsure at all Xaa locations
MGLGAVAATREDEEAKMEAGGDTAGQKLDAGALFVLQSKGSWLHCGYHLTTSIVAPALLSLPFAFASLGWAAGTICLVIAAAVTFYSYNLISLVLEHHARQGRRQLRFRDMITDILGPGWGKYYIGPIQFTGWGDSSASSCVPAAXQMQAIYLLANPGGTIKLYVFVAIFGVFMMILAQLPSFHSLRHVNLVSLLLCLAYSFCAVAGSIYLGNSDKAPPKDYSISGDAQNRVFGVFNAIAIIATTYGNGIIPEIQATVAAPVTGKMFRGLCLCYAVVVTTFFSVAISGYWAVGNQAQGILLSNFMVDGAAVIPKGLLLVTQLFTLLQLSAVGVVYLQPTNEVLEGLFSDAKQGQYAARNVVPRLVSRTVAVALATTVAAMLPFFGDMNSLIGAFXFLPLDFAVPALFYXVTX

SEQ ID NO: 844 - protein, 456 aa, Zea mays
  unsure (1)..(456): unsure at all Xaa locations
NSTQLPAARQPPSDTRRALAGLAAAEEKAIDDWLPINARRNAKWWYSAFHNVTAMVGAGVLGLPYAMSELGWGPGIAVLLLSWIITLYTLWQMVEMHEMVPGKXRFDRYHELGQHAFGERLGLXWIVVPQQLVVEVGGCIVFMVTGGRSLKKLHELVCDXCRPIRLTYFIMIFASCHLLLSQLPNFNSXISAVSLAAAVMSLSYSTIAWGASLHRGRREDVDYHLRATTTPGKVFGFLGGLGDVAFAYSGHNVVLEIQATIPSTPDKPSKKAMWKGAFVAYVVVAICYFPVTFVGYWAFGSGVDEKIFXITLSKPKWLIALANMMVVVHVIGSYQVYAMPVFDMIETVLVKKMRFAPSLTLRLIARSVYVAFTMFLGITFPFFGGLLSFFGGLAFAPTTYFLPCIMWLKVYKPKRFGLSWFINWICIVIGVLLLILGPIGGLRQIILSATTYKFYQ

SEQ ID NO: 845 - protein, 472 aa, Zea mays
  unsure (1)..(472): unsure at all Xaa locations
MAAVQPSVEMTTQQGPPAASYSPARDGGGGRSAEDEEKEKAAAIDNWLPISATRNAKWWYSAFHNVTAMVGAGVLGLPYAMSQLGWGAGITIMLLSWVITLYTLWQMVEMHEMVPGKRFDRYHELGQHAFGERLGLWIVVPQQLVVEVGVNIVYMVTGGTSLQKFHELVCGDAACEGGRKIRLTYFIMIFASCHFVLAQLPNFDSISRXVSLAAAVMSLSYSTIAWGASVSKGRVPDVDYGLRATTPPGKVFGFLGALGTVAFAYAGHNVVLEIQATMGGTPVMPSKKPMWKGVVVAYLVVALCYFPVSFVGYWAFGDSVDGDILVTLNRPRWLIALANMMVVIHVIGSYQIYAMPVFDMIETVLVKKLRFPTCLTLRFIARTVYVAFTMFIAITFPXFDGLLSFFGGFAFAPTTYFLPCIMWLAIYKPKRFSLSWFTNWICIILGVLLMVLAPIGGLRQIIISAKTYKFYQ

SEQ ID NO: 846 - protein, 453 aa, Zea mays
  unsure (1)..(453): unsure at all Xaa locations
MGTQAPENYPAEKEDARSAREKAIDDWLPITSSRNAKWWYSAFHNVAAMVGAGVLSLPYAMSELGWGPGIAVLVVSWVITLYTLWQMVEMHEMVPGXKRFDRYHELGQHAFGDRLGLXWIVVPQQLAVEVGVNIVYMXVTGGKXSLKKFPRRGCEGKDNIKLTFFIMTFXASVHFVLSQLPNFNSXSPGVSLAAAVMSLSYSTIAWGAGCTRGRMSGVDYHLRXATTTPGKVFGFFGALGDVAFAYAGHNVVLEIQATIPSTPDKPSKKPMWKGVVVAYVVVALCYFPVALIGYWAFGNTVEDNILITLSKPKWLIALANMMVVVHVIGSYQIYAMPVFDMIETVLVKKLRFPPGLTLRLIARTLYVAFTMFIAITFPFFGGLLGFFGGFAFAPTTYFLPCVMWLAIYKPKRFSLSWLTNWMCIILGVLLMILSPIGGLRQIIMEAKTYQFYS

SEQ ID NO: 847 - protein, 474 aa, Zea mays
  unsure (1)..(474): unsure at all Xaa locations
LRPLVKGSSEPPEGKPGAMGTQASPDYTPPKDERTAREKAIDDWLPITSSRKAKWWYSAFHNVTAMVGAGVLSLPYAMSELGWGPGIAVMTLSWIITVYTLWQMVEMHEMVPGKRFDRYHELGQHAFGDKLGLWIVVPQQLVVEVSLNIVYMVTGGNSLKKFHDVICDECKDIKLTYFIMVFASVHFVLSQLPDFHSISSVSLAAAVMSVGYSAIAWTASAAQGKAAEAEADYSLRATTMPGKVFGFLGALGDVAFTYAGHNVVLEIQATIPSTPGKPSKKPMWKGVIVAYVVIAACYLPVALVGYWAFGNGVDENIFPSLNRPRWLIAAANMMVVVHVVGSYQVYXAMPVFDMIETVLVRKYWFTPGFRLRLIARTVYVALTMFVAITFPFFSELAQFXFGGFAYAPTSYFLPCIMWLIIYKPRRFSLSWFTNWICIVIGVLLMVLSPIGGLRQMILKVKTYKFYQDYSGLKP

SEQ ID NO: 848 - protein, 330 aa, Zea mays
  unsure (1)..(330): unsure at all Xaa locations
XQKFAESAXARAARXLHRSYWICIFGSSQFLLSQLPNLDAITAVSFAAAAMSLCYSTISWAACVARGXGARGGYDAYKAGTGTGTAADSAFRVFSALGQVAFAYAGHGVVLEIQATIPSTPTKPSRAPMWKGTVAAYLVTAACYFPVAVAGYWAFGRDVGDNVLVALQRPPWLVAAANMMVVIHVVGSYQVYAMPMFESIETIMATRFRLPRGLLLRLVARSAYVAFTLFVAVTFPFFGDLLGFFGGFGFTPTSYFLPCVLWLKIKKPPRFSASWCANWGCIIVGVLLMLVSTIGGLRSIVQDASTFHKSSPSLVHAALPLHFVASLRVS

SEQ ID NO: 849 - protein, 471 aa, Zea mays
GLLQNIQLFPAANYLAAISSDPSAYVSIGRATEMATPSSMTSTEKEKAIDDWLPITSSRNAKWWYSAFHNVTAMVGAGVLSLPYAMSELGWGPGVVAMVLSWVITLYTLWQMVEMHECVPGKRFDRYHELGQHAFGDKLGLWIVVPQQLIVEIGVCIVYMVTGGKSFEKCYTVACPDCKPLRTSSWIMVFAAIHLLLSQLPNFNSITLVSLAAAVMSLTYSTIAWAASAHKGRHSAVDYSMKASTTTGQTFNFLSALGDVAFAYAGHNVVLEIQATIPSTPDKPSKKPMWQGVVLAYLVVAICYLPVAFVGYYVFGNAVDDNILITLEKPRWLIAAANIFVVVHVIGSYQIYAMPVFDMLETFLVKKLRFKPGMPLRLIARSLYVVLTALVGIAVPFFGGLLGFFGGFAFAPTTYYLPCILWLKIKKPKKFSLSWFINWFCIIVGVLLTVLAPIGGLRSIVVNASTYKFFS

SEQ ID NO: 850 - protein, 298 aa, Zea mays
  unsure (1)..(298): unsure at all Xaa locations
XGPSGRPGXDPYFXMIFASVHFVLSQLPNFNSISGVSLAAAVMSLSYSTIAWGASVHKGRMSGVDYHLRATTTPGKVFGFFGALGDVAFAYAGHNVVLEIQATIPSTPDKPSKKPMWKGVVVAYVVVALCYFPVALIGYWAFGNTVEDNILITLSKPKWLIALANMMVVVHVIGSYQIYAMPVFDMIETVLVKKLRFPPGLTLRLIARTLYVAFTMFIAITFPFFGGLLGFFGGFAFAPTTYFLPCVMWLAIYKPKRFSLSWLTNWICIILGVLLMILSPIGGLRQIIIDAKTYQFYS

SEQ ID NO: 851 - protein, 183 aa, Zea mays
  unsure (1)..(183): unsure at all Xaa locations
LSSIRHPQDIRESNHHKARRQCSAERERDQEEKEKGKEKQRDAASASSSWQDLPPRLQSYDNRAPLLLPVKIMDAAADDKQISDDTAHQISVDPWYQVGFVLTTGVNSAYVLGYSGSIMVPLGWIGGTCGLLLAAAISMYANALLARLHEVGGKRHIRYRDLAGHIYGPEIYGLTWALQYINX

SEQ ID NO: 852 - protein, 440 aa, Zea mays
  unsure (1)..(440): unsure at all Xaa locations
LPGPPPPLPLTSPIRYCSRLCASRPRVRLQPLPWDQPVRHSRRRPVRRDHGTTILRPSFPQSLLRPKGGVRRQTRRREGKAAGAGRTRSRRPXDDWLPINARRNAKWWYAAFHNVTAMVGAGVLTLPYAMSELGWGVGVTVLVLSWVITVYTLWQMVEMHECVPGKRFDRYHELGQHAFGEKLGLWIVVPQQLVVEVGLNIVYMITGGQSLQKFHDMVCHGRCRRIKLPYFIMVFASVHFVLSQLPDFHSISSVSLAAAVMSVGYSAIAWTASAAQGKAAEAEADYSLRATTTPGKVFGFLGALGDVAFTYAGHNVVLEIQATIPSTPGKPSKKPMWKGVIVAYVVIVACYLPVVLVGYWAFGNGVDENILITLNRPRWLIAAANMMVVVHVVGSYQVYAMPVFDMIETVLVRKYWFTPGFRLRLIARTVYVGNETPLSX

SEQ ID NO: 853 - protein, 531 aa, Zea mays
  unsure (1)..(531): unsure at all Xaa locations
XMPAATAMAMAAEGAASEPELVSIPATXXHGLSTPEGAATPTGAGGGGGGRSKGSGTPGRRVVEGLRGYLEDVGHLTRLDPRDAWLPVTESRGGNARYAAFHSLNAGLGFQALLLPLAFPDLGWSWGIISLTIAYFWQLYTLWILVKLHEAVPGRRYNRYVELAQAAFGEKMGMWLALFPTIYLSAGTATALILVGGETMKLFFQIVCGPLCSPNPITTVEWYLVFTSLAVILSQLPNLNSIAGLSLIGGATAIMYCTMSWVLSVSQPRPPTVSYDPVTSNSFGLSLFSILNALGIIAFAFRGHNLALEIQATMPSTFKHPAHVPMWRGAKVAYLLIAMCLFPVAVGGYWAYGNMVPPGGMLAALYAFHSHDISQGVLATTCLLVVLNCLSSFQIYSMPVFDSFEAYYTGRTNRPCSAWVRSGFRVFYGFLSLFISVALPFLSSLAGLLGGLTLPVTFAYPCFMWICVKKPERFSFSWYLNWGLGLLGTAFSLAFSLGGVWSIVNNGMKLKFFKPNXVHRLLACSNLHASY

SEQ ID NO: 854 - protein, 196 aa, Zea mays
  unsure (1)..(196): unsure at all Xaa locations
LHLVFXPFVWWCAQQKQIMYTSLAPHGPLKLYHFIIMVAVVLAFLSQLPSFHSLRHINFVSLLLSLGYTVLVAAACVRAGLSKNSPAKDYSLSSSKSEQSFDAFLSISILASVFGNGILPEIQATLAPPAAGKMMKALVLCYSVIVFTFFLSSITGYWAFGSNVQSNVLKSLMPDSGPALAPTWLLGVAVLFVLLQ

SEQ ID NO: 855 - protein, 514 aa, Zea mays
  unsure (1)..(514): unsure at all Xaa locations
MSSSREVMVLSDSEVQSAPPTPRPPPPVSAPPSQIHSPSPARSPLASPVRKAVAGVKAGCLEEEVGGHVTRLADPRDAWLPVTESRSGNAYYAAFHSLSSGIGFQALVLPTAFASLGWTWAIICLTLAFGWQLYTLWLLVRLHEPVAGATRYSRYMHLATTVFGDRWANILALLPVTYLSAGICTALIIVGGGSMKMLFGIAYGGSCLARPLTAVEWYLVFVCAAVVLSQLPNLNSIAGVSLVAAVAAVAYCTMIWAVSVARGRVAGVSYDPVHTPDDVDAALGVLNGLGIIAFAFRGHNVVLEIQGTMPSTLKHPSHVPMWKGVKVAYAIIALCLYPIAIGGFWAYGNQIPPNGILSALYKFHSRDASRLVLGVTTLLVIINCLTTFQIYAMPVYDNMEAGYVHKKNRPCPXWMRSGFRAFFGAVNLLVAVAMPFLSELAGLFGGISLPVTLAYPCFMWVAIKKPRKGTATWNVNWALGILGMSISLVLIVGNLWGLVEKGMRVKFFKPADFQ

SEQ ID NO: 856 - protein, 224 aa, Zea mays
  unsure (1)..(224): unsure at all Xaa locations
PPXLAQTYLNSIVXLQATLAPPAAGKMMKALVLCYSVIVFTFFLSSITGYWAFGSNVQSNVLKSLMPDSGPALAPTWLLGVAVLFVLLQLLAIGLVYSQVAYEIMEKGSADAARGRFSRRNLVPRLLLRTLYLAFCALMAAMLPFFGDIVGVVGAVGFVPLDFVLPVLMYNMALAPPRRSPVFIANAAVMVVFAGVGAIGAFATIRKLVLDADKFKLFSNNVVD

SEQ ID NO: 857 - protein, 359 aa, Zea mays
VRGDDDAARAASRQLFSGQGTSSVVVRHQSDSLDGGGGRSAEDEEKEKAAAIDNWLPISATRNAKWWYSAFHNVTAMVGAGVLGLPYAMSQLGWGAGITIMLLSWVITLYTLWQMVEMHEMVPGKRFDRYHELGQHAFGERLGLWIVVPQQLVVEVGVNIVYMVTGGTSLKKFHDTVCGDDDHRCKGRDIKLTYFIMIFASCHLVLSQLPNFHSISGVSLAAAVMSLCYSTIAWIASAQKGKSPDVHYGLRATTTPGKVFGFFGALGDVAFAYAGHNVVLEIQATIPSTPDKPSKKPMWKGVVVAYVVVAVCYFPASLVGYWAFGDGVDENILVTLRKPKWLIALANVMVVVHLIGSYQ

SEQ ID NO: 858 - protein, 278 aa, Zea mays
MVGTDIVYMVTGGQSLRKFHDLVCRQGGCGGGGGDIRLTFWIMIFASPHFVLSQLPNFNSLSAVSGAAAVMSLAYSMIAFSTSVAKGGRAADYGLRATTAPGQAFGMLSALGTVSFAYAAHNVVLEIQATIPSTPEAPSKKPMWRGVVAAYAVVALCYFSVAFAGYYAFGSSVDPNVLITLDRPRWLIAAANLMVVVHVIGGYQVFAMPMFDMIETVLVKRHGFAPGFWLRFVSRSAYVAATMFVGLTFPFFDGLLGFFGGFGFAPTTYFIDLLAWPA

SEQ ID NO: 859 - protein, 484 aa, Zea mays
MVSERQQAAGKVAAFNLTEAGFGDGSDLLDDDGRERRTGTLVTASAHIITAVIGSGVLSLAWAIAQLGWVIGPVVLLAFSAITWFCSSLLADCYRAPPGPGQGKRNYTYGQAVRSYLGESKYRLCSLAQYVNLVGVTIGYTITTAISMGAIKRSNCFHSRGHGADCEASNTTNMIIFAGIQILLSQLPNFHKLWWLSIVAAVMSLAYSSIGLGLSIAKIAGGGVHVKTSLTGAAVGVDVTAAEKVWKTFQSLGDIAFAYTYSNVLIEIQDTLRSSPPENVVMKKASFIGVSTTTAFYMLCGVLGYAAFGSDAPGNFLTGFGFYDPFWLIDVGNVCIAVHLVGAYQVFCQPIYQFVEAWARGRWPDCAFLHAELAVVAGSSFTASPFRLVWRTAYVVLTALVATVFPFFNDFLGLIGAVSFWPLTVYFPIQMYMAQAKTRRFSPAWTWMNVLSYACLFVSLLAAAGSVQGLVKDLKGYKPLFKVS

SEQ ID NO: 860 - protein, 529 aa, Zea mays
  unsure (1)..(529): unsure at all Xaa locations
MSSSKDAISEVESAQPSPRXXPPVSTPPSQIHSPAPGRSPLHAMASPLRAVASPLRAMATPLASPVRKAVAGVRECLEEVGHITRLADPRDAWLPITESRSGNAYYAAFHNLSSGIGFQALVLPTAFASLGWTWAIICLTLAFGWQLYXTLWLLVRLHEPVAGATRYSRYMHLATTVFGERWAKILALLPVMYLSAGICTALIIVGGGSMKLLFGIACGEPCPARPPTTVEWYLVFVCAAVLLSQLPNLNSIAGVSLVGATAAVAYCTMIWTVSVAKGRVPAVSYDPVKAPSDVDGALAILNGLGIIAFAFRGHNVVLEIQGTMPSTLKHPSHVPMWKGVKVAYAIIALCLYPVAIGGFWAYGNQIPPNGILSALYKFHSRDTSRLVLGVTTTLVIVNCLTTFQIYAMPVYDNMEAGYVHKKNRPCPWWMRSGFRAFFGAVNFLIAVALPFLSQLAGLLGGISLPVTLAYPCFMWVAIKKPRKGTATWNVNWALGILGMSISLVLIVGNLWGLVEKGLRVKFFKPADSQ

SEQ ID NO: 861 - protein, 550 aa, Zea mays
  unsure (1)..(550): unsure at all Xaa locations
PINNTTLASPSLLSYLASTGREKKKMVASKAAPFDEVSSVEAGAYGGRDDDGRPRRTGTVWTASAHIITAVIGSGVLSLAWAIAQLGWAAGPAVMLLFAVVIYYTSTLLAECYRSGDPVAGKRNYTYMDAVRASLGGAKVRLCGAIQYANLFGVAIGYTIAASISMLAIKRADCFHAKGHKHACRSSSNPYMILFGVAEVVFSQIPDFDQIWWLSIVAAVMSFTYATIGLVLGIMQTVANGGFQGSLTGISIGAGVTPTEKVWRSLQAFGNIAFAYSYSIILIEIQDTVKAPPPSEAKVMKRATMVSVATTTVFYMLCGCMGYAAFGDAAPDNLLTGFGFYEPFWLLDIANVAIVVHLVGAYQVFCQPLFAFVEKWAAATWPDSAFIAREFRVGPFAXXSLFRLTWRTAFVCLTTVAAMLLPFFGDVVGLLGAVSFWPLTVYFPIEMYVVQRAVRRWSTHWICLQMLSAACLLVSVAAAAGSIADVIGALKVYRPFSSXFLLLWMCWGLDWVWTYVHAAFIALRSTVVNKGGRRCRCSVRCLHGGPYRNK

SEQ ID NO: 862 - protein, 133 aa, Zea mays
  unsure (1)..(133): unsure at all Xaa locations
QPVIALHIFASPMYGFLDTQYGSGRGGPFEIPNVGFRVAVRGGSLPVASLVAPVLPFLGAFMSLXGAFSPFPLTFVLAGPMCLLVKGPKLGAIPESWLWLDVFGFPALAVAPAVSPIRLLLRDSRPSPFFVDL

SEQ ID NO: 863 - protein, 551 aa, Zea mays
  unsure (1)..(551): unsure at all Xaa locations
MDVDMQARAGRDSLSSLETHHRTPRSADSFAAAPAIVTHRCVERSQRARSSHRAACACVQIERETCRSRERDEQRERFMVGAMRGGAMELEDRLATLPRFRGDHDDDGKERRTGTVWTATAHIITAVIGSGVLSLAWAMAQLGWVAGPLTLVLFAAITFYTCGLLADCYRVGDPVTGKRNYTYTEAVKSNLGGWYVWFCGFCQYVNMFGTGIGYTITASISAAAINKSNCFHWHGHDADCSQNTSAYIIGFGXVVQVIFSQLHNFHKLWWLSIIAAIMSFSYSAIAVGLSLAQIVMGPTGKTTMTGTLVGVDVDAAQKVWMTFQALGNVAFAYSYAIILIEIQDTLRSPPAENKTMRRATMMGISTTTGFYMLCGCLGYAAFGNAASGNILTGFGFYEPFWLVDFANACIVVHLVGGFQVFCQPLFAAVEGAVAARYPGXDARVRRRGXLNVFRLVWRTAFVAVITLLAILMPFFNSILGILGSIAFWPLTVFFPVEMYIRQRQVRRFSTKWIALQSLSFVCFLVTAASCAASVQGVVDSLKTYVPFKTRS

SEQ ID NO: 864 - protein, 486 aa, Zea mays
MTQQDVEMAARHGTGARGPGLGPRLENGAGGETLDDDGKKKRTGTVWTASAHIITAVIGSGVLSLAWSTAQLGWVVGPLTLMIFALITYYTSSLLADCYRSGDQLTGKRNYTYMDAVAAYLGRWQVLSCGVFQYVNLVGTAVGYTITASISAAAVHKANCFHNKGHAADCSTYDTMYMVVFGIVQIFFSQLPNFSDLSWLSIVAAIMSFSYSSIAVGLSLARTISGRSGTTTLTGTEIGVDVDSAQKVWLALQALGNIAFAYSYSMILIEIQDTVKSPPAENKTMKKATLMGVTTTTAFYMLAGCLGYSAFGNAAPGNILTGFGFYEPYWLIDFANVCIVVHLVGAYQVFSQPIFAALETAAAKRWPNARFVTREHPLVAGRFHVNLLRLTWRTAFVVVSTVLAIVLPFFNDILGFLGAIGFWPLTVYYPVEMYIRQRRIQKYTSRWVALQLLSFLCFLVSLASAVASIEGVTESLKHYVPFKTKS

SEQ ID NO: 865 - protein, 194 aa, Zea mays
  unsure (1)..(194): unsure at all Xaa locations
LLLSQLPNFNSISAVSIAAAVMSLSYSTIAWGASVHKGKLPDVDYEVLAAAATASEKALSYMAALGDVAFAYAGHNVVLEIQATIPSTPETPSKKPMWRGVVVAYAMVAACYFPVSLLGYWAFGNQVDDNVLVTLSKPRWLIALANAMVVVHVIGSYQIFAMPVFDMMETVLVKKLHFPPGLALRLIARSTYVX

SEQ ID NO: 866 - protein, 467 aa, Zea mays
MDKSAVADDVERGDYEEEHERRGTVWTATAHIVTAVIGSGVLALAWSVAQLGWVAGTLALAGFACVTYYTSTLLANAYRAPHPVTGDRNRTYMDAVRSYLSPREVFMCGIAQYVNLWGTMVGYTITATISMAAIRQSNCFRRSGAGAQCDAPGTVLMLAFGVVQVVLSQFPGLEHITWLSVVAAVMSFAYSFIGLGLSVGQWVSHGGGLGGRIAGAAAASPTRKLWNVLLALGNIAFAYTFAEVLIEIQDTLKSPPPENRTMKKAAMYGIGATTIFYISVGCAGYAAFGSDAPGNILTAGGLGPFWLVDIANMCLILHLIGAYQVYAQPIFASVERWAASRWPEAKFISSAYTVSIPLMQRGSVTVAPYKLVLRTVLVAATTVVALMIPFFNAVLGLLGAFSFWPLTVYFPISMHIAQDKITRGTKWYLLQALSMVCLMISVAVGIGSVTDIVDSLKVSSNPLKTVS

SEQ ID NO: 867 - protein, 455 aa, Zea mays
  unsure (1)..(455): unsure at all Xaa locations
MTQQDVEMAARHGTGADGAGFYPQPRNGGGGETLDDDGKKKRTGTVWTASAHIITAVIGSGVLSLAWSTAQLGWVVGPLTLMIFALITYYTSSLLADCYRSGDQLTGKRNYTYMDAVAAYLGRWQVLSCGVFQYVNLVGTAVGYTITASISAAAVHKANCFHNKGHAADCSTYDTMYMVVFGIVQIFFSQLPNFSDLSWLSIVAAIMSFSYSSIAVGLSLARTISGRSGTTTLTGTEIGVDVDSAQKVWLALQALGNIAFAYSYSMILIEIQDTVKSPPAENKTMKKATLMGVTTTTAFYMLAGCLGYSAFGNAAPGNILTGFGFYEPYWLIDFANVCIVVHLVGAYQVFSQPIFAALETAALKRWPNDRFVTREHPLVXXVRFHVSLLRLTWRTAFVVVSTVLAIALPFFNDILGFLGDIEFWPLTLDYPVXMDIPEGPERKYTWRGXGGVRWX

SEQ ID NO: 868 - protein, 484 aa, Zea mays; identical to SEQ ID NO: 355

SEQ ID NO: 869 - protein, 484 aa, Zea mays; identical to SEQ ID NO: 355

SEQ ID NO: 870 - protein, 484 aa, Zea mays; identical to SEQ ID NO: 355

SEQ ID NO: 871 - protein, 523 aa, Zea mays
  unsure (1)..(523): unsure at all Xaa locations
GCTLGGHRPRVRGRVGGRVGGRVGAPRARRTLLLLHLPSSRTGVWSEASEREVATERPQRDVQIERETNRESDSWXDDDGKERRTGTVWTATAHIITAVIGSGVLSLAWAMAQLGWVAGPLTLVLFAAITFYTCGLLADCYRVGDPVTGKRNYTYTEAVKSNLGGWYVWFCGFCQYVNMFGTGIGYTITASISAAAINKSNCFHWHGHDADCSQNTSAYIIGFGVVQVIFSQLHNFHKLWWLSIIAAIMSFSYSAIAVGLSLAQIVMGPTGKTTMTGTLVGVDVDAAQKVWMTFQALGNVAFAYSYAIILIEIQDTLRSPPAENKTMRRATMMGISTTTGFYMLCGCLGYAAFGNAASGNILTGFGFYEPFWLVDFANACIVVHLVGGFQVFCQPLFAGQRGRRXAARYPGXDARVRRRGXLNVFRLVWRTAFVAVITLLAILMPFFNSILGILGSIAFWPLTVFFPVEMYIRQRQVRRFSTKWIALQSLSFVCFLVTAASCAASVQGVVDSLKTYVPFKTRS

SEQ ID NO: 872 - protein, 533 aa, Zea mays
  unsure (1)..(533): unsure at all Xaa locations
MAVSHNVGSKHGVAPLEVSVEAGNGGAAEWLDDDGRPRRTGTFWTASAHIVTAVIGSGVLSLAWAIAQLGWVAGPAAMLLFAFVTYYTATLLAECYRTGDPDTGKRNYTYMDAVRSNLGGAKVAFCGAIQYANLVGVAIGYTIASSISMQAVSRAGCFHKRGHAVPCKSSSNPYMILFGAVQILFSQIPDFDQIWWLSIVAAVMSFTYSAIGLSLGIAQTVANGGFKGSLTGISIGADVTSTQKVWHSLQAFGDIAFAYSFSNILIEIQDTIKAPPPSESKVMQKATRLSVATTTIFYMLCGCMGYAAFGDKAPDNLLTGFGFFEPFWLIDVANVAIVVHLVGAYQVFCQPIFAFVERRAAAAWPDSAFVSRELRVGPLAXXSVFRLTWRSAFVCVTTVVAMLLPFFGNVVGFLGAVSFWPLTVYFPVEMYIKQRRVPRGSTKWVCLQTLSVACLVVSIAAAAGSIADVIEALKVYHPFSSXFLLLWMCWVGPGLAWVWTYVHAAFIALRSTVVNKGGRQMQMQCEMFAWRPL

SEQ ID NO: 873 - protein, 502 aa, Zea mays
  unsure (1)..(502): unsure at all Xaa locations
DPLERPRRTGTFWTASAHIITAVIGSGVLSLAWAIAQLGWVAGPAAMLLFAFVTYYTATLLAECYRTGDPDTGKRNYTYMDAVRSNLGGAKVAFCGAIQYANLVGVAIGYTIASSISMQAVSRAGCFHKRGHAVPCKSSSNPYMILFGAVQILFSQIPDFDQIWWLSIVAAVMSFTYSAIGLSLGIAQTVANGGFKGSLTGISIGADVTSTQKVWHSLQAFGDIAFAYSFSNILIEIQDTIKAPPPSESKVMQKATRLSVATTTIFYMLCGCMGYAAFGDKAPDNLLTGFGFFEPFWLIDVANVAIVVHLVGAYQVFCQPIFAFVERRAAAAWPDSAFVARELRVGPLAXXSVFRLTWRSAFVCATTVVAMLLPFFGNVVGFLGAVSFWPLTVYFPVEMYIKQRRVPRGSTKWVCLQTLSVACLVVSIAAAAGSIADVIEALKVYHPFSSXFLLLWMCWVGPGLAWVWTYVHAAFIALRSTVVNKGGRRMQMQCEMFAWRPL

SEQ ID NO: 874 - protein, 538 aa, Zea mays
  unsure (1)..(538): unsure at all Xaa locations
CVKYLLQYISGSLCVRALTAAEPHSCSCAVYLSLVVLCRPSYCGREKGVCRPAAKHCYPXPAAMEVSSVEFGHHAAAASKCFDDDGRLKRTGTMWTASAHIITAVIGSGVLSLAWAIAQLGWVAGPTVMLLFSFVTYYTSALLADCYRSGDACTGKRNYTYMDAVNANLSGVKVWFCGFLQYANIVGVAIGYTIAASISMLAIQRANCFHVEGHGDPCNISSTPYMIIFGVVQIFFSQIPDFDQISWLSILAAVMSFTYSTIGLGLGIAQVVSNKGVQGSLTGISVGLVTPVDKMWRSLQAFGDIAFAYSYSLILIEIQDTIRAPPPSESKVMRRATVVSVAVTTFFYMLCGCMGYAAFGDNAPGNLLTGFGFYEPFWLLDVANAAIAVHLVGAYQVYCQPLFAFVEKWARQRWPKSRYITGEVDVPLPPGGRCYKLSLFRLTWRTAFVVATTVVSMLLPFFNDVVGLLGALGFWPLTVYFPVEMYIVQKKVPRWSTRWVCLQLLSVACLVITVASAAGSVAGIVSDLKVYKPFVTTS

SEQ ID NO: 875 - protein, 440 aa, Avicennia marina
SAPAHSGCDRGLCSDDHVAVEIPDTAHQISQDSWFQVGLVLTNGVNSAYVLGYSGAIMVPLGWLGGVVGLILATAISLYANALVAELHEFGGRRHIRYRDLAGFIYGRAAYNLTWGLQYVNLFMINVGYIILAGNALKAMYVLLLDDHLIKLPHFIGIAGLACGLFAMAVPHLSAMRVWLVFSTLFSLVYIVIAFALSLKDGVEAPPRDYSIMATTASRIFTAIGASANLVFAFNTGMVPEIQATVRPPVIGNMMKGLYFQFTAGVLPMYALTFIGYWAYGFEASTYLLSNVHGPVWLKAVANVSAFLQSIIALHIFASPMYEYLDTRYGIKGSALAFSNLCFRVVVRGSYLGMTTFVSALLPFLDDFMSLTGALSTFPLTFILANHMYLVAKKHELTSLQKSWHWFIVCFFGCMSVAAAAAGLRLIVVDSSHYHVFADL

SEQ ID NO: 876 - protein, 466 aa, Arabidopsis thaliana
  unsure (1)..(466): unsure at all Xaa locations
MDVPRPAFKCFDDDGRLKRSGTVWTASAHIITAVIGSGVLSLAWAIGQLGWIAGPTVMXLFSFVTYYSSTLLSDCYRTGDPVSGKRNYTYMDAVRSILGGFRFKICGLIQYLNLFGITVGYTIAASISMMAIKRSNCFHESGGKNPCHMSSNPYMIMFGVTEILLSQIKDFDQIWWLSIVAAIMSFTYSAIGLALGIIQVAANGVVKGSLTGISIGAVTXTQKIWRTFQALGDIAFAYSYSVVLIEIQDTVRSPPAESKTMKIATRISIAVTTTFYMLCGCMGYAAFGDKAPGNLLTGFGFYNPFWLLDVANAAIVIHLVGAYQVFAQPIFAFIEKQAAARFPDSDLVTKEYEIRIPGFRSPYKVNVFRAVYRSGFVVLTTVISMLMPFFNDVVGILGALGFWPLTVYFPVEMYIRQRKVERWSMKWVCLQMLSCGCLMITLVAGVGSIAGVMLDLKVXKPFKTTY

SEQ ID NO: 877 - protein, 261 aa, Vicia faba
AHIITAVIGSGVLSLAWAIAQLGWIAGPSMMLLFSFVTYYTSTLLSACYRTGDQLNGKRNYTYTDAVRAYLGGFKVKICGLVQYVNLFGVAIGYTIAASISMMAIKRSNCFHSSGGKDPCHMNGNLYMISFGIVEIFFSQIPDFDQLWWLSTLAAVMSFTYSTIGLGLGVGKVIENKGIKGSLTGITVGTVTQTQKVGRSFQALGNIAFAYSYSMILIEIQDTIKSPPSESKTMKAATLISVVVTTIFYMLCGCLGYAAFG

SEQ ID NO: 878 - protein, 471 aa, Lycopersicon esculentum
MADKPHQVFEVYGESKCFDDDGRIKRTGSVWTASAHIITAVIGSGVLSLAWATAQLGWVAGPTVLLLFSFVTYYTSALLSDCYRTGDPVTGKRNYTYMDAVRANLGGFQVKICGVIQYANLFGVAIGYTIASSISMVAVNRSNCFHKQGHHAACNVSSTPYMIMFGVMEIIFSQIPDFDQISWLSIVAAVMSFTYSTIGLGLGVAQVAETGKIEGSLTGISIGTEVTEMQKIWRSFQALGAIAFAYSYSLILIEIQDTLKSPPAEAKTMKRATLISVAVTTVFYMLCGCFGYAAFGDQSPGNLLTGFGFYNPYWLLDIANIAMVVHLVGAYQVYCQPLFAFVEKTAAEWYPDSKIITKEIDVPIPGFKPFKLNLFRLVWRAIFVIITTVISMLMPFFNDVVGILGAFGFWPLTVYFPVEMYIVQKRITKWSARWICLQILSGACLVISIAAAAGSFAGVVSDLKVYRPFQS

SEQ ID NO: 879 - protein, 467 aa, Zea mays
MAVSHNVGSKHGVAPLEVSVEAGNGGAAEWLDDDGRPRRTGTFWTASAHIVTAVIGSGVLSLAWAIAQLGWVAGPAAMLLFAFVTYYTATLLAECYRTGDPETGKRNYTYMDAVRSNLGGAKVAFCGVIQYANLVGVAIGYTIAASISMKAVRRAGCFHAHGHADPCNSSSTPYMILFGVVQILFSQIPDFDQIWWLSIVAAVMSFTYSSIGLSLGIAQTISNGGFMGSLTGISIGAGVTSTQKIWHTLQAFGDIAFAYSFSNILIEIQDTIKAPPPSESKVMQKATRLSVATTTIFYMLCGCMGYAAFGDKAPDNLLTGFGFFEPFWLIDIANVAIVVHLVGAYQVFCQPIFAFVERRAAAAWPDSAFVSQELRVGPFAVSVFRLTWRSSFVCVTTVVAMLLPFFGNVVGFLGAVSFWPLTVYFPVEMYIKQRRVPRGSTKWICLQTLSVSCLLVSVAAAASELVD

SEQ ID NO: 880 - protein, 562 aa, Zea mays
  unsure (1)..(562): unsure at all Xaa locations
MAPAPHNGVNNNHPVVPMEVSVEAGNAGAAEWLDDDGRPRRSGTFWTASAHIITAVIGSGVLSLAWAIAQLGWVAGPAAMXLLFAFVTYYTATLLAECYRTGXDPDTGKRNYTYMDAVRSNLGGAKVAFCGAIQYANLVGVAIGYTIASSISMQAVSRAGCFHKRGHAVPCKSSSNPYMILFGAVQILFSQIPDFDQIWWLSIVAAVMSFTYSAIGLSLGIAQTVANGGFKGSLTGISIGXADVTSTQKVWHSLQAFGDIAFAYSFSNILIEIQDTIKXRRPPSESKVMQKATRLSVATTTIFYMLCGCMGYAAFGDKAPDNLLTGFGFFEPFWLIDVANVAIVVHLVGAYQVFCQPIFAFVERRAAAAWPDSAFVARELRVGAXXALSVFRLTWRSAFVCVTTVVAMLLPFFGNVVGFLGAVSFWPLTVYFPVEMYIKQRRVPRGSTKWVCLQTLSVACLVVSIAAAAGSIADVIEALKVYHPFSSXFLLLWLCWGLDWPGFGRMCMQHSLRCVQLWSTREGDGCRCLHGGPYRTSERFRRPCAHAGRIPCKNTRGGARMA

SEQ ID NO: 881 - protein, 548 aa, Zea mays
  unsure (1)..(548): unsure at all Xaa locations
QARSTREHLLPALFRSDGPTRKKKFDSREGGRELVGSVGHGTRAAQRSEQQPPGRAHGGVGGGREXAGAAEWLDDDGRPRRSGTFWTASAHIITAVFGSGVLSLAWAIAQLGWVAGPAAMLLFAFVTYYTAALLAECYRTGHPETGKRNYTYMDAVRSNLGGVKVVFCGVIQYANLVGVAIGYTIASAISMKAVRRAGCFHAHGHADPCKSSSTPYMVLFGGVQILFSQIPDFDQIWWLSIVAAVMSFTYSSIGLSLGIAQTVSNGGFKGSLTGISIGAGVTSTQKIWHTLQAFGDIAFAYSFSNILIEIQDTIKAPPPSESKVMQKATRLSVATTTVFYMLCGCMGYXAAFGDNAPDNLLTGFGFYEPFWXLLDVANVAXIVVHLVGAYQVFCQPIFAFVERRAAAAWPDSAFVSRELRVGPFSXXSVFRLTWRSAFVCVTTVVAMLLPFFGDVVGLLGAVSFWPLTVYFPVEMYIKQLRVPRGSTKWICLQTLSVSCLLVSVAAAAGSIADVIAALKVYKPFSGXLRRQKVGGIYAKTIADTVLLH

SEQ ID NO: 882 - protein, 80 aa, Nicotiana tabacum
GIPFPFFGGLLGFFGGFAFAPTTYFLPCIMWLAIYKPRRWSLSWIANWICIIFGVLLMVLAPIGGLRSIIVQAQTYKFYN

SEQ ID NO: 883 - protein, 128 aa, Triticum aestivum
  unsure (1)..(128): unsure at all Xaa locations
XVIGSYQIYAMPVFDMLETFLVKKLRFKPGWPLRLIARSLYVAFTMLVGIAIPFFGGLLGFFGGFAFAPTTYFLPCIMWLAIKKPARFSMSWCINWICIIIGVLLSVLAPIGGLRSIIINYKTYQFFS

SEQ ID NO: 884 - protein, 156 aa, Triticum aestivum
  unsure (1)..(156): unsure at all Xaa locations
MGTQAAENFEPPAKDVRTDEQKKIDDWLPITSSRNAKWWYSAFHNVTAMVGAGXVLSLPYAMSELGWGPGIAVLGISWGXITLYTLWQMVXEMHQMVPGKPSHRYHELGQHAFGDKLGLWIXVVPQQLIVEVGVNIVYMVTGGRSLKKFHDVICDX

SEQ ID NO: 885 - protein, 145 aa, Triticum aestivum
  unsure (1)..(145): unsure at all Xaa locations
LVSIHPSPLRYLERSRSPERRSDRTGSDRVAMAMNTSKAATSDKQLQDIDDWLPITSSRNAKWWYSAFHNVTAMVGAGVLSLPYAMSELGWGPGVAAMILSWAITLYTLWQMVEMHECVXGKRFDRYHELGQHAFGQKLGXWIVV

SEQ ID NO: 886 - protein, 122 aa, Triticum aestivum
  unsure (1)..(122): unsure at all Xaa locations
XIYAMPVFDMIETVLVKKLKFPPGLTLRLIARTLYVAFTMFVAITFPFFGGLLGFFGGFAFAPTTYFLPCIMWLAIYKPKRFSLSWFTNWVCIVLGVCLMILSPIGGLRQIILDSKTYKFYS

SEQ ID NO: 887 - protein, 102 aa, Triticum aestivum
FKPGWPLRLIARSLYVAFTMLVGIAIPFFGGLLGFFGGFAFAPTTYFLPCIMWLAIKKPSRFSMSWCINWICIIIGMLLSVLAPIGGLRSIIINYKTYQFFS

SEQ ID NO: 888 - protein, 507 aa, Anopheles gambiae str. PEST
RAAHTQTLLPYLRHRIGSSQVKRSQEETQPYTMTVDKGHTNTAFVGDEAINGKKPPQAKTIDPNMYTLEIQEKKPGLETEYDPFQHRLVEHPTTNNETLIHLLKGSLGTGILAMPNAFHHAGWTVGVVGTLLIGLLCTYCIHLLIKAEYELCKRKRVPSLNYPAVTQTALLEGPDALKPLSKIIIHVVNVFLLIYQLGTCCVYVVFVSSNIKAIADYYTETDTDVRLYMLIILLPLILINWVRNLKFLAPFSTIANFVTLVSFGIILYYIFREPISFENRDQVGTMSGFALFFGTVLFALEAIGVILPLENEMKTPKKFGGNFGVLNKAMILIVTLYVGMGFFGYLNYGSAIKGSITLNLPEEEILAQCVKGMLAFAIYITHGLACYVAIDITWNDYLKKNLGDSPRSVFYEYIARTVLVLITFLLAVAIPNLELFISLFGALCLSALGIAFPALIETCTYWHYRKGMAKVWMVVRNSVIGVVAILGLVIGTSTSMIEIIHTFGHDD

SEQ ID NO: 889 - protein, 491 aa, Anopheles gambiae str. PEST
MKNEREPLLGHAADGGSNGSGLDVAEHQRLLARPDLRSSPENMIVDPSNDTDSLVSKEDPTYGSSSGEPYEPSMHRTLEHPTTNLDTMIHLLKGNIGTGILAMPDAFKHAGLYVGLFGTLFMGAVCTHCMHMLVNCSHELCRRLQVPSLSFADVCQRAFESGPIGLRRYSKLATNLINMFLVITQLGFCCVYFVFVAANLREVIAHYFFDLHTRIYLLLLLIPMVLLNLVKNLKYLTPISLIAALLTVTGLSCTFYYMLQDLPNTHTVKPYSSWAQLPLYFGTAIYAFEGIGMVLPLENNMKTPEDFGGWSGVLNTGMVIVACLYTAVGFFGYLKYGDSVKGSITLNLPGDEFIAQLVRIMMALAIFFSYSLQFFVPMSILNPHIRRRLHTEQSRLIGEYLARVSLVVFTFILAAMIPNLGAVISLVGAVSSSTLALIFPPLIEIVTFWPDKLGRHYWVLWKDIAIMVFGILGFIFGTYTSVAQILNPDLV

SEQ ID NO: 890 - protein, 489 aa, Cucumis sativus
MLGQKQAEEAIVPTTANEVEHGGGKEEGEEADGGEQPQNSVFQMKNLLWHGGSAWDAWFSCASNQVAQVLLTLPYSFAQFGMLSGIIFQIFYGLIGSWTAYLISVLYIEYRSRKEKENVNFKNHVIQWFEVLDGLLGPHWKALGLAFNCTFLLFGSVIQLIGCASNIYYINDHLDKRTWTYIFGACCATTVFIPSFHNYRIWSFLGLGMTTYTAWYLAARALIHGQTEGVTHSGPTKLVLYFTGATNILYTFGGHAVTVTVEIMQSDVETQKFKYIYLMATLYVFTLTLPSASAVYWAFGDELLNHSNAFSLLPKNRFRDAAVILMLIHQFITFGFACTPLYFVWEKVIGMHDTKSLCLRALVRLPVVVPIWFLAIIFPFLGPINSAVGALLVSFTVYIIPAAAHMLTYRKASAKQNAAEKPPFFLPSWTAMYVLNSFIVVWIFVFGFGFGGWATITNFVRQINSFGLFAKCYQCKPSHPPAPPPTHRH

SEQ ID NO: 891 - protein, 484 aa, Medicago truncatula
MLPQKQGEEAIVSSFNETDQQEGVVGREEEVEDHSFSVKNFLWHGGSVWDAWFSCASNQVAQVLLTLPYSFSQLGMLSGILLQVFYGILGSWTAYLISVLYVEYRSRKEKENVNFKNHVIQWFEVLDGLLGPYWKALGLAFNCTFLLFGSVIQLIACASNIYYINDNLDKRTWTYIFGACCATTVFIPSFHNYRIWSFLGLGMTTYTAWYLTIASIVHGQAENVTHTGPKKLVLYFTGATNILYTFGGHAVTVEIMHAMWKPQKFKYIYLMATLYVFTLTIPSATAVYWAFGDELLNHSNAFSLLPKNGWRDGAVILMLIHQFITFGFACTPLYFVWEKVIGMHDTRSICLRALARLPVVIPIWFLAIIFPFFGPINSAVGALLVSFTVYIIPSAAHMLTYRKASARKNAAEKPPFFMPSWTAMYIFNAFIVIWVLVVGFGFGGWASMTNFIRQIDTFGLFAKCYQCKPPPVMAAAPPPHALHH

SEQ ID NO: 892 - protein, 479 aa, Medicago truncatula
MLSEKQGEETMMSSLNETIELNEEREEEKGASPGSGFKNFLWHGGSVYDAWFSCASNQVAQVLLTLPYSFSQLGMISGIIFQVFYGLMGSWTAYLISILYVEYRSRKEKENVSFKNHVIQWFEVLEGLLGPYWKAIGLAFNCTFLLFGSVIQLIACASNIYYINDHLDKRTWTYIFGACCATTVFIPSFHNYRIWSFLGLGMTTYTAWYMTIAAIVHGQVENVVHSGPKKMVWYFTGATNILYTFGGHAVTVEIMHAMWKPQKFKAIYFFATLYVFTLTLPSAIAVYWAFGDQLLDHSNAFSLLPRNAWRDAGVILMLIHQFITFGFACTPLYFVWEKVIGMHDTKSIFLRALARLPVVIPIWFLAIIFPFFGPINSAVGALLVSFTVYVIPASAHMLTYRSASARQNAAEKLPKVIPSWTLMYVINAFVVIWVTIVGFGFGGWASMTNFIKQVDTFGLFAKCYQCPPKLPASNHTMHH

SEQ ID NO: 893 - protein, 482 aa, Medicago truncatula
MLSQNQAEEAIVTNMNETEQEGGSSLEEIAEDQSMFNFKSFLWHGGSVWDAWFSCASNQVAQVLLTLPYSFSQLGMVSGIVFQIFYGLIGSWTAYLISVLYVEYRARKEKENVNFKNHVIQWFEVLDGLLGRYWKALGLAFNCTFLLFGSVIQLIACASNIYYINDKLDKRTWTYIFGACCATTVFIPSFHNYRIWSFLGLGMTTYTAWYMAIAAIVNGQIENVVHSGPTKLVLYFTGATNILYTFGGHAVTVEIMHAMWKPQKFKYIYFLATLYVFTLTIPSAVAVYWAFGDELLNHSNAFSLLPKNGFRDAAVILMLIHQFITFGFACTPLYFVWEKVIGMHDTKSICLRALVRLPVVIPIWFLAIIFPFFGPINSAVGALLVTFTVYIIPALAHMLTYRTASARKNAVEKPPSFLPSWTAVYVLNAFIVVWVLVVGFGFGGWASMTNFIRQIDTFGLFAKCYQCKPPTPPQAPSPHARH

SEQ ID NO: 894 - protein, 473 aa, Populus tremula x Populus tremuloides
MSNQKHGEEAMVSSFNDTEHEEKEEVSKDESGFRLKSLLWHGGSVYDAWFSCASNQVAQVLLTLPYSFSQMGMLSGIILQIFYGFLGSWTAYLISVLYVEYRSRKEKENVNFKNHVIQWFEVLDGLLGPTWKAVGLAFNCTFLLFGSVIQLIACASNIYYIDDKFDKRTWTYIFGACCATTVFIPSFHNYRIWSFLGLGMTTYTAWYMTIASLVHGQVDGVTHSGPAKAVLYFTGATNILYTFGGHAVTVEIMHAMWKPQRFKYIYLLATLYVFTLTLPSAAATYWAFGDQLLTHSNAFSLLPRTGWRDAAVILMLIHQFITFGFACTPLYFVWEKVIGMHDTKSILLRALCRLPVVIPIWFFAIIFPFFGPINSAVGALLVTFTVYIIPALAHMLTYRSASARQNAVEKPPVFLPSWTAMYVLNAFIVVWVLVVGFGLGGWASMSNFIKQVDTFGLFAKCCQCPRSAAAKHH

SEQ ID NO: 895 - protein, 465 aa, Drosophila melanogaster
MPVMTKNGHSNSAYVADHPDKLELAEKGQKNKAVVAKDPDYNPYHHRDVEHPTTNSETLFHLLKGSLGTGILAMPNAFRNSGYITGSIGTIVIGFICTFCIHQLVKAQYELCRRKKMPSMNYPMVAETAMGEGPKCFRVFAPYIGTVVNTFLLIYQLGTCCVYVVFVASNIKAIVDAVADTSIDVRLCMIIILLPLILINWVRNLKYLAPFSTLANAITMVSFGIICYYIFREPVTTEGKDAFGKPSNFPLFFGTVLFALEAIGVILPLENEMKTPQKFGGSCGVLNVSMVLIVFLYVGMGLFGYLNYGSAVLGSITLNMPEHEVLSMCVKGMLAFAIYITHGLACYVAIDITWNDYVAKRLGAQRNALFWEYAVRTGLVLITFLLAVAIPNLELFISLFGALCLSALGLAFPALIQICTHWYNTKGFAKVWLVLSNFVLIIVGILGLVIGTYTSLKEIVLTFSE

SEQ ID NO: 896 - protein, 462 aa, Drosophila melanogaster
MTKNGHSNSAYVADHPDKLELAEKGQKNKAVVAKDPDYNPYHHRDVEHPTTNSETLFHLLKGSLGTGILAMPNAFRNSGYITGSIGTIVIGFICTFCIHQLVKAQYELCRRKKMPSMNYPMVAETAMGEGPKCFRVFAPYIGTVVNTFLLIYQLGTCCVYVVFVASNIKAIVDAVADTSIDVRLCMIIILLPLILINWVRNLKYLAPFSTLANAITMVSFGIICYYIFREPVTTEGKDAFGKPSNFPLFFGTVLFALEAIGVILPLENEMKTPQKFGGSCGVLNVSMVLIVFLYVGMGLFGYLNYGSAVLGSITLNMPEHEVLSMCVKGMLAFAIYITHGLACYVAIDITWNDYVAKRLGAQRNALFWEYAVRTGLVLITFLLAVAIPNLELFISLFGALCLSALGLAFPALIQICTHWYNTKGFAKVWLVLSNFVLIIVGILGLVIGTYTSLKEIVLTFSE

SEQ ID NO: 897 - protein, 221 aa, Mus musculus
MEAGGVADSFLSSACVLFTLGMFSTGLSDLRHMQRTRSVDNIQFLPFLTTDVNNLSWLSYGVLKGDGTLIIVNSVGAVLQTLYILAYLHYSPQKHGVLLQTATLLAVLLLGYGYFWLLVPDLEARLQQLGLFCSVFTISMYLSPLADLAKIVQTKSTQRLSFSLTIATLFCSASWSIYGFRLRDPYIAVPNLPGILTSLIRLGLFCKYPPEQDRKYRLLQT

SEQ ID NO: 898 - protein, 221 aa, Mus musculus
MEAGGVADSFLSSACVLFTLGMFSTGLSDLRHMQRTRSVDNIQFLPFLTTDVNNLSWLSYGVLKGDGTLIIVNSVGAVLQTLYILAYLHYSPQKHGVLLQTATLLAVLLLGYGYFWLLVPDLEARLQQLGLFCSVFTISMYLSPLADLAKIVQTKSTQRLSFSLTIATLFCSASWSIYGFRLRDPYITVPNLPGILTSLIRLGLFCKYPPEQDRKYRLLQT

SEQ ID NO: 899 - protein, 221 aa, Rattus norvegicus
MEAGGVADSFLSSACVLFTLGMFSTGLSDLRHMQRTRSVDNIQFLPFLTTDVNNLGWLSYGVLKGDGTLIIVNTVGAVLQTLYILAYLHYSPQKHAVLLQTATLLAVLLLGYGYFWLLVPDLETRLQQLGLFCSVFTISMYLSPLADLAKIIQTKSTQRLSFSLTIATLLSSTSWSIYGFRLKDPYITVPNLPGILTGFIRLVLFYKYPPEQDTKYRLLQT

SEQ ID NO: 900 - protein, 236 aa, Anopheles gambiae str. PEST
ALLPRQQMDGIMSKGSLASLATVATVLQFLTGTVICNRYIRKKSTGDTSAFPFISGFLSCFMWLKYGVLTEESTLILVNFIGSALFFSYTVVFFIFCVNKREVIRQMMVISCIILSATLYTLFETDDEKSIRVIGLLCCCLAVLFFASPLTMLAHVIRTQNTDSLPFPIIMASFFVCLLWTAYGVLIGDRFIQIPNLLGGILAGIQLTLYVIYPKKKASFSGGPRYSPLVSENPIL

SEQ ID NO: 901 - protein, 123 aa, Dianthus caryophyllus
MITIHHPWVFAFGLLGNFISFMVFLAPLPTFIRVYKKKSTEGFQSFPYVVAIFSAMLWIYYALLKGNSLLLITVNVTGVIIETIYVIIFITYAPRQARISTMKLLLFMNFGGFCMIVPRPRPR

SEQ ID NO: 902 - protein, 247 aa, Glycine max
MDVAHFLFGIFGNASALFLFLAPVITFKRIIKNRSTEKFSGIPYVMTLLNCLLSAWYGLPFVSPHNILVSTVNGTGSFIEIIYVLIFIVLAPRKEKAKILGLFTFVLSVFSAVVFVSLFALHGNSRKLFCGFAAAIFSIIMYGSPLSIMRLVIKTKSVEFMPFFLSLFVFLCGTSWFIFGLLGRDPFVAVPNGVGSALGTMQLILYFIYRDNKGVPRKQAPTEEESMEMGDAKPQQGKQSNANGIQG

SEQ ID NO: 903 - protein, 247 aa, Glycine max
MDVAHFLFGIFGNASALFLFLAPVITFKRIIKNRSTEKFSGIPYVMTLLNCLLSAWYGLPFVSPHNILVSTVNGTGSLIEIIYVLIFIVLAPRKEKAKILGLFTFVLSVFSAVVFVSLFALRGNSRKLFCGFAAAIFSIIMYGSPLSIMRLVIKTKSVEFMPFFLSLFVFLCGTSWFIFGLLGRDPFVAVPNGVGSALGTMQLILYFIYRDNKGVTRKQAPTEEESMEIGDVKPQQGKQSNANGIQG

SEQ ID NO: 904 - protein, 248 aa, Glycine max
  unsure (1)..(248): unsure at all Xaa locations
LLLGLSDYLLLDCNWTTRQCLILQXFTFKRIIKNRSTEKFSGIPYVMTLLNCLLSAWYGLPFVSPHNILVSTVNGTGSFIEIIYVLIFIVLAPRKEKAKILGLFTFVLSVFSAVVFVSLFALHGNSRKLFCGFAAAIFSIIMYGSPLSIMRLVIKTKSVEFMPFFLSLFVFLCGTSWFIFGLLGRDPFVAVPNGVGSALGTMQLILYFIYRDNKGVTRKQAPTEEESMEIGDVKPQQGKQSNANGIQG

SEQ ID NO: 905 - protein, 247 aa, Glycine max
  unsure (1)..(247): unsure at all Xaa locations
MDVAHFLFGIFGNASALFLFLAPVITFKRIIKNRSTEKFSGIPYVMTLLNCLLSAWYGLPFVSPHNILVSTVNGTGSFIEIIYVLIFIVLAPRKEKAKILGLFTFVLSVFSAVVFEALFALHGNSRKLFFGFASAIFSIIMYGSPLSITRXVTHLLQYLMVLVLLWGQWFLCGTSWFIFGLLGRDPFVAVPNGVGSALGTMQLILYFIYRDNKGVPRKQAPTEEESMEMGDAKPQQGKQSNANGIQG

SEQ ID NO: 906 - protein, 268 aa, Medicago truncatula
  unsure (1)..(268): unsure at all Xaa locations
MAISHNTLAFTFGMLGNVISFLVFLAPISTFYRIYKKKSTEGFQSLPYLVALFSSMLWLYYALLKKDAFLLITINSFGCVVETIYIILYIIYAPRDARNLTFKLLSAMNVGSFALILIVTNYAVHGPLRVQVLGWVCVSLSVSVFAAPLSIVAQVVRTKSVEFMPFNLSFTLTLSATMWFGYGFFLKDICIXLPNVLGXVLGLLQMLLYAIYRNGGEKAMKKEKKAPIEPPKSIVIETQLEKIEQEKKNKDDDNEEKDKSEEPIGCGV

SEQ ID NO: 907 - protein, 255 aa, Medicago truncatula
MAMTRESWAFVFGIIGNIISFAVFLSPLPTFYVIFKKKSAEGFQALPYVVALFSAMLWIYYAFVKRESALLLITINTFGIVVESAYIIMFLIYAPKKQRLSTIKLLLLLNVFGFGAMLLSTLYLSKGAKRLAIIGWICLVFNISVFAAPLFVISKVIRSRSVEYMPFFLSFFLTINAVMWFFYGLLLRDYYVALPNTLGFVFGIIQMVVYLIYRNATPVVEAPMKGQELSGGHIIDVVKIGTDSNRAGGGAGSKV

SEQ ID NO: 908 - protein, 273 aa, Oryza sativa (japonica cultivar-group)
MEHIARFFFGVSGNVIALFLFLSPVVTFWRIIKKRSTEDFSGVPYNMTLLNCLLSAWYGLPFVSPNNILVTTINGTGSVIEAIYVVIFLIFAERKARLKMMGLLGLVTSIFTMVVLVSLLALHGQGRKLFCGLAATIFSICMYASPLSIMRLVIKTKSVEFMPFLLSLSVFLCGTSWFIYGLLGRDPFIAIPNGCGSFLGLMQLILYAIYRNHKGATPAAAAGKGDAADEVEDAKKAAAAVEMADAKTNKVVADDADADADGKSADDKVASQV

SEQ ID NO: 909 - protein, 292 aa, Oryza sativa
MEHIARFFFGVSGNVIALFLFLSPVVTFWRIIKKRSTEDFSGVPYNMTLLNCLLSAWYGLPFVSPNNILVTTINGTGSVIEAIYVVIFLIFAERKARLKMMGLLGLVTSIFTMVVLVSLLALHGQGRKLFCGLAATIFSICMYASPLSIMRLVIKTKSVEFMPFLLSLSVFLCGTSWFIYGLLGRDPFIAIPNGCGSFLGLMQLILYAIYRNHKGATPAAAAGKGDAADEVEDAKKAAAAVEMADAKTNKVVADDADADARWQVGGRQGRQPGVTRSGPRTAPGRHARKNAA

SEQ ID NO: 910 - protein, 273 aa, Triticum aestivum
  unsure (1)..(273): unsure at all Xaa locations
MEDVAKFLFGISGNVIALFLFLSPVPTFWRIIRNKSTEEFSGVPYNMTLLNCLLSAWYGLPFVSPNNVLVSTINGVGAAIETVYVVIFLIFAERRAKVRMLGLLSVVTAIFATVVLVSLLALHGKARTVFCGLAATVFSICMYASPLSIMRLVIKTKSVEYMPFLLSLSVFLCGTSWFIYGLLGLDPFIYIPNGCGSFLGLMQLILYAIYRKNKGPAAGAGKGEDADEADEVEDAKKAAAAVEMGEAKIXXVDDDTRXSSTMPAVVDKVAAHV

SEQ ID NO: 911 - protein, 275 aa, Triticum aestivum
  unsure (1)..(275): unsure at all Xaa locations
MEHIARFFFGVSGNVIALFLFLSPVVTFWRIIKRKSTEDFSGVPYNMTLLNCLLSAWYGLPFVSPNNILVTTINGAGSVIEAIYVVIFLIFAERKAKIRMLGLLSVVTTIFATVVLVSLLALHGRARTVFCGLAATVFSICMYASPLSIMRLVIKTKSVEYMPFLLSLSVFLCGTSWFIYGLLGLDPFIYIPNGCGSFLGLMQLILYAIYRKNKGPAPAPAPARGRTXDEADEVEDAKKAAAAVEMGEAKIXXVDDDTRRRRRCGPSVDKVAAQV

SEQ ID NO: 912 - protein, 293 aa, Triticum aestivum
  unsure (1)..(293): unsure at all Xaa locations
MEHIARFFFGVSGNVIALFLFLSPVVTFWRIIKRKSTEDFSGVPYNMTLLNCLLSAWYGLPFVSPNNILVTTINGAGSVIEAIYVVIFLIFAERKAKIRMLGLLSVVTTIFATVVLVSLLALHGRARTVFCGLAATVFSICMYASPLSIMRSVIKSMGVADISILLSPSAFLRGAVGDHYGLLGLDPFIYIPNGCGSFLGLMQLMLYAIYRKNKGTRPRAAAGKGDEAEEVEDATKAAAAAEMGEAKIXXVDDXEPAXSTMTAVVDKLAALLWQAACRRELAWSVSSKSAQLN

SEQ ID NO: 913 - protein, 264 aa, Zea mays
MEHIARFFFGVSGNVIALFLFLSPVVTFWRVIRKRSTEDFSGVPYNMTLLNCLLSAWYGLPFVSPNNILVSTINGTGSVIEAIYVVIFLIFAVDRRARLSMLGLLGIVASIFTTVVLVSLLALHGNARKVFCGLAATIFSICMYASPLSIMRLVIKTKSVEFMPFLLSLAVFLCGTSWFIYGLLGRDPFIIIPNGCGSFLGLMQLILYAIYRKNKGPAAPAGKGDAAAEVEDTKKVAAAVELADATTNKAADAVGGDGKVASQV

SEQ ID NO: 914 - protein, 263 aa, Zea mays
MEDVVKFVFGVSGNVIALFLFLSPVPTFWRIIRRKSTEDFSGVPYSMTLLNCLLSAWYGLPFVSPNNMLVSTINGAGAAIEAVYVVIFLAFASRRTRLRMLGLASAVSAAFAAVALASMLALHGQGRKLMCGLAATVCSICMYASPLSIMRLVIKTKSVEFMPFLLSLAVFLCGTSWFIYGLLGRDPFIIIPNGCGSFLGLMQLILYAIYRKNKGPAAPAGKGDAAAEVEDTKKVAAAVELADATTNKAADAVGGDGKVASQV

SEQ ID NO: 915 - protein, 265 aa, Zea mays
  unsure (1)..(265): unsure at all Xaa locations
MEHIARFFFGVSGNVIALFLFLSPVVTFWRVIRKRSTEDFSGVPYNMTLLNCLLSAWYGLXPFVSPNNILVSTINGTGSVIEAIYVVIFLIFAVDRRARLSMLGLLGIVASIFTTVVLVSLLALHGNARKVFCGLAATIFSICMYASPLSIMRLVIKTKSVEFMPFLLSLAVFLCGTSWFIYGLLGRDPFIIIPNGCGSFLGLMQLILYAIYRKNKGPAAPAGKGDAAAEVEDTKKVAAAVELADATTNKAADAVGGDGKVASQV

SEQ ID NO: 916 - protein, 297 aa, Zea mays
  unsure (1)..(297): unsure at all Xaa locations
MEDVVKFVFGVSGNVIALFLFLSPVPTFWRIIRRKSTEDFSGVPYSMTLLNCLLSAWYGLPFVSPNNMLVSTINGAGAAIEAVYVVIFLAFASRRTRLRMLGLASAVSAAFAAXVALASMXLALHGQGRKLMCGLAATVCSICMYASPLSIMRLVVKTKSVEYMPFLLSLAVFLCGTSWFVYGLLGRDPFVAIPNGCGSFLGAVQLVLYAIYRDSXXSGGKQQAGDDVERAASDAKSSKKVADDVGGKEDRRSSMELATFSFGARAYVSSPRVVCVCVYYTRSACCTVLPLQCVQVI

SEQ ID NO: 917 - protein, 273 aa, Zea mays
  unsure (1)..(273): unsure at all Xaa locations
MEHIARFFFGVSGNVIALFLFLSPVVTFWRVIRKRSTEDFSGVPYNMTLLNCLLSAWYGLAVXVSPNNILXVSTINGTGSVIEAIYVVIFLIFAVDRRARLSMLGLLGIVASIFTTVVLVSLLALHGNAXRKVFCGXLAATIFXSICMYASPLSIMRLVIKTKSVEFMPFLLSLAVFLCGTSWFIYGLLGRDPFIIIPXNGCXGASLGLMQLILYAIYRKNKGPAAPGRQGRGPAAAEVEDTKKVAAAVELADATTNKAADAVGGDGKVASQV

SEQ ID NO: 918 - protein, 298 aa, Zea mays
  unsure (1)..(298): unsure at all Xaa locations
XPYNXTYMNHIMRSWYGLPFVSPNNILVSTINGTGSVIEAIYVVIFLIFAVDRRARLSMLDITGLVASIFTTVVLVSLLALHGNARKVFCGLAATIFSICMYASPLSIMRLVIKTKSVEFMPFLLSLAVFLXSGTSWFIYGLLGRDPFIIIPNGCGSFLGLMQLILYAIYRKNKGPAAPAGKGDAAAVVEDTKKVAAAVELADATTNKVASQDLLSSGTGRNILNEAAYXVSLSVKHIGVGFCGLLRLLLLSSPSLPGGYPQACSSFHSDSGTAVARYSALKLSLQSVFFYSISLLLL

SEQ ID NO: 919 - protein, 219 aa, Lilium longiflorum
VEQFSPVPYLATLLNCMLWVVYGLPLVHPHSTLVLTINGLGLIIELTYVLLFLLYSNGRARIRVLAMLLTEIVFVGLITVIVLSTAHTLVTRSLIIGVLCVFFGTMMYAAPLSVMKLVIQTKSVEYMPLFLSVASFLNGICWTTYALIRFDLFITIPNALGTMFAVAQLILHAMYYKSTKIQMEAQKRKLEMGFEEVMAPVENTEKIRGASQTGKYPPV

SEQ ID NO: 920 - protein, 355 aa, Caenorhabditis elegans
MFEIFTQGFSLLNLLSILAFFTTVGLFFCGIPICRQIWKRKDTKEISGAPFLMGVVGGCCWMTYGWLKNDGTVKWVTGCQVILYTTYTIFYWCMTKKKLYISLKVLGVIGICTSLVLAVHFFGMKIFHPLGIVCLTLNIADFAAPLGGIRVVIRRWATSTLPLPLCIANFLVSTEWFLYGLLKNDFYLIFPNGVGSLLAFIQLLLFIVLPRKPGQRAPIVRLWLWIRGVRVEETKEIVAELGECDEKDDKKMNRAQRWSQKIKMNVSTVAEELENVIYQLPTKDQFAYTHKIGDEDSSSEKTVETVDETKKAPVTAVDKLKDADRERKMRNALRAAQDARENALRRTISSPDLSE

SEQ ID NO: 921 - protein, 233 aa, Caenorhabditis elegans
MDTFFPIIFSTELKKPICLQIYRQGHVGDISGFPFLMGTLVLPFWLRYGFLRNDVMLISINCAGIPIAVFNAMFFLYFSKPKKYYMTQLSIVTIIILTMLMLIHFNPNVQFLGFVCIVLNLITFGSPLAGLRVVLRDREVITLPFVLCLVQLIVQCLWNLYGILIQDFFLVIPTAVGIMISLVQLSLFLIFPRKRDGYSPMAKVARCVFGSSNNRKEVPDEPQKIVVESNTVY

SEQ ID NO: 922 - protein, 299 aa, Caenorhabditis elegans
MLEVVLQVLSISAITTTIALFFCGIPICMQIRRQGAVGDISGVPFLMGVLGGSFWLRYGLLKMDYVMIIVNVVGVACMAFYCVFFLIYSLPKKTFTCQLILVTSTIGGMVLWIALKPNLDYLGVICMTFNIMNFGAPLAGLGVVLKNREVSTLPLPMCVANFLVSSQWCLYGNLVSDIYIIIPNGIGMFLAIVQLALFVVLPIRENEKSPLEKLASWFTGRDSKVKDLERGDCIVSSPPSSPQKVPNETRSDVEDKFDKLMAETSSTIPSDSRRGSMGSPPSYKSRSSSDPDLSSIQSP

SEQ ID NO: 923 - protein, 225 aa, Caenorhabditis elegans
MTTSLGQTILPYLSFTALSSTVAFFLCGLQICHRIKTRGSSEGTSPAPFLLSFLSCGLFIQYGLLKDDDVITYCNGIGCFLQACYLMYFYYMTRNRRFLNKVISIELGIIGIVVYWVAHSTNSHLTKTTYVGNYCIFLNICSVAAPLFDIGKVVRNKSSESLPLPLCVACFVVCLQWMFYGYIVDDIVILVPNVIATVISILQLSLFIIYPGAPAGVLPQKYEHI

SEQ ID NO: 924 - protein, 116 aa, Pinus pinaster
TVFTVILYGSPLSVIRLVIHTKSVEFMPSFYFSLFAFLGSVLWMVYGALSGDILIMAPNFVGIPLGLSQMALYCIYWNNSPVRVEATKLEAGGELKSIEQNIKEDIELYTEDIEKA

SEQ ID NO: 925 - protein, 66 aa, Pinus pinaster
TVFTVILYGSPLSVIRLVIHTKSVEFMPSFYFSLFAFLGSVLWMVYGALSGDILIMAPNFVGIPLG

SEQ ID NO: 926 - protein, 226 aa, Drosophila melanogaster
MSAVAYDSLLSTTAVISTVFQFLSGAMICRKYIQKKSTGDSSGVPFICGFLSCSFWLRYGVLTNEQSIVLVNIIGSTLFLVYTLIYYVFTVNKRACVKQFGFVLTVLVVVIVYTNRLEDQRDRMIHVTGIVCCIVTVCFFAAPLASLLHVIRAKNSESLPLPLIATSFVVSLQWLIYGILISDSFIQIPNFLGCILSLLQLGLFVLYPPRSYSGHGYKLVEQAVPF

SEQ ID NO: 927 - protein, 226 aa, Drosophila melanogaster
MSAVAYDSLLSTTAVISTVFQFLSGAMICRKYIQKKSTGDSSGVPFICGFLSCSFWLRYGVLTNEQSIVLVNIIGSTLFLVYTLIYYVFTVNKRACVKQFGVCSDCSGGGHCLHQSAGRSARSNDTRHRNCVLHRDRVFFAAPLASLLHVIRAKNSESLPLPLIATSFVVSLQWLIYGILISDSFIQIPNFLGCILSLLQLGLFVLYPPRSYSGHGYKLVEQAVPF

SEQ ID NO: 928 - protein, 637 aa, Plasmodium yoelii yoelii
MGIMKRLPLQILLLIFFWCHINGKNGGDIWALNALSIDDKQNRDDKPNGDTKSSGNETERGEVKEHTVVSGNKKEQTNTVTSKPVEIEVEKNGKINDNKNGTPGNSNTVNSNTANSNTANSNTANSNSANSNSANSNSANSNSANSNSANSNPVNSNNSVSANNPNDKSTPSPSKHAFIQNIAEVPSNKEIEKKEGVTSNNEQGNTPKPEEKEKTDKAEEKGKETKVEEKGKESKVEEKGKESKVEEKGKETKVEEKGNEPSKDTEESVVKEITPKSEEKKNDNNISGSTSSNTVSSNSNDKKVENMINVSNNNSLNNEDVINISKEENNSDLYFLKTLSIGSSIFMQLVLLPSVFKILKKKSTGESDGLTYVVLFFSSFLWLVYGILLNNSAIIFPNSVGLLLGLFYSIIYHVNCKNMWLKHKLYSYYKTCGSICFMLYIFLYILSYEQYELFVGFIAFVSSIVNFGAPLSYIQTVIKKRNSSLIPLEISIGSLVCSFLWLTYGFILKDVFLITPNLCGFVLSILQIALILLYSNKEVLSNMDTEIAYNESNNNNNNSNTIIQDNNVFFNEFNLDDDFKITEVPTNLNNSIFDTPYDETSPLTGHFDIQFKHNHLDRQNYLNNSENKKNNNHSVPF

SEQ ID NO: 929 - protein, 221 aa, Papio anubis
MEAGGFLDSLIYGACVVFTLGMFSAGLSDLRHMRMTRSVDNVQFLPFLTTEVNNLGWLSYGALKGDRILIVVNTVGAALQTLYILAYLHYCPRKRVVLLQTATLLGVLLLGYGYFWLLVPNPEARLQLLGLFCSVFTISMYLSPLADLAKVIQTKSTQCLSYPLTIATVLTSASWCLYGFRLRVPYIMVSNFPGIVTSFIRFWLFWKYPQEQDRNYWFLQT

SEQ ID NO: 930 - protein, 221 aa, Homo sapiens
MEAGGFLDSLIYGACVVFTLGMFSAGLSDLRHMRMTRSVDNVQFLPFLTTEVNNLGWLSYGALKGDGILIVVNTVGAALQTLYILAYLHYCPRKRVVLLQTATLLGVLLLGYGYFWLLVPNPEARLQQLGLFCSVFTISMYLSPLADLAKVIQTKSTQCLSYPLTIATLLTSASWCLYGFRLRDPYIMVSNFPGIVTSFIRFWLFWKYPQEQDRNYWLLQT

SEQ ID NO: 931 - protein, 221 aa, Homo sapiens
MEAGGFLDSLIYGACVVFTLGMFSAGLSDLRHMRMTRSVDNVRFLPFLTTEVNNLGWLSYGALKGDGILIVVNTVGAALQTLYILAYLHYCPRKRVVLLQTATLLGVLLLGYGYFWLLVPNPEARLQQLGLFCSVFTISMYLSPLADLAKVIQTKSTQCLSYPLTIATLLTSASWCLYGFRLRDPYIMVSNFPGIVTSFIRFWLFWKYPQEQDRNYWLLQT

SEQ ID NO: 932 - protein, 226 aa, Anopheles gambiae str. PEST
STMEAISEALQPYKEQVGMAAGILTVGQMFSGCFVCNDIRKKGTTDGFSAMPFVGGCGLTVLFLQHGMLMNDSAMTNANLVGLTISLAYAIFFLLYTPPTGRSSYWRQVGGTALFTITLLGYVKVENPSVVEDRFGMIITVLMLALIGQPLFGLPDIIRRKSTEGLPFAMILSGTIVGLSWLLYGVILNNVFVVCQNLAAVTLSGIQLALFAIYPSKAAPPSKKRE

SEQ ID NO: 933 - protein, 246 aa, Anopheles gambiae str. PEST
FVVSRVTQNTHAFPGHWTMESIAVALQPYKDTVGLTAAIVTVVQFFSGVLALNAIRRQGNTRGFSALPFLGGTVFCLLNIQFGQMLRDDGMIRVNFIGLALNLLYVCGFYLYTEGPAKTAVWGQIGLAGALTAGVLSYVQYEDPQLVEFRFGLILTGLLWTLVGMPLLGLGDILKKKSTEGLPFPIIFLGAVVSFAWLLYGIILRSNFLVVQNLMALALSAVQLSLFIIFPSGAAKPPPTPAKKRN

SEQ ID NO: 934 - protein, 218 aa, Anopheles gambiae str. PEST
STMEAISEALQPYKEQVGMAAGILTVGQMFSGCFVCNDIRKKGTTDGFSAMPFVGGCGLTVLFLQHGMLMNDSAMTNANLVGLTISLAYAIFFLLYTPPTGRSSYWRQVGGTALFTITLLGYVKVENPSVVEDRFGMIITVLMLALIGQPLFGLPDIIRRKSTEGLPFAMILSGTIVGLSWLLYGVILNNVFVVVRSVLLVSNGIQLALFAIYPSKAA

SEQ ID NO: 935 - protein, 686 aa, Plasmodium falciparum 3D7
MGIIKRILLLQIVLVLVLCCHRIRCEEVSSISNKASVKDEGQNNNSNKSNNNNNNNNNNNNNNNNNNNNNNNNNNNNNNNNNNNNNNNNNNNNNNTSGLSVKSENFNMIIKPEGDEQSPLNSLSVEQKKDTPQIEELRKKEETKDQKVTEQVNNLQSKNEKLTNTLDQVVQGDNNNNTLDTTTSETSSSSTTNTNNNNNNNINNNSNSNNNNSNINNNNNINNNNNNIYLGHNNNLDSNIIQQTNFIENTEHNVQKQNEKKENNNTSGSTSKSSSSQNLENSKEVEQAVVKEITPKEETSNGQNKDKEKILSNVQNDATNKKMVNDNTKGLSSDNMNSSNDLNAPNKMNEDSKGSSEYVDLASQKIYDEMNKNVEESGSNLYFLKLLSIGSSIFMQLIFLPTIFKIIKKKTTGELDGFPYIILLLSSFLWLVYGMLLNNSAIVFPNLVGLILGILYCVIYHKNCKNMWLKQKLHSYYKICGFICFLLYAFLYILSYEQYEVFVGFVAFISSIVNFGAPLSYIQIVIKKKNSSLIPMEVTMGSLLCSFLWLTYGFTLKDGFIIIPNLCGFILSLLQVLLIILYSNKENTTFNHDSDTTVSEISTRKNRNKYIPDTNSNMFFNEYNVDEENRMTEISTTMPTTIFDLSFDETSPLTGTFNIDYSRPGVSNQKYLKRSESLEKNTAITF

SEQ ID NO: 936 - protein, 247 aa, Arabidopsis thaliana; identical to SEQ ID NO: 434

SEQ ID NO: 937 - protein, 202 aa, Arabidopsis thaliana
MTLLNCLLSAWYGLPFVSKDNTLVSTINGTGAVIETVYVLIFLFYAPKKEKIKIFGIFSCVLAVFATVALVSLFALQGNGRKLFCGLAATVFSIIMYASPLSIMRLVVKTKSVEFMPFFLSLFVFLCGTSWFVYGLIGRDPFVAIPNGFGCALGTLQLILYFIYCGNKGEKSADAQKDEKSVEMKDDEKKQNVVNGKQDLQV

SEQ ID NO: 938 - protein, 265 aa, Petunia x hybrida
MAQLRADDLSFIFGLLGNIVSFMVFLAPVPTFYKIYKRKSSEGYQAIPYMVALFSAGLLLYYAYLRKNAYLIVSINGFGCAIELTYISLFLFYAPRKSKIFTGWLMLLELGALGMVMPITYLLAEGSHRVMIVGWICAAINVAVFAAPLSIMRQVIKTKSVEFMPFTLSLFLTLCATMWFFYGFFKKDFYIAFPNILGFLFGIVQMLLYFVYKDSKRIDDEKSDPVREATKSKEGVEIIINIEDDNSDNALQSMEKDFSRLRTSK

SEQ ID NO: 939 - protein, 142 aa, Triticum aestivum
MEDVAKFLFGISGNVIALFLFLSPVPTFWRIIRNKSTEEFSGVPYNMTLLNCLLSAWYGLPFVSPNNVLVSTINGVGAAIETVYVVIFLVFASNKKARLRMLGLASAVATVFAVVALVSMLALHGPARKLLAGLAMTVFSIC

SEQ ID NO: 940 - protein, 148 aa, Zea mays
  unsure (1)..(148): unsure at all Xaa locations
MEDVAKFLFGISGNVIALFLFLSPVPTFWRIIRNKSTEEFSGVPYNMTLLNCLLSAWYGLPFVSPNNVLVSTINGVGAVIETVYVVIFLVFASNKKARLRTLGLASAVAGVFAVVALVSMLALHXPARKLLAGLAMTVFSICMYASPL

SEQ ID NO: 941 - protein, 261 aa, Arabidopsis thaliana
MGDKLRLSIGILGNGASLLLYTAPIVTFSRVFKKKSTEEFSCFPYVMTLFNCLIYTWYGLPIVSHLWENLPLVTINGVGILLESIFIFIYFYYASPKEKVGVTFVPVIVGFGLTTAISALVFDDHRHRKSFVGSVGLVASISMYGSPLVVMKKVIETRSVEYMPFYLSFFSFLASSLWLAYGLLSHDLFLASPNMVATPLGILQLILYFKYKNKKDLAPTTMVITKRNDHDDKNKATLEFVVDVDRNSDTNEKNSNNASSI

SEQ ID NO: 942 - protein, 289 aa, Glycine max
  unsure (1)..(289): unsure at all Xaa locations
MAETIRLGVAVLGNAASVALYAAPMVTFRRVIRKKSTEEFSCFPYIIGLLNCLLFTWYGLPIVSYKWENFPLVTVNGVGILLELSYVLIYFWYASAKGKVKVAMTAIPVLLVFSIIAAVSAFAFHDNHHRKLLVGSIGLGVSVAMYGSPLIVMKKVIQTKSVEFMPLPLSMCSFLATVLWLIYGLLIRDIFVAGPSAVGTPLGILQLVLYCKYRXXGSVVEEPSKGDLEKGNLEKVDMEIGKVEMNVTNHMNGNSXTMRLRGKVEDFRMFYSDSFFFFFYVYFLYFKTK

SEQ ID NO: 943 - protein, 267 aa, Glycine max
  unsure (1)..(267): unsure at all Xaa locations
MAETLRMVVAVIGNVASVSLYAAPTVTFKRVIRKKSTEEFSCMPYIIALLNCLLFTWYGLPVVSNKWENLPLVTVNGVGILFELSYVLIYIWFSTPKGKVKVAMTAVPVLIVFCVIAIVSAFVFPDHRHRKLLVGSIGLGVSIAMYGSPLVVMKKVIQTKSVEFMPLPLSFCSFLASVLWLTYGLLIRDIFVAGPSLIGTPLGILQLVLHCKYWKRRVMEEPNKVELQKGNNTEKRKWDMEKNVXQFLVTATNDPGQPRLKDFNWFF

SEQ ID NO: 944 - protein, 307 aa, Glycine max
  unsure (1)..(307): unsure at all Xaa locations
MAETIRLAVAVLGNAASVALYAAPMVTFRRVMRKKSTEEFSCFPYIIGLLNCLLFTWYGLPVVSYKWENFPLVTVNGVGIVLELSYVLIYFWYASAKGKVKVAMTAIPVLLVFSIIAAVSAFAFHDNHHRKLLVGSIGLGVSVTMYGSPLIVMKKVIQTKSVEFMPLPLSMCSFLATVLWLIYGLLIRDIFVAGPSAVGTPLGXILQLVLYCKYRXXGVLWRIPSKGDLEKGNLEKVEMEIGKVEMNVTNHMNGHSXTMRLRGKIEDYRMFYSDSFFLCFISFILRQNDPPLALVVLLTYKLSYITS

SEQ ID NO: 945 - protein, 292 aa, Glycine max
  unsure (1)..(292): unsure at all Xaa locations
MAETIRLAVAVLGNAASVALYAAPMVTFRRVIRKKSTEEFSCFPYIIGLLNCLLFTWYGLPVVSYKWENFPLVTVNGVGIVLELSYVLIYFWYASAKGKVKVAMTAIPVLLVFSIIAAVSAFAFHDNHHRKLLVGSIGLXVFSVAMYGSPLIVMKKVIQTKSVEFMPLPLSMCSFLATVLWLIYGLLIRDIFVAGPSAXVGTPLGXILQLVLYCKYRXXGSVVEEPSKGDLEKGNLEKVDMEIGKVEMNVTNHMNGNSXTMRLRGKVEDFRMFYSDSFFFFFYVYFLYFKTK

SEQ ID NO: 946 - protein, 244 aa, Oryza sativa (japonica cultivar-group); identical to SEQ ID NO: 436

SEQ ID NO: 947 - protein, 265 aa, Triticum aestivum
MVSPDAIRTVIGVIGNGTALVLFLSPVPTFISIWKKKTVEQYSAVPYLATLLNCMMWVLYGLPLVHPHSMLVITINGTGMLIELTYIALFLTFSVGAARRRVLLLLVAEVAFVAGVAALVLSLAHTHDRRSMVVGILCVLFGTGMYAAPLSVMKMVIQTKSVEYMPLFLSVASLVNGICWTAYALIKFDLYITIPNGLGVMFAVGQIILYAIYYKSTQQILEARKRKADQVPMTEVVVDGKSGSATNSGAANGHSRSNTTINSPD

SEQ ID NO: 948 - protein, 254 aa, Zea mays
  unsure (1)..(254): unsure at all Xaa locations
MVPDTVRVAVGILGNAASMLLYTTPILTFRWVIRKGNVEEFSCVPYILALLNCLLYTWYGLPVWPPSTAWASCSRSPSSPYTYGSHXXAEKKRFALQLVLPALALFGLTAALSSFAAHTHRSRKAFVGSVGLVASVSMYTSPMVAAKRVIATKSVEFMPFSLSLFSFLSSALWMAYGLLGRDLFIASPNFIGVPVGVLQLLLYCIYRRDHGAAAGAEAHAHGPAAAADQEKGMKAAAPVAVQPQEVAARVSEYK

SEQ ID NO: 949 - protein, 461 aa, Streptomyces coelicolor A3(2)
MTVESVNPETRAPAAPGAPELREPPVAGGGVPLLGHGWRLARDPLAFMSQLRDHGDVVRIKLGPKTVYAVTNPELTGALALNPDYHIAGPLWESLEGLLGKEGVATANGPLHRRQRRTIQPAFRLDAIPAYGPIMEEEAHALTERWQPGKTVDATSESFRVAVRVAARCLLRGQYMDERAERLCVALATVFRGMYRRMVVPLGPLYRLPLPANRRFNDALADLHLLVDEIIAERRASGQKPDDLLTALLEAKDDNGDPIGEQEIHDQVVAILTPGSETIASTIMWLLQALADHPEHADRIRDEVEAVTGGRPVAFEDVRKLRHTGNVIVEAMRLRPAVWVLTRRAVAESELGGYRIPAGADIIYSPYAIQRDPKSYDDNLEFDPDRWLPERAANVPKYAMKPFSAGKRKCPSDHFSMAQLTLITAALATKYRFEQVAGSNDAVRVGITLRPHDLLVRPVAR

SEQ ID NO: 950 - protein, 512 aa, Mus musculus
MLFEGLELVSALATLAACLVSVTLLLAVSQQLWQLRWAATRDKSCKLPIPKGSMGFPLIGETGHWLLQGSGFQSSRREKYGNVFKTHLLGRPLIRVTGAENVRKILLGEHQLVSTEWPRSARVLLGPNTVANSIGDIHRNKRKVFSKIFSHEALESYLPKIQLVIQDTLRAWSSQPEAINVYQEAQRLTFRMAVRVLLGFSIPEEDLGHLFEVYQQFVENVFSLPVDLPFSGYRRGIQARQILQKGLEKAIREKLQCTQGKDYSDALDILIESSKEHGKEMTMQELKDGTLELIFAAYATTASASTSLIMQLLKHPAVLEKLREELRAQGLLHGGGCPCEGTLRLDTLSSLRYLDCVIKEVMRLFTPVSGGYRTVLQTFELDGFQIPKGWSVMYSIRDTHDTAPVFKDVNVFDPDRFSQARSEDKDGRFHYLPFGGGVRTCLGKHLAKLFLKVLAVELASTSRFELATRTFPRITLVPVLHPVDGLSVKFFGLDSNQNEILPETEAMLSATV

SEQ ID NO: 951 - protein, 512 aa, Rattus norvegicus
MLFEGLELVSALATLAACLVSVTLLLAVSQQLWQLRWAATRDKSCKLPIPKGSMGFPLIGETGHWLLQGSGFQSSRREKYGNVFKTHLLGRPLIRVTGAENVRKILLGEHQLVSTEWPRSARVLLGPNTVANSIGDIHRNKRKVFSKIFSHEALESYLPKIQLVIQDTLRAWSSQPEAINVYQEAQRLTFRMAVRVLLGFSIPEEDLGNLFEVYQQFVENVFSLPVDLPFSGYRRGIQARQILQKGLEKAVREKLQCTQGKDYSDALDILIESSKEHGKEMTMQELKDGTLELIFAAYATTASASTSLIMQLLKHPAVLEKLREELRAQGLLHGGGCPCEGTLRLDMLSGLRYLDCVIKEVMRLFTPVSGGYRTVLQTFELDGFQIPKGWSVMYSIRDTHDTAPVFKDVNVFDPDRFSQARSEDKDGRFHYLPFGGGVRTCLGKHLAKLFLKVLAVELASTSRFELATRTFPRITLVPVLHPVDGLSVKFFGLDSNQNEILPETEAMLSATV

SEQ ID NO: 952 - protein, 462 aa, Nostoc sp. PCC 7120
MHLPKGPQTPVFVQVLRWVFSPMSFLEDCAKRYGDIFSVKLAKDVPAIVFLSNPKDIQQILTNDNNQLDSPGDWNDLFEPLLGKRSVITLSGAEHQRQRQLLMPPFHGERMRGYSQVITDVTEKVISQHQIGQPFQVRSVTQAITLRVIMQAVFGLYEGSRAEKLQHLLSDLLEKSSSPFSVALLYFPSLRRDFGPIKFWGEQVQIQQQADELIYQEIQERRENPDPSRTDILSLLMDARDADGQPMTDVELRDELMTLLVAGHETTATALAWAMYWIHKLPPVKARLLEELDSLGDNPDSTTIFKLPYLNAVYSETLRIYPVAMLTFARRVIETMALGGYELPPGTPVLGSIYLTHHREDLYPEPKKFKPERFLERQFSPYEYLPFGGGTRRCLGLAFAQWEMKLALAKILTSYELELVNNSVEVRPKRRGLVTGPHRPIEMVIKSQRQITSRILETTTVS

SEQ ID NO: 953 - protein, 459 aa, Rhodopseudomonas palustris
MSIQVADSSLVARLSPPKPSALAHVPGDEGWPIIGRTLAVLADPKGEVEKMARTYGPVYRSRVLGETSITLLGPEANELVLFDNTKLFSSTHGWGPILGRLFPRGLMMLDFDEHRLHRRTLSVAFKAGPMQSYLAELNAGIAHRVAEWRARPGEMLCYPAMKQLTLDLAATSFLGTAIGAETEEVNRAFIDMVAASVAPIRKPWPGTAMARGVKGRQRIVAYFAEQIPIRRAKGGDDLFSQLCRATHDDGALLSNQAIIDHMSFLMMAAHDTLTSSLTSFVAALAAHPEWQQKLREEIAGLGLKPGEPISFEQLDALPLTEMAFKEAMRLRPPVPSLPRRATRAFSFKGYTIPAGTMVAVNPLFTHHMPEIWPNPDQFDPLRFTDEASRGRHRFAWIPYGGGAHMCLGLNFAYMQAKCFAVHLLQHLDLSLPPNYQASWQMWPIPKPKDGLRVNVAPLN

SEQ ID NO: 954 - protein, 499 aa, Hordeum vulgare subsp. vulgare
MGEGAWWAVAAVVAALAVVALDAAVRAAHAWYWTASLGAGRRGRLPPGDMGWPLVGGMWAFLRAFKSGRPDSFIDSFARRFGRAGLYRAFMFSSPTIMATTPEACKQVLMDDDAFVTGWPKATVALIGPKSFVNMGYDEHRRLRKLTAAPINGFDALTSYLGFIDDTVVTTLRGWSERGGDGHFEFLTELRRMTFRIIVQIFMGGADERTAAELERTYTELNYGMRAMAIDLPGFAYHKAIRARRRLVAALQRVLDERRARGGKTAAGAAAPVDMMDRLIAVEDEGGRRLQDDEIIDVLVMYLNAGHESSGHITMWATVFLQENPEILAKAKAEQEAIMRSIPPGQKGLTLRDFRKMAYLSQVVDETLRFVNISFVSFRQATRDVFVNGYLIPKGWKVQLWYRSVHMDPQVYPDPKKFDPSRWEGPPPRAGTFLPFGLGTRLCPGNDLAKLEISVFLHHFLLGYKLTRKNPNCRVRYLPHPRPVDNCLAKITRLSSSHG

SEQ ID NO: 955 - protein, 444 aa, Synechocystis sp. PCC 6803
MITSPTNLNSLPIPPGDFGLPWLGETLNFLNDGDFGKKRQQQFGPIFKTRLFGKNVIFISGALANRFLFTKEQETFQATWPLSTRILLGPNALATQMGEIHRSRRKILYQAFLPRTLDSYLPKMDGIVQGYLEQWGKANEVIWYPQLRRMTFDVAATLFMGEKVSQNPQLFPWFETYIQGLFSLPIPLPNTLFGKSQRARALLLAELEKIIKARQQQPPSEEDALGILLAARDDNNQPLSLPELKDQILLLLFAGHETLTSALSSFCLLLGQHSDIRERVRQEQNKLQLSQELTAETLKKMPYLDQVLQEVLRLIPPVGGGFRELIQDCQFQGFHFPKGWLVSYQISQTHADPDLYPDPEKFDPERFTPDGSATHNPPFAHVPFGGGLRECLGKEFARLEMKLFATRLIQQFDWTLLPGQNLELVVTPSPRPKDNLRVKLHSLM

SEQ ID NO: 956 - protein, 455 aa, Bacillus megaterium
TIKEMPQPKTFGELKNLPLLNTDKPVQALMKIADELGEIFKFEAPGRVTRYLSSQRLIKEACDESRFDKNLSQALKFVRDFAGDGLFTSWTHEKNWKKAHNILLPSFSQQAMKGYHAMMVDIAVQLVQKWERLNADEHIEVPEDMTRLTLDTIGLCGFNYRFNSFYRDQPHPFITSMVRALDEAMNKLQRANPDDPAYDENKRQFQEDIKVMNDLVDKIIADRKASGEQSDDLLTHMLNGKDPETGEPLDDENIRYQIITFLIAGHETTSGLLSFALYFLVKNPHVLQKAAEEAARVLVDPVPSYKQVKQLKYVGMVLNEALRLWPTAPAFSLYAKEDTVLGGEYPLEKGDELMVLIPQLHRDKTIWGDDVEEFRPERFENPSAIPQHAFKPFGNGQRACIGQQFALHEATLVLGMMLKHFDFEDHTNYELDIKETLTLKPEGFVVKAKSKKIPL

SEQ ID NO: 957 - protein, 473 aa, Bacillus megaterium
GAMTIKEMPQPKTFGELKNLPLLNTDKPVQALMKIADELGEIFKFEAPGRVTRYLSSQRLIKEACDESRFDKNLSQALKFVRDFAGDGLFTSWTHEKNWKKAHNILLPSFSQQAMKGYHAMMVDIAVQLVQKWERLNADEHIEVPEDMTRLTLDTIGLCGFNYRFNSFYRDQPHPFITSMVRALDEAMNKLQRANPDDPAYDENKRQFQEDIKVMNDLVDKIIADRKASGEQSDDLLTHMLNGKDPETGEPLDDENIRYQIITFLIAGHETTSGLLSFALYFLVKNPHVLQKAAEEAARVLVDPVPSYKQVKQLKYVGMVLNEALRLWPTAPAFSLYAKEDTVLGGEYPLEKGDELMVLIPQLHRDKTIWGDDVEEFRPERFENPSAIPQHAFKPFGNGQRACIGQQFALHEATLVLGMMLKHFDFEDHTNYELDIKETLTLKPEGFVVKAKSKKIPLGGIPSPSTEQSAKKV

SEQ ID NO: 958 - protein, 450 aa, Streptomyces carzinostaticus subsp. neocarzinostaticus
MNGRRPVSPPLRALPGLLRKLAVDRLGMMRDAAALDDAVLVSMGPKKLFVFNRPDYAKHVLADNAANYRKGIGLIESRKMLGDGLLTSEGELWREQRRTVQPAFRPARVAAQADAVAEETMNLRDLLMRRGADGPVDVLQEVTGFTLGVLGRTVLNTDLGGYGGIAHAFEAVQDQAMFDMVTQNMVPTWAPLATQRRFRRARRELIRTVDELVADRSARMTDGEEADDAFSLMIAAARRQTDPRTGQGRLRDELVTLLLAGHETTASTLAWTLLLLARHPHMRDLVREEARGVLADGRAPDAGDLRKLTYTTQVVQEAMRLYPPVWILPRVARQSDEVGPYSVSAGADVLICPYTLHRHPDLWERPEQFDPGRFDPARVADRPRYAYIPFGAGPRFCVGSNLGMMEAVFVTALLTRDLVLEVVPGDERTPEPMMSLRMRGGLPMTVRPVR

SEQ ID NO: 959 - protein, 449 aa, Streptomyces globisporus
MRIDPPGPPLRALPGLLRKLAVDRLGMMRDAAGLGDAVRVSMGPKKLYIFNRPDYAKHVLADNSDNYHKGIGLVQSRRVLGDGLLTSDGETWREQRRIVQPAFKPGRINQQAAAVAEEAAKLVALLRGHEGGGPVDVLQEVTGLTLGVLGRTLLDSNLTAHESLAHSFEEVQDQAMLEMVSQGTVPAWLPLPPQARFRRARRELYRVADLLVADRRSRMADGGPGDDALSRIIVAADRRRDDPARARNRLREELVTLLLAGHETTASTLGWTLHLLERHPEVRDRVRAEARAALGDGVPGPEDLHRLTYTTMVVQEAMRLFPPVWILPRVAQQRDVVGGYTVSAGSDVLVCPYIMHRHPGLWEDPERFDPERFEPRQTADRPRYAYIPFGAGPRFCVGSNLGMMEAVFVTALVTRDLDLRTVAGHRAVAEPMLSLRMRGGLPMTVSTAR

SEQ ID NO: 960 - protein, 448 aa, Trichodesmium erythraeum IMS101
MNMNFKSSNPASSLALPPGDLGLPFIGQNKKIFKNPQNFIEEVYQKYGPVYKTNFLGKNFIYFQGYEAIKFILTNENKYFTYSQILRNYQRIFGENDITVLAGKEHRERQKILAKTIKSKNLNNYIDIIHDLSQSYFLKWIKSDYVDLYSEINNYTLDMILKLLLGIDYASKSEISNYLKDMSSGLNTIPVVFPWTKFGSALESKNKLFNQFEQIIVRRKKENNFGSDILGILLTVQEQMNYELTPREIVGQMVNLLSLGKKELSSALSSFFILTSEHLDVLKLLQIEQEKMDVSEPLSLDKYKKMVYLEQVIKEVLRLVPPVSGGLRKIIEDCSFQGFRIPKGWHAYYYISSVLKDPEIYKQPEIFNPERFNPTNAEDKKKPLCYIPFGGGARECIGKEFAYLVIKIFISALLDNCSWKFKENQDLTINTFPVARPAHKIEVCFTPK

SEQ ID NO: 961 - protein, 318 aa, Trichodesmium erythraeum IMS101
MTANYLEKWVEMGTLTWYPEIRNYTFDIASLLFMGSDESSQTKLVSLFEEWVKGLFSIPLSLPWTRFGKSLRCRQKLLQHIEEIILQRQQQQNLGEDALGILLQAQDKEVNGLSLDELKDQILLLLFAGHETLTSAIASFCLLTSQHLDVLTRLRQEQKQFSAIEPLTLENLKRMTYLDMVLKEVLRLIPPVGGGFRQVTQDCEFCGYSIPKGWLVQYQIAKTHQDETLYPDDKNFDPERFAPENAVDKQKVFGYVPFGGGMRECLGKEFARLEMKIFAVMLLRGYEWELLPEQDLSVVAAPTPYPRDGLKVKFRKVE

SEQ ID NO: 962 - protein, 486 aa, Bradyrhizobium japonicum USDA 110
MLPRSAGAGRNKVAVARCPFGQPTGALVMSMQNVAAPALQFTAPRRNELTHIPGDEGWPVIGKTFQVLADPKGHIEANGAKYGPVYRTHVFGETNVVLLGPEANELVMFDQQKLFSSTHGWNKVLGLLFPRGLMLLDFDEHRLHRKALSVAFKSGPMKSYLSDLDRGISARVAQWKAKPGEMQLYPAMKQLTLDLAAASFLGADIGPEVDEINRAFVDMVAAAVAPIRRPLPGTQMARGVAGRKRIVAYFRQQIPLRRGNHGGDDLFSQLCRATHEDGALLSEQDIIDHMSFLMMAAHDTLTSSLTSFIGELAANPDWQDRLRAEVLALGLAPGAPSSFDDLEKMPLSEMAFKEALRIKPPVPSMPRRAMRDFTFKGFRIPAGTAVGVNPLYTHHMKDIWPEPDRFDPLRFTEEAQRNRHRFAWVPFGGGAHMCLGLHFAYMQAKCFARHFLQNIEVSLAPGYKPDWQMWPIPKPRDGLKVRVKAV

SEQ ID NO: 963 - protein, 473 aa, Streptomyces avermitilis MA-4680
MAAVTAAGAAQAPIVAGHPLLGSMNDLLNDPLATYLRARRDHGDVVRFRAGPPGLRADIYAVFSAEGAQQVLATESGNFRKDNVFYGELRDSVGNGLLTSQDATYLRQRRLVQPLFTRRRVDGYAGQVADEAAGLAEAWRGIPGGGVELVGEMHRFALRVVGRILFGTDMETTFEVIERTLPLLQEYALKRGLAPVRTPRTWPTPANRRAARTQAELFALCDGIIDSRRNRKNEGDGGEESGEDLVTLLVRAGNAEDGSLDAAELREQVLIFLLAGHETTATALAFALHLLARHPEQQRRVRDEADRVLGGPGGRAPTAADMEALPYLTMVLKEAMRLYPSAPVIGRRAVADAEVDGVRIPAGADLFVSPWVTHRHPDYWPDPERFDPERFTPEAEAGRPRYAWFPFGGGPRACIGQHLSMLESVLGLAVLIREFEFEAVGEEEVPLGAGITLLAKGPARCRVIPRSSGPRSS

SEQ ID NO: 964 - protein, 513 aa, Orconectes limosus
MSWLLDGALDLETGSVITYLIVTTLITLTLVWYFKRQQKVWLLEQIPGPRGLPILGNVLYLNVDPPELFERFLAVAEYGEVSRLWLCNMCTCLLSSATTAEVILSSTKHLDKSEDYTLLHPWLGESLLNSAGSRWHARRKLLTPAFHFKILEQFMEVFNSQTNKLVHKLLKKADGSPFDISDDITHCVLDIICETAMGRSINAQDNSESEYVQAVRKISGLIQYRQFRPWMYYEFLFKLMGPIKEYNACFKTLHDMSNSTIKERKESRKDKANTEVLEEEEVFGKKKRQAFLDLMLEYAEDNPELTDEEIRKEVDTFMFAGHDTTASAINWVLYTLGLHPDIQTRVQEELDDIFGSSDRPATMDDLRQMKYAEMCIKETMRLFTPVPVISRDIKEEVVINNYRIPANTIVAVVIYKIHRDPEQFPDPEVFDPDRFLPENALKRHPYAYVPFSAGPRNCIGQKFAMLELKTVVSSIFRKLRVESVIPRKDLKMTAEIILRPANGNILKLSPRTK

SEQ ID NO: 965 - protein, 497 aa, Taxus chinensis
MDSFIFLRSIGTKFGQLESSPAIISLTLAPILAIILLLLFRYNHRSSVKLPPGKLGFPLIGETIQLLRTLRSETPQKFFDDRLKKFGPVYMTSLIGHSTVVLCGPAGNKLALSNEDKLVEMEGPKSFMKLIGEDSIVAKRGEDHRILRTALARFLGAQALQNYLGRMSSEIGHHFNKKWKGKDEVKVLPLVRGLIFSIASTLFFDANDGHQQKQLHHLLETILVGSLSVPLDFPGTRYRKGLQARLKLDEILSSLIKRRRSDLRSGIASDDQDLLSVLLTFRDEKGNSLTDQGILDNFSAMFHASYDTTVAPMALIFKLLYSNPEYHEKVFQEQLEIIGNKKEGEEISWKDLKSMKYTWQAVQESLRMYPPVFGIFRKAITDIHYDGYTIPKGWRVLCSPYTTHLREEYFPEPEKFRPSRFEDEGRHVTPYTYVPFGGGLRTCPGWEFSKIEILLFVHHFVKNFSSYIPVDPNEKVLSDPLPPLPANGFSIKLFPRS

SEQ ID NO: 966 - protein, 512 aa, Pinus taeda
MSVPEMGPFGVVVTGIVAIAIVYKLVQRWRFKLPPGPRPWPVVGNLLQIEPVRFRCFWDWSKKYGPIMSVWFGSTLNVVVSNTELAKEVLKEHDQQLADRPRSRSAEKFSRNGQDLIWADYGPHYVKVRKVCTLELFSPKRLEALRPIREDEVAAMVESIFNDCGKQEGIGKPLVVKRYLSGVAFNNITRPAFGKRFVNEEGKMDPQGVEFKEIVATGLKLGASLTMAEHIPYLRWMFPLEEGAFAKHGARRDNVTKAIMEEHTLARQTSGAKQHFVDALLTLQEKYDLSEDTIIGLLWDMITAGMDTTAITVEWAMAELVRNPRIQQKAQEEIDRVVGRDRVMNETDFPHLPYLQCITKEALRLHPPTPLMLPHKATQNVKIGGYDIPKGSNVHVNVWAIARDPAVWKDPVTFRPERFLEEDVDIKGHDYRLLPFGAGRRICPGAQLGINLVQSMLGHLLHHFVWAPPEGMQAEDIDLTENPGLVTFMAKPVQAIAIPRLPDHLYKRQPLN

SEQ ID NO: 967 - protein, 506 aa, Lithospermum erythrorhizon
MALPAIPLAIIIFLIISYKLYQKLRLKLPPGPRPLPIIGNIYQVKPVKFRCFYNWSKTYGPIFSIYYGSQMNVIVSTTELAKEVLKENDQHLADRFRTRSSASMSRGGKDLIWADYGPHYVKVRKLCNVELFSPKRLEAIRPMREDEYTALVESIYKDCTKPELKGKSLLVREYLSSVAFNNITRLAFGKRFMDSNGVVNEQGQEFKKITHDGIKITAKLSIAEYIPWIRWMFKVEQDALDKFAADRDHLTRVIMEEHIKSGNTKQHFVDALLTLQKQYDISEDTIIGLLWDMIAAGMDTATISTEWAMAELVRNPRVQRKAQEELDRVVGPDRIMTEADVPKLPYLQCIVKESLRLHPPTPLMLPHRASANVKIGGYDIPKGSIVHVNVWAIARDPAYWKNPEEFRPERFMEEDIDMKGTDYRLLPFGAGRRICPGAQLAINLITSSLGHLLHQFTWSPQPGVKPEEIDLSENPGTVTYMRNPVKAVVSPRLSAVHLYKRVESDM

SEQ ID NO: 968 - protein, 498 aa, Mycobacterium abscessus
MDAVEAAQRPGGTMTNHLLAPAHHVKERLSSVIMVPAPHAVDDRWRRWSRDWPVRELAPAPAGSGLKAVRGDAGLPFVGHTLDYIRFGSDFSRERYDRLGSVSWMGAFGTKMVVIAGPDATREAFTSEAKAFSQDGWSFLIDAFFHRGLMLMSFDEHLMHRRIMQEAFTRPRLTGYVEQVTPCVRSAVPAWPVGPSVRIYPLLKELTLDIATDVFMGGRGKDESDAVNKAFVATVRAASSLVRAPLPGTRFRAGVQGRRVLEDYFFRHLPAARAGETEDLFAALCQATTEDGERFSDEDVVNHMIFLMMAAHDTSTITTTAVTYFLAKYPQWQEAAAAEAAAIGDGLPDIEALEKMTVIDRVIKEALRLLAPVPLVMRKTVRDVAIDGYHIPSNTLCAITPAVNHFDRTIWNDPERFDPSRFDEPRREDQHHRFAWVPFGGGAHKCIGMQFGTLEVKAILHRMLRSFTWKVPENYHVRWDNTSLPIPVDGLPLEMKRR

SEQ ID NO: 969 - protein, 478 aa, Arabidopsis thaliana
MWALLIWVSLLLISITHWVYSWRNPKCRGKLPPGSMGFPLLGESIQFFKPNKTSDIPPFIKERVKKYGPIFKTNLVGRPVIVSTDADLSYFVFNQEGRCFQSWYPDTFTHIFGKKNVGSLHGFMYKYLKNMVLTLFGHDGLKKMLPQVEMTANKRLELWSNQDSVELKDATASMIFDLTAKKLISHDPDKSSENLRANFVAFIQGLISFPFDIPGTAYHKCLQGRAKAMKMLRNMLQERRENPRKNPSDFFDYVIEEIQKEGTILTEEIALDLMFVLLFASFETTSLALTLAIKFLSDDPEVLKRLTEEHETILRNREDADSGLTWEEYKSMTYTFQFINETARLANIVPAIFRKALRDIKFKEFVNDTDYTIPAGWAVMVCPPAVHLNPEMYKDPLVFNPSRWEGSKVTNASKHFMAFGGGMRFCVGTDFTKLQMAAFLHSLVTKYRWEEIKGGNITRTPGLQFPNGYHVKLHKKRD

SEQ ID NO: 970 - protein, 639 aa, Arabidopsis thaliana
MPEHWVFVPKPHEVGSWKKVPSDFCPFIPVRRGQCINGVTYYLAWIDMYNSVLVSFDIRSEELTMSQIPRRDDGDGSRKNVSLIEYGGKVTLLDSNHLRDKGMLVLRVLEDAGINKEWSKKTMVLHPYQLHLVQVDIIFNVNDIMKEMWGVALSFVIALVVVKISLWLYRWANPNCSGKLPPGSMGFPVIGETVEFFKPYSFNEIHPFVKKRMFKHGGSLFRTNILGSKTIVSTDPEVNFEILKQENRCFIMSYPEALVRIFGKDNLFFKQGKDFHRYMRHIALQLLGPECLKQRFIQQIDIATSEHLKSVSFQGVVDVKDTSGRLILEQMILMIISNIKPETKSKLIESFRDFSFDLVRSPFDPSFWNALYNGLMARSNVMKMLKRMFKERREEATSDDSKYGDFMETMIYEVEKEGDTINEERSVELILSLLIASYETTSTMTALTVKFIAENPKVLMELKREHETILQNRADKESGVTWKEYRSMMNFTHMVINESLRLGSLSPAMFRKAVNDVEIKGYTIPAGWIVLVVPSLLHYDPQIYEQPCEFNPWRWEGKELLSGSKTFMAFGGGARLCAGAEFARLQMAIFLHHLVTTYDFSLIDKSYIIRAPLLRFSKPIRITISENPLSSSHQNANLF

SEQ ID NO: 971 - protein, 479 aa, Arabidopsis thaliana
MSSIWNVAMLMVALVVVRISHWLYRWSNPKCPGKLPPGSMGFPIIGETLDFFKPCGVEGIPTFVKKRMIRYGPLFRTNIFGSKTVVSTDPDVIHQIFRQENTSFELGYPDIFVKVFGKDNLFLKEVFIHKYLQKITMQILGSEGLKQTMLGNMDKATRDHIRSIASQGSFNVRKEVENLVVAYMTPKLISNLKPETQSKLIDNLNAFNLDWFKSFLRLSTWKAVTKALKSREEAIQVMKDVLMMRKETREKQEDFLNTLLEELEKDGSFFDQGSAINLIFLLAFALREGTSSCTALAVKFISKDPKVLAELKREHKAIVDNRKDKEAGVSWEEYRHNMTFTNMVSNEVLRLANTTPLLFRKAVQDVEIKGYTIPAGWIVAVAPSAVHFDPAIYENPFEFNPWRWEGKEMIWGSKTFMAFGYGVRLCVGAEFSRLQMAIFLHHLVAYYDFSMVQDSEIIRSPFHQYTKDLLINISQSPTK

SEQ ID NO: 972 - protein, 518 aa, Arabidopsis thaliana
MDRRGKYWAGPMWIGLSMCGSGSDTILECRLRLFKLQRQNQMSFVWSAAVWVIAVAAVVISKWLYRWSNPKCNGKLPPGSMGLPIIGETCDFFEPHGLYEISPFVKKRMLKYGPLFRTNIFGSNTVVLTEPDIIFEVFRQENKSFVFSYPEAFVKPFGKENVFLKHGNIHKHVKQISLQHLGSEALKKKMIGEIDRVTYEHLRSKANQGSFDAKEAVESVIMAHLTPKIISNLKPETQATLVDNIMALGSEWFQSPLKLTTLISIYKVFIARRYALQVIKDVFTRRKASREMCGDFLDTMVEEGEKEDVIFNEESAINLIFAILVVAKESTSSVTSLAIKFLAENHKALAELKREHAAILQNRNGKGAGVSWEEYRHQMTFTNMVINETLRMANMAPIMYRKAVNDVEIKGYTIPAGWIVAVIPPAVHFNDAIYENPLEFNPWRWEGKELRSGSKTFMVFGGGVRQCVGAEFARLQISIFIHHLVTTYDFSLAQESEFIRAPLPYFPKGLPIKISQSL

SEQ ID NO: 973 - protein, 477 aa, Arabidopsis thaliana
MSFVWSAAVWVIAVAAVVISKWLYRWSNPKCNGKLPPGSMGLPIIGETCDFFEPHGLYEISPFVKKRMLKYGPLFRTNIFGSNTVVLTEPDIIFEVFRQENKSFVFSYPEAFVKPFGKENVFLKHGNIHKHVKQISLQHLGSEALKKKMIGEIDRVTYEHLRSKANQGSFDAKEAVESVIMAHLTPKIISNLKPETQATLVDNIMALGSEWFQSPLKLTTLISIYKVFIARRYALQVIKDVFTRRKASREMCGDFLDTMVEEGEKEDVIFNEDSAINLIFAILVVAKESTSSVTSLAIKFLAENHKALAELKREHAAILQNRNGKGAGVSWEEYRHQMTFTNMVINETLRMANMAPIMYRKAVNDVEIKGYTIPAGWIVAVIPPAVHFNDAIYENPLEFNPWRWEGKELRSGSKTFMVFGGGVRQCVGAEFARLQISIFIHHLVTTYDFSLAQESEFIRAPLPYFPKGLPIKISQSL

SEQ ID NO: 974 - protein, 395 aa, Phascolarctos cinereus
LILSKRDPKSHDVYKFLIPWIGKGLLVLNGSDWFRHRRLLTPAFHSDILKPYVGLMADSARVMLDKWEKLSYQPLSLEISEHVSLMTLDSLMKCAFSHQSNCQMDRHSNLYIQAVHDLSYLLSSRMRNAFYHNDVLYWFSSAGRRTREAAQRAHQYTDQVIQKRRQQLEQEGGLEAISRKRHLDFLDILLCARTEGGDSLLDEELRAEVDTFMFEGHDTTASGISWLLYALATHPEHQQKCREEIRGVLGDGTSITWDHLGQLPYTTMCIKEALRLYPPVPSIGRDIKETITFPDGRILRAGNSVSLHIYALHHNPRVWENPEVFNPFRFSPENLTLQHSHAFLPFSAGSRNCIGQKFAMNEMKVVLALTLLLFELKPDTMKPPLPISKLVLKSK

SEQ ID NO: 975 - protein, 500 aa, Phascolarctos cinereus
MNSPLSFAWFQGNVSGLLQVSFLLGLGLLVLKVAQMYVRRQRLLRDFQNFPGPPSHWLYGNTLEFPVEEELPKMASLAEKFPCAFPRWLTGSWNLLQVYDPEYMKLILSKRDPKSHDVYKFLIPWIGKGLLVLNGSDWFRHRRLLTPAFHSDILKPYVGLMADSARVMLDKWEKLSYQPLSLEISEHVSLMTLDSLMKCAFSHQSNCQMDRHSNLYIQAVHDLSYLLSSRMRNAFYHNDVLYWFSSAGRRTREAAQRAHQYTDQVIQRRRQQLEQEGGLEAISRKRHLDFLDILLCARTEGGDSLLDEELRAEVDTFMFEGHDTTASGISWLLYALATHPEHQQKCREEIRGVLGDGTSITWDHLGQLPYTTMCIKEALRLYPPVPSIGRDIKETITFPDGRILRAGNSVSLHIYALHHNPRVWENPEVFNPFRFSPENLTLQHSHAFLPFSAGSRNCIGQKFAMNEMKVVLALTLLLFELKPDTMKPPLPISKLVLKSK

SEQ ID NO: 976 - protein, 401 aa, Oryza sativa (japonica cultivar-group)
MVGQDLIVCLDPEVNSFVFQQEERLFQCWYPDSFMRIIGADNIITTLGSSHKYIRNLILRLFGPENLRRAMLQDVHRTAQASLLSWLDRPSIELKDAVSSMIFSVTAKKLISYDSLASDGKMWKQFDAFIRGLLAFPIGIPGTAFYKCMQGRKNIMKMLKELIDERKEASGRRGSIDFIDVLLEELNEEKPLISENVALDLIFLLLFASFETTASAITAVVRFLTDNPEALQELAEEHDNIQKRRVDLNSEITWEEYKSMKFTSHVIHEALRLANIAPVMFRKATEDVHIKGFFIPKGSKIMICPSTVHLNPMIYKDPNIFNPWRWKDTAEPTGGASKDFMAFGGGLRLCVGADFAKLQTAIFLHCLVTKYRWKAIKGGTMVLGPGLRFPEGFHIQLFPKP

SEQ ID NO: 977 - protein, 464 aa, Lycopersicon esculentum
MAFFLIFLSSFFGLCIFCTALLRWNQVKYNQKNLPPGTMGWPLFGETTEFLKLGPSFMKNQRARYGSFFKSHILGCPTIVSMDSELNRYILVNEAKGLVPGYPQSMIDILGKCNIAAVNGSAHKYMRGALLSLISPTMIRDQLLPKIDEFMRSHLTNWDNKVIDIQEKTNKMAFLSSLKQIAGIESTSLAQEFMSEFFNLVLGTLSLPINLPNTNYHRGFQARKIIVNLLRTLIEERRASKEIQHDMLGYLMNEEATRFKLTDDEMIDLIITILYSGYETVSTTSMMAVKYLHDHPKVLEELRKEHMAIREKKKPEDPIDYNDYRSMRFTRAVILETSRLATIVNGVLRKTTQDMEINGYIIPKGWRIYVYTRELNYDPRLYPDPYSFNPWRWMDKSLEHQNSFLVFGGGTRQCPGKELGVAEISTFLHYFVTKYRWEEIGGDKLMKFPRVEAPNGLRIRVSAH

SEQ ID NO: 978 - protein, 474 aa, Solanum tuberosum
DLFLLSFATILTIIIYVFFKYFFAKPKEKIPPGTFGWPIIGETIQFFISLYYGMVHEFVQERTKKYNSHVFKTSLLGQKVVIFSGPAANKFIFTQGNKLIIGWRPKSVQKLFASTSFVPIEHDTKRAHNVISYLLNSQNVERLISTMDNMSHLHLKNHWKGKNEVIVYDLVKLFTFSLSIRAFIGIKESDKILNLYEKFKIFTYGLLAVDINLPGTTFYKAMKAGNELRKQMKVIIKQRRAELSENPNLSKVDVLTQMINEQDEDGKYMTEVEIEDKVFGFIIGSYDTTATTITLTMKYLQQMPEFFNEIIQEQNEISMQMMPRKELCWNDIQKMKKTWSFVNEVLRNTPVVQGIFREVIEDFTYEDFYIPKGWKIYLSFGATQKNGEYFPNPTKFDPSRFEGNGQVPYTSVPFGGGHRMCPGKEFARILILVFLHHLLKNFRWEPKVPSEKILYPFFLLAIPTDGYPITLSAV

SEQ ID NO: 979 - protein, 509 aa, Sesamum indicum
MALPLLILSFLTIFIAYKLFQRLRYKLPPGPRPLPVVGNLYDIKPLLVRCFTEWSQVYGPIFSVYLGSHLSVVVNSAELAKEVLKDNDQQLANRNRTRQIAKFSKNGADLIWSDYGPHYVKVRKLCTLELFSMKRLEGLRPIREDEVTAMVESIFKDCNKPENKGKALVLREYLGMMAFLHIARLTFGKRFMDSNGVVDGQGEELKAILHNGIKLGTKKSWAEFLPWFRFLFKTENQLLAEHDALADSFTKKIMQEHTLARQKTGNTKNHFVDALLTLQKEYDLSDDTVIGLLWDMISAGMVTTTITVEWAMAELVRNPRVQQKVQEELDRVVGSDRVMTEADIPNLPYLQCVTKECFRMHPPTPLMLPHKASTNVKIGGYDIPKGATVSVNVWALARDPAVWKNPLEFRPERFQEEDIDMKGTDYRLLPFGSGRRICPGAQLAIYLVTSMLGHMLHHFTWTPPAGTKPEDMDMMEQPGTVTYMRTPLQAVPTPRLPADLFKRVASGNV

SEQ ID NO: 980 - protein, 224 aa, Helianthus annuus
NDFFDYVLEELKQNDTMLTEATALDLMFALLFANFETTSQAITVAIKFLTHNPRALKELTEEHQKILRKRENPKLDLHGKNIVDEIYLQVINETLRLASIVPVLFRKAKKDIKFKGYTIPSGWAVMVCPPAVHLDPVNYKDPLDFNPWRWEDMDLKSASKTFMAFGGGQRFCVGADFAKLQIAIFLHCLVTKYQWQPIKGGDIVRTPGLQFPNGFHVRIFEKET

SEQ ID NO: 981 - protein, 414 aa, Oryza sativa
  unsure (1)..(414): unsure at all Xaa locations
XGPVFRTNMVGQDLIVCLDPKVNSFVFQQEERLFQCWYPDSFMRIIGADNIITTLGSSHKYIRNLILRLFGPENLRRAMLQDVHRTAQASLLSWLDRPSIELKDAVSSMIFSVTAKKLISYDSLASDGKMWKQFDAFIRGLLAFPIGIPGTAFYKCMQGRKNIMKMLKELIDERKEASGRRGSIDFIDVLLEELNEEKPLISENVALDLIFLLLFASFETTASAITAVVRFLTDNPEALQELAEEHDNIQKRRVDLNSEITWEEYKSMKFTSHVIHEALRLANIAPVMFRKATEDVHIKVCLICAGFFIPKGSKIMICPSTVHLNPMIYKDPNIFNPWRWKVCKIHNASKDFMAFGGGLRLCVGADFAKLQTAIFLHCLVTKYRWKAIKGGTMVLGPGLRFPEGFHIQLFPKPX

SEQ ID NO: 982 - protein, 481 aa, Sorghum bicolor
MSMHYLAALSVTLLGAILLRWAFKWMNYGRTGGEEGMLLPPGSRGLPFLGETLEFFAASPTLELVPFFKRRLERFGPIFRTNIVGEDMIVSLDPELNARVLQQEERGFQIWYPSSFMRILGADNMVSMLGPLHRHIRNLVLRLFGPEALRLVLLRDVQRSARDELRSWLDRPEVEVRTATSRMIFGVTAKKLISHDDVASGGSLWKCFDAWTKGLMSFPICVPGTAFYRCMQGRKNVMKVLKQQLDERRNGAERKTVDFFDLVIDELDKPNSIMSESIALNLLFLLLFASHETTSMGLTVILKFLTDNPKSLQELTEEHEKIMERRVDPDSDITWEEYKSMKFTSHVIHESLRLANIAPVVFRQANQDVHIKGYTIPEGSKIMICPSAAHLNSKVYEDPLAFNPWRWKDTPEPVGGSKDFMAFGGGLRLCVGAEFAKLQMAMFLHYLVTNYRWKALSKGTMMLYPGLRFPDGFHIQLHKKT

SEQ ID NO: 983 - protein, 178 aa, Triticum aestivum
  unsure (1)..(178): unsure at all Xaa locations
XSVVESLKEEHEAILKKREGAGTSAITWDEYKSMAFTAQVTNEIVRLSNVAPGIFRKTLTDVQAKGYTIPAGWLVMISPISVNLNPELYEDPLAFNPWRWQDESKKSTLLKNFMPFGGGLRLCVGAEFSRIQIALFLHTLVTKYRWKEIKGGEVQRISEIVFPKGYHIQIIPREESIN

SEQ ID NO: 984 - protein, 168 aa, Triticum aestivum
  unsure (1)..(168): unsure at all Xaa locations
XLMVEHETIXNQREXDGDRVTWKEYKSMTFTSQVINETVRLANIAPGXFRKTLKDVQFRGYXIPAGWGVMVCPLAVHLNPDIYPDPLTFNPSRFKDKLEANRGSRHFMAFGGGLRSCVGADFSKLQMAIFLHFLVTKYRWIQLGGGXIVRCPGLEFPDGYLIQIRQRD

SEQ ID NO: 985 - protein, 394 aa, Zea mays subsp. mays
LGSARRARLPPGEMGWPLVGGMWAFLRAFKSGKPDAFIASFVRRFGRTGVYRSFMFSSPTVLVTTAEGCKQVLMDDDAFVTGWPKATVALVGPRSFVAMPYDEHRRIRKLTAAPINGFDALTGYLPFINRTVTSSLRAWADHGGSVEFLTELRRMTFKIIVQIFLGGADQATTRALERSYTELNYGMRAMAINLPGFAYRGALRARRRLVAVLQGVLDERRAARAKGVSGGGVDMMDRLIEAQDERGRRLDDDEIIDVLVMYLNAGHESSGHITMWATVFLQENPDMFARAKAEQEAIMRSIPSSQRGLTLRDFRKMEYLSQVIDETLRLVNISFVSFRQATRDVFVNGYLIPKGWKVQLWYRSVHMDPQVYPDPTKFDPLRWEGHSPRAGTFL

SEQ ID NO: 986 - protein, 394 aa, Zea mays subsp. mays
LGSARRARLPPGEMGWPLVGGMWAFLRAFKSGKPDAFIASFVRRFGRTGVYRSFMFSSPTVLVTTAEGCKQVLMDDDAFVTGWPKATVALVGPRSFVAMPYDEHRRIRKLTAAPINGFDALTGYLPFIDRTVTSSLRAWADHGGSVEFLTELRRMTFKIIVQIFLGGADQATTRALERSYTELNYGMRAMAINLPGFAYRGALRARRRLVAVLQGVLDERRAARAKGVSGGGVDMMDRLIEAQDERGRRLDDDEIIDVLVMYLNAGHESSGHITMWATVFLQENPDMFARAKAEQEAIMRSIPSSQRGLTLRDFRKMEYLSQVIDETLRLVNISFVSFRQATRDVFVNGYLIPKGWKVQLWYRSVHMDPQVYPDPTKFDPSRWEGHSPRAGTFL

SEQ ID NO: 987 - protein, 394 aa, Zea mays subsp. mays
  unsure (1)..(394): unsure at all Xaa locations
LGAARRARLPPGEMGWPLVGGMWAFLRAFKSGKPDAFIASFVRRFGRTGVYRSFMFSSPTVLVTTAEGCKQVLMDDDAFVTGWPKATVALVGPRSFVAMPYDEHRRIRKLTAAPINGFDALTGYLPFINRTVTSSLRAWADHGGSVEFLTELRRMTFKIIVQIFLGGADQATTRALERSYTELNYGMRAMAINLPGFAYRGALRARRRLVAVLQGVLDERRAARAKXVSGGGXDMMDWLIEAQDERGRRLDDDEIIDVLVMYLNAGHESSGHITMWATVFLQENPDMFARAKAEQEAIMRSIPSSQQGLTLRDFRKMEYLSQVIDETLRLVNISFVSFRQATRDVFVNGYLIPKGWKVQLWYRSVHMDPQVYPDPTKFDPSRWEGHSPRAGTFL

SEQ ID NO: 988 - protein, 394 aa, Zea mays subsp. mays
LGAARRARLPPGEMGWPLVGGMWAFLRAFKSGKPDAFIASFVRRFGRTGVYRSFMFSSPTVLVTTAEGCKQVLMDDDAFVTGWPKATVALVGPRSFVAMPYDEHRRIRKLTAAPINGFDALTGYLPFIDRTVTSSLRAWADHGGSVEFLTELRRMTFKIIVQIFLGGADQATTRALERSYTELNYGMRAMAINLPGFAYRGALRARRRLVAVLQGVLDERRAARAKGVSGGGVDMMDRLIEAQDERGRRLDDDEIIDVLVMYLNAGHESSGHITMWATVFLQENPDMFARAKAEQEAIMRSIPSSQQGLTLRDFRKMEYLSQVIDETLRLVNISFVSFRQATRDVFVNGYLIPKGWKVQLWYRSVHMDPQVYPDPTKFDPSRWEGHSPRAGTFL

SEQ ID NO: 989 - protein, 394 aa, Zea mays subsp. mays
LGAERRARLPPGEMGWPLVGGMWAFLRAFKSGKPDAFIASFVRRFGRTGVYRSFMFSSPTVLVTTAEGCKQVLMDDDAFVTGWPKATVALVGPRSFVAMPYDEHRRIRKLTAAPINGFDALTGYLPFIDRTVTSSLRAWADHGGSVEFLTELRRMTFKIIVQIFLGGADQATTRALERSYTELNYGMRAMAINLPGFAYHGALRARRRLVAVLQGVLDERRAARAKGVSGGGVDMMDRLIEAQDERGRRLDDDEIIDVLVMYLNAGHESSGHITMWATVFLQENPDMFARAKAEQEAIMRSIPSSQQGLTLRDFRKMEYLSQVIDETLRLVNISFVSFRQATRDVFVNGYLIPKGWKVQLWYRSVHMDPQVYPDPTKFDPSRWEGHSPRAGTFL

SEQ ID NO: 990 - protein, 394 aa, Zea mays subsp. mays
  unsure (1)..(394): unsure at all Xaa locations
LGAARRARLPPGEMGWPLVGGMWAFLRAFKSGKPDAFIASFVRRFGRTGVYRSFMFSSPTVLVTTAEGCKQVLMDDDAFVTGWPKXTVALVGPRSFVAMPYDEHRRIRKLTAAPINGFDALTGYLPFIDRTVTSSLRAWADHGGSVEFLTELRRMTFKIIVQIFLGGADQATTRALERSYTELNYGMRAMAINLPGFAYRGALRARRRLVAVLQGVLDERRAARAKGVSGGGVDMMDRLIEAQDERGRRLDDDEIIDVLVMYLNAGHESSGHITMWATVFLQENPDMFARAKAEQEAIMRSIPSSQQGLTLRDFRKMEYLSQVIDETLRLVNISFVSFRQATRDVFVNGYLIPKGWKVQLWYRSVHMDPQVYPDPTKFDPSRWEGHSPRAGTFL

SEQ ID NO: 991 - protein, 394 aa, Zea mays subsp. mays
LGSARRARLPPGEMGWPLVGGMWAFLRAFKSGKPDAFIASFVRRFGRTGVYRSFMFSSPTVLVTTAEGCKQVLMDDDAFVTGWPKATVALVGPRSFVAMPHDEHRRIRKLTAAPINGFDALTGYLPFIDSTVTSSLRAWADHGGSVEFLTELRRMTFKIIVQIFLGGADQATTRALERSYTELNYGMRAMAINLPGFAYRGALRARRRLVAVLQGVLDERRAARAKGVSGGGVDMMDRLIEAQDERGRRLDDDEIIDVLVMYLNAGHESSGHITMWATVFLQENPDMFARAKAEQEAIMRSIPSSQQGLTLRDFRKMEYLSQVIDETLRLVNISFVSFRQATRDVFVNGYLIPKGWKVQLWYRSVHMDPQVYPDPTKFDPSRWEGHSPRAGTFL

SEQ ID NO: 992 - protein, 394 aa, Zea mays subsp. mays
LGSARRARLPPGEMGWPLVGGMWAFLRAFKSGKPDAFIASFVRRFGRTGVYRSFMFSSPTVLVTTGEGCKQVLMDDDAFVTGWPKATVALVGPRSFVAMPYDEHRRIRKLTAAPINGFDALTGYLPFINRTVTSSLRAWADHGGSVEFLTELRRMTFKIIVQIFLGGADQATTRALERSYTELNYGMRAMAINLPGFAYRGALRARRRLVAVLQGVLDERRAARAKGISGGGVDMMDRLIEAQDERGRRLDDDEIIDVLVMYLNAGHESSGHITMWATVFLQENPDMFARAKAEQEAIMRSIPSSQQGLTLRDFRKMEYLSQVIDETLRLVNISFVSFRQATRDVFVNGYLIPKGWKVQLWYRSVHMDPQVYPDPTKFDPSRWEGHSPRAGTFL

SEQ ID NO: 993 - protein, 394 aa, Zea mays subsp. mays
  unsure (1)..(394): unsure at all Xaa locations
XGAXRRARLPPGEMGWPLVGGMWDFLRAXKSGXPDXFIASFVRRFGRTGVYRSFMFSSPTVLVTTAEGCKQVLMDDDAFVTGWPKATVALVGPRSFVAMPYDEHRRIRKLTAAPINGFDALTGYLPFIDRTVTSSLRAWADHGGSVEFLTELRRMTFKIIVQIFLGGADQATTRALERSYTELNYGMRAMAINLPGFAYRGALRARRRLVAVLQGVLDERRAARAKGVSGGGVDMMDRLIEAQDERGRRLDDDEIIDVLVMYLNAGHESSGHITMWATVFLQENPDMFARAKAEQEAIMRSIPSSQRGLTLRDFRKMEYLSQVIDETLRLVNISFVSFRQATRDVFVNGYLIPKGWKVQLWYRSVHMDPQVYPDPTKFDPSRWEGHSPRAGTFL

SEQ ID NO: 994 - protein, 394 aa, Zea mays subsp. mays
LGAARRARLPPGEMGWPLVGGMWAFLRAFKSGKPDAFIASFVRRFGRTGVYRSFMFSSPTVLVTTAEGCKQVLMDDDAFVTGWPKATVALVGPRSFVAMPYDEHRRIRKLTAAPINGFDALTGYLPFIDRTVTSSLRAWADHGGSVEFLTELRRMTFKIIVQIFLGGADQATTRALERSYTELNYGMRAMAINLPGFAYRGALRARRRLVAVLQGVLDERRAARAKGVSGGGVDMMDRLIEAQDERGRRLDDDEIIDVLVMYLNAGHESSGHITMWATVFLQENPDMFARAKAEQEAIMRSIPSSQQGLSLRDFRKMEYLSQVIDETLRLVNISFVSFRQATRDVFVNGYLIPKGWKVQLWYRSVHMDPQVYPDPTKFDPSRWEGHSPRAGTFL

SEQ ID NO: 995 - protein, 394 aa, Zea mays subsp. mays
LGAARRARLPPGEMGWPLVGGMWAFLRAFKSGKPDAFIASFVRRFGRTGVYRSFMFSSPTVLVTTAEGCKQVLMDDDAFVTGWPKATVALVGPRSFVAMPHDEHRRIRKLTAAPINGFDALTGYLPFIDSTVTSSLRAWADHGGSVEFLTELRRMTFKIIVQIFLGGADQATTRALERSYTELNYGMRAMAINLPGFAYRGALRARRRLVAVLQGVLDERRAARAKGVSGGGVDMMDRLIEAQDERGRRLDDDEIIDVLVMYLNAGHESSGHITMWATVFLQENPDMFARAKAEQEAIMRSIPSSQQGLTLRDFRKMEYLSQVIDETLRLVNISFVSFRQATRDVFVNGYLIPKGWKVQLWYRSVHMDPQVYPDPTKFDPSRWEGHSPRAGTFL

SEQ ID NO: 996 - protein, 394 aa, Zea mays subsp. mays
  unsure (1)..(394): unsure at all Xaa locations
LGAERRARLPPGEMGWPLVGGMWDFLRAXKSGKPDXFIASFVRRFGRTGVYRSFMFSSPTVLVTTAEGCKQVLMDDDAFVTGWPKATVALVGPRSFVAMPYDEHRRIRKLTAAPINGFDALTGYLPFIDRTVTSSLRAWADHGGSVEFLTELRRMTFKIIVQIFLGGADQATTRALERSYTELNYGMRAMAINLPGFAYRGALRARRRLVAVLQGVLDERRAARAKGVSGGGVDMMDRLIEAQDERGRRLDDDEIIDVLVMYLNAGHESSGHITMWATVFLQENPDMFARAKAEQEAIMRSIPSSQQGLTLRDFRKMEYLSQVIDETLRLVNISFVSFRQATRDVFVNGYLIPKGWKVQLWYRSVHMDPQVYPDPTKFDPSRWEGHSPRAGTFL

SEQ ID NO: 997 - protein, 394 aa, Zea mays subsp. mays
LGAERRARLPPGEMGWPLVGGMWAFLRAFKSGKPDAFIASFVRRFGRTGVYRSFMFSSPTVLVTTAEGCKQVLMDDDAFVTGWPKATVALVGPRSFVAMPYDEHRRIRKLTAAPINGFDALTGYLPFIDRTVTSSLRAWADHGGSVEFLTELRRMTFKIIVQIFLGGADQATTRALERSYTELNYGMRAMAINLPGFAYRGALRARRRLVAVLQGVLDERRAARAKGVSGGGVDMMDRLIEAQDERGRRLDDDEIIDVLVMYLNAGHESSGHITMWATVFLQENPDMFARAKAEQEAIMRSIPSSQQGLTLRDFRKMEYLSQVIDETLRLVNISFVSFRQATRDVFVNGYLIPKGWKVQLWYRSVHMDPHVYPDPTKFDPSRWEGHSPRAGTFL

SEQ ID NO: 998 - protein, 394 aa, Zea mays subsp. mays
LGSARRARLPPGEMGWPLVGGMWAFLRAFKSGKPDAFIASFVRRFGRTGVYRSFTFSSPTVLVTTAEGCNQVLMDDDAFVTGWPKATVALVGPRSFVPIPHDEHRRIRKLTAAPINGFDALTGYLPFIDRTVTSSLRAWADHGGSVEFLTELRRMTFKIVVQIFLGGADQATTRALERSYTELNYGMRAMAINLPGFAYRGALRARRRLVAVLQGVLDERRAARAKGVSGGGVDMMDRLIEAQDERGRRLDDDEIIDVLVMYLNAGHESSGHITMWATVFLQENPDMFARAKAEQEAIMRSIPSSQRGLTLRDFRKMEYLSQVIDETLRLVNISFVSFRQATRDVFVNGYLIPKGWKVQLWYRSVHMDPQVYPDPTKFDPSRWEGHSPRAGTFL

SEQ ID NO: 999 - protein, 394 aa, Zea mays subsp. mays
LGAARRARLPPGEMGWPLVGGMWAFLRAFKSGKPDAFIASFVRRFGRTGVYRSFMFSSPTVLVTTAEGCKQVLMDDDAFVTGWPKATVALVGPRSFVAMPYDEHRRIRKLTAAPINGFDALTGYLPFIDRTVTSSLRAWADHGGSVEFLTELRRMTFKIIVQIFLGGADQATTRALERSYTELNYGMRAMAINLPGFAYRGALRARRRLVAVLQGVLDERCSARAKGVSGGGVDMMDRLIEAQDERGRRLDDDEIIDVLVMYLNAGHESSGHITMWATVFLQENPDMFARAKAEQEAIMRSIPSSQQGLTLRDFRKMEYLSQVIDETLRLVNISFVSFRQATRDVFVNGYLIPKGWKVQLWYRSVHMDPQVYPDPTKFDPSRWEGHSPRAGTFL

SEQ ID NO: 1000 - protein, 394 aa, Zea mays subsp. mays
  unsure (1)..(394): unsure at all Xaa locations
XGXARRARLPPXEMGWPLVGGMWDFLRAYKSGMPDTFIASFVRRFGRTGVYRSFMFSSPTVLVTTAEGCKQVLMDDDAFVTGWPKATVALVGPRSFVAMPYDEHRRIRKLTAAPINGFDALTGYLPFIDRTVTSSLRAWADHGGSVEFLTELRRMTFKIIVQIFLGGADQATTRALERSYTELNYGMRAMAINLPGFAYRGALRARRRLVAVLQGVLDERRAARAKGVSGGGVDMMDRLIEAQDERGRRLDDDEIIDVLVMYLNAGHESSGHITMWATVFLQENPDMFARAKAEQEAIMRSIPSSQRGLTLRDFRKMEYLSQVIDETLRLVNISFVSFRQATRDVFVNGYLIPKGWKVQLWYRSVHMDPQVYPDPTKFDPSRWEGHSPRAGTFL

SEQ ID NO: 1001 - protein, 394 aa, Zea mays subsp. mays
LGAARRARLPPGEMGWPLVGGMWAFLRAFKSGKPDAFIASFVWRFGRTGVYRSFMFSSPTVLVTTAEGCKQVLMDDDAFVTGWPKATVALVGPRSFVAMPYDEHRRIRKLTAAPINGFDALTGYLPFIDRTVTSSLRAWADHGGSVEFLTELRRMTFKIIVQIFLGGADQATTRALERSYTELNYGMRAMAINLPGFAYRGALRARRRLVAVLQGVLDERRAARAKGVSGGGVDMMDRLIEAQDERGRRLDDDEIIDVLVMYLNAGHESSGHITMWATVFLQENPDMFARAKAEQEAIMRSIPSSQQGLTLRDFRKMEYLSQVIDETLRLVNISFVSFRQATRDVFVNGYLIPKGWKVQLWYRSVHMDPQVYPDPTKFDPSRWEGHSPRAGTFL

SEQ ID NO: 1002 - protein, 394 aa, Zea mays subsp. mays
LGAERRARLPPGEMGWPLVGGMWAFLRAFKSGKPDAFIASFVRRFGRTGVYRSFMFSSPTVLVTTAEGRKQVLMDDDAFVTGWPKATVALVGPRSFVAMPHDEHRRIRKLTAAPINGFDALTGYLPFIDSTVTSSLRAWADHGGSVEFLTELRRMTFKIIVQIFLGGADQATTRALERSYTELNYGMRAMAINLPGFAYRGALRARRRLVAVLQGVLDERRAARAKGVSGGGVDMMDRLIEAQDERGRRLDDDEIIDVLVMYLNAGHESSGHITMWATVFLQENPDMFARAKAEQEAIMRSIPSSQQGLTLRDFRKMEYLSQVIDETLRLVNISFVSFRQATRDVFVNGYLIPKGWKVQLWYRSVHMDPHVYPDPTKFDPSRWEGHSPRAGTFL

SEQ ID NO: 1003 - protein, 394 aa, Zea mays subsp. mays
LGAERRARLPPGEMGWPLVGGMWAFLRAFKSGKPDAFIASFVRRFGRTGVYRSFMFSSPTVLVTTAEGCKQVLMDDDAFVTGWPKATVALVGPRSFVAMPHDEHRRIRKLTAAPINGFDALTGYLPFIDSTVTSSLRAWADHGGSVEFLTELRRMTFKIIVQIFLGGADQATTRALERSYTELNYGMRAMAINLPGFAYRGALRARRRLVAVLQGVLDERRAARAKGVSGGGVDMMDRLIEAQDERGRHLDDDEIIDVLVMYLNAGHESSGHITMWATVFLQENPDMFARAKAEQEAIMRSIPSSQQGLTLRDFRKMEYLSQVIDETLRLVNISFVSFRQATRDVFVNGYLIPKGWKVQLWYRSVHMDPHVYPDPTKFDPSRWEGHSPRAGTSL

SEQ ID NO: 1004 - protein, 394 aa, Zea mays subsp. mays
LGAERRARLPPGEMGWPLVGGMWAFLRAFKSGKPDAFIASFVRRFGRTGVYRSFMFSSPTVLVTTAEGCKQVLMDDDAFVTGWPKATVALVGPRSFVAMPHDEHRRIRKLTAAPINGFDALTGYLPFIDSTVTSSLRAWADHGGSVEFLTELRRMTFKIIVQIFLGGADQATTRALERSYTELNYGMRAMAINLPGFAYRGALRARRRLVAVLQGALDERRAARAKGVSGGGVDMMDRLIEAQDERGRHLDDDEIIDVLVMYLNAGHESSGHITMWATVFLQENPDMFARAKAEQEAIMRSIPSSQQGLTLRDFRKMEYLSQVIDETLRLVNISFVSFRQATRDVFVNGYLIPKGWKVQLWYRSVHMDPQVYPDPTKFDPSRWEGHSPRAGTFL

SEQ ID NO: 1005 - protein, 394 aa, Zea mays subsp. mays
LGAERRARLPPGQMGWPLVGGMWAFLRAFKSGKPDAFIASFVRRFGRTGVYRSFMFSSPTVLVTTAEGCKQVLMDDDAFVTGWPKATVALVGPRSFVAMPHDEHRRIRKLTAAPINGFDALTGYLPFIDSTVTSSLRAWADHGGSVEFLTELRRMTFKIIVQIFLGGADQATTRALERSYTELNCGMRAMAINLPGFAYRGALRARRRLVAVLQGVLDERRAARAKGVSGGGVDMMDRLIEAQDERGRHLDDDEIIDVLVMYLNAGHESSGHITMWATVFLQENPDMFARAKAEQEAIMRSIPSSQRGLTLRDFRKMEYLSQVIDETLRLVNISFVSFRQATRDVFVNGYLIPKGWKVQLWYRSVHMDPQVYPDPTKFDPLRWEGHSPRAGTFL

SEQ ID NO: 1006 - protein, 394 aa, Zea mays subsp. mays
LGAERRARLPPGEMGWPLVGGMWDFLRAFKSGKPDAFIASFVRRFGRTGVYRSFMFSSPTVLVTTAEGCKQVLMDDDAFVTGWPKATVALVGPRSFVAMPHDEHRRIRKLTAAPINGFDALTGYLPFIDSTVTSSLRAWADHGGSVEFLTELRRMTFKIIVQIFLGGADQATTRALERSYTELNYGMRPMAINLPGIAYRGALRARRRLVAVLQGVLDERRAARAKGVSGGGVDMMDRLIEAQDERGRRLDDDEIIDVLVMYLNAGHESSGHITMWATVFLQENPDMFARAKAEQEAIMRSIPSSQRGLTLRDFRKMEYLSQVIDETLRLVNISFVSFRQATRDVFVNGYLIPKGWKVQLWYRSVHMDPQVYPDPTKFDPLRWEGHSPRAGTFL

SEQ ID NO: 1007 - protein, 394 aa, Zea mays subsp. mays
LGAERRARLPPGEMGWPLVGGMWDFLRAYKSGKPDTFIDSFVRRFGRTGVYRSFMFSSPTVLVTTAEGCKQVLMDDDAFVTGWPKATVALVGPRSFVAMPHDEHRRIRKLTAAPINGFDALTGYLPFIDSTVTSSLRAWADHGGSVEFLTELRRMTFKIIVQIFLGGADQATTRALERSYTELNYGMRAMAINLPGFAYRGALRARRRLVAVLQGVLDERRAARAKGVSGGGVDMMDRLIEAQDERGRHLDDDEIIDVLVMYLNAGHESSGHITMWATVFLQENPDMFARAKAEQEAIMRSIPSSQRGLTLRDFRKMEYLSQVIDETLRLVNISFVSFRQATRDVFVNGYLIPKGWKVQLWYRSVHMDPQVYPDPTKFDPLRWEGHSPRAGTFL

SEQ ID NO: 1008 - protein, 394 aa, Zea mays subsp. mays
LGAERRARLPPGEMGWPLVGGMWAFLRAFKSGKPDAFIASFVRRFGRTGVYRSFMFSSPTVLVTTAEGCKQVLMDDDAFVTGWPKATVALVGPRSFVAMPHDEHRRIRKLTAAPINGFDALTGYLPFIDSTVTSSLRAWADHGGSVEFLTELRRMTFKIIVQIFLGGADQATTRALERSYTELNYGMRAMAINLPGFAYRGALRARRRLVAVLQGVLDERRAARAKGVSGGGVDMMDRLIEAQDERGRRLDDDEIIDVLVMYLNAGHESSGHITMWATVFLQENPDMFARAKAEQEAIMRSIPSSQRGLTLRDFRKMEYLSQVIDETLRLVNISFVSFRQATRDVFVNGYLIPKGWKVQLWYRSVHMDPQVYPDPTKFDPLRWEGHSPRAGTFL

SEQ ID NO: 1009 - protein, 394 aa, Zea mays subsp. mays
  unsure (1)..(394): unsure at all Xaa locations
LGAARRARLPPGEMGWPLVGGMWAFLRAFKSDKPDAFIASFVRRFGRTGVYRSFIFSSPTVLLTTPEGCKQVLMDDDAFVTGWPKATVALVGPRSFVAMPYDEHRRIRKLTAAPINGFDALTGYLPFIDRTVTSSLRAWADHGGSVEFLTELRRMTFKIIVQIFLGGADQATTRALERSYTELNYGMRAMAINLPSFAYRGALRARRRLVAVLQGVLDERRXARAKGVSGGGVDMMDRLIEAQDERGRRLDDDEIIDVLVMYLNAGHESSGHITMWATVFLQENPDMFARAKAEQEAIMRSIPSSQQGLTLRDFRKMEYLSQVIDETLRLVNISFVSFRQATRDVFVNGYLIPKGWKVQLWYRSVHMDPQVYPDPTKFDPSRWEGHSPRAGTFL

SEQ ID NO: 1010 - protein, 394 aa, Zea mays subsp. mays
LGAERRARLPPGEMGWPLVGGMWAFLRAFKSGKPDAFIASFVRRFGRTGVYRSFMFSSPTVLVTTAEGCKQVLMDDDAFVTGWPKATVALVGPRSFVAMPHDEHRRIRKLTAAPINGFDALTGYLPFIDSTVTSSLRAWADHGGSVEFLTELRRMTFKIIVQIFLGGADQATTRALERSYTELNYGMRAMAINLPGFAYRGALRARRRLVAVLQGVLDERRAARAKGVSGGGVDMMDRLIEAQDERGRRLDDDEIIDVLVMYLNAGHESSGHITMWATVFLQENPDMFARAKAEQEAIMRSIPSSQRGLTLRDFRKMEYLSQVIDETLRLVNISFVSFRQATRDVFVNGYLIPKGWKVQLWYRSVHMDPQVYPDPTKFDPSRWEGHSPRAGTFL

SEQ ID NO: 1011 - protein, 394 aa, Zea mays subsp. mays
LGAERRARLPPGEMGWPLVGGMWAFLRAFKSGKPDAFIASFVRRFGRTGVYRSFMFSSPTVLVTTAEGCKQVLMDDDAFVTGWPKATVALVGPRSFVAMPHDEHRRIRKLTAAPINGFDALTGYLPFIDSTVTSSLRAWADHGGSVEFLTELRRMTFKIIVQIFLGGADQATTRALERSYTELNYGMRAMAINLPGFAYRGALRARRRLVAVLQGVLDERRAARAKGVSGGGVDMMDRLIEAQDERGRHLDDDEIIDVLVMYLNAGHESSGHITMWATVFLQENPDMFARAKAEQEAIMRSIPSSQRGLTLRDFRKMEYLSQVIDETLRLVNISFVSFRQATRDVFVNGYLIPKGWKVQLWYRSVHMDPQVYPDPTKFDPLRWEGHSPRAGTFL

SEQ ID NO: 1012 - protein, 394 aa, Zea mays subsp. mays
LGAERRARLPPGEMGWPLVGGMWAFLRAFKSGKPDAFIASFVRRFGRTGVYRSFMFSSPTVLVTTAEGCKQVLMDDDAFVTGWPKATVALVGPRSFVAMPHDEHRRIRKLTAAPINGFDALTGYLPFIDSTVTSSLRAWADHGGSVEFLTELRRMTFKIIVQIFLGGADQATTRALERSYTELNYGMRAMAINLPGFAYRGALRARRRLVAVLQGVLDERRAARAKGISGGGVDMMDRLIEAQDERGRRLDDDEIIDVLVMYLNAGHESSGHITMWATVFLQENPDMFARAKAEQEAIMRSIPSSQQGLTLRDFRKMEYLSQVIDETLRLVNISFVSFRQATRDVFVNGYLIPKGWKVQLWYRSVHMDPQVYPDPTKFDPSRWEGHSPRAGTFL

SEQ ID NO: 1013 - protein, 394 aa, Zea mays subsp. mays
LGAERRARLPPGEMGWPLVGGMWAFLRAFKSGKPDAFIASFVRRFGRTGVYRSFMFSSPTVLVTTAEGCKQVLMDDDAFVTGWPKATVALVGPRSFVAMPHDEHRRIRKLTAAPINGFDALTGYLPFIDSTVTSSLRAWADHGGSVEFLTELRRMTFKIIVQIFLGGADQATTRALERSYTELNYGMRAMAINLPGFAYRGALRARRRLVAVLQGVLDERRAARAKGISGGGVDMMDRLIEAQDERGRRLDDDEIIDVLVMYLNAGHESSGHITMWATVFLQENPDMFARAKAEQEAIMRSIPSSQRGLTLRDFRKMEYLSQVIDETLRLVNISFVSFRQATRDVFVNGYLIPKGWKVQLWYRSVHMDPQVYPDPTKFDPSRWEGHSPRAGTFL

SEQ ID NO: 1014 - protein, 394 aa, Zea mays subsp. mays
LGAERRARLPPGEMGWPLVGGMWAFLRAFKSGKPDAFIASFVRRFGRTGVYRSFMFSSPTVLVTTAEGCKQVLMDDDAFVTGWPKATVALVGPRSFVAMPHDEHRRIRKLTAAPINGFDALTGYLPFIDSTVTSSLRAWADHGGSVEFLTELRRMTFKIIVQIFLGGADQATTRALERSYTELNYGMRAMAINLPGFAYRGALRARRRLVAVLQGVLDERRAARAKGVSGGGVDMMDRLIEAQDERGRRLDDDEIIDVLVMYLNAGHESSGHITMWATVFLQENPDMFARAKAEQEAIMRSIPSSQQGLTLRDFRKMEYLSQVIDETLRLVNISFVSFRQATRDVFVNGYLIPKGWKVQLWYRSVHMDPHVYPDPTKFDPSRWEGHSPRAGTFL

SEQ ID NO: 1015 - protein, 394 aa, Zea mays subsp. mays
LGAERRARLPPGEMGWPLVGGMWAFLRAFKSGKPDAFIASFVRRFGRTGVYRSFMFSSPTVLVTTAEGCKQVLMDDDAFVTGWPKATVALVGPRSFVAMPHDEHRRIRKLTAAPINGFDALTGYLPFIDSTVTSSLRAWADHGGSVEFLTELRRMTFKIIVQIFLGGADQATTRALERSYTELNYGMRAMAINLPGFAYRGALRARRRLVAVLQGVLDERRAARAKGVSGGGVDMMDRLIEAQDERGRHLDDDEIIDVLVMYLNAGHESSGHITMWATVFLQENPDMFARAKAEQEAIMRSIPSSQQGLTLRDFRKMEYLSQVIDETLRLVNISFVSFRQATRDVFVNGYLIPKGWKVQLWYRSVHMDPHVYPDPTKFDPSRWEGHSPRAGTFL

SEQ ID NO: 1016 - protein, 394 aa, Zea mays subsp. mays
  unsure (1)..(394): unsure at all Xaa locations
LGAERRARLPPGEMGWPLVGGMWDFLRAXKSGKPDXFIASFVRRFGRTGVYRSFMFSSPTVLVTTAEGCKQVLMDDDAFVTGWPKATVALVGPRSFVAMPYDEHRRIRKLTAAPINGFDALTGYLPFIDRTVTSSLRAWADHGGSVEFLTELRRMTFKIIVQIFLGGADQATTRALERSYTELNYGMRAMAINLPGFAYRGALRARRRLVAVLQGVLDERRAARAKGVSGGGVNMMDRLIEAQDERGRRLDDDEIIDVLVMYLNAGHESSGHITMWATVFLQENPDMFARAKAEQEAIMRSIPSSQRGLTLRDFRKMEYLSQVIDETLRLVNISFVSFRQATRDVFVNGYLIPKGWKVQLWYRSVHMDPQVYPDPTKFDPSRWEGHSPRAXTFL

SEQ ID NO: 1017 - protein, 394 aa, Zea mays subsp. mays
LGAERRARLPPGEMGWPLVGGMWAFLRAFKSGKPDAFIASFVRRFGRTGVYRSFMFSSPTVLVTTAEGCKQVLMDDDAFVTGWPKATVALVGPRSFVAMPHDEHRRIRKLTAAPINGFDALTGYLPFIDSTVTSSLRAWADHGGSVEFLTELRRMTFKIIVQIFLGGADQATTRALERSYTELNYGMRAMAINLPGFAYRGALRARRRLVAVLQGVLDERRAARAKGVSGGGVNMMDRLIEAQDERGRRLDDDEIIDVLVMYLNAGHESSGHITMWATVFLQENPDMFARAKAEQEAIMRSIPSSQQGLTLRDFRKMEYLSQVIDETLRLVNISFVSFRQATRDVFVNGYLIPKGWKVQLWYRSVHMDPQVYPDPTKFDPSRWEGHSPRAGTFL

SEQ ID NO: 1018 - protein, 394 aa, Zea mays subsp. mays
  unsure (1)..(394): unsure at all Xaa locations
LGAERRARLPPXDMGWPLVGGMWAYLRAXKSGKPDXFIASFVRRFGRTGVYRSFMFSSPTVLVTTAEGCKQVLMDDDAFVTGWPKATVALVGPRSFVAMPHDEHRRIRKLTAAPINGFDALTGYLPFIDSTVTSSLRAWADHGGSVEFLTELRRMTFKIIVQIFLGGADQATTRALERSYTELNYGMRAMAINLPGFAYRGALRARRRLVAVLQGVLDERRAARAKGVSGGGVDMMDRLIEAQDERGRHLDDDEIIDVLVMYLNAGHESSGHITMWATVFLQENPDMFARAKAEQEAIMRSIPSSQRGLTLRDFRKMEYLSQVIDETLRLVNISFVSFRQATRDVFVNGYLIPKGWKVQLWYRSVHMDPQVYPDPTKFDPSRWEGHSPRAGTFL

SEQ ID NO: 1019 - protein, 394 aa, Zea mays subsp. mays
LGAERRARLPPGEMGWPLVGGMWAFLRAFKSGKPDAFIASFVRRFGRTGVYRSFMFSSPTVLVTTAEGCKQVLMDDDAFVTGWPKATVALVGPRSFVAMPHDEHRRIRKLTAAPINGFDALTGYLPFIDSTVTSSLRAWADHGGSVEFLTELRRMTFKIIVQIFLGGADQATTRALERSYTELNYGMRAMAINLPGFAYRGALRARRRLVAVLQGVLDERRAARAKGVSGGGVDMMDRLIEAQDERGRHLDDDEIIDVLVMYLNAGHESSGHITMWATVFLQENPDMFARAKAEQEAIMRSIPSSQRGLTLRDFRKMEYLSQVIDETLRLVNISFVSFRQATRDVFVNGYLTPKGWKVQLWYRSVHMDPQVYPDPTKFDPLRWEGHSPRAGTFL

SEQ ID NO: 1020 - protein, 394 aa, Zea mays subsp. mays
LGAERRARLPLGEMGWPLVGGMWAFLRAFKSGKPDAFIASFVRRFGRTGVYRSFMFSSPTVLVTTAEGCKQVLMDDDAFVTGWPKATVALVGPRSFVAMPYDEHRRIRKLTAAPINGFDALTGYLPFIDRTVTSSLRAWADHGGSVEFLTELRRMTFKIIVQIFLGGADQATTRALERSYTELNYGMRAMAINLPGFAYRGALRARRRLVAVLQGVLDERRAARAKGVSGGGVDMMDRLIEAQDERGRRLDDDEIIDVLVMYLNAGHESSGHITMWATVFLQENPDMFARAKAEQEAIMRSIPSSQQGLTLRDFRKMEYLSQVIDETLRLVNISFVSFRQATRDVFVNGYLIPKGWKVQLWYRSVHMDPHVYPDPTKFDPSRWEGHSPRAGTFL

SEQ ID NO: 1021 - protein, 394 aa, Zea mays subsp. mays
LGAERRARLPPGEMGWPLVGGMWAFLRAFKSGKPDAFIASFVRRFGRTGVYRSFMFSSPTVLVTTAEGCKQVLMDDDAFVTGWPKATVALVGPRSFVAMPHDEHRRIRKLTAAPINGFDALTGYLPFIDSTVTSSLRAWADHGGSVEFLTELRRMTFKIIVQIFLGGADQATTRALERSYTELNYGMRAMAINLPGFAYRGALRARRRLVAVLQGVLDERRAARAKGVSGGGVDMMDRLIEAQDERGRRLDDDEIIDVLVMYLNAGHESSGHITMWATVFLQENPDMFARAKAEQEAIMRSIPSSQRGLTLRDFMKMEYLSQVIDETLRLVNISFVSFRQATRDVFVNGYLIPKGWKVQLWYRSVHMDPQVYPDPTKFDPSRWEGHSPRAGTFL

SEQ ID NO: 1022 - protein, 394 aa, Zea mays subsp. mays
LGAERRARLPPGEMGWPLVGGMWAFLRAFKSGKPDAFIASFVRRFGRTGVYRSFMFSSPTVLVTTAEGYKQVLMDDDAFVTGWPKATVALVGPRSFVAMPHDERRRIRKLTAAPINGFDALTGYLPFIDSTVTSSLRAWADHGGSVEFLTELRRMTFKIIVQIFLGGADQATTRALERSYTELNYGMRAMAINLPGFAYRGALRARRRLVAVLQDVLDERRAARAKGVSGGGVDMMDRLIEAQDERGRHLDDDEIIDVLVMYLNAGHESSGHITMWATVFLQENPDMFARAKAEQEAIMRSIPSSQQGLTLRDFRKMEYLSQVIDETLRLVNISFVSFRQATRDVFVNGYLIPKGWKVQLWYRSVHMDPHVYPDPTKFDPSRWEGHSPRAGTFL

SEQ ID NO: 1023 - protein, 394 aa, Zea mays subsp. mays
LGAERRARLPPGEMWWPLVGGMWAFLRAFKSGKPDAFIASFVRRFGRTGVYRSFMFSSPTVLVTTAEGCKQVLMDDDAFVTGWPKATVALVGPRSFVAMPHDEHRRIRKLTAAPINGFDALTGYLPFIDSTVTSSLRAWADHGGSVEFLTELRRMTFKIIVQIFLGGADQATTRALERSYTELNYGMRAMAINLPGFAYRGALRARRRLVAVLQGVLDERRAARAKGISGGGVDMMDRLIEAQDERGRRLDDDEIIDVLVMYLNAGHESSGHITMWATVFLQENPDMFARAKAEQEAIMRSIPSSQRGLTLRDFRKMEYLSQVIDETLRLVNISFVSFRQATRDVFVNGYLIPKGWKVQLWYRSVHMDPQVYPDPTKFDPSRWEGHSPRAGTFL

SEQ ID NO: 1024 - protein, 394 aa, Zea mays subsp. mays
  unsure (1)..(394): unsure at all Xaa locations
LGSARRARLPPGEMGWPLVGGMWAFLRAFKSGKPDAFIASFVRRFGRTGVYRSFMFSSPTVLVTTAEGCKQVLMDDDAFVTGWPKATVALVGPRSFVAMPHDEHRRIRKLTAAPINGFDALTGYLPFIDRTVTSSLRAWADHGASVEFLTEIRRMTFKIIVQIFLXGADQATTRALERSYTELNYRMRTMAIHMTDFAYRGALRARRRIVTVMQGVLDERRAARAKGVSGGGVDMMDRLIEAQDERGRRLDDDEIIDVLVMYLNAGHESSGHITMWATVFLQENPDMFARAKAEQEAIMRSILSSQRGLTLRDFSKMEYLSQVIDETLRLVNISFVSFRQATRDVFVHGYLIPKGWKVQLWYRSVHMDPQVYPDPTKLYPSRWEGHSPRPGTFL

SEQ ID NO: 1025 - protein, 394 aa, Zea mays subsp. mays
  unsure (1)..(394): unsure at all Xaa locations
LGAERRARLPPGEMGWPLVGGMWAFLRAFKSGKPDAFIASFVRRFGRTGVYRSFMFSSPTVLVTTAEGCKQVLMDDDAFVTGWPKATVALVGPRSFVAMPHDEHRRIRKLTAAPINGFDALTGYLPFIDSTVTSSLRAWADHGGSVEFLTELRRMTFKIIVQIFLGGADQATTRALERSYTELIYGVRAMAINLPGFAYRGALRARRRLXGALXGVLYXSPAARAKGVSGGGVDMMDRLIEAQDERGRHLDDDEIIDVLVMYLNAGHESSGHITMWATVFLQENPDMFARAKAEQEAIMRSIPSSQQGLTLRDFRKMEYLSQVIDETLRLVNISFVSFRQATRDVFVNGYLIPKGWKVQLWYRSVHMDPHVYPDPTKFDPSRWEGHSPRAGTFL

SEQ ID NO: 1026 - protein, 473 aa, Cunninghamella elegans
MNNFIFKRLNVKEFYEAETKKLVENGHEFHLRLERTGYVIHTCNPQAIKEILLKGDKFPKYDYNTSNNEDGSFFHEFVGFENVLMTNGSTWKKHRMIVNPAFKTALPSRLFGDCTRDLFKLWDNEYANEPFDSDIHNITERLTLQIIGKAAFDFDFNAILDEKSIWKQTYDGINKAASDPLFILFPILEEKFLWLFPKRQQSFKLLNEWKKMLLSIIEKKREAIQNNVDHGVEEAEKDLLTLMIESEHRGEGALSNEELLSDLIIFFIAGHDTTAFALSAAIYYLAKHPDIQEKARQEAISVLCPNGEVDEDIFPTTEDTKHFVYINQIMKETLRINGSVLFLLSPRLVTQDVNLSGVFIPKGSQINVNIHEVHHNPNVWHDPETFDPDRWASNGEAEQLAGKGMAWVPFSNGNRQCIGMNFSLLEQRVILGSLLRKYEWTLPEDSIHQDYMVNKFNLIPKPIDLKIRFKRRY

SEQ ID NO: 1027 - protein, 456 aa, Polyangium cellulosum
MISISKSKQKLLPPGPRSPMALQTLQWLKNPVPFLEACGARYGEMFTLKLPTQWPVVVVQHPEAVKEVFALDSNAGHAGEANNILKPFLGKYSLLVLDGEEHMRQRKMMMPAFHGERMEAYGHAMIDAAHASIDAWPVGSPFGVHAPMQAITLQVILRTVVGMTDGPLLAELEALYPQVIDAASAPAMHFELFRKDLGPWSPWGKFKRRSARGKEIMIHEIRRAREKGTAGRTDVLAMIIDAKDENGELLTEDEIHGELMTLLVAGHETTATALCWALRWLLRDAALTRRVAEEAAEVADDPVKIAKSELLDRVVKEALRLQPIGPVVARVLKQPLTIQGRELPADVMVAPCVQLLHHRPSLYPEPTRFDPDRYATFTPKPWEFIPFGGGLRKCIGAAFSMYEMKMVLATAFSRLSMELATDDIKIIRRGVTLAPSGGLPLVIRKKSPRATKPIAA

SEQ ID NO: 1028 - protein, 437 aa, Nostoc punctiforme
MKTNQIPPGSFGLPVLGETLSFVFDRDFAKKRYHQYGPIFKTHLLGRPTVVMAGPEALEFVLSSHIENFSWREGWPDNFKTLLGESLFLQDGEEHRRNRRLMMPALHGPALASYFSTMEDITRSYLQKWEKKQEFTWFQEFKQLTFDIASQLFLGTRPGPECVRLSQLFTTLTNGLLAINPLPLPFTTFGKAIAARNEILEHLTQVVRERQQNPTQDTISLLIKAKDEDGNSLSEKEIIAQAVLLLFAGHETTTSMLTWLCTELACHPEVLEKARVEQLQLASQGDLDLEQLGKMPYLEQVLWEVERLHQPVGGGFRGVIKDFELNGYHVPTGWQLYYSIGVTHQIEEIYSEPELFDPDRFSPQRQEHKKYPFSLVGFGGGPRICIGIAFAKMEMKIVAAHLLRSYHWEILPNQSLEVVAVPTNRPKDGLRVRFQPR

SEQ ID NO: 1029 - protein, 452 aa, Nostoc punctiforme
MQQLKSAEEIPGSYGLPILGETLEIFRDSELYLWRRFQQYGSVFKTSVLGRKRAYLIGPSANRLVLVEQAENMSSRIGWYFLESTFGNNILLQDGEEHRLTRRLMYPAFHGKAIATYFDTIQNIVQDFLKDWGERGTISLNSSFRQLTLMIATRLFLGSQNKSEVEQTSQWFTQLLDSSMAIFKWNVPFTLYGRGQNARGKLVAFLREAIAQRIEQGNLEESKDVLGLLLAAVDEDGNKLSETQVINEALLLLFAGHETTASLLTWVIFELGNHPEWRERLRQEQLAVVGNNPLSLSHLKQFPQLTNVLKEAERLYPPVYAYNRGVLKDIEYGGYRIPAGWFVTISPMLTHRLPELYTEPDRFDPDRFAPPREEDKKHPLALMGFGYGSHSCLGMEFAQMEMKIVLSTLLRHYDWTVKPDYSAIAPVRQPSKVKDILQAYIEPLLIKHPLDS

SEQ ID NO: 1030 - protein, 405 aa, Halobacterium sp. NRC-1
MGPMETYVVTEPALVERLLVSDAAEFRKPEFQADAIDDLLGDGLLLSEGESWREQRGRANPAFSMARVAGFDADIAAHAADRVDDWPVGDTVDVEAAMTHITLDVILDVMLGVSLPEARVDAIGDALEPVGARFEPDPVRFAVPEWLPMPDDREYAAAVATLDDLVDDIVAAREGTASGGDGDDPMDLLSVLLRARDRGEQSLDRLRDEVMTTLLAGHDTTALTLTYTWFLLSEHPDVEARLHAELDGALDDGAQPTVAQLQDLDYLEWVLQESMRLYPPVYNVFRTPIEPVELAGSEVPAGAPIMLPQWAIHRSPDHWDDPEAFDPERWRPERRADRPRFAYFPFGGGPRHCIGKQLALLEAKLIVATVASDYRLRYEGDTPLSFVPSLTIHPEQEMRMRVEPR

SEQ ID NO: 1031 - protein, 511 aa, Blaberus discoidalis
MEFITILLSTALFIVTFLFLFRQGAKRARFVYLVNKLPGPTAYPVVGNAIEAIVPRNKLFQVFDRRAKLYGPLYRIWAGPIAQVGLTRPEHVELILRDTKHIDKSLVYSFIRPWLGEGLLTGTGAKWHSHRKMITPTFHFKILDIFVDVFVEKSEILVKKLQSKVGGKDFDIYPFITHCALDIICETAMGIQMNAQEESESEYVKAVYEISELTMQRSVRPWLHPKVIFDLTTMGKRYAECLRILHGFTNKVIQERKSLRQMTGMKPTISNEEDELLGKKKRLAFLDLLLEASENGTKMSDTDIREEVDTFMFEGHDTTSAGICWALFLLGSHPEIQDKVYEELDHIFQGSDRSTTMRDLADMKYLERVIKESLRLFPSVPFIGRVLKEDTKIGDYLVPAGCMMNLQIYHVHRNQDQYPNPEAFNPDNFLPERVAKRHPYAYVPFSAGPRNCIGQKFATLEEKTVLSSILRNFKVRSIEKREDLTLMNELILRPESGIKVELIPRLPADAC

SEQ ID NO: 1032 - protein, 505 aa, Tribolium castaneum
MLVLTTVLTAAAVFLLFYLFYCYKTIKQHIYSLISLSYLPGPPVNDIISGNILPLYTSAENIFKQLREWGRLYYPIYKLNAAHLAAANILSPEDCELVLSNPTHMEKSAIYNLLHDWLGTGLLTSTGLKWQTRRKILTPAFHFSILQQFVAIFNEETDKLVEVLKEECYKPFINVNAHVAQFTLKTIAETAMGTKLRFTTRKETIYKQSIVDMGEFLLYRLLRCWLISKCIYVFNPRYYLEKKVTRRLHRFTKSVIAERQENFKEIVVPETDEVYTGKRRLAMLDLLLTAKNKEGLIDDEGIREEVDTFMFEGHDTTAAALGFALMVLAGHKEVQDKIVEEMNEVLGDIKKKPTYQDLQEMKYLERCVKEVLRLYPSVHFISRKLGEDLVTHSGHKLAKGSIVNLHIYDLHHNPAIYPDPEKFDPDRFLPENCQKRHPFAYLPFSAGPRNCIGKKFAMLELKAAICGILANFTLEPIDIPETIVLVVDIVLRTKEGIKVRFIPRV

SEQ ID NO: 1033 - protein, 432 aa, Prochlorococcus marinus str. MIT 9313
MASSDDAKLRPLPNTAALSGVLEAFAFFRDPAFAQKRFERHGNVFETSLLGQPMVFIQGGQAIRDLLAQPNAVEGWWPESVRQLLGSHSLANRNGASHRARRRVIGQLFSASALQRYSAGIISMVQDLADELQAAKTALPLAERMRRFAFSVIATTVLGLEGTDRDELFVDFEIWTRALFSIPIALPGSSFAKALKARERLLRRLQKVLLKASNGNGGLDLLAGGLDEAGIPLTDEDMVEQLLLLLFAGYETTASSLSCLMRELLLNPQVETWLREEINGVDWPPAPEQATTAYDQVNAPKLDAVVSEVMRLTPAVGGFFRRTKCALVIDGVEVPKNRVVQVALAASNRHGAGDLEAFRPQRHLEDGCSATLLPFGGGERVCLGKPLAELEIRLMVVGLFHQLRLHLIPDQDLTLQMLPSPTPRDGLLTKVL

SEQ ID NO: 1034 - protein, 414 aa, SYNECHOCOCCUS SP. WH 8102
MTAAPLPSTGAVTGLGETLAFFRDPSFSQRRFSELGDVFETKLLAQSIVFIRGERAIGDLLKQEDCLQGWWPDSVRQLLGSKSLANRSGADHKARRRVVGQLFSSAALSRYTPAIEALVNDLANELQQAEGPIPLAARMRRFAFSVIATTVLGLEAENRDALFADFEIWTRALFSIPLALPGTPFARALAARQRLLARLKTVLQTNNNRQQGGLDLLSGGLDEAGLPLDDDDLVEQLLLLLFAGYETTASSLSCLFRALLLNPEVEQWLMQDLNNHERPSRLDATVLEVMRMTPPVGGFFRQNTQSIELADVAIPQGRVIQVVLSSSSTTNQIDLETFRPQRHLDGSFQQTLLPFGGGERVCLGKALAELEIRLMAMGLLQRVQLHLEPDQDLNLQLIPSPTPRDGLLVRATAR

SEQ ID NO: 1035 - protein, 453 aa, Bacillus halodurans
MPTNTMPTGPKGNPVLGNTIEFGKDPLQFITRCSQEYGEIVRLRFERERDTFLLNDPKHIQYVFMNKGGEFSKGYQQDPIMGLVFGNGLLTSEGSFWLRQRRLSQPAFHPKRIADYADTMVGYCERMLNTWMDNDTRDINDEMMQLTMAIATKTLFDLDLHKGDTQEASRSLDTVMTAFNEQMTNVFRHVLHLIGLGKLVPPVSRELREAVESLDKMIYSIIEERRKHPGDRGDLLSMLISTYDEDDGSYMTDRQLRDEIITLFLAGHETTANTLSWAFYLLSQHPHVEEKLYQEVSQVLGNRPATLEDMPKLSYAEHVIKETLRVQPTVWLISRRAEKDVTLGDYHISAGSEIMISQWGMHRNPRYFNDPLTFLPERWDNNDNKPSKYVYFPFGGGPRVCIGERFALMEATLIMATIVREFRMELVDELPIKMEPSITLRPKHGVTMKLRKR

SEQ ID NO: 1036 - protein, 512 aa, Homo sapiens
MLFEGLDLVSALATLAACLVSVTLLLAVSQQLWQLRWAATRDKSCKLPIPKGSMGFPLIGETGHWLLQGSGFQSSRREKYGNVFKTHLLGRPLIRVTGAENVRKILMGEHHLVSTEWPRSTRMLLGPNTVSNSIGDIHRNKRKVFSKIFSHEALESYLPKIQLVIQDTLRAWSSHPEAINVYQEAQKLTFRMAIRVLLGFSIPEEDLGHLFEVYQQFVDNVFSLPVDLPFSGYRRGIQARQILQKGLEKAIREKLQCTQGKDYLDALDLLIESSKEHGKEMTMQELKDGTLELIFAAYATTASASTSLIMQLLKHPTVLEKLRDELRAHGILHSGGCPCEGTLRLDTLSGLRYLDCVIKEVMRLFTPISGGYRTVLQTFELDGFQIPKGWSVMYSIRDTHDTAPVFKDVNVFDPDRFSQARSEDKDGRFHYLPFGGGVRTCLGKHLAKLFLKVLAVELASTSRFELATRTFPRITLVPVLHPVDGLSVKFFGLDSNQNEILPETEAMLSATV

SEQ ID NO: 1037 - protein, 497 aa, Taxus cuspidata
MDSFIFLRSIGTKFGQLESSPAILSLTLAPILAIILLLLFRYNHRSSVKLPPGKLGFPLIGETIQLLRTLRSETPQKFFDDRLKKFGPVYMTSLIGHPTVVLCGPAGNKLVLSNEDKLVEMEGPKSFMKLIGEDSIVAKRGEDHRILRTALARFLGAQALQNYLGRMSSEIGHHFNEKWKGKDEVKVLPLVRGLIFSIASTLFFDVNDGHQQKQLHHLLETILVGSLSVPLDFPGTRYRKGLQARLKLDEILSSLIKRRRRDLRSGIASDDQDLLSVLLTFRDEKGNSLTDQGILDNFSAMFHASYDTTVAPMALIFKLLYSNPEYHEKVFQEQLEIIGNKKEGEEISWKDLKSMKYTWQAVQESLRMYPPVFGIFRKAITDIHYDGYTIPKGWRVLCSPYTTHLREEYFPEPEEFRPSRFEDEGRHVTPYTYVPFGGGLRTCPGWEFSKIEILLFVHHFVKNFSSYIPVDPNEKVLSDPLPPLPANGFSIKLFPRS

SEQ ID NO: 1038 - protein, 508 aa, Rattus norvegicus
MLGAAGTALLCAGLLLGLAQQLWTLRWTLSRDWASTLPLPKGSMGWPFFGETLHWLVQGSRFHSSRRERYGTVFKTHLLGRPVIRVSGAENVRTILLGEHRLVRSQWPQSAHILLGSHTLLGAVGERHRQRRKVLARVFSRPALEQFVPRLQEALRREVRSWCAAQRPVAVYQAAKALTFRMAARILLGLQLDEARCTELAQTFERLVENLFSLPLDVPFSGLRKGIRARDQLYQHLDEVIAEKLREELTAEPGDALHLIINSARELGRELSVQELKELAVELLFAAFFTTASASTSLILLLLQHPAAIAKIQQELSAQGLGSPCSCAPRASGSRPDCSCEPDLSLAVLGRLRYVDCVVKEVLRLLPPVSGGYRTALRTFELDGYQIPKGWSVMYSIRDTHETAAVYRSPPEGFDPERFGVESEDARGSGGRFHYIPFGGGARSCLGQELAQAVLQLLAVELVRTARWELATPAFPVMQTVPIVHPVDGLLLLFHPLPTLGAGDGSPF

SEQ ID NO: 1039 - protein, 944 aa, Rattus norvegicus
MLFEGLELVSALATLAACLVSVTLLLAVSQQLWQLRWAATRDKSCKLPIPKGSMGFPLIGETGHWLLQGSGFQSSRREKYGNVFKTHLLGRPLIRVTGAENVRKILLGEHQLVSTEWPRSARVLLGPNTVANSIGDIHRNKRKVPWPKDEPGPMNTRTRDQAPTVFRYNPLTVEAPHQEIPQDPRIWASVFSKIFSHEALESYLPKIQLVIQDTLRAWSSQPEAINVYQEAQRLTFRMAVRVLLGFSIPEEDLGNLFEVYQQFVENVFSLPVDLPFSGYRRGIQARQILQKGLEKAIREKLQCTQGKDYSDALDILIESSKEHGKEMTMQELKDGTLELIFAAYATTASASTSLIMQLLKHPAVLEKLREELRAQGLLHGGGCPCEGTLRLDMLSGLRYLDCVIKEVMRLFTPVSGGYRTVLQTFELDGFQIPKGWSVMYSIRDTHDTAPVFKDVNVFDPDRFSQARSEDKDGRFHYLPFGGGVRTCLGKHLAKLFLKVLAVELASTSRFELATRTFPRITLVPVLHPVDGLSVKFFGLDSNQNEILPETEAMLSATSAKPSSEFGIEKKAERLVRRFLGLSVFPSAVPRPACQEALERTVKFCSTVLHKGKAVMRSRADGGIDSRKATALPGVTVTRYQVFTLDPMTQRLIDQFEPGWLKFAAVGGAGVAFAWAVSCKLGSTGRKGEYRHQFGKNLEETYSAISQPSPKFPGALAGPGFPRPQDQQAAVRNAPFIPWIRATLSSQKRQPLPRQRCPRSACPHQCCKLNKAIKEEDKAWVSEVTCALLCLSPTLGVNGCTPRELDAKIQVLNIIDFPNKGATSPREEGEKDVAMYYSLKTTGQALGTEIDQGSDYARERAATGNRNSKLEPTNKNPGVFFVPLLSWHQLHRQLDRKPCEAGGRVNEHGTRARKTLEEPGTNTLKLKSRWWQPYSCPRQSTGKAS

SEQ ID NO: 1040 - protein, 526 aa, Oculimacula acuformis
MGILEAVSVPLAQQVSQRGLGVVIAAGFAAFLVVSVVLNVLSQILFKNPNEPPVVFHFFPIIGSTVTYGIDPYKFFFDNKAKYGDIFTFILLGKKTTVYLGRNGNEFILNGKIKDVNAEEIYTVLTTPVFGKDVVYDCPNSKLMEQKKFMKIGLTTEAFKTYVPIIQDEVETFIKRSAELKGHSGTVNIPAQMAEITIYTASHALQGKDCRDKFDSSFAELYHALDMGFSPINFMLHWAPLPHNRARDHAQRTVAKTYMEIMEARRKDKKSLDNMDIMSQLMRSTYKNGVPVPDMEIAHMMIALLMAGQHSSSSSSSWIMLRLASRPDIMEELYQEQLEVLGSDLPPLQYDDLAKLTKHQNVLKEVLRLHTPIHSIMRKVKTPMPVTGTKFVVPTSHVLLASPGFSSRDDTYFPDAMKWEPHRWDPESGGVLGTDVEEESFDYGYGLISKGAKSPYLPFGAGRHRCIGEQFANVQLITITAVMVRHFKFKNLDNSTKVVETDYTSLFSRPLAPAVVEYERREKVKV

SEQ ID NO: 1041 - protein, 445 aa, Deinococcus radiodurans
MVPAPPFLGHAAEMGTIKLRPFLTRCYQAYGPVFQLTVPGQKITVLAGPEANLFAMKEGHRVLRSLEAWRDNDHEMGSDRSMISLDGAEHRAYRRVEGRAFARSFFAAGLRPALAVLAEDLAPFQPGDVLPVATWCKKTITEQLARMAVGGTVRPYLPDLLHFIQTALQVTVNRQLPPAVLRLPKYRRAKARIFQMVDDLIEDHRQNPPEKSGRAPDLIDDVLADQQVNPERWEHPDVRLAALGAFIAGMDTAANSLAFVLYRMHLHSEFLPALRAEADALFRDGPPTAEALGRSPLLHRFVMETLRVHPIAPALSRTLTEDVEFAGHRIPAGTPVIIGTTVPHGLPELFPDPEHFDPGRFAPGRAEHRQPGAYAPFGVGSHTCAGSGMAEGLIMLGAAAALRTLDLSLEPDYVLRQTAKPTPSLDNKLQLRVNAVRHNPVFLVH

SEQ ID NO: 1042 - protein, 455 aa, Mycobacterium tuberculosis
MSAVALPRVSGGHDEHGHLEEFRTDPIGLMQRVRDECGDVGTFQLAGKQVVLLSGSHANEFFFRAGDDDLDQAKAYPFMTPIFGEGVVFDASPERRKEMLHNAALRGEQMKGHAATIEDQVRRMIADWGEAGEIDLLDFFAELTIYTSSACLIGKKFRDQLDGRFAKLYHELERGTDPLAYVDPYLPIESFRRRDEARNGLVALVADIMNGRIANPPTDKSDRDMLDVLIAVKAETGTPRFSADEITGMFISMMFAGHHTSSGTASWTLIELMRHRDAYAAVIDELDELYGDGRSVSFHALRQIPQLENVLKETLRLHPPLIILMRVAKGEFEVQGHRIHEGDLVAASPAISNRIPEDFPDPHDFVPARYEQPRQEDLLNRWTWIPFGAGRHRCVGAAFAIMQIKAIFSVLLREYEFEMAQPPESYRNDHSKMVVQLAQPACVRYRRRTGVHHHH

SEQ ID NO: 1043 - protein, 509 aa, Anopheles gambiae str. PEST
MFYWAVVLGVIATLLAALDWKYKSYEHLPGPRRWPFIGNVVSFLGAGPVEIFDQLIAFASTYGKVYKLDFFYDYTIIYSSPEAAEAILTSPAFTAKSQDYDKVSEWIGNGLLISRDQKWFTHRKVITPGFHFKILENFVPVFNRQAEAFCAKLETLTGRSADAVNVFPELKLLTLGIICETAMGVGMDGEGQSTQQAYYTQIVEELSSILYWRMFNVFVNIDAVFRLTRTSRRFDELVKKSWQFTLGMIERRRKMNELEAPVEVRKEEETFGKQKRALLDTLLEARIDGRPLTDEEIREEVDTFTFAGHDTTASAMTFILYNVAKHPEIQERVYQEIVNEIGADFCELSLRAICLHTLSALNNLHYMELVIKESLRLFPPVPVIARIATEDTELLAERITRGTSVAIDIYTMHHSDDYFPDAERFDPDRFEGARDAQTFNPYTYIPFSAGSRNCIGQKFAQYELKSTLVKLLQRFQIRLADASYVPILKAEIVLKPAEGLPLRFIKRRV

SEQ ID NO: 1044 - protein, 458 aa, Caulobacter crescentus CB15
MDADVRSAPLIPPAPKVHPRQLGGSFVGELRIALEMSRNLMGAWCEEDFDNLFTPYVFMGQPGMVVSDPAAARRILSSPNYVRPVKAARSVRPIAGDGLLLSEGETWRRQRKSLAPVFTPMAVEGLLPHFVAAGASLAEALSGHARADLSEAFHHATLDAVLSALFSRRADAQGDQLAYMVRRYMEGPAHFNLMDFVSRGADDLTFLDVERRRQGAAWFQAVEHLIAQRQAHPHAEARDLLDRLLAARDEDGAPLSNQEIRDQCGTMLVAGFETTSRLLFWATYLLALDPATQDRLRAEVLAAPAAAVRTLDDLQAWPLMRSVLFETLRLYPTAPLLAREAIGPDTVMGHAVVPGQIITISPWLIHRHRKLWDAPTAFVPDRFIDQPHPWGIEAFLPFGAGPRVCIGASFALAEAQIVLASLLERFEIGLVSDRPVIPIASITLGPDHAPAFTLTPVS

SEQ ID NO: 1045 - protein, 500 aa, Mentha x piperita
MELQISSAIIILVVTYTISLLIIKQWRKPKPQENLPPGPPKLPLIGHLHLLWGKLPQHALASVAKQYGPVAHVQLGEVFSVVLSSREATKEAMKLVDPACADRFESIGTKIMWYDNDDIIFSPYSVHWRQMRKICVSELLSARNVRSFGFIRQDEVSRLLGHLRSSAAAGEAVDLTERIATLTCSIICRAAFGSVIRDHEELVELVKDALSMASGFELADMFPSSKLLNLLCWNKSKLWRMRRRVDAILEAIVEEHKLKKSGEFGGEDIIDVLFRMQKDSQIKVPITTNAIKAFIFDTFSAGTETSSTTTLWVMAELMRNPEVMAKAQAEVRAALKGKTDWDVDDVQELKYMKSVVKETMRMHPPIPLIPRSCREECEVNGYTIPNKARIMINVWSMGRNPLYWEKPETFWPERFDQVSRDFMGNDFEFIPFGAGRRICPGLNFGLANVEVPLAQLLYHFDWKLAEGMNPSDMDMSEAEGLTGIRKNNLLLVPTPYDPSS

SEQ ID NO: 1046 - protein, 496 aa, Cucurbita maxima
MESTWAVAAVVTAVVAVATVFSVLKWAAKSLNEWIYEAKLGDRRLALPPGDLGWPLIGNMLGFLRAFKSKNPETFIDGYVSRYGKTGVYKVHLFGNPSVVVTTPETCRKVLTDDEAFQPGWPRAAVELIGEKSFIQMPQEEHKRLRRLTSAPVNGFEALSNYIPYIEKNVLESLEKWSKMGPIEFLTQLRKLTFTVIMYIFLSSESEPVMEMLEKEYTRLNYGVRDMRINLPGFAYHKALKARKNLVAALKGIVTERRRQKLDKWAPKRKDMMDQLIDIVDENGRKLDDEEIIDILIMYLNAGHESSGHTMMWATILLNQHPEVLKKAREEQEAIVRNRPAGQTGLTLKECRDMEYLSKVVDETLRYVSFSLVVFREAQMDVNLNGYLIPKGWKVLAWFRSIHYDSEVYPDPKKFEPSRWDGFVPKAGEFLPFGAGSRLCPGNDLAKLEICIFVHYFLLNYNLEWLTPDCEILYLPHSRPKDNCMAKITKKSSVAA

SEQ ID NO: 1047 - protein, 468 aa, Arabidopsis thaliana
MAEIWFLVVPILILCLLLVRVIVSKKKKNSRGKLPPGSMGWPYLGETLQLYSQNPNVFFTSKQKRYGEIFKTRILGYPCVMLASPEAARFVLVTHAHMFKPTYPRSKEKLIGPSALFFHQGDYHSHIRKLVQSSFYPETIRKLIPDIEHIALSSLQSWANMPIVSTYQEMKKFAFDVGILAIFGHLESSYKEILKHNYNIVDKGYNSFPMSLPGTSYHKALMARKQLKTIVSEIICERREKRALQTDFLGHLLNFKNEKGRVLTQEQIADNIIGVLFAAQDTTASCLTWILKYLHDDQKLLEAVKAEQKAIYEENSREKKPLTWRQTRNMPLTHKVIVESLRMASIISFTFREAVVDVEYKGYLIPKGWKVMPLFRNIHHNPKYFSNPEVFDPSRFEVNPKPNTFMPFGSGVHACPGNELAKLQILIFLHHLVSNFRWEVKGGEKGIQYSPFPIPQNGLPATFRRHSL

SEQ ID NO: 1048 - protein, 443 aa, Arabidopsis thaliana
MAEIWFLVVPILILCLLLVRVIVSKKKKNSRGKLPPGSMGWPYLGETLQLYSQNPNVFFTSKQKRYGEIFKTRILGYPCVMLASPEAARFVLVTHAHMFKPTYPRSKEKLIGPSALFFHQGDYHSHIRKLVQSSFYPETIRKLIPDIEHIALSSLQSWANMPIVSTYQEMKKFAFDVGILAIFGHLESSYKEILKHNYNIVDKGYNSFPMSLPGTSYHKALMARKQLKTIVSEIICERREKRALQTDFLGHLLNFKNEKGRVLTQEQIADNIIGVLFAAQDTTASCLTWILKYLHDDQKLLEAVKAEQKAIYEENSREKKPLTWRQTRNMPLTHKVIVESLRMASIISFTFREAVVDVEYKGYLIPKGWKVMPLFRNIHHNPKYFSNPEVFDPSRFEVNPKPNTFMPFGSGVHACPGNELAKLQILIFLHHLVSNFRYVFHAR

SEQ ID NO: 1049 - protein, 521 aa, Glycine max
  unsure (1)..(521): unsure at all Xaa locations
MSRAKKYAAILIFIFIFCFLRKKANLLTFQRTESSNTPMDGIFAYTILILLTIFSFMFLPKPNRRRPQNQTLAKLPPGSMGWPYIGETLQLYSQDPNAYFSTKHKRYGEIFKTNILGCPCVMLTSPEAARFVLVTQAHLFRPTYPKSKERLIGPFALFFHQGEYHTRLRKLVQRSLSLEALRNLVPHIEALALSAMNSWGGDGQVINTFKEMKMFSFEVGILTIFGYLEPRLREELKKNYRIVDNGYNSFPTCIPGTQYQKALLARRRLGKIIGDIICERKEKKLLERDLLSCLLNWKGEGGEVLSDYQIADNIIGVLFAAQDTTASAMTWVVKYLHDEPKLLESVKAEQKAIHKSNXXGNLPLSWDQTRNMRITHKVVLESLRMASIISFPFREAIADVEYKGFLIPKGWKAMPLFRNIHHNPEYFPEPQKFNPSRFEVAPKPNTFMPFGSGVHACPGNELAKLETLIMIHHLVTKFRWEVVGSKCGIQYGPFPLPLNGLPARCWRESYQLEKAAREENA

SEQ ID NO: 1050 - protein, 488 aa, Pisum sativum
MILEMGSMWVVLMAIGGALLVLRSILKNVNWWLYESKLGVKQYSLPPGDMGWPFIGNMWSFLRAFKSKDPDSFISSIVSRYGSSGIYKALMFGNPSVIVTTPEGCKRVLTDDEKFTTGWPQSTIELIGKNSFIAMTYEEHKRLRRLTSSSINGMEALSLYLKYIEENVIISLEKWSNMGQIEFLTEIRKLTFKIIMHIFLSSESEPVMEALEKEYTILNHGVRAMQINVPGFAYYKALKARKNLVGIFQSIVDDRRNIRKVYSQKKAKDMMDSLIDVEDDNGRKLNDEDIIDIMLMYLNAGHESSGHITMWATYFLQKHPEYLKKAKEEQEEIIKRRPSTQKGLTLKEIRGMDFLYKVIDETMRVITFSLVVFREAKSDVTINGYTIPKGWKVLTWFRSVHLDPEIYPNPKEFNPNRWNKEHKAGEFLPFGAGTRLCPGNDLAKMEIAVFLHHFTLNYRLEQLNPKCPIRYLPHTRPMDNCLGRVKKC

SEQ ID NO: 1051 - protein, 490 aa, Pisum sativum
MASLWFIFGAIAGALLVLRSLLKNVNWFLYEAKLGDKQYSLPPGDMGWPIIGNMWSFLRAFKSSKPDSFMDSIVKRFGNTGIYKVFMFGFPSVIVTSPEACKKVLTDDENFEPGWPQSTVELIGEKSFIKMPFEEHRRLRRLTSASINGYEALSVYLKYIEEIVISSLEKWTQMGEIEFLTQMRKLTFKIIIHIFLGSESEPVMEALEREYTVLNLGVRAMRINIPGFAFHKSLKARKNLVAIFQSIVDKRRNERRGKEPAPGKKAKDMMDSLIDAVDENGRKLGDDEIIDIMLMYLNAGHESSGHITMWATYFLQRHPEFFRKAKEEQVEMLKRRPPSQKGLKLEDVRKMEYLSKVIDETMRVVTFSLMVFRQARNDVKVNGYLIPKGWRVLTWFRSVHFDSELYPDPREFNPENFSVVRKAGEFLPFGAGTRLCPGNDLAKLEISVFLHHFLLKYELEQLNPKSPIRFLPHTRPLDNCLARIKKQEAA

SEQ ID NO: 1052 - protein, 550 aa, Cryptococcus neoformans var. neoformans
MSAIIPQVQQLLGQVAQFFPPWFAALPTSLKVAIAVVGIPALIIGLNVFQQLCLPRRKDLPPVVFHYIPWFGSAAYYGEDPYKFLFECRDKYGDLFTFILMGRRITVALGPKGNNLSLGGKISQVSAEEAYTHLTTPVFGKGVVYDCPNEMLMQQKKFIKSGLTTESLQSYPPMITSECEDFFTKEVGISPQKPSATLDLLKAMSELIILTASRTLQGKEVRESLNGQFAKYYEDLDGGFTPLNFMFPNLPLPSYKRRDEAQKAMSDFYLKIMENRRKGESDHEHDMIENLQSCKYRNGVPLSDRDIAHIMIALLMAGQHTSSATSSWTLLHLADRPDVVEALYQEQKQKLGNPDGTFRDYRYEDLKELPIMDSIIRETLRMHAPIHSIYRKVLSDIPVPPSLSAPSENGQYIIPKGHYIMAAPGVSQMDPRIWQDAKVWNPARWHDEKGFAAAAMVQYTKAEQVDYGFGSVSKGTESPYQPFGAGRHRCVGEQFAYTQLSTIFTYVVRNFTLKLAVPKFPETNYRTMIVQPNNPLVTFTLRNAEVKQEV

SEQ ID NO: 1053 - protein, 500 aa, Solanum chacoense
MQLVSIFLFISFLFLLRKWKKYLNNSQTKKLPPGPWKLPFIGGMHHLAGGLPHRVLRDLAEKYGPLMHLQLGEVSAVVVTSPEMAKQVLKTHDIAFASRPKLLAMDIICYNRRDIAFSPYGDYWRQMRKICIMEVLSAKSVRSFSSIRHDEVVRLIDSIQPCFTSGELVNFTERIIWFTSSMTCRSAFGQVLKEQEVFIKLIREVISLAEGFDVADIFPSYKFLHGFGGAKQKLLNAHRKVDSIVEDVIKEHKKNLATRKSDDAIGGEDLVDALVRLMNDKSLQFPINNDNIKAVIIDLFAAGTETSSTTTVWAMAEMLKNPSVFAKAQAKVREAFRDKVTFDENDVEELKYLKLVIKETMRLHAPVPLLVPRECREETEINGYTIPVKTKVMVNVWALGRDPKYWDDAESFKPERFEQCSIDFIGNNFEYLPFGGGRRICPGISFGLANVYLPLAQLLYHFDWKLPTGMEPKDLDLTESAGITAARKGDLYLIATPHQP

SEQ ID NO: 1054 - protein, 492 aa, Oryza sativa
  unsure (1)..(492): unsure at all Xaa locations
MAASFVIVIVISFXXFLLLLCAMSTTRAGRGGKLPPGSMGWPYIGETLQLYSQDPNVFFASKQKRYGEIFKTHILGCPCVMLASPEAARFVLVTQAHLFKPTYPRSKEXRMIGPSALFFHQGDYHLRLRRLVQGPLGPDALRALVPDVEAAVRSTLASWDGNVSSTFHAMKRLSFDVGIVTIFGGRLDERRKAELRQNYAIVEKGYNSFPNSFPGTLYYKAIQARRRLHGVLSDIMRERRARGEPGSDLLGCLMQSRAGDDGALLTDEQVADNIIGVLFAAQDTTASVLTWIVKYLHDHPKLLEAVRAEQAAIRAANDGGRLPLTWAQTRSMALTHKVILESLRMASIISFTFREAVADVEYKGFLIPKGWKVMPLFRNIHHNPDYFQDPQKFDPSRFKVSPRPNXTFXSFGNGVHACPGNELAKLEMLVLIHHLVTGYRWEIVGSSDEVEYSPFPVPKHGLLAKLWRDDSVSVETDGCQNGDNDDNGVAMV

SEQ ID NO: 1055 - protein, 490 aa, Oryza sativa
  unsure (1)..(490): unsure at all Xaa locations
AAVLCFVVPAFLLLCTSVQRRRDVGRQKKKKLRLPPGSMGWPYVGETLQLYSQDPNVFFASKQKRYGEIFKTNLLGCPCVMLASPEAARFVLVSQARLFKPTYPPSKERMIGPSALFFHQGEYHLRLRRLVQAALAPDSLRALVPDVDAAVAATLAAWSGGHVASTFHAMKKLSFDVGVVTIFGGRLXAAGHREELRTNYSVVERGYNCFPNRFPGTLYHKAIQARKRLRAILSEIVAERRARGGGGGGGGDDLLGGLMRSRDDGTAVLTDDQIADNVVGVLFAAQDTTASVLTWILKYLHDSPKLLEAVKAEQMAIYVANEGGKRPLTWTQTRSMTLTHQVILESLRMASIISFTFREAVADVEYKGFLIPKGWKVMPLFRNIHHNPDYFQDPQKFDPSRFKVAPRPSTFLPFGSGVHACPGNELAKLEMLVLVHRLVTAYRWEIVGASDEVEYSPFPVPRGGLNAKLWKQEAEEDMYMAMGTITAAGA

SEQ ID NO: 1056 - protein, 502 aa, Oryza sativa
  unsure (1)..(502): unsure at all Xaa locations
TGASTSLPLLCFSQGRGEERERIGKEVERAAVLCFVVPAFLLLCTSVQRRRDVGQGGGRDWQKKKKLRLPPGSMGWPYVGETLQLYSQDPNVFFASKQKRYGEIFKTNLLGCPCVMLASPEAARFVLVSQARLFKPTYPPSKERMIGPSALFFHQGXAALAPDSLRALVPDVDAAVAATLAAWSGGHVASTFHAMKKLSFDVGVVTIFGGRRRRHREELRTNYSVVERGYNCFPNRFPGTLYHKAIQARKRLRAILSEIVAERRARGGGGGGGGDDLLGGLMRSRDDGTAGAVALLTDDQIADNVVGVLFAAQDTTASVLTWILKYLHDSPKLLEAVKAEQMAIYVANEGGKRPLTWTQTRSMTLTHQVILESLRMASIISFTFREAVADVEYKXPALAWAYLTTTSLNFAGRFXVAPRPSTFLPFGSGVHACPGNELAKLEMLVLVHRLVTAYRWEIVGASDEVEYSPFPVPRGGLNAKLWKQEAEEDMYMAMGTITAAGA

SEQ ID NO: 1057 - protein, 189 aa, Triticum aestivum
  unsure (1)..(189): unsure at all Xaa locations
XGPLGPEALRKLVPDIEAAVRATLAAWADGDVASTFHAMKRLSFDVGIVTIFGGRLDERRKEELRRNYAVVEKGYNSFPNSFPGTLYYKAIQARRRLNGVLSDILHERRERGEPGDDLLGCLMRYDGDEGALLTDEQVADNVIGVLFAAQDTTASVLTWIVKYLHDRPKLLEAVRAEHAQIHEANDGGX

SEQ ID NO: 1058 - protein, 247 aa, Triticum aestivum
  unsure (1)..(247): unsure at all Xaa locations
XKARKRLGAIVAHIISVRRERERGSDLLGSFMDGREALTDDQIADNAIGVIFAARDTEPSXPARHPIEKQRLTRSSYNQQEEHAEIAREKALSGEALSWADTRRMRLTGRVIQETMRVASILSFTFREAVEDVEYQGYLIPKGWKVLPLFRNIHHNPDHFPSPEKFDPSRFEVAPKPNTFMPFGNGTHSCPGNELAKLEMLVLCHHLATKYRWSTSKSESGVQFGPFALPINGLPMTFTRKDDKNKA

SEQ ID NO: 1059 - protein, 122 aa, Triticum aestivum
  unsure (1)..(122): unsure at all Xaa locations
SFSRIIWMAFFLLLLCILISAAIVSYAHHQAALKLPPGSMGLPYIGETLQLYSQDPSVFLSSKQKRYGEIFKTHLLGCPCVMLASPEAARFVLVSRAHLFKPTYPRSKERLIGPSALFFHQX

SEQ ID NO: 1060 - protein, 464 aa, Novosphingobium aromaticivorans
MASIAPDSRTDLHTERANPHWVRLGGDHKLDHVPGEDGWPVLGTTLMQLADPLGFQRRMVETHGPVFRTRSFGRRGVNLIGADANELVLFDRDRLFSNEQGWGPVLNLLFPRGLMLMDFEAHRVDRRALSIAFKPEPMRAYCSVLNTGIAQAVQGWGGQMRFYDAIKALTLDTAASSFLGLPLGPEADRLNKAFVDMVQASGGVVRRPLPFTRMGKGVAGRRLMVEYFGRLVRERRADPGQDMFSQFALATREDGSLLPEDVVVDHMIFLMMAAHDTITSSATVLFWQLARNPDWQDRLRAEARAVTGGDGLPLAYEDLGRMELTEMAFKEALRFMPPVPNMPRRALRDFEFGGYRIPAGTPVGISPAAVHADPAHWPEPDRFDPLRFTPENVSGRHKYAWVPFGGGAHMCLGLHFAYMQVKLLVSHILTRYEVAMQPGPAPSWQAWPIPKPRDGLRVEMRRIC

SEQ ID NO: 1061 - protein, 310 aa, Pichia anomala
EFVKGALTRDAFKSYVPQIREEIIHYFQNSKNFKFGERKHGISNVMATQPEITIFTASRSLMGKQMRERFDESFAGYYSDLDKGFTPINFVFPNLPLPSYRRRDYAQQKISSTYMGLIKERRENNDIKDRDLIDTLMKTSTYKDGVKMTDQEIANLLIGVLMGGQHTSAATSAWFLLHLAEKPELQEEIYQEIMKVTGGEDVTYDDLQEMPLVNNVIKETLRMHMPLHSIFRKVKNPLPVPGTSYVVPKGHHVLVSPGFAMTNENYFPQPEVYNPHRWDEDSTSKAAQDSSTVDYGFGAVSKGVSSPYLP

SEQ ID NO: 1062 - protein, 524 aa, Venturia inaequalis
  unsure (1)..(524): unsure at all Xaa locations
MGLLSPLLAXLPGSDRSWLFYTLASFGFTVAIVAANLVKQLLFSNPNEPPVVFHWFPFFGNTVVYGIDPIKFFAECKEKHGDIFTFILLGRKTTVYIGTKGNEFILNGKQSHVNAEEIYSPLTTPVFGSDVVYDCPNSKLMEQKKFVKYGLTTEALKSYVTLIQQEVEDYTKRYPQFKGEKGSFDVCASMAEITIFTASRSLQGKEVRDKFDASFADLFHDLDMGFSPINFMLPWAPLPHNRRRDAANKKMTETYLEIIQSRKAEGVKKDSEDMIWNLMQCVYKNGTPIPDKEIAHMMIALLMAGQHSSSSTSSWILLRLATRPDIQEELYQEQIRVCGADLPPLQYEDLARMPLHNQIIKETLRMHSPIHSILRAVKQPMPVEGTPYTIPTSHVLLAAPIASGGSPMYFPAPEKWEPHRWDEGSGGTNISGGENGGEEKEDYGYGLITKGASSPYLPFGAGRHRCIGEQFAYMQLNTVLATQVREFKFSLREGESFPKTDFSSLFSGPLRPAWLNWERREKSS

SEQ ID NO: 1063 - protein, 524 aa, Uncinula necator
MYIADILSDLLTQQTTRYGWIFMVTSIAFSIILLAVGLNVLSQLLFRRPYEPPVVFHWFPIIGSTISYGIDPYKFYFDCRAKYGDIFTFILLGKKVTVYLGLQGNNFILNGKLKDVNAEEIYTNLTTPVFGRDVVFDCPNSKLMEQKKFMKTALTIEAFHSYVTIIQNEVEAYINNCVSFQGESGTVNISKVMAEITIYTASHALQGEEVRENFDSSFAALYHDLDMGFTPINFTFYWAPLPWNRARDHAQRTVARTYMNIIQARREEKRSGENKHDIMWELMRSTYKDGTPVPDREIAHMMIALLMAGQHSSSSTSSWIMLWLAARPDIMEELYEEQLRIFGSEKPFPPLQYEDLSKLQLHQNVLKEVLRLHAPIHSIMRKVKNPMIVPGTKYVIPTSHVLISSPGCTSQDATFFPDPLKWDPHRWDIGSGKVLGNDAVDEKYDYGYGLTSTGASSPYLPFGAGRHRCIGEQFATLQLVTIMATMVRFFRFRNIDGKQGVVKTDYSSLFSMPLAPALIGWEKR

SEQ ID NO: 1064 - protein, 524 aa, Uncinula necator
MYIADILSDLLTQQTTRYGWIFMVTSIAFSIILLAVVLNVLSQLLFRRPYEPPVVFHWFPIIGSTISYGIDPYKFYFDCRAKYGDIFTFILLGKKVTVYLGLQGNNFILNGKLKDVNAEEIYTNLTTPVFGRDVVYDCPNSKLMEQKKFMKTALTTEAFHSYVTIIQNEVEAYINNCVSFQGESGTVNISKVMAEITIYTASHALQGEEVRENFDSSFAALYHDLDMGFTPINFTFYWAPLPWNRARDHAQRTVARTYMNIIQARREEKRSGENKHDIMWELMRSTYKDGTPVPDREIAHMMIALLMAGQHSSSSTSSWIMLWLAARPDIMEELYEEQLRIFGSEKPFPPLQYEDLSKLQLHQNVLKEVLRLHAPIHSIMRKVKNPMIVPGTKYVIPTSHVLISSPGCTSQDATFFPDPLKWDPHRWDIGSGKVLGNDAVDEKYDYGYGLTSTGASSPYLPFGAGRHRCIGEQFATLQLVTIMATMVRFFRFRNIDGKQGVVKTDYSSLFSMPLAPALIGWEKR

SEQ ID NO: 1065 - protein, 524 aa, Uncinula necator
MYIADILSDLLTQQTTRYGWIFMVTSIAFSIILLAVGLNVLSQLLFRRPYEPPVVFHWFPIIGSTISYGIDPYKFYFDCRAKYGDIFTFILLGKKVTVYLGLQGNNFILNGKLKDVNAEEIYTNLTTPVFGRDVVYDCPNSKLMEQKKFMKTALTIEAFHSYVTIIQNEVEAYINNCVSFQGESGTVNISKVMAEITIYTASHALQGEEVRENFDSSFAALYHDLDMGFTPINFTFYWAPLPWNRARDHAQRTVARTYMNIIQARREEKRSGENKHDIMWELMRSTYKDGTPVPDREIAHMMIALLMAGQHSSSSTSSWIMLWLAARPDIMEELYEEQLRIFGSEKPFPPLQYEDLSKLQLHQNVLKEVLRLHAPIHSIMRKVKNPMIVPGTKYVIPTSHVLISSPGCTSQDATFFPDPLKWDPHRWDIGSGKVLGNDAVDEKYDYGYGLTSTGASSPYLPFGAGRHRCIGEQFATLQLVTIMATMVRFFRFRNIDGKQGVVKTDYSSLFSMPLAPALIGWEKR

SEQ ID NO: 1066 - protein, 416 aa, Streptomyces venezuelae
MRRTQQGTTASPPVLDLGALGQDFAADPYPTYARLRAEGPAHRVRTPEGDEVWLVVGYDRARAVLADPRFSKDWRNSTTPLTEAEAALNHNMLESDPPRHTRLRKLVAREFTMRRVELLRPRVQEIVDGLVDAMLAAPDGRADLMESLAWPLPITVISELLGVPEPDRAAFRVWTDAFVFPDDPAQAQTAMAEMSGYLSRLIDSKRGQDGEDLLSALVRTSDEDGSRLTSEELLGMAHILLVAGHETTVNLIANGMYALLSHPDQLAALRADMTLLDGAVEEMLRYEGPVESATYRFPVEPVDLDGTVIPAGDTVLVVLADAHRTPERFPDPHRFDIRRDTAGHLAFGHGIHFCIGAPLARLEARIAVRALLERCPDLALDVSPGELVWYPNPMIRGLKALPIRWRRGREAGRRTG

SEQ ID NO: 1067 - protein, 481 aa, Trypanosoma brucei brucei
MLLEVAIFLLTALALYSFYFVKSFNVTRPTDPPVYPVTVPILGHIIQFGKSPLGFMQECKRQLKSGIFTINIVGKRVTIVGDPHEHSRFFLPRNEVLSPREVYSFMEPVFGEGVAYAAPYPRMREQLNFLAEELTIAKFQNFVPAIQHEVRKFMAANWDKDEGEINLLEDCSTMIINTACQCLFGEDLRKRLDARRFAQLLAKMESSLIPAAVFLPILLKLPLPQSARCHEARTELQKILSEIIIARKEEEVNKDSSTSDLLSGLLSAVYRDGTPMSLHEVCGMIVAAMFAGQHTSSITTTWSMLHLMHPANVKHLEALRKEIEEFPAQLNYNNVMDEMPFAERCARESIRRDPPLLMLMRKVMADVKVGSYVVPKGDIIACSPLLSHHDEEAFPEPRRWDPERDEKVEGAFIGFGAGVHKCIGQKFGLLQVKTILATAFRSYDFQLLRDEVPDPDYHTMVVGPTASQCRVKYIRRKAAAA

SEQ ID NO: 1068 - protein, 515 aa, Mercenaria mercenaria
MEILGMVNLPTWLVCIIMTVMTVCLYTWYKQSYFKRLGIHTKPTVFFLGDMFELSKKGFGYIDDQMVKENGKIFGLYLGNIPTLVISDTDIIKQIMVKDFSKFTDRVSLVQVTKKWKSAVSVASGEHWRFLRTTLSPTFTTGKIREMKPYIHKCMKTLLELLSEKTDQNPEGFNIVPNLSGYTLDVICSTGFGLDVDAQKDPDNLIIRYAREFLEFRGLRNPLFLVQMFFPDLSSIFGRLLETNIVSNEAFDFYMSTMKKAFTDRKQAQSKHRDLLQLLINTHKGELGENEIDTEETTFEGMKQRGLTDEEVLLNSIIFMVAGYDTTATTLSWIVYDLVTNTECQEKLIEEIDAEIGESETTYDNVFKLRYLDMVVNETLRMHPPAQRINRLALEDVKINGLQILKGMDCTFSILALHYMPEYWENPYKYDPERFAPENQANINQYAYMPFGQGPRNCIGKRLALLEVKATVVVLLQKFRLHKTDKLQVPMPVSDVGLGKPAKPVFVRLEKRSKN

SEQ ID NO: 1069 - protein, 518 aa, Homarus americanus
MITVVLVAVLAVLLTHFLWRRKNHFQLLARNGIPTPKYHWLLGHMEQTFYSPGKRSVVEVKHEWLQLYGKVCGFYSGAIPRVLVADLDMLKHILVKDINNFVNRSFFGTDKKMLIFLRDQQWKDVRRIMTPVFSSAKMKKMMPLMGGCVEELMDMYETAADSGQPIDMMEAFQCLTMDVINRCAITLDINCIKNPKNEVLAFMRKYVSQPIPCIFKFIVAFPMLYDLIRLLIPENKRNNITFIEEHLTKVVKQRREQTQATVVDGLQLLVDAADANVDASKTKLTDEEVVDNAFLFLLAGFETTSTALTYTSYLLALNPDIQEKIFQEVEEVVGLERAPSYEDLSKLVYTEAVALESTRMYPPVTGFITRQATQDWQYGPYTIPAGTEVEVPVWSIHHNPELYPQPELFKPERFLPKAKKDRHTMAYLGFGGGPRNCLGLRFALMEMKLVLSSVIQRFYIKPCSHTKVPLTLVTRNVFTNPDEGVWLTLHRRTTDLPHHYEPPTQVLYNRLCQVPLTK

SEQ ID NO: 1070 - protein, 492 aa, Mycobacterium tuberculosis H37Rv
MATIHPPAYLLDQAKRRFTPSFNNFPGMSLVEHMLLNTKFPEKKLAEPPPGSGLKPVVGDAGLPILGHMIEMLRGGPDYLMFLYKTKGPVVFGDSAVLPGVAALGPDAAQVIYSNRNKDYSQQGWVPVIGPFFHRGLMLLDFEEHMFHRRIMQEAFVRSRLAGYLEQMDRVVSRVVADDWVVNDARFLVYPAMKALTLDIASMVFMGHEPGTDHELVTKVNKAFTITTRAGNAVIRTSVPPFTWWRGLRARELLENYFTARVKERREASGNDLLTVLCQTEDDDGNRFSDADIVNHMIFLMMAAHDTSTSTATTMAYQLAAHPEWQQRCRDESDRHGDGPLDIESLEQLESLDLVMNESIRLVTPVQWAMRQTVRDTELLGYYLPKGTNVIAYPGMNHRLPEIWTDPLTFDPERFTEPRNEHKRHRYAFTPFGGGVHKCIGMVFDQLEIKTILHRLLRRYRLELSRPDYQPRWDYSAMPIPMDGMPIVLRPR

SEQ ID NO: 1071 - protein, 441 aa, Mycobacterium tuberculosis H37Rv
MSEVVTAAPAPPVVRLPPAVRGPKLFQGLAFVVSRRRLLGRFVRRYGKAFTANILMYGRVVVVADPQLARQVFTSSPEELGNIQPNLSRMFGSGSVFALDGDDHRRRRRLLAPPFHGKSMKNYETIIEEETLRETANWPQGQAFATLPSMMHITLNAILRAIFGAGGSELDELRRLIPPWVTLGSRLAALPKPKRDYGRLSPWGRLAEWRRQYDTVIDKLIEAERADPNFADRTDVLALMLRSTYDDGSIMSRKDIGDELLTLLAAGHETTAATLGWAFERLSRHPDVLAALVEEVDNGGHELRQAAILEVQRARTVIDFAARRVNPPVYQLGEWVIPRGYSIIINIAQIHGDPDVFPQPDRFDPQRYIGSKPSPFAWIPFGGGTRRCVGAAFANMEMDVVLRTVLRHFTLETTTAAGERSHGRGVAFTPKDGGRVVMRRR

SEQ ID NO: 1072 - protein, 472 aa, Mycobacterium tuberculosis H37Rv
MSGTSSMGLPPGPRLSGSVQAVLMLRHGLRFLTACQRRYGSVFTLHVAGFGHMVYLSDPAAIKTVFAGNPSVFHAGEANSMLAGLLGDSSLLLIDDDVHRDRRRLMSPPFHRDAVARQAGPIAEIAAANIAGWPMAKAFAVAPKMSEITLEVILRTVIGASDPVRLAALRKVMPRLLNVGPWATLALANPSLLNNRLWSRLRRRIEEADALLYAEIADRRADPDLAARTDTLAMLVRAADEDGRTMTERELRDQLITLLVAGHDTTATGLSWALERLTRHPVTLAKAVQAADASAAGDPAGDEYLDAVAKETLRIRPVVYDVGRVLTEAVEVAGYRLPAGVMVVPAIGLVHASAQLYPDPERFDPDRMVGATLSPTTWLPFGGGNRRCLGATFAMVEMRVVLREILRRVELSTTTTSGERPKLKHVIMVPHRGARIRVRATRDVSATSQATAQGAGCPAARGGGPSRAVGSQ

SEQ ID NO: 1073 - protein, 476 aa, Mycobacterium tuberculosis H37Rv
MVLRSLASPAALTDPKRCASVVGVAAFAVRREHAPDALGGPPGLPAPRGFRAAFAAAYAVAYLAGGERRMLRLIRRYGPIMTMPILSLGDVAIVSDSALAKEVFTAPTDVLLGGEGVGPAAAIYGSGSMFVQEEPEHLRRRKLLTPPLHGAALDRYVPIIENSTRAAMHTWPVDRPFAMLTVARSLMLDVIVKVIFGVDDPEEVRRLGRPFERLLNLGVSEQLTVRYALRRLGALRVWPARARANTEIDDVVMALIAQRRADPRLGERHDVLSLLVSARGESGEQLSDSEIRDDLITLVLAGHETTATTLAWAFDLLLHHPDALRRVRAEAVGGGEAFTTAVINETLRVRPPAPLTARVAAQPLTIGGYRVEAGTRIVVHIIAINRSAEVYEHPHEFRPERFLGTRPQTYAWVPFGGGVKRCLGANFSMRELITVLHVLLREGEFTAVDDEPERIVRRSIMLVPRRGTRVRFRPAR

SEQ ID NO: 1074 - protein, 449 aa, Mycobacterium tuberculosis H37Rv
MASTLTTGLPPGPRLPRYLQSVLYLRFREWFLPAMHRKYGDVFSLRVPPYADNLVVYTRPEHIKEIFAADPRSLHAGEGNHILGFVMGEHSVLMTDEAEHARMRSLLMPAFTRAALRGYRDMIASVAREHITRWRPHATINSLDHMNALTLDIILRVVFGVTDPKVKAELTSRLQQIINIHPAILAGVPYPSLKRMNPWKRFFHNQTKIDEILYREIASRRIDSDLTARTDVLSRLLQTKDTPTKPLTDAELRDQLITLLLAGHETTAAALSWTLWELAHAPEIQSQVVWAAVGGDDGFLEAVLKEGMRRHTVIASTARKVTAPAEIGGWRLPAGTVVNTSILLAHASEVSHPKPTEFRPSRFLDGSVAPNTWLPFGGGVRRCLGFGFALTEGAVILQEIFRRFTITAAGPSKGETPLVRNITTVPKHGAHLRLIPQRRLGGLGDSDPP

SEQ ID NO: 1075 - protein, 526 aa, Oculimacula yallundae
MGILDAVTVPLATQVSQRGLGVVIAAGFAAFLVVSVVLNVLSQILFKNPNEPPVVFHFFPIIGSTVTYGIDPYKFFFDNKAKYGNIFTFILLGKKTTVYLGPDGNEFILNGKIKDVNAEEIYTVLTTPVFGKDVVYDCPNSKLMEQKKFMKIGLTTDAFKTYVPIIQNEVETFIKRSPEFKGHSGTVNIPAQMAEITIYTASHALQGKDCRDKFDSSFAELYHALDMGFSPINFMLHWAPLPHNRARDHAQRTVAKTYMEIMEARRKDKKSLDNMDIMSQLMRSTYKNGVPVPDMEIAHMMIALLMAGQHSSSSSSSWIMLRLASRPDIMEELYQEQLEVLGSDLPPLQYEDLAKLTKHQNVLKEVLRLHTPIHSIMRKVKTPMPVAGTKFVVPTSHVLLASPGFSSRDDTYFPDAMKWEPHRWDPESGGVLGTDVEEESFDYGYGLISKGAKSPYLPFGAGRHRCIGEQFANVQLITITAVMVRYFKFKNLDNSGKVVETDYTSLFSRPLAPAVVEYERREKVKV

SEQ ID NO: 1076 - protein, 526 aa, Oculimacula yallundae
MGILDTVTVPLAQQVSQRGLGVVIAAGFAAFLVVSVVLNVLSQILFKNPNEPPVVFHFFPIIGSTVTYGIDPYKFFFDNKAKYGNIFTFILLGKKTTVYLGRDGNEFILNGKIKDVNAEEIYTVLTTPVFGKDVVYDCPNSKLMEQKKFMKIGLTTDAFKTYVPIIQNEVETFIKRSPEFKGHSGTVNIPAQMAEITIYTASHALQGKDCRDKFDSSFAELYHALDMGFSPINFMLHWAPLPHNRARDHAQRTVAKTYMEIMEARRKDKKSLDNMDIMSQLMRSTYKNGVPVPDMEIAHMMIALLMAGQHSSSSSSSWIMLRLASRPDIMEELYQEQLEVLGSDLPPLQYEDLAKLTKHQNVLKEVLRLHTPIHSIMRKVKTPMPVAGTKFVVPTSHVLLASPGFSSRDDTYFPDAMKWEPHRWDPESGGVLGTDVEEESFDYGYGLISKGAKSPYLPFGAGRHRCIGEQFANVQLITITAVMVRYFKFKNLDNSGKVVETDYTSLFSRPLAPAVVEYERREKVKV

SEQ ID NO: 1077 - protein, 526 aa, Oculimacula yallundae
MGILDAVTVPLAQQVSQRGLGVVIAAGFAAFLVVSVVLNVLSQILFKNPNEPPVVFHFFPIIGSTVTYGIDPYKFFFDNKAKYGNIFTFILLGKKTTVYLGRDGNEFILNGKIKDVNAEEIYTVLTTPVFGKDVVYDCPNSKLMEQKKFMKIGLTTDAFKTYVPIIQNEVETFIKRSPEFKGHSGTVNIPAQMAEITIYTASHALQGKDCRDKFDSSFAELYHALDMGFSPINFMLHWAPLPHNRARDHAQRTVAKTYMEIMEARRKDKKSLDNMDIMSQLMRSTYKNGVPVPDMEIAHMMIALLMAGQHSSSSSSSWIMLRLASRPDIMEELYQEQLEVLGSDLPPLQYEDLAKLTKHQNVLKEVLRLHTPIHSIMRKVKTPMPVAGTKFVVPTSHVLLASPGFSSRDDTYFPDAMKWEPHRWDPESGGVLGTDVEEESFDYGYGLISKGAKSPYLPFGAGRHRCIGEQFANVQLITITAVMVRYFKFKNLDNSGKVVETDYTSLFSRPLAPAVVEYERREKVKV

SEQ ID NO: 1078 - protein, 526 aa, Venturia nashicola
MGLLSALLAPLAGSDRGWLFYTLASFGFTVAIVVANVLKQVLLKNPNEPPVVFHWFPFFGNTVVYGIDPIKFFAECKEKHGDIFTFILLGRKTTVYIGTKGYEFILNGKQSHVNAEEIYSPLTTPVFGSDVVYDCPNSKLMEQKKFVKYGLTTEALKSYVTLIQREVEDYAKRYSQFKGEKGSFDVCATMGEITIFTASRSLQGKEVRDKFDASFADLFHDLDMGFSPINFMLPWAPLPHNRRRDAANKKMTETYLEIIRSRKVEGAKKDSEDMIWNLMQCVYKNGTPIPDNEIAHMMIALLMAGQHSSSSTSSWMLFRLATRPDIQEELYQEQIRVCGADLPPLKYDDLARMPLHNQQIIKETLRMHSPIHSILRAVKQPMPIEGTPYTIPTSHVLLAAPIASGGSPMYFPAPEKWEPHRWDEGSGGTNISGGDNGDEEKEDYGYGLITKGASSPYLPFGAGRHRCIGEQFAYMQLNTVLATQVREFKFSFREGESFPKTDFSSLFSGPQRPAWLNWERREKSSS

SEQ ID NO: 1079 - protein, 503 aa, Macaca fascicularis
MDLIPDLAVETWLLLAVTLVLLYLYGTHSHGLFKKLGIPGPTPLPLLGNILSYRKGFWTFDMECYKKYGKVWGFYDGRQPVLAITDPNMIKTVLVKECYSVFTNRRPFGPVGFMKNAISIAEDEEWKRIRSLLSPTFTSGKLKEMVPIIAKYGDVLVRNLRREAETGKPVTLKDVFGAYSMDVITSTSFGVNIDSLNNPQDPFVENTKKLLRFDFLDPFFLSITIFPFIIPILEVLNISIFPREVTSFLRKSVKRIKESRLKDTQKHRVDFLQLMIDSQNSKETESHKALSDLELVAQSIIFIFAGYETTSSVLSFIIYELATHPDVQQKLQEEIDTVLPNKAPPTYDTVLQMEYLDMVVNETLRIFPIAMRLERVCKKDVEINGIFIPKGVVVMIPSYALHHDPKYWPEPEKFLPERFSKKNNDNIDPYIYTPFGSGPRNCIGMRFALMNMKLAIIRVLQNFSFKPCKETQIPLKLRLGGLLQTEKPIVLKIESRDGTVSGA

SEQ ID NO: 1080 - protein, 522 aa, Homo sapiens
MFPWGLSCLSVLGAAGTALLCAGLLLSLAQHLWTLRWMLSRDRASTLPLPKGSMGWPFFGETLHWLVQGSRFHSSRRERYGTVFKTHLLGRPVIRVSGAENVRTILLGEHRLVRSQWPQSAHILLGSHTLLGAVGEPHRRRRKVLARVFSRAALERYVPRLQGALRHEVRSWCAAGGPVSVYDASKALTFRMAARILLGLRLDEAQCATLARTFEQLVENLFSLPLDVPFSGLRKGIRARDQLHRHLEGAISEKLHEDKAAEPGDALDLIIHSARELGHEPSMQELKESAVELLFAAFFTTASASTSLVLLLLQHPAAIAKIREELPDLSLAALGRLRYVDCVVKEVLRLLPPVSGGYRTALRTFELDVSAPCQPMASLLPPAACRLPPAACRGGAQGYQIPKGWSVMYSIRDTHETAAVYRSPPEGFDPERFGAAREDSRGASSRFHYIPFGGGARSCLGQELAQAVLQLLAVELVRTARWELATPAFPAMQTVPIVHPVDGLRLFFHPLTPSVAGNGLCL

SEQ ID NO: 1081 - protein, 485 aa, Taxus cuspidata
MDALKQLEVSPSILFVTLAVMAGIILFFRSKRHSSVKLPPGNLGFPLVGETLQFVRSLGSSTPQQFIEERMSKFGDVFKTSIIGHPTVVLCGPAGNRLVLSNENKLVQMSWPSSMMKLIGEDCLGGKTGEQHRIVRAALTRFLGPQALQNHFAKMSSGIQRHINEKWKGKDEATVLPLVKDLVFSVASRLFFGITEEHLQEQLHNLLEVILVGSFSVPLNIPGFSYHKAIQARATLADIMTHLIEKRRNELRAGTASENQDLLSVLLTFTDERGNSLADKEILDNFSMLLHGSYDSTNSPLTMLIKVLASHPESYEKVAQEQFGILSTKMEGEEIAWKDLKEMKYSWQVVQETLRMYPPIFGTFRKAITDIHYNGYTIPKGWKLLWTTYSTQTKEEYFKDADQFKPSRFEEEGKHVTPYTYLPFGGGMRVCPGWEFAKMETLLFLHHFVKAFSGLKAIDPNEKLSGKPLPPLPVNGLPIKLYSRS

SEQ ID NO: 1082 - protein, 500 aa, Beta vulgaris
FLHLRPTPTAKSKALRHLPNPPSPKPRLPFIGHLHLLKDKLLHYALIDLSKKHGPLFSLYFGSMPTVVASTPELFKLFLQTHEATSFNTRFQTSAIRRLTYDSSVAMVPFGPYWKFVRKLIMNDLLNATTVNKLRPLRTQQIRKFLRVMAQGAEAQKPLDLTEELLKWTNSTISMMMLGEAEEIRDIAREVLKIFGEYSLTDFIWPLKHLKVGKYEKRIDDILNKFDPVVERVIKKRREIVRRRKNGEDVEGEVSGVFLDTLLEFAEDETMEIKITKDHIKGLVVDFFSAGTDSTAVATEWALAELINNPKVLEKAREEVYSVVGKDRLVDEVDTQNLPYIRAIVKETFRMHPPLPVVKRKCIEECEINGYVIPEGALILFNVWQVGRDPKYWDRPSEFRPERFLETGAEGEARLLDLRGQHFQLLPFGSGRRMCPGVNLATSGMATLLASLIQCFDLQVLGPQGQILKGGDAKVSMEERAGLTVPRAHSLVCVPLARIG

SEQ ID NO: 1083 - protein, 499 aa, Beta vulgaris
LHLRPTPTAKSKALRHLPNPPSPKPRLPFIGHLHLLKDKLLHYALIDLSKKHGPLFSHYFGSMPTVVASTPELFKLFLQTNEATSFNTRFQTSAIRRLTYDSSVAMVPFGPYWKFVRKLIMNDLLNATTVNKLRPLRTQQIRKFLRAMAQGAEARKPLDLTEELLKWANSTISMMMLGEAEEIRDIAREVLKIFGEYSLTDFIWPLKHLKVGKYEKRIDDILNKFDPVVERVIKKRREIVRRRKNGEVVEGEVSGVFLDTLLEFAEDETMEIKITKDHTKGLVVDFFSAGTDSTAVATEWALAELINNPKVLEKAREEVYSVVGKDRLVDEVDTQNLPYIRAIVKETFRMHPPLPVVKRKCTEECEINGYVIPEGALIPFNVWQVGRDPKYWDRPSEFRPERFLETGAEGEARPLDLRGQHFQLLPFGSGRRMCPGVNLATSGTATLLASLIQCFDLQVLGPQGQILKGGDAKVSMEERAGLTVPRAHSLVCVPLARIG

SEQ ID NO: 1084 - protein, 511 aa, Gerbera hybrid cultivar
MNTLQLIFLLFFFPTLLFLYCLPYKRNQNHRRLPPSPPSFPIIGHLHHLGPLIHQSFHALSTRYGSLIHLRLGSVPCVVVSTPDLAKDFLKTNELAFSSRKHSLAIDHITYGVAFAFAPYGTYWKFIKKLFTVELLGTQNLSHFLPIRTHEIRELLRTLMVKSRAKERVNLTEELLKLTNNVISQMMMSIRCSGTNSEADEAKNLVREVTKIFGQFNVSDFIWFCKNIDLQGFKKRYEGTHRRYDALLERIIMGREENRRRGKIKDGEGKDFLDMLLDVLEDGKAEIKITRDHIKALILDFLTAGTDTTAIAIEWALVELINNPNALEKARQEIDQVIGDERLVQESDTPNLPYIQAIIKEALRLHPPIPMLIRKSTENVIVQGYDIPAGTLLFVNIWSIGRNPQCWETPLEFKPHRFLDGGDLKSSLDIKGHNFQLLPFGTGRRGCPGVNLAMRELSVVIANLIQCFDWDVVGERLLNTDERAGLTAPRAVDFVCVPLERGNTLKILGSN

SEQ ID NO: 1085 - protein, 496 aa, Mentha spicata
MELDLLSAIIILVATYIVSLLINQWRKSKSQQNLPPSPPKLPVIGHLHFLWGGLPQHVFRSIAQKYGPVAHVQLGEVYSVVLSSAEAAKQAMKVLDPNFADRFDGIGSRTMWYDKDDIIFSPYNDHWRQMRRICVTELLSPKNVRSFGYIRQEEIERLIRLLGSSGGAPVDVTEEVSKMSCVVVCRAAFGSVLKDQGSLAELVKESLALASGFELADLYPSSWLLNLLSLNKYRLQRMRRRLDHILDGFLEEHREKKSGEFGGEDIVDVLFRMQKGSDIKIPITSNCIKGFIFDTFSAGAETSSTTISWALSELMRNPAKMAKVQAEVREALKGKTVVDLSEVQELKYLRSVLKETLRLHPPFPLIPRQSREECEVNGYTIPAKTRIFINVWAIGRDPQYWEDPDTFRPERFDEVSRDFMGNDFEFIPFGAGRRICPGLHFGLANVEIPLAQLLYHFDWKLPQGMTDADLDMTETPGLSGPKKKNVCLVPTLYKSP

SEQ ID NO: 1086 - protein, 518 aa, Lotus japonicus
MLVEIALALLALALFLQFRPTPTAKSKALRHLPNPPSPKPRLPFVGHLHLLDQPLLHNSLIKLGEKYGPLYTLYFGSMPTVVASTPELFKLFLQTHEATSFSTRFQTSAIRRLTYDNSVAMVPFAPYWKFIRKVIMNDLLNATTVNKLRPLRSQEIRKVLKAMAQSAESQKPLNVTEELLKWTNSTISRMMLGEAEHVKDIVREVLKIFGEYSLTDFIWPLKKLRVGQYEKRIDEIFNKFDPVIEKVIKKRQEIIKRRKERNGELEEGEQSVVFLDTLLEYAADENMEIKITKEQIKGLVVDFFSAGTDSTAVATDWALAELINNPRVLKKAREEVDSVVGKDRLVDESDIQNLPYIRAIVKETFRMHPPLPVVKRKCVQECELNGYVIPEGALVLFNVWAVQRDPKYWKTPLEFRPERFLEEADIDLKGQHFELLPFGSGRRMCPGVNLATAGMATLLSSVIQCFELQVVGPKGQILKGSDAKANMEERAGLTVPRANSLMCVPLARSKVAAELLSS

SEQ ID NO: 1087 - protein, 490 aa, Lotus japonicus
VALMILRKNLKKPDSIPNIPPGPWKLPIIGSIPHLVGSPPHRKLRDLAKKYGPLMHLQLGEVIFIIVSSAEYAKEVMKTHDVTFASRPRSLFTDIVFYGSTDIGFSPYGDYWRQVRKICNVELLSMKRVQSLWPIREEEVKNLIQRIASEEGSVVNLSQAIDSLIFTITSRSAFGKRYMEQEEFISCVREVMKLAGGFNIADLFPSAKWLENLTRMRSKFEYLHQKMDRILETIIDDHKANSRTKEGQVEGGEEDLIDVLLKYENSSTDQDFHLTIRNIKAILFDIFIAGSETSATTINWTMAEMMKDPILLKKAQDEVREIFQRRGKVDETCIYELKYLKAFINEVLRLHPPGPLVFRECRQACEINGYHIPAKSTVLVNTFAIGTDSKYWAEPERFCPERFIDSSIDYKGTNFEHLPFGAGRRICPGINYGMANVELVLALLLYHFDWTLPKGIKNEDLDLTEEFGVTVSKKEDLCLIPSISHPLPST

SEQ ID NO: 1088 - protein, 318 aa, Persea americana
  unsure (1)..(318): unsure at all Xaa locations
DIIKNAAEIIAKTSFGMNHQYAERVFEKLKAMQVTLYRSGRLLGVPFGRLVYLKQTLEERKLGKEIDDLLLSIITARKASHIAEPPKDLLGLLLPDNHVNELLGKKLSPRELVDECKTFFFGGHETTALASLWTLFLLAKQPKWQTLLREXIMEVTGGEPLDFTMLPKLEKMGWVMNEVLRLYPPAPNVQRQVREDIQVGDTIIPKGTNIWIDLVGMHHDPALWGEDVNEFRPERFKEDVLYGGCKHKMGYLPFGFGGRMCVGRNLALMEYKTVLSLILTRFSMSLSPNYLHSPTHLLSLRPSCGMPLILQPITPNHP

SEQ ID NO: 1089 - protein, 488 aa, Coptis japonica
MEVLSIAIVSFSFLLFLFFILRDSRPKNLPPGPRPSPIVGNLLQLGDKPHAEFAKLAQKYGELFSLKLGSQTVVVASSPAAAAEILKTHDKILSGRYVFQSFRVKEHVENSIVWSECNDNWKLLRKVCRTELFTPKMIESQSEIREAKAREMVKFLRGKEGEVVKIVEVVFGTLVNIFGNLIFSKDVFDLEDPTGGSVELKEHLWKLLDMGNSTNPADYFPIMGKLDLFGQRRAVAEVLQQIYDVWGVMLKERRGTKGSESKNDFVDVLLNAGLDDQKINALLMELFGAGTETSASTIEWAITELTKKPLVVSKIRLELVNVVGDNTVKESDLPHLPYLQAFVKETLRLHPPTPLLLPRRALETCTVMNYTIPKECQIMVNAWAIGRDPKTWDDPLNFKPERFLSSDVDYKGNDFELIPFGGGRRICPGLPLASQFSNLIVATLVQNFEWSLPQGMSTSELSMDEKFGLTLQKDPPLLIVLKARASNI

SEQ ID NO: 1090 - protein, 491 aa, Coptis japonica
MEMNPLLVCATVAIVFATTTIIRILFSSSSLPQMKWPSGPRKLPIIGNLHQLGDDVLHVALAKLAKVHGSVMTIWIGSWRPVIVISDIEKAWEVLVNKSADYGARDMPEITKIASASWHTISTSDAGSFWQNVRKGLQSGAMGPLNVAAQNQYQERDMKRLIKAMSDEAANNNGIVKPLDHIKKNTVRLLTRLIFGQAFDDNKFIESMHYEIEDIIRISGYARLAEAFYYAKYLPSHKKAEREAFLVKCRVEELVRPLLSSKPPTNSYLYFLLSQNFEEEVIIFCIFELYLLGVDSTSSTTTWALAYLIREQGAQEKLYQDIRMTLGDVDLVKIEDVNKLKYLQGVVKETMRMKPIAPLAIPHKTAKETTLMGTKVAKGTRIMVNLYALHHNQNIWPDPYKFMPERFLEGETGTAYNKAMEQSFLPFSAGMRICAGMDLGKLQFAFALANLVNAFKWSCVEEGKLPDMGEELSFVLLMKTPLEARIAGRNV

SEQ ID NO: 1091 - protein, 521 aa, Stenotomus chrysops
  unsure (1)..(521): unsure at all Xaa locations
MVLMILPVIGSVSVSEGLVAMITMCLAYLILRLFRTEIPEGLLQLPGPKPLPIIGNVLEVGRNPYLSLTAMSKRYGDVFQIQIGMRPVVVLSGSETVRQALIKQGDXFAGRPDLYSFRFINDGKSLAFSTDQAGVWRARRKLAYSALRSFATLEGTTPEYSCALEEHVSKEAEYLVKQLHTVMEADGSFDPFRHIVVSVANVICGMCFGRRYDHNHQELLNLVNLSDEFGQVVASGNPADFIPILQYLPSTTMKKFLNINDRFNTFVQKIVSEHYTTFDKDNIRDITDSLIDHCEDRKLDENSNVQMSDEKIVGIVNDLFGAGFDTISTALSWSVMYLVAYPEIQERLYQEMNETVGPDRTPCLSDKPKLPFLEAFILETFRHSSFLPFTIPHCTSKDTSLNGYFIPKDTCVFINQWQINHDAELWKDPSSFNPDRFLNADGTEVNKLEGEKMMVFGMGKRRCIGEVIARSEVFLFLAILVQNLRFHSMPGEPLDMTPEYGLTMKHKRCQLRAAMRARNEE

SEQ ID NO: 1092 - protein, 521 aa, Stenotomus chrysops
MVLMILPVIGSVSVSEGLVAMITMCLAYLILRLFRTEIPEGLLQLPGPKPLPIIGNVLEVGRNPYLSLTAMSKRYGDVFQIQIGMRPVVVLSGSETVRQALIKQGDDFAGRPDLYSFRFINDGKSLAFSTDQAGVWRARRKLAYSALRSFATLEGTTPEYSCALEEHVSKEAEYLVKQLHTVMEADGSFDPFRHIVVSVANVICGMCFGRRYDHNHQELLNLVNLSDEFGQVVASGNPADFIPILQYLPSTTMKKFLNINDRFNTFVQKIVSEHYTTFDKDNIRDITDSLIDHCEDRKLDENSNVQMSDEKIVGIVNDLFGAGFDTISTALSWSVMYLVAYPEIQERLYQEMNETVGPDRTPCLSDKPKLPFLEAFILETFRHSSFLPFTIPHCTSKDTSLNGYFIPKDTCVFINQWQINHDAELWKDPSSFNPDRFLNADGTEVNKLEGEKMMVFGMGKRRCIGEVIARSEVFLFLAILVQNLRFHSMPGEPLDMTPEYGLTMKHKRCQLRAAMRARNEE

SEQ ID NO: 1093 - protein, 491 aa, Arabidopsis thaliana
MDTSSSLLFFSFFFFIIIVIFNKINGLRSSPASKKKLNDHHVTSQSHGPKFPHGSLGWPVIGETIEFVSSAYSDRPESFMDKRRLMYGRVFKSHIFGTATIVSTDAEVNRAVLQSDSTAFVPFYPKTVRELMGKSSILLINGSLHRRFHGLVGSFLKSPLLKAQIVRDMHKFLSESMDLWSEDQPVLLQDVSKTVAFKVLAKALISVEKGEDLEELKREFENFISGLMSLPINFPGTQLHRSLQAKKNMVKQVERIIEGKIRKTKNKEEDDVIAKDVVDVLLKDSSEHLTHNLIANNMIDMMIPGHDSVPVLITLAVKFLSDSPAALNLLTEENMKLKSLKELTGEPLYWNDYLSLPFTQKVITETLRMGNVIIGVMRKAMKDVEIKGYVIPKGWCFLAYLRSVHLDKLYYESPYKFNPWRWQERDMNTSSFSPFGGGQRLCPGLDLARLETSVFLHHLVTRFRWIAEEDTIINFPTVHMKNKLPIWIKRI

SEQ ID NO: 1094 - protein, 464 aa, Arabidopsis thaliana
MDTSSSLLFFSFFFFIIIVIFNKINGLRSSPASKKKLNDHHVTSQSHGPKFPHGSLGWPVIGETIEFVSSAYSDRPESFMDKRRLMYGRVFKSHIFGTATIVSTDAEVNRAVLQSDSTAFVPFYPKTVRELMGKSSILLINGSLHRRFHGLVGSFLKSPLLKAQIVRDMHKFLSESMDLWSEDQPVLLQDVSKTVAFKVLAKALISVEKGEDLEELKREFENFISGLMSLPINFPGTQLHRSLQAKKNMVKQVERIIEGKIRKTKNKEEDDVIAKDVVDVLLKDSSEHLTHNLIANNMIDMMIPGHDSVPVLITLAVKFLSDSPAALNLLTEENMKLKSLKELTGEPLYWNDYLSLPFTQKVITETLRMGNVIIGVMRKAMKDVEIKGYVIPKGWCFLAYLRSVHLDKLYYESPYKFNPWRWQERDMNTSSFSPFGGGQRLCPGLDLARLETSVFLHHLVTRFR

SEQ ID NO: 1095 - protein, 524 aa, Arabidopsis thaliana
MQPPASAGLFRSPENLPWPYNYMDYLVAGFLVLTAGILLRPWLWLRLRNSKTKDGDEEEDNEEKKKGMIPNGSLGWPVIGETLNFIACGYSSRPVTFMDKRKSLYGKVFKTNIIGTPIIISTDAEVNKVVLQNHGNTFVPAYPKSITELLGENSILSINGPHQKRLHTLIGAFLRSPHLKDRITRDIEASVVLTLASWAQLPLVHVQDEIKKMTFEILVKVLMSTSPGEDMNILKLEFEEFIKGLICIPIKFPGTRLYKSLKAKERLIKMVKKVVEERQVAMTTTSPANDVVDVLLRDGGDSEKQSQPSDFVSGKIVEMMIPGEETMPTAMTLAVKFLSDNPVALAKLVEENMEMKRRKLELGEEYKWTDYMSLSFTQNVINETLRMANIINGVWRKALKDVEIKGYLIPKGWCVLASFISVHMDEDIYDNPYQFDPWRWDRINGSANSSICFTPFGGGQRLCPGLELSKLEISIFLHHLVTRYSWTAEEDEIVSFPTVKMKRRLPIRVATVDDSASPISLEDH

SEQ ID NO: 1096 - protein, 457 aa, Arabidopsis thaliana
MIPNGSLGWPVIGETLNFIACGYSSRPVTFMDKRKSLYGKVFKTNIIGTPIIISTDAEVNKVVLQNHGNTFVPAYPKSITELLGENSILSINGPHQKRLHTLIGAFLRSPHLKDRITRDIEASVVLTLASWAQLPLVHVQDEIKKMTFEILVKVLMSTSPGEDMNILKLEFEEFIKGLICIPIKFPGTRLYKSLKAKERLIKMVKKVVEERQVAMTTTSPANDVVDVLLRDGGDSEKQSQPSDFVSGKIVEMMIPGEETMPTAMTLAVKFLSDNPVALAKLVEENMEMKRRKLELGEEYKWTDYMSLSFTQNVINETLRMANIINGVWRKALKDVEIKGYLIPKGWCVLASFISVHMDEDIYDNPYQFDPWRWDRINGSANSSICFTPFGGGQRLCPGLELSKLEISIFLHHLVTRYSWTAEEDEIVSFPTVKMKRRLPIRVATVDDSASPISLEDH

SEQ ID NO: 1097 - protein, 524 aa, Arabidopsis thaliana
MQPPASAGLFRSPENLPWPYNYMDYLVAGFLVLTAGILLRPWLWFRLRNSKTKDGDEEEDNEEKKKGMIPNGSLGWPVIGETLNFIACGYSSRPVTFMDKRKSLYGKVFKTNIIGTPIIISTDAEVNKVVLQNHGNTFVPAYPKSITELLGENSILSINGPHQKRLHTLIGAFLRSPHLKDRITRDIEASVVLTLASWAQLPLVHVQDEIKKMTFEILVKVLMSTSPGEDMNILKLEFEEFIKGLICIPIKFPGTRLYKSLKAKERLIKMVKKVVEERQVAMTTTSPANDVVDVLLRDGGDSEKQSQPSDFVSGKIVEMMIPGEETMPTAMTLAVKFLSDNPVALAKLVEENMEMKRRKLELGEEYKWTDYMSLSFTQNVINETLRMANIINGVWRKALKDVEIKGYLIPKGWCVLASFISVHMDEDIYDNPYQFDPWRWDRINGSANSSICFTPFGGGQRLCPGLELSKLEISIFLHHLVTRYSWTAEEDEIVSFPTVKMKRRLPIRVATVDDSASPISLEDH

SEQ ID NO: 1098 - protein, 467 aa, Glycine max
  unsure (1)..(467): unsure at all Xaa locations
XRVSYVGPPPKTSQNLSPLMLKSKRKKNKLPLGTLGWPFIGETIEFVSCAYSDRPESFMDKRRRMYGKVFKSHIFGSPTIVSTDASVNKFILQSDAKVFVPSYPKSLTELMGESSILLINGSLQRRIHGLIGAFFKSQQLKAQITRDMQKYVKESMASWREDCPIYIQDETKKIAFHVLVKALISLDPGEEMELLKKHFQEFISGLMSLPIKLPGTKLYQSLQAKKKMVKLVKRIILAKRSSGFCKVPKDVVDVLLSDANEKLTDDLIADNIIDMMIPGEDSVPLLMTLATKYLSECPAALQQLTEENMKLKKIQDQVGESLSWSDYLSLPFTQTVITETLRMGNIIIGVMRKALKDVEIKGHLIPKGWCVFVNFRSVHLDDKNYECPYQFNPWRWQDKDTSSCNFTPFGGGQRLCPGLDLARLEASIFLHHFVTQFRWHAEKDAIVNFPTVRMKKRMPVKVRRVES

SEQ ID NO: 1099 - protein, 500 aa, Lupinus albus
FLHLRPTPTAKSKALRHLPNPPSPKPRLPFIGHLHLLKDKLLHYALIDLSKKHGPLFSLYFGSMPTVVASTPELFKLFLQTHEATSFNTRFQTSAIRRLTYDSSVARVPFGPYWKFVRKLIMNDLLNATTVNKLRPLRTQQIRKFLRVMAQGAEAQKPLDLTEELLKWTNSTISMMMLGEAEEIRDIAREVLKIFGEYSLTDFIWPLKHLKVGKYEKRIDDILNKFDPVVERVIKKRREIVRRRKNGEVVEGEVSGVLLDTLLEFAEDETMEIKITKDHIKGLVVDFFSAGTDSTAVATEWALAELINNPKVLERAREEVYSVVGKDRLVDEVDTQNLPYIRAIVKETFRMHPPLPVVKRKCTEECEINGYVIPEGALILFNVWQVGRDPKYWDRPSEFRPERFLETEAEGEARPLDLRGQHFQLLPFGSGRRMCPGVILATSGMATLLASLIQCFDLQVLGPQGQILKGGDAKVSMEERAGLTVPRAHSLVCVPLARIG

SEQ ID NO: 1100 - protein, 500 aa, Medicago sativa
FLHLRPTPTAKSKALRHLPNPPSPKPRLPFIGHLHLLKDKLLHYALIDLSKKHGPLFSLYFGSMPTVVASTPELFKLFLQTHEATSFNTRFQTSAIRRLTYDSSVAMAPFGPYWKFVRKLIMNDLLNATTVNKLRPLRTQQIRKFLRVMAQGAEAQKPLDLTEELLKWTNSTTSMMMLGEAEEIRDIAREVLKIFGEYSLTDFIRPLKHLKVGKYEKRIDDILNKFDPVVERVIKKRREIVRRRKNGEVVEGEVSGVFLDTLLEFAEDETTEIKITKDHIKGLVVDFFSAGTDSTAVATEWALAELINNPKVLEKAREEVYSVVGKDRLVDEVDTQNLPYIRAIVKETFRMHPPLPVVKRKCTEECEINGYVIPEGALILFNVWQVGRDSKYWDRPSEFRPERFLETGAEGEARPLDLRGQHFQLLPFGSGRRMCPGVNLATSGMATLLASLIQCFDLQVLGPQGQILKGGDAKVSMEERAGLTVPRAHSLVCVPLARIG

SEQ ID NO: 1101 - protein, 500 aa, Medicago sativa
FLHLRPTPTAKSKALRHLPNPPSPKPRLPFIGHLHLLKDKLLHYALIDLSKKHGPLFSLYFGSMPTVVASTPELFKLFLQTHEATSFNTRFQTSAIRRLTYDSSVAMVPFGPYWKFVRKLIMNDLLNATTVNKLRPLRTQQIRKLLRVMAQGAEAQKPLDLTEELLKWTNSTISMMMLGEAEEIRDIAREVLKIFGEYSLTDFIWPLKHLKVGKYEKRIDDILNKFDPVVERVIKKRREIVRRRKNGEVIEGEVSGVFLDTLLEFAEDETTEIKITKDHIKGLVVDFFSAGTDSTAVATEWALAELINNPKVLEKAREEVYSVVGKDRLVDEVDTQNLPYIRAIVKETFRMHPPLPVVKRKCTEECEINGYVIPEGALILFNVWQVGRDPKYWDRPSEFRPERFLETGAEGEARPLDLRGQHFQLLPFGSGRRMCPGVNLATSGMATLLASLIQCFDLQVLGPQGQILKGGDAKVSMEERAGLTVPRAHSLVCVPLARIG

SEQ ID NO: 1102 - protein, 500 aa, Medicago sativa
FLHLRPTPSAKSKALRHLPNPPSPKPRLPFIGHLHLLKDKLLHYALIDLSKKHGPLFSLSFGSMPTVVASTPELFKLFLQTHEATSFNTRFQTSATRRLTYDNSVAMVPFGPYWRFVRKLIMNDLLNATTVNKLRPLRTQQIRKFLRVMAQSAEAQKPLDVTEELLKWTNSTISMMMLGEAEEIRDIAREVLKIFGEYSLTDFIWPLKYLKVGKYEKRIDDILNKFDPVVERVIKKRRGIVRRRENGEVVEGEASGVFLDTLLEFAEDETMEIKITKEQIKGLVVDLFSAGTDSTAVATEWALAELINNPRVLQKAREEVYSVVGKDRLVDEVDTQNLPYIRAIVKETFRMHPPLPVVKRKCTEECEINGYVIPEGALVLFNVWQVGRDPKYWDRPSEFRPERFLETGAEGEAGPLDLRGQHFQLLPFGSGRRMCPGVNLATSGMATLLASLIQCFDLQVLGPQGQILKGDDAKVSMEERAGLTVPRAHSLVCVPLARIG

SEQ ID NO: 1103 - protein, 500 aa, Trifolium repens
FLHLRPTPTAKSKALRHLPNPPSPKPRLPFIGHLHLLKDKLLHYALIDLSKKHGPLFSLYFGSMPTVVASTPELFKLFLQTHEATSFNTRFQTSAIRRLTYDNSVAMVPFGPYWKFVRKLIMNDLLNATTVNKLRPLRTQQIRKFLRVMAQSAEAQKPLDVTEELLKWTNSTISMMMLGEAEEIRDIAREVLKIFGEYSLTDFIWPLKYLKVGKYEKRIDDILNKFDPVVERVIKKRREIVRRRKNGEVVEGEASGVFLDTLLEFAEDETMEIKITKEQIKGLVVDFFSAGTDSTAVATEWALAELINNPKVLQKAREEAYSVVGKDRLVDEVDTQNLPYIRAIVKETFRMHPPLPVVKRKCTEECGINGYVIPEGALVLFNVWQVGRDPKYWDRPSEFRPERFLETGAEGEAGPLDLRGQHFQLLPFGSGRRMCPGVNLATSGMATLLASLIQCFDLQVLGPQGQILKGDDAKVSMEERAGLTVPRAHSLVCVPLARIG

SEQ ID NO: 1104 - protein, 499 aa, Trifolium repens
SHLRPTPSAISKALRHLPNPPSPRPRLPFIGHLHLLKDKLLHYAPIDLSKKHGPLFSLSFGSMPTVVASTPELFKLFLQTHEATSFNTRFQTSAIRHLTYDNSVAMVPFGPYWKFVRKLIMNDLLNATTVNKLRPLRTQQIRKFLRVMAQSAEAQKPLDVTEELLKWTNSTISMMMLGEAEEIRDIAREVLKIFGEYSLTDFIWPLKYLKVGKYEKRIDDILNKFDPVVERVIKKRREIVRRRKNGEVVEGEASGVFLDTLLEFAEDETMEIKITKEQIKGLVVDFFSAGTDSTAVVTEWALAELINNPRVLQKAREEVYSVVGKDRLVDEVDTQNLPYIRAIVKETFRMHPPLPVVKRKCTEECEINGYVIPEGALVLFNVWQVGRDPKYWDRPSESRPERFLETGAEGEAGPLDLRGQHFQLLPFGSGRRMCPGVSLATSGMATLLASLIQCFDLQVLGPQGQILKGDDAKVSMEERAGLTVPRAHSLVCVPLARIG

SEQ ID NO: 1105 - protein, 500 aa, Vicia villosa
FLHLRPTPTAKSKALRHLPNPPSPKPRLPFIGHLHLLKDKLLHYALIDLSKKHGPLFSLYFGSMPTVVASTPELFKLFLQTHEATSFNTRFQTSAIRRLTYDSLVAMVPFGPYWKFVRKLIMNDLLNATTVNKLRPLRTQQIRKFLRVMAQGAEAQKPLDLTEELLKWTNSTISMMMLGEAEEIRDIAREVLKIYGEYSLTDFIWPLKHLKVGKYEKRIDDILNKFDPVVERVIKKRREIVRRRKNGEVVEGEVSGVFLDTLLEFAEDETTEIKITKDHIKGLVVDFFSAGIDSTAVATEWALAELINNPKVLEKAREEVYSVVGKDRLVDEVDTQNLPYIRAIVKETFRMHPPLPVVKRKCTEECEINGYVIPEGALILFNVWQVGRDPKYWDRPSEFRPERFLETGAEGEARPLDLRGQHFQLLPFGSGRGMCPGVNLATSGMATLLASLIQCFDLQVLGPQGQILKGGDAKVSMEERAGLTVPRAHSLVCVPLARIG

SEQ ID NO: 1106 - protein, 490 aa, Oryza sativa (japonica cultivar-group)
MVSAAAGWAAPAFAVAAVVIWVVLCSELLRRRRRGAGSGKGDAAAAARLPPGSFGWPVVGETLEFVSCAYSPRPEAFVDKRRKLHGSAVFRSHLFGSATVVTADAEVSRFVLQSDARAFVPWYPRSLTELMGKSSILLINGALQRRVHGLVGAFFKSSHLKSQLTADMRRRLSPALSSFPDSSLLHVQHLAKSVVFEILVRGLIGLEAGEEMQQLKQQFQEFIVGLMSLPIKLPGTRLYRSLQAKKKMARLIQRIIREKRARRAAASPPRDAIDVLIGDGSDELTDELISDNMIDLMIPAEDSVPVLITLAVKFLSECPLALHQLEEENIQLKRRKTDMGETLQWTDYMSLSFTQHVITETLRLGNIIGGIMRKAVRDVEVKGHLIPKGWCVFVYFRSVHLDDTLYDEPYKFNPWRWKEKDMSNGSFTPFGGGQRLCPGLDLARLEASIFLHHLVTSFRWVAEEDHIVNFPTVRLKRGMPIRVTAKEDDD

SEQ ID NO: 1107 - protein, 506 aa, Antirrhinum majus
MSTLVYSTLFILSTLLLTLLTRTRRKTRPPGPLALPLIGHLHLLGPKLHHTFHQFSQRYGPLIQLYLGSVPCVVASTPELAREFLKTHELDFSSRKHSTAIDIVTYDSSFAFAPYGPYWKFIKKLCTYELLGARNLSHFQPIRALEVNSFLRILYEKTEQKQSVNVTEELVKLTSNVISNMMLGIRCSGTEGEAEVARTVIREVTQIFGEFDVSEIVWFCKNLDLQGIRKRSEDIRRRYDALLEKIISDRERLRLRGGGGGGGGEVKDFLDMLLDVMESEKSEVEFTREHLKALILDFFTAGTDTTAITTEWAIAELISNPNVLKKAQEEMDKVIGSQRLLQESDAPNLPYLNAIIKETFRLHPPIPMLTRKSISDVVVNGYTIPAKTLLFVNLWSMGRNPNYWENPMEFRPERFLEKGTGSIDVKGQHFELLPFGTGRRGCPGMLLGMQELFSIIGAMVQCFDWKLPDGVKSVDMTERPGLTAPRANDLVCQLVPRIDPVVVSGP

SEQ ID NO: 1108 - protein, 511 aa, Liquidambar styraciflua
MDSSLHEALQPLPMTLFFIIPLLLLLGLVSRLRQRLPYPPGPKGLPVIGNMLMMDQLTHRGLAKLAKQYGGLFHLKMGFLHMVAVSTPDMARQVLQVQDNIFSNRPATIAISYLTYDRADMAFAHYGPFWRQMRKLCVMKLFSRKRAESWESVRDEVDSAVRVVASNIGSTVNIGELVFALTKNITYRAAFGTISHEDQDEFVAILQEFSQLFGAFNIADFIPWLKWVPQGINVRLNKARGALDGFIDKIIDDHIQKGSKNSEEVDTDMVDDLLAFYGEEAKVSESDDLQNSIKLTKDNIKAIMDVMFGGTETVASAIEWAMTELMKSPEDLKKVQQELAVVVGLDRRVEEKDFEKLTYLKCVLKEVLRLHPPIPLLLHETAEDAEVGGYYIPAKSRVMINACAIGRDKNSWADPDTFRPSRFLKDGVPDFKGNNFEFIPFGSGRRSCPGMQLGLYALETTVAHLLHCFTWELPDGMKPSELEMNDVFGLTAPRAIRLTAVPSPRLLCPLY

SEQ ID NO: 1109 - protein, 474 aa, Oryza sativa
  unsure (1)..(474): unsure at all Xaa locations
MQPLAAGGGVSWPLYAATVAAALLVTAIVLRXRRAVDGXXACKARPPAGSLGWPLVGETLQFISAAYSSRPESFVEKRCRRYGKVFRSHLWGSPAVVSADAEASRAVLQSDASAFVPWYPRSLMELMGESSILVLGGALQRRVHGLAGAFFKSPELKARVTADMRSRLAAAMDAWRATAATGAGAAVRVQDEAKLEMNYLRQQFHIFIAGLISLPIKLPGTQLYRSLKAKKRMTSLIQNIIQEKRRRIFEGKDPRDLIDVLMSNGSDELSLTDELISDNMIDFMIPAEDSVPVLITLAIKYLSECPLALQQLEEENMELKRQKSDVGETLEWTDYMSLTFTQHVITETLRIGNIISGIMRKAVRDVEVKGQGDVVIPKGWCVLVYFRSVHLDANIYDDPYAFNPWRWKERDMAAGGFTPFGGGQRLCPGLDLXRLQTSIFLHHLXWVAQGDVVVNFPTVRLKRGMPIKVTPKTX

SEQ ID NO: 1110 - protein, 222 aa, Triticum aestivum
  unsure (1)..(222): unsure at all Xaa locations
LFXHEVDFCLSLLVAGYETTSVLMTVAVKFLTETPAALAQLKEEHENMTKMKGENQPLEWVDYKSMTFTQCVINETLRVANIIGGVFRRANTDIHFKGYTIPKGCKIFASFRAVHLNNEHYENARTFDPWRWQSNNNQNEVGANLFTPFGGGPRLCPGYELARVVISVFLHHLVMRFSWEAAEEDRLVFFPTTRTLKGYPINLRRRSESVXRPHIGLRLLLS

SEQ ID NO: 1111 - protein, 139 aa, Triticum aestivum
  unsure (1)..(139): unsure at all Xaa locations
XFRSVHLDDMLYEDPCKFNPWRWKEKDMSTSSFTPFGGGQRLCPGLDLARLEASIFLHHLVTSFRWVAEEDHIVNFPTVRLKGGMPIRVTAKDXLPVNQTVVLDQLPAAAKPAMHIHDAAAASMVSSIARLKGSLKQAS

SEQ ID NO: 1112 - protein, 521 aa, Trifolium pratense
MLLELALGLLVLALFLHLRPTPTAKSKALRHLPNPPSPKPRLPFIGHLHLLKDKLLHYALIDLSKKHGPLFSLYFGSMPTVVASTPELFKLFLQTHEATSFNTRFQTSAIRRLTYDSSVAMVPIGPYWKFVRKLIMNDLLNATTVNKLRPLRTQQIRKFLRVMAQGAEAQKPLDLTEELLKWTNSTISMMMLGEAEEIRDIAREVLKIFGEYSLTDFIWPLKHLKVGKYEKRIDDILNKFDPVVERVIKKRREIVRRRKNGEVDEGEVSGVFLDTLLEFAEDETTEIKITKDHIKGLVVDFFSAGTDSTAVATEWALAELINNPKVLEKAREEVYSVVGKDRLVDEVDTQNLPYIRAIVKETFRMHPPLPVVKRKCTEECEINGYVIPEGALILFNVWQVGRDPKYWDRPSEFRPERFLETGAEGEARPLDLRGQHFQLLPFGSGRRMCPGVNLATSGMATLLASLIQCFDLQVLGPQGQILKGGDAKVSMEERAGLTVPRAHSLVCVPLARIGVASKLLS

SEQ ID NO: 1113 - protein, 505 aa, Oncorhynchus mykiss
MSLMESLLLQAPSTVTLLGAVLFLLVLYLLSSSSSSEEHGKEPPGPRPLPLLGNMLQLDLKRPYQTLCELSKKYGSVFTVHIGPRKVVVLAGYKTVKQALVNHAEEFGDRGISHLFTELNKGHGIVFANGDSWKEMRRFALTNLRDFGMGKKASEEKIIEEVHYLIEVFEEHKGKAFDATQAMNYAVSNIICSIVYGSRFDYSDPRFRRSVDQANESIRLGGSISIQLYNMFPWLGPLLKNKTLILKNIADNKGEMKELVRGLKETLNPQMCRGFVDSFLVRKQTLEESGNMNSHYHTENLIQTVANLFAAGTDTTGTTLRWGLLLMAKYPDIQDRVQEEISRVIGSRQALVEDRKNLPYTDAVIHETQRLANIVPMSIPHTTSQDVTFQGYFIKKGTDVLPLLTSVLRDESEWKSPHTFNPEHFLDEEGRFVKKDAFMPFSAGRRVCLGESLARMELFLFFTSLLQHFCFSPPPGVREEDLDLTPSLGFTLSPSPHQLCAVSRV

SEQ ID NO: 1114 - protein, 497 aa, Fundulus heteroclitus
MWLYNFLLVLDLKAILLFIFSFLLIADFLRNRKPANFPPGPKALPFVGNMLNLDSQHPHIFFSKLADIYGNVFSFRLGKESMVVVSGHKLVKEAIVTQGENFVDRPPNAIAERFYTEPSGGLFFNNGEIWKRQRRFALSTLRTFGLGKNTLELSICEEIRHLQEEIENEKGKPFSPAGLFNNAVSNIICQLVMGRRFDYHDQSFQTMLKYMSEALWLEGSIWGQLYQAFPQVMKYIPGPHNKLFSNFTAIKELLQEEIEKHKKDLDHSNPRDYIDTFLIKMENQQEAELGFTERNLAFCSLDLFLAGTETTATTLLWALLFLIKYPEVQEKVHAEIDRVIGQTRLPSMADRPNLPYTDAVIHEIQRMSNIVPLNGLRVASKDTTLGGYFIPKGTAVMPMLTSVLFDKTEWETPDTFNPGHFLDANGKFVKKEAFLPFSAGKRVCLGEGLAKMELFLFLVALLQKFSFSAPEGVELSTEGITGITLVPHPYKVSAKAR

SEQ ID NO: 1115 - protein, 495 aa, Oreochromis niloticus
MLPVEELTAGPMVADRASEVTAVLLLLLLLLLLFTTWRQRKQSHIPGPFFLAGLGPILSYSRFIWSGIGTACNYYNNKYGSIVRVWINGEETLILSRSSEVYHVLRSAHYTSRFGSKKGLECIGMYGNGIIFNSDVLLWKKVRTYFSKALTGPGLQRTVGICVSFTAKHLDNLQDMTDPSGHVDALNLLRAIVLDISNRLFLIVPLNEKDFLTKIHNYFDTWQTVLIKPDIFFKVGWLYNKHKRAAQELQDAMESLLEVKKKMIHEAEKLDDELDFATELIFAQNHGELSADNVRQCVLEMVIAAPDTLSISLFFMLMLLKQNPDIELQLVEEMNTILNEKDVENIDYQSLKVMESFINESLRFHPVVDFTMRKALEDNDIAGTKIKKGTNIILNTGLMHKTEFFPKPEEFNLTNFEKTVPNRYFQPFGCGPRSCVGKHIAMVMMKAILVTLLSRYTVCPHQGCTLSSIKQTNNLSQQPVEDEHSLAMRFIPRTK

SEQ ID NO: 1116 - protein, 495 aa, Oreochromis niloticus
MLPVEELTAGPMVADRASEVTAVLLLLLLLLLLFTTWRQRKQSHIPGPFFLAGLGPILSYSRFIWSGIGTACNYYNNKYGSIVRVWINGEETLILSRSSEVYHVLRSAHYTSRFGSKKGLECIGMYGNGIIFNSDVLLWKKVRTYFSKALTGPGLQRTVGICVSSTAKHLDNLQDMTDPSGHVDALNLLRAIVLDISNRLFLRVPLNEKDFLTKIHNYFDTWQTVLIKPDIFFKVGWLYNKHKRAAQELQDAMESLLEVKKKMIHEAEKLDDELDFATELIFAQNHGELSADNVRQCVLEMVIAAPDTLSISLFFMLMLLKQNPAIELQLVEEMNTILNEKDVENIDYQSLKVMESFINESLRFHPVVDFTMRKALEDNDFAGTKIKKGTNIILNTGLMHKTEFFPKPEEFNFTNFEKTVPNRYFQPFGCGPRSCVGKHIAMVMMKAILVTLLSRYTVCPHQGCTLSSIKQTNNLSQQPVEDEHSLAMRFIPRTK

SEQ ID NO: 1117 - protein, 480 aa, Oreochromis niloticus
RASEVTAVLLLLLLLLLLFTTWRQRKQSHIPGPFFLAGLGPILSYSRFIWSGIGTACNYYNNKYGSIVRVWINGEETLILSRSSEVYHVLRSAHYTSRFGSKKGLECIGMYGNGIIFNSDVLLWKKVRTYFSKALTGPGLQRTVGICVSSTAKHLDNLQDMTDPSGHVDALNLLRAIVLDISNRLFLRVPLNEKDFLTKIHNYFDTWQTVLIKPDIFFKVGWLYNKHKRAAQELQDAMESLLEVKRKMIHEAEKLDDELDFATELIFAQNHGELSADNVRQCVLEMVIAAPDTLSISLFFMPMLLKQNPDIELQLVEEMNTILNEKDVENIDYQSLKVMESFINESLRFHPVVGFTMRKALEDNDIAGTKIKKGTNIILNTGLMHKTEFFPKPEEFNHTNFEKTVPNRYFQPFGCGPRSCVGKHIAMVMMKAILVTLLSRYTVCPHQGCTLSSIKQTNNLSQQPVEDEHSLAMRFIPRTK

SEQ ID NO: 1118 - protein, 520 aa, Sus scrofa
MLARGLALRSVLVKGCQPFLSAPRECPGHPRVGTGEGACISTKTPRPFSEIPSPGDNGWINLYRFWKEKGTQKIHYHHVQNFQKYGPIYREKLGNLESVYIIDPEDVALLFKFEGPNPERYNIPPWVAYHQHYQKPVGVLLKKSGAWKKDRLVLNTEVMAPEAIKNFIPLLDTVSQDFVGVLHRRIKQQGSGKFSGDIREDLFRFAFESITNVIFGERLGMLEEIVDPEAQKFIDAVYQMFHTSVPMLNLPPDLFRLFRTKTWRDHVAAWDTIFNKAEKYTQNFYWDLRRKREFNNYPGILYRLLGNDKLLSEDVKANVTEMLAGGVDTTSMTLQWHLYEMARSLNVQEMLREEVLNARRQAQGDTSKMLQLVPLLKASIKETLRLHPISVTLQRYLVNDLVLRDYMIPAKTLVQVAVYAMGRDPAFFSNPGQFDPTRWLGKERDLIHFRNLGFGWGVRQCVGRRIAELEMTLFLIHILENFKVELQHFSDVDTIFNLILMPDKPIFLVFRPFNQDPLQA

SEQ ID NO: 1119 - protein, 494 aa, Cricetulus griseus
MLASGLLLVSVLAFLVILVLMSVWKQRKLSGKMPPGPTPLPFIGNYLQLNTAQMYNSLMKISKRYGPVFTVHLGPRRRIVVLWGQEAVKEALVDQAEEFSGRGEQATFDSFFEGYGLVFSSGERAKQLRRFSIATLRDFGMGKRGVEERILEEAGYLLEALQKTNGALIDPTFYLSRAVSNVMSSIVFGDRFDYEDQEFLSLLRMMLETFQFTASSTGQLYEMFSSVMKRLPGPQQQAYKGLKALEDFIAKKVEQHQSTLDPNSPRDFIDSFLIRMQEEKDPNTEFFMKNLVLTTLNLFAAGTETISTTLRYGFLLLMKHPDVEAKVHEEIDRVIGRNRQPKYEDRTKMPYTEAVIHEIQRFGDVIPMGVPRRVTKDTKFRDFLIPKGTDVFPVLGSVLKDSKFFSNPKDFNPKHFLDGNMQFKKNDAFVPFSLGKRYCFGEGLARMELFLFLTIILQNFRFRSSQAPQDIDVSPQLVGFGTLPPNYTMSFLSR

SEQ ID NO: 1120 - protein, 493 aa, Cricetulus griseus
MLGSELLLVAILAYLSVMVLVSVWKQKVRGKLPPGPTPLPYIGNYLQLNTKDMYSSITELSERYGPVFTIHLGPRPVVVLYGYDAVKEALVDQAEEFSGRGEQATYNTLFKGYGVTFSSGERAKQLRRFSIATLRDFGVGKRSVEERIQEEAACLVKMLQSTSGAPIDPTVYLSQTVSNVINSIVFGDRFDYEDKEFLELLRMMGQINRFAASPTGQLYDMFHSVMKYLPGPQQQIIKNTKELEDFMVRKVKQNQSTLDLNSPRNFIDSFLIHMQEEKKNPDSEFNIQNLVMTSLNLFFAGSETVSSTMRYGFLLLMKYPEVEAKVHEEIDRVIGRNRQPQFEDRMKMPYTEAVINEIQRFANLAPLGIPRKTIQNTTFRGFFLPKDTEVFPILGSLLTDPKFFPSPKDFNPQNFLDDKGQLKKNAAFVPFSVGKRFCLGDGLARMELFLFFTTILQNFRFKFPKKPEDIDESPKPLGFARIIPHYTMSFLPI

SEQ ID NO: 1121 - protein, 453 aa, Nostoc sp. PCC 7120
MTVTQNLPNGPRIPRLLRLFKFITQPIQYVEDFAKVYGDNFTIWGSGESYFVYFSHPQALEQIFTNVSCFESSGGGSPLLELLLGKNSLILLEGDRHQRQRQLLTPPFHGERMRAYGQTIREITQQVTQAWQMGKPFNIRASMQEITMRVILRVVFGVDEGELFQELRQLLTTLLDFMGSPLMSSTFFFSFTQKDYGAWSPWGRMVRLIKKIDQLIYALIAQRRAEFGENRQDILSLLISARYDDGQPMSDVELRDELMTMLVAGHETTASALTWAFYWIDSVPEVREKLFQELDTLNDDSEPSIIAKLPYLTAVCQETLRFYPIVLNAFFRRTKNPMEIMGYKLPKATLVVPSIYLAHHREEVYPQSKQFRPERFLEKQFSPYEYLPFGGGNRRCIGLAFAQYEMKIVLATILSQFQVSRLSKRPVQPVRRGLTLAAPGGMKMVANKRMRNS

SEQ ID NO: 1122 - protein, 474 aa, Vigna radiata
MVSLPTLLLLFAASAAAIFLHRAFSRRKFRLPPGSYGLPFIGETLQLISAYKSSNPEPFMDERVRRYGSIFMTHVFGEPTVFSADPELNRFILQNEGKLLDCSYPGSISNLLGKHSLLLMKGALHKRMHSLTMSFANSSIIKDHLLHHIDRLIGLNLDTWSDRVTLMDQAKKITFELTVKQLMSFDPDEWTESLRKEYVLVIEGFFTLPLPLFSTTYRRAIKARTKVAEALTLVVRQRREEYNQGKEKKSDMLGALLASGDHFSDDQIVDFLLALLVAGYETTSTIMTLAVKFLTETPLALAQLKEEHDQIRARSDPGAPLEWTDYKSMVFTQHVVNETLRVANIIGGIFRRATTDIDIKGYTIPKGWKVFASFRAVHLNPEYYKDARTFNPWRWQSNSSEAANPANVYTPFGGGPRLCPGYELARVVLSVFLHRIVTRFSWVPAEEDKLVFFPTTRTQKRYPIIVKRRNANHV

SEQ ID NO: 1123 - protein, 372 aa, Hemerocallis hybrid cultivar
STEIFSPVRIRSLAAVRQEEVKLMITGILASTSTDNSVKVNMKVVFSELMFNVIMKIIAGKRYFGVNTDSEVEEGQKFRVVFDEMFSTLEVASPQDFLPFLKWFGFKRMENRLTKLAKELDQLFQKLIEERRSERGKVQSTVIDVLLSLQETDREQYSDKLIKGMILSLIAAGTHTTAGTMEWAMSLLLNHPEALLKVRDEIDKKVGQDRLIDHSDLQNLSYLNNAIKESLRLFPTAPLLLAHESSAECTVGGFTIPSNTILFANAYALHRDPKVWTDPVSFKPERFENNGQQGSRIYVPFGLGRRSCPGEGLATQVVGLALGTLIQCFEWDRNGEEKVDMTDGSGLAMHMEKPLEAMCKPRQSIVDVINRL

SEQ ID NO: 1124 - protein, 536 aa, Gossypium arboreum
MLQIAFSSYSWLLTASNQKDGMLFPVALSFLVAILGISLWHVWTIRKPKKDIAPLPPGPRGLPIVGYLPYLGTDNLHLVFTDLAAAYGPIYKLWLGNKLCVVISSAPLAKEVVRDNDITFSERDPPVCAKIITFGLNDIVFDSYSSPDWRMKRKVLVREMLSHSSIKACYGLRREQVLKGVQNVAQSAGKPIDFGETAFLTSINAMMSMLWGGKQGGERKGADVWGQFRDLITELMVILGKPNVSDIFPVLARFDIQGLEKEMTKIVNSFDKLFNSMIEERENFSNKLSKEDGNTETKDFLQLLLDLKQKNDSGISITMNQVKALLMDIVVGGTDTTSTMMEWTMAELIANPEAMKKVKQEIDDVVGSDGAVDETHLPKLRYLDAAVKETFRLHPPMPLLVPRCPGDSSNVGGYSVPKGTRVFLNIWCIQRDPQLWENPLEFKPERFLTDHEKLDYLGNDSRYMPFGSGRRMCAGVSLGEKMLYSSLAAMIHAYDWNLADGEENDLIGLFGIIMKKKKPLILVPTPRPSNLQHYMK

SEQ ID NO: 1125 - protein, 487 aa, Berberis stolonifera
MDYIVGFVSISLVALLYFLLFKPKHTNLPPSPPAWPIVGHLPDLISKNSPPFLDYMSNIAQKYGPLIHLKFGLHSSIFASTKEAAMEVLQTNDKVLSGRQPLPCFRIKPHIDYSILWSDSNSYWKKGRKILHTEIFSQKMLQAQEKNRERVAGNLVNFIMTKVGDVVELRSWLFGCALNVLGHVVFSKDVFEYSDQSDEVGMDKLIHGMLMTGGDFDVASYFPVLARFDLHGLKRKMDEQFKLLIKIWEGEVLARRANRNPEPKDMLDVLIANDFNEHQINAMFMETFGPGSDTNSNIIEWALAQLIKNPDKLAKLREELDRVVGRSSTVKESHFSELPYLQACVKETMRLYPPISIMIPHRCMETCQVMGYTIPKGMDVHVNAHAIGRDPKDWKDPLKFQPERFLDSDIEYNGKQFQFIPFGSGRRICPGRPLAVRIIPLVLASLVHAFGWELPDGVPNEKLDMEELFTLSLCMAKPLRVIPKVRI

SEQ ID NO: 1126 - protein, 475 aa, Myxococcus xanthus
MGTSEPVEPDHALSKPPPVAPVGAQALPRGPAMPGIAQLMMLFLRPTEFLDRCAARYGDTFTLKIPGTPPFIQTSDPALIEVIFKGDPDLFLGGKANNGLKPVVGENSLLVLDGKRHRRDRKLIMPTFLGERMHAYGSVIRDIVNAALDRWPVGKPFAVHEETQQIMLEVILRVIFGLEDARTIAQFRHHVHQVLKLALFLFPNGEGKPAAEGFARAVGKAFPSLDVFASLKAIDDIIYQEIQDRRSQDISGRQDVLSLMMQSHYDDGSVMTPQELRDELMTLLMAGHETSATIAAWCVYHLCRHPDAMGKLREEIAAHTVDGVLPLAKINELKFLDAVVKETMRITPVFSLVARVLKEPQTIGGTTYPANVVLSPNIYGTHHRADLWGDPKVFRPERFLEERVNPFHYFPFGGGIRKCIGTSFAYYEMKIFVSETVRRMRFDTRPGYHAKVVRRSNTLAPSQGVPIIVESRLPS

SEQ ID NO: 1127 - protein, 481 aa, Papaver somniferum
SLVAVVITTFLYLIFRDSSPKGLPPGPKPWPIVGNLLQLGEKPHSQFAQLAETYGDLFSLKLGSETVVVASTPLAASEILKTHDRVLSGRYVFQSFRVKEHVENSIVWSECNETWKKLRKVCRTDLFTQKMIESQAEVRESKAMEMVEYLKKNVGNEVKIAEVVFGTLVNIFGNLIFSQNIFKLGDESSGSVEMKEHLWRMLELGNSTNPADYFPFLGKFDLFGQSKDVADCLQGIYSVWGAMLKESKIAKQHNNSKKNDFVEILLDSGLDDQQINALLMEIFGAGTETSASTIEWALSELTKNPQVTANMRLELLSVVGKRPVKESDIPNMPYLQAFVKETLRLHPATPLLLPRRALETCKVLNYTIPKECQIMVNAWGIGRDPKRWTDPLKFSPERFLNSSIDFKGNDFELIPFGAGRRICPGVPLATQFISLIVSSLVQNFDWGLPKGMDPSQLIMEEKFGLTLQKEPPLYIVPKTRD

SEQ ID NO: 1128 - protein, 481 aa, Papaver somniferum
SLVAVVITTFLYLIFRDSSPKGLPPGPKPWPIVGNLLQLGEKPHSQFAQLAETYGDLFSLKLGSETVVVASTPLAASEILKTHDRVLSGRYVFQSFRVKEHVENSIVWSECNETWKKLRKVCRTELFTQKMIESQAEVRESKAMEMVEYLKKNVGNEVKIAEVVFGTLVNIFGNLIFSQNIFKLGDESSGSVEMKEHLWRMLELGNSTNPADYFPFLGKFDLFGQSKDVADCLQGIYSVWGAMLKERKIAKQHNNSKKNDFVEILLDSGLDDQQINALLMEIFGAGTETSASTIEWALSELTKNPQVTANMRLELLSVVGKRPVKESDIPNMPYLQAFVKETLRLHPATPLLLPRRALETCKVLNYTIPKECQIMVNAWGIGRDPKRWTDPLKFSPERFLNSSIDFKGNDFELIPFGAGRRICPGVPLATQFISLIVSSLVQNFDWGFPKGMDPSQLIMEEKFGLTLQKEPPLYIVPKTRD

SEQ ID NO: 1129 - protein, 472 aa, Arabidopsis thaliana
MAFTAFLLLLSSIAAGFLLLLRRTRYRRMGLPPGSLGLPLIGETFQLIGAYKTENPEPFIDERVARYGSVFMTHLFGEPTIFSADPETNRFVLQNEGKLFECSYPASICNLLGKHSLLLMKGSLHKRMHSLTMSFANSSIIKDHLMLDIDRLVRFNLDSWSSRVLLMEEAKKITFELTVKQLMSFDPGEWSESLRKEYLLVIEGFFSLPLPLFSTTYRKAIQARRKVAEALTVVVMKRREEEEEGAERKKDMLAALLAADDGFSDEEIVDFLVALLVAGYETTSTIMTLAVKFLTETPLALAQLKEEHEKIRAMKSDSYSLEWSDYKSMPFTQCVVNETLRVANIIGGVFRRAMTDVEIKGYKIPKGWKVFSSFRAVHLDPNHFKDARTFNPWRWQSNSVTTGPSNVFTPFGGGPRLCPGYELARVALSVFLHRLVTGFSWVPAEQDKLVFFPTTRTQKRYPIFVKRRDFAT

SEQ ID NO: 1130 - protein, 513 aa, Brassica napus
QTLSQLLDPTTAILIIVSLFIFIGLITRRRRSYPPGPRGWPIIGNMLMMDQLTHRGLANLAKKYGGLCHLRMGFLHMYAVSSPHVARQVLQVQDSIFSNRPATIAISYLTYDRADMAFAHYGPFWRQMRKVCVMKVFSRKRAESWASVRDEVDKMIRSVSSNVGKSINVGEQIFALTRNITYRAAFGSACEKGQDEFIRILQEFSKLFGAFNVADFIPYFGWIDPQGISKRLVKARNDLDGFIDDIIDEHMKKKENQNTVDDGDVGDTDMVDDLLAFYSEEAKLVSETTDLQNSIKLTRDNIKAIIMDVMFGGTETVASAIEWALTELLRSPEDLKRVQQELAEVVGLDRRVEESDIEKLTFLKCTLKETLRLHPPIPLLLHETAEDTEIDGYFVPKKSRVMINAFAIGRDPKSWPDAETFRPSRFLEPGVADFKGSNFEFIPFGSGRKSCPGMQLGLYALELAVAHILHCFTWKLPDGMKASELDMNDVFGLTAPKATRLFAVPSTRLICAV

SEQ ID NO: 1131 - protein, 437 aa, Cicer arietinum
NSARVMTLKLGQVTTVVISSADMAKEVLLTHDLITSNRTVPDALSVLNHDQYSLSFMRVSPRWRDLRKICNYQLFSNKTLDSSQALRRRKLQDLLNDIERCSKVGEAVDVGKAAFKTTVNLLSNTFFSVDFVHSAKEAGEYKEIIVSILKEVGVPNVSDFFPMLKFLDLQGIRKRSIVSVKKVLSIFKRFVGERVKMREGTGSIGNDDVLDALLNMSSDGGKIEMDKDEIEHLLLNIFVAGTDTTTYTLEWAMAELIHNPEMMSKLKEELEKTVGKGIPVEETDIAKLPYMQAVIKETFRLHPPVPLLLPRRAEIDVKIGDYVIPKDAQILINAWVVGRDPTKWENPNVFIPERFLDSEIDIKGHHFELIPFGSGRRTCPGLPLAIRMLPLMLGSLVNCFDWKLEDGLNVEDFNKEDEFGITLEKSQPVRIVPTKLY

SEQ ID NO: 1132 - protein, 381 aa, Cicer arietinum
WRSLRRACATKIFSPQQLDSTQFHRKRKVQDLLNYVQKCCEKGEALDFGEVVLATVMNSISETFISMDLFHYCDPSNDDDNKKSREFKEMVFGIMEEVGRPNVVDFFPFLKLFDPQGVRTRMRNHFEKLLAFFYEVMKERMRLRASGESKEYKDVLDSFLDLLNEENSQLCRHDVLHLFTDLFVAGIDTTSTTMEWAMAELLHNPSKLARLRKELEQIHGKFGQIEESDASKLPYLRAVVKEILRLHPSVPFLVPHKSKDDGELGGFMVPKNAQILVNVWSIGRNSSIWDNQIHLNLKDFWRVKLISKGRDFELVPFGAGRRICPGLPLASRSIHYIMASLLHHFNFKLADDLKPDDMDMSHKFGVTLHKAQPLRVVPIKA

SEQ ID NO: 1133 - protein, 496 aa, Glycine max
  unsure (1)..(496): unsure at all Xaa locations
MASLPALPTLLLSFAAIFFTVLLLFLRRRQLRLPPGSYGLPLIGETLQLISAYKSDNPEPFIDERVERYGSIFTTHVFGEATVFSADPEVNRFILQNEGRLLDCSYPGSISNLLGKHSLLLMKGGLHKRMHSLTMSLANSSIIKDHLLHHIDRLVCLNLDAWSNRVFLMDQAKKITFELTVKQLMSFDPDEWTENLRKEYVLVIEGFFTLPFPLFSTTYRRAIKARTKVAEALTLVVRQRRKEYDEDKEKKNDMLGALLASGDHFSDEEIVDFLLALLVAGYETTSTIMTLAIKFLTETPLALAQLKEEHDQIRARSDPGTPLEWTDYKSMAFTQCVVNETLRVANIIGGIFRRARTDIDIKGYTIPKGWKVFASFRAVHLNPEHYKDARSFNPWRWQSNSSETANPGNVYTPFGGGPRLCPGYELARVVLSVFLHRIVTRFSWVPAEEDKLVFFPTTRTQKRYPIIVQRRHXRGMTMYSNMKIKSTTDREGKKGS

SEQ ID NO: 1134 - protein, 479 aa, Glycine max
  unsure (1)..(479): unsure at all Xaa locations
MASFIIIPLLLLSICVVHVLHHRRGYCRGYPGNGGSAXGLPVVGATLLLVSAYKSDNPEPFMDQRVKRYGPIFTTHVFGEPTVFSADPETNRFILLNEGKLFECSYPGSISNLLGKHSLLLMKGSLHKRMHSLTMSFANSSIIKDHLLVDIDRLIRLNLDSWSDRVLLMEEAKKITFELTVKQLMSFDPGEWTETLRKEYVLVIEGFFSVPLPLFSSTYRRAIKARTKVAEALTLVVRDRRKESVTEEKKNDMLGALLASGYHFSDEEIVDFMLALLVAGYETTSTIMTLAIKFLTETPLALAQLKEEHDQIRAKKSCPEAPLEWTDYKSMAFTQCVVNETLRVANIIGAIFRRAMTDINIKGYTIPKGWRVVASFRAVHLNPDHFKDARTFNPWRWQSNSEASSPGNVYTPFGGGPRLCPGYELARVVLSVFLHRIVTRYSWFPAEEDKLVFFPTTRTQKRYPIIVKRREESKLSKSP

SEQ ID NO: 1135 - protein, 322 aa, Glycine max
  unsure (1)..(322): unsure at all Xaa locations
MASLPTLLSFAVISVALLYLRRVFRRRQFRLPPGSHGLPLIGETLQLISAYKSDNPEPFIDERVERYGSIFTTHVFGEPTVFSADPEVNRFILQNEGKLLDCSYPGSISNLLGKHSLLLMKGALHKRMHSLTMSFGNSSIIKDHLLHHIDRLICLNLDAWSDTVFLMDQAKKITFELTVKQLMSFDPEEWTENLRKEYVLVIEGFFTLPFPLFSTTYRRAIKARTKVAEALTLVVRQRRKEYDEDKEKKNDMLGALLASGDHFSDEEIVDFLLALLVAGYETTSTIMTLAIKFLTETPLALAQLKEREKKIKMMNYLQSNSX

SEQ ID NO: 1136 - protein, 509 aa, Ocimum basilicum
MAALLLLLLLLPAIFLLHHLYYRLRFRLPPGPRPLPVVGNLYDVKPVRFRCFADWAQSYGPIISVWFGSTLNVIVSNTELAKEVLKEKDQQLADRHRSRSAAKFSRDGQDLIWADYGPHYVKVRKVCMLELFSPKRLEALRPIREDEVTAMVESIYHDCTAPDNAGKSLLVKKYLGAVAFNNITRLAFGKRFVNSEGIIDKQGLEFKAIVSNGLKLGASLAMAEHIPWLRWMFPLDEDAFAKHGARRDQLTREIMEEHTRAREESGGAKQHFFDALLTLKDKYDLSEDTIIGLLWDMITAGMDTTAISVEWAMAELIKNPRVQQKAQEELDRVIGYERVMTELDFSNLPYLQCVAKEALRLHPPTPLMLPHRSNSNVKIGGYDIPKGSNVHVNVWAVARDPAVWKNPSEFRPERFLEEDVDMKGHDFRLLPFGAGRRVCPGAQLGINLVTSMIGHLLHHFNWAPPSGVSTDELDMGENPGLVTYMRTPLEAVPTPRLPSDLYKRIAVDL

SEQ ID NO: 1137 - protein, 512 aa, Ocimum basilicum
MAALLLLLLLPLLLPAIFLLHHLYYRLRFRLPPGPRPLPIVGNLYDVKPVRFRCFADWAQSYGPIISVWFGSTLNVIVSNTELAKEVLKEKDQQLADRHRSRSAAKFSRDGQDLIWADYGPHYVKVRKVCTLELFSPKRLEALRPIREDEVTAMVESIYHDCTAPDNAGKSLLVKKYLGAVAFNNITRLAFGKRFVNSEGIIDKQGLEFKAIVSNGLKLGASLAMAEHIPSLRWMFPLDEDAFAKHGARRDQLTREIMEEHTRAREESGGAKQHFFDALLTLKDKYDLSEDTIIGLLWDMITAGMDTTAISVEWAMAELIKNPRVQQKAQEELDRVIGYERVMTELDFSNLPYLQCVAKEALRLHPPTPLMLPHRSNSNVKIGGYDIPKGSNVHVNVWAVARDPAVWKNPCEFRPERFLEEDVDMKGHDFRLLPFGAGRRVCPGAQLGINLVTSMIGHLLHHFNWAPPSGVSSDELDMGENPGLVTYMRTPLEAVPTPRLPSDLYKRIAVDL

SEQ ID NO: 1138 - protein, 477 aa, Dictyostelium discoideum
FHKKRTNGMPPGPFPLPIIGNLHQLGKSPYKSLKSFSDKYGGLTTIFLGSVPTVLISEPNILREIIIKNNDSIIDRYISDSGLIIGGERNLLFSKGSFWIKYRKIFSSAMTNARKFNIASRIEQQAISLNNYFGTYANSKQAINPHDYIRRYSLNGVIDYSFSDSVEYESDTHHIVIRAAEIMEEILATGNPHDYLPFLKPFYTKKRNTLAMAVGQVWDYCNDAITVHRKTLDHEKPRDLLDLILMEIEKSEEKQFYDDDSLSKCLTDLIVAGHETVAITLGWMILFLSNHQDVQQKVYDELINVVGKGNLPALVHRKDTSYLNACIQETMRIRTAAPLALPRIASEDIKVGGYTIPKGTQVMMSVYGMASDERYWKDPHIFNPERWLSSNHSTENGGGGGGVVGNSSQSEVFIPFGVGPRMCVGMGVAKDELYYCASQMFMNFKWSPVNDKPIDDEGVARIALEYKEYQVVLERRK

SEQ ID NO: 1139 - protein, 328 aa, Oryza sativa
  unsure (1)..(328): unsure at all Xaa locations
XTMRQWEPAATVRLMDEAKKITFNLTVKQLVSIEPGPWTKSLRREYVKLIDGFFSIPFPLANLLPFTTYGQALKARKKVAGALREVIKKRMEEKAEGKKEKKDMVEELLEAEGGSFSEEEMVDFCLSLLVAGYETTSMLMTLAVKFLTETPAALAELKEEHANIRDMKGKKQPLEWSDYKSMPFTQCVINETLRVGNIISGVFRRANTDIHYKDYTIPKGCKIFASFRAVHLNNEHYENARTFNPWRWQINNKLQNAVGANIFTPFGGGPRLCPGYELARVVVSIFLHHLVTRFSWEETEEDRLVFFPTTRTLKGYPINLRLLSESIC

SEQ ID NO: 1140 - protein, 231 aa, Triticum aestivum
  unsure (1)..(231): unsure at all Xaa locations
MDEGALQLAAAAVAIVVAALVCRWFLVACAVGVRKQRPRLPPGSTGLPLIGETLRLISAYKTPDPEPFIDERVARHGGVFTTHIFGERTVFSADPAFNRLLLAAEGRAVSCSYPSSITTLLGARSLLLTRGTAHKRLHSLTLTRLGRPASQPLLAHIERLVLATMGQWEPTATVRLLDEAXKITFNLTVKQLVSIEPGPWTESLRREYVKLIDGFFSIPFLSPHSSPSPTT

SEQ ID NO: 1141 - protein, 516 aa, Fusarium sporotrichioides
MWSSKPLHDNLAQVASSFPPEVSETLSNLTLTQGFLAFLVLFIIVPRVFELLRNIFSPVSRIPGPLINKLSPWPLEIATFKGKSHLFARALHQKYGPIVVLAPNMISVGDANEIKRIIQNEDWVKSEAIYGNFRQDPHRPTLLAFTEKKAYSRRKRMLSSMFGIRYIRSLEPLMKSCVDAGVAHLDKLCENSNNSTVINLQHFIHGLAIDTIGATTFGGSFNVVENGSHPLPSRLKAGMKISAVMQLISWIKYIPFLPKRDPYIEEFTFKIVDKRRKESGDVKHQDLLQHLVDVSDDSPGSEFRTSDVQDESVILLAAGSETTANAELFTIMQLLKHPHVMKKLVEEVDKWYPPSEPDRETECAYSQAGMTYLQACIDETMRLIPGQATGSPRDASKQETVLGYGIPKGTTVFPNTQEAHLDSDNWKNPDKFVPERWLDIYSQNQTSSVPYWPFSAGSRVCVGKHFAFQEMHISLTTLLRKFSFEYVPGQDETTVFRIAQQLQANSYDVKVKRRSV

SEQ ID NO: 1142 - protein, 520 aa, Gibberella zeae
MIDQDWIKGLVNIPVSHVAGIFAASTVIYFLSSCFYNLYLHPLRKIPGPKLAAIGPYLEFYHEVIRDGQYLWEIRKMHDKYGPIVRVNAREVHIRDSSYYTTIYTAGSRKTNKDPATVGAFDVPSATAATVDHDRHRSRRGYLNPYFSKRTITNLEPFIHERVTKLLTRFQQHLDNDQVLSLDGAFCALTADVITNRFYGKHNDYLSLPDFHFVVRDGFLGLTKVYHLARFLPAVVTVLKRLPYSCIRMIAPSVCDLLQMRDEIQERGGEEFLSNKSHEAKSSILFGALADSHIPAHERTVERMLDEGTVILFAGTETTSRTLAITVFYLLTHPECLKKLREELNSLPPVKDDQYPLATLENLPYLNGVIHEGFRLAFGPISRSGRVATQEDLKYKEHVIPKGTPISQSTYFMHTDPKNFPEPEKFKPERWIEAQQKGIALKKYITNFSQGSRQCIGYTMAFAEMYLALSRIARAYEVELYDTTKADIDMTHARIVGYPKAIPGKKEHLGEVRVKVLKAL

SEQ ID NO: 1143 - protein, 519 aa, Rana dybowskii
MKLCFFLLIFIRSFLLFKIKLVRTSEKKWRMGSRSHGDVKHPKSLPSLPVIGSLLHLGKKLPPHILFCNLQKKYGSLYSFMMGSHYVVVVNNHEDAREVLLKKGKTFGGRPRTVTTDILTRDGKDIAFADYSPTWKFHRKMVHSALCMFGEGTVAIEQIISREAASLCQTLTSFQRIPLDMAPELIRAVTNVVCSLCFNTRYKRGDAEFETMLKYSKGIVDTVAKDSLVDIFPWLQIFPNKDLDILRQSVAARDQLLQKKINEHKDAFCGETVKDLVDALLKAKLNMENNNSNVSQDVGLTEDHILMTVGDIFGAGVETTSTVLKWAVAYLLHYPEVQKKIQEELDVKVGFGRYPLLSDRKILHYTEAAISEVLRIRPVSPLLIPHVALKESSIGEYTIPKEARVVINLWSLHHDEKEWVNPHLFSPDRFLDENGNRVYSPSPSFLPFGAGIRVCLGEALAKMEVFLFLSWILQRFTLEVPEGDPLPDLEGKFGVVIQVKPFKVIAKLREVWKNIEIVT

SEQ ID NO: 1144 - protein, 543 aa, Musca domestica
MIKYKQYSRAIVALRQRGAQQYSTNVTNASQPDVKATTTTTISPEWQEAKPFEEMPSMNSWPIIKNMLPWGKYGKMEPTQFLMALRDDMGPIVRTAAFMGRPPTVITHNPHDFEMVFRNEGIWPIRPGGDAQMYHRTVLREDFFQGVTGLVSVNGEKWGNFRSTVNPVLMQPKNVRLYLNKMAQVNDEFMARIRQIRDPETLEVPASFQEEMNRWTLESVSVVALDKQLGLITTNRDNPDLKKLIGLLNDFFELGQKIEFGLPFWKYIKTPTFKLFMKTLDGLLEIGNKYVNEAIDRLEAERQSGVPEKPENEKSVLEKLIKIDRKIATVMAIDMILAGVDTTSTTFTALLLCLAKNPEKQEKLREEIRQILPRKDSQFEPSSLNHIPYTRACIKEALRMYPLTLGNARILANDTVLSGYRVPKGTLVSMISTGLLQDDNHYTKAKEYLPERWMRPTKEETEDSATCPHALKASSPFIYLPFGFGPRSCVGRRIVEMELELGIARLVRNFRIEFNYPTENAFKFKLINVPNIPLKFKFTDVEN

SEQ ID NO: 1145 - protein, 509 aa, Squalus acanthias
MSLMLAALILTVAFVICSLTGFTQRKLSGGRLPKCLPSFPLIGSLLSLRSDLPPHLLFQKLQKTYGNLFSLMMGPHYAVVINNHQHAKEVLLKKGKIFAGRPSMVTTDLLSRGGKDIAFGKYGPAWKFHRKLVLSALHLFGDGSAGIEKMICQEATSMCSTFERLNNAAHDMMPDVTRAVTNVICLLCFNSTYEKEDPEFQTMRKYSQGIVNTVAKDSLIDIFPWLQFFPNENLHTLKQCIATRDSILQKKFEDHKANYSSDSANDLFNILLKAKMNAENNNSSVHEAGLTDDHMVMTVADIFGAGVETSSTAFAWMIIYLIHHPEVQKKIQEEIDSNIGFERTPKMSDKGNMNFLNATIHEILRIQPVSPLLIPHVALADSSIGDYTIPKGTRVIINLWAIHHDEKEWKNPDAFDPGRFLDEDGKYVCSSSESYLPFGAGTRVCLGEMLARMELFLFTSWILQRFTVQVPPGYPPPDKEGKFGIVLQPLKFKVQLKLRKAWENRGLHD

SEQ ID NO: 1146 - protein, 521 aa, Lycopersicon esculentum x Lycopersicon peruvianum
MVLNNINSILEALQANPILIFFFIIPLFFLYLFSTSRRKRYPPGPLGWPLIGNMMIMDQLTHRGLAKLAQKYGGVFHLKMGYVHKIVISGPEEARQVLQVQDNIYSNRPKTVAISYLTYDRADMAFADYGPFWRQMRKLCVMKLFSRKRAESWDSVRDEVDSMVKIVTTNAGTSINLGELVFCLTRNIIYRAAFGTSSDEGQDDFIKILQEFSKLFGAFNMADFIPWLGWIGKQGLNVRLAKARASLDGFIDTIIDDHIERKKAIHVINDDGYRESDMVDELLAFYSEETKVNESEDLQNAIRLTRDNIKAIIMDVMFGGTETVASAIEWAMAELMKSPEDLKKVQQELANVVGLNRKVDESDFENLTYLKCCLKETLRLHPPIPLLLHETAEESTVSGYYIPANSHVIINSFAIGRDKNSWEDPDSFKPSRFLKEGVADFKGGNFEFLPFGSGRRSCPGMQLGLYALEMAVAHLLHCFTWELPDGMKPSELNMDDMFGLTAPLANRLVAVPTPRLLCEIY

SEQ ID NO: 1147 - protein, 491 aa, Capra hircus
MDSISTAILLLILALICLLLTTSSKGKGRLPPGPRALPFLGNLLQLRSQDMLTSLTKLSKEFGAVYTVYLGPRRVVVLSGYQAVKEALVDQAEEFSGRGDYPAFFNFTKGNGIAFSNGDRWKALRKYSLQILRNFGMGKRTIEERILEEGHFLLEELRKTQGKPFDPTFVVSRSVSNIICSVIFGSRFDYDDDRLLTIIHLINENFQIMSSPWGEMYNIFPNLLDWVPGPHRRLFKNYGRMKNLIARSVREHQASLDPNSPRDFIDCFLTKMAQEKQDPLSHFFMDTLLMTTHNLLFGGTETVGTTLRHAFRLLMKYPEVQVRVQEEIDRVVGRERLPTVEDRAEMPYTDAVIHEVQRFADIIPMSLPHRVTRDTNFRGFTIPRGTDVITLLNTVHYDPSQFLKPKEFNPEHFLDANMSFKKSPAFMPFSAGRRLCLGEALARMELFLYLTAILQSFSLQPLGAPEDIDLTPLSSGLGNVPRPYQLCVRAR

SEQ ID NO: 1148 - protein, 378 aa, Oryctolagus cuniculus
LGILFSNANTWKEMRRFSLMTLRNFGMGKRSIEDRVQEEARCLVEELRKTNASPCDPTFILGCAPCNVICSIIFHNRFDYKDEHFLKLMEKFNENVRILSSPWLQICNNFPVLTDYLPGIHNTLVKNIEYTKNFIMEKVKEHQKSLDVNNPRDFIDCFLIKMDQENHLEFTLESLVTTVSDLFGAGTETTSTTLSISLLLLLKHPEVAAKVQEEIERVIGRHRSPCMQDRSRMPYTDAVIHEIQRYIDLIPINLPHAVTRDIKFRNYFIPKGMNIITSLTSVLHDEKEFPNPKVFDPGHFLDESGNFKKSDYFMPFSAGKRMCVGEGLARMELFLFLTSILQNFKLQSLVEPKDLDITAVVNGFASVPPAYQLCFSPV

SEQ ID NO: 1149 - protein, 504 aa, Mus spretus
MELLNGTDLWPVAIFTVIFILLVVLTHQRQRWTSRYPPGPVPWPILGNLLQVDLGNMPYSLYKLQKRYGDVFSLQMAWKPIVVINGLKAMKEMLLTCGEDTADRPPVPIFEYLGVKPGSQGVVLAPYGPEWREQRRFSVSTLRNFGLGKKSLEDWVTKEARHLCDAFTAQAGRSINPNTMLNKSTCNVIASLIFARRFEYEDPFLIRMLKVLEQSLTEISGLIPEVLNAFPILLRIPRLADKALQGQKSFNAILDNLLTENRTTWDPVQAPRNLTDAFLAEIEKAKGNPESSFNDENLLIVVRDLFGAGMVTTSTTLSWALLLMILYPDVQCRVQQEIDEVIGQVRHPEMADQAHMPYTNAVIHEVQRFGDIVPVNLPRITSHDIEVQDFLIPKGTILLPNMSSMLKDETVWEKPLRFHPEHFLDAQGHFVKPEAFMPFSAGRRSCLGESLARMELFLFFTCLLQRFSFSVPDGQPRPSNSGVYGILVAPSPYQLCAVIRDQGH

SEQ ID NO: 1150 - protein, 510 aa, Callistephus chinensis
MSILSLLVYFCISLLVIIALVNMFITRHTNRLPPGPAPWPVVGNLPHLGAIPHHTLAALATKYGPLVYLRLGFVHVVVASSPSVAAQFLKVHDLKFASRPPNSGAKHIAYNYQDMVFAPYGPQWTMFRKICKDHLFSSKALDDFRHVRQEEVAILARGLAGAGRSKVNLGQQLNMCTANTLARMMLDKRVFGNESGGDDPKANEFKEMATELMFLAGQFNIGDYIPVLDWLDLQGIVKKMKKLHTRFDKFLDVILDEHKVIASGHIDMLSTLISLKDDTSVDGRKPSDIEIKALLLELFVAGTDTSSNTVEWAIAELIRQPHLLKRAQEEMDSVVGQNRLVTEMDLSQLTFLQAIVKEAFRLHPSTPLSLPRIASESCEVDGYYIPKGSTLLVNIWAIGRHPEVWTDPLEFRPTRFLPGGEKPGIVVKVNDFEVLPFGAGRRICAGMSLALRTVQLLMGTLVQAFDWELANGIKPEKLNMDEAFGLSVQRAEPLVVHPRPRLPPHVYKSG

SEQ ID NO: 1151 - protein, 518 aa, Callistephus chinensis
MTILPFIFYTCITALVLYVLLNLLTRNPNRLPPGPTPWPIVGNLPHLGMIPHHSLAALAQKYGPLMHLRLGFVDVVVAASASVAAQFLKTHDANFASRPPNSGAKHIAYNYQDLVFAPYGPRWRMLRKICSVHLFSTKALDDFRHVREEEVAILTRVLVHAGESAVKLGQLLNVCTTNALARVMLGRRVFADGSEGRGVDPKADEFKDMVVELMELAGEFNIGDFIPPLDCLDLQGITKKMKKLHARFDKFLNIILDDHKIEKGAAGRRHSDLLTTLISLKDVDAADDDEEGKLSDIEIKALLLNLFAAGTDTSSSTVEWAVAELIRHPELLKQAREEMDIVVGRDRLVTELDLSRLTFLQAIVKETFRLHPSTPLSLPRMASESCEVDGYYIPKGSTLLVNVWAIARDPKMWTNPLEFRPSRFLPGGEKPDADIKGNDFEVIPFGAGRRICAGMSLGMRMVQLLIATLVQTFDWELANGLDPEKLNMEEAYGLTLQRAEPLMVHPRPRLSPHVYESR

SEQ ID NO: 1152 - protein, 406 aa, Streptomyces griseolus
MTDTATTPQTTDAPAFPSNRSCPYQLPDGYAQLRDTPGPLHRVTLYDGRQAWVVTKHEAARKLLGDPRLSSNRTDDNFPATSPRFEAVRESPQAFIGLDPPEHGTRRRMTISEFTVKRIKGMRPEVEEVVHGFLDEMLAAGPTADLVSQFALPVPSMVICRLLGVPYADHEFFQDASKRLVQSTDAQSALTARNDLAGYLDGLITQFQTEPGAGLVGALVADQLANGEIDREELISTAMLLLIAGHETTASMTSLSVITLLDHPEQYAALRADRSLVPGAVEELLRYLAIADIAGGRVATADIEVEGHLIRAGEGVIVVNSIANRDGTVYEDPDALDIHRSARHHLAFGFGVHQCLGQNLARLELEVILNALMDRVPTLRLAVPVEQLVLRPGTTIQGVNELPVTW

SEQ ID NO: 1153 - protein, 454 aa, Pseudomonas fluorescens
MTSWEREVSRGAGNRQLPVVKGWPLLGSALALIRNPLGFLQTTRSTYGDVYRVKAAHMNFVVLAGMEANRFVADKGKDCFVSSGFWEATLQEMQCPHSFIGVDGDAHRFQRNLMKPLFSKSAFNERIPMLAQIFTDTLQARYGVDQKVSALFRHVLSQQIGGSLQGYQPTPDEVEALMRYQNTAMNVCALKKWPRLALRLPGYRAAKKQVQALADRIIESERTQEQTQGYFQTLKEKGQMVQPQWFTPGDMRNHAIISYLAGIDTVGATLSFMLLELFKQPHLHQALRDEVDACFSQGLPDADGLENMETLKNFIREVMRLYPTAYAVRRTRRKDFEFQGYSIDKGQDIILFTTANHTDPAWFKNPQVFDITRYEEPRLEHRASGAWAPFGRGPHTCIGAGLANILLSLNLALFLYHTDLRPACKLSDIKMDFSNPAAGLSERFAISFTPRNRP

SEQ ID NO: 1154 - protein, 421 aa, Amycolatopsis mediterranei
MTTTAETSAEPVDLFSPEVVADPWGAHAAVREAPTLQIGGFMGGPPMYLAARYEDVRQVLMDQRFQCNPLADSPAEDIRNGVFRHLDMPEELIPWLKNLINASDGEEHARLRKLVSYALTAHRVGKFRPRVEELTAELLDKLEAAGGDGTPIDLVESFCYPLPVTVICELVGVDHEDRPQWRAWSDAMATLDGKRLPEEVRKTLAAARGMIERRRAEPKDDMVTALVEAQAKNPGIATDDELVGVLFSLVTAGHQTTTYLIGNSVLALHEHPDQLARLKADPSLWPQAVRELQRLGPIQFGQPRFATEDIEVGGTVIPRGMPVVPLIMAANSDPRKFPEPEKLQIDRLAVGSESHLGFGKGIHRCLGQHVAYLEAEVALRGLYTRFPDMTLAVPREEIPWILRPGFTRTKDLPVRLARPAS

SEQ ID NO: 1155 - protein, 511 aa, Amycolatopsis mediterranei
PVPLSIVSRDRVSIQRLACKVFGETRSGPPGRASFVLIAPRRPQTVHKGHNSEHCQVGGCSTGRPLPTVRNRACRTRAGRPRRHQEGMAMTATAKPSAKPVDLFSPEVVADPFGWYARLREEPLPHTGTLNLGTMMGGPDMWLATRYEDVLTVLTDPRFLTNPPADSPLADIRDGVFKAMNFPEDLIPWMANKLNTADGEDHTRLRKLVSYALTARRVNALRPRVEKITEDLFDRMAEQGKDGSPVDIVEEFCFPLPVTVICELVGIDEPDRAAWHAWGNAMATMDGPKIPPALRECIALSRELMARRRVEPKDDLVTALVQAQADDPGRVSDDEIVGILFSLVTAGHQTTTYLIGNSVLFLLEQPEQLARLKAEPALWAQAVRELQRLGPLQFTQARFPSEDVELGGVTIPRGTPVAPLLLAANTDPRKFPEPDKLVVDRLSVANEMHLSFGKGIHRCLGQHLAYQEAEVALHGLFTRFPDLALAVPRDEIPWILRPAFTRTKTLPLKLA

SEQ ID NO: 1156 - protein, 499 aa, Lotus japonicus
MDIISFLYYSLFYVALFAIIKLFLGSRKFKNLPPGPTSLPIIGNLHHLKRPLHRTFRALSEKYGDVFSLWFGNRLVVVVSSFADVQECFTKNDVVLANRPRFLSGKYIFYNYTTLGSTSYGEHWRNLRRITSLDVLSNHRINSFSPIRRDETTRLIRKLAEDSAKNFSEVELTSRFFDMTFNNIMRMISGKRYYGEDCDMTELQEASEFRDMVTELLQLSGANNKADFMPILRLVDFEGLEKRVKGISSKTDRFLRGLLQEHRDKKQRTANTMIDHLLTLQESQPEYYTDQIIKGLALAMLLAGTDSSAVTLEWSMCNVLNYPEVLEKIKAELDTHVGQDRLVDESDIPKLTYLKNVINETLRLYTPAPLLLPHSASDDCTIGGYKVPRDTIVLINAWALHRDPQLWTEATTFKPERFDKKGELEKLIPFGLGRRACPGELLAIRAISMTLALLIQCFDWKRVSDEEIDMGERDGFVLMKSIPVKAMCKSRPVINNVFK

SEQ ID NO: 1157 - protein, 471 aa, Persea americana
MAILVSLLFLAIALTFFLLKLNEKREKKPNLPPSPPNLPIIGNLHQLGNLPHRSLRSLANELGPLILLHLGHIPTLIVSTAEIAEEILKTHDLIFASRPSTTAARRIFYDCTDVAFSPYGEYWRQVRKICVLELLSIKRVNSYRSIREEEVGLMMERISQSCSTGEAVNLSELLLLLSSGTITRVAFGKKYEGEEERKNKFADLATELTTLMGAFFVGDYFPSFAWVDVLTGMDARLKRNHGELDAFVDHVIDDHLLSRKANGSDGVEQKDLVDVLLHLQKDSSLGVHLNRNNLKAVILDMFSGGTDTTAVTLEWAMAELIKHPDVMEKAQQEVRRVVGKKAKVEEEDLHQLHYLKLIIKETLRLHPVAPLLVPRESTRDVVIRGYHIPAKTRVFINAWAIGRDPKSWENAEEFLPERFVNNSVDFKGQDFQLIPFGAGRRGCPGIAFGISSVEISLANLLYWFNWELPGI

SEQ ID NO: 1158 - protein, 502 aa, Persea americana
MAILVSLLFLAIALTFFLLKLNEKREKKPNLPPSPPNLPIIGNLHQLGNLPHRSLRSLANELGPLILLHLGHIPTLIVSTAEIAEEILKTHDLIFASRPSTTAARRIFYDCTDVAFSPYGEYWRQVRKICVLELLSIKRVNSYRSIREEEVGLMMERISQSCSTGEAVNLSELLLLLSSGTITRVAFGKKYEGEEERKNKFADLATELTTLMGAFFVGDYFPSFAWVDVLTGMDARLKRNHGELDAFVDHVIDDHLLSRKANGSDGVEQKDLVDVLLHLQKDSSLGVHLNRNNLKAVILDMFSGGTDTTAVTLEWAMAELIKHPDVMEKAQQEVRRVVGKKAKVEEEDLHQLHYLKLIIKETLRLHPVAPLLVPRESTRDVVIRGYHIPAKTRVFINAWAIGRDPKSWENAEEFLPERFVNNSVDFKGQDFQLIPFGAGRRGCPGIAFGISSVEISLANLLYWFNWELPGDLTKEDLDMSEAVGITVHMKFPLQLVAKRHLS

SEQ ID NO: 1159 - protein, 516 aa, Penicillium digitatum
MDLVPLVTGQIKCIAYYTTGLVLASIVLNVIKQLVFYNRKEPPVVFHWIPFIGSTVAYGMDPYQFFFASRAKYGNIFTFILLGKKTTVYLGVEGNEFILNGKLKDVNAEEIYGKLTTPVFGSDVVYDCPNSKLMEQKKFIKYGLSQEALESYVPLIADEISSYIKSSPSFKGQSGTIDLVPAMAEITTFTAARTLQGEEVRSKLTTEFAKLFHDLDLGFTPINFMLPWAPLPQNRKRDRAHRRMREIYVDIIQARREAGEEANDNGRDKTKGTDMISNLMRCVYRDGTPIPDKEIAHLMITLLMAGQHSSASISCWILLRLASQPEMTEKLFAEQVNNLGADLPPLQYKDLDKLPLHRNVIKETLRLHSSIHTLMRKVKNPMPVPGTDFVIPPSHTLLSSPGVTARDDRHFRDPLRWDPHRWESRVEAEDSSDTVDYGYGAVSKGTRSPYLPFGAGRHRCIGEKFAYLNLGVIIATLVREFRFFNPEGMEGVPDTDYSSLFSRPMQPATVRWEVRS

SEQ ID NO: 1160 - protein, 516 aa, Penicillium digitatum
MDLVPLVTGQIKCIAYYTTGLVLASIVLNVIKQLVFYNRKEPPVVFHWIPFIGSTVAYGMDPYQFFFASRAKYGNIFTFILLGKKTTVYLGVEGNEFILNGKLKDVNAEEIYGKLTTPVFGSDVVYDCPNSKLMEQKKFIKYGLSQEALESYVPLIADEISSYIKSSPSFKGQSGTIDLVPAMAEITTFTAARTLQGEEVRSKLTTEFAKLFHDLDLGFTPINFMLPWAPLPQNRKRDRAHRRMREIYVDIIQARREAGEEANDNGRDKTKGTDMISNLMRCVYRDGTPIPDKEIAHLMITLLMAGQHSSASISCWILLRLASQPEMTEKLFAEQVNNLGADLPPLQYKDLDKLPLHRNVIKETLRLHSSIHTLMRKVKNPMPVPGTDFVIPPSHTLLSSPGVTARDERHFRDPLRWDPHRWESRVEAEDSSDTVDYGYGAVSKGTRSPYLPFGAGRHRCIGEKFAYLNLGVIIATLVREFRFFNPEGMEGVPDTDYSSLFSRPMQPATVRWEVRS

SEQ ID NO: 1161 - protein, 489 aa, Arabidopsis thaliana
MTETGLILMWFPLIILGLFVLKWVLKRVNVWIYVSKLGEKKHYLPPGDLGWPVIGNMWSFLRAFKTSDPESFIQSYITRYGRTGIYKAHMFGYPCVLVTTPETCRRVLTDDDAFHIGWPKSTMKLIGRKSFVGISFEEHKRLRRLTSAPVNGPEALSVYIQFIEETVNTDLEKWSKMGEIEFLSHLRKLTFKVIMYIFLSSESEHVMDSLEREYTNLNYGVRAMGINLPGFAYHRALKARKKLVAAFQSIVTNRRNQRKQNISSNRKDMLDNLIDVKDENGRVLDDEEIIDLLLMYLNAGHESSGHLTMWATILMQEHPMILQKAKEEQERIVKKRAPGQKLTLKETREMVYLSQVIDETLRVITFSLTAFREAKSDVQMDGYIIPKGWKVLTWFRNVHLDPEIYPDPKKFDPSRWEGYTPKAGTFLPFGLGSHLCPGNDLAKLEISIFLHHFLLKYRVERSNPGCPVMFLPHNRPKDNCLARITRTMP

SEQ ID NO: 1162 - protein, 489 aa, Arabidopsis thaliana
MTETGLILMWFPLIILGLFVLKWVLKRVNVWIYVSKLGEKKHYLPPGDLGWPVIGNMWSFLRAFKTSDPESFIQSYITRYGRTGIYKAHMFGYPCVLVTTPETCRRVLTDDDAFHIGWPKSTMKLIGRKSFVGISFEEHKRLRRLTSAPVNGPEALSVYIQFIEETVNTDLEKWSKMGEIEFLSHLRKLTFKVIMYIFLSSESEHVMDSLEREYTNLNYGVRAMGINLPGFAYHRALKARKKLVAAFQSIVTNRRNQRKQNISSNRKDMLDNLIDVKDENGRVLDDEKIIDLLLMYLNAGHESSGHLTMWATILMQEHPMILQKAKEEQERIVKKRAPGQKLTLKETREMVYLSQVIDETLRVITFSLTAFREAKSDVQMDGYIIPKGWKVLTWFRNVHLDPEIYPDPKKFDPSRWEGYTPKAGTFLPFGLGSHLCPGNDLAKLEISIFLHHFLLKYRVERSNPGCPVMFLPHNRPKDNCLARITRTMP

SEQ ID NO: 1163 - protein, 490 aa, Arabidopsis thaliana
MAETTSWIPVWFPLMVLGCFGLNWLVRKVNVWLYESSLGENRHYLPPGDLGWPFIGNMLSFLRAFKTSDPDSFTRTLIKRYGPKGIYKAHMFGNPSIIVTTSDTCRRVLTDDDAFKPGWPTSTMELIGRKSFVGISFEEHKRLRRLTAAPVNGHEALSTYIPYIEENVITVLDKWTKMGEFEFLTHLRKLTFRIIMYIFLSSESENVMDALEREYTALNYGVRAMAVNIPGFAYHRALKARKTLVAAFQSIVTERRNQRKQNILSNKKDMLDNLLNVKDEDGKTLDDEEIIDVLLMYLNAGHESSGHTIMWATVFLQEHPEVLQRAKAEQEMILKSRPEGQKGLSLKETRKMEFLSQVVDETLRVITFSLTAFREAKTDVEMNGYLIPKGWKVLTWFRDVHIDPEVFPDPRKFDPARWDNGFVPKAGAFLPFGAGSHLCPGNDLAKLEISIFLHHFLLKYQVKRSNPECLVMYLPHTRPTDNCLARISYQ

SEQ ID NO: 1164 - protein, 490 aa, Arabidopsis thaliana
MAETTSWIPVWFPLMVLGCFGLNWLVRKVNVWLYESSLGENRHYLPPGDLGWPFIGNMLSFLRAFKTSDPDSFTRTLIKRYGPKGIYKAHMFGNPSIIVTTSDTCRRVLTDDDAFKPGWPTSTMELIGRKSFVGISFEEHKRLRRLTAAPVNGHEALSTYIPYIEENVITVLDKWTKMGEFEFLTHLRKLTFRIIMYIFLSSESENVMDALEREYTALNYGVRAMAVNIPGFAYHRALKARKTLVAAFQSIVTERRNQRKQNILSNKKDMLDNLLNVKDEDGKTLDDEEIIDVLLMYLNAGHESSGHTIMWATVFLQEHPEVLQRAKAEQEMILKSRPEGQKGLSLKETRKMEFLSQVVDETLRVITFSLTAFREAKTDVEMNGYLIPKGWKVLTWFRDVHIDPEVFPDPRKFDPARWDNGFVPKAGAFLPFGAGSHLCPGNDLAKLEISIFLHHFLLKYQVKRSNPECPVMYLPHTRPTDNCLARISYQ

SEQ ID NO: 1165 - protein, 499 aa, Cicer arietinum
MEYNFLTYIIFLSLFLITTKLLFSKRKFKKLPPCPPSIPIIGNLHQVKQPIHHTFYNLSKKYGPIFTLKFGSQPVVVVSSASLVEECFTKNDIIFANRIHSAKTKYLGYNNTNMVSTSYGDLWRNLRRISSIEILSTHRLNSFSEIRKDETMRLIGKLAKKSHKDFTKVELRSLFGELTFNTIMRMVCGKRFYGEESDGTNAEEAKKFRDMMNEMQEFGLGSNLGDFVPLFKLFDFSGGHKKLKKVGEKMDALFQGLVDEHRNNKDKNLNTMIDHLLSLQESQPDYYSDQIIKGLIMALIVAGTETSSVTLEWAMSNLLNHPEILEKAKIELDNHIGQEHLIEEAEATKLQYLQNIISETLRLHPPVTMLLPHLSSHDCTIGGYDVPRNTMLMVNAWAIHRDPNLWADPMSFKPERFENGQGDIGGFIPFGMGRRACPGSGLALRTLGLTLGSLIQCFEWKRIGKEEVDMSEGSGTVVPKAIPLEAQCKARPIINKIFN

SEQ ID NO: 1166 - protein, 497 aa, Glycine max
MIMMMMMCSMWMWVVLVAIAGALLVLRSILKNVNWWLYESKLGVKQYSLPPGDMGWPFIGNMWSFLSAFKSKDPDSFISSFVSRFGRTGMYKTMMFGNPSIIVTTPEICKRVLTDDDKFTPGWPQSTIELIGKRSFISMSYEEHKRLRRLTSSSINGMEALSLYLTYIEKNVKSSLEKWANMGQIEFLTEIRKLTFKIIMHIFLSSESEHVMEALEREYTALNHGVRAMCINIPGFAYHKAFKARKNLVAIFQSIVDERRNLRKGYLPGKAKDMMDALIDLEDDDGRKLSDEDIIDIMLMYLNAGHESSGHITMWATFFLQKHPEYLQKAKAEQEEIIRRRPSTQKGLTLKEVREMDFLYKVIDETLRVITFSLVVFREAKTDVNINGYTVPKGWKVLVWFRSVHLDPEIFPDPKEFNPNRWNKEHKAGEFLPFGGGSRLCPGNDLAKMEIAVFLHHFLLNYRFEQHNPNCPVRYLPHTRPMDNCLGRVRKCPSTTT

SEQ ID NO: 1167 - protein, 495 aa, Glycine max
  unsure (1)..(495): unsure at all Xaa locations
MMEMDSMCMWVVLVAIAGALLVLRSMLKNVNWWLYESKLGVKQYSLPPGDMGWPFIGNMWSFLRAFKSKDPDSFISSFVSRYGRTGMYKTLMFGNPSVIVTTPETCKRVLTDDDKFTTGWPQSTIELIGKRSFISMSYEEHKRLRRLTSSSINGMESLSLYLTYIEENVKNSLEKWANMGQIEFLTEIRKLTFKIIMHIFLSSESEPVMEXALEREYTALNHGVRAMCINIPGFAYHKAFKARKNLVAIFQSIVDERRNLRKGYLPGKAKDMMDALIDVEDDDGRKLSDEDIIDIMLMYLNAGHESSGHITMWATFFLQKHPEYLQKAKAEQEEIIRRRPPTQKGLTLKEVREMDFLYKVIDETLRVITFSLVVFREAKSDVNINGYTIPKGWKALVWFRSVHLDPEIYPNPKEFNPYRWNKEHKAGEFLPFGGGSRLCPGNDLAKMEIAVFLHHFLLNYRFEQHNPNCPVRYLPHTRPMDNCLGRVRKCSSTTT

SEQ ID NO: 1168 - protein, 368 aa, Glycine max
  unsure (1)..(368): unsure at all Xaa locations
XFGSRNSLYLSYEEHKRLRRLTSSSINGMESLSLYLTYIEENVKNSLEKWANMGQIEFLTEIRKLTFKIIMHIFLSSESEPVMEALEREYTALNHGVRAMCINIPGFAYHKAFKARKNLVAIFQSIVDERRNLRKGYLPGKAKDMMDALIDVEDDDGRKLSDEDIIDIMLMYLNAGHESSGHITMWATFFLQKHPEYLQKAKAEQEEIIRRRPPTQKGLTLKEVREMDFLYKVIDETLRVITFSLVVFREAKSDVNINGYTIPKGWKALVWFRSVHLDPEIYPNPKEFNPYRWNKEHKAGEFLPFGGGSRLCPGNDLAKMEIAVFLHHFLLNYRFEQHNPNCPVRYLPHTRPMDNCLGRVRKCSSTTT

SEQ ID NO: 1169 - protein, 504 aa, Oryza sativa (japonica cultivar-group)
MEGMGMAAAWAAGDLWVLAAAVVAGVVLVDAVVRRAHDWVRVAALGAERRSRLPPGEMGWPMVGSMWAFLRAFKSGNPDAFIASFIRRFGRTGVYRTFMFSSPTILAVTPEACKQVLMDDEGFVTGWPKATVTLIGPKSFVNMSYDDHRRIRKLTAAPINGFDALTTYLSFIDQTVVASLRRWSSPESGQVEFLTELRRMTFKIIVQIFMSGADDATMEALERSYTDLNYGMRAMAINLPGFAYYRALRARRKLVSVLQGVLDGRRAAAAKGFKRSGAMDMMDRLIEAEDERGRRLADDEIVDVLIMYLNAGHESSGHITMWATVFLQENPDIFARAKAEQEEIMRSIPATQNGLTLRDFKKMHFLSQVVDETLRCVNISFVSFRQATRDIFVNGYLIPKGWKVQLWYRSVHMDDQVYPDPKMFNPSRWEGPPPKAGTFLPFGLGARLCPGNDLAKLEISVFLHHFLLGYKLKRANPKCRVRYLPHPRPVDNCLATITKVSDEH

SEQ ID NO: 1170 - protein, 469 aa, Oryza sativa (japonica cultivar-group)
MAAAWAAGDLWVLAAAVVAGVVLVDAVVRRAHDWVRVAALGAERRSRLPPGEMGWPMVGSMWAFLRAFKSGNPDAFIASFIRRQVWADRGVQDVHVQQPDDPGGDAGGVQAGAHGRRGLRHRLAQGHRHPHRPQILRQHVLRRPPPHPQAHRRPHQRLRRPHHLPLLHRPDRRRLPPPLVLAGVRPGRVPHRAQAHDLQDHRPDLHERRRRRHHGGPGAELHRPQLRHARHGHQPPRLRLLPRAQGSPEARVRAAGCARRPEGRRRQGLQTLRGHGHDGPPHRGRGRTRPPPRRRRDRRRPHHVPQRRPRVLRPHHHVGHRLPPGEPRHLRKSKVQAEQEEIMRSIPATQNGLTLRDFKKMHFLSQVVDETLRCVNISFVSFRQATRDIFVNGYLIPKGWKVQLWYRSVHMDDQVYPDPKMFNPSRWEGPPPKAGTFLPFGLGARLCPGNDLAKLEISVFLHHFLLGYK

SEQ ID NO: 1171 - protein, 505 aa, Helianthus tuberosus
MEIPYLLTTTLLLLFTTLYLLLRRRSSTLPPTIFPSLPIIGHLYLLKPPLYRTLAKLSAKHGQILRLQLGFRRVLIVSSPSAAEECFTKNDIVFANRPKMLFGKIIGVNYTSLAWSPYGDNWRNLRRIASIEILSIHRLNEFHDIRVEETRLLIQKLLSACNSGSSQVTMKFSFYELTLNVMMRMISGKRYFGGDNPELEEEGKRFRDMLDETFVLAGASNVGDYLPVLSWLGVKGLEKKLIKLQEKRDVFFQGLIDQLRKSKGTEDVNKKKTMIELLLSLQETEPEYYTDAMIRSFVLVLLAAGSDTSAGTMEWVMSLLLNHPQVLKKAQNEIDSVIGKNCLVDESDIPNLPYLRCIINETLRLYPAGPLLVPHEASSDCVVGGYNVPRGTILIVNQWAIHHDPKVWDEPETFKPERFEGLEGTRDGFKLLPFGSGRRSCPGEGLAVRMLGMTLGSIIQCFDWERTSEELVDMTEGPGLTMPKAIPLVAKCKPRVEMTNLLSEL

SEQ ID NO: 1172 - protein, 520 aa, Helianthus tuberosus
MEIPYLLTVVLLLLTTLYLLLFTTLLLLFTTLYLLLRRRRSSTLPPTIFPYLPIIGHLYLLKPPLYRTLAKLSAKHGPILRLQLGFRRVLIVSSPSAAEECFTKNDIVFANRPKMLFGKIIGVNYTSLAWSPYGDNWRNLRRIASIEILSIHRLNEFHDIRVEETRLLIQKLLSACNSGSSQVTMKFSFYELTLNVMMRMISGKRYFGGDNPELEEEGKRFRDMLDETFVLAGASNVGDYLPVLSWLGVKGLEKKLIKLQEKRDVFFQGLIDQLRKSKGTEDVNKKKTMIELLLSLQETEPEYYTDAMIRSFVLVLLAAGSDTSAGTMEWVMSLLLNHPQVLKKAQNEIDSVIGKNCLVDESDIPNLPYLRCIINETLRLYPAGPLLVPHEASSDCVVGGYNVPRGTILIVNQWAIHHDPKVWDEPETFKPERFEGLEGTRDGFKLLPFGSGRRSCPGEGLAVRMLGMTLGSIIQCFDWERTSEELVDMTEGPGLTMPKAIPLVAKCKPRVEMTNLLSEL

SEQ ID NO: 1173 - protein, 504 aa, Oryza sativa; identical to SEQ ID NO: 1169

SEQ ID NO: 1174 - protein, 442 aa, Oryza sativa
MEEWHRFGRTGVYRTFMFSSPTILAVTPEACKQVLMDDEGFVTGCAKGTVTLIGPKSFVNMSYDDHRRIRKLTAGPINGFDALTTYLSFIDQTVVASLRRWSSPESGQVEFLTELRRMTFKIIVQIFMSGADDATMEALERSYTDLNYGMRAMAINLPGFAYYRALRARRKLVSVLQGVLDGRRAAAAKGFKRSGAMDMMDRLIEAEDERGRRLADDEIVDVLIMYLNAGHESSGHITMWATVFLQENPDIFARAKAEQEEIMRSIPATQNGLTLRDFKKMHFLSQVVDETLRCVNISFVSFRQATRDIFVNGYLIPKGWKVQLWYRSVHMDDQVYPDPKMFNPSRWEGPPPKAGTFLPFGLGARLCPGNDLAKLEISVFLHHFLLGYNASRRRASRRRRRPPLPPGPALCPPPLRDLLARSPARPTSVSVHSSFVRSAPLP

SEQ ID NO: 1175 - protein, 144 aa, Oryza sativa
  unsure (1)..(144): unsure at all Xaa locations
RLADDEIVDVLIMYLNAGHESSGHITMWATVFLQENPDIFARAKAEQEEIMRSIPATQNGLTLRDFKKMHFLSQVVDETLRCVNISFVSFRQATRDIFVNGYLIPKGWKVQLWYRSVHMDDQVYPDPKMFNPSRWEGPPPILKX

SEQ ID NO: 1176 - protein, 494 aa, Triticum aestivum
  unsure (1)..(494): unsure at all Xaa locations
MGEGGRRAAAGRPGLAAPGGRGALAPRVHARPAAAAPGCRRRGGRPRGAVGWLLVRGPWAPLGPSESARPDSYGCSPPRWLGRAGLHRALMCRRLPSVVTTPDAAGNARSPGRPXXAAFPRSPGTARPSTTPLSPSPGAGPTAPATSRLVLGDGRPDDAAGPASRSLTVGAPTWGTADRHLGIDTVTELRNLTLRIIGQIFMGVADERTAAELESTYTERSYVMRAMAIDLPGFAYHKAIRARRRLVAALQCVLDERRARGAKTAGVDMMDRLIAAEDEGGRRLQDDEIIDVLVMYLNAGHESPGHITMWATVFLQENPEILAKAKAEQEAIMRSIPPGQKGLTLRDFRKMEYLSQVVDETLRFVNISFVSFRQATRDVSVNGYLIPKGWKVQLWYRSVHMDPQVYPDPKKFDPSRWEGPPPRAGTFLPFGLGTRLCPGNDLAKLEISVFLHHFLLGYKLTRKNPNCRVRYLPHPRPVDNCLAKITRVSSSHXR

SEQ ID NO: 1177 - protein, 324 aa, Triticum aestivum
  unsure (1)..(324): unsure at all Xaa locations
XCLLLQINPTKGNKSWSSTAVAAALERGRLPPGDMGWPLVGGMWAFLRAFKSGRPDSFIDSFARWFGRAGLYRAFMFSSPTIMVTTPDACKQVLMDDDTFVTGWPKATIALIGPKSFISMGYDEHRRLRKLTAAPINGFDALTFYLAFIDHTVVTTLRGWSERGDDFESPAELRRMTFRIIVQIFMGGADERTAAELESTYTELNYGMRAMAIDLPGFAYHKAIRARRRPGAALQCVLDERRARGAKTAGVDMMDRLIAAEDEGGRRLQDDEIIDVLVMYLNAGHESSGHITMWATVFLQENPEILAKAKAEQEAIMRSIPSGQ

SEQ ID NO: 1178 - protein, 128 aa, Triticum aestivum
  unsure (1)..(128): unsure at all Xaa locations
ICLFSSSLMEKYIGTMLFRFRRAGLYRAFMFSSPTILVTTPEACKQVLMDDDTFVTGWPKATVALIGPKSFVNMGYDEHRRLRKLTAAPINGFDALTSYLGFIDETVVTTLRGWADRGSDFEFLTELX

SEQ ID NO: 1179 - protein, 141 aa, Triticum aestivum
  unsure (1)..(141): unsure at all Xaa locations
MGELVWAALAGVLVPLAAVALDAAVRAAHAWYWTASLGAGRRGRLPPGDMGWPLVGGMWAFLCAFKSGRPDSFIDSFARRFRRAXGLYXRAFMFSSPTILVTSPEAXCKQXCFMDDDTFVTGWPKATVALIGPKSFINMGX

SEQ ID NO: 1180 - protein, 507 aa, Musa acuminata
MALPPLLLSPLPSLLVVLALLSSLLLAGRKARGGSATWKLPPGPPKLPVIGHLHLLGSSLLHRSLWELSKKHGPLMHLKFGRVPVVVVSSPEMAKEVLKTHDLECCSRPSLLSFSKFSYGLSDVAFIPYGERWRQLRKLCTVELLSTRKINSFRDIRKEEMERVTKLICSHVRASSMVNLSELLLSLSCNMTCRSAFGSGFDDGGDIQLHDMLREAQEELSGLFLSDYLPLLGWVDRLSGMRSRLERAFLKLDSIYQRRIDYHQDRLRQQGKEDGDVLDALLRMQKDEEGLTEDHIKGVLMDIFIAGTDTSSATVEWAMAELIRQPELMKRAQDEVRRCVGSKGEVEESDLHQLHFFKCVIKETMRLHPPAPLLLPRETMQHFKLNGYDILPKTWMYVNAWAIGRDPNSWGRPHVFDPERFMHDSTEASGQDFKLIPFGEGRRICPGKNLGMLMVELVLANLLYSFDWHLPPGMVKEDISMEEAPGVTVHREYALCLMATKYDATTA

SEQ ID NO: 1181 - protein, 491 aa, Musa acuminata
GTRRDRERERERERERERERERERERERERERERERVHLLGSSSLHRSLWELSKKHGPLMHLKFGRVPVVVVSSPEMAKEVLKTHDLECCSRPSLLSFSKFSYGLSDVAFIPYGERWRQLRKLCTVELLSTRKINSFRDIRKEEMERVTKLICSHVRASSMVNLSELLLSLSCNMTCRSAFGSGFDDGGDIQLHDMLREAQEELSGLFLSDYLPLLGWVDRLSGMRSRLERAFLKLDSIYQRRIDYHQDRLRQQGKEDGDVLDALLRMQKDEEGLTEDHIKGVLMDIFIAGTDTSSATVEWAMAELIRQPELMKRAQDEVRRCVGSKGEVEESDLHQLHFFKCVIKETMRLHPPAPLLLPRETMQHFKLNGYDILPKTWMYVNAWAIGRDPNSWGRPHVFDPERFMHDSTEASGQDFKLIPFGEGRRICPGKNLGMLMVELVLANLLYSFDWHLPPGMVKEDISMEEAPGVPVHREYALCLMATKYDATTA

SEQ ID NO: 1182 - protein, 523 aa, Perilla frutescens
MISAAVSLIICTSILGVLVYFLFLRRGGGSNGRPLPPGPRPWPIVGNLPQLGPKPHQSMAALARVHGPLMHLKMGFVHVVVAASATVAEKFLKVHDTNFLSRPPNSGAEHIAYNYNDLVFAPHGPRWRLLRKICALHLFSSKALDDFRHVREEEVGILIRNLASVGEMPASIGQMMYVCATNAISRVMLGRHVLGDEHRGAAGGGDTTAEEFKAMVVELMALAGVFNVGDFIPPLKGLDLQGVVAKMKKLHQRFDAFFSGILHDHKINGSNAAEGHVDLLTTLISLKDVDNNGEGGKLTDTEIKALLLNLFTAGTDTTSSTVEWAITELIRNPNILARVRKELDLIVGKDKLVKESDLGQLTYLQAVIKENFRLHPSTPLSLPRVAQESCEINGYYIPKDSTLLVNVWAIGRDPNVWPDPLEFRPERFLMGGEKPNVDVRGNDFELIPFGSGRRICAGMNLGIRMVQLLIATMVHAFDFELANGQLAKDLNMEEAYGITLQRADPLVVHPRPRLARHVYQAQV

SEQ ID NO: 1183 - protein, 530 aa, Saccharomyces cerevisiae
MSATKSIVGEALEYVNIGLSHFLALPLAQRISLIIIIPFIYNIVWQLLYSLRKDRPPLVFYWIPWVGSAVVYGMKPYEFFEECQKKYGDIFSFVLLGRVMTVYLGPKGHEFVFNAKLADVSAEAAYAHLTTPVFGKGVIYDCPNSRLMEQKKFVKGALTKEAFKSYVPLIAEEVYKYFRDSKNFRLNERTTGTIDVMVTQPEMTIFTASRSLLGKEMRAKLDTDFAYLYSDLDKGFTPINFVFPNLPLEHYRKRDHAQKAISGTYMSLIKERRKNNDIQDRDLIDSLMKNSTYKDGVKMTDQEIANLLIGVLMGGQHTSAATSAWILLHLAERPDVQQELYEEQMRVLDGGKKELTYDLLQEMPLLNQTIKETLRMHHPLHSLFRKVMKDMHVPNTSYVIPAGYHVLVSPGYTHLRDEYFPNAHQFNIHRWNNDSASSYSVGEEVDYGFGAISKGVSSPYLPFGGGRHRCIGEHFAYCQLGVLMSIFIRTLKWHYPEGKTVPPPDFTSMVTLPTGPAKIIWEKRNPEQKI

SEQ ID NO: 1184 - protein, 530 aa, Saccharomyces cerevisiae
MSATKSIVGEALEYVNIGLSHFLALPLAQRISLIIIIPFIYNIVWQLLYSLRKDRPPLVFYWIPWVGSAVVYGMKPYEFFEECQKKYGDIFSFVLLGRVMTVYLGPKGHEFVFNAKLADVSAEAAYAHLTTPVFGKGVIYDCPNSRLMEQKKFVKGALTKEAFKSYVPLIAEEVYKYFRDSKNFRLNERTTGTIDVMVTQPEMTIFTASRSLLGKEMRAKLDTDFAYLYSDLDKGFTPINFVFPNLPLEHYRKRDHAQKAISGTYMSLIKERRKNNDIQDRDLIDSLMKNSTYKDGVKMTDQEIANLLIDVLMGGQHTSAATSAWILLHLAERPDVQQELYEEQMRVLDGGKKELTYDLLQEMPLLNQTIKETLRMHHPLHSLFRKVMKDMHVPNTSYVIPAGYHVLVSPGYTHLRDEYFPNAHQFNIHRWNNDSASSYSVGEEVDYGFGAISKGVSSPYLPFGGGRHRCIGEHFAYCQLGVLMSIFIRTLKWHYPEGKTVPPPDFTSMVTLPTGPAKIIWEKRNPEQKI

SEQ ID NO: 1185 - protein, 512 aa, Torenia hybrida
MSPLALMILSTLLGFLLYHSLRLLLFSGQGRRLLPPGPRPWPLVGNLPHLGPKPHASMAELARAYGPLMHLKMGFVHVVVASSASAAEQCLRVHDANFLSRPPNSGAKHVAYNYEDLVFRPYGPKWRLLRKICAQHIFSVKAMDDFRRVREEEVAILSRALAGKRAVPIGQMLNVCATNALSRVMMGRRVVGHADGTNDAKAEEFKAMVVELMVLSGVFNISDFIPFLEPLDLQGVASKMKKLHARFDAFLTEIVRERCHGQINNGGAHQDDLLSTLISFKGLDDGDGSRLTDTEIKALLLNLFAAGTDTTSSTVEWAVAELLRHPKTLAQVRQELDSVVGKNRLVSETDLNQLPYLQAVVKETFRLHPPTPLSLPRLAEDDCEIDGYLIPKGSTLLVNVWAIARDPKVWADPLEFRPERFLTGGEKADVDVKGNDFELIPFGAGRRICAGVGLGIRMVQLLTASLIHAFDLDLANGLLPQNLNMEEAYGLTLQRAEPLLVHPRLRLATHVY

SEQ ID NO: 1186 - protein, 457 aa, Torenia hybrida
MAKTYGPLMHLKFGLKDAVVASSASVAEQFLKKHDVNFSNRPPNSGAKHIAYNYQDLVFAPYGPRWRLLRKICSVHLFSSKALDDFQHVRHEEICILIRAIASGGHAPVNLGKLLGVCTTNALARVMLGRRVFEGDGGENPHADEFKSMVVEIMVLAGAFNLGDFIPVLDWFDLQGIAGKMKKLHARFDKFLNGILEDRKSNGSNGAEQYVDLLSVLISLQDSNIDGGDEGTKLTDTEIKALLLNLFIAGTDTSSSTVEWAMAELIRNPKLLVQAQEELDRVVGPNRFVTESDLPQLTFLQAVIKETFRLHPSTPLSLPRMAAEDCEINGYYVSEGSTLLVNVWAIARDPNAWANPLDFNPTRFLAGGEKPNVDVKGNDFEVIPFGAGRRICAGMSLGIRMVQLVTASLVHSFDWALLDGLKPEKLDMEEGYGLTLQRASPLIVHPKPRLSAQVYCM

SEQ ID NO: 1187 - protein, 514 aa, Oncorhynchus mykiss
MMVSWSVCRSSLALPACGLPSARHNSSMPVVRQALSPDNSSTVQNFSEIPGLWRNGLANLYSFWKLDGFRNIHRVMVHNFNTFGPIYREKIGYYDSVNIIKPEMPAILFKAEGHYPKRLTVEAWTSYRDYRNRKYGVLLKNGEDWRSNRVILNREVISPKVLGNFVPLLDEVGQDFVARVHKKIERSGQDKWTTDLSQELFKYALESVGSVLYGERLGLMLDYINPEAQHFIDCISLMFKTTSPMLYIPPAMLRRVGAKIWRDHVEAWDGIFNQADRCIQNIYRTMRQDTNTHGKYPGVLASLLMLDKLSIEDIKASVTELMAGGVDTTSITLLWTLYELARHPDLQEELRAEVAVARQSTQGDMLQMLKMIPLVKGALKETLRLHPVAVSLQRYITEEIVIQNYHIPCGTLVQLGLYAMGRDPDVFPRPEKYLPSRWLRTENQYFRSLGFGFGPRQCLGRRIAETEMQLFLIHMLENFRVDKQRQVEVHSTFELILLPEKPILLTLKPLKSGQ

SEQ ID NO: 1188 - protein, 256 aa, Salvelinus alpinus
DCISLMFKTTSPMLYIPPPMLRRVGAKIWRDHVEAWDGIFNQADRCIQNIYRTMRQDTNTHRKYPGVLPSLLMLDKLSIEDIKASVTELMAGGVDTTSITLLWTLYELARHPDLQEELRAEVAVARQSTQGDMLQMLKMIPLVKGALKETLRLHPVAVSLQRYITEDIVIQNYHIPRGTLVQLGLYAMGRDPDVFPRPEKYLPSRWLRAENQYFRSLGFGFGPRQCLGRRIAETEMQLFLIHMLENFRVDKQRQVE

SEQ ID NO: 1189 - protein, 418 aa, Cloning vector pSLJ8313
MQVWPPYGKKKYDTDTATTPQTTDAPAFPSNRSCPYQLPDGYAQLRDTPGPLHRVTLYDGRQAWVVTKHEAARKLLGDPRLSSNRTDDNFPATSPRFEAVRESPQAFIGLDPPEHGTRRRMTISEFTVKRIKGMRPEVEEVVHGFLDEMLAAGPTADLVSQFALPVPSMVICRLLGVPYADHEFFQDASKRLVQSTDAQSALTARNDLAGYLDGLITQFQTEPGAGLVGALVADQLANGEIDREELISTAMLLLIAGHETTASMTSLSVITLLDHPEQYAALRADRSLVPGAVEELLRYLAIADIAGGRVATADIEVEGHLIRAGEGVIVVNSIANRDGTVYEDPDALDIHRSARHHLAFGFGVHQCLGQNLARLELEVILNALMDRVPTLRLAVPVEQLVLRPGTTIQGVNELPVTW

SEQ ID NO: 1190 - protein, 492 aa, Canis familiaris
MLLLGVLLLTVLAGARLLWGKWKLRGLHLPPLVPGCLHLLQPDLPLHLLGLTQKLGPIYRLRLGLQDVEVLNSKRTIEEAMVRKWVDFAGRPQTPSYKLVSLHHQDLSLGDYSLLWKAHKKLTRSALLLGIRSSMEPLVEQLTQEFCERMRAQAGTPVAIQKEFSLLTCAIICHLTFGNKEDTLVHTFHDCVQDLMRTWEHWSIQMLDIIPFLRFFPNPGLWRLKRALENRDHIVEKQLRQHKESMVAGQWRDMTDYMLQRVGRLRAEEGCGQLLEGHVHMSVVDLFIGGTETTATTLSWAVAFLLHHPEIQQRLQEELDRELGPGASGSRIPYRDPTRLPLLSATVAEVLRLRPVVPLALPHCTTRPNSISGYDIPEGMVVIPNLQGAHLDETVWERPQEFRPDRFLVPGASPRVLAFGCGARVCLGEPLARLELLVVLAQLLRAFTLMPAAGTLPSLRPRARCGVNLSMQPFQVQLQPRGAGVLGRGQHP

SEQ ID NO: 1191 - protein, 492 aa, Canis familiaris
MLLLGVLLLTVLAGARLLWGKWKLRGLHLPPLVPGCLHLLQPDLPLHLLGLTQKLGPIYRLRLGLQDVVVLNSKRTIEEAMVRKWVDFAGRPQTPSYKLVSLHHQDLSLGDYSLLWKAHKKLTRSALLLGIRSSMEPLVEQLTQEFCERMRAQAGTPVAIQKEFSLLTCAIICHLTFGDKEDTLVHTFHDCVQDLMRTWEHWSIQMLDIIPFLRFFPNPGLWRLKRALENRDHIVEKQLRQHKESMVAGQWRDMTDYMLQRVGRLRAEEGCGQLLEGHVHMSVVDLFIGGTETTATTLSWAVAFLLHHPEIQQRLQEELDRELGPGASGSRIPYRDPTRLPLLSATVAEVLRLRPVVPLALPHCTTRPSSISGYDIPEGMVVIPNLQGAHLDETVWERPQEFRPDRFLVPGASPRVLAFGCGARVCLGEPLARLELLVVLAQLLRAFTLMPAAGTLPSLRPRARCGVNLSMQPFQVQLQPRGAGVLGRGQHP

SEQ ID NO: 1192 - protein, 354 aa, Anabaena sp.
MEKGIQAYAQQICLITNQIASEWQIGQPFVARSAMQKLSLEVIIQIVFGLADGERYQQIKPLFTDWLNMTDSPLRSSMLFLKSLQKDWGTWTPWGQMKHKQRSIYDLLQAEIEEKRTKENEQRGDVLSLMMAARDENGQAMTDEELKDELLTILFAGHETTATTIAWAFYQILKNVNVQEKLQQELDRLGANPNPMEIAQLPYLTAVSQETLRMYPVLPTLFPRITKSSINIAGYQLEPDTTLMASIYLIHYREDLYPNPQQFRPERFIERQYSPSEYIPFGGGSRRCLGIALALLEIKLVIATVLSNYQLALAEDKPVNVQRRGFTLAPDGGVRVIMTGKKSLKFEQSSKIFN

SEQ ID NO: 1193 - protein, 395 aa, Bacillus subtilis
MTIASSTASSEFLKNPYSFYDTLRAVHPIYKGSFLKYPGWYVTGYEETAAILKDARFKVRTPLPESSTKYQDLSHVQNQMMLFQNQPDHRRLRTLASGAFTPRATESYQPYIIETVHQLLDQVQGEKKMEVISDFAFPLASFVIANIIGVPEEDREQLKEWAASLIQTIDFTRSRKVLTEGNHMAVQAMAYFKELIQKRKRHPQQDMISMLLKGKENDKLTEEEAASTCILLAIAGHETTVNLISNSVLCLLQHPEQLLKLRENPDLIGTAVEECLRYESPTQMTARVASEDIDISGVTIRQGEQVYLLLGAANRDPSIFTNPDVFDITRSPNPHLSFGHGHHVCLGSSLARLEAQIAINTFLQRMPSLKLADFEWRYRPLFGFRALEELPVTFE

SEQ ID NO: 1194 - protein, 467 aa, Arabidopsis thaliana
MDISALFLTLFAGSLFLYFLRCLISQRRFGSSKLPLPPGTMGWPYVGETFQLYSQDPNVFFQSKQKRYGSVFKTHVLGCPCVMISSPEAAKFVLVTKSHLFKPTFPASKERMLGKQAIFFHQGDYHAKLRKLVLRAFMPESIRNMVPDIESIAQDSLRSWEGTMINTYQEMKTYTFNVALLSIFGKDEVLYREDLKRCYYILEKGYNSMPVNLPGTLFHKSMKARKELSQILARILSERRQNGSSHNDLLGSFMGDKEELTDEQIADNIIGVIFAARDTTASVMSWILKYLAENPNVLEAVTEEQMAIRKDKEEGESLTWGDTKKMPLTSRVIQETLRVASILSFTFREAVEDVEYEGYLIPKGWKVLPLFRNIHHSADIFSNPGKFDPSRFEVAPKPNTFMPFGNGTHSCPGNELAKLEMSIMIHHLTTKYSWSIVGASDGIQYGPFALPQNGLPIVLARKPEIEV

SEQ ID NO: 1195 - protein, 463 aa, Arabidopsis thaliana
MDFSGLFLTLSAAALFLCLLRFIAGVRRSSSTKLPLPPGTMGYPYVGETFQLYSQDPNVFFAAKQRRYGSVFKTHVLGCPCVMISSPEAAKFVLVTKSHLFKPTFPASKERMLGKQAIFFHQGDYHSKLRKLVLRAFMPDAIRNMVPHIESIAQESLNSWDGTQLNTYQEMKTYTFNVALISILGKDEVYYREDLKRCYYILEKGYNSMPINLPGTLFHKAMKARKELAQILANILSKRRQNPSSHTDLLGSFMEDKAGLTDEQIADNIIGVIFAARDTTASVLTWILKYLADNPTVLEAVTEEQMAIRKDKKEGESLTWEDTKKMPLTYRVIQETLRAATILSFTFREAVEDVEYEGYLIPKGWKVLPLFRNIHHNADIFSDPGKFDPSRFEVAPKPNTFMPFGSGIHSCPGNELAKLEISVLIHHLTTKYRWSIVGPSDGIQYGPFALPQNGLPIALERKP

SEQ ID NO: 1196 - protein, 457 aa, Arabidopsis thaliana
MDISALFLTLFAGSLFLYFLRCLISQRRFGSSKLPLPPGTMGWPYVGETFQLYSQDPNVFFQSKQKRYGSVFKTHVLGCPCVMISSPEAAKFVLVTKSHLFKPTFPASKERMLGKQAIFFHQGDYHAKLRKLVLRAFMPESIRNMVPDIESIAQDSLRSWEGTMINTYQEMKTYTFNVALLSIFGKDEVLYREDLKRCYYILEKGYNSMPVNLPGTLFHKSMKARKELSQILARILSERRQNGSSHNDLLGSFMGDKEELTDEQIADNIIGVIFAARDTTASVMSWILKYLAENPNVLEAVTEEQMAIRKDKEEGESLTWGDTKKMPLTSRVIQETLRVASILSFTFREAVEDVEYEGYLIPKGWKVLPLFRNIHHSADIFSNPGKFDPSRFEVAPKPNTFMPFGNGTHSCPGNELAKLEMSIMIHHLTTKYRCVCVYYLLITFSFTHFVLFFQIYV

SEQ ID NO: 1197 - protein, 482 aa, Arabidopsis thaliana
MQISSSSSSNFFSSLYADEPALITLTIVVVVVVLLFKWWLHWKEQRLRLPPGSMGLPYIGETLRLYTENPNSFFATRQNKYGDIFKTHILGCPCVMISSPEAARMVLVSKAHLFKPTYPPSKERMIGPEALFFHQGPYHSTLKRLVQSSFMPSALRPTVSHIELLVLQTLSSWTSQKSINTLEYMKRYAFDVAIMSAFGDKEEPTTIDVIKLLYQRLERGYNSMPLDLPGTLFHKSMKARIELSEELRKVIEKRRENGREEGGLLGVLLGAKDQKRNGLSDSQIADNIIGVIFAATDTTASVLTWLLKYLHDHPNLLQEVSREQFSIRQKIKKENRRISWEDTRKMPLTTRVIQETLRAASVLSFTFREAVQDVEYDGYLIPKGWKVLPLFRRIHHSSEFFPDPEKFDPSRFEVAPKPYTYMPFGNGVHSCPGSELAKLEMLILLHHLTTSFRWEVIGDEEGIQYGPFPVPKKGLPIRVTPI

SEQ ID NO: 1198 - protein, 356 aa, Bradyrhizobium japonicum
MFGGTLVAQDGIAHRQARDAIQAALLPKGLTLAGIGELFAPVIRARVQRWRERGDVTILRETGDLMLKLIFSLMGIPAQDLPGWHRKYRQLLQLIVAPPVDLPGLPLRRGRAARDWIDARLREFVRAAREHASRTGLINDMVSAFDRSDDALSDDVLVANIRLLLLGGHDTTASTMAWMVIELARQPGLWDALVEEAQRVGAVPTRHADLAQCPVAEALFRETLRVHPATPLLVRRALRELRIGQQRIPTGTDLCIPLLHFSTSALLHEAPDQFRLARWLQRTEPIRPVDMLQFGTGPHFCMGYHLVWLELVQFCIALALTMHEAGVRPRLLSGVEKGRRYYPTAHPSMTIRIGFS

SEQ ID NO: 1199 - protein, 447 aa, Mesorhizobium loti
MDMLLNPLDRRHRLRDDIPVVPGAFPLVGHLPAIVCDLPRLLRRAERTLGSHFWLDFGPAGHLMTCVDPDAFALLRHKDVSSALIEEIAPELLGGTLVAQDGGAHRQARDAIKAAFLPKGLTQAGIGNLFAPVIQARVQAWRDRGDVTILRETGDLMLKLIFSLMGIPAQDLPGWHRKYRQLLQLIVAPPVDLPGLPLRRGRAARDWIDAQLRQFVRDARAHAARTGLINDMVSSFDRGDDALSDDVLVANIRLLLLAGHDTTASTMAWMVIELARQPGLWDALVEEAQRVGAVPTRHADLAQCPVAEALFRETLRVHPATTLLPRRALQELQLGQRRIPAGTPLCIPLLHFSTSALLHEAPDQFRLARWLQRTEPIRPVDMLQFGTGPHVCIGYHLVWLEMVQFCIALALTMHKAGVRPRLLSAVEKGRRYFPTAHPSMKIRIGFS

SEQ ID NO: 1200 - protein, 445 aa, Mesorhizobium loti
MLLNPLDRRHRLRDDIPVVPGAFPLVGHLPAIVCDLPRLLRRAERTLGSHFWLDFGPAGHLMTCVDPDAFALLRHKDVSSALIEEIAPELLGGTLVAQDGGAHRQARDAIKAAFLPKGLTQAGIGNLFAPVIQARVQAWRDRGDVTILRETGDLMLKLIFSLMGIPAQDLPGWHRKYRQLLQLIVAPPVDLPGLPLRRGRAARDWIDAQLRQFVRDARAHAARTGLINDMVSAFDRGDDALSDDVLVANIRLLLLAGHDTTASTMAWMVIELARQPGLWDALVEEAQRVGAVPTRHADLAQCPVAEALFRETLRVHPATTLLPRRALQELQLGQRRIPAGTHLCIPLLHFSTSALLHEAPDQFRLARWLQRTEPIRPVDMLQFGTGPHVCIGYHLVWLEMVQFCIALALTMHKAGVRPRLLSAVEKGRRYFPTAHPSMKIRIGFS

SEQ ID NO: 1201 - protein, 472 aa, Glycine max
  unsure (1)..(472): unsure at all Xaa locations
MELSTMFXXLCASFLFIVLFRALIKPYYVSSRDLPLPPGSMGWPYIGETFQMYSQDPNVFFASKIKRFGSMFKSHILGCPCVMISSPEAAKFVLNKAQLFKPTFPASKERMLGKQAIFFHQGEYHANLRRLVLRTFMPEAIKNIVPDIESIAQDCLKSWEGRLITTFLEMKTFTFNVALLSIFGKEEILYRDALKRCYYTLEQGYNSMPINVPGTLFHKAMKARKELAQIVAQIIWSRRQRKMNYKDLLGSFMDEKSGLTDDQIADNVIGVIFAARDTTASVLTWIVKYLGENPSVLEAVNEEQECILKSKEEREGLNWEDAKKMPITSRVIQETLRVASILSFTFREAVEDVEYQGYLIPKGWKVLPLFRNIHHSPDNFKEPEKFDPSRFEAAPKPNTFMPFGSGIHMCPGNELAKLEILVLLHHLTTKYRWSVVGAKNGIQYGPFALPQNGLPITLFPKXQVDITQTMAS

SEQ ID NO: 1202 - protein, 480 aa, Glycine max
  unsure (1)..(480): unsure at all Xaa locations
MELSTMFFLCASLLFIVLFFRTLIKPYYVSSRDLPLPPGSMGWPYIGETFQMYSQDPNVFFASKIKRFGSMFKSHILGCPCVMISSPEAAKFVLNKAQLFKPTFPASKERMLGKQAIFFHQGEYHANLRRLVLRTFMPEAIKNIVPDIESIAQDCLKSWEGRLITTFLEMKTFTFNVALLSIFGKEEILYRDALKRCYYTLEQGYNSMPINVPGTLFHKAMKARKELAQIVAQIISSRRQRKQDFHKDLLGSFMDEKSGLTDEQIADNVIGVIFAARDTTASVLTWIVKYLGENPSVLEAVTEEQECILKSKEESEGLNWEDAKKMPITSRVIQETLRVASILSFTFREAVEDVEYQGYLIPKGWKVLPLFRNIHHSPDNFKEPEKFDPSRFEAAPKPNTFMPFGSGIHMCPGNELAKLEILVLLHHLTTKYXXWSVVGCKDGIQYGPFXALPQNGLXPITLXSKSKXIINHTSNTTLAS

SEQ ID NO: 1203 - protein, 515 aa, Penicillium italicum
MDLVPLVTGQILGIAYYTTGLFLVSIVLNVIKQLIFYNRKEPPVVFHWIPFIGSTIAYGMDPYQFFFASRAKYGDIFTFILLGKKTTVYLGVEGNEFILNGKLKDVNAEEVYGKLTTPVFGSDVVYDCPNSKLMEQKKFIKYGLSQEALESYVPLIADETNAYIKSSPNFKGQSGTIDLAAAMAEITIFTAARTLQGEEVRSKLTSEFADLFHDLDLGFSPINFMLPWAPLPHNASAIKHTTYARDLSGNYPSATGSWRRRQRRRQDKSKGTDMISNLMRCVYRDGTPIPDKEIAHMMITLLMAGQHSSSAISCWILLRLASQPEMAEKLHAEQIKNLGADLPPLQYKDMDKLPLLRNVIKETLRLHSSIHTLMRKVKNPMPVPGTDFVVPPSHTLLSSPGVTARDERHFRDPLRWDPHRWESRVEVEDSSDTVDYGYGAVSKGTRSPYLPFGAGRHRCIGEKFAYLNLEVIVATLVREFRFFNPEGMEGVPDTDYSSLFSRPVQPATVRWEVRS

SEQ ID NO: 1204 - protein, 495 aa, Catharanthus roseus
LLFCFILSKTTKKFGQNSQYSNHDELPPGPPQIPILGNAHQLSGGHTHHILRDLAKKYGPLMHLKIGEVSTIVASSPQIAEEIFRTHDILFADRPSNLESFKIVSYDFSDMVVSPYGNYWRQLRKISMMELLSQKSVQSFRSIREEEVLNFIKSIGSKEGTRINLSKEISLLIYGITTRAAFGEKNKNTEEFIRLLDQLTKAVAEPNIADMFPSLKFLQLISTSKYKIEKIHKQFDVIVETILKGHKEKINKPLSQENGEKKEDLVDVLLNIQRRNDFEAPLGDKNIKAIIFNIFSAGTETSSTTVDWAMCEMIKNPTVMKKAQEEVRKVFNEEGNVDETKLHQLKYLQAVIKETLRLHPPVPLLLPRECREQCKIKGYTIPSKSRVIVNAWAIGRDPNYWIEPEKFNPDRFLESKVDFKGNSFEYLPFGGGRRICPGITFALANIELPLAQLLFHFDWQSNTEKLNMKESRGVTVRREDDLYLTPVNFSSSSPA

SEQ ID NO: 1205 - protein, 476 aa, Oryza sativa
SEQAPMGAFLLFVCVLAPFLLVCAVRGRRRQAGSSEAAACGLPLPPGSMGWPYVGETFQLYSSKNPNVFFNKKRNKYGPIFKTHILGCPCVMVSSPEAARFVLVTQAHLFKPTFPASKERMLGPQAIFFQQGDYHAHLRRIVSRAFSPESIRASVPAIEAIALRSLHSWDGQFVNTFQEMKTYALNVALLSIFGEEEMRYIEELKQCYLTLEKGYNSMPVNLPGTLFHKAMKARKRLGAIVAHIISARRERQRGNDLLGSFVDGREALTDAQIADNVIGVIFAARDTTASVLTWMVKFLGDHPAVLKAVTEEQLQIAKEKEASGEPLSWADTRRMKMTSRVIQETMRVASILSFTFREAVEDVEYQGYLIPKGWKVLPLFRNIHHNPDHFPCPEKFDPSRFEVAPKPNTFMPFGNGTHSCPGNELAKLEMLVLFHHLATKYRWSTSKSESGVQFGPFALPLNGLPMSFTRKNTEQE

SEQ ID NO: 1206 - protein, 123 aa, Triticum aestivum
  unsure (1)..(123): unsure at all Xaa locations
QKRREPFVGMAAFILFLCLLVPLVLACAIRARKGGSSSLPLPPGSMGWPYVGETTQLYSSKNPNVFFARKRNKYGPIFKTHILGCPCVMVSSPEAAKFVLVTQAHLFKPTFPASKERMLGPQX

SEQ ID NO: 1207 - protein, 526 aa, Leptosphaeria maculans
MAVLATVAGPLGDFTAKSSNFVLAITGFASFILVAVVLNVLKQLLFKKANEPPVVFHWLPIIGSTVTYGMDPYAFFFRNQKKYGNVFTFILLGRKMTVCLDTTGNNFILNGKIKDVNAEEIYSPLTTPVFGKDVVYDCPNSKLMEQKKFVKFGLTQEALRSYVVIITQETEDFLKRHKAFKGQKGTFDVTKVMAELTIYTASRSLQGEEIRRSFDSKFAELYHDLDMGFSPVNFMLSWAPLPHNRARDHARETMIELYSNIVRKRRAGVAKDSHDMIWHLMDCKYKDGTPVPEHEIAGIMIALLMAGQHSSSSTIAWILLRLAQNPHIIEELFEEQNTVLGADLPALTYEDLQKLPLHAQVVKETLRIHAPIHSIMRRVKQPLVVDGTNFVVPTSHTLMSSPGFSAQLDSHFANPSHWDPHRWDAGNSQYDEEADEKDDEKIDYGWGVVSKGTNSPYLPFGAGRHRCIGEQFAYLQLQTILVAFVREFKLRNVGGSRDIIGTDYTSLFSRPLAPGIIEWERREKVE

SEQ ID NO: 1208 - protein, 150 aa, Litopenaeus setiferus
DTFMFEGHDTTAAAINWSLYLIGSNPEIQARVHEELDSIFGGSDRPITMADLREMKLTENCIKEALRLFPSVPFLARELKEDAVIDDYRIPSGTTATVVTYCLHRDPEQFPNPEVYDPDRFLPENCKSRHPYAYVPFSAGPRNCIRPENR

SEQ ID NO: 1209 - protein, 149 aa, Haliotis rufescens
DTFMFEGHDTTAAAINWSLYLLGSSPEIQARVHEEIDAIFGDSDRPITMNDLRELKLTENCIKEALRLFPSVPFLARELKEDAVINNYRVPSGTTVMVVTYRLHRDPEQFPNPEVFDPDRFLPENIKNRPPYAYVPFSAGPRNCIGQKI

SEQ ID NO: 1210 - protein, 490 aa, Ictalurus punctatus
MLGSWLLVVFCVCLLFLFIRIQRPKNFPPGPRPIPIFGNLFQFNIKNPLKDFEKLAEQYGNICSLYIGTKPAVVLNGLKVIREALVTKSADFSGRPQNMLKDVTEGKGIVIADYGRQWKEHRRFALMTLRNFGLGKQSMENRILGEIEHLVAKLEKYAGSSMYPQTLFHDAASNIIYLVLFGTRYDYGDETLKVYVRLYSENAKLANGTWSIIYDALPILRSLPLPFKKAFDNYSTLKILTANMINKHRTTRVPGKPRDLVDCYLDEIDKKDNESTFSEEQLVVYIMNLHIAGTDTTSNTLLTSILYLMAHPDIQKRCQKEIDVVLEGNSQPSFEDRHNMPYTQAVVHECQRIARTVPLSVFHCTTRDTELMGYTIPKGTMIIPNLSSVLSEEGQWKFPHDFNPSNFLNEQGQFEKPEAFIPFSAGPRVCLGEGLARMELFLFLVTLLRRFQFIWPEDAGEPDFTPIFGLTLTPKPYRMGVKLRQPAREK

SEQ ID NO: 1211 - protein, 980 aa, Malus floribunda
MERTMRVVILLTRFLAIATITFSIGLCNGNPGWPPLCKVSERRALLMFKQDLKDPVNRLASWVAEEDSDCCSWTGVVCDHVTGHIHELHLNSSYSDWEFNSFFGGKINPSLLSLKHLNYLDLSNNDFNGTQIPSFFGSMTSLTHLNLAYSELYGIIPHKLGNLSSLRYLNLSSFYGSNLKVENLQWISGLSLLKHLDLSSVNLSKASDWLQVTNMLPSLVELDMSDCELDQIPPLPTPNFTSLVVLDLSRNSFNCLMPRWVFSLKNLVSLHLSFCGFQSPIPSISQNITSLREIDLSFNSISLDPIPKLLFTQKILELSLESNQLTGQLPRSIQNMTGLTTLNLGGNEFNSTIPEWLYSLNNLESLLLFGNALRGEISSSIGNLKSLRHFDLSSNSISGPIPMSLGNLSSLEKLYISENHFNGTFTEVIGQLKMLTDLDISYNSLEGVVSEISFSNLIKLKHFVAKGNSFTLKTSRDWVPPFQLEILKLDSWHLGPEWPMWLRTQTQLKELSLSGTGISSTIPTWFWNLTFHVQYLNLSHNQLYGQIQNIVAGPSSAVDLSSNQFTGALPIVPTSLMWLDLSNSSFSGSVFHFFCDRPDEPKQLGILRLGNNFLTGKVPDCWMSWPSLAFLNLENNNLTGNVPMSMGYLDWLESLHLRNNHLYGELPHSLQNCTSLSVVDLSENGFSGSIPIWIGKSLSGLNVLNLRSNKFEGDIPNEVCYLKSLQILDLAHNKLSGMIPRCFHNLSAMANFSQSFSPTSFWGMVASGLTENAILVTKGMEMEYTKILGFVKGMDLSCNFMYGEIPEELTGLLALQYLNLSNNRFTGRIPSKIGSMAQLESLDFSMNQLDGEIPPSMTILTFLSHLNLSYNNLTGRIPESTQLQSLDQSSFVGNELCGAPLNKNCSENGVIPPPTVEHDGGGGYSLVEDEWFYVSLGVGFFTGFWIVLGSLLVNMPWSILLSQLLNRIVLKMYHVIVEYV

SEQ ID NO: 1212 - protein, 915 aa, Malus floribunda
MERTMRVVILLTRFLAIATITFSIGLCNGNPGWPPLCKESERQALLMFKQDLKDPTNRLASWVAEEDSDSDCCSWTGVVCDHTTGHIHELHLNNTDPFLDLKSSFGGKINPSLLSLKHLNFLDLSNNYFYPTQIPSFFGSMTSLTHLNLAYSRFGGIIPHKLGNLSSLRYLNLSSNSIYLKVENLQWISGLSLLKHLDLSGVNLSKASDWLQVTNMLPSLVKLIMSDCQLYQIPPLPTTNFTSLVVLDLSFNNFNSLMPRWVFSLKNLVSIHLSDCGFQGPIPSISQNITYLREIDLSDNNFTVQRPSEIFESLSRCGPDGIKSLSLRNTNVSGHIPMSLRNLSSLEKLDISVNQFNGTFTEVIGQLKMLTYLDISYNSLESAMSEVTFSNLTKLKNFVAKGNSLTLKTSRDWVPPFQLEILHLDSWHLGPKWPMWLRTQTQLKELSLSGTGISSTIPTWFWNLTSQVEYLNLSRNQLYGQIQNIVAGPSSVVDLSSNQFTGALPIVPTSLFFLDLSRSSFSESVFHFFCDRPDEPKQLSVLNLGNNLLTGKVPDCWMSWQHLRFLNLENNNLTGNVPMSMGYLQYLGSLHLRNNHLYGELPHSLQNCTWLSVVDLSENGFSGSIPIWIGKSLSGLNVLNLRSNKFEGDIPNEVCYLKSLQILDLAHNKLSGMIPRCFHNLSALADFSESFYPTSYWGTNWSELSENAILVTKGIEMEYSKILGFVKVMDLSCNFMYGEIPEELTGLLALQSLNLSNNRFTGRIPSNIGNMAWLESLDFSMNQLDGEIPPSMTNLTFLSHLNLSYNNLTGRIPESTQLQSLDQSSFVGNKLCGAPLNKNCSTNGVIPPPTVEQDGGGGYRLLEDEWFYVSLGVGFFTGFWIVLGSLLVNMPWSILLSQLLNRIVLKMYHVIVEYV

SEQ ID NO: 1213 - protein, 1015 aa, Malus floribunda
MERTMRVVILLIRFLAIATITFSIGLSNGNPSWPPLCKESERQALLIFKQDLKDPANRLASWVAEEDSNCCSWTGVVCDHITGHIHELHLNNSDSHWDFESFFGGKINPSLLSLKHLNFLDLSYNNFEGTQIPSFFGSMTSLTHLNLGFSWFDGVIPHNLGNLSSLRYLYLSSFYNSNLKAENLQWISGLSLLKHLDLSYVNLSKASDWLQVTNMLPSLVELDMSGCQLDQIPPLPTPNFTSLVVLDLSENFFNSLMPRWVFSLKNLVSLHLRFCGFQGPIPSISQNITSLREIDLSENSISLDPIPKWLFNQKDLALSLKSNQLTGQLPSSFQNMTGLKVLNLESNYFNSTIPKWLYGLNNLESLLLSYNALRGEISSSIGNMTSLVNLNLENNQLQGKIPNSLGHLCKLKVVDLSENHFTVRRPSEIFESLSGCGPDGIKSLSLRYTNISGPIPMSLGNLSSLEKLDISGNHFNGTFTEVIGQLKMLTDLDISYNWFEGVVSEISFSNLTKLKHFVAKGNSFTLKTSRDWVPPFQLETLRLDSWHLGPKWPMWLRTQTQLKELSLSGTGISSTIPTWFWNLTFHVWYLNLSHNQLYGQIQNIVAGRSVVDLGSNQFTGALPIVPTSLVWLDLSNSSFSGSVFHFFCDRPDETKLLYILHLGNNFLTGKVPDCWMSWPQLGFVNLENNNLTGNVPMSMGELPHSLQNCTMLSFVDLSENGFSGSIPIWIGKSLSWLYVLNLRSNKFEGDIPNEVCYLQSLQILDLAHNKLSGMIPRCFHNLSALANFSESFFPFITGNTDGEFWENAILVTKGTEMEYSKILGFVKGMDLSCNFMYGEIPKELTGLLALQSLNLSNNRFTGRIPSKIGNMAQLESLDFSMNQLDGEIPPSMTNLTFLSHLNLSYNNLTGRILESTQLQSLDQSSFVGNELCGAPLNKNCSENGVIPPPTVEHDGGGGYRLLEDEWFYVTLGVGFFTGFWIVLGSLLVNMPWSILLSQLLNRIVLKMYHVIVEYV

SEQ ID NO: 1214 - protein, 633 aa, Leptospira interrogans serovar lai str. 56601
MNFRITLIYLQKITIGLLFLITLSCEIQAEAPEDEPGTYRDLTEALQNPLNVRVLNLSGQNFTTLPKEIEQLKNLQELDLGDNQLATFPAVIVELQKLESLDLSENRLVMLPNEIGRLQNLQELGLYKNKLITFPKEIGQLQNLQTLNLQDNQLATLPVEIGQLQNLEKLNLRKNRLTVLPKEIGQLQNLQTLNLQDNQLATLPVEIGQLQNLQTLGLSENQLTTFPKEIGQLENLQELNLKWNRLTALPKEIGQLKNLENLELSENQLTTFPKEIGQLKKLRDLGLGRNQLTTFPKEIGQLKNLQMLDLCYNQFKTVSKEIGQLKNLLQLNLSYNQLATLPAEIGQLKKLQDLSLGRNQLTTLPKEIGQLKNLYNLDLGTNQLTTLPKEIGQLKNLYNLGLGRNQLATFPKEIGQLENLQELDLWNNRLTALPKEIGQLKNLENLELSENQLTTFPKEIGQLKKLQDLGLSYNRLVILPKEIGQLEKLQDLGLSYNRLVILPKEIGQLKNLQMLDLCYNQFKTVSKEIGQLKNLLQLNLSYNQLATLPAEIGQLKNLYNLDLGTNQLTTLPKEIGQLKNLYNLGLGTNQLTTLPKEIGQLKKLQWLLLSVNPILPQEKERIRKLLPNCEIRF

SEQ ID NO: 1215 - protein, 1192 aa, Arabidopsis thaliana
MAFLTALFLFLFFSFSSSAIVDLSSETTSLISFKRSLENPSLLSSWNVSSSASHCDWVGVTCLLGRVNSLSLPSLSLRGQIPKEISSLKNLRELCLAGNQFSGKIPPEIWNLKHLQTLDLSGNSLTGLLPRLLSELPQLLYLDLSDNHFSGSLPPSFFISLPALSSLDVSNNSLSGEIPPEIGKLSNLSNLYMGLNSFSGQIPSEIGNISLLKNFAAPSCFFNGPLPKEISKLKHLAKLDLSYNPLKCSIPKSFGELHNLSILNLVSAELIGLIPPELGNCKSLKSLMLSFNSLSGPLPLELSEIPLLTFSAERNQLSGSLPSWMGKWKVLDSLLLANNRFSGEIPHEIEDCPMLKHLSLASNLLSGSIPRELCGSGSLEAIDLSGNLLSGTIEEVFDGCSSLGELLLTNNQINGSIPEDLWKLPLMALDLDSNNFTGEIPKSLWKSTNLMEFTASYNRLEGYLPAEIGNAASLKRLVLSDNQLTGEIPREIGKLTSLSVLNLNANMFQGKIPVELGDCTSLTTLDLGSNNLQGQIPDKITALAQLQCLVLSYNNLSGSIPSKPSAYFHQIEMPDLSFLQHHGIFDLSYNRLSGPIPEELGECLVLVEISLSNNHLSGEIPASLSRLTNLTILDLSGNALTGSIPKEMGNSLKLQGLNLANNQLNGHIPESFGLLGSLVKLNLTKNKLDGPVPASLGNLKELTHMDLSFNNLSGELSSELSTMEKLVGLYIEQNKFTGEIPSELGNLTQLEYLDVSENLLSGEIPTKICGLPNLEFLNLAKNNLRGEVPSDGVCQDPSKALLSGNKELCGRVVGSDCKIEGTKLRSAWGIAGLMLGFTIIVFVFVFSLRRWAMTKRVKQRDDPERMEESRLKGFVDQNLYFLSGSRSREPLSINIAMFEQPLLKVRLGDIVEATDHFSKKNIIGDGGFGTVYKACLPGEKTVAVKKLSEAKTQGNREFMAEMETLGKVKHPNLVSLLGYCSFSEEKLLVYEYMVNGSLDHWLRNQTGMLEVLDWSKRLKIAVGAARGLAFLHHGFIPHIIHRDIKASNILLDGDFEPKVADFGLARLISACESHVSTVIAGTFGYIPPEYGQSARATTKGDVYSFGVILLELVTGKEPTGPDFKESEGGNLVGWAIQKINQGKAVDVIDPLLVSVALKNSQLRLLQIAMLCLAETPAKRPNMLDVLKALKEI

SEQ ID NO: 1216 - protein, 1192 aa, Arabidopsis thaliana
MAFLTALFLFLFFSFSSSAIVDLSSETTSLISFKRSLENPSLLSSWNVSSSASHCDWVGVTCLLGRVNSLSLPSLSLRGQIPKEISSLKNLRELCLAGNQFSGKIPPEIWNLKHLQTLDLSGNSLTGLLPSRLSELPELLYLDLSDNHFSGSLPLSFFISLPALSSLDVSNNSLSGEIPPEIGKLSNLSNLYMGLNSFSGQIPSEIGNTSLLKNFAAPSCFFNGPLPKEISKLKHLAKLDLSYNPLKCSIPKSFGELQNLSILNLVSAELIGSIPPELGNCKSLKSLMLSFNSLSGPLPLELSEIPLLTFSAERNQLSGSLPSWIGKWKVLDSLLLANNRFSGEIPREIEDCPMLKHLSLASNLLSGSIPRELCGSGSLEAIDLSGNLLSGTIEEVFDGCSSLGELLLTNNQINGSIPEDLWKLPLMALDLDSNNFTGEIPKSLWKSTNLMEFTASYNRLEGYLPAEIGNAASLKRLVLSDNQLTGEIPREIGKLTSLSVLNLNANMFQGKIPVELGDCTSLTTLDLGSNNLQGQIPDKITALAQLQCLVLSYNNLSGSIPSKPSAYFHQIDMPDLSFLQHHGIFDLSYNRLSGPIPEELGECLVLVEISLSNNHLSGEIPASLSRLTNLTILDLSGNALTGSIPKEMGNSLKLQGLNLANNQLNGHIPESFGLLGSLVKLNLTKNKLDGPVPASLGNLKELTHMDLSFNNLSGELSSELSTMEKLVGLYIEQNKFTGEIPSELGNLTQLEYLDVSENLLSGEIPTKICGLPNLEFLNLAKNNLRGEVPSDGVCQDPSKALLSGNKELCGRVVGSDCKIEGTKLRSAWGIAGLMLGFTIIVFVFVFSLRRWVMTKRVKQRDDPERIEESRLKGFVDQNLYFLSGSRSREPLSINIAMFEQPLLKVRLGDIVEATDHFSKKNIIGDGGFGTVYKACLPGEKTVAVKKLSEAKTQGNREFMAEMETLGKVKHPNLVSLLGYCSFSEEKLLVYEYMVNGSLDHWLRNQTGMLEVLDWSKRLKIAVGAARGLAFLHHGFIPHIIHRDIKASNILLDGDFEPKVADFGLARLISACESHISTVIAGTFGYIPPEYGQSARATTKGDVYSFGVILLELVTGKEPTGPDFKESEGGNLVGWAIQKINQGKAVDVIDPLLVSVALKNSQLRLLQIAMLCLAETPAKRPNMLDVLKALKEI

SEQ ID NO: 1217 - protein, 647 aa, Brassica napus
MSSAPSPGTGSPPSPPSNSTTTTPPPASAPPPTTPSSPPPPSTIPTSPPPSSRSTPSAPPPSPPTPSTPGSPPPLPQPSPPAPTTPGSPPAPVTPPTRNPPPSVPGPPSNPSREGGSPRPPSSPSPPSPSSDGLSTGVVVGIAIGGVALLVIVTLICLLCKKKRRRDEEDAYYVPPPPPPGPKAGGPYGGQQQQWRQQNATPPSDHVVTSLPPPPKAPSPPRQPPPPPPPPFMSSSGGSDYSDRPVLPPPSPGLVLGFSKSTFTYEELARATNGFSEANLLGQGGFGYVHKGVLPSGKEVAVKQLKVGSGQGEREFQAEVEIISRVHHRHLVSLVGYCIAGAKRLLVYEFVPNNNLELHLHGEGRPTMEWSTRLKIALGSAKGLSYLHEDCNPKIIHRDIKASNILIDFKFEAKVADFGLAKIASDTNTHVSTRVMGTFGYLAPEYAASGKLTEKSDVFSFGVVLLELITGRRPVDANNVYVDDSLVDWARPLLNRASEQGDFEGLADAKMNNGYDREEMARMVACAAACVRHSARRRPRMSQIVRALEGNVSLSDLNEGMRPGQSNVYSSYGGSTDYDSSQYNEDMKKFRKMALGTQEYNATGEYSNPTSDYGLYPSGSSSEGQTTREMEMGKIKRTGQGYSGPSL

SEQ ID NO: 1218 - protein, 999 aa, Malus x domestica
MLLFLPLLLLLLLPPLPTTLSLNQEGLYLRHFKLSLDDPDSALSSWNYADSTPCNWLGVTCDDASSSSPVVRSLDLPSANLAGPFPTVLCRLPNLTHLSLYNNSINSTLPPSLSTCQTLEDLDLAQNLLTGALPATLPDLPNLKYLDLSGNNFSGAIPDSFGRFQKLEVLSLVYNLIENTIPPFLGNISTLKMLNLSYNPFHPGRIPAELGNLTNLEVLRLTECNLVGEIPDSLGRLKNLKDLDLAINGLTGRIPPSLSELTSVVQIELYNNSLTGELPPGMSKLTRLRLLDASMNQLSGQIPDELCRLPLESLNLYENNLEGSVPASIANSPNLYEVRLFRNKLSGELPQNLGKNSPLKWFDVSSNQFTGTIPASLCEKGQMEEILMLHNEFSGEIPARLGECQSLARVRLGHNRLSGEVPVGFWGLPRVYLMELAENELSGPIAKSIARATNLSLLILAKNKFSGPIPEEIGWVENLMEFSGGDNKFSGPLPESIVRLGQLGTLDLHSNEVSGELPVGIQSWTNLNELNLASNQLSGKIPDGIGNLSVLNYLDLSGNRFSGKIPFGLQNMKLNVFNLSYNQLSGELPPLFAKEIYRNSFLGNPGLCGDLDGLCDSRAEVKSQGYIWLLRCMFILSGLVFVVGVVWFYLKYKNFKKVNRTIDKSKWTLMSFHKLGFSEYEILDCLDEDNVIGSGASGKVYKVVLNSGEVVAVKKLWRRKVKECEVEDVEKGWVQDDGFEAEVDTLGKIRHKNIVKLWCCCTARDCKLLVYEYMQNGSLGDLLHSSKGGLLDWPTRFKIALDAAEGLSYLHHDCVPAIVHRDVKSNNILLDGDFGARVADFGVAKEVDATGKGLKSMSIIAGSCGYIAPEYAYTLRVNEKSDIYSFGVVILELVTGRLPVDPEFGEKDLVKWVCTTLDQKGVDNVVDPKLESCYKEEVCKVLNIGLLCTSPLPINRPSMRRVVKLLQEVGTEKHPQAAKKEGKLTPYYYEDTSDHGSVA

SEQ ID NO: 1219 - protein, 976 aa, Pisum sativum
MKSITCYLLVFFCVLFTPCFSITDLDALLKLKESMKGEKSKHPDSLGDWKFSASGSAHCSFSGVTCDQDNRVITLNVTQVPLFGRISKEIGVLDKLERLIITMDNLTGELPFEISNLTSLKILNISHNTFSGNFPGNITLRMTKLEVLDAYDNSFTGHLPEEIVSLKELTILCLAGNYFTGTIPESYSEFQKLEILSINANSLSGKIPKSLSKLKTLKELRLGYNNAYDGGVPPEFGSLKSLRYLEVSNCNLTGEIPPSFGNLENLDSLFLQMNNLTGIIPPELSSMKSLMSLDLSNNALSGEIPESFSNLKSLTLLNFFQNKFRGSIPAFIGDLPNLETLQVWENNFSFVLPQNLGSNGKFIFFDVTKNHLTGLIPPDLCKSKKLQTFIVTDNFFHGPIPKGIGACKSLLKIRVANNYLDGPVPQGIFQMPSVTIIELGNNRFNGQLPSEVSGVNLGILTISNNLFTGRIPASMKNLISLQTLWLDANQFVGEIPKEVFDLPVLTKFNISGNNLTGVIPTTVSQCRSLTAVDFSRNMITGEVPRGMKNLKVLSIFNLSHNNISGLIPDEIRFMTSLTTLDLSYNNFTGIVPTGGQFLVFNDRSFFGNPNLCFPHQSSCSSYTFPSSKSHAKVKAIITAIALATAVLLVIATMHMMRKRKLHMAKAWKLTAFQRLDFKAEEVVECLKEENIIGKGGAGIVYRGSMPNGTDVAIKRLVGQGSGRNDYGFKAEIETLGRIRHRNIMRLLGYVSNKDTNLLLYEYMPNGSLGEWLHGAKGCHLSWEMRYKIAVEAGKGLCYLHHDCSPLIIHRDVKSNNILLDADFEAHVADFGLAKFLYDPGASQSMSSIAGSYGYIAPEYAYTLKVDEKSDVYSFGVVLLELIIGRKPVGEFGDGVDIVGWINKTELELYQPSDKALVSAVVDPRLTGYPMASVIYMFNIAMMCVKEMGPARPTMREVVHMLTNPPQSTTHNNLINL

SEQ ID NO: 1220 - protein, 1344 aa, Oryza sativa (indica cultivar-group)
MSQHYTKTICIAVVLVAVLFSLSSSAAAGSGAAVSVQLEALLEFKNGVADDPLGVLAGWRVGKSGDGAVRGGALPRHCNWTGVACDGAGQVTSIQLPESKLRGALSPFLGNISTLQVIDLTSNAFAGGIPPQLGRLGELEQLVVSSNYFAGGIPSSLCNCSAMWALALNVNNLTGAIPSCIGDLSNLEIFEAYLNNLDGELPPSMAKLKGIMVVDLSCNQLSGSIPPEIGDLSNLQILQLYENRFSGHIPRELGRCKNLTLLNIFSNGFTGEIPGELGELTNLEVMRLYKNALTSEIPRSLRRCVSLLNLDLSMNQLAGPIPPELGELPSLQRLSLHANRLAGTVPASLTNLVNLTILELSENHLSGPLPASIGSLRNLRRLIVQNNSLSGQIPASISNCTQLANASMSFNLFSGPLPAGLGRLQSLMFLSLGQNSLAGDIPDDLFDCGQLQKLDLSENSFTGGLSRRVGQLGNLTVLQLQGNALSGEIPEEIGNLTKLISLKLGRNRFAGHVPASISNMSSLQLLDLGHNRLDGMFPAEVFELRQLTILGAGSNRFAGPIPDAVANLRSLSFLDLSSNMLNGTVPAALGRLDQLLTLDLSHNRLAGAIPRRATCRCTSTCRTTRSRARSPAEIGGLVMVQTIDLSNNQLSGGVPATLAGCKNLYSLDLSGNSLTGELPANLFPQLDLLTTLNISGNDLDGEIPADIAALKHIQTLDVSRNAFAGAIPPALANLTALRSLNLSSNTFEGPVPDGGVFGNLTMSSLQGNAGLCGGKLLVPCHGHAAGNKRVFSRTGLVILVVLIALSTLLLLMVATILLIGYRRYRRKRRAAGIAGDSSEAAVVVPELRRFSYGQLAAATNSFDQGNVIGSSNLSTVYKGVLAGDADGGMVVAVKRLNLEQFPSKSDKCFFTELATLSRLRHKNLARVVGYAWEAGKIKALVLDYMVNGDLDGAIHGGAAAPPTAPSRWTVRERLRVCVSVAHGLVYLHSGYDFPVVHCDVKPSNVLLDGDWEARVSDFGTARMLGVHLPAAADAAAQSTATSSAFRGTVGYMAPVISELKTSNSVLKKFRVRVHEDGVDEGGRVQLRGAGDGALHRAAADGDDRGGRRAADAAAAGRQRGLEGARRRPRRPGPPHEGRHRGRPVHGGGRARRCPVLRRVRAGRPARHGRCALVLAQDEQARRRRLNKKKKKRKAKLSLQFCRMQQRKHSSQNFHVYCAIVKSSAILHNAAVKTCKFLGRFRVQFMMIWFFEFFALRTFSIDEVYYLFATVHGQGSVRHGSEVVPKFLPFDPPKTFRAATYLYAQALQVRMEAERLKDSTELKTIYYSSCMSANKSGELITNMLT

SEQ ID NO: 1221 - protein, 1420 aa, Oryza sativa (japonica cultivar-group)
MLSIASRSPSPALIAPHASARATGLRAPFAGNRIVGWGWGDQTKSGTDRNRASICVVLFLRVRSGEPTQAPRDPPAAVGGGGCYVRLPAPPRDRDAVLSFLVPVSKPAYHVCLFTLLLCFIPITALAESDIKNLFALRKAIAVGKGFLHNWFELETPPCNWSGISCVGLTVVAIDLSSTPLYVDFPSQIIAFQSLVRLNVSGCGFSGELPEAMVNLQHLQHLDLSDNQLGGPLPASLFDLKMLKVMVLDNNMFSGQLSPAIAHLQQLTVLSISTNSFSGGLPPELGSLKNLEYLDIHTNAFSGSIPASFSNLSRLLYLDANNNNLTGSIFPGIRALVNLVKLDLSSNGLVGAIPKELCQLKNLQSLILSDNELTGSIPEEIGNLKQLEVLNLLKCNLMDTVPLSIGNLEILEGLYISFNSFSGELPASVGELRNLRQLMAKSAGFTGSIPKELGNCKKLTTLVLSGNNFTGTIPEELADLVAVVLFDVEGNRLSGHIPDWIQNWSNVSSISLAQNMFDGPLPGLPLHLVSFSAESNRLSGSIPAKICQGTFLQILRLNDNNLTGSIDETFKGCKNLTELSLLDNHLHGEIPEYLALLPLVSLDLSHNNFTGMIPDRLWESSTILDISLSDNQLTGMITESIGKLLSLQSLSIDRNYLQGPLPRSIGALRNLTALSLSGNMLSEDIPIQLFNCRNLVTLDLSCNNLTGHIPKAISHLTKLNTLVLSRNRLSGAIPSELCVAFSRESHSELEYVQHIGLIDLSRNRLTGHIPRAINNCSILVELHLQDNLLSGTIPVELAELRNITTIDLSSNALVGPVLPWPVPLASLQGLLLSNNRLSGSIPSGIGNILPQITMLDLSGNALTGTLPLDLLCKESLNHLDVSDNNISGQIPFSCHEDKESPIPLIFFNASSNHFSGSLDESISNFTKLTYLDLHNNSLTGRLPSAIARVTSLYYLDLSSNDFSGTIPCGICGMFGLTFANFSGNRDGGTFTLADCAAEEGGVCAANRVDRKMPDHPFHVLEATICCIATAIVIVLVVILVVYLRRRRKMLRRRQFVLVPAGDNAMADHETTLSNNLLGRRRMKKREPPSINLATFEHAPVRVTVDEIMRATGNFDGMHVVGDGGFGTVYRAELPGGRRVAVKRLHGVGRRFQGGEREFRAEMETVGKVRHPNLVPLLGYCAAGDERFLVYEYMEHGSLEDRLRGGGGAALGWPERLTICGGAARGLAFLHHGFVPHVIHRDVKSSNVLLGEGLQPRVSDFGLARIISACETHVSTVLAGTLGYIPPEYALAMRCTAKGDVYSFGVVMLELLTGRPPTWSSAEVTAEGDDERGGGGSLVGWVRWMAARGRGGEVFDACLPVSGAEREQMARVLDVARDCTADEPWRRPTMAEVARRVGAIEAMEYGPLVVAVSSGEPPAMP

SEQ ID NO: 1222 - protein, 1294 aa, Oryza sativa (japonica cultivar-group)
MVSNSFWLFILLVSFIPISAWAESRDISTLFTLRDSITEGKGFLRNWFDSETPPCSWSGITCIGHNVVAIDLSSVPLYAPFPLCIGAFQSLVRLNFSGCGFSGELPEALGNLQNLQYLDLSNNELTGPIPISLYNLKMLKEMVLDYNSLSGQLSPAIAQLQHLTKLSISMNSISGSLPPDLGSLKNLELLDIKMNTFNGSIPATFGNLSCLLHFDASQNNLTGSIFPGITSLTNLLTLDLSSNSFEGTIPREIGQLENLELLILGKNDLTGRIPQEIGSLKQLKLLHLEECQFTGKIPWSISGLSSLTELDISDNNFDAELPSSMGELGNLTQLIAKNAGLSGNMPKELGNCKKLTVINLSFNALIGPIPEEFADLEAIVSFFVEGNKLSGRVPDWIQKWKNARSIRLGQNKFSGPLPVLPLQHLLSFAAESNLLSGSIPSHICQANSLHSLLLHHNNLTGTIDEAFKGCTNLTELNLLDNHIHGEVPGYLAELPLVTLELSQNKFAGMLPAELWESKTLLEISLSNNEITGPIPESIGKLSVLQRLHIDNNLLEGPIPQSVGDLRNLTNLSLRGNRLSGIIPLALFNCRKLATLDLSYNNLTGNIPSAISHLTLLDSLILSSNQLSGSIPAEICVGFENEAHPDSEFLQHHGLLDLSYNQLTGQIPTSIKNCAMVMVLNLQGNLLNGTIPVELGELTNLTSINLSFNEFVGPMLPWSGPLVQLQGLILSNNHLDGSIPAKIGQILPKIAVLDLSSNALTGTLPQSLLCNNYLNHLDVSNNHLSGHIQFSCPDGKEYSSTLLFFNSSSNHFSGSLDESISNFTQLSTLDIHNNSLTGRLPSALSDLSSLNYLDLSSNNLYGAIPCGICNIFGLSFANFSGNYIDMYSLADCAAGGICSTNGTDHKALHPYHRVRRAITICAFTFVIIIVLVLLAVYLRRKLVRSRPLAFESASKAKATVEPTSTDELLGKKSREPLSINLATFEHALLRVTADDILKATENFSKVHIIGDGGFGTVYKAALPEGRRVAIKRLHGGHQFQGDREFLAEMETIGKVKHPNLVPLLGYCVCGDERFLIYEYMENGSLEMWLRNRADALEALGWPDRLKICLGSARGLAFLHHGFVPHIIHRDMKSSNILLDENFEPRVSDFGLARIISACETHVSTDIAGTFGYIPPEYGLTMKSTTKGDVYSFGVVMLELLTGRPPTGQEEVQGGGNLVGWVRWMIARGKQNELFDPCLPVSSVWREQMARVLAIARDCTADEPFKRPTMLEVVKGLKMTHGMECGPLVVTVSRDM

SEQ ID NO: 1223 - protein, 1021 aa, Daucus carota
MGVLRVYVILILVGFCVQIVVVNSQNLTCNSNDLKALEGFMRGLESSIDGWKWNESSSFSSNCCDWVGISCKSSVSLGLDDVNESGRVVELELGRRKLSGKLSESVAKLDQLKVLNLTHNSLSGSIAASLLNLSNLEVLDLSSNDFSGLFPSLINLPSLRVLNVYENSFHGLIPASLCNNLPRIREIDLAMNYFDGSIPVGIGNCSSVEYLGLASNNLSGSIPQELFQLSNLSVLALQNNRLSGALSSKLGKLSNLGRLDISSNKFSGKIPDVFLELNKLWYFSAQSNLFNGEMPRSLSNSRSISLLSLRNNTLSGQIYLNCSAMTNLTSLDLASNSFSGSIPSNLPNCLRLKTINFAKIKFIAQIPESFKNFQSLTSLSFSNSSIQNISSALEILQHCQNLKTLVLTLNFQKEELPSVPSLQFKNLKVLIIASCQLRGTVPQWLSNSPSLQLLDLSWNQLSGTIPPWLGSLNSLFYLDLSNNTFIGEIPHSLTSLQSLVSKENAVEEPSPDFPFFKKKNTNAGGLQYNQPSSFPPMIDLSYNSLNGSIWPEFGDLRQLHVLNLKNNNLSGNIPANLSGMTSLEVLDLSHNNLSGNIPPSLVKLSFLSTFSVAYNKLSGPIPTGVQFQTFPNSSFEGNQGLCGEHASPCHITDQSPHGSAVKSKKNIRKIVAVAVGTGLGTVFLLTVTLLIILRTTSRGEVDPEKKADADEIELGSRSVVLFHNKDSNNELSLDDILKSTSSFNQANIIGCGGFGLVYKATLPDGTKVAIKRLSGDTGQMDREFQAEVETLSRAQHPNLVHLLGYCNYKNDKLLIYSYMDNGSLDYWLHEKVDGPPSLDWKTRLRIARGAAEGLAYLHQSCEPHILHRDIKSSNILLSDTFVAHLADFGLARLILPYDTHVTTDLVGTLGYIPPEYGQASVATYKGDVYSFGVVLLELLTGRRPMDVCKPRGSRDLISWVLQMKTEKRESEIFDPFIYDKDHAEEMLLVLEIACRCLGENPKTRPTTQQLVSWLENIDVSS

SEQ ID NO: 1224 - protein, 861 aa, Nicotiana tabacum
MMMVGKLFSLLHFFTLFCLFTVTFASTKEATALLKWKATLQNQSNSLLVSWTPSSKACKSWYGVVCFNGRVSKLDIPYAGVIGTLNNFPFSSLPFLEYIDLSMNQLFGSIPPEIGKLTNLVYLDLSFNQISGTIPPQIGSLAKLQTLHILDNHLNGSIPGEIGHLRSLTELDLSINTLNGSIPPSLGNLHNLSLLCLYKNNISGFIPEEIGYLSSLIQLDLNTNFLNGSIPASLENLHNLSLLYLYENQLSGSIPDEIGQLRTLTDIRLNTNFLTGSIPASLGNLTSLSILQLEHNQLSGSIPEEIGYLRTLAVLSLYTNFLNGSIPISLGNLTSLSSLSLYENHLSGPIPSSLGNLDNLVYLYLYANQLSGPIPSELGNLKNLNYMKLHDNQLNGSIPASFGNLRNMQYLFLESNNLTGEIPLSICNLMSLKVLSLGRNSLKGDILQCLINISRLQVLKIPDNNLSEEIPSSICNLTSLRILDLSRNNLKGSIPQCFGDMGGHLEVLDIHKNGISGTLPTTFRIGSVLRSFTLHENELEGKIPRSLANCKELQVLDLGDNLLNDTFPMWLGTLPKLQVLRLKSNKLYGSIRTSKDENMFLELRIINLSYNAFTGNIPTSLFQQLKAMRKIDQTVKEPTYLGKFGADIREYNYSVTVTTKGLELKLVRILTVYIIIDLSSNRFEGHVPSIMGELIALRVLNLSRNGLQGHIPPSLGNLFVIESLDLSFNQLSGEIPQQIASQLTSLAVLNLSYNHLQGCIPQGPQFHTFENNSYEGNDGLRGFPISKGCGNDRVSETNNTVSTLDDQESTSEFLNDFWKAALMGYGSGLCIGLSILYFMISTGKLKWLSRITEWLQNRFII

SEQ ID NO: 1225 - protein, 497 aa, Triticum aestivum
  unsure (1)..(497): unsure at all Xaa locations
XPAPELRAAGAFSYNRLEGPIPSSFSSLSLSEINLSSNRLNGTIPELGSLATFPKSQYENNSGLCGVXPLPACEPHTGQGSSNGGQSNRRKASLAGSVAMGLLFSLFCIFVVIIAIESKKRRQKRRPAGTSRDIYIDSRSHSGTMYSNWRLSGTNALSINLAAFEKPLQKLTLGDLVEATNGFHNESLIGSGGFGDVYKATLKDGRVGAIKKLIHVSGQGDREFTAEMETIGKIKHRNLVPLLGYCKIGEERLLMYDFMKFGSLEDVLHDRKKIGIKLNWAARRKIAIGAARGLAFLHHNCIPHIIHRDMKSSNVLVDENLEARVSDFGMARMMSVVDTHLSVSTLAGTPGYVPPEYDRGFRCTTKGDVYSYGVVLLELLTGKPPTDSTDFGEDHNLVGWVKMHTKLKIADVFDPELLKDDPTLELELLEHLKIACACLDDRPSRRPTMLKVMTMFKEIQAGSTVDSKTSSVATGLSDDPGFAVMDMTLKEAKEEKD

SEQ ID NO: 1226 - protein, 708 aa, Zea mays
  unsure (1)..(708): unsure at all Xaa locations
XTCRNLVTLDLSSNNLSGHIPSAISXLTFLNNLNLSSNQLSSAIPAEICVGFGSAAHPDSEFIQHHGLLDLSYNRLTGNIPTAIKNCVMVTVLNLQGNMLSGTIPPELAELPNVTAIYLSYNTLVGPMLPWSAPLVQLQGLFLSNNHLSGSIPAEIGQILPKIEKLDLSSNALTGTLPESLLCINYLTYLDISNNSLSGQIPFSCSKEKESSSSLILFNGSSNHFSGNLDESISNFTQLSFLDIHNNSLTGSLPFSLSDLSYLNYLDLSSNDFNGPAPCGICNIVGLTFADFSGNHIGMSGLVDCAAEGFCTGKGFDRKALNSSDRVRRAAIICVSILTVVIVLVFLVVYLKRRLLRSRPLALVPVSKAKATIEPTSSDELLGKKFREPLSINLATFEHALLRVTADDIQKATENFSKVHIIGDGGFGTVYRAALPEGRRVAIKRLHGGHQFQGDREFLAEMETIGKVKHPNLVPLLGYCVCGDERFLIYEYMENGSLEMWLKNRADAIETLGWPDRLKICIGSARGLSFLHHGFVPHIIHRDMKSSNILLDENFEPRVSDFGLARIISACETHVSTDIAGTYGYIPSEYALTMKSFTKGDVYSFCAVMLELLTGRPPTGQEEGEGGGNLVGWVRWMMAHGKEGELFDPCLPVSSVWRVQMAHVLAIARDCTVDEPWKRPTMLEVVKGLKMAETIECGPLVVTVTKDM

SEQ ID NO: 1227 - protein, 862 aa, Lycopersicon hirsutum
MDCLELVFLMLYTFLCQLALSSSLPHLCPEDQALALLQFKNMFTVNPNDSDYCYDISTGVDIQSYPRTLSWNNRTSCCSWDGVHCDETTGQVIELDLSCSQLQGKFHSNSSLFQLSNLKRLDLSFNNFTGSLISSRLGEFSSLTHLDLSHSSFTGLIPSEISHLSKLHVLRIGDLNELSLGPHNFELLLENLTQLRELNLNSVNISSTIPSNFSSHLAILTLYDTGLHGLLPERVFHLSDLEFLDLSYNPQLTVRFPTTKWNSSASLMKLYVHSVNIADRIPESFSHLTSLHELDMGYTNLSGPIPKPLWNLTNIESLDLDYNHLEGPIPQLPRFEKLKDLSLRNNNFDGGLEFLSFNRSWTQLEWLDFSSNSLTGPIPSNVSGLQNLEWLYLSSNNLNGSIPSWIFSLPSLIELDLRNNTFSGKIQEFKSKTLSVVSLQKNQLEGPIPNSLLNQSLFYLLLSHNNISGRISSSICNLKMLISLDLGSNNLEGTIPQCVGEMKENLWSLDLSNNSLSGTINTTFSIGNSFRAISLHGNKLTGKVPRSLINCKYLTLLDLGNNQLNDTFPNWLGYLSQLKILSLRSNKLHGPIKSSGNTNLFTRLQILDLSSNGFSGNLPESILGNLQAMKKIDESTRTPEYISDICYNYLTTITTKGQDYDSVRIVDSNMIINLSKNRFEGRIPSIIGDLVGLRTLNLSHNALEGHIPASFQNLSVLESLDLSSNKISGEIPQQLASLTFLEFLNLSHNHLVGCIPKGKQFDTFLNSSYQGNDGLRGFPLSIHCGGDDQLTTPAELDQQQEEEDSSMISWQGVLVGYGCGLVIGLSVIYIMWSTQYPAWFSRMDLKLERIITTRMKKHKKRY

SEQ ID NO: 1228 - protein, 865 aa, Lycopersicon hirsutum
MGCVKLIFFMLYVFLFQLVPSSSLPHLCPEDQALALLQFKNMFTVNPNASDYCYDYTGVEIQSYPRTLSWNKSTDCCSWDGVDCDETTGQVIALDLCCSKLRGKFHTNSSLFQLSNLKRLDLSNNNFTGSLISPKFGEFSNLTHLVLSDSSFTGLIPFEISRLSKLHVLRISDLNELSLGPHNFELLLKNLTQLRELNLDSVNISSTIPSNFSSHLTNLWLPYTELRGVLPERVFHLSDLEFLHLSGNPQLTVRFPTTKWNSSASLMKLYVDSVNIADRIPESFSHLTSLHELDMGYTNLSGPIPKPLWNLTNIESLFLDDNHLEGPIPQLPRFEKLNDLSLGYNNLDGGLEFLYSNRSWTELEILDFSSNYLTGPIPSNVSGLRNLQLLHLSSNHLNGTIPSWIFSLPSLVVLDLSNNTFSGKIQEFKSKTLITVTLKQNKLKGPIPNSLLNQQSLSFLLLSHNNISGHISSSICNLKTLISLDLGSNNLEGTIPQCVGEMKENLWSLDLSNNSLSGTINTTFSVGNFLRVISLHGNKLTGKVPRSLINCKYLTLLDLGNNMLNDTFPNWLGYLPDLKILSLRSNKLHGLIKSSGNTNLFTRLQILDLSSNGFSGNLPESILGNLQTMKKINESTRFPEYISDPYDIFYNYLTTITTKGQDYDSVRIFTSNMIINLSKNRFEGHIPSIIGDLVGLRTLNLSHNALEGHIPASFQNLSVLESLDLASNKISGEIPQQLASLTFLEVLNLSHNHLVGCIPKGKQFDSFGNSSYQGNDGLRGFPLSKLCGVDDQVTTPAELDQEEEEEDSPMISWQGVLVGYGCGLVIGLSVIYIMWSTQYPVWFSRMDLKLEHIITTRMKKHKKRY

SEQ ID NO: 1229 - protein, 806 aa, Lycopersicon hirsutum
MGCVKLVFFMLYVFLFQLVSSSSLPHLCPEDQALALLEFKNMFTVNPNASDYCYDRRTLSWNKSTSCCSWDGVHCDETTGQVIELDLRCIQLQGKFHSNSSLFQLSNLKRLDLSYNDFTGSPISPKFGEFSDLTHLDLSHSSFRGVIPSEISHLSKLYVLRISLNELTFGPHNFELLLKNLTQLKVLDLESINISSTIPLNFSSHLTNLWLPYTELRGILPERVFHLSDLEFLDLSSNPQLTVRFPTTKWNSSASLMKLYLYNVNIDDRIPESFSHLTSLHKLYMSRSNLSGPIPKPLWNLTNIVFLDLNNNHLEGPIPSNVSGLRNLQILWLSSNNLNGSIPSWIFSLPSLIGLDLSNNTFSGKIQEFKSKTLSTVTLKQNKLKGPIPNSLLNQKNLQFLLLSHNNISGHISSAICNLKTLILLDLGSNNLEGTIPQCVVERNEYLSHLDLSNNRLSGTINTTFSVGNILRVISLHGNKLTGKVPRSMINCKYLTLLDLGNNMLNDTFPNWLGYLFQLKILSLRSNKLHGPIKSSGNTNLFMGLQILDLSSNGFSGNLPERILGNLQTMKEIDESTGFPEYISDPYDIYYNYLTTISTKGQDYDSVRILDSNMIINLSKNRFEGHIPSIIGDLVGLRTLNLSHNVLEGHIPASFQNLSVLESLDLSSNKISGEIPQQLASLTFLEVLNLSHNHLVGCIPKGKQFDSFGNTSYQGNDGLRGFPLSKLCGGEDQVTTPAELDQEEEEEDSPMISWQGVLVGYGCGLVIGLSVIYIMWSTQYPAWFSRMDLKLEHIITTKMKKHKKRY

SEQ ID NO: 1230 - protein, 1166 aa, Capsella rubella
MKQKWLFVLILCFFTALGIHGKRLINSDFDETALLMAFKQFSVKSDPNNVLGNWIYESGRGSCSWRGVSCSDDGRIVGLDLRNGGVTGTLNLANLTALPNLQNLYLQGNYFSSSSGGDSSSGSYCYLQVLDLSSNLISDYSLVDYVFSKCSNLVSVNFSNNKLVGKLGFAPSSLKSLTTVDFSYNILSEKIPESFISEFPASLKYLDLTHNNFSGDFSDLSFGMCGNLSFFSLSQNNISGVKFPISLPNCRFLETLNISRNNLAGKIPGGEYWGSFQNLKQLSLAHNRFSGEIPPELSLLCKTLETLDLSGNALSGELPSQFTACVWLQNLNIGNNYLSGDFLSTVVSKITRITYLYVAFNNISGSVPISLTNCTNLRVLDLSSNGFTGNVPSGLCSQQSSPVLEKLLIANNYLSGTVPVELGKCKSLKTIDLSFNELTGPIPKDVWMLPNLSDLVMWANNLTGSIPEGVCVKGGKLETIILNNNLLTGSIPQSISRCTNMIWISLSSNRLTGKIPTGIGNLSKLAILQLGNNSLSGNVPRQLGNCKSLIWLDLNSNNLTGDLPGELASQAGLVMPGSVSGKQFAFVRNEGGTDCRGAGGLVEFEGIRAERLERFPMVHSCPATRIYSGMTMYTFSANGSMIYFDISYNAVSGLIPPGYGNMGYLQVLNLGHNRITGNIPDSLGGLKAIGVLDLSHNDLQGYLPGSLGSLSFLSDLDVSNNNLTGPIPFGGQLTTFPVSRYANNSGLCGVPLRPCGSAPRRPITSSVHAKKQTLATAVIAGIAFSFMCLVMLFMALYRVRKVQKKELKREKYIESLPTSGSCSWKLSSVPEPLSINVATFEKPLRKLTFAHLLEATNGFSAETMVGSGGFGEVYKAQLRDGSVVAIKKLIRITGQGDREFMAEMETIGKIKHRNLVPLLGYCKVGEERLLVYEYMKWGSLETVLHEKSSKKGGIFLNWTARKKIAIGAARGLAFLHHSCIPHIIHRDMKSSNVLLDEDFEARVSDFGMARLVSALDTHLSVSTLAGTPGYVPPEYYQSFRCTAKGDVYSYGVILLELLSGKKPIDPGEFGEDNNLVGWAKQLYREKSGTEILDPELVTEKSGDAELFHYLKIASQCLDDRPFKRPTMIQVMAMFKELKADTEEDESLDEFSLKETPLVEESRDKEP

SEQ ID NO: 1231 - protein, 323 aa, Mus musculus
MYHSSSQKRHWTFASEEQLARLRADANRKFKCKAVANGKVLPNDPVFLEPHEELTLCKYYEKRLLEFCSVFKPAMPRSVVGTACMYFKRFYLNNSVMEYHPRIIMLTCAFLACKVDEFNVSSPQFVGNLRESPLGQERALEQILEYELLLIQQLNFHLIVHNPYRPFEGFLIDIKTRYPMLENPEILRKTADDFLSRIALTDAYLLYTPSQIALTAILSSASRAGITMESYLSESLMLKENRTCLSQLLDIMKSMRNLVKKYEPPRSDEVAVLKQKLERCHSSDLALNAVTKKRKGYEDDDYVSKKPKQEEEEWTDDDLVDSL

SEQ ID NO: 1232 - protein, 323 aa, Rattus norvegicus
MYHNSSQKRHWTFASEEQLARLRADANRKFKCKAVANGKVLPNDPLFLEPHEEMTLCKYYEKRLLEFCSVFKPAMPRSVVGTACMYFKRFYLNNSVMEYHPRIIMLTCAFLACKVDEFNVSSPQFVGNLRESPLGQEKALEQILEYELLLIQQLNFHLIVHNPYRPFEGFLIDIKTRYPMLENPEILRKTADDFLSRIALTDAYLLYTPSQIALTAILSSASRAGITMESYLSESLSRKENRTCLSQLLDIMKSMRNLVKKYEPPRSEEVAILKQKLERCHSSDLALNMVTKKRKGYEDDDYVSKKPKQEEEEWTDDDLVDAL

SEQ ID NO: 1233 - protein, 323 aa, Rattus norvegicus
MYHNSSQKRHWTFASEEQLARLRADANRKFKCKAVANGKVLPNDPLFLEPHEEMTLCKYYEKRLLEFCSVFKPAMPRSVVGTACMYFKRFYLNNSVMEYHPRIIMLTCAFLACKVDEFNVSSPQFVGNLRESPLGQEKALEQILEYELLLIQQLNFHLIVHNPYRPFEGFLIDIKTRYPMLENPEILRKTADDFLSRIALTDAYLLYTPSQIALTAILSSASRAGITMESYLSESLMLKENRTCLSQLLDIMKSMRNLVKKYEPPRSEEVAILKQKLERCHSSDLALNMVTKKRKGYEDDDYVSKKPKQEEEEWTDDDLVDAL

SEQ ID NO: 1234 - protein, 323 aa, Rattus norvegicus
MYHNSSQKRHWTFASEEQLARLRADANRKFKCKAVANGKVLPNDPLFLEPHEEMTLCKYYEKRLLEFCSVFKPAMPRSVVGTACMYFKRFYLNNSVMEYHPRIIMLTCAFLACKVDEFNVSSPQKEGNLRESPLGQEKALEQILEYELLLIQQLNFHLIVHNPYRPFEGFLIDIKTRYPMLENPEILRKTADDFLSRIALTDAYLLYTPSQIALTAILSRASRAGITMESYLSESLMLKENRTCLSQLLDIMKSMRNLVKKYEPPRSEEVAILKQKLERCHSSDLALNMVTKKRKGYEDDDYVSKKPKQEEEEWTDDDLVDAL

SEQ ID NO: 1235 - protein, 319 aa, Gibberella moniliformis
MSANYWHSTQCRFWSFTKEQLVTMRQKLEEDNAELVRMFPLPQQRRLYIYFNQQLIRLAKRLTIRQQSMATAQVYMKRFYSKVEIRRTNPYLVIATAIYLACKIEESPQHIRLIVTEARQMWGDLVAIDTSKLGECEFFMISEMRSQLIVFQPYRTITALRNELSLVDDEVQLARSVINDHFMTDLPLLYPPHIIAMVAILLALVLRPNNSGPGQSTSGAAAAAGLAAAQQALMRAQGQQAQGGMPEPAAAEPKEKRQQDRVSRVQKFAKWLVDSNVEIASMVDATQEIISFYECYEHYNDKLTREQINRFVKARGLDK

SEQ ID NO: 1236 - protein, 341 aa, Anopheles gambiae str. PEST
SGRSGHETLTQQPQTRGKMYSLSSQKKFWTFKTEQELAELRVKQNVRFIAKHGASMTEEQRQAHFLSADEERLLLKQYELQLKEFCKRFEPPMPKYVVGTAFHYFKRFYLNNSSMDYHPKEILATCVYLACKVEEFNVSIAQFVANIKGDRVKAMDIILSNELLLMQELNYYLTIHNPMRPIEGFLIDIKTRCNMSNPDRLRPGIEDFIDKTFLTDAPLMYAPSQIALAAVLHAASKEQENLDSYVTESLFGSAKDKLPVLIEAVRRVRSMVRTIELPPKDRVRFLEKKLEKCRNQENNPDSQIYKQRMKKMYEDEDDLDVMGSSYHMNVSDASLDVSQLN

SEQ ID NO: 1237 - protein, 336 aa, Arabidopsis thaliana
MADFQTSTQRAKWIFTPQKLAERYKAANQRAVQMLEKCGTTQVEVDASGSLTYPKDKVGSGDQADKKLKPLSADEERFMRAFYEAKVQEVCSAFAFPHKIQATALQYFKRFYLQWSVMQHHPKEIMLTCVYAACKIEENHVSAEEIGKGINQDHRIILKYEMAVLQSLEFDLIVYAPYRAIEGFVNNMEEFLQARDDEIQKLESLLKGATAEADKVMLTDAPLLFPPGQLALASLRIANGVLGVIDFDRYLENIVSQPNSEHTTSELTKLLDNIEYLVKNYKCPSEKDMKHINRKLKSCLGHSSSHDESKKREKRSKHKSHRSSNDTPNGAPPPIG

SEQ ID NO: 1238 - protein, 337 aa, Glycine max
  unsure (1)..(337): unsure at all Xaa locations
MADFQTSTHRAKWIFSPQQLVEKYRAANQRAKQILEKCGATLMEVDVDGXSLSYPEPQMTAKDSAEKHSRTKPLTIEEETCIKVFYENKLQEVCNNFRFPHKIQATALIYFKRFYLQWSVMEHQPKHIMLTCIYAACKIEENHVSAEELGKGISQDHQMILNNEMIVYQSLEFDLIVYAPYRSVEGFINDMEEFFNAGDNQLEMLKTLQETARFEVDKMMLTDAPLLFPPGQVLALAALRNSNAFHRVIDFDSYLRGIFSRENSMHTMSELSESLDAIDSWVRKYKSPSEKELKHINRKLKSCWGHHSHDEGKKREKKSKHKSKKSSNEAQNMPSIA

SEQ ID NO: 1239 - protein, 314 aa, Glycine max
  unsure (1)..(314): unsure at all Xaa locations
XEFGTRNQRAKQILEKCGATLMEVDVDGSLSYPEPQMTAKDSAEKHSRTKPLTIEEEQCIKVFYENKLQQVCNNFRFPHKIQATXLIYFKRFYLHPPPIRXTPTHIMLTCIYAACKIEENHVSAEELGKGISQDHQMILNNEMIVYQSLEFDLIVYAPYRSVEGFINDMEEFFNAGDNQLEMLKTLQETARFEVDKMMLTDAPLLFPPGQLALAALRNSNAFHRVIDFDSYLRGIFSRENSMHTMSELSESLNAIDSWVRKYKSPSEKELKHIIRKLKSCWGHSSHDEGKKREKKSKHKSKKSSNEAQNMSSLA

SEQ ID NO: 1240 - protein, 264 aa, Glycine max
  unsure (1)..(264): unsure at all Xaa locations
XYSIAKIYFRIIYLNHYIGNFTACSFFXXRLQMMSIHYFKRFYLLWSVMXHQPKHIILSINYXKTALXKNKGSAVQLDNLISHDQHLILTIDLTLSQCFQCVFIVYAPYRSVEGIINDMDVFFNAGDNQLEMLKTLQETARFEVDKMMLTDAPLLFPPGQLALAALRNSNAFHRVIDFDSYLRGIFSRENSMHTMSELSESLDAIDSWVRKYKSPSEKELKHINRKLKSCWGHHSHDEGKKREKKSKHKSKKSSNEAQNMPSIA

SEQ ID NO: 1241 - protein, 110 aa, Glycine max
  unsure (1)..(110): unsure at all Xaa locations
MADFQTSTHRAKWIFSPQQLVEKYRAANQRAKQILEKCGATLMEVDVNGSLSYPEPHMTAKDSAEKHYRTKPLSIEEEQCIKVFYENKLQEVCNNFRFPHKIQVSVLLIX

SEQ ID NO: 1242 - protein, 69 aa, Glycine max
  unsure (1)..(69): unsure at all Xaa locations
XCIKVFYDNKLQLVCTXIFRFHHKIQATAVIYFKRFYLQWSVMEHQPKHIMLTCIYAACKIEENYVXGX

SEQ ID NO: 1243 - protein, 103 aa, Glycine max
  unsure (1)..(103): unsure at all Xaa locations
TLQETARFEVDKMMLTDAPLLFPPGQLALAALRNSNAFHRVIDFDRXRKYKSPSEKELKHINRKLKSCWGHXXSHDEGKKREKKSKHKSKKSSNEAQNMPSIA

SEQ ID NO: 1244 - protein, 328 aa, Oryza sativa (japonica cultivar-group)
MADFRTSTHRERWIFQTNDLMDRWGAANQRATETLVQYGTTRLKVDPVDGSLSYPEPAPDHVVGSSGVKPLSCEEERLMRVFYEQKIQEVCSAFKFPHKIQATAIIYFKRFYLQWSVMEHHPKHIMLTCIYSSCKVEENHVSAEELGKGIQQDHQIILNNEMIVLKSLDFDLIVYAPYRSIEGFVDDMEDFCRAGNGEHQRLQDLRQTAISQVDKMMLTDAPLLYTPGQLALAALHKSNDMHKILNFERYLESVFSRQHSDCPIEQFVGSINMINYLQLKIPTPKDMRHIDRKLKHCLDPSSQDEHKKKEKKSKHKSKRAANEAQLDS

SEQ ID NO: 1245 - protein, 255 aa, Dictyostelium discoideum
MAANFWESSHCTEWLLDRNKIEESNPKDKQYLTPIELKKLRTHYCFVIQNLGNALKLRQRAISTAIVYFKRFYLKNSFVDCEPRLVAVTCLYLSSKVEECITQAKKCAAKMKEIDHSFNYLMNDILECEFFVLEELDFCLIIYHPYKSLPFYLQSSGLDPASIEIIWGIVNDSYRTDVCLLYPPFVVGLGCILLGSYLLKKDIKQWLSELNVEMKDIWEVSKDLIDYYEFEKQQSLQNQSELDLLYNKLPIRNKK

SEQ ID NO: 1246 - protein, 216 aa, Triticum aestivum
  unsure (1)..(216): unsure at all Xaa locations
MSDFQTSTHRERWIFQPQDLVNKWTTANRRSAEILAQYGTTRLKVDPVDGSISNPEPVPDHVVGSSSVKPLSCEEEQVMRIFYEQKIQEVCRAFKFPHKIQATAIIYFKRFYLQWSVMEHHPKHIMLTCVYASCKVEENHVSAEELGKGIQQDHQIILNNEMIVLKSLDFDLIXVYAPYRSIEGFIDDLDDLCRARNGAHQRLKDLHQTANSEVDT

SEQ ID NO: 1247 - protein, 438 aa, Zea mays
  unsure (1)..(438): unsure at all Xaa locations
MADFRTSTQRERWIFQSHDLMERWAAANQRAAQTLAQYGTTRLNVDLLDGSVSYPESMPDHVEGSSVVKPLSYEEEQLTRVFYEQKIQEVCAAFKFPHKIQATAIIYFKRFYLQWSVMEHQPKHIMLTCVYASCKVEENHVSAEELGKGIQQDHQIILNNEMILLKTLDFDLIVYAPYRSIEGFIDDLEDFCRAGNGPFQRLKELRQAAISHVDKMMLTDAPLLYTPGQLALAALHKSNDLLRVVDFERYLEIIFSRQHSDCPIEQFVQSINEINYLVDQLNIPTVKDMRHVDRKLKHCWDPSSHDEHNKKKEKKSKHKSKRTSTDAQLXEAYGPAVALCKSTTGLQMIETELRHLSTAALRQLSTPAEAYLRSSNFVTMWAMELHCSNGRVAAKIQTKRCNIGCLSPKYGELQILYGRLCVSHNYLSSFCYGCSIVY

SEQ ID NO: 1248 - protein, 92 aa, Zea mays
MADFRTSTQRERWIFQSHDLMERWAAANQRAAQTLAQYGTTRLNVDLLDGSVSYPESMPDHGMRHLLVYNSPVLCVFQNMKYICTTSSLQKA

SEQ ID NO: 1249 - protein, 332 aa, Populus tremula x Populus tremuloides
MADFQSSSHKAKWIFTPQQLAEKYKATNNRAKQMLEKYGTTRMRVDVDGSLSYPEPQVNMTENADKHSRSKPISVEEEQFMRVYYEYKLREVCSAFYFPHKIQATALLYFKRFYLQWSVMEHDPKHVMLTCIYAACKIEENHVSAEELGKGISQDHQMILNYEMIVYQSLEFDLIVYAPYRSVEGFVADIEEFCHPTDENIEKLKEIAVAEVDKIMLTDAPVMFPPGQLALAALQSANEMHRVLDFERYLESVLSRQNSAHMISEISESLHAVEKWVRKYSFPTDKDMKHINRKLKSCWGHNSHDDNKKREKKSKHKSHKSSNEMQNGPGLT

SEQ ID NO: 1250 - protein, 322 aa, Schizosaccharomyces pombe
MSADKFRDSTHYRDWIFTEEDLSKTRAKVNEKFTNIVRERMLEELSLQNKEASLEVLPPTLTVEEELELVNYYSFQLNALSSALSLPTHIRSTAILFFKRFYLINSVMEYSPKIISFTSLFLATKCNDHYISIEQFCKNMPKTTPEEVLEYEFNVCQSLKWDLYVWLPFRPLQGFLLDCQTVLPKVAVEKFYECHDLSKKFLIETLHSDIYFLHSPSIIALGAIYHTNPTICLQYIEAKKIPELQPLIISISANLKATKKFKIEKKKAQDYGRKLYFCMNPLRNKSSALYLKRKAEEESTNNNKWAKKFSTSSNVLDKNPFE

SEQ ID NO: 1251 - protein, 393 aa, Saccharomyces cerevisiae
MTDIQLNGKSTLDTPSATMSAKEKEAKLKSADENNKPPNYKRISDDDLYRHSSQYRMWSYTKDQLQEKRVDTNARAIAYIEENLLKFREAHNLTEEEIKVLEAKAIPLTMEEELDLVNFYAKKVQVIAQHLNLPTEVVATAISFFRRFFLENSVMQIDPKSIVHTTIFLACKSENYFISVDSFAQKAKSTRDSVLKFEFKLLESLKFSLLNHHPYKPLHGFFLDIQNVLYGKVDLNYMGQIYDRCKKRITAALLTDVVYFYTPPQITLATLLIEDEALVTRYLETKFPSREGSQESVPGNEKEEPQNDASTTEKNKEKSTESEEYSIDSAKLLTIIRECKSIIEDCKPPSTEEAKKIAAKNYYCQNPSTLIQKLKRKLNGEDTSSTVEKKQKT

SEQ ID NO: 1252 - protein, 427 aa, Neurospora crassa
MASEDARYRETSQFQAWSFSPAQLAAMREKTNAIARQRIAERMLASASNPPTSNNTSHANTPDPSGHGTPNPTENSTPTLPDFLKPEEEALLVSFYVSELLRAADHLGVPDEVRATATVFFRRFFLTNSIMTYPPQEMILVALFVGSKAEGRFPRIIEFQQKFNTKQDILAGEFLLCQGNRFNFEVRHPFRALMGATMELRSYGDIDEQRIIAAEKRAHEILLFSPLMTDAYFHYTPSQIMFAALSLADRGLAERLIQETFHFVPPTTNNDNTPAVTPLPGLENQGIGRKEGGSKGITTNDERAAIVGPGIRDKVMGTIEACRNMLSTELPERKSHWTSESIFKSQIRPVRKKLTKCRDPDRWNLSELQRQRREAGVRRADSEERPAASNGSKDAAIFGGDLSADAPEKKRRKVDGNGLEDPFGGPL

SEQ ID NO: 1253 - protein, 335 aa, Echinococcus multilocularis
MAYVTSTQLYNWRFTQDELANQRQECNAAVRRRLSAQYRAKAEVKGGDVPAEPTFLTAEEEFIIVKRYIFAMKELFHQFSDSGLPVDVFGFAATYLKRFYLNNSVMDYFPREMMLTALYLACKAADYPLGLQTFAAHIPRNREHYSEIVVHSELFLMEKLQYDIWIHTPYRPLSGLLVDLLAYRKTQLGEPMTIEAGEVATADMMTSLKKEGYEIIHKWFQTDLCLTHSPSQFALAVLLELGQKHPDLGVEKFVKNSVCEYNSSDELMEQKWTALNEKMEQIQTMIGEFEFLSDLTYGSDLEAVLMQCRNPLYDPLSEEYAAAKEQAEKLMSFLD

SEQ ID NO: 1254 - protein, 296 aa, Caenorhabditis elegans
MQPDELELFVTPEEELRMQRSIEDAALKFADKFRPHIWPSVKWTALAFFKRAFLVWVPSDTSIRMVMMACFYLAMKIDEFYITIEDFVKNMNVGEPRQNAERILKLEPELMKILDYNLTVHCPYRPYEGHLMDMKTRMLLLNFDLESIRRDSMRFFQNALQTDVLLLYPPSQIALAAINFGLHAQGKSDEILREFLRKLIGIEEDSWAHRDARPEDLEKLEKTVTRVNQIMREVDRNFVAVTEQERENHKSQLARIQALIPALDERRKEQWLAGGGVGLMPGELAEQPVDSDDEIN

SEQ ID NO: 1255 - protein, 324 aa, Drosophila melanogaster
MYPVSSQKRSWTFANEGQLMEFRVEQNSKYIESHEEEAQGRDLNEHFLTSAEERLLLKQYEIYLFDFCRRFEPTMPKCVVGTAFHYFKRFYLNNSPMDYHPKEILATCVFVACKVEEFNVSINQFVNNIKGDRNKATDIVLSNELLLIGQLNYYLTIHNPFRPIEGFLIDIKTRSNMQNPDRLRPHIDSFIDSTYYSDACLLHTPSQIALAAVLHAASREQENLDSYVTDLLFVSAREKLPGLIDAVRKIRIMVKQYQQPDREKVKAIEKKLDKCRNQANNPDSELYKERLRRLYTDEDDMPAEDASFHIADVSSDTSAMNISQ

SEQ ID NO: 1256 - protein, 325 aa, Drosophila melanogaster
FTYPVSSQKRSWTFANEGQLMEFRVEQNSKYIESHEEEAQGRDLNEHFLTSAEERLLLKQYEIYLFDFCRRFEPTMPKCVVGTAFHYFKRFYLNNSPMDYHPKEILATCVFVACKVEEFNVSINQFVNNIKGDRNKATDIVLSNELLLIGQLNYYLTIHNPFRPIEGFLIDIKTRSNMQNPDRLRPHIDSFIDSTYYSDACLLHTPSQIALAAVLHAASREQENLDSYVTDLLFVSAREKLPGLIDAVRKIRIMVKQYQQPDREKVKAIEKKLDKCRNQANNPDSELYKERLRRLYTDEDDMPAEDASFHIADVSSDTSAMNISQ

SEQ ID NO: 1257 - protein, 323 aa, Xenopus laevis
MYHNSTQKKHWTFLSEDEPLRRRIQANVRYRARIRATEKPRLSEIFSLEPHEELAICKYYEKRLLDFCNAFKPTMPKSVLGTACMYFKRFYLNNSVMEHHPRIIMLTCVFLACKVDEFNVSSIQFVGNLGENPLGQEKILEQILEYELLLIQQLNFHLIVHNPYRPFEGFLIDVKTRYPMLENPEVLRKSADEFLNRVALTDACLLFAPSVIALTAILSTASRAGLNMESYLTECLSLKDNQETMSHLLDGMRRLKILVSKYEPARPEEVAALKKRLDHCHSTEVTLSVHGRKRKGYEDDGYISKKPKTEEDEWTDEDFGDSL

SEQ ID NO: 1258 - protein, 283 aa, Gallus gallus
MAGNFWQSSHYLQWILDKQDLLKERQKDLKFLSEEEYWKLQIFFTNVIQALGEHLKLRQQVIATATVYFKRFYARYSLKSIDPVLMAPTCVFLASKVEEFGVVSNTRLISAATSVLKTRFSYAFPKEFPYRMNHILECEFYLLELMDCCLIVYHPYRPLLQYVQDMGQEDMLLPLAWRIVNDTYRTDLCLLYPPFMIALACLHVACVVQQKDARQWFAELSVDMEKILEIIRVILKLYEQWKNFDERKEMATILSKMPKPKPPPNSEGEQGPNGSQNSSYSQS

SEQ ID NO: 1259 - protein, 272 aa, Gallus gallus
LQWILDKQDLLKERQKDLKFLSEEEYWKLQIFFTNVIQALGEHLKLRQQVIATATVYFKRFYARYSLKSIDPVLMAPTCVFLASKVEEFGVVSNTRLISAATSVLKTRFSYAFPKEFPYRMNHILECEFYLLELMDCCLIVYHPYRPLLQYVQDMGQEDMLLPLAWRIVNDTYRTDLCLLYPPFMIALACLHVACVVQQKDARQWFAELSVDMEKILEIIRVILKLYEQWKNFDERKEMATILSKMPKPKPPPNSEGEQGPNGSQNSSYSQS

SEQ ID NO: 1260 - protein, 323 aa, Homo sapiens
MYHNSSQKRHWTFSSEEQLARLRADANRKFRCKAVANGKVLPNDPVFLEPHEEMTLCKYYEKRLLEFCSVFKPAMPRSVVGTACMYFKRFYLNNSVMEYHPRIIMLTCAFLACKVDEFNVSSPQFVGNLRESPLGQEKALEQILEYELLLIQQLNFHLIVHNPYRPFEGFLIDLKTRYPILENPEILRKTADDFLNRIALTDAYLLYTPSQIALTAILSSASRAGITMESYLSESLMLKENRTCLSQLLDIMKSMRNLVKKYEPPRSEEVAVLKQKLERCHSAELALNVITKKRKGYEDDDYVSKKSKHEEEEWTDDDLVESL

SEQ ID NO: 1261 - protein, 333 aa, Homo sapiens
MSHHHHHHGSMYHNSSQKRHWTFSSEEQLARLRADANRKFRCKAVANGKVLPNDPVFLEPHEEMTLCKYYEKRLLEFCSVFKPAMPRSVVGTACMYFKRFYLNNSVMEYHPRIIMLTCAFLACKVDEFNVSSPQFVGNLRESPLGQEKALEQILEYELLLIQQLNFHLIVHNPYRPFEGFLIDLKTRYPILENPEILRKTADDFLNRIALTDAYLLYTPSQIALTAILSSASRAGITMESYLSESLMLKENRTCLSQLLDIMKSMRNLVKKYEPPRSEEVAVLKQKLERCHSAELALNVITKKRKGYEDDDYVSKKSKHEEEEWTDDDLVESL

SEQ ID NO: 1262 - protein, 323 aa, Homo sapiens [sequence omitted]

SEQ ID NO: 1263 - protein, 323 aa, Homo sapiens
MYHNSSQKRHWTFSSEEQLARLRADANRKFRCKAVANGKVLPNDPVFLEPHEEMTLCKYYEKRLLEFCSVFKPAMPRSVVGTACMYFKRFYLNNSVMEYHPRIIMLTCAFLACKVDEFNVSSPQFVGNLRESPLGQEKALEQILEYELLLIQQLNFHLIVHNPYRPFEGFLIDLKTRYPILENPEILRKTADDFLNRIALTDAYLLYTPSQIALTAILSSASRAGITMESYLSESLMLKENRTCLSQLLDIMKSMRNLVKKYEPPRSEEVAVLKQKLDRCHSAELALNVITKKRKGYEDDDYVSKKSKHEEEEWTDDDLVESL

SEQ ID NO: 1264 - protein, 298 aa, Mesocricetus auratus
MENFQKVEKIGEGTYGVVYKAKNKLTGEVVALKKIRLDTETEGVPSTAIREISLLKELNHPNIVKLLDVIHTENKLYLVFELLHQDLKKFMDASAVTGIPLPLIKSYLFQLLQGLAFCHSHRVLHRDLKPQNLLINAEGSIKLADFGLARAFGVPVRTYTHEVVTLWYRAPEILLGCKYYSTAVDIWSLGCIFAEMVTRRALFPGDSEIDQLFRIFRTLGTPDEVVWPGVTSMPDYKPSFPKWARQDFSKVVPPLDEDGRSLLSQMLHYDPNKRISAKAALAHPFFQDVTKPVPHLRL

SEQ ID NO: 1265 - protein, 346 aa, Mesocricetus auratus
MENFQKVEKIGEGTYGVVYKAKNKLTGEVVALKKIRLDTETEGVPSTAIREISLLKELNHPNIVKLLDVIHTENKLYLVFELLHQDLKKFMDASAVTGIPLPLIKSYLFQLLQGLAFCHSHRVLHRDLKPQNLLINAEGSIKLADFGLARAFGVPVRTYTHEVVTLWYRAPEILLGCKYYSTAVDIWSLGCIFAEMHLVCTQHHAKCCGEHRRNGRHSLCPLCSYLEVAASQGGGMTAVSTPYPVTRRALFPGDSEIDQLFRIFRTLGTPDEVVWPGVTSMPDYKPSFPKWARQDFSKVVPPLDEDGRSLLSQMLHYDPNKRISAKAALAHPFFQDVTKPVPHLRL

SEQ ID NO: 1266 - protein, 346 aa, Mus musculus
MAVDVKSRAKRYEKLDFLGEGQFATVYKARDKNTNQIVAIKKIKLGHRSEAKDGINRTALREIKLLQELSHPNIIGLLDAFGHKSNISLVFDFMETDLEVIIKDNSLVLTPSHIKAYMLMTLQGLEYLHQHWILHRDLKPNNLLLDENGVLKLADFGLAKSFGSPNRAYTHQVVTRWYRAPELLFGARMYGVGVDMWAVGCILAELLLRVPFLPGDSDLDQLTRIFETLGTPTEEQWPDMCSLPDYVTFKSFPGVPLQHIFIAAGDDLLELIQGLFLFNPCTRTTASQALKTKYFSNRPGPTPGCQLPRPNCPVEALKEPANPTVATKRKRAEALEQGILPKKLIF

SEQ ID NO: 1267 - protein, 346 aa, Mus musculus
MAVDVKSRAKHNEKLDFLGRGQFATVYKARDKNTNQIVAIKKIKLGHRSEAKDGINRTALREIKLLQELSHPNIIGLLDAFGHKSNISLVFDFMETDLELIIKHNSLVLTPSHIKAYMLMTLQGLEYLHHNWILHRDLKPNNLLLDENGVLKLADFGLAKSFGSPNRAYTHQVVTRWYRAPELLFGARMYGVGVDMWAVGCILAELLLRVPFLPGDSDLDQLTRIFETLGTPTEEQWPDMCSLPDYVTFKSFPGVPLQHIFIAAGDDLLELIQGLFLFNPCTRTTASQALKTKYFSNRPGPTPGCQLPRPNCPVEALKEPANPTVATKRKRAEALEQGILPKKLIF

SEQ ID NO: 1268 - protein, 309 aa, Mus musculus
MAVDVKSRAKRYEKLDFLGEGQFATVYKARDKNTNQIVAIKKIKLGHRSEAKDGINRTALREIKLLQELSHPNIIGLLDAFGHKSNISLVFDFMETDLEDLKPNNLLLDENGVLKLADFGLAKSFGSPNRAYTHQVVTRWYRAPELLFGARMYGVGVDMWAVGCILAELLLRVPFLPGDSDLDQLTRIFETLGTPTEEQWPDMCSLPDYVTFKSFPGVPLQHIFIAAGDDLLELIQGLFLFNPCTRTTASQALKTKYFSNRPGPTPGCQLPRPNCPVEALKEPANPTVATKRKRAEALEQGILPKKLIF

SEQ ID NO: 1269 - protein, 346 aa, Mus musculus
MDQYCILGRIGEGAHGIVFKAKHVETGEIVALKKVALRRLEDGIPNQALREIKALQEIEDSQYVVQLKAVFPHGAGFVLAFEFMLSDLAEVVRHAQRPLAPAQVKSYLQMLLKGVAFCHANNIVHRDLKPANLLISASGQLKIADFGLARVFSPDGGRLYTHQVATRWYRAPELLYGARQYDQGVDLWAVGCIMGELLNGSPLFPGENDIEQLCCVLRILGTPSPRVWPEITELPDYNKISFKEQAPVPLEEVLPDASPQALDLLGQFLLYPPRQRIAASQALLHQYFFTAPLPAHPSELPIPQRPGGPAPKAHPGPPHVHDFHVDRPLEESLLNPELIRPFIPEG

SEQ ID NO: 1270 - protein, 252 aa, Mus musculus
MAVDVKSRAKRYEKLDFLGEGQFATVYKARDKNTNQIVAIKKIKLGHRSEAKDGINRTALREIKLLQELSHPNIIGLLDAFGHKSNISLVFDFMETDLEVIIKDNSLVLTPSHIKAYMLMTLQGLEYLHQHWILHRDLKPNNLLLDENGVLKLADFGLAKSFGSPNRAYTHQVVTRWYRAPELLFGARMYGVGVDMWAVGCILAELLLRVPFLPGDSDLDQLTRIFETLGTPTEEQWPGFSPYPGCPELFVD

SEQ ID NO: 1271 - protein, 329 aa, Rattus norvegicus
  unsure (1)..(329): unsure at all Xaa locations
ANRNEKLDFLGEGQFATVYKARDKNTNQIVAIKKIKLGHRSEAKDGINRTALREIKLLQELSHPNIIGLLDAFGHKSNISLVFDFMETDLEVIIKDNSLVLTPSHIKAYMLMTLQGLEYLHQHWILHRDLKPNNLLLDENGVLKLADFGLAKSFGSPNWAYTHQVVTRWYRAPELLFGARMYGVGVDMWAVGCILAELLLRVPFLPGDSDLDQLTRIFETLGTPTEEQWPDMCSLPDYVTFKSFPGIPLQHIFIAAGDDLLELIQGLFLFNPCTRITASQALRTKYFSNRPGPTPGCQLPRPNCPVEALKEQXNPAMATKRKRAEALEQ

SEQ ID NO: 1272 - protein, 312 aa, Rattus norvegicus
ANRNEKLDFLGEGQFATVYKARDKNTNQIVAIKKIKLGHRSEAKDGINRTALREIKLLQELSHPNIIGLLDAFGHKSNISLVFDFMETDLEVIIKDNSLVLTPSHIKAYMLMTLQGLEYLHQHWILHRDLKPNNLLLDENGVLKLADFGLAKSFGSPNWAYTHQVVTRWYRAPELLFGARMYGVGVDMWAVGCILAELLLRVPFLPGDSDLDQLTRIFETLGTPTEEQWPDMCSLPDYVTFKSFPGIPLQHIFIAAGDDLLELIQGLFLFNPCTRITASQALRTKYFSNRPGPTPGCQLPRPNCPVEALKEQ

SEQ ID NO: 1273 - protein, 303 aa, Oryzias curvinotus
MEDYVKIEKIGEGTYGVVYKGRHKSTGQVVAMKKIRLESEEEGVPSTAVREVSLLQELKHPNVVRLLDVLMQESRLYLIFEFLSMDLKKYLDSIPSGQYMDPMLVKSYLYQILEGIYFCHRRRVLHRDLKPQNLLIDNKGVIKLADFGLSRAFGVPVRVYTHEVVTLWYRAPEVLLGSPRYSTPVDVWSTGTIFAELATKKPLFHGDSEIDQLFRIFRTLGTPNNDVWPDVESLPDYKSTFPKWKGGSLSSMVKNLDKNGLDLLAKMLIYNPPKRISAREAMTHPYFDDLDKSTLPAACINGV

SEQ ID NO: 1274 - protein, 303 aa, Oryzias luzonensis
MEDYVKIEKIGEGTYGVVYKGRHKSTGQVVAMKKIRLESEEEGVPSTAVREVSLLQELKHPNVVRLLDVLMQESRLYLIFEFLSMDLKKYLDSIPSGQYMDPMLVKSYLYQILEGIYFCHRRRVLHRDLKPQNLLIDNKGVIKLADFGLARAFGVPVRVYTHEVVTLWYRAPEVLLGSPRYSTPVDVWSTGTIFAELATKKPLFHGDSEIDQLFRIFRTLGTPNNDVWPDVESLPDYKNTFPKWKGGSLSSMVKNLDKNGLDLLAKMLIYNPPKRISAREAMTHPYFDDLDKSTLPAACINGV

SEQ ID NO: 1275 - protein, 483 aa, Hordeum vulgare subsp. vulgare
  unsure (1)..(483): unsure at all Xaa locations
MERYNIITEVGDGTFGSVWRAINKESGEVVAIKKMKKKYFSWEECINLREVKSLRRMNHPNIVKLKEVIRENDMLFFVFEYMECNLYQLMKSKGKPFSETEIRNWCFQVFQALSHMHQRGYFHRDLKPENLLVTKELIKVADFGLAREIISEPPYTEYVSTRWYRAPEVLLQSSVYSSAVDMWAMGAIIAELFSHRPLFPGSSEADEIYKICNILGTPNQHTWAGGLQLAASIHFQFPQSGSINLSEVVPTASEDALNLISWLCSWDPRKRPTAVEVLQHPFFQPCFYVPPSLRYRSTGYATPPPSVGAKGAMDQKNARRYPVGTLSNGRPAVNNSYLSTNAPARAAGVQRKLELDHQVKPEGNHKLTTKENAMNQPWSRLPPAPVRNNMNYLAAXEQIPRGGAPDIAEKLSQLSMSSTTNRAPIMPSDRFVDLKATTRAHGEPVRRPVPLGPRDTWHARNDPFRRTYEMPGERALLQRKLVS

SEQ ID NO: 1276 - protein, 303 aa, Oryzias javanicus
MEDYVKIEKIGEGTYGVVYKGRHKSTGQVVAMKKIRLESEEEGVPSTAIREVSLLQELKHPNVVRLLDVLMQESRLYLIFEFLSMDLKKYLDSIPSGQYMDPMLVKSYLYQILEGIYFCHRRRVLHRDLKPQNLLIDNKGVIKLADFGLARAFGVPVRVYTHEVVTLWYRAPEVLLGSPRYSTPVDVWSTGTIFAELATKKPLFHGDSEIDQLFRIFRTLGTPNNDVWPDVESLPDYKNTFPKWKEGSLSSMVKNLDKNGLDLLAKMLTYNPPKRVSAREAMTHPYFDDLDKSTLPAASINGV

SEQ ID NO: 1277 - protein, 303 aa, Oryzias javanicus
MEDYVKIEKIGEGTYGVVYKGRHKSTGQVVAMKKIRLESEEEGVPSTAVREVSLLQELKHPNVVRLLDVLMQESRLYLIFEFLSMDLKKYLDSIPSGQYMDPMLVKSYLYQILEGIYFCHRRRVLHRDLKPQNLLIDNKGVIKLADFGLARAFGVPVRVYTHEVVTLWYRAPEVLLGSPRYSTPVDVWSTGTIFAELATKKPLFHGDSEIDQLFRIFRTLGTPNNDVWPDVESLPDYKNTFPKWMEGSLSSMVKNLDKNGLDLLAKMLIYNPPKRISAREAMTHPYFDDLDKSTLPAACINGV

SEQ ID NO: 1278 - protein, 209 aa, Coffea arabica
DQYEKVEKIGEGTYGVVYKARDRLTNEMIALKKIRLEQEDEGVPSTAIREISLLKEMQHNNIVRLQDVVHSEKRIYLVFEYLDLDLKKHMDSCPELAKDPCLIKTFLYQILHGIAYCHSHRVLHRDLKPQNLLIDRRTNALKLADFGLARAFGIPVRTFTHEVVTLWYRAPEILLGSRHYSTPVDIWSVGCIFAEMVNQRPLFPVDSEI

SEQ ID NO: 1279 - protein, 337 aa, Acrosiphonia duriuscula
MPRNRDDSPDGAYLIHGRYEKIEKLGEGTYGKVYKARDSKTDQVVALKKCRLQLDAEGVPPTTIREVSLLQVLSRSNHVVKLLGVEQIEEDGKVVLYLIFEYLQHDLKKFMDFKKKEKHNPLQPELVKPYLFQLIRGMAFMHQHGVMHRDLKPQNLLVDPKTNVLKIADLGLGRVFALPCKAYTHEIVTLWYRAPEVLLGTKIYSLPVDVWSIGCIFAEMVKGIPFFPADCEIAQLFMIFQVLGTPNEEVWPGVTSLRDWHMYPQWQPMDLHTHLEGLLDHQGCDLLKKMLVYNPNKRIPAKQAMKHPYFDDLDMEVMDALENPEVLNAGMEYQENA

SEQ ID NO: 1280 - protein, 417 aa, Malus micromalus
MAAKESNSAAAAASSDGKIKRMLTHGGRYAQYNVFGNLFEVSSKYVPPIRPIGRGAYGIVCAAVNAEAREEVAIKKIGNAFDNRIDAKRTLREIKLLRHMDHENVIATKDIIRPPQKENFNDVYIVYELMDTDLHQIIRSNQPLNDDHCRYFLYQLLRGLKYVHSAGVLHRDLKPSNLFMNANCDLKIGDFGLARTTSETDFMTEYVVTRWYRAPELLLNCSEYTAAIDIWSVCCILGEIMTRKPLFPGKDYVHQLRLITELLGSPDDSSLGFLRSDNARRYVRELPQYPKRSFSLGFPNMSPSSIDLLEKMLIFDPNRRITVDEALSHPYLAPLHDINEEPVCPMPFNFDFEQPSFTEENIKELIWRESVRFNPESHFSMDHDIICCILLQTNLKTDCNDMFVDTVIVECVKGVDS

SEQ ID NO: 1281 - protein, 264 aa, Axinella corrugata
GEGTYGVVFKGRNKKTDEIVAMKKIRLESEEEGVPSTALREISLLKELQHPNIVGLNDVIMQEVKLYLIFEFLTMDLKKFMDTKTKMDMNLVKSYTYQILQGILFCHQRRVIHRDLKPQNLLIDKEGSIKIADFGLARAFGVPVRVYTHEVVTLWYRAPEILLGATKYSCPIDIWSIGCIFAEMCNKRPLFQGDSEIDQLFRIFRVLRTPNEEIWPGVTQLPDFKVTFPAWTSNNLVAQMKNLDDDGLDLLQEMLHYDPAKRIS

SEQ ID NO: 1282 - protein, 599 aa, Beta vulgaris
MGCVFGKESLAPEGRERGGRREKENLGTESGRKVDLPVADVVSGWDTGKDGENGGVELNDGGKKDEEKNGEEDGEEKREGEGKGRSQKPRGERRRTKANPRLSNPPKNVHGEQVAAGWPSWLSAVAGEAIDGWVPRRADTFEKIDKIGQGTYSNVYKARDSLTGKIVALKKVRFDNLEPESVKFMAREILILRRLDHPNVVKLEGLVTSRMSCSLYLVFEYMEHDLAGLAASPDIKFTEPQVKCYMHQLISGLEHCHNRGVLHRDIKGSNLLLDNGGILKIADFGLATFFDPNKKHPMTSRVVTLWYRAPELLLGATDYGVGIDLRSAGCILAELLAGRPIMPGRTEVEQLHKIYKLCGSPSDEYWKKSKLPNATIFKPREPYKRCIRETFRDFPPSALSLIDSLLAIDPAERKTATDALNSDFFSTEPLACDPSTLPKYPPSKEMDAKRRDDEARRLRAASKAQGDATKKTRTRDRPRAMPAPEANAELQANLDRRRIITHANAKSKSEKFPPPHQDGGLGYPLGASQHIDPSNIPPDIPYSSTSFTYSKGVGQHWSGPLVDPASAGGPRRKKKNVVEGNEPKSTGRRDISSSRARGK

SEQ ID NO: 1283 - protein, 434 aa, Beta vulgaris
MDRYKLLKELGDGTCGTVYKAVNRESYEIVAVKKMKRKFYFWEECVNLREVKSLPSIESSHIIKLKEVVRENNDLFFIFEYMQYNLYQIMKDRHRPFTEEEIRNFLTQVLQGLAHMHRNGYFHRDLKPENLLVTNDVIKIADFGLAREVSSIPPYTEYVSTRWYRAPEVLLKSSLYTPAIDMWAVGAVLAELFTSCPIFPGESETDQLYKICCVLGAPDWAVFPEAKNISQLTSISYSQMLPANLSEIIPNANWEAIDLISQLCSWDPLKRPTAEQALHHPFFHVALRVPRPIHDPFHSKPDYTKTKPNLELNLWDFDSKADDCFLGLTLAVNPGVSSLEMGPRVSGSTRQDVYFCSSFQDHPEQSVFWSLFSPCRNGATPPVDPSLSLSFSSITHPRIAVPHSGGFGLAALQPGILDGPLLVVSSPHQPSHYL

SEQ ID NO: 1284 - protein, 323 aa, Aspergillus nidulans
MENYQKIEKIGEGTYGVVYKARELTHPNRIVALKKIRLEAEDEGVPSTAIREISLLKEMNDPNIVRLLNIVHADGHKLYLVFEFLDLDLKKYMEALPVSEGGRGRALPDGSTLSRNLGLGDAMVKKFMAQLIEGIRFCHSHRVLHRDLKPQNLLIDRDGNLKLADFGLARAFGVPLRTYTHEVVTLWYRSPEILLGGRQYSTGVDMWSCGAIFAEMCTRKPLFPGDSEIDEIFKIFRILGTPDETIWPGVTSFPDFKPTFPKWKREDIQNVVPGLEEDGLDLLEALLEYDPARRISAKQACMHPYFQHGSSYYSGRARRNGFH

SEQ ID NO: 1285 - protein, 320 aa, Aspergillus nidulans
MDKSQQPSSFQQLEKLGEGTYATVFKGRNRQTGELVALKEIHLDSEEGTPSTAIREISLMKELKHESIVSLYDVIHTENKLMLVFEYMDKDLKKYMDTRGDRGQLDQATIKSFMHQLMSGIAFCHDNRVLHRDLKPQNLLINKKGQLKLGDFGLARAFGIPVNTFSNEVVTLWYRAPDVLLGSRTYNTSIDIWSAGCIMAELYTGRPLFPGTTNEDQLQKIFRLMGTPSERSWPGISQLPEYRANFHVYATQDLGLILPQIDPLGLDLLNRMLQLRPEMRIDAHGALQHPWFHDLPQLQAQLQQQQMAGYGGMMPPQQAY

SEQ ID NO: 1286 - protein, 366 aa, Aspergillus nidulans
MTSQRPTSSSSSLLDIVANLASPKSLLFNAHHTNPPPSLPSQRAPTMDKSQQPSSFQQLEKLGEGTYATVFKGRNRQTGELVALKEIHLDSEEGTPSTAIREISLMKELKHESIVSLYDVIHTENKLMLVFEYMDKDLKKYMDTRGDRGQLDQATIKSFMHQLMSGIAFCHDNRVLHRDLKPQNLLINKKGQLKLGDFGLARAFGIPVNTFSNEVVTLWYRAPDVLLGSRTYNTSIDIWSAGCIMAELYTGRPLFPGTTNEDQLQKIFRLMGTPSERSWPGISQLPEYRANFHVYATQDLGLILPQIDPLGLDLLNRMLQLRPEMRIDAHGALQHPWFHDLPQLQAQLQQQQMAGYGGMMPPQQAY

SEQ ID NO: 1287 - protein, 355 aa, Fusarium solani
MSRSNPPNPTGSRKISFNVSEQYDIQDVVGEGAYGVVCSAIHKPSGQKVAIKKITPFDHSMFCLRTLREMKLLRYFNHENIISILDIQKPRNYESFNEVYLIQELMETDMHRAIRTQDLSDDHCQYFIYQTLRALKAMHSANVLHRDLKPSNLLLNANCDLKVCDFGLARSAASQEDNSGFMTEYVATRWYRAPEIMLTFKEYTKAIDVWSVGCILAEMLSGKPLFPGKDYHHQLTLILDVLGTPTMEDYYGIKSRRAREYIRSLPFKKKVPFRTLFPKTSDLALDLLEKLLAFNPVKRITVEEALKHPYLEPYHDPEDEPTAPPIPEEFFDFDKHKDNLSKEQLKQLIYQEIMR

SEQ ID NO: 1288 - protein, 345 aa, Anopheles gambiae str. PEST
LSMEILNRLNRYEKIDFLGEGQFATVYKARDAETNEIVAVKKIKIGNREEAADGINRTALREIKLLHELQHENIIGLLDVFGHKSNVSLVFDFMDTDLEIIIKDPKIILTPANIKSYMIQTLRGLEYLHQHWILHRDLKPNNLLISGTGVLKIGDFGLAKFFGSPNRINTNQVVTRWYRCPELLFGARQYGIGVDIWAVGCILAELLLRVPFLPGESDLDQLTRIFQVLGTPNETNWPDVKSLPDYVQYKFYPPIPLRDIFTAASDDLIELANKMLALYPLHRCSCTEALKMAYFSNKPAPTVGPRLPMPASYNAANSKPEEKPSLKRKLLDSIDGGTVPKRLQF

SEQ ID NO: 1289 - protein, 310 aa, Kluyveromyces lactis
MTLKSTVDDYTKEKKAGEGTYAVVYLGTKKSTGRSIAVKEIKTSQFKDGLDMSALREVKFLQELKHVNVIELVDVFMANDNLNLVLEFLPADLEIIIKDTSIMFSPADIKSWILMTLRGVHHCHRNFILHRDLKPNNLLLAPDGQLKIADFGLARLMASPQEILTSNVVTRWYRAPELLFGAKHYTSAVDIWSVGVIFAELMLRIPYLPGKDDVDQINVTFRALGTPTDADWPEVSSFSNYNKIQIYPPPSREELRRRFIAATENALELISGMMIMNPKKRWDAVKCLQSQYFQELPEPTLPQDLPKLNK

SEQ ID NO: 1290 - protein, 356 aa, Gaeumannomyces graminis
MSRAANPPSNSGSRKISFNVSEQYDIQDVVGEGAYGVVCSAIHKPSGQKVAIKKITPFDHSMFCLRTLREMKLLRYFNHENIISILDIQKPRSYETFNEVYLIQELMETDMHRVIRTQDLSDDHCQYFIYQTLRALKAMHSANVLHRDLKPSNLLLNANCDLKVCDFGLARSAASQEDNSGFMTEYVATRWYRAPEIMLTFKEYTKAIDVWSVGCILAEMLSGKPLFPGKDYHHQLTLILDVLGTPTMEDYYGIKSRRAREYIRSLPFKKKVPFRTLFPQDVGSRLDLLEKLLAFNPVKRITVEEALKHPYLEPYHDPDDEPTAPPIPEEFFDFDKHKDNLSKEQLKQFIYQEIMR

SEQ ID NO: 1291 - protein, 341 aa, Sporothrix schenckii
MDNYQKLEKVGEGTYGVVYKARDLTAGGRIVALKKIRLEAEDEGVPSTAIREISLLKEMRDPNIVRLYNIVHAEGHKLYLVFEFLDLDLKKYMDSLPVSDGGRGKALPEGTGTRLHTLGLGDDIIKKFMSQLCAGIRYCHSHRILHRDLKPQNLLINKEGNLKLADFGLARAFGVPLRTYTHEVVTLWYRAPEILLGGHQYSTGVDMWSVGCIFAEMAMRKPLFPGDSEIDEIFKIFRLLGTPTEDVWPGVTTYPDFKASFPRWVQDTETPICPTLDPMGQELLELMLVYDPASRLSAKQACNHPYFDDLEKALPGTAAAAARQHTTTAAAGGAYNGSGYH

SEQ ID NO: 1292 - protein, 306 aa, Sporothrix schenckii
MDGKRQLNSFQQLEKLGEGTYATVFKGRNRHTGEFVALKEIHLDSEEGTPSTAIREISLMKELKHENIVALHDVIHTESKLMLVFEYMDGDLKKYMDTNGERGALKPMLIKSFMYQLLKGIDFCHQNRVLHRDLKPQNLLINGKGQLKLGDFGLARAFGIPVNTFSNEVVTLWYRAPDVLLGSRTYNTSIDIWSVGCIMAEMYTGRPLFPGTTNEDQMLRIFRIMGTPAEHNWPGISQFPEYKATAPRYATQDLRQILPQIDATGIDLLQRLLQLRPELRISAHDALQHPWFHDILQYQHCQQAAG

SEQ ID NO: 1293 - protein, 306 aa, Sporothrix schenckii
MDGKRQLNSFQQLEKLGEGTYATVFKGRNRHTGEFVALKEIHLDSEEGTPSTAIREISLMKELKHENIVALHDVIHTESKLMLVFEYMDGDLKKYMDTNGERGALKPMLIKSFMYQLLKGIDFCHQNRVLHRDLKPQNLLINGKGQLKLGDFGLARAFGIPVNTFSNEVVTLWYRAPDVLLGSRTYNTSIDIWSVGCIMAEMYTGRPLFPGTTNEDQMLRIFRIMGTPTEHNWPGISQFPEYKATAPRYATQDLRQILPQIDATGIDLLQRLLQLRPELRISAHDALQHPWFHDILQYQHCQQAAG

SEQ ID NO: 1294 - protein, 1104 aa, Fugu rubripes
MFNSGSSLKSKIRQVYNEKETNELVAIKKFKDSEENEEVKETTLRELKMLRTLKQDNIVELKEAFRRRGKLYLVFEYVERNMLELLEEHPTGAPPDKVRSYIYQLIKAINWCHKNEIVHRDIKPENLLISSDDILKLCDFGFARNLSEGTDANYTEYVATRWYRSPELLLGAPYGKAVDMWSVGCILGELSDGQPLFPGESEIDQLFTIQKVLGPLPAEQMKLFYNNPRFHGIRFPSVTHPQTLERRYQGILSGLMLDLMKNLLLLNPTERYLTEQSLNHPAFQPLRQVERERPAPPASPNPPRSSKRKTHHHGENTVPTRSHSKSTSRRSNSKECSSLPRHGDLHHLGSKSFLNGNKPPPSSLSPTLHPKSQYMSQTLNRSPSSSKDLVNNNLPHLLSPKEVKGKTEFDFNLGPSPKLPDQGHGAKYSHSKPSSSRSQQQQQQLQQQQQQQLQQQQLQLQQQQQQLQQQQLQQQQQQQQQQAIRHTFLENKNNTLQSGAEKQHSRHTHSMADSAHGSMSSSSKSSASYLSLSKSHSALSDAKSVGNLSDGRLHPDDPNSNTAGLGPGARFFPTSCLDLNAPTGPPGPPGSPSARHSDRSGHSPASRSSGNIRMESSTLDSSSRHKSRHKSSAPEEAGAPELLDPGGAAMPSTHTLPSPHESYHYGLGYTSPFSSQQRPQRHSMYVRRERHRPHGVEGGMAGLPAPGQGIPMRASSLQLLSPQLQHRTTLTGHSVSSSREDCTDDMTRSEQSPKDMGHPCAPIKDSARDNTAAFHTQRSKNEAGLYHDPHGEDGASSKENRMIFTESMPRRVGSFYRVPSPRPDNSSSFHDAVGQGRVPVGPVVPVDPVAMVGHSKRQTAFDWTAAEAMVMNPLEPVKEKEKQGFFRAIKKKKKKTQLVPGNGQEHLSLQRSTKSSSHHSSRRKNRERSRDRHREREQSRDRDRERERERERDRERERERGRELERSQPLKSLRRLLHLSPSSSNQRQQSPASPAPPPDLRFQAPLPNPPQPPSKAGYPETRGHADSRGHSGVSSSSQPKSRKASYPIPGQIESSWHVSALQRAEGAQFTPEQLGIKPGQNGPTFTRASRTRIPNLNDLKETAL

SEQ ID NO: 1295 - protein, 563 aa, Physcomitrella patens
  unsure (1)..(563): unsure at all Xaa locations
MMAVALPGQLNLDETPTWGSRSVDVYEKIEHIGEGTYGQVYMAKDKSTGEVVALKKVRMDNEKEGFPITAIREIKILKKLQHANVIKLKEIVTSKGPEKEDNIKPGDASKFKGSIYMVFEYMDHDLTGLADRPGMRFSIPQIKCYMKQLLTGLHYCHVNQVLHRDIKGSNLLIDNNGILKLADFGLARSFSNDQNGQPLTNRVITLWYRPPELLLGSTKYTPAVDMWSVGCIFAELLNGKPILPGRNESEQFQKICELCGSPDEXNWPRVSQLPYYNQFKPERLMKRRVKDVFKHFDRHALELLERMLTLDPDHRISAKDALDAEYFWVEPFPCQPSSLPKYEASHEYQTKKKRQQQRQQQEEQAKRMKVLHHPAPHTRLPPIQQQPLRPGPHQPGHNLGPPIHANGMANQHNNYNRGQGASNQGRAPGGGRPPHGGPNQNGGYGGPNRGGPGGAYGGPAQPGGFAAPNMGHQGGRGGAYGGPAGGVYPAGPYGGGRGPPVGGRGQQFGGMPGGPQPPAYGGQHYMQQPTAQYVDIDGAYARASHSGFQPPSPHRPDYRQQQR

SEQ ID NO: 1296 - protein, 303 aa, Physcomitrella patens
MDQYEKVEKIGEGTYGVVYKARDRLTNETIALKKIRLEQEDEGVPSTAIREISLLKEMHHGNIVRLQDVVHSEKRLYLVFEYLDLDLKKHMDTCPDLAKDPRLIKTFLYQILRGIAYCHAHRVLHRDLKPQNLLIDRRTNALKLADFGLARAFGIPVRTFTHEVVTLWYRAPEILLGSRHYSTPVDVWSVGCIFAEMVNQRPLFPGDSEIDELFKIFRTLGTPNEEVWPGVTSLPDFKTAFPKWPPKPLSSVVPSLEPAGIDLLEVCDLSTPASEFCVVLFFFIISTFSLIVRLKQCMQSYAS

SEQ ID NO: 1297 - protein, 294 aa, Picea abies
MEQYEKVEKIGEGTYGVVYKARDRLTNETIALKKIRLEQEDEGVPSTAIREISLLKEMQHGNIVRLQDVVHSEKRLYLVFEYLDLDLKKHMDSCPELAKDPRLIKTFLYQILRGIAYCHSHRVLHRDLKPQNLLIDRKTNALKLADFGLARAFGIPVRTFTHEVVTLWYRAPEILLGSRHYSTPVDVWSVGCIFAEMVNQRPLFPGDSEIDELFKIFRVLGTPNEETWPGVTSLPDFKSAFPKWPAKDLATVVPGLEPAGIDLLSKMLCLEPSKRITARSALEHEYFKDLGFVP

SEQ ID NO: 1298 - protein, 294 aa, Pinus contorta
MEQYEKVEKIGEGTYGVVYKARDRLTNETIALKKIRLEQEDEGVPSTAIREISLLKEMQHGNIVRLQDVVHSEKRLYLVFEYLDLDLKKHMDSCPELAKDPRLIKTFLYQILRGIAYCHSHRVLHRDLKPQNLLIDRKTNALKLADFGLARAFGIPVRTFTHEVVTLWYRAPEILLGSRHYSTPVDVWSVGCIFAEMVNQRPLFPGDSEIDELFKIFRVLGTPNEETWPGVTSLPDFKSAFPKWPAKDLATVVSGLEPAGIDILSKMLCLEPSRRITARSALEHEYFKDLGFVP

SEQ ID NO: 1299 - protein, 294 aa, Chenopodium rubrum
MDQYEKVEKIGEGTYGVVYKARDKVTNETIALKKIRLEQEDEGVPSTAIREISLLKEMQHGNIVRLQDVVHSEKRLYLVFEYLDLDLKKHMDSCPDFAKDPRMIKRFLYQILRGIAYCHSHRVLHRDLKPQNLLIDRQTNALKLADFGLARAFGIPVRTFTHEVVTLWYRAPEILLGSRHYSTPVDVWSVGCIFAEMVNQKPLFPGDSEIDELFKIFRTLGTPNEETWPGVTSLPDFKSSFPKWISKDLSAVVPNLDPAGIDLLNKMLCLDPSKRITARNALEHEYFKDIGFVP

SEQ ID NO: 1300 - protein, 288 aa, Plasmodium falciparum 3D7
MEKYHGLEKIGEGTYGVVYKAQNNYGETFALKKIRLEKEDEGIPSTTIREISILKELKHSNIVKLYDVIHTKKRLVLVFEHLDQDLKKLLDVCEGGLESVTAKSFLLQLLNGIAYCHDRRVLHRDLKPQNLLINREGELKIADFGLARAFGIPVRKYTHEVVTLWYRAPDVLMGSKKYSTTIDIWSVGCIFAEMVNGTPLFPGVSEADQLMRIFRILGTPNSKNWPNVTELPKYDPNFTVYEPLPWESFLKGLDESGIDLLSKMLKLDPNQRITAKQALEHAYFKENN

SEQ ID NO: 1301 - protein, 324 aa, Plasmodium falciparum 3D7
MENNSTERYIFKPNFLGEGSYGKVYKAYDTILKKEVAIKKMKLNKISNYIDDCGINFVLLREIKIMKEIKHKNIMSALDLYCEKDYINLVMEIMDYDLSKIINRKIFLTDSQKKCILLQILNGLNVLHKYYFMHRDLSPANIFINKKGEVKLADFGLCTKYGYDMYSDKLFRDKYKKNLNLTSKVVTLWYRAPELLLGSNKYNSSIDMWSFGCIFAELLLQKALFPGENEIDQLGKIFFLLGTPNENNWPEALCLPLYTEFTKATKKDFKTYFKIDDDDCIDLLTSFLKLNAHERISAEDAMKHRYFFNDPLPCDISQLPFNDL

SEQ ID NO: 1302 - protein, 368 aa, Prunus armeniaca
MATLVEPPDGIRQRGKHYYSMWQTLFEVDTKYVPIKPIGRGAYGIVCSSINRATNEKVAIKKINNVFENRIDALRTLRELKLLRHIRHENVIALKDVMMPIHRTSFKDVYFVYELMDTDLHQIIKSSQPLSSDHCKYFLFQLLRGLKYLHSANILHRDLKPGNLLINANCDLKICDFGLARTSGGTGQFMTEYVVTRWYRAPELLLCCDNYGTSIDVWSVGCIFAEILGRKPIFPGTECLNQLKLIINVLGSQHEPDLAFIDNPKARKYIKSLPYSRGTHFSRLYPQADPLAIDLLQRMLVFDPTKRISVTEALQHPYMSGLYDPRCNPPAQVPINLDIDENLAEPMIREMMWHEMLHYHPEAAFVNA

SEQ ID NO: 1303 - protein, 412 aa, Medicago sativa subsp. X varia
MTELDPSKKVADRYLKREVLGEGTYGVVYKAIDTQTGQTVAIKKIRIGKQKEGVNFTALREIKLLKELKDPNIIELIDCFPHKGNLHLVFEFMETDLEAVIRDRNIFLAPGDIKSYLQMTLKGLAHCHKKWILHRDMKPNNLLIGPNGQLKLADFGLARIFGSPDRRFTHQVFARWYRAPELLFGTKQYGPGVDVWAAACIFAELLLRRPFLQGSSDIDQLGKIFAAFGTPSPSQWPDMVYLPDYVEYQFVPAPPLRSLFPMATDDALDLLSKMFTYDPKDRISVQQALEHRYFTCPPQPTDPVKLPRPAPKKEIKPSDLNPPEGPTVLSPPRKTRRVMPGRDGLEGNSLQGDRVDDNHGNLKQTGGDNTGKNEPAPMSLDFSVFGLKPPNRPTINSADRSHLKRKLDLEFQ

SEQ ID NO: 1304 - protein, 391 aa, Arabidopsis thaliana
MPEQPKKVADRYLKQEVLGQGTYGVVFKATDTKTEQTVAIKKIRLGKQREGVNITALREIKMLKELKHPHIILLIDAFPHKENLHLVFEFMETDLEAVIRDSNIFLSPADIKSYLLMTFKGLAYCHDKWVLHRDMKPNNLLIGVDGQLKLADFGLARIFGSPNRKFTHQVFARWYRAPELLFGAKQYGAAVDVWAVACIFAELLLRRPFLQGNSDIDQLSKIFAAFGTPKADQWPDLTKLPDYVEYQFVPAPSLRSLFPAVSDDALDLLSKMFTYDPKARISIKQALEHRYFTSAPAPTDPAKLPKPVPKQDGKSSYGKHEAITVQSPPRKLRRVMPERGRVDSLKSHVDKDQQAPMSLDFTILAERPPNRPTITSADRSHLKRKLDLEFQ

SEQ ID NO: 1305 - protein, 398 aa, Arabidopsis thaliana
MEQPKKVADRYLKREVLGQGTYGVVFKATDTKNGETVAIKKIRLGKEKEGVNVTALREIKLLKELKHPHIIELIDAFPHKENLHIVFEFMETDLEAVIRDRNLYLSPGDVKSYLQMILKGLEYCHGKWVLHRDMKPNNLLIGPNGQLKLADFGLARIFGSPGRKFTHQVFARWYRAPELLFGAKQYDGAVDVWAAGCIFAELLLRRPFLQGNSDIDQLSKIFAAFGTPKADQWPDMICLPDYVEYQFVPAPSLRSLLPTVSEDALDLLSKMFTYDPKSRISIQQALKHRYFTSAPSPTDPLKLPRPVSKQDAKSSDSKLEAIKVLSPAHKFRRVMPDRGKSGNGFKDQSVDVMRQASHDGQAPMSLDFTILAERPPNRPTITSADRSHLKRKLDLEFL

SEQ ID NO: 1306 - protein, 348 aa, Arabidopsis thaliana
MSKSGDNQPVDRYLRRQILGEGTYGVVYKATDTKTGKTVAVKKIRLGNQKEGVNFTALREIKLLKELNHPHIVELIDAFPHDGSLHLVFEYMQTDLEAVIRDRNIFLSPGDIKSYMLMTLKGLAYCHKKWVLHRDMKPNNLLIGENGLLKLADFGLARLFGSPNRRFTHQVFATWYRAPELLFGSRQYGAGVDVWAAGCIFAELLLRRPFLPGSTEIDQLGKIFQAFGTPVPSQWSDMIYLPDYMEFSYTPAPPLRTIFPMASDDALDLLAKMFIYDPRQRITIQQALDHRYFSSSPSPTEPGKLQIPASKGDALEPKASEQNQHGNSPAVLSPPGKMRRVMGPEGFT

SEQ ID NO: 1307 - protein, 294 aa, Brassica napus
MDQYEKVEKIGEGTYGVVYKARDKVTNETIALKKIRLEQEDEGVPSTAIREISLLKEMQHSNIVKLQDVVHSEKRLYLVFEYLDLDLKKHMDSSPDFSKDLHMIKRYVYQILRGIAYCHSHRVLHRDLKPQNLLIDRRTNSLKLADFGLARAFGIPVRTFTHEVVTLWYRAPEILLGSHHYSTPVDIWSVGCIFAEMISQKPLFPGDSEIDQLFKIFRIMGTPTEDTWPGVTSLPDYKSAFPKWKPTDLESFVPNLDPNGIDLLSKMLLMDPTKRINARAALEHDYFKDIGVMP

SEQ ID NO: 1308 - protein, 203 aa, Isochrysis galbana
GEGTYGVVYKAQDTEDPQGATVALKKIWLDDRDEGVPVTTLREVALLRNLDHVNIVRMREFVTIPPRIYLVFEYLDHDLKACLDTKFRSGMPAPLVKSCALQILRGLAFCHSHRILHRDLKPQNVLIDNAGIVKLADFGLARASLLLNSQLYTNEVVTLWYRAPELLLGTQNYINSVDVWAAGCIFTELSCRMPLFPGDSEIE

SEQ ID NO: 1309 - protein, 428 aa, Glycine max
MTLSHAPLFAFTFISDMDHSKKVADRYLKREVLGEGTYGVVYKAIDTHTGQTVAIKKIRLGKRKEGVNFTALREIKLLKELKDPNIVELIDAFPHKGNLHLVFEFMETDLEAVIRDRNIFLSPSDTKSYLQMTLKGLAYCHKKWVLHRDMKPNNLLIGSNGQLKLADFGLARMFGSPDRRFTHQVFARWYRAPELLFGAKQYGPGVDVWAAGCIFAELLLRRPFLQGTSDIDQLGKIFSAFGIPTAPQWPDMVYLPDYVEYQYVLAPPLRSLFPMATDDALDLLSKMFTYDPKTRISVHQALEHRYFSSAPLPSDPDKLPRPAPKRESRVSDFNSQEGPTILSPPRKSRRVMPGRDGFEGNSLQADKVDASFGDFRQTTDDNTGKNESAPMSVDFSIFGLKPPNRPTINSADRSYLKRKLDLEFQQPE

SEQ ID NO: 1310 - protein, 436 aa, Glycine max
  unsure (1)..(436): unsure at all Xaa locations
MSDMDPSKKVADRYLKREVLGEGTYGVVYKAIDTHTGQTVAIKKIRLGKQKEGVNFTALREIKLLKELKDPNIVELIDAFPHKGNLHLVFEFMETDLEAVIRDRNIFLSPSDTKSYLQMTLKGLAYCHKKWVLHRDMKPNNLLIGSNGQLKLADFGLARMFGSPDRRFTHQVFARLXRAMEGLFVAQXXNPGVDVWAAGCIFAELLLRRPFLQGTSDIDQLGKIFSAFGTPTASQWPDMVYLPDYVEYQYVPAPPLRSLFPMVTDDALDLLSKMFTYDPKARISVQQALEHRYFSSAPLPSDPDKLPRPAPKRESRTSDFNLQEGPTVLSPPRKSRRVMPGRDGFEGSSLQADKVDASFGDFRQTTDDNTGKNESAPMSVEYYILRLKPPNRPTINSADRSYFQSKLDLRKKIKNLYPPLPLVPPCTFLFCTFSKN

SEQ ID NO: 1311 - protein, 397 aa, Glycine max
  unsure (1)..(397): unsure at all Xaa locations
MSDMDPSKKVADRYLKREVLGEGTYGVVYKAIDTHTGQTVAIKKIRLGKQKEGVNFTALREIKLLKELKDPNIVELIDAFPHKGNLHLVFEFMETDLEAVIRDRNIFLSPSDTKSYLQMTLKGLAYCHKKWVLHRDMKPNNLLIGSNGQLKLADFGLARMFGSPDRRFTHQVFARWYRAPELLFGAKQYGPGVVGSSAGCIFAELLLRRPFLQGTSDIDQLGKIFSAFGTPTASQWPDMVYLPDYVEYQYVPAPPLRSLFPMVTDDALDLLSKMFTYDPKARISVQQALEHRYFSSAPLPSDPDKLPRPAPKRESRTSDFNLQEGPTVLSPPRKSRRVMPGRDGFEGSSLQADKVDASFGDXXTDDNTVWVISTDDNXSADRSYLKRKLDLEFQQPE

SEQ ID NO: 1312 - protein, 229 aa, Glycine max
MAELDLSKKVADRYLKREVLGEGTYGVVYKAIDTKTGQTVAIKKIRLGKQKEGVNFTALREIKLLKELKDPNIIELIDAFPHKGNLHLVFEFMETDLEAVIRDRNIVLSPSDIKSYLQMTLKGLAICHKKWVLHRDMKPNNLLIGSNGQLKLADFGLARVFGSPDRRFTHQVFARWYRAPELLFGTKQYGPGVDVWAAACIFAELLLRRPFLHGSSDIDQLGKNFRAFG

SEQ ID NO: 1313 - protein, 291 aa, Medicago sativa
GENVEKIGEGTYGVVYKARDRVTNETIALKKIRLEQEDEGVPSTAIREISLLKEMQHRNIVRLQDVVHSDKRLYLVFEYLDLDLKKHMDSSPEFIKDPRQVKMFLYQMLCGIAYCHSHRVLHRDLKPQNLLIDRRTNSLKLADFGLARAFGIPVRTFTHEVVTLWYRAPEILLGSRHYSTPVDVWSVGCIFAEMANRRPLSPGDSEIDELFKIFRILGTPNEDTWPGVTSLPDFKSTFPRWPSKDLATVVPNLEPAGLDLLNSMLCLDPTKRITARSAVEHEYFKDIKFVP

SEQ ID NO: 1314 - protein, 294 aa, Medicago sativa
MEQYEKVEKIGEGTYGVVYKARDRATNETIALKKIRLEQEDEGVPSTAIREISLLKEMQHRNIVRLQDVVHSEKRLYLVFEYLDLDLKKFMDSSPEFAKDQRQIKMFLYQILCGIAYCHSHRVLHRDLKPQNLLIDRSSNAVKLADFGLARAFGIPVRTFTHEVVTLWYRAPEILLGSRHYSTPVDVWSVGCIFAEMINQRPLFPGDSEIDELFKIFRITGTPNEETWPGVTSLPDFKSAFPKWPAKDLATQVPNLEPAGLDLLSSTCRLDPTRRITARGALEHEYFKDIKFVP

SEQ ID NO: 1315 - protein, 280 aa, Phaseolus vulgaris
GEGTYGVVYKARDRVTNEAIALKKIRLEQEDEGVPSTAIREISLLKEMQHRNIVRLQDVVHSGKRLYLVFEYLDLDLKKHMDSSPEFAKDLRQVKMFLYQILCGIAYCHSHRVLHRDLKPQNLLIDRSTNSLKLADFGLARAFGIPVRTFTHEVVTLWYRAPEILLGSPRYSTPVDIWSVGCIFAEMVNQRPLFPGDSEIDELFKIFRILGTPNEDTWPGVTSLPDFKSAFPKWQPKDLKTVVPNLDPAGLDLLSRMLHLDPSKRITGRSALEHEYSERH

SEQ ID NO: 1316 - protein, 294 aa, Pisum sativum
MEQYEKVEKIGEGTYGVVYKARDRVTNETIALKKIRLEQEDEGVPSTAIREISLLKEMQHRNIVRLQDVVHSEKRLYLVFEYLDLDLKKHMDSSPEFSKDQRQVKMFLYQILCGIAYCHSHRVLHRDLKPQNLLIDRSSNALKLADFGLARAFGIPVRTFTHEVVTLWYRAPEILLGSRHYSTPVDVWSVGCIFAEMINQRPLFPGDSEIDELFKIFRITGTPNEDTWPGVTSLPDFKSAFPKWPSKDLATLVPSLEPSGLDLLSSMLRLDPSRRITARGALEHEYFKDIKFVP

SEQ ID NO: 1317 - protein, 293 aa, Oryza sativa (japonica cultivar-group)
MEQYEEEKIGEGTYGVVYKARDKVTNETIALKKIRLEQEDEGVPSTAIREISLLKEMHHRNIVRLHDVIHSEKRIGLVFEYLDLDLKKFMDSCPEFAKNPTLIKSYLYQILRGVAYCHSHRVLHRDLKPQNLLIDRRTNTLKLADFGLARAFGIPVRTFTHEVVTLWYRAPEILLGSRQYSTPVDMWSVGCIFAEMVNQKPLFPGDSEIDELFKIFRVLGTPNEQSWPGVSSLPDYKSAFPKWQAQALATIVPTLDPAGLDLLSKMLRYEPNKRITARQALEHEYFKDLEMER

SEQ ID NO: 1318 - protein, 294 aa, Daucus carota
MDQYEKVEKIGEGTYGVVYKARDRVTNETIALKKIRLEQEDEGVPSTAIREISLLKEMQHENIVRLQDVVHSEKRLYLVFEYLDLDLKKHMDSCPEFAKDPRLIKMFLYQILRGIAYCHSHRVLHRDLKPQNLLIDRRTNALKLADFGLARAFGIPVRTFTHEVVTLWYRAPEILLGSRHYSTPVDVWSVGCIFAEMVNQQPLFPGDSEIDELFKIFRIVGTPNEDTWPGVTALPDFKSAFPKWPSKELGNVVPNLDVAGLNLLKKMLCLDPSRRITARSALEHEYFKDIGIVP

SEQ ID NO: 1319 - protein, 441 aa, Cryptococcus neoformans var. neoformans
MDNTPRHLFQTPNNVYILQQPWQFVKELGQGAYGCVSSARNSSTGETCAVKKVTNVFQKKILTKRCLRELRLLHHFRGHKNITCLYDMDIVFDPPGSGQFREVYLYEELMEADLHAIIRSGQPLSDAHFQSFLYQTLCGLKYIHSANVLHRDLKPGNLLVNADCELKICDFGLARGFQPGAVQTDQGQAGFMTEYVATRWYRAPEIMLSFANYTSSIDMWSVGCILAELLGGKPIFKGEDYVDQLNKILNLLGTPTEDTLRRVGSPRAQDYIRSLPIKPRVKFGTLYPNASPLALDLLSKLLTFDPAKRYGCEEALEHPYLAVWHDPADEPLCEVPFDFSFEEEDSVSGMRDLILEEVRSFRYLVRQQTMPPVRKDSHELPPAPPAPQHPGAGVGPAFHEKRTAKAIWRNILGLHWRNSWRGRNYHRIIFVESVTVIGKHR

SEQ ID NO: 1320 - protein, 365 aa, Cryptococcus neoformans var. neoformans
MADFVKLSIFGTVFEVTTRYVDLQPVGMGAFGLVCSAKDQLSGTSVAIKKIMKPFSTPVLSKRTYRELKLLKHLRHENIISLSDIFISPLEDIYFVTELLGTDLHRLLTSRPLEKQFIQYFLYQILRGLKYVHSAGVVHRDLKPSNILVNENCDLKICDFGLARIQDPQMTGYVSTRYYRAPEIMLTWQKYDVAGDIWSTGCIFAEMLEGKPLFPGKDHVNQFSIITELLGTPPDDVIQTIASENTIRFVQSLPKREKVPFSTKFPNADPVSLDLLEKMLVFDPRTRISAAEGLAHEYLAPYHDPTDEPVAAEVFDWSFNDADLPVDTWKVMMYSEILDFHNLGDISQNEAEGPVTGEVPAAPAS

SEQ ID NO: 1321 - protein, 294 aa, Petroselinum crispum
MDQYEKVEKIGEGTYGVVYKARDRVTNETIALKKIRLEQEDEGVPSTAIREISLLKEMQHGNIVRLQDVVHSEKRLYLVFEYLDLDLKKHMDSCPEFAKDPRLIKMFLYQILRGIAYCHSHRVLHRDLKPQNLLIDRRTNALKLADFGLARAFGIPVRTFTHEVVTLWYRAPEILLGSRHYSTPVDVWSVGCIFAEMVNQRPLFPGDSEIDELFKIFRITGTPNEDTWPGVTSLPDFKSAFPKWPSKELETVVPNLDSAGLNLLKKMLCLDPSRRITARIALEHEYFKDIGIVP

SEQ ID NO: 1322 - protein, 355 aa, Botryotinia fuckeliana
MTARAPNPASGSRKISFNVSEQYDIQDVVGEGAYGVVCSALHKPSGQKVAIKKITPFDHSMFCLRTLREMKLLRYFNHENIISILDIQKPRNYESFTEVYLIQELMETDMHRVIRTQDLSDDHCQYFIYQTLRALKAMHSANVLHRDLKPSNLLLNANCDLKVCDFGLARSAASQEDNSGFMTEYVATRWYRAPEIMLTFKEYTKAIDVWSVGCILAEMLSGKPLFPGKDYHHQLTLILDVLGTPTMEDYYGIKSRRAREYIRSLPFKKKVPFKTMFPKTSDLALDLLEKLLAFNPVKRITVEEALKHPYLEPYHDPEDEPTANPIPEEFFDFDKNKDNLTKEQLKKLIYDEIMR

SEQ ID NO: 1323 - protein, 394 aa, Capsicum annuum
MDGPAQQTDTVMAEAAAAQQPAPPSQPVAGIDNIPATLSHGGRFIQYNIFGNVFEVTAKYKPPIMPIGKGAYGIVCSALNSETNEHVATKKIANAFDNKIDAKRTLREIKLLRHMDHENIVAIRDIIPPPQREAFNDVYIAYELMDTDLHQIIRSNQGLSEEHCQYFLYQILRGLKYIHSANVLHRDLKPRNLLLNANCDLKICDFGLARVTSETDFMTEYVVTRWYRPPELLLNSSDYTAAIDVWSVGCIFMELMDRKPLFPGRDHVQQLRLLMELIGTPSEAEMEFLNENAKRYIRQLPLYRRQSFVEKFPHVNPAAIDLVEKMLTFDPRRRLTVEDALAHPYLTSLHDISDEPVCTTPFSFDFEQHALTEEQMKELIYREGLAFNPEYQHM

SEQ ID NO: 1324 - protein, 375 aa, Capsicum annuum
MVDANMGAAGGQFPEFPNIVTHGGQYVQYDIFGNFFEITTKYRPPIMPIGRGAYGIVCSVFNAELNEMVAVKKIANAFDNYMDAKRTLREIKLLRHLDHENVIGLRDVIPPPLRREFSDVYIATELMDTDLHQIIRSNQGLSEDHCQYFMYQLLRGLKYIHSANVIHRDLKPSNLLLNANCDLKICDFGLARPNLENENMTEYVVTRWYRAPELLLNSSDYTEAIDVWSVGCIFMELMNRKPLFAGKDHVHQIRLLTELLGTPTESDLSFLRNEDAKRYIRQLPQHPRQQLAKVFPHVNSLAIELVDKMLTLNPTGRITVEEALAHPYLAKLHDAADEPVCPVPFSFDFEQQGIGEEQIKDMIYQEALVLNPEYA

SEQ ID NO: 1325 - protein, 294 aa, Lycopersicon esculentum
MDQYEKVEKIGEGTYGVVYKARDRVTNETIALKKIRLEQEDEGVPSTAIREISLLKEMQHANIVRLQDVVHSEKRLYLVFEYLDLDLKKHMDSCPEFSKDPRLVKMFLYQILRGIAYCHSHRVLHRDLKPQNLLIDRRTNALKLADFGLARAFGIPVRTFTHEVVTLWYRAPEILLGSRHYSTPVDVWSVGCIFAEMVNQPPLFPGDSEIDELFKIFRVLGTPNEDTWPGVTSLPDYKSAFPKWPPKDLAIIVPNVDGAGLDLLGKMLSLDPSKRITARNALEHEYFKDIGYVP

SEQ ID NO: 1326 - protein, 294 aa, Lycopersicon esculentum
MDQYEKVEKIGEGTYGVVYKARDRVTNETIALKKIRLEQEDEGVPSTAIREISLLKEMQHGNIVRLQDVVHSEKRLYLVFEYLDLDLKKHMDSCPEFSKDPRLVKMFLYQILRGIAYCHSHRVLHRDLKPQNLLIDRRTNVLKLADFGLARAFGIPVRTFTHEVVTLWYRAPEILLGSRHYSTPVDVWSVGCIFAEMVNQRPLFPGDSEIDELFKIFRVVGTPNEDTWPGVTSLPDFKSAFPKWPSKDLGTVVPNLGAAGLDLIGKMLTLDPSKRITARSALEHEYFKDIGFVP

SEQ ID NO: 1327 - protein, 294 aa, Nicotiana tabacum
MDQYEKVEKIGEGTYGVVYKARDRVTNETIALKKIRLEQEDEGVPSTAIREISLLKEMQHANIVRLQDVVHSEKRLYLVFEYLDLDLKKHMDSSPEFSKDPRLVKMFLYQILRGIAYCHSHRVLHRDLKPQNLLIDRRTNALKLADFGLARAFGIPVRTFTHEVVTLWYRAPEILLGSRHYSTPVDVWSVGCIFAEMVTQRPLFPGDSEIDELFKIFRVMGTPNEDTWPGVTTLPDFKSAFPKWPSKDLATIVPNLDGAGLDLLDKMLRLDPSKRITARNALEHEYFKDIGYVP

SEQ ID NO: 1328 - protein, 294 aa, Nicotiana tabacum
MDQYEKVEKIGEGTYGVVYKARDRVTNETIALKKIRLEQEDEGVPSTAIREISLLKEMQHANIVRLQDVVHSEKRLYLVFEYLDLDLKKHMDSSPEFSEDPRLVKMFLYQILRGIAYCHSHRVLHRDLKPQNLLIDRRTNALKLADFGLARAFGIPVRTFTHEVVTLWYRAPEILLGSRHYSTPVDVWSVGCIFAEMVTQRPLFPGDSEIDELFKIFRVMGTPNEDTWPGVTTLPDFKSAFPKWPSKDLATIVPNLDGAGLDLLDKMLRLDPSKRITARNALEHEYFKDIGYVP

SEQ ID NO: 1329 - protein, 294 aa, Nicotiana tabacum
MDQYEKVEKIGEGTYGVVYKARDRVTNETIALKKIRLEQEDEGVPSTAIREISLLKEMQHANIVRLQDVVHSEKRLYLVFEYLDLDLKKHMDSSPEFSKDPRLVKMFLYQILRGIAYCHSHRVLHRDLKPQNLLIDRRTNALKLADFGLARAFGIPVRTFTHEVVTLWYRAPEILLGTRHYSTPVDVWSVGCIFAEMVTQRPLFPGDSEIDELFKIFRVMGTPNEDTWPGVTTLPDFKSAFPKWPSKDLATIVPNLDGAGLDLLDKTSRLDPSKRITARNALEHEYFKDIGYVP

SEQ ID NO: 1330 - protein, 293 aa, Nicotiana tabacum
MDQYEKVEKIGEGTYGVVYKARDRVTNETIALKKIRLEQEDEGVPSTAIREISLLKEMQHANIVRLQDVVHSEKRLYLVFEYLDLDLKNTWITTPEFSEDPRLVKMFLYQILRGIAYCHSHRVLHRDLKPQNLLIDRRTNALKLADFGLARAFGIPVRTFTHEVVTLWYRAPEILLGSRHYSTPVDVWSVGCIFAEMVTQRPLFPGDSEIDELSRFRVMGTPNEDTWPGVTTLPDFKSAFPKWPSKDLATIVPNLDGAGLDLLDKIVRLDPSKRITARNALEHEYFKDIGYVP

SEQ ID NO: 1331 - protein, 393 aa, Nicotiana benthamiana
MDGSGQQSDTMMSDAGAEQPPPAAQPVAGMDNIPATLSHGGRFIQYNIFGNIFEVTAKYKPPILPIGRGAYGIVCSALNSETIENVAIKKIANAFDNKIDAKRTLREIKLLRHMDHENIVAIRDIIPPPQREAFNDVYIAYELMDTDLHQIIRSNQGLSEEHCQYFLYQILRGLKYIHSANVLHRDLKPSNLLLNANCDLKICDFGLARVTSETDFMTEYVVTRWYRPPELLLNSSDYTAAIDVWSVGCIFMELMDRKPLFPGRDHVHQLRLIMELIGTPSEAEMEFLNENAKRYIRQLPLYRRQSFTEKFPHVHPDAIDLVETMLTFDPRRRITVEGALAHPYLNSLHDISDEPICMTPFSFDFEQHALTEEQMKELIYRESLAFNPEYQHM

SEQ ID NO: 1332 - protein, 376 aa, Nicotiana benthamiana
MADANMGGGGGGQFPDFPSVLTHGGQYVQYDIFGNFFEITTKYRPPIMPIGRGAYGIVCSVLNTELNEMVAVKKIANAFDNYMDAKRTLREIKLLRHLDHENVIGLRDVIPPPLRREFSDVYIATELMDTDLHQIIRSNQGLSEDHCQYFMYQLLRGLKYIHSANVLHRDLKPSNLLLNANCDLKICDFGLARPNIENENMTEYVVTRWYRAPELLLNSSDYTAAIDVWSVGCIFMELMNRKPLFAGKDHVHQIRLLTELLGTPTEADLGFLQNEDAKRYIRQLPQHPRQQLANVFPHVNPLAIDLVDKMLTLDPTRRITVEEALDHPYLAKLHDAGDEPICPVPSSFDFEQQGIGEEQIKDMIYQEALSLNPEYA

SEQ ID NO: 1333 - protein, 307 aa, Petunia x hybrida
MDQYEKVEKIGEGTYGVVYKARDRVTNETIALKKIRLEQEDEGVPSTAIREISLLKEMQHANIVRLQDVVHTVKSDCILSFEYLDLDLKKHMDSSPEFSKDPRLVKMFLYQILRGIAYCHSHRVLHRVLHRDLKPQNLLIGRRTNALKLADFGLARAFGIPVRTFTHEVVTLWYRAPEILLGSRHYSTPVDVWSVGCIFAEMVTQRPLFPGDSEIDELFKIFRVMGTPNEDTWPGVTTLPDFKSALPKWPSKDLATIVPNLDGAGLDLLDKTVRLDPSKRITARNALEHEYFKDIGYVFRSKGSSRV

SEQ ID NO: 1334 - protein, 365 aa, Ipomoea batatas
MVGGGDFLAVQTHGGQYVQYDIFGNLFEVTSKYAPPITPIGRGAYGIVCSALNAETNEMVAIKKIADAFDNYMDAKRTLREIKLLRHLEHENVIAIKDVIPPPLRREFNDVYIATELMDTDLHQIIRSNQGLSEEHCQYFLYQILRGLKYIHSANVIHRDLKPSNLLLNSNCDLKICDFGLARTNLDNEFMTEYVVTRWYRAPELLLNSSDYTAAIDVWSVGCIFMELMNRKPLFQGKDHVHQMRLITELLGTPTDSDLGSIQNENARRYIRQLPLRPRQQLANGFPHVHPLAIDLMDKMLTFNPSKRITVEEALAHPYLAQLHDKSDEPICPVPFTDFEKQAYGEEQIKDMIYQEALAMNPGYA

SEQ ID NO: 1335 - protein, 302 aa, Antirrhinum majus
MVSSHRSLMEQYEKVEKIGEGTYGVVYKARDRVTNETIALKKIRLEQEDEGVPSTAIREISLLKEMQHGNIVRLQDVVHSEKRLYLVFEYLDLDLKKHMDSCPEFSQDPRLVKMFLYQILRGIAYCHSHRVLHRDLKPQNLLIDRRTNALKLADFGLARAFGIPVRTFTHEVVTLWYRAPEILLGSRHYSTPVDVWSVGCIFAEMVNQRPLFPGDSEIDELFKIFRVMGTPNEETWPGVTSLPDFKSAFPKWPAKELAAVVPNLDASGLDLLDKMLRLDPSKRITARNALQHEYFKDIGFVP

SEQ ID NO: 1336 - protein, 294 aa, Antirrhinum majus
MEQYEKVEKIGEGTYGVVYKARDRVTNETIALKKIRLEQEDEGVPSTAIREISLLKEMQHGNIVRLQDVVHSEKRLYLVFEYLDLDLKKHMDSCPEFSQDPRLVKMFLYQILRGIAYCHSHRVLHRDLKPQNLLIDRRTNALKLADFGLARAFGIPVRTFTHEVVTLWYRAPEILLGSRHYSTPVDVWSVGCIFAEMVNQRPLFPGDSEIDELFKIFRVMGTPNEETWPGVTSLPDFKSAFPKWPAKELAAVVPNLDASGLDLLDKMLRLDPSKRITARNALQHEYFKDIGFVP

SEQ ID NO: 1337 - protein, 280 aa, Antirrhinum majus
AYGVVYKARDIETNEDIALKKIRLEQEDEGVPSTAIREISLLKEMHHENIVNLKDVVHREKRLYLVFEYLDLDLKKHMDSCPEFSQDLHMVKMFLCQILRGVAYCHSHRVLHRDLKPQNLLIDRGSNTIKLADFGLARAFGIPVRTFTHEVVTLWYRAPEVLLGSRHYSTPVDVWSVGCIFAEMVNQKPLFPGDSEIDELHKIFRIIGTPNEDIWPGVTSLPDFKSSFPKWPPKELATIVPNLGATGLDLLCKMLQLDPSKRITAKKALEHEYFKDIVLP

SEQ ID NO: 1338 - protein, 294 aa, Helianthus annuus
MEQYEKVEKIGEGTYGVVYKARDKVTNETIALKKIRLEQEDEGVPSTAIREISLLKEMQHGNIVRLQDVVHSDKRLYLVFEYLDLDLKKHMDSCPEFSKDPRLVKTFLYQILRGIAYCHSHRVLHRDLKPQNLLIDRRTNALKLADFGLARAFGIPVRTFTHEVVTLWYRAPEILLGSRHYSTPVDVWSVGCIFAEMVNQRPLFPGDSEIDELFKIFRIMGTPNEETWPGVTSLPDFKSAFPKWSSKDLATVVPNLEKTGLDLLRKMLCLDPSKRITARTALEHEYFKDIGFVP

SEQ ID NO: 1339 - protein, 294 aa, Helianthus tuberosus
MEQYEKVEKIGEGTYGVVYKARDKVTNETIALKKIRLEQEDEGVPSTAIREISLLKEMQHGNIVRLQDVVHSDKRLYLVFEYLDLDLKKHMDSCPEFSKDPRLVKTFLYQILRGIAYCHSHRVLHRDLKPQNLLIDRRTNALKLADFGLARAFGIPVRTFTHEVVTLWYRAPEILLGSRHYSTPVDVWSVGCIFAEMVNQRPLFPGDSEIDELFKIFRIMGTPNEETWPGVTSLPDFKSAFPKWSSKDLATVVPNLEKAGLDLLCKMLWLDPSKRITARTALEHEYFKDIGFVP

SEQ ID NO: 1340 - protein, 362 aa, Dictyostelium discoideum
MDKYMIEALIGEGTYGVVSRATVKATGQIVAIKKIRKILIQNQTDDGINFSAIREIKILQELKHDNVVNLLDIFAHKSNVYLVFELMQWDLQEVIEDKSIILKPADIKSYMKMLLQGIEACHRNWVLHRDLKPNNLLMSINGDLKLADFGLARQYGSPNKVFSPQAVTIFYRAPELLFGAKSYGPSVDIWSIGCIFAELMLRTPYLPGTGEIDQLRKICSALGTPNESNWPGVTCLPNYIKFTDHPATPFKQLFTAASDEAIDLISKMLLFNPSNRISAADALNHPYFTSGVKHTNPADLPVPFAKKASLLQQRQVLAQVQQQLLQKQQQQQQQQQQQIQSQPEPIQGDNVEQTQQAQQGKK

SEQ ID NO: 1341 - protein, 362 aa, Dictyostelium discoideum
MDKYNIEALIGEGTYGVVSRATVKATGQIVAIKKIRKILIQNQTDDGINFSAIREIKILQELKHDNVVNLLDIFAHKSNVYLVFELMQWDLQEVIEDKSIILKPADIKSYMKMLLQGIEACHRNWVLHRDLKPNNLLMSINGDLKLADFGLARQYGSPNKVFSPQAVTIFYRAPELLFGAKSYGPSVDIWSIGCIFAELMLRTPYLPGTGEIDQLRKICSALGTPNESNWPGVTCLPNYIKFTDHPATPFKQLFTAASDEAIDLISKMLLFNPSNRISAADALNHPYFTSGVKHTNPADLPVPFAKKASLLQQRQVLAQVQQQLLQKQQQQQQQQQQQIQSQPEPIQVDNVEQTQQAQQVKK

SEQ ID NO: 1342 - protein, 369 aa, Avena sativa
MDGAPVAEFRPTMTHGGRFLLYNIFGNQFEITSKYQPPIMPIGRGAYGIVCSVMNFETREMVAIKKIANAFDNNMDAKRTLREIKLLRHLDHENIVGLRDVIPPSIPQSFNDVYIATELMDTDLHHIIRSNQELSEEHCQYFLYQLLRGLKYIHSANVIHRDLKPSNLLLNANCDLKICDFGLARPSSESDMMTEYVVTRWYRAPELLLNSTDYSAAIDVWSVGCIFMELINRAPLFPGRDHMHQMRLITEVIGTPTDDDLGFIRNEDARRYMRHLPQFPRRPFPGQFPKVQPAALDLIERMLTFNPLQRITVEEALEHPYLERLHDVADEPICTDPFSFDFEQHPLTEDQMKQLIFNEALELNPNFRY

SEQ ID NO: 1343 - protein, 308 aa, Sorghum bicolor
MEINIVDKYEKLEKVGEGTYGKVYKAQDKATGQLVALKKTRLEMDEEGIPPTALREISLLNLLSHSIYVVRLLAVEQAAKNGKPVLYLVFEFLDTDLKKYLDVYRRGPAARPLPATLIKNFLYQLCKGVAHCHGHGVLHRDLKPQNLLVDKDKGILKIADLGLGRAFTVPMKSYTHEIVTLWYRAPEVLLGATHYSTGVDMWSVGCIFAEMARRQALFPGDSELQQLLHIFRLLGTPSEEQWPGVSELRDWHEFPQWKPQSLARVVPTLEPEGVDLLSKMLQLDPSNRISAIAAMEHPYFDSLDKSQF

SEQ ID NO: 1344 - protein, 285 aa, Triticum aestivum
  unsure (1)..(285): unsure at all Xaa locations
MASGGGDDAGEKRVTDRYLKREVLGEGTYGVXVFKAIDTKTGETVAIKRIRLGKYKEGVNFTALREIKLLKELKDPNIIELIDAFPYKGNLHLVFEFMETDLEAVIRDRNIVLSPADIKSYIQMMLKGLAFCHKKWVLHRDMKPNNLLIGAEGQLKLGDFGLARIFGSPERNFTHQVFARWYRAPELLFGTKQYGSAVDVWAAXGCIFAELLLRRPFLQGSSDIDQLGKIFAAFGTPKSSQWPDMVCLPDYVEYQFVSAPPLRSLFPMASDDALDLLSRMFTYDP

SEQ ID NO: 1345 - protein, 429 aa, Zea mays
  unsure (1)..(429): unsure at all Xaa locations
MASAGNSGSGDDDAGGKLLADRYQKGEVLGEGTYGVVFKAIDTKTGNTVAVKRIRIGKDKKEGVNFTALREIKLLKELKDPNIIELIDCFPYKENLHLVFEFMETDLEALIKDKNIILSPADTKSYVQMMLKGLAFCHKKWVLHRDMKPNNLLIGADGQLKLADFGLARVFGSPGRNFTHQVFARWYRAPELLFGSKQYGSGVDIWAAGCIFAELLTRRAFLQGSSDIDQLGKIFAALGTPKSSQWPDMVYLPDYVEYQYVAAPPLRTLFPMASDDALDLLSKMLTYDPKARISAQQALEHRYFSSLPAPTRPSQLPRPRRKGDQGNNKIPDLNLQDGPMVLSPPRKLRRVTAHEGMEXXMHRTDKVDEHPSGMRHTDDMPSQSSRIPMSVDVGAVFGTRPAPRPTLNSADKSRLKRKLDMDPEFGYAE

SEQ ID NO: 1346 - protein, 430 aa, Zea mays
  unsure (1)..(430): unsure at all Xaa locations
MASAGISGSGDDDAGGKLLADRYQKGEVLGEGTYGVVFKAIDTKTGNTVAVKRIWVGKDKKEGVNFTALREIKLLKELKGPNIIELIDCFPYKENLHLVFEFMETDLEALIKDKNIILSPADTKSYLQMLLKGLSFCHKKWVIHRDMKPNNLLIGADGQLKLADFGLARMFGSPGRNFTHQVFARWYRAPELLFGSKHYGSGVDIWAAGCIFAELLTRRAFLQGSSDIDQLGKIFAALGTPKSSQWPDMVYLPDYVEYQYVAAPPLRTLLPMASDDALDLLSRMLTYDPKARISAQQALEHRYFSSLPAPTRPSQLLRSRWKGDQGNNKMPDLNLQHGPLVLSPPRKLRRVIAHEWMEXXMHRADKVDEHPSGMRHTDDMPSQKSSRIPMSVDVGALFGTRPAPRPTLNSADKSRLKRKLDMDPEFGFAE

SEQ ID NO: 1347 - protein, 372 aa, Zea mays
  unsure (1)..(372): unsure at all Xaa locations
XPRVRVNFTALREIKLLKELKGPNIIELIDCFPYKENLHLVFEFMETDLEALIKDKNIILSPADTKSYLQMLLKGLSFCHKKWVIHRDMKPNNLLIGADGQLKLADFGLARMFGSPGRNFTHQVFARWYRAPELLFGSKQYGSGVDIWAAGCIFAELLTRRAFLQGSSDIDQLGKIFAALGTPKSSQWPDMVYLPDYVEYQYVAAPPLRTLLPMASDDALDLLSKMLTYDPKARISAQQALEHRYFSSLPAPTRPSQLLRSRWKGDQGNNKMPDLNLQHGPLVLSPPRKLRRVIAHEWMEXXMHRADKVDEHPSGMRHTDDMPSQKSSRIPMSVDVGAVFGTRPAPRPTLNSADKSRLKRKLDMDPEFGFAE

SEQ ID NO: 1348 - protein, 204 aa, Zea mays
  unsure (1)..(204): unsure at all Xaa locations
XDSWADSWVSYALGTPKSSQWPDVVYLRDYVEYQYVAAPPLRTLLPMASDDALDLLSRMLTYDPKARISAQQALEHRYFSSLPAPTRPSQLPRPRRKGDQGNNKMPDLNLQHGPLVLSPPRKFRRVTAHEGMEXXMHRADXVDEHPSGMRHTDDMPSQSSRIPMSVDVGAVFGTRPAPRPTLNSADKSRLKRKLDMDPEFGYAE

SEQ ID NO: 1349 - protein, 294 aa, Allium cepa
MDQYEKVEKIGEGTYGVVYKARDRLTNETIALKKIRLEQEDEGVPSTAIREISLLKEMQHANIVRLQDVVHSEKRIYLVFEYLDLDLKKHMDSCPDFAKDSRLAKTFLYQLLRGIAYCHSHRVLHRDLKPQNLLIDRRTNSLKLADFGLARAFGIPVRTFTHEVVTLWYRAPEILLGARQYSTPVDIWSVGCIFAEMVNQRPLFPGDSEIDELFKIFRIMGTPNEDTWPGVTSLPDFKSAFPKWPAKDLATIVPKLDSAGIDLLYKMLHLEPSKRITARKALEHEYFRDLGTIP

SEQ ID NO: 1350 - protein, 300 aa, Pneumocystis carinii
MEQYQRLEKIGEGTYGVVYKAKDLESGTIVALKKIRLEAEDEGVPSTAIREISLLKEMHNDNVVRLLNIIHQESRLYLVFEFLDLDLKKYMNSIPKDMMLGAEMIKKFMSQLVSGVKYCHSHRILHRDLKPQNLLIDREGNLKLADFGLARAFGVPLRGYTHEVVTLWYRAPEVLLGGRQYATALDIWSIGCIFAEMATKKPLFPGDSEIDEIFRIFRILGTPDENSWPGITSYPDFKATFPKWSPKNLGELITELDSDGIDLLQKCLRYYPAERISAKKALDHPYFDDFININRSNVVL

SEQ ID NO: 1351 - protein, 300 aa, Pneumocystis carinii
MEQYQRLEKIGEGTYGVVYKAKDLESGTIVALKKIRLEAEDEGVPSTAIREISLLKEMHNDNVVRLLNIIHQESRLYLVFEFLDLDLKKYMNSIPKDMMLGAEMIKKFMSQLVSGVKYCHSHRILHRDLKPQNLLIDREGNLKLADFGLARAFGVPLRGYTHEVVTLWYRAPEVLLGGRQYATALDIWSIGCIFAEMATKKPLFPGDSEIDEIFRIFRILGTPDENSWPGITSYPDFKATFPKWSPKNLGELITELDSDGIDLLQKCLRYYPAERISAKKALDHPYFDDFINLNRSNVVL

SEQ ID NO: 1352 - protein, 294 aa, Populus tremula x Populus tremuloides
MDQYEKVEKIGEGTYGVVYKARDRVTNETIALKKIRLEQEDEGVPSTAIREISLLKEMQHGNIVRLQDVVHSEKRLYLVFEYLDLDLKKHMDSSPEFAKDPRLVKTFLYQILRGIAYCHSHRVLHRDLKPQNLLIDRRTNALKLADFGLARAFGIPVRTFTHEVVTLWYRAPEILLGSRHYSTPVDVWSVGCIFAEMVNQKPLFPGDSEIDELFKIFRILGTPNEDTWPGVTSLPDFKSAFPKWPSKDLATVVPTLEKAGVDLLSKMLFLDPTKRITARSALEHEYFKDIGFVP

SEQ ID NO: 1353 - protein, 335 aa, Schizosaccharomyces pombe
MDIEKSDKWTYVKERKVGEGTYAVVFLGRQKETNRRVAIKKIKVGQFKDGIDISALREIKFLRESRHDNVIELVDVFSTKSNLNIILEFLDSDLEMLIKDKFIVFQPAHIKSWMVMLLRGLHHIHSRFILHRDLKPNNLLISSDGVLKLADFGLSRDFGTPSHMSHQVITRWYRPPELFMGCRSYGTGVDMWSVGCIFAELMLRTPYLPGESDLDQLNVIFRALGTPEPEVIKSMQQLPNYVEMKHIPPPNGGMEALFSAAGHEEIDLLKMMLDYNPYRRPTAQQALEHHYFSALPKPTHPSLLPRKGGEEGIKHVSSDLQRQNNFPMRANIKFV

SEQ ID NO: 1354 - protein, 426 aa, Pichia pastoris
MSGDHKSFTVFNQEFIIDRDFELIKALGQGAYGVVCSAQYKGNEDGGKVAIKKVTNIFSKKILAKRALREIKLLRHFRGHKYITCLYDLDVIPDQNNNFNEIYLYEELMECDLHHIIKSKQPLTDSHYQSFIYQILGGLKYIHSADVLHRDLKPVNLLVNSDCELKICDFGLARGYSSDAEKNAGFLTEYVATRWYRAPEIILSFQTYTKAIDIWSVGCILAELLGGRPIFRGRDYVDQLNLILSTLGTVSEETLQSIRSERAQDYVRSLPFMPKIPFSQLFPGANPEAIDLLDRMLTVDPTHRITVTEALEHPYLKVWHDPNDEPVCSSKFDFSFEVVDDIETMKQMIVDEVLSLREFVRRPIQEQQLPFTEPDKHFDVSFDQPQIEPPAENYRDDHLPRPHELESQILDLEHELQYGLDRYGTQ

SEQ ID NO: 1355 - protein, 306 aa, Saccharomyces cerevisiae
MKVNMEYTKEKKVGEGTYAVVYLGCQHSTGRKIAIKEIKTSEFKDGLDMSAIREVKYLQEMQHPNVIELIDIFMAYDNLNLVLEFLPTDLEVVIKDKSILFTPADIKAWMLMTLRGVYHCHRNFILHRDLKPNNLLFSPDGQIKVADFGLARAIPAPHEILTSNVVTRWYRAPELLFGAKHYTSAIDIWSVGVIFAELMLRIPYLPGQNDVDQMEVTFRALGTPTDRDWPEVSSFMTYNKLQIYPPPSRDELRKRFIAASEYALDFMCGMLTMNPQKRWTAVQCLESDYFKELPPPSDPSSIKIRN

SEQ ID NO: 1356 - protein, 352 aa, Cochliobolus heterostrophus
MPPAGSGSSRKISFNVSEQYDIQDVVGEGAYGVVCSALHKPSGQKVAIKKITPFDHSMFCLRTLREMKLLRYFNHENIISILDIQKPRNYETFTEVYLIQELMETDMHRVIRTQELSDDHCQYFIYQTLRALKAMHSANVLHRDLKPSNLLLNANCDLKVCDFGLARSAASTEDNSGFMTEYVATRWYRAPEIMLTFKEYTKAIDVWSVGCILAEMLSGKPLFPGKDYHHQLTLILDVLGTPTMEDYYGIKSRRAREYIRSLPFKKKIPWKAIFPKTNDLALDLLERLLAFNPVKRISVEDALKHPYLEPYHDPDDEPGADPIPEEFFDFDKNKDNLTKEQLKLLIYQEIMR

SEQ ID NO: 1357 - protein, 352 aa, Leptosphaeria maculans
MPPTGSGSSRKISFNVSEQYDIQDVVGEGAYGVVCSALHKPSGQKVAIKKITPFDHSMFCLRTLREMKLLRYFNHENIISILDIQKPRNYETFTEVYLIQELMETDMHRVIRTQELSDDHCQYFIYQTLRALKAMHSANVLHRDLKPSNLLLNANCDLKVCDFGLARSAASTEDNSGFMTEYVATRWYRAPEIMLTFKEYTKAIDVWSVGCILAEMLSGKPLFPGKDYHHQLTLILDVLGTPTMEDYYGIKSRRAREYIRSLPFKKKIPWKAMFPKTNDLALDLLERLLAFNPVKRITVEEALKHPYLEPYHDPDDEPTADPIPEEFFDFDKNKDNLTKEQLKLLIYQEIMR

SEQ ID NO: 1358 - protein, 324 aa, Ajellomyces capsulatus
MENYQKIEKIGEGTYGVVYKARDLTHPNRIVALKKIRLEAEDEGVPSTAIREISLLKEMHDPNIVRLLNIVHADGHKLYLVFEFLDLDLKKYMEALPVSEGGRGKALPDGSTLDMNRLGLGEAMVKKFMAQLVEGIRYCHSHRVLHRDLKPQNLLIDREGNLKLADFGLARAFGVPLRTYTHEVVTLWYRAPEILLGGRQYSTGVDMWSVGAIFAEMCTRKPLFPGDSEIDEIFKIFKLLGTPDENTWPGVTSFPDFKASFPKWKREDTRKLVPGLERNGLDLLDAMLEYDPARRISAKQACMHPYFQAGSSAYSGRERLQPYP

SEQ ID NO: 1359 - protein, 365 aa, Aspergillus fumigatus
MAEFVRAQIFGTTFEITSRYNLQPVGMGAFGLVCSARDQLTGQPVAVKKIMKPFSTPVLSKRTYRELKLLKHLRHENIISLSDIFISPLEDIYFVTELLGTDLHRLLTSRPLEKQFIQYFLYQILRGLKYVHSAGVVHRDLKPSNILINENCDLKICDFGLARIQDPQMTGYVSTRYYRAPEIMLTWQKYDVEVDIWSAGCIFAEMLEGKPLFPGKDHVNQFSIITELLGTPPDDVIQTICSENTLRFVKSLPKRERQPLANKFKNADPEAVDLLERMLVFDPKKRIRAGEALAHEYLSPYHDPTDEPEAEEKFDWSFNDADLPVDTWKIMMYSEILDFHNIDQGNDAGQVLMEGGVAQAQQNYA

SEQ ID NO: 1360 - protein, 358 aa, Cryphonectria parasitica
MAEFVRAQIFGTTFEITSRYSDLQPVGMGAFGLVCSARDQLTNQNVAIKKIMKPFSTPVLAKRTYRELKLLKHLRHENIISLSDIFISPLEDIYFVTELLGTDLHRLLTSRPLEKQFIQYFLYQIMRGLKYVHSAGVVHRDLKPSNILVNENCDLKICDFGLARIQDPQMTGYVSTRYYRAPEIMLTWQKYDVEVDIWSAGCIFAEMLEGKPLFPGKDHVNQFSIITELLGTPPDDVINTIASENTLRFVKSLPKRERQPLASKFKNADEQAVDLLERMLVFDPKKRITASDALAHEYLAPYHDPTDEPVAEEKFDWSFNDADLPVDTWKIMMYSEILDYHNVDASGASAAMGEFNGQ

SEQ ID NO: 1361 - protein, 355 aa, Gibberella fujikuroi
MSRSNPPNAAGSRKISFNVSEQYDIQDVVGEGAYGVVCSAIHKPSGQKVAIKKITPFDHSMFCLRTLREMKLLRYFNHENIISILDIQKPRNYESFNEVYLIQELMETDMHRVIRTQDLSDDHCQYFIYQTLRALKAMHSANVLHRDLKPSNLLLNANCDLKVCDFGLARSAASQEDNSGFMTEYVATRWYRAPEIMLTFKEYTKAIDVWSVGCILAEMLSGKPLFPGKDYHHQLTLILDVLGTPTMEDYYGIKSRRAREYIRSLPFKKKVPFRTLFPQDLGSALDLLEKLLAFNPVKRITVEEALKHPYLEPYHDPEDEPTAPPIPEEFFDFDKHKDNLSKEQLKQLIYQEIMR

SEQ ID NO: 1362 - protein, 337 aa, Neurospora crassa
MDGRKHPSSFQQLEKLGEGTYATVFKGRNRQTGELVALKEIHLDSEEGTPSTAIREISLMKELKHENIVALHDVIHTENKLMLVFEYMDGDLKKFMDTNGERGALKPHVIKSFMHQLLKGIDFCHKNRVLHRDLKPQNLLINSKGALKLGDFGLARAFGIPVNTFSNEVVTLWYRAPDVLLGSRTYNTSIDIWSAGCIMAEMFTGRPLFPGTTNEDQIVRIFRIMGTPTERTWPGLTSFPEYKPNWQMYATQSLSSILPQIDRDGIDLLQRMLQLRPELRISAHDALQHHWFNDLVHQQHHHQAQQSMMQQPPMMQQQPMMQQHRGYGQPQPNYEGY

SEQ ID NO: 1363 - protein, 328 aa, Neurospora crassa
MENYQKLEKIGEGTYGVVYKARDLANSGRIVALKKIRLEAEDEGVPSTAIREISLLKEMRDPNIVRLLNIVHADGGQGHKLYLVFEFLDLDLKKYMEALPVSDGGRGKALPEGTGAGLHNLGLGEDIIKKFMSQLCEGVRYCHSHRVLHRDLKPQNLLIDRDGNLKLADFGLARAFGVPLRTYTHEVVTLWYRAPEILLGGRQYSTGVDMWSVGCIFAEMCTRKPLFPGDSEIDEIFKIFRLLGTPTEDIWPGVTSYPDFKASFPKWVRDYNVPLCQNLDDVGLELLESMLVYDPAGRISAKAACNHPYFEDYNPKPKSKYRDSSRYA

SEQ ID NO: 1364 - protein, 407 aa, Neurospora crassa
MANSPLVARPTDALQPPKSLPPSSGGTPSGGLPRSARGQQIAALARPTMDLMEQMNEDEKNKYIKGKKLGEGTYANVYLGHSRLDSSTQVAIKKIKVQKEYQDGIAPDAIREMKYLQKLRGHANIIILHSVFSSKDQNLNLVLEYLPLGDLEMLIRDVDHVRYGAADIKAWMGMLTRAIWWCHDNYVLHRDIKPNNLLIAADGEVKLADFGLARSFADPGVRMTANVITRWYRPPELLFGARHYSGAVDIWSVGLVFAELIIRAPYLPGNSEVEQIALICREIGTPTEENWPGVTQLKEYTVPSDVVPVAGKDKYMGRFGAVGSDGVDLLTKTLVLDPRRRITAREMLEHRWWKADPKPTPKHDLPKKTAGAEEKLAADLKRRNGMVEDDDVRGSKVARKLDFGTAR

SEQ ID NO: 1365 - protein, 366 aa, Cryptococcus neoformans
MTIDQSQINFNVPSTYKLEEIVGEGAYGLVVAGTHLPSGTQVAIKRITPFDHTMFCQRTLREIKLLRHFHHENIISILDLIQPESYEVFNEVYLVQELMETDLHRVIRSQELSDDHCQYFVYQTLRGLKALHSADVLHRDLKPSNLLLNANCDLKICDFGLARSSAKPPPGTSDGGQGFMTEYVATRWYRAPEVMLSFQEYTKAIDLWSVGCILAEMINGKPLFPGRDYHHQLSLILQVLGTPTMDDFNEITSQRSKDYLRALEFTRRQDFSAICPKAKPAAVDLLKQTLTFSPSKRITVEEALMHSYVEAYHDPHDEPNAEPLKPGFFDFEFHQEKLSRDQWKRMIYDEVQDPVPTILSQWTESH

SEQ ID NO: 1366 - protein, 354 aa, Ustilago maydis
MSHAHGQQPNHSTTFKVGETYKVVDVVGEGAYGVVCSAIHVPSSSRVAIKKITPFDHSMFCLRTLREIKLLRHFNHENIISILDIVKPDDYDSFSEVYLIQELMETDMHRVIRTQELSDDHCQYFIYQTLRGLKALHSAQVLHRDLKPSNLLLNANCDLKICDFGLARSANQPEAEGTGFMTEYVATRWYRAPEIMLTFKEYTKAIDVWSVGCILAEMLAGKPLFPGRDYHHQLSLTLEILGTPSLDDFYAITSTRSRDYIRALPFRKRRNLSLMFPNANPLAVDLMEKCLTFSPRKRITVEEALAHPYLEPYHDPEDEPTAEPLDPSFFDFDYCKEQLSRSELKRLIYNEIMR

SEQ ID NO: 1367 - protein, 352 aa, Pyrenophora teres
MPPAGSGSSRKISFNVSEQYDIQDVVGEGAYGVVCSALHKPSGQKVAIKKITPFDHSMFCLRTLREMKLLRYFNHENIISILDIQKPRNYETFTEVYLIQELMETDMHRVIRTQELSDDHCQYFIYQTLRALKAMHSANVLHRDLKPSNLLLNANCDLKVCDFGLARSAASTEDNSGFMTEYVATRWYRAPEIMLTFKEYTKAIDVWSVGCILAEMLSGKPLFPGKDYHHQLTLILDVLGTPTMEDYYGIKSRRAREYIRSLPFKKKIPWKAMFPKTNDLALDLLERLLAFNPVKRITVEEALKHPYLEPYHDPDDEPTADPIPEEFFDFDKNKDNLTKEQLKLLIYQEIMR

SEQ ID NO: 1368 - protein, 317 aa, Candida albicans
MVELSDYQRQEKVGEGTYGVVYKALDTKHNNRVVALKKIRLESEDEGVPSTAIREISLLKEMKDDNIVRLYDIIHSDSHKLYLVFEFLDLDLKKYMESIPQGVGLGANMIKRFMNQLIRGIKHCHSHRVLHRDLKPQNLLIDKEGNLKLADFGLARAFGVPLRAYTHEVVTLWYRAPEILLGGKQYSTGVDMWSVGCIFAEMCNRKPLFPGDSEIDEIFRIFRILGTPNEEIWPDVNYLPDFKSSFPQWKKKPLSEAVPSLDANGIDLLDQMLVYDPSRRISAKRALIHPYFNDNDDRDHNNYNEDNIGIDKHQNMQ

SEQ ID NO: 1369 - protein, 326 aa, Candida albicans
MTGSSSQFQQLEKLGEGTYATVYKGRNRATGALVALKEISLDSEEGTPSTAIREISLMKELDHENIVTLYDVIHTENKLTLVFEYMDKDLKKYMEVHGQQSALDLKVVKSFMFQLLKGIMFCHDNRVLHRDLKPQNLLINNKGELKLGDFGLARAFGIPFNTFSNEVVTLWYRAPDVLLGSRAYTTSIDIWSAGCIFAEMCTGKPLFPGTANEDQLIKIFRLMGTPNERTWPGISQYTNYKNNWQIFVPQDLRLIVPNLDSMGLNLLQSLLQMRPESRITARQALQHPWFHEITMPNAVPQHLSDPYQQQQQQQQHPHQPIIDQQY

SEQ ID NO: 1370 - protein, 303 aa, Guillardia theta
MDNYKRIEILGQGAYGKVYKAQDLRNGNLVALKKALSSSDEEGIPPTTLREISILKSVSECEFIVKLLDVVNTKSKNGKISIYIVFQYLDSDLKSYMISNYGKGRGMDENSAKKFCFQLLIGMYHCHKLGIIHRDLKPQNILIEKGEKLKIADFGLSRNFSIPVGKYTHEVVTLWYRAPEILLGARTYSSPVDIWSIGCIFAEMLTGNPLFCGESEIEQLLSIFKTIGTPTSQTWPEVLNFKDWHEFPIWPQINLKYSFENISEETLEFIQVFLRLNPNKRISILGAITNTYFEHFFKDYNLY

SEQ ID NO: 1371 - protein, 363 aa, Leishmania donovani
MAQLVPLVELPSGKKIYSVRGQQFEVDRQYDLVKVVGFGACGTVCSAVANGSGERVAIKRLSRVFGDLREGKRILREMEIMTSLKHNNLIRLHHFMRPQSKETFEDIYLVMDLYDTDLNRIIRSRQKLTDEHLQYFMIQAFRGLHYLHSAKVMHRDLKPSNLLVNADCALAICDFGLARDDQVMSSSDLTQYVVTRWYRPPEVLGMGSNQYTSAVDVWSLGLIFAELMLGRTLLPGTDYIGQLVMIVNLLGSPSIDDMEFLSSEAKAFILSQPRRPALSFRDLFPMATEEATDLLSKLLVFHPARRLTAKQVMEHPYFSKYRDAAEEADAPDPFVWNHSHIETKEQLREDLWRVVEAHSQSNG

SEQ ID NO: 1372 - protein, 311 aa, Leishmania major
MSSFGRVTARSGDAGTRDSLDRYNRLDVLGEGTYGVVYRAVDKITGQYVALKKVRLDRTEEGIPQTALREVSILQEFDHPNIVNLLDVICSDGKLYLVFEYVEADLKKAIEKQEGGYSGMDLKRLIYQLLDGLYFCHRHRIIHRDLKPANILLTSGNVLKLADFGLARAFQVPMHTYTHEVVTLWYRAPEILLGEKHYTPAVDMWSVGCIFAELTRRKVLFRGDSEIGQLFEIFQVLGTPTDTEGSWPGVSRLPDYRDVFPKWTAKRLGQVLPELHPDAIDLLSKMLKYDPRERISAKEALQHPWFSDLRW

SEQ ID NO: 1373 - protein, 301 aa, Leishmania major
MTSRYERQEKIGEGTYGVVYKARDTSTSATVALKRIRLDSEEEGVPCTAIREISLLKELRHENIVKLLDVCHSEHRLTIVFEYLDLDLKKYLDRENGNLDAATIQHFMRDLLRGVAFCHQRSVLHRDLKPQNLLISREKELKLGDFGLGRSFAIPVRKFTNEVVTLWYRPPDVLLGSMQYGPPVDVWSVGCIFSEMATGTPLFAGKNDADQLMRIFRFLGTPNNRVWPSMNQYPNSNNMLSQPEFLQNFEPEWSNVLGSVPGYEKLGCAGVDLLEKLLRYEPSERITAADALNHPYFSLQF

SEQ ID NO: 1374 - protein, 311 aa, Leishmania mexicana
MSSFGRVTARSGDAGTRDSLDRYNRLDVLGEGTYGVVYRAVDKITGQYVALKKVRLDRTEEGIPQTALREVSILQEFDHPNIVNLLDVICSDGKLYLVFEYVEADLKKAIEKQEGGYSGMDLKRLIYQLLDGLYFCHRHRIIHRDLKPANILLTSGNVLKLADFGLARAFQVPMHTYTHEVVTLWYRAPEILLGEKHYTPAVDMWSVGCIFAELARRKVLFRGDSEIGQLFEIFQVLGTPTDTEGSWPGVSRLPDYRDVFPKWTAKRLGQVLPELHPDAIDLLSKMLKYDPRERISAKEALQHPWFSDLRW

SEQ ID NO: 1375 - protein, 301 aa, Leishmania mexicana
MTSRYERQEKIGEGTYGVVYKARDTSTAATVALKRIRLDSEEEGVPCTAIREISLLKELRHENIVKLLDVCHSEHRLTIVFEYLDLDLKKYLDRENGNLDAATIQHFMRDLLRGVAFCHQRSVLHRDLKPQNLLISREKELKLGDFGLGRSFAIPVRKFTNEVVTLWYRPPDVLLGSMQYGPPVDVWSVGCIFSEMATGTPLFAGKNDADQLMRIFRFLGTPNNRVWPSMNQYPNSNNMLSQPEFLQNFEPEWSNVLGSVPGYEKLGCAGVDLLERLLRYEPSERITAADALNHPYFSLQF

SEQ ID NO: 1376 - protein, 363 aa, Leishmania panamensis
MTQLVPLAELPSGKKIYSVRGQRFEVDRQYDLVKVVGFGACGTVCSAVVNGSGERVAIKRLSRVFGDLREGKRILREMEIMTSLKHNNLIRLPTFMRPQSKETFEDIYLVMDLYDTDLNRIIRSRQKLTDEHLQYFMIQAFRGLHYLHSAKVMHRDLKPSNLLVNADCALAICDFGLARDDQVMSSSDLTQYVVTRWYRPPEVLGMGSNQYTSAVDVWSLGLIFAELMVGRALLPGTDYIGQLVMIVNLLGSPSIDDMEFLSSEAKAFILSQPHRPALSFRDLFPMATEEATDLLSKLLVFHPARRLTAKQVMEHPYFSKYRDAAEEADAPDPFVWNHSHIETKEQLREDLWRVVEVHSQSNG

SEQ ID NO: 1377 - protein, 657 aa, Trypanosoma brucei
MDAYETLGMLGEGTYGVVVKARHRATSRIVAIKKYKQAEDDDHVRKTSLREVRVLKQLRHPNVIALLDVFRRDGKLYLVFEYVENTILQLIEEKKYGLSPDEVRRYTFQLLNGVSYCHAHNIIHRDVKPENILVSRDGVLKLCDFGFARQLSCRGNYTEYVATRWYRAPELLVGDVSYGKAVDVWAIGCVFSELSDGQPLFPGDSDLDQLSLIMRACGPVPQQMVSTFEHNALYRRVTFPSVDVEETLQQRFPTAASPWLEFLTSCLRMDPVERPSCTALMSMAYFTENNFRATYELELRELFQHCQPPLVDVAPTSPDHNFSREQQHQQQTLGNDRVDAELTLPRLAAPSLDAETTDKVDSAESKNTTMGVSSEVVGGVGGSVVVDSNSNSFHQLGALWSHYIGSTVGATMALSGELPNIGPRQAHPYPSGLPPGVQVTKPVPRSGTNSVGDKNYNGVQAMKVTGCLRLSAKNISRSPDVQRVKASAAQSGPKVKQAKSEVKPEQKREWKSCSALGKSVKPNYLFPLLPNGTNNSGITSYGPSGVAVGAGPAPQDACSPLVSKGLRPPSSNGIPGAGLHSNGSTTSFSAHKDEKMDLGCGEQNNNGSDHKQRKKHVKRTHDNGELEGPPRKVSDKPSSQHSVAGHRYSFRDGATKR

SEQ ID NO: 1378 - protein, 325 aa, Trypanosoma brucei
MSDTLSSKLDDVDADVLRGAYEPVAIIGEGTYGVVFRARGVASGAEFVIKKLRSDKLKEGVPATTLREVTLLHEMSDNPNVVRLLDVLCSKRRVYLVFELLNEDLRSFIRRNYPQPSATASSSVVPLRLVKNFTCQMLHALWRCHQNRIIHRDLKPANVLLGVKKSTRNDGEDSYILKLADFGLARTYEMTLLTYTKEVMTLWYRAPEILLGERHYTPAADVWSVGCIVLEMIVGCPVFRGESNRDQLDRIFYTVGTPTEETWAGVAMMPGYDKATKIYKVAPLHERLPTFDKEAVQFVAFLLQVNPKSRPTIPTILQHPFLQGD

SEQ ID NO: 1379 - protein, 301 aa, Trypanosoma congolense
MGSRYQRLEKIGEGSYGVVYRARDITTDVIVALKRIRLESVEEGVPCTAIREISILKELRHENIVRLLDVCHSENRLNLVFEYMEMDLKKYMDRASGNLDPATIQEFMRSLLKGVRFCHERNVLHRDLKPPNLLISREKELKLADFGLGRAFGIPVKKYTHEVVTLWYRSPDVLLGSTQYGTPVDIWSVGCIFAEMAIGAPLFAGKNDADQLLRIFRFLGTPSSQVWPSMNLYPNSTNMLSKPEFQQNLIATCDEQFQTHPAYAKLGPQGIDLLRRLLRYEPGERLTAAQALEHPYFSVEF

SEQ ID NO: 1380 - protein, 301 aa, Trypanosoma cruzi
MSTRYERQEKIGEGTYGVVYRARDTATGATVALKRIRLDTEEEGVPCTAIREISLLKELRHANIVKLLDVCHSESRLTLVFEYMELDLKKYMDQEEGNLDAATIQDFMRDLLNGVRFCHDRNVLHRDLKPPNLLISREKSLKLADFGLGRAFGIPVKKFTHEVVTLWYRSPDVLLGSTQYGTPVDIWSVGCIFAEMVIGAPLFAGKNDADQLLRIFRFLGTPNNQVWPSMNQYPNSTNMLFKPEFLQNLAAECETQFRTVPAYAKLGPGGIDLLRRLLKYEPSERLTAAQALEHPYFSVEF

SEQ ID NO: 1381 - protein, 311 aa, Trypanosoma cruzi
MTTLTTLPSRPLSSNTREQFERYNRMDILGEGTYGVVYRAVDKITGQIVALKKVRLDRTEEGIPQTALREVSILQEIHHPNVVNLLDVICTDGKLYLIFEYVDYDLKKAIEKRGCTFTGVTLKKLVYQLLDGLFFCHRHRIVHSDLKPANILITSDNVLKLADFGLARTFQIPMHTYTHEVVTLWYRAPEILLGEKHYTPAVDIWSVGCIFAELARGKVIFRGDSEIGQLFEIFQILGTPMDNEGSWPGVSSLPDYRDVFPRWAGKPLAQVIPQLDSEAIDLISRMLKYSPAERISAKEALQHSWFSEIRT

SEQ ID NO: 1382 - protein, 311 aa, Trypanosoma brucei brucei
MTMLGALTGRQLSSGLKDQFDRYNRMDILGEGTYGVVYRAVDRATGQIVALKKVRLDRTDEGIPQTALREVSILQEIHHPNIVNLLDVICADGKLYLIFEYVDHDLKKALEKRGGAFTGTTLKKIIYQLLEGLSFCHRHRIVHRDLKPANILVTTDNSVKIADFGLARAFQIPMHTYTHEVVTLWYRAPEILLGEKHYTPAVDMWSIGCIFAELARGKVLFRGDSEIGQLFEIFQVLGTPMDAEGSWLGVSSLPDYRDVFPKWSGKPLTQVLPTLDGDAVDLLSQMLRYNPAERISAKAALQHPWFSDAMF

SEQ ID NO: 1383 - protein, 301 aa, Trypanosoma brucei brucei
MGSRYERLQKIGEGSYGVVFRARDVTTGTIVAVKRIRLEKEEEGVPCTAIREISILKELRHENIVRLLDVCHSEKRLTLVFECMEMDLKKYMDHVGGDLDAGTIQEFMRSLLSGVRFCHERNVLHRDLKPPNLLISREKELKLADFGLGRAFGIPVKKFTQEVVTLWYRSPDVLLGSTQYGTPVDIWSVGCIFAEMAIGAPLFTGKNDADQLLRIFQFLGTPNRQVWPSMDTYPNSSNMLSRPEFQQTLAATCEEQFQTNPAYAKLGPQGIDLLRWLLRYEPSERLTAAQALEHPYFSVEF

SEQ ID NO: 1384 - protein, 345 aa, Trypanosoma brucei brucei
MQVQVQEGQTACDGSLRPLPSAGPASFVPRSLRPAPLRGTSTPDRYSRIEKVGEGSYGIVYKCHDNFTGRTVAMKRIPLIVNDGGVPSTAVREVSLLRELNHPYVVRLLDVVLHEAKLLLIFEYMEQDLQGMLKQRNTAFVGGKLRRIMFQLLLGLHECHSRRFVHRDIKPSNILIDRKESVVKLADFGLGRAFRVPLQTYTTEVMTLWYRAPEVLLGDKQYLPAVDVWSMGCVFAELARRRSLFAGDTAINQLFSIFQLLGTPTEATWRGVTSLPHHNVNFPRWTAKPLRTAVPALDDDGVDLLRRMLCYNPRERITAYEALQHSYFDEVREEEVEKLMRFNGA

SEQ ID NO: 1385 - protein, 291 aa, Entamoeba histolytica
MTRYEKKQQLGEGTYGVVCKAWDTVCNRYVALKKIKQEREDDGIPVTSVREIAVLLELKHPNVVDLYDIYLEDKFLYLVFEFCDEDLYQFMSRSSKIPINETRSIVYQILQGLAFCHYHQILHRDMKPQNILINKNGTIKLGEFGLARLTTINDRKYTSEVVTLWYRAPEILLGATQYGGAIDIWSTAAIFGELINKEELFKGRCKIDQLFKIFSQLGTPTEDIWNGVTKLPFYLSTFPKWKAKDLHTIFHTDERAVDLLQKMFIYTPEKRISAADALKHPFFDPLNKPNN

SEQ ID NO: 1386 - protein, 294 aa, Cryptosporidium parvum
MEKYQKLEKVGEGLTGLVYKAKDSQGRIVALKRIRLDAEDEGIPSTAIREISLLKELHHPNIVSLIDVIHSERCLTLVFEFMEKDLKKVLDEDKTGLQDSQIKIYLYQLLRGVAHCHQHRILHRDLKPQNLLINSDGALKLADFGLARAFGIPVRSYTHEVVTLWYRAPDVLMGSKKYSTSVDIWSIGCIFAEMITGKPLFPGVTDDDQLPKIFSILGTPNPREWPQVQELPLWKQRTFQVFEKKPWSSIIPGFCQEGIDLLSNMLCFDPNKRISARDAMNHPYFKDLDPQIMI

SEQ ID NO: 1387 - protein, 300 aa, Toxoplasma gondii
MEKYQKLEKIGEGTYGVVYKAQDHSGEISALKKIRLEAEDEGIPSTAIREISLLKELHHPNIVRLRDVIHTDRRLTLVFEYLDQDLKKLLDVCDGGLEPSTTKSFLFQLLCGIAYCHEHRVLHRDLKPQNLLINREGALKLADFGLARAFGIPVRSYTHEVVTLWYRAPDVLMGSKTYSTPVDIWSVGCIFAEMVNGRPLFPGTGNEDQLMKIFKVLGTPQVSEHPQLAELPHWNRDFPQFPPLPRDQVVPKLDPLGTDLLSRMLRFDSNQRISARQAMQHPYFSDLADNIKRLATFRGE

SEQ ID NO: 1388 - protein, 300 aa, Toxoplasma gondii
MEKYQKLEKIGEGTYGVVYKAQDHSGEISALKKIRLEAEDEGIPSTAIREISLLKELHHPNIVRLRDVIHTDRRLTLVFEYLDQDLKKLLDVCDGGLEPSTTKSFLFQLLCGIAYCHEHRVLHRDLKPQNLLINREGALKLADFGLARAFGIPVRSYTHEVVTLWYRAPDVLMGSKTYSTPVDIWSVGCIFAEMVNGRPLFPGTGNEDQLMKIFKVLGTPQVSEHPQLAELPHWNRDFPQFPPLPWDQVVPKLDPLGTDLLSRMLRFDSNQRISARQAMQHPYFSDLADNIKRLATFRGE

SEQ ID NO: 1389 - protein, 288 aa, Plasmodium berghei
MEKYHGLEKIGEGTYGVVYKAQNSDGESFALKKIRLEKEDEGIPSTAIREISILKELRHSNIVKLYDVIHAKKRLILVFEQLDQDLKKLIDVCDGGLESVTAKSFLLQLLNGIAYCHEHRVLHRDLKPQNLLINREGELKIADFGLARAFGIPARRYTHEVVTLWYRAPDILMGSKKYSTPIDIWSVGCIFAEMVNGRPLFPGASETDQLMRIFKILGTPNSQNWPDVFKLPKYDPNFPVYNPLPWETFIKGLDDTGIDLLSKMLKLDPNQRITAKYTIEHPYFKETN

SEQ ID NO: 1390 - protein, 324 aa, Plasmodium falciparum
MENNSTERYIFKPNFLGEGSYGKVYKAYDTILKKEVAIKKMKLNKISNYIDDCGINFVLLREIKIMKEIKHKNIMSALDLYCEKDYINLVMEIMDYDLSKIINRKIFLTDSQKKCILLQILNGLNVLHKYYFMHRDLSPANIFINKKGEVKLADFGLCTKYGYDMYSDKLFRDKYKKNLNLTSKVVTLWYRAPELLLGSNKYNSSIDMWSFGCIFAELLLQKALFPGENEIDQLGKIFFLLGTPNENNWPEALCLPLYTEFTKATKKDFKTYFKIDDDDCIDLLTSSLKLNAHERISAEDAMKHRYFFNDPLPCDISQLPFNDL

SEQ ID NO: 1391 - protein, 324 aa, Plasmodium falciparum
MENNSTERYIFKPNFLGEGSYGKVYKAYDTILKKEVAIKKMKLNEISNYIDDCGINFVLLREIKIMKEIKHKNIMSALDLYCEKDYINLVMEIMDYDLSKIINRKIFLTDSQKKCILLQILNGLNVLHKYYFMHRDLSPANIFINKKGEVKLADFGLCTKYGYDMYSDKLFRDKYKKNLNLTSKVVTLWYRAPELLLGSNKYNSSIDMWSFGCIFAELLLQKALFPGENEIDQLGKIFFLLGTPNENNWPEALCLPLYTEFTKATKKDFKTYFKIDDDDCIDLLTSFLKLNAHERISAEDAMKHRYFFNDPLPCDISQLPFNDL

SEQ ID NO: 1392 - protein, 719 aa, Plasmodium falciparum
MGKGHDVKKERGKKDEDEHNEYHPYRRDNKSFYSKNYKMKNKHSYNSSDEYKKYVSHDTYNSYDTYNSYKSHEEHKNNKHISIKPVNKNKYVHSPSPKKTKKIYDELSDYNKHKKYSSSKMDKKKDSYYKEQSNKYKEKRKYDESSQDTYDKKRKRKRKKKKYDYEREEEKYNRYDERRDSSYYTSNYSEDSSKREGGKKEKEDLYISRKEFSGKKKSHKGEHNNNNHHTDQHIKNNYHTDQHIKNNYHTDQHNNNNHHTDQHNNNNHHTDQHNNNNHYTDQHNNNNHHTDQHNNTISDQINIFPEKNKRDNRINEEKYTIKEHLIYEDEQNISYESNKDSSSEENTILNEYSSDEEKNKIDCILNGCRNVKNYKKLNKISEGTYGAVYRAQNKRTKKIVALKKLKNFSSMHNEGFAMTSLREINILLQLQHDNILSIKEVVFGKHLNDIYLVMEYIEHELKMILDNKSPSFTISELKCLLKQLLSGINYLHRNWVMHRDLKPTNLLYSNKGILKICDFGMARKFGHVTNHNFTKNVVTLWYRAPELLLGEQCYTNKIDIWSAGCIFAEMILKKPLFVGENEIDQLFKILCLLGLPDKESYPEFYEYSFISKNKELFKKKKIKMNVNNIRSHFPNIANQFSGLYLSDNGLDLLQKMLHYNPQCRISAQEALNHPYFNEFPKPLDIKDMPIVPDSNKFIRSNKMANHFKLNSQNNIQFHS

SEQ ID NO: 1393 - protein, 670 aa, Plasmodium falciparum
MNIRNMFHMIRTIHMIHIIHINHMKSIKITNIFHQASKQKQICTFPVSQKTKKIYDELSDYNKHKKYSSSKMDKKKDSYYKEQSNKYKEKRKYDESSQDTYDKKRKRKRKKKKYDYEREEEKYNRYDERRDSSYYTSNYSEDSSKREGGKKEKEDLYISRKEFSGKKKSHKGEHNNNNHHTDQHIKNNYHTDQHIKNNYHTDQHNNNNHHTDQHNNNNHHTDQHNNNNHYTDQHNNNNHHTDQHNNTISDQINIFPEKNKRDNRINEEKYTIKEHLIYEDEQNISYESNKDSSSEENTILNEYSSDEEKNKIDCILNGCRNVKNYKKLNKISEGTYGAVYRAQNKRTKKIVALKKLKNFSSMHNEGFAMTSLREINILLQLQHDNILSIKEVVFGKHLNDIYLVMEYIEHELKMILDNKSPSFTISELKCLLKQLLSGINYLHRNWVMHRDLKPTNLYYSNKGILKICDFGMARKFGHVTNHNFTKNVVTLWYRAPELLLGEQCYTNKIDIWSAGCIFAEMILKKPLFVGENEIDQLFKILCLLGLPDKESYPEFYEYSFISKNKELFKKKKIKMNVNNIRSHFPNIANQFSGLYLSDNGLDLLQKMLHYNPQCRISAQEALNHPYFNEFPKPLDIKDMPIVPDSNKFIRSNKMANHFKLNSQNNIQFHS

SEQ ID NO: 1394 - protein, 288 aa, Plasmodium knowlesi
MEKYHGLEKIGEGTYGVVYKAQNNYGETFALKKIRLEKEDEGIPSTAIREISILKELKHSNIVKLYDVIHTKKRLILVFEHLDQDLKKLLDVCDGGLESVTAKSFLLQLLSGIAYCHEHRVLHRDLKPQNLLINREGELKIADFGLARAFGIPVRKYTHEVVTLWYRAPDILMGSKKYSTPIDIWSVGCIFAEMVNGRPLFPGVSETDQLMRIFRILGTPNSANWPSVTELPKYDPDFIVYEPLPWETFLKGLDDTGIDLLSKMLRLDPNQRITAKEALQHAYFKESS

SEQ ID NO: 1395 - protein, 288 aa, Plasmodium vivax
MEKYHGLEKIGEGTYGVVYKAQNNYGETFALKKIRLEKEDEGIPSTAIREISILKELKHSNIVKLYDVIHTKKRLILVFEHLDQDLKKLLDVCDGGLESVTAKSFLLQLLSGIAYCHEHRVLHRDLKPQNLLINREGELKIADFGLARAFGIPVRKYTHEVVTLWYRAPDILMGSKKYSTPIDMWSVGCIFAEMVNGRPLFPGVSETDQLMRIFRILGTPNSENWPNVTELPKYDPDFMVYEPLPWETFLKGLDDTGIDLLSKMLRLDPNQRITAKQALEHAYFKESN

SEQ ID NO: 1396 - protein, 298 aa, Theileria annulata
MRRYHKMEKIGEGTYGVVYKAQNNHGEICALKKIRVEEEDEGIPSTAIREISLLKELHHPNIVWLRDVIHSEKCLTLVFEYLDQDLKKLLDACDGGLEPTTAKSFLYQILRGISYCHDHRILHRDLKPQNLLINREGVLKLADFGLARAFAIPVRSYTHEVVTLWYRAPDVLMGSKKYSTAVDIWSVGCIFAEMINGVPLFPGISEQDQLKRIFKILGTPNVDSWPQVVNLPAYNPDFCYYEKQAWSSIVPKLNESGIDLISRMLQLDPVQRISAKEALKHDYFKDLHRPSEFLNGVH

SEQ ID NO: 1397 - protein, 298 aa, Theileria parva
MRRYHKMEKIGEGTYGVVYKAQNNHGEICALKKIRVEEEDEGIPSTAIREISLLKELHHPNIVWLRDVIHSEKCLTLVFEYLDQDLKKLLDACDGGLEPTTAKSFLYQILRGISYCHDHRILHRDLKPQNLLINREGVLKLADFGLARAFAIPVRSYTHEVVTLWYRAPDVLMGSKKYSTAVDIWSVGCIFAEMINGVPLFPGISEQDQLKRIFKILGTPSVDSWPQVVNLPAYNPDFSYYEKQSWSSIVPKLNESGIDLISRMLQLDPVQRISAKEALKHDYFKDLHRPPEFLNGVH

SEQ ID NO: 1398 - protein, 301 aa, Paramecium tetraurelia
MDLAQSEERYQKLEKIGEGTYGLVYKARDNQTGDIVALKKIRMDHEDEGVPSTAIREISLLKEVQHPNIVPLKDVVYDESRLYLIFDFVDLDLKKYMESVPQLDRMQVKKFINQMIQALNYCHQNRVIHRDLKPQNILVDIKQQNTQIADFGLARAFGLPLKTYTHEVITLWYRAPEILLGQRQYSTPVDIWSLGCIFAEMAQKRPLFCGDSEIDQLFKIFKIMGTPKESTWPGVSTLPDFKSTFPRWPTPTNPAATLGKDITNLCPLGLDLLSKMITYDPYARITAEEALKHAYFDELNN

SEQ ID NO: 1399 - protein, 308 aa, Paramecium tetraurelia
MKSNKLEKYEKKEKLGEGTYGIVYKALDRNTNEYVAIKKIRLESEEEGIPSTAIREISLLKELNHPNIVKLMEVVHSNKKLVLVFEYFEMDLKKFLAQFPKEKGMEPVIVKSFLYQLLRGIQACHQQKILHRDLKPQNLLGSKDGILKLADFGLARASGIPVKSFTHEVVTLWYRPPDVLLGSKNYNTSIDIWSVGCIFGEMSNLKPLFAGSNETDQLKKIFRVLGTPSPIEYPKLNDLPSWKPENFEQYQPDNLAKFCPRLDPDGLDLLVKMLKINPDQRITAKAACEHPFFKELPEQVKKLYVNVK

SEQ ID NO: 1400 - protein, 309 aa, Paramecium tetraurelia
MDLAQSEERYQKLEKIGEGTYGLVYKARDNQTGDIVALKKIRMDHEDEGVPSTAIREISLLKEVQHPNIVPLKDVVYDESRLYLIFDFVDLDLKKYMESVPKYMESVPQLDRMQVKKFINQMIQALNYCHQNRVIHRDLKPQNILVDIKQQNTQIADFGLARAFGLPLKTYTHEVITLWYRAPEILLGQRQYSTPVDIWSLGCIFAEMAQKRPLFCGDSEIDQLFKIFKIMGTPKESTWPGVSTLPDFKSSFPRWPNPYQSSCNVQEKILLIYVHQDQISLSKMITYDPLARIPAEEALKHAYFDELNN

SEQ ID NO: 1401 - protein, 307 aa, Paramecium tetraurelia
MKSNKLEKYEKKEKLGEGTYIVYKALDRNTNEYVAIKKIRLESEEEGIPSTAIREISLLKELNHPNIVKLMEVVHSNKKLVLVFEYFEMDLKKFLAQFPKEKGMEPVIVKSFLYQLLRGIQACHQQKILHRDLKPQNLLGSKDGILKLADFGLARASGIPVKSFTHEVVTLWYRPPDVLLGSKNYNTSIDIWSVGCIFGEMSNLKPLFAGSNETDQLKKIFRVLGTPSPIEYPKLNDLPSWKPENFEQYQPDNLAKFCPRLDPDGLDLLVKMLKINPDQRITAKAACEHPFFKELPEQVKKLYVNVK

SEQ ID NO: 1402 - protein, 318 aa, Tetrahymena thermophila
MNNNTFGSDRYEKLLKVGEGTYGEVYKAKDIQSSEIVALKKIKLENEDEGVPSTALREISILKELQPHPNIVCMHEVIYQPQEKKLYLVFEFVDQDLKKFLDQYRKDKKLQLRPYQIKLMMYQILNGLNFCHSRRIIHRDLKPQNILIDAKGNIKIADFGLARAFGVPIKTLTHEVETLWYRAPEILLGQKAYSLGVDIWSLGCIFHEMVEKRALFMGDSEIDQIFKIFQYHGTPTEQTWPALKECPYFKPIYPRFKTADPKTYFKNFCDKGFDLIQQMIALDPAKRISVKDALRHPYFEDLSREDIAKFEPNQVHMY

SEQ ID NO: 1403 - protein, 308 aa, Encephalitozoon cuniculi
MKTYIRERRLGEGTYAVIYLGYRALPQDKPLVSSGTRIEDVPVAIKKIKPTKYTQGHEISAIREIKSLKRIDSKYVVRLIDTFVYDKCVHIVLEYVETNLENVIRNSDKIIMPGDIKAWILMVLRGVYECHRLFIIHRDIKPNNILITSEGMVKLADFGLTRGIGNRMTPQAVTRWYRAPELLMGSRDYGSPVDMWSVGCVFAELFLRVPLFAGDTDIQQLDMIFRALGTPVEREWPGVSTLPEFLDFQQYPKASLNGLFSAASSDALDLLEKLLTLNPCNRISCDDAIKHPYFKSSPPPTPIGKLPV

SEQ ID NO: 1404 - protein, 296 aa, Encephalitozoon cuniculi
MTESFQKLEKIGEGTYGVVYKARERNTNRVVALKKIRLENENEGIPATTIREILLLKNLKHSTIVELSDVIYNNNKMYLVFEYVELDLRRYLDRMSDEGRLVEEGFVRKMSQQLLTAMEYCHSRNIFHRDLKPQNILVDPKENIKLADFGLGRAAGIPLRTYTTEVVTLWYRPPELLLGCKYYDASVDVWSAACIMAEVVLMRPFFPGDSEIDQLFRIFKVLGTPNNSRWSNVENFPNYKVEFPVWDPVDLKTIFRGDPDFVDLISKMLEYDPKMRMTAKNGLSHKYFEGMPLIME

SEQ ID NO: 1405 - protein, 330 aa, Caenorhabditis elegans
MSRRYDTIKHLGEGQFANVYLAQDLESGECVAIKKIKLGSREEAKDGINRTAIREIKLLKEIHHDNIIGLRDVIGHRTSIQLVFDFMDTDLEHVIKDKEIILMPAHIKNITMQMLLGLEFLHVHWILHRDLKPNNLLMNKMGRVKLTDFGLARFFGSPNRNYTHQVVTRWYRAPELLFGARSYGVGIDIWSVGCIIAELLLRNPIFPGESDIDQLVKIFNILGCPTPETWPNMTEMNSYVIIKPQTEYMALNYYFSAAPQDLLDLMAGMWTFDPIKRLTCTQSLQMEYFRTQPFCCLDEELPLPKKQQPQKRSRRLDDDGTRPVRRLNFD

SEQ ID NO: 1406 - protein, 351 aa, Aplysia californica
EIVRGQTFEVAPRYTNLTYIGEGAYGMVVSATDNQTKQKVAIKKISPFEHQTYCQRTLREIKILTRFKHENIIDIRDILRAPTVEDMKDVYIVQCLMETDMYKLLKTQQLSNDHVCYFLYQILRGLKYIHSANVLHRDLKPSNLLLNTTCDLKICDFGLARVADPDHDHTGFLTEYVATRWYRAPEIMLNSKGYTKSIDVWSVGCILAEMLANRPLFPGKHYLDQLNHILGVLGSPSQEDLQCIINDKARGYIQSLPFKPKVPWNKLYPNADVKALDLLEKMLTFNPNKRITVEQALAHPYLEQYYDPADEPVAEEPFTFEMELDDLPKERLKELIFQETLQIQDKNLEHS

SEQ ID NO: 1407 - protein, 319 aa, Bombyx mori
MDDFLKIEKIGEGTYGVVYKGKNKITGQFVAMKKIRLESEDEGIPSTAIREISLLKELNHPNIVKLEDVLMEESRLYLIFEFLSMDLKKYMDSLGSGKFMDPSVVKSYLYQINNAILYCHQRRILHRDLKPQNLLIDKTGIIKVADFGLGRAFGVPVRVYTHEVVTLWYRAPEVLLGSQRYSCPIDIWSVGCIFSEMSSKKPLFQGDSEIDQLFRIFRMLRTPTEEIWPGVSLLPDYKPTFPNWNTYNLHNHVQNLDEVGMDLLQKMLVYDPVKRISAKDARRHKYFRDVKLPPGLTVHDAYIRVTPEYPYDTDSVQSV

SEQ ID NO: 1408 - protein, 302 aa, Rana dybowskii
MDEYAKIEKIGEGTYGVVYKGVHKATGQIVAMKKIRLENEEEGVPSTAIREISLLKELQHPNIVCLLDVLMQDSRLYLIFEFLSMDLKKYLDSIPSGQYLEAMLVKSYLYQILQGIIFCHARRVLHRDLKPQNLLIDSKGVIKLADFGLARAFGIPVRVYTHEVVTLWYRAPEVLLGSVRYSTPVDVWSIGTIFAEIASKKPLFHGDSEIDQLFRISELWGTPNNEVWPEVESLQDYKNTFPKWKGGSLAANVKNIDKEGLDLLAKMLVYDPAKRISARKALLHPYFDDLDKSSLPANQIRN

SEQ ID NO: 1409 - protein, 353 aa, Drosophila melanogaster
MLPNANDKTERYAKLSFLGEGQFATVYKARDTVTNQIVAVKKIKKGSREDARDGINRTALREIKILQELQHENIIGLVDVFGQLSNVSLVFDFMDTDLEVIIKDNKIILTQANIKAYAIMTLKGLEYLHLNWILHRDLKPNNLLVNSDGILKIGDFGLAKSFGSPNRIYTHHVVTRWYRSPELLFGARQYGTGVDMWAVGCILAELMLRVPFMPGDSDLDQLTRIFSTLGTPTEAEWPHLSKLHDYLQFRNFPGTPLDNIFTAAGNDLIHLMQRLFAMNPLRRVSCREALSMPYFANKPAPTVGPKLPMPSAILAAKEGANPQTGDTKPALKRKLVETTVRGNGLAQKKRLQF

SEQ ID NO: 1410 - protein, 289 aa, Plasmodium yoelii yoelii
MEKYHGLEKIGEGTYGVVYKAQNSDGESFALKKIRLEKEDEGIPSTVSIREISILKELRHSNIVKLYDVIHAKKRLILVFEHLDQDLKKLIDVCDGGLESVTAKSFLLQLLNGIAYCHEHRVLHRDLKPQNLLINREGELKIADFGLARAFGIPARRYTHEVVTLWYRAPDILMGSKKYSTPIDIWSVGCIFAEMVNGRPLFPGVSETDQLMRIFKILGTPNSQNWPDVFKLPKYDPNFPVYEPLPWETFIKGLDDTGIDLLSKMLKLDPNQRITAKQAIEHPYFKETN

SEQ ID NO: 1411 - protein, 324 aa, Plasmodium yoelii yoelii
MEHNSNERYIFKPNFLGEGSYGKVYKAYDTVLKKEVAIKKMKLNKISNYIDECGINFLILREIKIMKEIKHKNVMNALDLYCEKDYINLVMEIMDYDLAKLINRKILLTDSQKKCILLQILNGLNTLHKYYFMHRDLSPANIFINKKGEVKIADFGLSSKYAFDMHSGKMANDKYSKRALNLTSKVVTLWYRAPELLMGSNKYNSSIDMWSFGCIFAELLLQKALFPGENEIDQLGKIFFLLGTPNENNWPEAKHLPLYTDFTKSSKKNLKNIIKIEDDDCIDLLASLLKLNSHERITAEEALKHRYFLNDPLPCDASQLFIDM

SEQ ID NO: 1412 - protein, 412 aa, Haematobia irritans irritans
ENRTKISKQLGSIRLYFMQNSFLILCRMNKEVDPVAPVTRKGYLISIKTGEPIEIRERDVHGRCRAVTEFEKLNRIGEGTYGIVYRARDTRTNEIVALKKVRMDQEKDGLPVSGLREITILKKCKHENIVHLREVVVGKSLESMFLVMEYCEQDLASLLDNMTQPFAESEVKCIVLQVLQGLKYMHSHYIIHRDLKVSNLLMTDKGCVKIADFGLARLFGLPSGPMTPQVVTLWYRSPELLLGSTTQTTAVDMWAVGCILGELLSHKPLLPGNTEIAQLELIIDLLGTPSEAIWPDYPKMPAIQNFTLKKQPYNNLKPKFQYLSAAGLRLLNFLFMYDPKKRATADECLHSTYFKEPPLPCDPKLMPSFPQHRNMHQHNSTKTARGSSHTSMPELPAISDLLGSLIKRKKNE

SEQ ID NO: 1413 - protein, 300 aa, Asterina pectinifera
MEDYSKIEKIGEGTYGVVYKGRCKKDGSIVALKKIRLESEEEGVPSTAIREISLLKELQHPNVVNLSNVLMQESRLYLVFEFLTMDLKKYMETLRGTTMDPALVKSYLHQIVQGILFCHCRRVLHRDLKPQNLLIDEKGIIKLADFGLARAFGIPVRVYTHEVVTLWYRAPEVLLGSPRYSTPVDVWSIGCIFAEMVTKRPLFHGDSEIDQLFRIFRTPGTPTDKTWPGVTELPDHKSTFPKWTTNNLAKSVKTLTLRNDLLQKMLIYDPAKRISCKAALSHPYLKDFEGGTVLPTRLGQ

SEQ ID NO: 1414 - protein, 209 aa, Marthasterias glacialis
VYKAKDTEEKNRIVAVKKIKLGHRSERKDGVNRTALREIKLLQELKHDNIIGLLDVFGHRSNISLVFDFMDTDLEVIIQDNSIVLKPGDIKAYTLMTLKGLEYLHRHWILHRDMKPNNSLIDTRGVLKIGDFGLAKFYGTGNRVYTHQVVTRWYRCPELLFGARIYGVGVDMWALGCILAELLLRVPFLPGESDLDQLTRISQTLGTVT

SEQ ID NO: 1415 - protein, 301 aa, Hemicentrotus pulcherrimus
MEDFTKIEKLGEGTYGVVYKGRHKRTGKIVALKKIRLESEEEGVPSTAIREISLLKELYHPNIVLLEDVLMEPNRLYLVFEYLTMDLKKYMESLKGKQMDPALVKSYLHQMVDGILFCHSRRILHRDLKPQNLLIDNNGTIKLADFGLARAFGIPVRVYTHEVVTLWYRAPEVLLGSTRYACPIDMWSLGCIFAEMVTKRPLFHGDSEIDQLFRIFRTLGTPTDEIWPGVTQLQDYKSTFPMWTKPNIKGAVKGMDEEGLDLLEKMLIYDPAKRITAKASMRHPYFDNIPDLSDRLQPIRS

SEQ ID NO: 1416 - protein, 371 aa, Lytechinus variegatus
MASPVPSQSSPERYVQAAEIGSGAYGIVYKARDTETGHFVALKSVRIPIGEEGMPVSTIREISLLRHLCQLDHPNIVKLLDVCDVMDVGRSEMMLTLVFELVDQDLAQYLERCPPPGLSSSTIKVLMQQLLSGVEYLHSHRVTHRDLKPQNILIACDKKLKLTDFGLSRVYSFQMALTPVVVTMWYRAPEVLLQASYATPVDMWSVGCIFAELHRRRPLFRGQSDKDQLHKIFEVIGLPPEDQWPDVALPWSSFRQTGQRSFLDLVQEICNHGLDLLERMLCFNPDHRITAEQSLSHSYFDDEQGDEEEEDDDDTEVEEEDDDEGVDVGQERSLSVASSRMSLSTDDSGSHSQFGVSDDSQSQEITPTNVR

SEQ ID NO: 1417 - protein, 373 aa, Strongylocentrotus purpuratus
MASSVPSRSTPERYVQAAEIGSGAYGIVYKARDTETGHFVALKSVRIPIGEEGMPVSTIREISLLRHLCQLDHPNIVKLLDVCDVMDVGRSEMMLTLVFELVDQDLAQYLEKCPPPGLSSCTIKFLMHQLLSGVEYLHSHRVTHRDLKPQNILVASDKKLKLTDFGLSRVYSFQMALTPVVVTMWYRAPEVLLQASYATPVDMWSVGCIFAELYRRRPLFRGQSDKDQLHKIFEVIGLPPEDQWPDVALPWSSFRQTGQRSFLDLVQEICNQGLDLLERMLCFNPDHRMTAEQGLLHGFFGDEEEDDEEDDDTEVEDDDDEEDEDDEGVDVGQERSQSASTSSMSQATDDSGSHSQFFSDSSQSQDVTPTNKR

SEQ ID NO: 1418 - protein, 362 aa, Halocynthia roretzi
MSGMKAMSGVKVTVRGQVFDVGPRYVDLSYIGEGAYGMVVSATDNFTGHKVAIKKISPFEHQTYCQRTLREIKILLSFNHENIIAIQDIIRSSAMEMMKDVHIVQDLMETDLYKLLKTQKISNDHVCYFLYQILRGLKYIHSANVIHRDLKPSNLLLNTTCDLKVCDFGLARVSDPDHDHTGFLTEYVATRWYRAPEIMLNSKGYTKSIDIWSVGCILAEMLNNRPLFPGKHYLDQLNHILGVLGSPNNEDLSCIINEKARAYLLSLPLKPKVPWVGMYPNADKKALDLLDKMLTFNPNKRITVVEALAHPYLEQYYDPADEPVAEKPFTFEEELDDLPKEKLKQMIYDTTDPAKFPGPHPT

SEQ ID NO: 1419 - protein, 344 aa, Carassius auratus
MALDVKSRAKLYEKLDFLGEGQFATVYKARDKTTNTIVAIKKIKVGHRTEAKDGINRTALREIKLLQELSHPNIIGLLDAFGHKSNISLLCFMETDLEVIIKDTSLVLTPANIKAYILMSLQGLEYMHNHWILHRDLKPNNLLLDENGVLKLADFGLAKAFGSPNRVYTHQVVTRWYRAPELLFGARMYGVGVDMWAVGSILAELLLRVPFLAGDSDLDQLTGIFEALGTPTEETWPGMSNLPDYVSFKLFPGTPLEHIFSAAGDDLLELLKGLFTFNPCTRTTASQALKMRYFSIRPGPTPGPQLPRPNSSTEALKEKENLLIGIKRKRDSIEQGTLKKKLVF

SEQ ID NO: 1420 - protein, 392 aa, Cyprinus carpio
MAESGSSAAAAGAAGSSSSAAGAGAAVAVGGANGAAGPKPGLESVKGQNFDVGPRYTDLQYIGEGAYGMVCSAFDNVNKIRVAIKKISPFEHQTYCQRTLREIKILLRFRHENIIGINDILRARRIEYMRDVYIVQDLMETDLYKLLKTQQLSNDHVCYFLYQILRGLKYIHSANVLHRDLKPSNLLINTTCDLKICDFGLARIADPEHDHTGFLTEYVATRWYRAPEIMLNSKGYTKSIDMWSVGCILAEMLSNRPIFPGKHYLDQLNHILGILGSPTQDDLNCIINMKARNYLQALPQKPKIPWNKLFPKADNKALDLLDRMLTFNPIKRITVEEALAHPYLEQYYDPSDEPVAEEPFTFNMELDDLPKEKLKELIYEETARFQATYQGS

SEQ ID NO: 1421 - protein, 369 aa, Cyprinus carpio
MATAAVSAPAGGGPNPGSGAEMVRGQAFDVGPRYTNLSYIGEGAYGMVCSAYKRDNKVRVAIKKISPFEHQTYCQRTLREIKILLRFKHENIIGINDIIRTTTIDQMKDVYIVQDLMETDLYKLLKTQHLSNDHICYFLYQILRGLKYIHSANVLHRDLKPSNLLLNTTCDLKICDFGLARVADPDHDHTGFLTEYVATRWYRAPEIMLNSKGYTKSIDIWSVGCILAEMLSNRPIFPGKHYLDQLNHILGILGSPSQEDLNCIINIKARNYLLSLPLRCKVPWNRLFPNADPKALDLLDKMLTFNPHKRIEVEEALAHPYLEQYYDPTDEPVAEAPFKFDMELDDLPKETLKELIFEETARFQPGYRP

SEQ ID NO: 1422 - protein, 361 aa, Cyprinus carpio
MSHKERPTFYRQELNKTIWEVPERYQNLSPVGSGAYGSVCSALDTKSGLRVAVKKLSRPFQSMIHAKRTYRELRLLKHMKHENVIGLLDAFSPATCLAGFNDVYLVTHLMGADLNNIVKCQKLTDDHVQFLIYQILRGLKYIHSADIIHRDLKPSNLAVNEDCELKILDFGLARLTDDEMTGYVATRWYRAPEIMLNWMHYNMTVDIWSVGCIMAELLTGRTLFPGTDHINQLQQIMRLTGTPPASLISRMPSHEARNYINSLSYMPKRNFADVFVGANPMAVDLLEKMLVLDTDKRITASQALAHPYFAQYHDPDDEPEADPYDQSFESRDLDIEEWKRLTYEEVISFEPPVFDGDEMES

SEQ ID NO: 1423 - protein, 303 aa, Oryzias latipes
MEDYVKIEKIGEGTYGVVYKGRHKSTGQVVAMKKIRLESEEEGVPSTAVREVSLLQELKHPNVVRLLDVLMQESRLYLIFEFLSMDLKKYLDSIPSGQYMDPMLVKSYLYQILEGIYFCHRRRVLHRDLKPQNLLIDNKGVIKLADFGLARAFGVPVRVYTHEVVTLWYRAPEVLLGSPRYSTPVDVWSTGTIFAELATKKPLFHGDSEIDQLFRIFRTLGTPNNDVWPDVESLPDYKNTFPKWKEGSLSSMVKNLDKNGLDLLAKMLIYNPPKRISAREAMTHPYFDDLDKSTLPAACINGV

SEQ ID NO: 1424 - protein, 395 aa, Paralichthys olivaceus
  unsure (1)..(395): unsure at all Xaa locations
MADLCCTAAEVGAAGSDSAAADGADGTVALDVGGAPVAAVPKIESESVKGQIFDVGPRYTNLCYIGEGAYGMVCSAMDNVTTXRVAIKKISPFEHQTYCQRTLREIKILLRLDHENIIGINDILMYKLRARHIDNMGDVYIVQTLMETDLKSQRLSNDHVCYFLYQILRGLKYIHSANVLHRDLKPSNLLINTTCDLKMCDFGLARIADPEHDHTGFLTEYVATRWYRAPEIMLNSKGYSKSIDIWSVGCILAEMLSNKPIFPGKDYLDQLNHMLGVLGSHLKMNLNCIINMKARNYLQSLPEKPKIPWEKIFNRADSKALDLLGRMLTFNPIRRISVEEALGHPYLEQYYDPSDEPVAEEPFTFTMELDDLPKEKLKELIFEETARFQETYQGS

SEQ ID NO: 1425 - protein, 365 aa, Xenopus laevis
MLAIDCGKGAAGRMEGIAARGVDVRSRAKQYEKLDFLGEGQFATVYKARDKNTDRIVAIKKIKLGHRAEANDGINRTALREIKLLQELSHPNIIGLLDAFGHKSNISLVFDFMETDLEVIIKDTSLVLTPAHIKSYMLMTLQGLEYLHHLWILHRDLKPNNLLLDENGVLKLADFGLAKSFGSPNRIYTHQVVTRWYRSPELLFGARMYGVGVDMWAVGCILAELLLRVPFLPGDSDLDQLTRIFETLGTPTEEQWPGMSSLPDYVAFKSFPGTPLHLIFIAAGDDLLELLQGLFTFNPCARCTASQALRKRYFSNRPAPTPGNLLPRPNCSIEALKEQQNLNLGIKRKRTEGMDQKDIAKKLSF

SEQ ID NO: 1426 - protein, 352 aa, Xenopus laevis
MEGIAARGVDVRSRAKQYEKLDFLGEGQFATVYKARDKNTDRIVAIKKIKLGHRAEANDGINRTALREIKLLQELSHPNIIGLLDAFGHKSNISLVFDFMETDLEVIIKDTSLVLTPAHIKSYMLMTLQGLEYLHHLWILHRDLKPNNLLLDENGVLKLADFGLAKSFGSPNRIYTHQVVTRWYRSPELLFGARMYGVGVDMWAVGCILAELLLRVPFLPGDSDLDQLTRIFETLGTPTEEQWPGMSSLPDYVAFKSFPGTPLHLIFIAAGDDLLELLQGLFTFNPCARCTASQALRKRYFSNRPAPTPGNLLPRPNCSIEALKEQQNLNLGIKRKRTEGMDQKDIAKKLSF

SEQ ID NO: 1427 - protein, 303 aa, Gallus gallus
MEDYTKIEKIGEGTYGVVYKGRHKTTGQVVAMKKIRLESEEEGVPSTAIREISLLKELHHPNIVCLQDVLMQDARLYLIFEFLSMDLKKYLDTIPSGQYLDRSRVKSYLYQILQGIVFCHSRRVLHRDLKPQNLLIDDKGVIKLADFGLARAFGIPVRVYTHEVVTLWYRSPEVLLGSALYSTPVDIWSIGTIFAELATKKPLFHGDSEIDQLFRIFRALGTPNNDVWPDVESLQDYKNTFPKWKPGSLGTHVQNLDEDGLDLLSKMLIYDPAKRISGKMALNHPYFDDLDKSTLPANLIKKF

SEQ ID NO: 1428 - protein, 365 aa, Pan troglodytes
  unsure (1)..(365): unsure at all Xaa locations
MSLIRKKGFYKQDVNKXXXELXKTYVSPTHVGSGAYGSVCSAIDKRSGEKVAIKKLSRPFQSEIFAKRAYRELLLLKHMQHENVIGLLDVFTPASSLRNFHDFYLVMXFMQTDLQKIMXMEFSEEKIQYLVYQMLKGLKYIHSAGVVHRDLKPGNLAVNEDCELKILDFGLARHADAEMTGYVVTRWYRAPEVILSWMHYNQTVDIWSVGCIMAEMLTGKTLFKGKDYLDQLTQILKVTGVPGTEFVQKLNDXAAKSYIQSLPQTPRKDFTQLFPRASPQAADLLEKMLELDVDKRLTAAQALTHPFFEPFRDPEEETEAQQPFDDSLEHEKLTVDEWKQHIYKEIVNFSPIARKDSRRRXGXKL

SEQ ID NO: 1429 - protein, 346 aa, Homo sapiens
MALDVKSRAKRYEKLDFLGEGQFATVYKARDKNTNQIVAIKKIKLGHRSEAKDGINRTALREIKLLQELSHPNIIGLLDAFGHKSNISLVFDFMETDLEVIIKDNSLVLTPSHIKAYMLMTLQGLEYLHRHWILHRDLKPNNLLLDENGVLKLADFGLAKSFGSPNRAYTHQVVTRWYRAPELLFGARMYGVGVDMWAVGCILAELLLRVPFLPGDSDLDQLTRIFETLGTPTEEQWPDMCSLPDYVTFKSFPGIPLHHIFSAAGDDLLDLIQGLFLFNPCARITATQALKMKYFSNRPGPTPGCQLPRPNCPVETLKEQSNPALAIKRKRTEALEQGGLPKKLIF

SEQ ID NO: 1430 - protein, 346 aa, Homo sapiens
MALDVKSRAKRYEKLDFLGEGQFATVYKARDKNTNQIVAIKKIKLGHRSEAKDGINRTALREIKLLQELSHPNIIGLLDAFGHKSNISLVFDFMETDLEVIIKDNSLVLTPSHIKAYMLMTLQGLEYLHQHWILHRDLKPNNLLLDENGVLKLADFGLAKSFGSPNRAYTHQVVTRWYRAPELLFGARMYGVGVDMWAVGCILAELLLRVPFLPGDSDLDQLTRIFETLGTPTEEQWPDMCSLPDYVTFKSFPGIPLHHIFSAAGDDLLDLIQGLFLFNPCARITATQALKMKYFSNRPGPTPGCQLPRPNCPVETLKEQSNPALAIKRKRTEALEQGGLPKKLIF

SEQ ID NO: 1431 - protein, 346 aa, Homo sapiens [sequence omitted]

SEQ ID NO: 1432 - protein, 346 aa, Homo sapiens
MDQYCILGRIGEGAHGIVFKAKHVETGEIVALKKVALRRLEDGFPNQALREIKALQEMEDNQYVVQLKAVFPHGGGFVLAFEFMLSDLAEVVRHAQRPLAQAQVKSYLQMLLKGVAFCHANNIVHRDLKPANLLISASGQLKIADFGLARVFSPDGSRLYTHQVATRWYRAPELLYGARQYDQGVDLWSVGCIMGELLNGSPLFPGKNDIEQLCYVLRILGTPNPQVWPELTELPDYNKISFKEQVPMPLEEVLPDVSPQALDLLGQFLLYPPHQRIAASKALLHQYFFTAPLPAHPSELPIPQRLGGPAPKAHPGPPHIHDFHVDRPLEESLLNPELIRPFILEG

SEQ ID NO: 1433 - protein, 303 aa, Sus scrofa
MATSRYEPVAEIGVGAYGTVYKARDPHSGHFVALKSVRVPNGGGAGGGLPISTVREVALLRRLEAFEHPNVVRLMDVCATARTDRETKVTLVFEHVDQDLRTYLDKAPPPGLPVETIKDLMRQFLRGLDFLHANCIVHRDLKPENILVTSGGTVKLADFGLARIYSYQMALTPVVVTLWYRAPEVLLQSTYATPVDMWSVGCIFAEMFRRKPLFCGNSEADQLGKIFDLIGLPPEDDWPRDVSLPRGAFSPRGPRPVQSVVPEMEESGAQLLLEMLTFNPHKRISAFRALQHSYLHKAEGNPE

SEQ ID NO: 1434 - protein, 292 aa, Bos taurus
MQKYEKLEKIGEGTYGTVFKAKNRETHEIVALKRVRLDDDDEGVPSSALREICLLKELKHKNIVRLHDVLHSDKKLTLVFEFCDQDLKKYFDSCNGDLDPEIVKSFLFQLLKGLGFCHSRNVLHRDLKPQNLLINRNGELKLADFGLARAFGIPVRCYSAEVVTLWYRSPDVLFGAKLYSTSIDMWSAGCIFAELANAGRPLFPGNDVDDQLKRIFRLLGTPTEEQWPAMTKLPDYKPYPMYPATTSLVNVVPKLNATGRDLLQNLLKCNPVQRISAEEALQHPYFSDFCPP

SEQ ID NO: 1435 - protein, 297 aa, Bos taurus
MEDYTKIEKIGEGTYGVVYKGRHKTTGQVVAMKKIRLESEEEGVPSTAIREISLLKELRHPNIVSLQDVLMQDSRLYLIFEFLSMDLKKYLDSIPPGQFMDSSLVKSYLYQILQGIVFCHSRRVLHRDLKPQNLLIDDKGTIKLADFGLARAFGIPIRVYTHEVVTLWYRSPEVLLGSAGYSTPVDIWSIGTIFAELATKKPLFHGDSEIDQLFRIFRALGTPNNEVWPEVESLQDYKSTFPKWKPGSLASHVKNLDENGLDLLSKMLIYDPAKRISGKMALNHPYFNDLDSQIKKM

SEQ ID NO: 1436 - protein, 566 aa, Oryctolagus cuniculus
MEKYENLGLVGEGSYGMVMKCRNKDSGRIVAIKKFLESDDDKMVKKIAMREIKLLKQLRHENLVNLLEVCKKKKRWYLVFEFVDHTILDDLELFPNGLDDQVVQKYLFQIINGIGFCHSHNIIHRDIKPENILVSQSGVVKLCDFGFARTLAAPGEVYTDYVATRWYRAPELLVGDVKYGKAVDVWAIGCLVTEMLMGEPLFPGDSDIDQLYLIMRCLGNLIPRHQELFYKNPVFAGVRLPEIKESEPLERRYPKLSEVVIDLAKKCLHVDPDKRPFCAELLHHDFFQMDGFAERFSQELQMKVQKDARNISLSKKSQNRKKEKEKDDSLGEERKTLVVQDTNVDSKFKDSKVFKIKGSKIDGEKVDKGNRAAVSMTVGPSHIKAVPSTSLRDCSNVSVDHTRNPGMAIPPLTHNLSAVAPGINSGMGTIPGVQSYRVDEKTKKYCIPFVKPNKHSPSGIYNMNVTTSVSSEKNLLQANKKRGEYSKTDVRLPELNYNHLPELRALEGIARNSRLIRKENKILSESRIPSLAAIDLHTPNIAVHQVSGSPLSDGSEADSPWMEHQH

SEQ ID NO: 1437 - protein, 311 aa, Leishmania donovani donovani
MSSFGRATARSGDAGTRDSLDRYNRLDVLGEGTYGVVYRAVDKITGQYVALKKVRLDRTEEGIPQTALREVSILQEFDHPNIVNLLDVICSDGKLYLVFEYVEADLKKAIEKQEGGYSGMDLKRLIYQLLDGLYFCHRHRIIHRDLKPANILLTSGNVLKLADFGLARAFQVPMHTYTHEVVTLWYRAPEILLGEKHYTPAVDMWSVGCIFAELARRKVLFRGDSEIGQLFEIFQVLGTPTDTEGSWPGVSRLPDYRDVFPKWTAKRLGQVLPELHPDAIDLLSKMLKYDPRERISAKEALQHPWFSDLRW

SEQ ID NO: 1438 - protein, 155 aa, Axinella corrugata
GEGTYGVVYKARVKESGRTVALKKIRLDTECEGVPSTAIREISLLKELGHPNIVSLLEVLHCDRKLFLVFEYLDYDLKKFMDKSAPTGIPPNSAKSYLYQLLDGISFCHSHRVLHRDLKPQNLLLNSHGVIKLADFGLARAFGVPVRTYTHEVVT

SEQ ID NO: 1439 - protein, 699 aa, Plasmodium falciparum 3D7
MGKGHDVKKERGKKDEDEHNEYHPYRRDNKSFYSKNYKMKNKHSYNSSDEYKKYVSHDTYNSYDTYNSYKSHEEHKNNKHISIKPVNKNKYVHSPSPKKTKKIYDELSDYNKHKKYSSSKMDKKKDSYYKEQSNKYKEKRKYDESSQDTYDKKRKRKRKKKKYDYEREEEKYNRYDERRDSSYYTSNYSEDSSKREGGKKEKEDLYISRKEFSGKKKSHKGEHNNNNHHTDQHIKNNYHTDQHNNNNHHTDQHNNNNHHTDQHNNNNHHTDQHNNTISDQINIFPEKNKRDNRINEEKYTIKEHLIYEDEQNISYESNKDSSSEENTILNEYSSDEEKNKIDCILNGCRNVKNYKKLNKISEGTYGAVYRAQNKRTKKIVALKKLKNFSSMHNEGFAMTSLREINILLQLQHDNILSIKEVVFGKHLNDIYLVMEYIEHELKMILDNKSPSFTISELKCLLKQLLSGINYLHRNWVMHRDLKPTNLLYSNKGILKICDFGMARKFGHVTNHNFTKNVVTLWYRAPELLLGEQCYTNKIDIWSAGCIFAEMILKKPLFVGENEIDQLFKILCLLGLPDKESYPEFYEYSFISKNKELFKKKKIKMNVNNIRSHFPNIANQFSGLYLSDNGLDLLQKMLHYNPQCRISAQEALNHPYFNEFPKPLDIKDMPIVPDSNKFIRSNKMANHFKLNSQNNIQFHS

SEQ ID NO: 1440 - protein, 479 aa, Arabidopsis thaliana
MDKQPATSWSIHTRPEIIAKYEIFERVGSGAYADVYRARRLSDGLIVALKEIFDYQSAFREIDALTILNGSPNVVVMHEYFWREEENAVLVLEFLRSDLAAVIRDGKRKKKVEGGDGFSVGEIKRWMIQILTGVDACHRNLIVHRDLKPGNMLISDDGVLKLADFGQARILMEHDIVASDENQQAYKLEDKDGETSEPPEVIPDYENSPRQGSDGQEREAMSKDEYFRQVEELKAKQVVRDDTDKDSNVHDGDISCLATCTVSEMDDDLGRNSFSYDADEAVDDTQGLMTSCVGTRWFRPPELLYGSTMYGLEVDLWSLGCVFAELLSLEPLFPGISDIDQISRVTNVLGNLNEEVWPGCVDLPDYKSISFAKVESPLGIEGCLPNHSGDVISLLKKLICYDPASRATTMEMLNDKYLSEEPLPVPVSELYVPPTMSGPDEDSPRKWNDYREMDSDSDFDGFGPMNVKPTSSGFTIEFP

SEQ ID NO: 1441 - protein, 313 aa, Cicer arietinum
ETVAIKKVLQDKRYKNRELQTMRLLDHPNVVTLKHCFFSTTEKDELYLNLVLEYVPETVYRVIRHYSKMNQRMPLIYVKLYFYQICRALAYIHNCVGVSHRDIKPQNLLVNPHTHQLKLCDFGSAKVLVKGEPNISYICSRYYKAPELIFGATEYTTAIDIWSAGCVLGELLLGQPLFPGASGVDQLVEIIKVLGTPTREEIKCMNPNYTEFKFPQIKAHPWHKIFRKRMPPEAVDLVSRLLQYSPNLRSTALEALVHPFLDELRDPNTRLPNGRHLPPLFNFKANELKGVSAEMLVKLIPLHARKQCALFVS

SEQ ID NO: 1442 - protein, 341 aa, Trifolium repens
QTISYMAERVVGHGSFGVVFQAKCLETGETVAIKKVLQDKRYKNRELQTMRLLDHPNVVSLKHCFFSTTEKDELYLNLVLEYVPETVHRVIKHYNKLNQRMPMIYVKLYTYQIFRALSYIHRCIGVCHRDIKPQNLLVNPHTHQVKLCDFGSAKVLVKGEPNISYICSRYYRAPELIFGATEYTTAIDVWSVGCVLAELLLGQPLFPGESGVDQLVEIIKVLGTPTREEIKCMNPNYTEFKFPQIKAHPWHKIFHKRMPPEAVDLVSRLLQYSPNLRCQALDALTHPFFDELRDPNARLPTGRFLPPLFNFKPHELKGIPVETLVKLVPEHARKQCPFLGL

SEQ ID NO: 1443 - protein, 294 aa, Vigna unguiculata
MEQYEKVEKIGEGTYGVVYKARDRVTDETIALKKIRLEQEDEGVPSTAIREISLLKEMQHRNIVRLQDVVHSEKRLYLVFEYLDLDLKKHMDSSPEFVKDPRQVKMFLYQILCGIAYCHSHRVLHRDLKPQNLLIDRRTNSLKLADFGLARAFGIPVRTFTHEVVTLWYRAPEILLGSRHYSTPVDVWSVGCLFAEMVNRRPLFPGDSEIDELFKIFRILGTPNEETWPGVTALPDFKSTFPKWPPKDLATMVPNLDAAGLNLLSSMLSLDPSKRITARIAVEHEYFKDIKFVP

SEQ ID NO: 1444 - protein, 294 aa, Vigna unguiculata
  unsure (1)..(294): unsure at all Xaa locations
MEQYEKVEKIGEGTYGVVYKARDRVTDETIALKKIRLEQEDEGVPSTAIREISLLKEMQHRNIVRLQDVVHSEKRLYLVFEYLDLDLKKHMDSSPEFVKDPRQVKMFLYQILCGIAYCHSHRVLHRDLKPQNLLIDRRTNSLKLADFGLARAFGIPVRTFTHEVVTLWYRAPEILLGSRHYSTPVDVWSVGCLFAEMVNRRPLFPGDSEIDELFKIFRILGTPNEETWPGVTALPDFKSTFPKWPPKDLATMVPNLDAAGLNLLSXMLSLDPSKRITARIAVEHEYFKDIKFVP

SEQ ID NO: 1445 - protein, 480 aa, Euphorbia esula
MEQLPPSPPPHAKSWSIHTRPEIIAKYEIQERVGSGAYSDVYKARRLSDNLIVALKEIHDYQSAFREIEALHIVQNCPNIVVLHEYFWREDEDAVLVLEFLRTDLASLIKEGKKNGGIGVNAGEIKRWMMQILSGLDACHRNMVVHRDLKPSNLLISDDGVLKLADFGQARILMEPGFVATATDETMHPDEQNLAVNEQKVVTSPENIPQVNPVPIEVQSNQEQVIVKGYESFRETGESKPYDYLDETSIRDGDTSCLATGTASDMGDDFMRSTYNYETDEVDNERYGSLTSCVGTRWFRAPELLYGSTDYGLEIDLWSLGCIFAELLTLEPLFPGTSDIDQLSRIINVLGNLTEQVWPGCLKLPDYGTISFNKVENPTGIESYLTNHSPEEIALVKKLVCYDPAARATAMELLRDEYFSKEPFPVPKFELGGPLLNSGQDEDFPGRYDDYFERDFDSDFDNFAPVKIRSTRTGFSKQFS

SEQ ID NO: 1446 - protein, 396 aa, Solanum tuberosum
MDASAPQMDTMMPDVAAPAVQQPPPPPQPLPGMDNIPATLSHGGRFIQYNIFGNIFEVTAKYKPPIMPIGKGAYGIVCSALNSETNENVAIKKIANAFDNKIDAKRTLREIKLLRHMDHENIVAIRDIIPPPQREAFNDVYIAYELMDTDLHQIIRSNQGLSEEHCQYFLYQILRGLKYIHSANVLHRDLKPSNLLLNANCDLKICDFGLARVTSETDFMTEYVVTRWYRPPELLLNSSDYTAAIDVWSVGCIFMELMDRKPLFPGRDHVHQLRLIMELIGTPSEAEMEFLNENAKRYIRQLPLYRRQSFTEKFPHVNPAAIDLVEKMLTFDPRRRITVEDALAHPYLASLHDISDEPICMTPFNFDFEQHALTEEQMKELIYRESIAFNPEYQRM

SEQ ID NO: 1447 - protein, 394 aa, Solanum tuberosum
MDGSAQQTDTVMSDAAAGQQPATPPLPMAGMENIPATLSHGGRFIQYNIFGNIFEVTAKYKPPIMPIGKGAYGIVCSALNSETNEHVAIKKIANAFDNKIDAKRTLREIKLLRHMDHENIVAIRDIIPPPQREAFNDVYIAYELMDTDLHQIIRSNQGLSEEHCQYFLYQILRGLKYIHSANVLHRDLKPSNLLLNANCDLKICDFGLARVTSETDFMTEYVVTRWYRPPELLLNSSDYTAAIDVWSVGCIFMELMDRKPLFPGRDHVHQLRLLMELIGTPSEAEMEFLNENAKRYIRQLPLYRRQSFVEKFPHVNPAAIDLVEKMLTFDPRRRLTVEGALAHPYLTSLHDISDEPVCMTPFSFDFEQHALTEEQMKELIYREGLAFNPEYQHM

SEQ ID NO: 1448 - protein, 379 aa, Solanum tuberosum
MANQTGGASSTGSRDIRGVLIHGGQYVRYNVYGSLFEVSSKYVPPIRPIGRGAYGLVCAAVNSETREEVAIKKIGNAFDNRIDAKRTLREIKLLRHLDHENIVAIKDLIRPPKKEAFNDVYIVSELMDTDLHQIIRSEQPLTNDHCQYFMYQLLRGLKYVHSANVLHRDLKPSNLFLNANCDLKIGDFGLARTTSETDFMTEYVVTRWYRAPELLLNCSEYTGAIDVWSVGCILGEIMTREPLFPGKDYVQQLRLITELLGSPDDASLQFLRSDNARRYVRQLPQYPKQQFSARFPSMSPLAVDLLEKMLVFDPTRRITVDEALCHPFLSSLHDLNDEPICPSPFSLDFDEPSITEEKIKELIWRESVKFYPDFVDQNI

SEQ ID NO: 1449 - protein, 206 aa, Oryza sativa
  unsure (1)..(206): unsure at all Xaa locations
EEGMLEEESGAFTSCVGTRWFRAPELLYGSTNYGQEVDLWSLGCISGARFNFRALFPGPIWIPIQIGRIIRVLGNLTEETFPXGCSNLPXDYNKIFFNKVEXSPIGLEACLPDRSASEVSIIKRLLCYDPXTKRASAADLLNDPYFAEEPLPVPIEGLQVPESKDEDDDSTEEWANFRGGDSDSDFDEFGSMDVTKTDKGFSIRFS

SEQ ID NO: 1450 - protein, 451 aa, Triticum aestivum
  unsure (1)..(451): unsure at all Xaa locations
MAIGGGGGGGSWSIHGRPDVTSRYDVLGRAGSGAYADVYRGRRRSDGAPVALKEVHDAVSAQREVDALLAAASESSPHVITLLDHFPGGDHDDDVLVLEWLPLDLAAVVREGRRAGGLPAGQLKRWMLQVIEGVAACHRAGLVHRDLKPGNLLISEDGVLKVADFGQARILQEXXPSDEPEIXXAAQEPETLTAADYLHEIDQLRAKSTYGDVDRMSLQDGNTSCLATCSTADIDDDPFRASYSYDAEEDIGDEESGAFTSCVGTRWFRAPELLYGSTSYGQEIDLWSLGCILAELLSLEPHIPKANPDIAQIGRIIGVLGNITQESFPGCSNLPDYNKIFFSKVEKPTGLEASLPNRSASEVSIVKRLLCYDPAKRASASELLNDPYFTEEPLPVPTEALQVPASKGEDDDSSAEEWGNYRDGNSDSDIDEFGSMDVTKTDKGFSIRFXR

SEQ ID NO: 1451 - protein, 485 aa, Zea mays
  unsure (1)..(485): unsure at all Xaa locations
FNRIQILFPNPTPMARSWSIHGRADVTSRYEVLGRAGSGSYADVYRGRRRSDGAAVALKEVHDAVSARSEVEALLAIPPSPNVVALIDHFPGGDCDASXVLVLEWLPLDLAAVVREGGGEGGEGIPASQLKRWMLQVLEGVAACHRAGVVHRDLKPENLLISEDGVLKVADFGQARILQQSAPTFQEMYPHEQSSGMETWVPQQQPAVLQGTEEEPTSYESDATAGQEPETLTAADYLRELDQLRENPAMXDKMSFQDEHASCLCTCSTGDIGDDPYPALYSDDMEGIGEDSGAFTSCVGTRWFRAPELLYGSTNYGLEIDLWSLGCILAELMKLEALFPGISDIDQISRIINVLGDITEETFPGCSNLPDYNKISFNKVEKPTGLEACLPNRSPTEVSIIKQLICYDTAKRTSAVDLLNDRYFTEEPLPAPIEGLHVPASKDEDDDSSTEEWGNYRDGVSRVDFDEFGSMDATKTEKGFSIQFS

SEQ ID NO: 1452 - protein, 1106 aa, Leishmania mexicana
MEAYETLGILGEGTYGVVVKARSRVTGKLVAIKRFKQTEQDEHVRKTSSREVRMLQLLQHPNVIRLEDVFRREGKLYLVFEFIDHTILQLLESTTRGFHRHELRRYTYQLLRGIEFCHNQNIIHRDVKPENVLIDESGLLKLCDFGFARQTSAKGKYTDYVATRWYRAPELLVGDVAYGKPVDVWALGCMFAELSDGQPLFPGESDLDQLCLIMQTCGPVPQRLVFIFMHNPLYNGISFPHTDILYTLKDRYHRESNDWIEFLSSCLHTDPAQRLTCTELMELPYFTRDGFRDRYEAELRAATGLPQLRSTPTTSAPSTQRRAPDQAAALGGDIKADAVVPPHTRRSSENISPALQGQQPPTAKNSFSEPHISKTALKPAAHDANPGKGKGAGAPTLRLTSPHKTASEHPLQLPMILNVSSERAIAAALTDYLNQMPTSSSTVVSSPAQATPAEVAEAFTKADPLSRSCGAALPLQTSQTINASTTRDKKKKRNSSLAETELHRRSSASISNDTEYAVTTDGTKGEPARHISDHPRASATLPPNGVRDGGDSHEPRREGEKTNVSPPLPSHGVAESNMRALLTTAAPGKDGGETAVLSHRALKPASAEKAAATTATAFSPPPLTATHGAPLAECLQDLPALSLHLPRHLQSERQTPAAEQPQPHTSLSAETSMSSFHVRTRNPLAAASSVNDGVSHGKANIETTGSSVAKPRLGLSNSSVSTAASEVKKRKSARHKSNTSRLQDKAVGPVSGSASRRPVPGNASDVVAYRAGFASVVNSLKSTVSQSLSHVLGQQQRHRLLSPESDGVHTAEPHLHGVGAGPSAPDSTRNRNVDATGPQPRKERRCKPLAASTHALQGSDQRHRQQSQPRLDGPLHPDGGASQRATATLMALSALRNVSGPPPAKSAGDANKSSYVHHTRSHTNNNGGETVIPVVGGDGNDTNTCVTSRARRPIVACAVHGNNRDSDELMATRRVQKKNAVATHGRTGNGAVGSIGCTDSSTTSSYQATSIMYGAPYHPFARASKVDGDVCGAQQRQTLQRLKKKIADHRGSGIANTTSSIGSRHSLTPARQIQHQPQLAKEDGGSGDGKTPQFNAATAASPDTGI

SEQ ID NO: 1453 - protein, 385 aa, Toxoplasma gondii
MAAPQVKPEVGDSPEATRQGVLLPSASEEAAANGSSSPRLVPIKREGKQRYRQCDAFLGEGTYGRVEKAEDLRTHQIVAIKKVKASAGSLFASGDSGSVGSGEKTRAQLLRQNVGSVGLHFTTVRELKVMREIEEENVMGVVGVCRAGLHLPRDGTHARRPEEAGRQQDPPRDPTCQVHRLQILRGLHALHKRYIVHRDLAPANVFINDQGICKVADFGLSRCFGCPVVSGTLSKQEQSKGETSQPGKESSVESASKTAPVAISRKELMTSKVVTLWYRPPELLFGADRYGQAVDMWSVGCIMAELLTGETEKLLEIHAQHRRHTMDFKDSERVGQGEPGGSGVDRWVITSKKVREVKKAREVKKAQRIRERGGSLKQRERCEVT

SEQ ID NO: 1454 - protein, 430 aa, Tetrahymena pyriformis
MDKKLSSRNFQDWEAGDRYELVKVVGSGSYGSVREAIDKKTGKKVAIKRLNGIFEDNVDCKRILREIHLLRILNHPNLIRINEIIEPKDFANFDTLYVVTEYCQSDLKKLFKSPIHLCMIQVETLTYNILTGIKYLHSAEVLHRDLKPANVLINEDCSVKICDFGLARSVEGIEGAHIYDERDGGSNSPQKIAPSSQSPEKPATGGRPKLTKEKNLNSKSSKRELTGHVVTRWYRAPELILLEKDYTAAIDIWSIGCIFAELMNMIKENSPTFLDRSPLFPGSSCFPLSPDRNNTVKQGGFPHSHSDQLNVIFSVLGTPSEEDMDFVTDAKAIEYLKSFKQKKRVDFKDLFPAATPECIDFLNQTLVFNPRKRITIDAALNHPLFTPVRDIKKEVFAEGSVILPFEKEGDMPIARLRELFIEEIKRYHVK

SEQ ID NO: 1455 - protein, 363 aa, Pisaster ochraceus
MNNPVTGSGETLSDDGYHRYELNKTTWEVPVQYQKLSAVGAGAYGSVCSSLNTKTGIKIAIKKLSRPFQSAIHAKRTYRELRLLQHMDHENIISLLDVFCRGDTLSSFRDVYMVTHLMGADLNSITKTQKLSDEHVQFLVYQILRGLKYIHSVGVIHRDLKPSNLAVNEDCELRILDFGLARQADDEMTGYVATRWYRAPEIMLNWMHYTNTVDMWSVGCIMAELLTGKTLFPGSDHIDQLSRIMDLTGTPDDEILAKIQSEDARNFVKSQPKTKKKDFRGYFAGANEIAVDLLEKMLLLDVDKRITAEEALSHPYVAKYHDESDEPIGKQFDDSFEQQDLTVQQWKELTFQLIQAVRHQSRR

SEQ ID NO: 1456 - protein, 369 aa, Strongylocentrotus purpuratus
MADQGGAKTKRTNEEKPETVRGQVFDVGPRYVTLNYIGEGAYGMVCSAVDTRHGGKVAIKKISPFEHQTYCQRTLREIKILTRFNHENIINIQDIIKADTIEAMRDVYIVQSLMETDLYKLLKTQPLSNDHICYFLYQILRGLKYIHSANVLHRDLKPSNLLLNTTCDLKICDFGLARIADPGHDHTGFLTEYVATRWYRAPEIMLNSKGYTKSIDIWSVGCILAEMLSNRPIFPGKHYLDQLNHILGVLGSPSQDDLKCIINEKARAYLQGLPFKSKIPLKSLFPKADNKALDFLERMLSFNPDKRITVEEALAHPYLEQYYDPDDEPVKEEPFTFVTELDDLPKEKLKEMIFEEASKFNPSPSPNTS

SEQ ID NO: 1457 - protein, 407 aa, Ciona intestinalis
MHGAPKTTLGNMKGSRDKESKITTVVATHGHGPDRPQEVAYTDTKVIGNGSFGVVYQARLIESNEMVAIKKVLQDKRFKNRELQIMRKLDHCNIVRLRYFFYSSGDKKDEIYLNLVLDFVPETVYRVARQYSKSKQTIPILYVKLYMYQLFRSLAYIHSQGTCHRDIKPQNLLLDPETAVLKLCDFGSAKQLVRGEPNVSYICSRYYRAPELIFGATDYTSSIDVWSAGCVLAELLLGQPIFPGDSGVDQLVEIIKVLGTPTRDQIREMNPNYTEFKFPQIKAHPWSKVFRPRTPPEAIALCSRLLEYSPDNRISPLESCAHSFFDELRLPNTKLPNGRSLPPLFNFTDKELSIKSPLNNILIPLHARNANSAGSTGDYSMGNSIENNGSTSAIGAGGVIATSAPQP

SEQ ID NO: 1458 - protein, 118 aa, Equus caballus
CCAAVKHLHDNWILHRDLKTSNLLLSHAGILKVGDFGLAREYGSPLKAYTPVVVTLWYRAPELLLGAKEYSTAVDMWSVGCIFGELLTQKPLFPGKSEIDQINKVFKDLGTPSEKIWP

SEQ ID NO: 1459 - protein, 309 aa, Mus musculus
MDDQGCPRCKTTKYRNPSLKLMVNVCGHTLCESCVDLLFVRGAGNCPECGTPLRKSNFRVQLFEDPTVDKEVEIRKKVLKIYNKREEDFPSLREYNDFLEEVEEIVFNLTNNVDLENTKKKMEIYQKENKDVIQKNKLKLTREQEELEEALEVERQEHEQRQLFIQKEEELQQALKRKNKQAFLDELESSDLPVALLLAQHKDRSTQLEMQLEKPRSMKPVTFSTGIKMGQQISLAPIQKLEEALYEYQPLQIETCGPQVPEQELLGRLGYLNHVRAASPQDLAGGYTSSLACHRALQDAFSGLFWQPR

SEQ ID NO: 1460 - protein, 309 aa, Mus musculus
MDDQGCPRCKTTKYRNPSLKLMVNVCGHTLCESCVDLLFVRGAGNCPECGTPLRKSNFRVQLFEDPTVDKEVEIRKKVLKIYNKREEDFPSLREYNDFLEEVEEIVFNLTNNVDLENTKKKMEIYQKENKDVIQKNKLKLTREQEELEEALEVERQEHEQRRLFIQKEEELQQALKRKNKQAFLDELESSDLPVALLLAQHKDRSTQLEMQLEKPRSMKPVTFSTGIKMGQQISLAPIQKLEEALYEYQPLQIETCGPQVPEQELLGRLGYLNHVRAASPQDLAGGYTSSLACHRALQDAFSGLFWQPR

SEQ ID NO: 1461 - protein, 309 aa, Mus musculus
MDDQGCPRCKTTKYPNPSLKLMVNVCGHTLCESCVDLLFVRGAGNCPECGTPLRKSNFRVQLFEDPTVDKEVEFRKKVLKIYNKREEDFPSLREYNDFLEEVEEIVFNLTNNVDLEKTKKKMEIYQKENKDVIQKNKLNVTREQEELEEALEVERQEHEQRRLFIQKEEELQQALKRKNKQAFLDELESSDLPVALLLAQHKDRSTQLEMQLEKPRSMKPVTFSTGIKMGQQISLAPIQKLEEALYEYQPLQIETCGPQVPEQELLGRLGYLNHVRAASPQDLAGGYTSSLACHRALQDAFSGLFWQPR

SEQ ID NO: 1462 - protein, 309 aa, Rattus norvegicus
MDDQGCPRCKTTKYRNPSLKLMVNVCGHTLCESCVDLLFVRGAGNCPECGTPLRKSNFRVQLFEDPTVDKEVEIRKKVLKIYNKREEDFPSLREYNDFLEEVEEIVFNLTNNVDLENTKKKMEIYQKENKDVIQKNKLKLTREQEELEEALEVERQESEQRRLFIQKEEELQQILKRKNKQAFLDELESSDLPVALLLAQHKDRSTQLEMQLEKPKSMKPVTFSTGIKMGQQISLAPIQKLEEALYEYQPLQIETCGPQVPEQELLGRLGYLNHVRAASPQDLAGGYTSSLACHRALQDAFSGLFWQPR

SEQ ID NO: 1463 - protein, 314 aa, Anopheles gambiae str. PEST
MDDQVCPRCKTTKYRNPSLKLMVNVCGHTLCESCVELLFLKGSGSCPECNVALRRSNFRVQLFEDSNVDKEVQIRKRILKDFNKKEDDFGSLDEYNDYLEMIEELVFNLCNNIDIINTNKRIEQYKRDNRDVIMKNKLKLSKDELELEQIVEYEKEQFDQRRKELAMIEAENRKQKTKNKEELIDSLMASYEDASAIVDKFTQKAEQSQIQLPKPVAPPPVAKHTHFSSGIATGFQGQHGFLAVPKLEEGPLYVYEPQGFETDGPAPPSLEEVINNGYIRHIRVENLAEKAGGFQTNISCLRAIQEALAGLYHG

SEQ ID NO: 1464 - protein, 178 aa, Arabidopsis thaliana
MVMVSNSTHQNKEIHVRRRISEIYNRREEEFPSLKDYNDYLEEVECMVFDLIDGINVEAIEQKIKRYSKENAEQIMINRARKAEELTAALAACKAKPPQTDADTSSNHGVTAGATYGQASRPTGMGPQPVPIVGGAERQHYAMEDEATRRMKAERAGGFSLEISKRRALEEAFASIWV

SEQ ID NO: 1465 - protein, 178 aa, Arabidopsis thaliana
MVMVSNSTHQNKEIHVRRRISEIYNRREEEFPSLKDYNDYLEEVECMVFDLIDGINVEAIEQKIKRYSKENAEQIMINRARKAEELTAALAACKAKPPQTDADTSSNHGVTAGTTYGQASRPTGMGPQPVPIVGGAERQHYAMEDEATRRMKAERAGGFSLEISKRRALEEAFASIWV

SEQ ID NO: 1466 - protein, 187 aa, Glycine max
KREQEVDGSRMVVSSTNPHNKEIAIRRRIASIFNKREDDFPSLREYNDYLEEVEDMTFNLIEGIDVSDIEAKIAKYQEENAEQIMINRARKAEELAAAMAASKGQPAQTDDDSATNQNSQAGTFAGGQPRPTGMAPQPLPLGGGDMPGFAGDDEETKRLRTERAGGWSGDISRKRALEEAFGSIWVC

SEQ ID NO: 1467 - protein, 188 aa, Glycine max
  unsure (1)..(188): unsure at all Xaa locations
KREQEVDGSRMVVSSTNPHNKEIAIRRRIASIFNKREDDFPSLREYNDYLEEVEDMTXFNLIEGIDVSDIEAKIAKYQQENAEQIMSARIKQAEELAAAMAASKGQPAQTDDDSVSTQGQYAPTFAGGQPRPTGMAPQPLPLGGGDMPGFAGDDEETKRLRTERAGGWSGDISRKRALEEAFGSIWVC

SEQ ID NO: 1468 - protein, 113 aa, Glycine max
LSGGGLLAFLINVKTRRAEELAAAMAASKGQPAQTDDDSVSTQGQYAPTFAGGQPRPTGMAPQPLPLGGGDMPGFAGDDEETKRLRTERAGGWSGDISRKRALEEAFGSIWVC

SEQ ID NO: 1469 - protein, 232 aa, Oryza sativa (japonica cultivar-group)
MVVASGGGRNAWAKEMTIRRRITSIKDLAVKFMSLMLCVDNDLRFNKTREHFPSLKDYNDYLEEVEDMSWSSFNTFNLIEGIDVEVIEAKIARYQQENAEQIYLSRAKRAEDLAAALKASRMNPGKAGANDTKDVVFIPILGTLATCNRLLEALRALVVAREFRKASMRLLLFPPRPTGMAPQPIGGSSVPLQGDDEETMRLRAESGARAGGWSIEMCKRRALQEAFSTIFV

SEQ ID NO: 1470 - protein, 237 aa, Oryza sativa
  unsure (1)..(237): unsure at all Xaa locations
MVVASGGGRNAWAKEMTIRRRITSIKDLAVKFMSLMLCVDNDLRFNKTREHFPSLKDYNDYLEEVEDMSWSSFNTFNLIEGIDVEVIEAKIARYQQENAEQIYLSRAKRAEDLAAALKASRMNPGKAGANDTKDVVFIPILGTLATCNRLLEALRALVVAREFRKASMRLLLFPVGXLXPRPTGMAPQPIGGSSVPLQGDDEETMRLRAESGARAGGWSIEMCKRRALQEAFSTIFV

SEQ ID NO: 1471 - protein, 165 aa, Oryza sativa
  unsure (1)..(165): unsure at all Xaa locations
MVVASGGGRNAWAKEMTIRRRITSIFNKTREHFPSLKDYNDYLEEVEDMTFNLIEGIDVEVIEAKIARYQQENAEQIYLSRAKRAEDLAAALKASRMNPGKAGANDXXLLEALRALVVAREFRKASMRLLLFPVGXLXPRPTGMXPQPIGGSSVPLQGDDEETMX

SEQ ID NO: 1472 - protein, 115 aa, Oryza sativa
  unsure (1)..(115): unsure at all Xaa locations
MVVVSSGGGGGGNAWAKEMTIRRRMASIFNKTQDHFPCLKDYNDYLEEVEDMTFNLIEGIDVEEIEAKIARYQQENAEQIYLSRAKRAEDLAAALKASRMNPGKAAASDTAAGSX

SEQ ID NO: 1473 - protein, 189 aa, Triticum aestivum
  unsure (1)..(189): unsure at all Xaa locations
MVVVGGGSGNAWAKEMTLRRRMASIFNKTREHFPSLKDYNDYLEEVEDMXXIDVEAIEARIARYQQENAEQIYLSRAKRAEDLAAALKASRMVTVKAGPSDTAAGTSQGISGGAGVQGQYAPAAVPGGLNQPRPTGNAPQPIGGSSDPLHGYDEETMRLRAERGARAGGWTAELGRRRALEEAFNSIFV

SEQ ID NO: 1474 - protein, 318 aa, Schizosaccharomyces pombe
MDDEGARKVDEKCPLCQADRYLNPNMKLLINPECYHKMCESCVDRIFTTGPAQCPTPGCNKILRKAKFREQTFEDAQIEREVDVRKRISRIFNKGQQEFDSLQAYNDYLEEVEILTFNLIYKIDVEETEEKVKQYEKQNRDSIAANSARAAAEARILAQNEILLKRQKQEAREAAIREHQKEKERREQVEQQIIFDLATSGKDPNKIIQLSDSLKKQQENIASSVSNISRSSSILLSDVQQVAEDTTPFSPLAGEKDGSKYFSYSKNTYQDLYLEKVSHEPGRKCGFRIEDCHLRCLYEAFSGIDYDLESLKKLEVAS

SEQ ID NO: 1475 - protein, 362 aa, Neurospora crassa
MARPLDPLGFEDEMCPVCKSRKYLNPDIVFVFNPECYHSMCLNCANRLFNDGPNQCPHAGCNKTLRRKGFRSAFFGDLAVEREVDIRRRVAAVFNQVEDDFETLQDYNNYLQMVEDLTFELVNGTDERRRQAEAQLQAWEAEHRADIERNKKAGREADEISRVRLAAERDAVRQRRIEAIKEAEAEKRERVRSREMELDNLAKGTTAMTAEPATKVQLKRRGQVNRVAETASNPAIATTGMGTGASEVERLSIRGLKEKPKAPAPQGPYDPFGGMDFAPSRYKLHGGLSHPLMEKYRLDRQHVAGGYSFDDFAARALYEAFAGLGVFVEDEKEVGSGIGLSQETSMAAGIAAVVDADKMDLD

SEQ ID NO: 1476 - protein, 320 aa, Drosophila melanogaster
MDDQACPRCKTTKYRNPSLKLMVNVCGHTLCESCVDLLFLKGSGACPECMVPLRRNNFRVQLFEDPMVEKEVDIRRRILRDYNKREEDFASLAEYNDYLEEIEDIVYNLCNNIDIIETNKRIEAYKRDNREVIQRNKTRVGRDEYALEEMLELEKVQEEARRKELEELENEHKKKKARDKQALIEELMYSGKDAAQIVTEFAEKAEKQREEEKQLPPPKPANEFSTGIKFGQTADPSLLPVPKSEEGPLFVYEPLVPFSEGPAMPPTNEIVSRGYIAHIRAETPQENAGGFTSALACERALQEALQGLYYTATTGVVSGT

SEQ ID NO: 1477 - protein, 320 aa, Drosophila melanogaster
MDDQACPRCKTTKYRNPSLKLMVNVCGHTLCESCVDLLFLKGSGACPECMVPLRRNNFRVQLFEDPMVEKEVDIRRRILRDYNKREEDFASLAEYNDYLEEIEDIVYNLCNNIDIIETNKRIEAYKRDNREVIQRNKTRVGRDEYALEEMLELEKVQEEARRKELEELENEHKKKKARDKQALIEELMYSGKDAAQIVTEFAEKAEKQREEEKQLPPPKPANEFSTGIKFGQTADPSLLPVPKSEEGPLFVYEPLVPFSEGPAMPPTNEIVSGGYIAHIRAETPQENAGGFTSALACERALQEALQGLYYTATTGVVSGT

SEQ ID NO: 1478 - protein, 324 aa, Marthasterias glacialis
MMEEQACPRCKSTKYRNPSLKLLVNVCGHTLCENCVEILFVRGSGSCPSCNTPLRRNQFRVQEFEDAYVEKEVDIRKRILKDFNKQEEEFPALKDYNDYLEEIETIIFNLANGTELEATKRKVDQYRKNNRESIMKNRSKQSSDQAYLEALLQQENEDEEEKKQQLQFMERQTKNQKKRDKEALIDELIHSNMPADHVIASHTANVEMQEAPVFKLPKKTTFSTGIKVGFGYQDTFLPIPKQEEILFTYEEETYETYGPSAPSTDELDTQRYNKHVRPASPQGIAGGYSQNLACLRALQEAFSGLLYFPSQHKNTDDSSSMETS

SEQ ID NO: 1479 - protein, 309 aa, Xenopus laevis
MDDQGCPRCKTTKYRNPSLKLMVNVCGHTLCESCVELLFVRGSGSCQECDTPLRKSNFKVQLFEDPTIDKEVEIRKKILKIYNKREEDFPSLREYNDFLEEIEEIVLNLTNNVDLDNTRRKIDMYQKENKDTIQRNKIKMTREQEELEEALEMEKHENEQRRLHLQKEEQFQQMMKRKNKQELLDQLETSHLPASILLAQHKGKSVQAEMQVEKPRSFKTDTFSTGIKKGHHIASVPVTKIEEALYQYQPIHIETYGPQVPHIEMLGRQGYLNHVRAAAPQDLAGGYVSSLACHRALQDAFSGLFWQTH

SEQ ID NO: 1480 - protein, 267 aa, Homo sapiens
  unsure (1)..(267): unsure at all Xaa locations
MDDQGCPRCKTTKYRNPSLKLMVNVCGHTLCESCVDLLFVRGAGXCPECGTPLRKSNFRVQLFEDPTVDKEVEIRKKVLKIYNKREEDFPSLREYNDFLEEVEEIVFNLTNNVDLDNTKKKMEIYQKENKDVIQKNKLKLTREQEELEEALEVERQENEQRRLFIQKEEQLQQILKRKNKQAFLDELGQHISLAPIHKLEEAXYDNQPLQIETYGPHVPELEMLGRLGYLNHVRAASPQDLAGGYTSSLACHRALQDAFSGLFWQPS

SEQ ID NO: 1481 - protein, 309 aa, Homo sapiens
MDDQGCPRCKTTKYRNPSLKLMVNVCGHTLCESCVDLLFVRGAGNCPECGTPLRKSNFRVQLFEDPTVDKEVEIRKKVLKIYNKREEDFPSLREYNDFLEEVEEIVFNLTNNVDLDNTKKKMEIYQKENKDVIQKNKLKLTREQEELEEALEVERQENEQRRLFIQKEEQLQQILKRKNKQAFLDELESSDLPVALLLAQHKDRSTQLEMQLEKPKPVKPVTFSTGIKMGQHISLAPIHKLEEALYEYQPLQIETYGPHVPELEMLGRLGYLNHVRAASPQDLAGGYTSSLACHRALQDAFSGLFWQPS

SEQ ID NO: 1482 - protein, 308 aa, Giardia lamblia ATCC 50803
MSVSAAPSATSIDRYRRITKLGEGTYGEVYKAIDTVTNETVAIKRIRLEHEEEGVPGTAIREVSLLKELQHRNIIELKSVIHHNHRLHLIFEYAENDLKKYMDKNPDVSMRVIKSFLYQLINGVNFCHSRRCLHRDLKPQNLLLSVSDASETPVLKIGDFGLARAFGIPIRQFTHEIITLWYRPPEILLGSRHYSTSVDIWSIACIWAEMLMKTPLFPGDSEIDQLFKIFEVLGLPDDTTWPGVTALPDWKQSFPKFRGKTLKRVLGALLDDEGLDLLTAMLEMDPVKRISAKNALEHPYFSHNDFDP

SEQ ID NO: 1483 - protein, 291 aa, Giardia lamblia ATCC 50803
MTDPLNRYERIQGLGEGTYGVVFKAKDKETGQIVALKRIRLENADEGIPATAIREIAILKEMKHKNVVDLLSVIHTEAKLTLVFEYLDMDLKKYIDSKQGKLTPKEVKSFMGQLMTGLTYIHNKRVLHRDLKPQNLLVTSSGLLKLADFGLARGSGIPVRSYTHEVVTLWYRCPSVLLGCRKYGGALDIWSCGCIFYECVTGKPLFPAKTEKDELIKIFKTLGTPDKQSWPDVDTLPQWQKDFPVYPGINVAELLPTLDEAGRDLFSKMMALDPSKRPSARDCLKHPYFAK

SEQ ID NO: 1484 - protein, 356 aa, Hypocrea virens
MSRSNPPNNASASRKISFNVSEQYDIQDVVGEGAYGVVCSAIHKPSGQKVAIKKITPFDHSMFCLRTLREMKLLRYFNHENIISILDIQKPRSYDSFNEVYLIQELMETDMHRVIRTQDLSDDHCQYFIYQTLRALKAMHSANVLHRDLKPSNLLLNANCDLKVCDFGLARSAASQEDNSGFMTEYVATRWYRAPEIMLTFKEYTKAIDVWSVGCILAEMLSGKPLFPGKDYHHQLTLILDVLGTPTMEDYYGIKSRRAREYIRSLPFKKKVPFRTLFPKTSDLALDLLEKLLAFNPVKRITVEDALKHPYLEPYHDPDDEPTAPPIPEEFFDFDKHKDTLSKEQLKQLIYQEIMR

SEQ ID NO: 1485 - protein, 314 aa, Dunaliella tertiolecta
MDAYEKLEKIGEGTYGKVYKARDINTGKLVALKKTRLEMEEEGVPSTTLREVSLLLMLSESNHVVKLIAVEHVEENGKPCLYLVFEYLSTDMKKWMDRNGRGPAHPLPKPAIKSLTYQLIKGLAHCHKHGVMHRDLKPQNLLVDDSIMCCKIADLGLGRAFSIPIKSYTHEIVTLWYRAPEVLLGSTHYSTPVDMWSVGCIFAELVRKTPLFPGDCELQQLLHIFKLLGTPNEEVWPGVSKLRDWHEFPQWHPQDLSRIFPTLEPEGVDLLKRMIEYDPAKRISAKEALKHPYFDDPMIREVDQQENPEVRARD

SEQ ID NO: 1486 - protein, 443 aa, Fugu rubripes
MAAYNGGSSAVAAHHPHHHHQLQHLPPPHMHHHHHHQHHQQQHQQHHLQQQLDIEPDRPIGYGAFGVVWSVTDPRDGKRVALKKMPNVFQNLVSCKRVFRELKMLCFFKHENVLSALDMLQPPHIDYFEEIYVVTELMQSDLHKIIVSPQPLSSDHAKVFLYQILRGLKYLHSAGILHRDIKPGNLLVNSNCVLKICDFGLARVEESDEARHMTQEVVTQYYRAPEILMGSRHYSNSIDIWSVGCIFAELLGRRILFQAQSPIQQLDLITDLLGTPSMEAMRTACEGARAHILRGPHKQPSLPVLYTLSSQATHEAVHILCRMLVFDPSKRISAKDALAHPYLDEGRLRYHTCMCKCCYTTSSGRVYTSDFEPVTNPKFDDGFEKNLSSVRQVKEIIHQFILEQQKGSRVPLCINPQSAAFKSFISSTVPQPSEMPPSPLVWE

SEQ ID NO: 1487 - protein, 294 aa, Sesbania rostrata
MEQYEKVEKIGEGTYGVVYKARDRVTNETIALKKIRLEQEDEGVPSTAIREISLLKEMQHRNIIRLQDVVHSEKRLYLVFEYLDLDLKKHMDSSPEFVKDPRQVKMFLYQILCGIAYCHSHRVLHRDLKPQNLLIDRRTNSLKLADFGLARAFGIPVRTFTHEVVTLWYRAPGILLGSRHYSTPVDIWSVGCIFAEMVNRRPLFPGDSEIDELFKIFRILGTPNEDTWPGVTSLPDFKSTFPKWPPKDLATVVPNLEQAGLNLLSSMLCLDPSKRITARSAVEHEYFKDIKFVP

SEQ ID NO: 1488 - protein, 294 aa, Vigna aconitifolia
MEQYEKVEKIGEGTYGVVYKARDRVTNETIALKKIRLEQEDEGVPSTAIREISLLKEMQHRNIVRLQDVVHSEKRLYLVFEYLDLDLKKHMDSSPEFVKDPRQVKMFLYQILCGIAYCHSHRVLHRDLKPQNLLIDRRTNSLKLADFGLARAFGIPVRTFTHEVVTLWYRAPEILLGSRHYSTPVDVWSVGCIFAEMVNRRPLFPGDSEIDELFKIFRILGTPNEETWPGVTALPDFKSTFPKWPPKDLATVVPNLDAAGLNLLSSMLCLDPSKRITARIAVEHEYFKDIKFVP

SEQ ID NO: 1489 - protein, 424 aa, Oryza sativa; identical to SEQ ID NO: 417

SEQ ID NO: 1490 - protein, 424 aa, Oryza sativa; identical to SEQ ID NO: 417

SEQ ID NO: 1491 - protein, 384 aa, Oryza sativa
  unsure (1)..(384): unsure at all Xaa locations
MASGDGGDDAGVKRVADRYLKREVLGEGTYGVVFKAVDTKTGNTVAIKKIRLGKYKEGVNFTALREIKLLKELKDSNIIELIDAFPYKGNLHLVFEFMETDLEAVIRDRNIVLSPADTKSYIQMMDMKPNNLLIGADGQLKLADFGLARIFGSPERNFTHQVFARWYRAPELLFGTKQYGSAVDIWAAGCIFAELLLRRPFLQGSSDIDQLGKIFAAFGTPKSSQWPDMVYLPDYVEYQFVSAPPLRSLFPMASDDALDLLSRMFTYDPKARITAQQALEHRYFLSVPAPTKPSQLPRPPPKGDSGNNKIPDLNLQDGPVVLSPPRKLRRVTAHEGMEVHMHRADRTEEHPSGARHMDDMSSQSXRIPMSVDVGAXFGTRPAPX

SEQ ID NO: 1492 - protein, 353 aa, Podospora anserina
MSNAQARGGARKISFNVSEQYDIQDVVGEGAYGVVCSAIHKPSGQKVAIKKITPFDHSMFCLRTLREMKLLRYFNHENIISILDIQKPRSYESFNEVYLIQELMETDMHRVIRTQELSDDHCQYFIYQTLRALKAMHSANVLHRDLKPSNLLLNANCDLKVCDFGLARSAASQEDNSGFMTEYVATRWYRAPEIMLTFKEYTKAIDVWSVGCILAEMLSGKPLFPGKDYHHQLTLILDVLGTPTMEDYYGIKSRRAREYIRSLPFKKKVPFRTLFPNTSDMALDLLEKLLAFNPVKRITVEEALKHPYLEPYHDPEDEPTAPPIPEEFFDFDKHKDNLSKEQLKQLIYQEIMR

SEQ ID NO: 1493 - protein, 355 aa, Glomerella cingulata
MSRANPPNASGSRKISFNVSEQYDIQDVVGEGAYGVVCSAIHKPSGQKVAIKKITPFDHSMFCLRTLREMKLLRYFNHENIISILDIQKPRSYETFNEVYLIQELMETDMHRVIRTQDLSDDHCQYFIYQTLRALKAMHSANVLHRDLKPSNLLLNANCDLKVCDFGLARSAASQEDNSGFMTEYVATRWYRAPEIMLTFKEYTKAIDVWSVGCILAEMLSGKPLFPGKDYHHQLTLILDVLGTPTMEDYYGIKSRRAREYIRSLPFKKKVPFRTLFPKTSDLALDLLEKLLAFNPVKRITVEDALKHPYLEPYHDPDDEPTAPPIPEEFFDFDKHKDNLSKEQLKQLIYQEIMR

SEQ ID NO: 1494 - protein, 308 aa, Giardia intestinalis
MSVSAAPSATSIDRYRRITKLGEGTYGEVYKAIDTVTNETVAIKRIRLEHEEEGVPGTAIREVSLLKELQHRNIIELMSVIHHNHRLHLIFEYAENDLKKYMDKNPDVSMRVIKSFLYQLINGVNFCHSRRCLHRDLKPQNLLLSVSDASETPVLKIGDFGLARAFGIPIRQFTHEIITLWYRPPEILLGSRHYSTSVDIWSIACIWAEMLMKTPLFPGDSEIDQLFKIFEVLGLPDDTTWPGVTALPDWKQSFPKFRGKTLKRVLGALLDDEGLDLLTAMLEMDPVKRISAKNALEHPYFSHNDFDP

SEQ ID NO: 1495 - protein, 355 aa, Fusarium oxysporum f. sp. lycopersici
MSRSNPPNAAGSRKISFNVSEQYDIQDVVGEGAYGVVCSAIHKPSGQKVAIKKITPFDHSMFCLRTLREMKLLRYFNHENIISILDIQKPRNYESFNEVYLIQELMETDMHRVIRTQDLSDDHCQYFIYQTLRALKAMHSANVLHRDLKPSNLLLNANCDLKVCDFGLARSAASQEDNSGFMTEYVATRWYRAPEIMLTFKEYTKAIDVWSVGCILAEMLSGKPLFPGKDYHHQLTLILDVLGTPTMEDYYGIKSRRAREYIRSLPFKKKVPFRTLFPKTSDLALDLLEKLLAFNPVKRITVEEALKHPYLEPYHDPEDEPTAPPIPEEFFDFDKHKDNLSKEQLKQLIYQEIMR

SEQ ID NO: 1496 - protein, 355 aa, Trichoderma atroviride
MSRSTAPNASASRKISFNVSEQYDIQDVVGEGAYGVVCSAIHKPSGQKVAIKKITPFDHSMFCLRTLREMKLLRYFNHENIISILDIQKPRSYDSFNEVYLIQELMETDMHRVIRTQDLSDDHCQYFIYQTLRALKAMHSANVLHRDLKPSNLLLNANCDLKVCDFGLARSAASQEDNSGFMTEYVATRWYRAPEIMLTFKEYTKAIDVWSVGCILAEMLSGKPLFPGKDYHHQLTLILDVLGTPTMEDYYGIKSRRAREYIRSLPFKKKVPFRTLFPKTSDLALDLLEKLLAFNPVKRITVEDALKHPYLEPYHDPEDEPTAPPIPEEFFDFDKHKDTLSKEQLKQLIYQEIMR

SEQ ID NO: 1497 - protein, 290 aa, Juglans nigra x Juglans regia
MDQYEKVEKIGEGTYGVVYKARNRKTNQTLALKKIRLEQEDEGVPSTAIREISLLKEMQHGNIVKLQDVVHGEKRLYLVFEYLDLDLKKHMDSSPEFANDLRQIKMFLHQILRGIAYCHSHRVLHRDLKPQNLLIDRRSNSLKLADFGLARAFGIPVRTFTHEVVTLWYRAPEILLGSRHYSTPVDVWSVGCIFAEMVNQRPLFPGDSEIDELFKIFRVLGTPNEDTWPGVTSLPDYKGAFPKWPPKDLAAVVSSLDSTGVDLLSKMLSLDPSRRITARTALEHEYFKDI

SEQ ID NO: 1498 - protein, 876 aa, Streptomyces coelicolor A3(2)
MGHGVPELVLESNGRTWTLDPSRSYALGRDPQGELVFDDARVSWRHATISFNGRGWVVEDHGSTNGTFVHGQRVQQMELGAGTVLNLGNATDGPRVSLTGAQAPAGAPQAQPQQQPQQPQQQPYAAQGANAGWAQQAPPAQEPFQQQAPQQAPQHGQQHQAQQAGWQQQQPPQQVAPQPQQAAPHFPQQQGPGGAAGAPPVHGDRSPTTFHQFSLGRVMRIGRALENDLVVSDLQVSRNHAEFHSTPDGRMEIRDLGSHNGTYVNGQPIAKGGTQLLGPTDVVGVGHSTFQIVGDRLEEFVDTGEVSFSARHLTVTVDGGKQILKDVSFGVPEKSLIAVIGPSGSGKSTLLKALTGYRPADQGEVLYDNRNLYKQFAELRQRIGLVPQDDILHKELTVKKALKYAAKLRFPADTTGAERNARIDEVLRELKLDIHKDKKVTSLSGGQRKRVSVALELLTKPSLIFLDEPTSGLDPGMDRDVMQLLRGLADDGRTVLVVTHSVAELATCDKLLVMAPGGSVAYFGPPEEALNFFGYDTWADVFSAFENYRDYDWAGRWKGSQHYQMYAADLDAVAPQSVQVPPMQAMRPPKPQGWMSQFVTLVRRYTSVIASDKGFLALMVILPAVLGAVSLLIDADKGLLPNPANPQTGRIIPNGTATTVLLILAVGACFAGAANSVRELIKERVIYERERATGLSRSAYLMSKVFVLGLITVFQGLLVGVIGFASREIPDEGLILGGATLVELSLPIMALGFASMMFGLVISSLVKTAEKTMPLLVMFAIIQVVFTGCLFALNDAVGVNQFSYLMPSRWAVGAAGATLDFNRISPPEKGAEADPLWEHTVGAWGMDMAALIVLGVICGFFVARFLRRHEPEVMRK

SEQ ID NO: 1499 - protein, 276 aa, Streptomyces coelicolor A3(2)
MMNYPTEHSSPPPEGQGGDPAPPAVHAEDLTVVRGPRTVLRVLGFTVPRGRITGLLGPSGCGKSTLMRAIVGTQAKVTGTLDVLGRPAGHPALRTRIGYVTQAPSVFDDLTVRQNLDYFAEILDPGRAASDRRRDDVTRVIADVDLTAHADALAGNLSGGQRSRVSLAVALLGAPELLVLDEPTVGLDPVLRRDLWTLFHSIAADRGATLLVSSHVMDEAERCHRLLLMREGEVLADDTPDALRTRTGSETVEEAFLHLVDEAKDKAAARTKETTR

SEQ ID NO: 1500 - protein, 615 aa, Nostoc sp. PCC 7120
MLTRRRAGLRLDAIDLRKYSHPILASTTLLNEISLSFLPNEFIVIAGVSGGGKSTLIDALNGQRKARGKVLIDGVDLYKNYHAFKNLIGYVPQDDIVHLDLTVWEAFMFAAQLRVPFLSISEQQQWVEAILQRLHLVERKNVPVKQLSGGQRKRVSIGVELISSPSLFFLDEATSGLDPGTELQIMSLLRSFCDQASTVVLITHATKNVGIADQVVFLAKGGRLAYVGPPKLALDYFGVQDFDAIYHKVEHQLSPAQWEERFKSSGYYKKFVSERLQSLPQQKQAPTADKPNLREQLVVLCQRNLSILLKNKLSLALMLLGAPILGSLNFVLWKSDLFSTKTGNAGQSISMLFVVVVMAIMSGSLAMMPEIAKERPIYKRERSVGLGLAPYLISKLLLAWVLALYQSAVLFYLMLGAVDVPGADTNTAAMYLTLFLASFGSMVLGLIVSAVAPNQSVAPLIILVLLVFQIVFGGGIQPTENLNSNPDAKAFSQLMLSKYSFENLVFLSKMGADIADDFCWQKSESQRKTLPTALIAQCNCYNKNVFTKCEFPGLGKIKRTSSLNNDLLKANLLIQSILDGYERLIYTDVSRNNWNLIYLIGVMISILFMILLFRG

SEQ ID NO: 1501 - protein, 297 aa, Nostoc sp. PCC 7120
MLNIHNLNKSYGDRHVLQDLTLNIINGEVYGLLGANGSGKTTTINIICNLLKADSGDIKLNNQVISESTKKLIGVAPQENILYKTLTCEENLQFFAEIYGLSKENIQKQIKDILAAVNLSDRAKSPVETLSGGMQRRLNIAVALVHQPKLVILDEPTTGLDIEARYEIWELIRQLKAQGITVLLTTHLLDEAERLCEKIGILKNGQILVEGSLAELRNLIPAQEILSLKTTQEKEAIARAKMYGFTHRHYDKELAFWLHESLELKEIISRFEGINIDAISRQPVRLEHIYLEVTQQI

SEQ ID NO: 1502 - protein, 339 aa, Nostoc sp. PCC 7120
MAPAVLIQNLQKRYGTVEAVKDVSFQVEPGEIFGLLGPNGAGKTTTLRALCTLTTPDAGKIEVSGISVLDNPRVARQRLGYVAQEVALDKVLTGKELLQLQAALYHLPNAIAKQRIDTVLDLLGLQEYANKKTGTYSGGLRKRLDLAAGLLHSPDVLVLDEPTVGLDIESRFVVWEFLRKLRVSGTTVVITSHYLEEIDALADRVAIIDRGVVIAVGTPSELKDRVGGDRITLRIREFSPTAEAEQAKSLLQGLPFVKEVIINNAQGNSLNLVVTPQNDALITIQQALNNASLPIFGIAQSRPSLDDVYLAATGRTLLDAELAAVANRDPKAEKKQNMR

SEQ ID NO: 1503 - protein, 267 aa, Rhodopseudomonas palustris
MPSFSTSARCSPKASRPTWCATRKSSLLILGIVMLSVREVTTAYKGLVAISNVSIEVEQGEIVCVAGANGAGKSTLLKSIAGAERIRSGQVLFDGERLDGVPQHVITKRGVAYVPENRRLFPRLSVHDNLRLGSYLYRGEADREKPLEFVFSLFPRLQERLEQRAETLSGGEQQMLAIGRALMTRPRLLMLDEPSQGIMPKLVSEIFQSVKKIRDAGMTVLIVEQRMAECLEIADRAYILQTGRVLMQGKAAELMDNPDVRKAYLGL

SEQ ID NO: 1504 - protein, 168 aa, Thanatephorus cucumeris
TLTALMGVSGAGKTTLLDCLATRTTMGVITGQMLVDGKPRDDSFQRKTGYAQQQDLHLSTSTVREALTFSAVLRQPAHVSRKEKVEYVEEVIKLLEMTEYADAVVGVPGEGLNVEQRKRLTIGVELAAKPALLLFLDEPTSGLDSQTSWAILDLLDKLKKNGQAILCT

SEQ ID NO: 1505 - protein, 864 aa, Chloroflexus aurantiacus
MAPAQPSVCPFCQAPLGRSDARFCPACGRSLPVPAATGPSTIITTGSATLHISEPGVERDVVLGVQPLTIGRAPDNDIVLQSRFVSGRHARIEPNGQGHRIVDVGSRNGLLFAGQRITMRELADGDVLRIGDPATGNFVSLTYHNTALTTTAALREVPSRFPLDPNDPEITIGRIGCDIILDNPQVSRFHARLDRAPGGGVLLRDMGSTNGTFVNGQRVTAPVVLKPGDVIQIGAFKLVYNVTSLDRYDQRGALRIDARNLSRVVSRNGVQRVILHDVSLSIAPREFVAIVGGSGTGKSTLMKALCGYAPADQGEVLVNGDDFYRNFAAYRSVLGYVPQDDILHRTLVVQRALEYAARLRLPADTTDQEIVARIERVLDDVEMSAHRDKSIEALSGGQRKRVSIGAELLADPSLFFLDEPTSGLDPGLEKKMMYTLRRLADSGRTVVLVTHATANITQCDHVIFMAGNGRMVFFGPPAAALNFFQITSGDFADIYTKIEGVATADHPVVRQDLRAEYEAWQAAHPQAASPPSLAELWEMRYRQSALYRQYVAERLAATPAGPHVESGQTSQTTQRISAWRQFGLLTRRYLDLMLQDRRNLLILLLQAPIIALLLLLVARSDALTGVQAQDLIQRGEAKKVLFMLATVSVWFGIINAAREITKEQAVYRRERLVNLQIGPYLFSKVTVLSLLILVQTIVLLGMLLFKVALPGETGILLPPLIETFLTLFLSSGAGMALGLAISAASATPDRAISLVPFALIPQILFAGLIFAIEGLATPLSWLTISRWSMDALGASLDLNRLCDLPNTDDQGSIPAGCTPGFLEIEAAFTHDPLHLIGRWAALLGYAGICLLITAWLLRRRDRVI

SEQ ID NO: 1506 - protein, 301 aa, Sulfolobus tokodaii
MIDVFGLVKKYSKREVLSNVSLGVRKGEFVSLIGPNGAGKTTLIRSILTLIKPDKGEVRIMGKDPFKDKSIFKNLGYVQELPNLPPFMTGREVLMLSAKLKGAKKDDVDELLDIVGMAEFADRQIAKYSKGMTQRIAIAEALLGNPEVMILDEPNIGIDPIFSVKVREMFNKLKKNGSSILMTSHELEDVKKLSDRVYMIYKGKIVFEGSVEQLVREFLGINVIIETNEVEKVLNLVSSLEYVKRVYRENSRVVVSLSEDKREELLKSLIQSNISVKGFYLDLNLEEAYARAINSVGNNAL

SEQ ID NO: 1507 - protein, 790 aa, Synechocystis sp. PCC 6803
MVMNQNNRPYIIVTNQGQSLPPFELTKSKHILGRDSQFADLIVPTDWSIISRCQATLVEDQGNYFIYDGDRLNPSSNKLFINHHLITHDIGYPLQNGDVIKIGQNINILITIKYFTPNGSSPTNLTSLLSINLKQKSVVIGRDETANLQLLSSAVSRQHAVLDYLEPNTYLLHDYSTNGVYVNGTKVNGKILINTAAIIKIVPYTLVLQNDQLFIADTGDNIRLDARNIVRTVQGNQSEEITLLNQISLPIEPGQLVALVGGSGAGKSTFMRTLLGIEPTTSGTVYLNGEDLRNNFNLYRNQIGYVPQKDIIHSSLTVEEALRYAAKLRLPQDADIDEIVEKTLGQIEMQERRHVLVKKLSGGQLKRVSIGVELLVDPKLFFLDEPTSGLDPGLDKKMMQLLRKLADQGRTIVLVTHATGNINLCDRLVFLGQGGNLCYFGTFSDACQFFNLHNGDFADVYIQLDNQSAVIKAAQRYSRSSYQHQYIDQRLGVSNSAVAAPRPSPPRVSPLRQTWILCQRYWQIMARDPVNIGISIATAPIGILLIDLAIATREPFILGSEADPKLAPLAQTVLLVFSCAAIWVGLASSLQEIVKENDIYSRERLVNLNLFAYIASKVTVLSGLALLQTLAMVVIILIAFDHPQPPLLPWGLGLIITSYLTLFSSICLGLMVSTLVKSETQANTALPILLLPQIIFSGVLFQIKGVSQYLSWFMVSRWSIGAYGTLLDINSLVPEPVIFPDGTVLESPFKATLVYDPSWNNLLVNWEILLLQGFVCLVVIFLFKKREDII

SEQ ID NO: 1508 - protein, 244 aa, Anabaena variabilis
MRQEAVIAIKSLNHYYGKGALKRQILFDINLEIYPGEIVIMTGPSGSGKTTLLSLIGGLRSVQEGNLQFLGVELSGASQNKLVQIRRSIGYIFQAHNLLGFLTARQNVQMAVELNEHISQEEAIAKAEAMLKAVGLENRVDYYPDNLSGGQKQRVAIARALVNNPPLVLADEPTAALDKQSGRDVVEIMQRLAKDQGTSILLVTHDNRILDIADRIVEMEDGILARDSQTAIVSYDSGAWSETP

SEQ ID NO: 1509 - protein, 297 aa, Ralstonia metallidurans
MRNVRKLYGDHVVVDNLDLEVQPGQCFGLLGPNGAGKTTTLRMLLGLTTPASGTLMLCGEPIPQRAPQARMRVGVVPQFDNLDPDFSVIENLRIFGRYFGLSSAQIAERVPKLLEFARLESRADAQVRDLSGGMRRRLTVARALINDPDLLIMDEPTTGLDPQARHLIWERLKSLLSAGKTILLTTHFMEEAERLCNHLCVIDAGRKIAEGKPHELIDSEIGCDVVEVYGDELEPLRDTLTPLAERTEMRGETLFFYVREPAPLLAALHGKGGVRYLHRPANLEDVFLKLTGREMRD

SEQ ID NO: 1510 - protein, 292 aa, Streptococcus suis
MIEVQALEKIIKGRTILSTISFEIKSGECVALIGPNGAGKTTLMSCLLGDRKATKGQVLLDGLAPQARSNKETVAVLPQENAIPTDLKVKELLRFFQAIYKDSLTDVEIDSLLCFSQEQKNQLAGKLSGGQKRLLAFVICLIGKPKLLFLDEPTAGMDTSTRQRFWEIVHELKAQGVTIFYTSHYIEEVEHTAERILVLHQGRLLRDTTPFAMRSEEQEKEVTLPIAFAAVVESLAEINGISYKQDTVSFKTRAIEQVWASLQEAGCRISDLEVQNKTLLNSLFDKTREEES

SEQ ID NO: 1511 - protein, 248 aa, Lactococcus lactis subsp. lactis
MKSPIAINDISVKFGDKAILDHLSYEFESGKIICLIGPSGAGKSTFIKAIVGMQKLDSGNVKILERKIPDREVLGKLGYMAQEDALFKELTGKQNLEFFGSLQGIKKKDLQGKLDKAAATVNLTKQLNQSISNYSGGMQRRLSLAIALQTDAPILLLDEPTVGIDPELRQEIWEELRNQANQGKTILITTHVMDEAERCDVVLMLRNGKFIAEGSPKEIKEKYQVASVEEAFIVAGKNLELQNKGAAK

SEQ ID NO: 1512 - protein, 162 aa, Chaetodiopsis meigenii
LFIGSLTAREHLIFQAMVRMPRALTYRQKLQRVDQVIQDLSLGKCQNTIIGVPGRIKGLSGGERKRLAFASEALTDPPLLICDEPTSGLDSFMAHSVVQVLKKLSEKGKTVILTIHQPSSELFELFDKILLMAEGRVAFLGTPIEAVDFFSYIGAQCPTNYN

SEQ ID NO: 1513 - protein, 162 aa, Cyrtodiopsis currani
LFIGSLTAREHLIFHAMVRMPGTLTKHQKVERVDQVIQDLSLGKCQNTIIGVPGRVKGLSGGERKRLAFASEALTDPPLLICDEPTSGLDSFMAHSVVQVLKKLSEKGKTVILTIHQPSSELFELFDKILLMAEGRVAFLGTPLEAVDFFSYIGAQCPADYN

SEQ ID NO: 1514 - protein, 162 aa, Cyrtodiopsis dalmanni
LFIGSLTAREHLIFHAMVRMPGTLTYRQKVERVDQVIQDLSLGKCQNTIIGVPGRVKGLSGGERKRLAFASEALTDPPLLICDEPTSGLDSFMAHSVVQVLKKLSEKGKTVILTIHQPSSELFELFDKILLMAEGRVAFLGTPLEAVDFFSYIGAQCPANYN

SEQ ID NO: 1515 - protein, 162 aa, Cyrtodiopsis quinqueguttata
LFIGSLTAREHLIFHAMVRMPEALTYRQKIERVDQVILDLSLGKCQNTIIGVPGRVKGLSGGERKRLAFASEALTDPPLLICDEPTSGLDSFMAHSVVQVLKKLSEKGKTVILTIHQPSSELFELFDKILLMAEGRVAFLGTPVEAVDFFSYIGAQCPANYN

SEQ ID NO: 1516 - protein, 162 aa, Cyrtodiopsis whitei
LFIGSLTAREHLIFHAMVRMPGTLTYRQKVERVDQVIQDLSLGKCQNTIIGVPGRVKGLSGGERKRLAFASEALTDPPLLICDEPTSGLDSFMAHSVVQVLKKLSEKGKTVILTIHQPSSELFELFDKILLMAEGRVAFLGTSLEAVDFFSYIGAQCPANYN

SEQ ID NO: 1517 - protein, 162 aa, Diasemopsis aethiopica
LFIGSLTAREHLIFQAMVRMPRALSYRQKLQRVDQVIQDLSLGKCQNTIIGVPGRIKGLSGGERKRLAFASEALTDPPLLICDEPTSGLDSFMAHSVVQVLKKLSEKGKTVILTIHQPSSELFELFDKILLMAEGRVAFLGTPIEAVDFFSYIGAQCPTNYN

SEQ ID NO: 1518 - protein, 162 aa, Diasemopsis albifacies
LFIGSLTAREHLIFQAMVRMPSALTYRQKLQRVDQVIQDLSLGKCQNTIIGVPGRTKGLSGGERKRLAFASEALTDPPLLICDEPTSGLDSFMAHSVVQVLKKLSEKGKTVILTIHQPSSELFELFDKILLMAEGRVAFLGTPIEAVDFFSYIGAQCPTNYN

SEQ ID NO: 1519 - protein, 162 aa, Diasemopsis dubia
LFIGSLTAREHLTFQAMVRMPRALTYRQKLQRVDQVIQDLSLGKCQNTIIGVPGRIKGLSGGERKRLAFASEALTDPPLLICDEPTSGLDSFMAHSVVQVLKKLSEKGKTVILTIHQPSSELFELFDKILLMAEGRVAFLGTPIEAVDFFSYIGAQCPTNYN

SEQ ID NO: 1520 - protein, 162 aa, Diasemopsis elongata
LFIGSLTAREHLIFQAMVRMPHVLTYRQKLQRVDQVIQDLSLGKCQNTIIGVPGRIKGLSGGERKRLAFASEALTDPPLLICDEPTSGLDSFMAHSVVQVLKKLSEKGKTVILTIHQPSSELFELFDKILLMAEGRVAFLGTPVEAVDFFSYIGAQCPTNYN

SEQ ID NO: 1521 - protein, 162 aa, Diasemopsis nebulosa
  unsure (1)..(162): unsure at all Xaa locations
LFIGSLTAREHLIFQAMVRMPRALTYRQKVQRVDQVIQDLSLGKCQNTIIGVPGRIKGLSGGERKRLAFASEALTDPPLLICDEPTSGLDSFMAHSVVQVLKKLSEKGKTVILTIHQPSSXLFELFDKILLMAEGRVAFLGTPIEAVDFFSYIGAQCPTNYN

SEQ ID NO: 1522 - protein, 162 aa, Diasemopsis sp.
LFIGSLTAREHLTFQAMVRMPRALTYRQKLQRVDQVIQDLSLGKCQNTVIGVPGRIKGLSGGERKRLAFASEALTDPPLLICDEPTSGLDSFMAHSVVQVLKKLSEKGKTVILTIHQPSSELFELFDKILLMAEGRVAFLGTPIEAVDFFSYIGAQCPTNYN

SEQ ID NO: 1523 - protein, 162 aa, Diasemopsis sp.
LFIGSLTAREHLTFQAMVRMPRAFTYRQKLQRVDQVIQDLSLGKCQNTIIGVPGRIKGLSGGERKRLAFASEALTDPPLLICDEPTSGLDSFMAHSVVQVLKKLSEKGKTVILTIHQPSSELFELFDKILLMAEGRVAFLGTPIEAVDFFSYIGAQCPTNYN

SEQ ID NO: 1524 - protein, 162 aa, Diopsis apicalis
LFIGSLTAREHLIFQAMLRMPNALSYRQKVERVDQVIQDLSLGKCQNTIIGVPGRVKGLSGGERKRLAFASEALTDPPLLICDEPTSGLDSFMAHSVVQVLKKLSEKGKTVILTIHQPSSELFELFNKILLMAEGRVAFLGTPTEAVDFFSYIGAQCPANYN

SEQ ID NO: 1525 - protein, 162 aa, Diopsis fumipennis
LFIGSLTAREHLIFQAMLRMPSALSYRQKVERVDQVIQDLSLGKCQNTIIGVPGRVKGLSGGERKRLAFASEALTDPPLLICDEPTSGLDSFMAHSVVQVLKKLSEKGKTVILTIHQPSSELFELFNKILLMAEGRVAFLGTPTEAVDFFSYIGAQCPANYN

SEQ ID NO: 1526 - protein, 162 aa, Diopsis gnu
LFIGSLTAREHLIFQAMLRMPGSLTYQQKVERVDQVIQDLSLGKCQNTIIGVPGRVKGLSGGERKRLAFASEAITDPPLLICDEPTSGLDSFMAHSVVQVLKKLSEKGKTIILTIHQPSSELFELFNKILLMAEGRVAFLGTPIEAVDFFSYIGAQCPANYN

SEQ ID NO: 1527 - protein, 162 aa, Diopsis longicornis
LFIGSLTAREHLIFQAMLRMPSALSYRQKVERVDQVIQDLSLGKCQNTIIGVPGRVKGLSGGERKRLAFASEALTDPPLLICDEPTSGLDSFMAHSVVQVLKKLSEKGKTVILTIHQPSSELFELFNKILLMAEGRVAFLGTSAEAVDFFSYIGAQCPANYN

SEQ ID NO: 1528 - protein, 162 aa, Eurydiopsis argentifera
  unsure (1)..(162): unsure at all Xaa locations
LFIGSLTAREHLIFQAMVRMPGVLSHRQKIERVDQVIQDLSLGKCQNTIIGXPGRVKGLSGGERKRLAFASEALTDPPLLICDEPTSGLDSFMAHSVVQVLKKLSEKGKTVILTIHQPSSELFELFDKILLIAEGRVAFLGTPTEAVDFFSYIGAQCPANYN

SEQ ID NO: 1529 - protein, 162 aa, Sphyracephala beccarii
LFIGSLTAREHLIFQAMVRMPRNMTYRQKIQRVDQVIQDLSLGKCQNTIIGVPGRVKGLSGGERKRLAFASEALTDPPLLICDEPTSGLDSFMAHSVVQVLKKLSQKGKTVILTIHQPSSELFELFDKILLMAEGRVGFLGTPIEAVDFFSYIGAQCPTNYN

SEQ ID NO: 1530 - protein, 162 aa, Sphyracephala bipunctipennis
LFIGSLTAREHLVFQAMVRMPRNMTHRQKIQRVDQVIQDLSLGKCQYTIIGVPGRVKGLSGGERKRLAFASEALTDPPLLICDEPTSGLDSFMAHSVVQVLKKLSQKGKTVILTIHQPSSELFELFDKILLMAEGRVGFLGTPIEAVDFFSYIGAQCPTNYN

SEQ ID NO: 1531 - protein, 162 aa, Sphyracephala munroi
LFIGSLTAREHLIFQAMVRMPRTMTHRQKIQRVDQVIQDLSLGKCQNTIIGVPGRVKGLSGGERKRLAFASEALTDPPLLICDEPTSGLDSFMAHSVVQVLKKLSQKGKTVILTIHQPSSELFELFDKILLMAEGRVAFLGTPIEAVDFFSYIGAQCPTNYN

SEQ ID NO: 1532 - protein, 162 aa, Teleopsis breviscopium
  unsure (1)..(162): unsure at all Xaa locations
LFIGSLTAREHLIFHAMVRMPGXLTYRQKVERVDQVIQDLSLGKCQNTIIGVPGRVKGLSGGERKRLAFASEALTDPPLLICDEPTSGLDSFMAHSVVQVLKKLSEKGKTVILTIHQPSSELFELFDKILLMAEGRVAFLGTPTEAVDFFSYIGAQCPANYN

SEQ ID NO: 1533 - protein, 162 aa, Teleopsis quadriguttata
LFIGSLTAREHLIFHAMVRMPGALTYRQKVDRVDQVIQDLSLGKCQNTIIGVPGRLKGLSGGERKRLAFASEALTDPPLLICDEPTSGLDSFMAHSVVQVLKKLSEKGKTVILTIHQPSSELFELFDKILLMAEGRVAFLGTPLEAVDFFSYIGAQCPANYN

SEQ ID NO: 1534 - protein, 161 aa, Teleopsis rubicunda
  unsure (1)..(161): unsure at all Xaa locations
XIGSLTAREHLIFHAMVRMPGALTYRQKVERVDQVIQDLSLGKCQNTIIGVPGRVKGLSGGERKRLAFASEALTDPPLLICDEPTSGLDSFMAHSVVQVLKKLSEKGKTVILTIHQPSSELFELFDKILLMAEGRVAFLGTPTEAVDFFSYIGAQCPANYN

SEQ ID NO: 1535 - protein, 162 aa, Teloglabrus entabenensis
LFIGSLTAREHLIFQAMVRMPRSMTHRQKIQRVDQVIQDLSLGKCQNTIIGVPGRVKGLSGGERKRLAFASEALTDPPLLICDEPTSGLDSFMAHSVVQVLKKLSQKGKTVILTIHQPSSELFELFDKILLMAEGRVAFLGTPNEAVDFFSYIGAQCPTNYN

SEQ ID NO: 1536 - protein, 1619 aa, Magnaporthe grisea
MSQPVEDPSHDQARNDNAQTTTDTGNASMPKTNGHDQESSATGISSSPADTLMDKEKQAAPTPEPSTEKAAVPDPAASVASDTAEDEFFDDNDSEQRRRNEMVQQLARTYTSRSNASAAADEYGNANPFLIASEDPDSPLNPSGNNFKAYAWAKAIAGMVAAEGGSFRTIGICFQNMNVFGFGAATDFQKTVSNVWLEAANMLRTAVGMGKTTRIDILRGFNGVVRNGEMLVVLGPPGSGCSTFLKTIAGETNGLNVDQSAYFNYQGLSAEEMHKRHRGEAIYTAEVDVHFPQLSVGDTLTFAANARAPRRAPPGVSKTLFANHIRDVVMAIFGISHTINTRVGNEYIRGVSGGERKRVTIAEAALSGAPLQCWDNSTRGLDSANAIEFCKTLRVCTRLFQTTACVSIYQAPQSAYDMFDKAVVLYEGYQIYFGPADEAKQYFVNLGFECPARTTPDFLTSMTAPHERIVRPGFEGKAPRTPEEFAIAWENSAEYTALQADIEEYKSSHPINGPDAEAFRKSRAAQQGRGQRPNSPYTLSFYQQTKLCLWRGWKRLLGDPTLTVGALFANTLMALVISSIFFNLQMTTSSFFQRGALLFFACLLNGFAAALEILILFAQRPIVEKHDRYALYHPSAEAVASMLCDMPYKVFNAIVFNLVLYFMANLRREPGAFFFYLLISFATVLAMSMMFRTIASMSRSLSQAMVPAAAIILILIIFTGFVIPLDYMLPWCRWLNYIDILAYSFESLLINEFAGQRYTCTEFVPRAEFPGYGDLSGTNRVCQAVGSVAGQPFVKGEDYLYSSFRYESANKWRNFGILIAFMIFFCSRTWLRPRMCERKKSKGEVLVFRRGQRPAAIKDAKTDPEAGPPKVGGAVVAANMTGENAGFIQRQTSTFGWRDVCYEVQIKKETRRILDHVDGWVKPGTLTALMGVSGAGKTTLLDCLADRTSMGVITGEMLVDGHQRDASFQRKTGYVQQQDLHLQTTTVREALNFSALLRQPAHVPRAEKLAYVDEVIRLLDMQEYADAVVGVPGEGLNVEQRKRLTIGVELAAKPPLLLFVDEPTSGLDSQTSWAILDLLEKLTKSGQAILCTIHQPSAMLFQRFDRLLFLAKGGKTVYFGDIGENSKIMTDYFERNGGFPCPHDANPAEWMLEVIGASPGTTSDIDWHQAWRESPECADVHAELDRLKEQVPNTPPPTEDKASYREFAAPFHQQIYAVTHRVFQQYWRTPSYIYAKAALCAVTALFIGFVFYDAPNTQQGLQNQMFAIFNILTVFGQLVQQTMPHFVIQRDLYEVRERPSKVYSWKVFMLSQIIVEIPWNSLMAVIMFFCWYYPVGLERNAILADQVTERGALAFLYLWGFLIFTSTFTDLMIAGFETAEAGGNIANLFFSLCLIFCGVLANPDTMPRFWIFMYRVSPFTYIVSGLLSVAVANSEVRCASNEFLHFDPLNGTCAEFMRNYINGTTIPGLGRIPGAGGYLRPDTESSRSNCAFCPIKDTNIFLQGAHANYNDRWRNFGLIFVYIIFNIIAALFVYWAVRVPKKKLGGKDAAAGVGAGAGAARASASNEKGKMQREKGEVEGLTTAVLGTSVAGSDAPMTTTTEGEGERAKRRTSGDEVVR

SEQ ID NO: 1537 - protein, 310 aa, Clostridium acetobutylicum
MLELTNITKKYGDFTAVNNISFKIEDGEVFGLLGPNGAGKSTIVSMISTVISPTSGDITVDNKLLRQKPTEIKKVMGIVPQDIALYESLSAKDNLEFFGCLYGLNGKELKERVNEVLKIIELEDKKDQAVEEFSGGMKRRVNIGVALMNNPKLLILDEPTVGIDPQSRNHILETVKKLNKERGMTVIYTSHYMEEVEYLCKRIAIVDHGKLIALGTKDELKEKSKAKDTLTVIYSNGDKGALDKIKSINGIENVSISNNQISMLVDQHKRNIIDIVEDVRNLGVKLTSFKYEEVNLESIFLQITGKSLRD

SEQ ID NO: 1538 - protein, 238 aa, Clostridium acetobutylicum
MVEVKGLTKRFKDITAVDNISFEVKEGEIVGLLGENGAGKTTTLRMLATMLKITDGKAIINGYDAQKESDKVRGEIGILFGGEVGIYDRLTARENIMYFAELNGMSNEEAKKSIDNLTKSLQMEEYIDKRVGKFSRGMKQKVSIARSIVHNPSVVLFDEPTTGLDVSASRIVQDFILHCKNENKAVVFSSHSMPEVEKLCDRVIIIHKGKIVEEGSIEALKKKHNNNNLEEVFLELIK

SEQ ID NO: 1539 - protein, 1501 aa, Aspergillus nidulans
MSSQPSPPAPSGDVAPPGAVQQPSETVSRITDDNGAPSTAKEKAESSDITCASSEKDIDRDRKDIDQESELKITALARNLSRLSQKSGAVDGTNTFLDSSSDPELDPNSGQFNARKWTKNFLSVANRDPDRYPRRTAGVSFRNLSAFGYGTAADYQMDVANMWLKGFGWIRRKLGFVDRVRIDILRDFEGFVRSGEMLVVLGRPGSGCSTFLKTIAGETHGLWLDDGTDIQYQGISWDEMHSRFRGEVIYQAETEIHFPNLTAGETLLFAAQARTPANRFPGVTRDQYAHHMRDVTMAMLGLSHTMNTLIGNEFIRGVSGGERKRVSIAETILCGCPLQCWDNSTRGLDSSTALEFVRNLRLSTEYTGSTAIVAIYQASQAIYDVFDKAIVLYEGRQIYFGSASDARRFFVEMGFECPDRQTTGDFLTSLTSPTERLVRKGFENLVPRTPDEFAERWKQSAERKRLLEEIEAFQNEHPLGGSKYEEFTRSRAAEKAKGTRAASPYTLSYPMQIRLCLSRGFLRLKGDMSMTLATTIGNSIMALIISSIFYNMNGTTEKFFSRGALLFFAILLNAFSSALEILTLWQQRPIVEKHYKYALYHPSAEAISSMIVDLPAKVLVSIVFNIILYFMTNLRRTAGHFFVFYLFSFTTTLTMSNIFRWIGAISRSMAQAMVPSSIFMLILVIYTGFTIPVRNMHPWFRWLNYLNPIGYAFESLMVNEFSGRRFDCAMYVPDGPGYADVPLSSKICSGRGAVAGQDYIDGDTYLNTSFQYYRSHLWRNYGVLLAFMFFFLAAYIICSELVRAKPSKGEILVFPRGKIPAFAKEVRRDEEDAKTVEKPQLVGEKSDDHVGAISKQTAIFHWQDVCYDIKIKGENRRILDHIDGWVKPGTLTALMGVTGAGKTSLLDVLADRMTMGVITREMLVDGRLRDDSFQRKTGYVQQQDLHLETSTVREALIFSAMLRQPASIPRKEKLAYVEEVIKMLGMEEYAEAVVGILGEGLNVEQRKRLTIGVELAAKPDLLLFFDEPTSGLDSQTAWSICSLMRKLADHGQAILCTIHQPSAILMQQFDRLLFLAKGGKTIYFGELGENMGTLIEYFEKKGSTPCPKNANPAEWMLEVIGAAPGSHADRDWSEVWNQSPEREQVRAELARMKAELLQKPEPPRTPEYGEFAMPLWSQFLICLKRMFQQYWRSPSYIYSKATMCVIPPIFIGFTFWREPLSLQGMQNQMFAIFMLLVIFPNLVQQMMPYFVTQRALYEVRERPSKAYSWKAFMMASICVELPWNILMAVPAYFCWYYPIGLYRNAGPGETVERGGTMFLLILIFMMFTSTFSSMVIAGIEHPDTGSNIAQLLFSLCLIFNGVLATPQQMPRFWIFMYRVSPFTYLVSSVLSTGLSGAEVECSDIEILKIPPPDGQNCTSYLGPYAEGIHAKLLSDAPNGDCRLCSISSTNQFLASLSINPDDNWRNVGILFVYIVFNAFAAVFLYWLVRVPKKKSQQVKKQ

SEQ ID NO: 1540 - protein, 1515 aa, Aspergillus nidulans
MSSFLGTGTFNTSVSPSQAVESRGIENHGNAITETETLHNESHAESPGEKLASSSNSILSSTETAREKDERDYELDAEEEVTRLAQQLTHQSTKYSTHNIENPFLEVGEDSTLNPHSPNFKAKNWMKNLLALSSRDPERYLPRQAGVSFTNLSVHGYGSPTDYQKDVFNSVLQIGGLVRSMMGHGKQKIEILRNFDGLVKAGEMLVVLGRPGSGCSTFLKTIAGEMNGIFMDEKSQLNYQGIPAKQMRKQFRGEAIYTAETDVHFPQLSVGDTLKFAALARCPRNRLPGVSREQYAVHMRDVVMAMLGLSHTINTRVGNDFVRGVSGGERKRVSIAEATLSASPLQCWDNSTRGLDSANALEFCRTLNLMAKYSGATMAVAIYQASQSAYDVFDKVTVLYEGRQIYFGRTDDAKQFFIDMGFECPERQTTADFLTSLTSPAERIVRKGYEGRVPQTPDEFAAAWKNSDAYAQLMREIEEYNQEFPLGGESVNKFIESRRAMQSKNQRVKSPYTMSVMEQVHLCMIRGFQRLKGDASLTLSQLIGNFIMALVIGSVFYDLDNDTGSFYSRGALLFFAVLLNAFGSALEVCLILRLFLSLADSLQILTLYAQRPIVEKQARYAMYHPFAEAIASMLCDMPYKITNTFTFNIPLYFMTNLRREPGAFFIFLLFSFVTTLTMSMLFRTMAATSRTLSQALVPAAILILGLVIYTGFTIPTRNMLGWSRWMNYIDPIAYGFESLMVNEFHGRLFPCSESELVPSYGDTANRVCAVVGATPGELMVNGTTYLRESYQYTKSHEWRNLGIMFAFMAFFLFTYLTATEYISEAKSKGEVLLFRRGQAPPSVNDVETHSPATAGEKVDQSTQDVANIQRQTAIFHWKDVCYDIKIKNEPRRILDHVDGWVKPGTCTALMGVSGAGKTTLLDVLATRVTMGVVTGEMLVDGRPRDQSFQRKTGYVQQQDLHLHTTTVREALRFSALLRQPAKTPRQEKLDYVEEVIKLLGMEAYADAVVGVPGEGLNVEQRKRLTIGVELAAKPQLLLFLDEPTSGLDSQTSWSILDLIDTLTQHGQAILCTIHQPSAMLFQRFDRLLFLAKGGKTVYFGEIGEKSSTLASYFERNGAPKLPADANPAEWMLEVIGAAPGSHSDIDWPAVWRESPERQAVHQHLAELKETLSQKPTETSASDPSEYNEFAAPFSVQLWECLVRVFSQYWRSPVYIYSKAALSILTSLYIGFSFFQAQNTRQGLQNQMFSIFMLMTIFGNLVQQIMPNFVTQRALYEVRERPSKAYSWKAFMTANILVELPWNTLMAVIMYFCWYYPVGLYRNAEPTDSVHERGALMFLLILAFLLFTSTFAHMIIAGIETAETGGNIAQLLFSLCLIFCGVLAGPDVLPGFWIFMYRVSPFTYLVSAMLSTGVSGTTAYCEQVEYLTLYPPSNTTCSEYMDPYISQVGGYLQNPDATSECTFCQISSTDTFLSAVYSNYDDAWRNFGLMWAYIAFNIAAAVFIYWLARVPKGKKN

SEQ ID NO: 1541 - protein, 1498 aa, Aspergillus nidulans
MSFLGSISPNLPRSQSVVSHNLPQAHGLDENDDIYHNHSTTAQPGASEKDKSEDGETLHENEPDGEARVTLLARQLTRHSTRLTAKSTLENPFFLDDSDSTLNPNSPNFRVRDWMKMLLEIRSRDPERYPDRTAGIAFKNLSVHGFGSPTDYQKDVMNVLLEIGTIARRLAGMKMPKIQILRDFEGLVRSGEMLVVLGRPGSGCSTFLKTIAGEMNGIQVSDDAVLNYQGISSKNMQNSFRGEAIYTAENDIHFPQLSVGDTLMFSALARAPRNRLEGVSRKQYAEHMRDVVMAMLGLSHTINTRVGNDFIRGVSGGERKRVSIAEATLSQAPLQCWDNSTRGLDSANALEFCKNLALMSKYTGSTACVAIYQASQSAYDVFDKVTVLYEGRQIYFGNTKDAKKFFVDMGFECPERQTTADFLTSLTSPAERLVRPGYEGRVPCTPDEFAAAWKRSEERAKLMAEIEEYERQYPIGGPSYDAFVDARKAMQSKRQRVNSPYTISIWQQVSLCVVRGFQRLRGDFSLTTTSLIGNFMMALIIGSVFFDLPDDTSSFYYRGALLFFAVLLNAFSSALEILTLYSQRPIVEKQSRYAFYHPFAEAVASMICDTPYKLINSFTFNVPLYLMTNLRRDAAAFFTFWIFSVVTTFTMSMIFRTIASTSRSLSQALVPAAMLILGMVIYTGFTIPTQNMLGWSRWMNYINPIAYSFESFMVNEFDGRQFECVSIIPSGDEYNNVSMQYRICSTVGAESGSRIVDGGQYLELSYQYTKSHLWRNMGILIGFMVFFAFTYLLGTEYISEQKAKGEVLLFRRGRQPDLSTTEADPENPIQPSNAPKTEESAPQNTARIQRQTAIFHWEDVCYDIKIKGQPRRILDNVDGWVKPGTCTALMGVSGAGKTTLLDVLATRVTMGVVSGSMLVDGRLRDQSFQRKTGYVQQQDLHLATSTVREALRFSAILRQPAHLSRQEKLDYVEEVIKLLGMEAYADAIVGVPGQGLNVEQRKRLTIGVELAAKPQLLLFLDEPTSGLDSQTSWSILDLIDTLTQHGQAILCTIHQPSAMLFQRFDRLLLLASGGKTIYFGEIGPNSSTLSNYFVRNGSHGLPPGDNPAEWMLEVIGAAPGSNTEIDWVKTWRESPEYAKVREHLAELRATLSAKPADSSDPSALSEFAAPFSVQLWECLVRVFAQYYRTPTYIWSKAALCALTALYIGFSFFNAPTSIQGLQNQMFSVFMLMTIFGNLVQQIMPNFVTQRSLYEARERPSKAYSWKAFMAANIIVELPWNSLMAALIFFCWYYPIGLYNNAKPTDAVTERGGLMFLLIWTFLLFTSTFAHMIIAGIELAETGGNVAQLLFSLCLIFCGVLSTPDAMPGFWIFMYRVSPFTYLVSAMLSTGLSGTDVECEPVEYLTFAPPNNQTCGDYMRAYIDEVQSGYLLDPSATDQCSFCSMDKTDTFLLSVGSTFDEAWRNFGLMWAYILFNIVGAVFIYWLARVPKGKKMAGTA

SEQ ID NO: 1542 - protein, 1498 aa, Aspergillus nidulans
MSFLGSISPNLPRSQSVVSHNLPQAHGLDENDDIYHNHSTTAQPGASEKDKSEDGETLHENEPDGEARVTLLARQLTRHSTRLTAKSTLENPFFLDDSDSTLNPNSPNFRVRDWMKMLLEIRSRDPERYPDRTAGIAFKNLSVHGFGSPTDYQKDVMNVLLEIGTIARRLAGMKMPKIQILRDFEGLVRSGEMLVVLGRPGSGCSTFLKTIAGEMNGIQVSDDAVLNYQGISSKNMQNSFRGEAIYTAENDIHFPQLSVGDTLMFSALARAPRNRLEGVSRKQYAEHMRDVVMAMLGLSHTINTRVGNDFIRGVSGGERKRVSIAEATLSQAPLQCWDNSTRGLDSANALEFCKNLALMSKYTGSTACVAIYQASQSAYDVFDKVTVLYEGRQIYFGNTKDAKKFFVDMGFECPERQTTADFLTSLTSPAERLVRPGYEGRVPCTPDEFAAAWKRSEERAKLMAEIEEYERQYPIGGPSYDAFVDARKAMQSKRQRVNSPYTISIWQQVSLCVVRGFQRLRGDFSLTTTSLIGNFMMALIIGSVFFDLPDDTSSFYYRGALLFFAVLLNAFSSALEILTLYSQRPIVEKQSRYAFYHPFAEAVASMICDTPYKLINSFTFNVPLYLMTNLRRDAAAFFTFWIFSVVTTFTMSMIFRTIASTSRSLSQALVPAAMLILGMVIYTGFTIPTQNMLGWSRWMNYINPIAYSFESFMVNEFDGRQFECVSIIPSGDEYNNVSMQYRICSTVGAESGSRIVDGGQYLELSYQYTKSHLWRNMGILIGFMVFFAFTYLLGTEYISEQKAKGEVLLFRRGRQPDLSTTEADPENPIQPSNAPKTEESAPQNTARIQRQTAIFHWEDVCYDIKIKGQPRRILDNVDGWVKPGTCTALMGVSGAGKTTLLDVLATRVTMGVVSGSMLVDGRLRDQSFQRKTGYVQQQDLHLATSTVREALRFSAILRQPAHLSRQEKLDYVEEVIKLLGMEAYADAIVGVPGQGLNVEQRKRLTIGVELAAKPQLLLFLDEPTSGLDSQTSWSILDLIDTLTQHGQAILCTIHQPSAMLFQRFDRLLLLASGGKTIYFGEIGPNSSTLSNYFVRNGSHGLPPGDNPAEWMLEVIGAAPGSNTEIDWVKTWRESPEYAKVREHLAELRATLSAKPADSSDPSALSEFAAPFSVQLWECLVRVFAQYYRTPTYIWSKAALCALTALYIGFSFFNAPTSIPGLQNQMFSVFMLMTIFGNLVQQIMPNFVTQRSLYEARERPSKAYSWKAFMAANIIVELPWNSLMAALIFFCWYYPIGLYNNAKPTDAVTERGGLMFLLIWTFLLFTSTFAHMIIAGIELAETGGNVAQLLFSLCLIFCGVLSTPDAMPGFWIFMYRVSPFTYLVSAMLSTGLSGTDVECEPVEYLTFAPPNNQTCGDYMRAYIDEVQSGYLLDPSATDQCSFCSMDKTDTFLLSVGSTFDEAWRNFGLMWAYILFNIVGAVFIYWLARVPKGKKMAGTA

SEQ ID NO: 1543 - protein, 1466 aa, Aspergillus nidulans
MGVPDELPPGSSETDTIVSSSQPTNRSPMDLISEAESLNLRRIATNQSKAQCRPGSAAVPSHDNPPNDDLEDATLDPNSASFSLEKWLRAAVSDASQQGLSTPSGGIPLQKSDRPRAQTAALQLQPTVGSVLTAPLRSRVCCDTGEYEPRRILHGFDGVMKTGELLLVLGRPGTGCSTFLKAVCGETNGLHIDADSVLHYNGVSQQRMMKEFKGEVVYNQEVDKHFPHLTVRQTLEFGAAARTPAHRFQNMSRDEFASYAASVVMAIFGLSHTHNTKVGNDFVRGVSGGERKRVSIAEMALAMTPFAAWDNSSRGLDSATALKFVQALRLSADLAGAAHAVAIYQASQSIYEVFDKVTVLYEGRMIFFGPTGTAKEYFERMGWVCPARQTTGDFLTSITNPLERKARAGMEDVVPKTPKDFEIYWRQSPEYKTLLGEMTGVRDQHPTGNDEQASAELRARKENSQSRNSRAASPYILSIPMQIKLNTKRAYQRIWNDMSSTMSTVVGQIVIALITGVVFYDSPNTTAGFQSKGGTLFYAVLLNALTAMSEITSLYSQRPIVEKQASYAFYHPATEAIAGVVSDVPVKFLLAVAFNVIMYFLANLRREPAQFFIYFLMSFTVMFVMSAVFRTMAAVTKNAAQAMGLAGVLMLALVVYTGYVLPVPSMHPWFEWIHYLNPIYYAFEAMIANEFHGRDFDCIAFVPSMQIWTGDSFSCSSLGSVAGERMVSGDSYINFNYTYTYSHVWRNFGVLLAFLIGFMAIYFLASELNSSTTSTAEALVFRRGHVPEYMRPGYTRPTDEEKAVTQSDIKPSSPSPTNPILPLPPQRDIFTWKDISYDIEIKGEPRRLLDDVSGWVKPGTLTALMGVSGAGKTTLLDVLAHRTTMGVITGDMFVNGKGLDASFQRKTGYVQQQDLHLETATVRESLRFSALLRQPASVSIREKHDYVESVIEMLGMGDFCRACCGTPGEGLNVEQRKLLTIGVELPPSPKLLLFLDEPTSGLDSQSSWAICTFLRKLADSGQAVLCTIHQPSAILFQEFDQLLFLAKGGKTVYFGPIGPNSRTLLDYFESNGARKCDEAENPAEYMIEVVNAEVNDHGTDWFDVWKGSKECQAVKEEIERIHEKKRGTAGAIEETDDGSTKSEFADAILVPAVCRHVRVFQQYWRMPEYIISKGALAIVAGLFIGFSFYDAKTSLAGLQTLVFSLFMVCALFAPLVNQIMPLFITQRSLYEVRERPSKAIPGKLPDCNILVEIPYQVLMGILTFVCYYYPLSVPAKDQTERALVLLFCIQFYVYASTFAHMCIAAMPNAETASPIVILLFSMCLTFCGVMQPPDALPGFWIFMYRVSPFTYWVAGMATTQVHGREVVCGENELSIFDPPTNQTCGQYMERYISVAGGQVLNPSATAGCEYCSLTVADEYLAASQIYWSDRWRNFGLIWVYIGFNIFVATAVYYLFRVKKWNGRRKK

SEQ ID NO: 1544 - protein, 255 aa, Listeria innocua
METVLQAKNVRKIYGSKGNVYTALENISIDIKEGEFTGIMGPSGAGKSTLLNVLSTIDKPTSGEIMISGQELENMNEQQMSTFRRDKLGFIFQDYNLLDTLTIRENIILPLALAKRPVKEMEEKLANISEKFGITEILDKYPSEISGGQKQRTAASRAIITSPSLIFADEPTGALDSKSATNLLESLRDLNEQDKATIMMVTHDAFAASFCKRILFIKDGELYTEIYRGTKTRKEFFQKILDVLAKLGGDTDDVI

SEQ ID NO: 1545 - protein, 255 aa, Listeria monocytogenes EGD-e
METVLQAKNVRKIYGSKGNVYTALENISIDIKEGEFTGIMGPSGAGKSTLLNVLSTIDKPTSGQIVISGQELENMNEQQMSTFRRDKLGFIFQDYNLLDTLTIRENIILPLALAKRPVKEMEEKLAIISEKFGITEILDKYPSEISGGQKQRTAASRAIITSPSLIFADEPTGALDSKSATNLLESLRDLNEQDKSTIMMVTHDAFAASFCKRILFIKDGELYTEIYRGTKTRKEFFQKILDVLAKLGGDSDDVI

SEQ ID NO: 1546 - protein, 294 aa, Streptococcus pneumoniae TIGR4
MNMIKVESLNKNIKGKAILKGISFEVAEGECVALIGPNGAGKTTLLDCLLGDKLVTSGQVSIQGLSVTSSQLDYIRGYLPQENVIVQKLKVKELIAFFQRIYPNSLSDQEIDQLLQFDQQQKEQFAEKLSGGQKRLFSFVLTLIGRPKLVFLDEPTAAMDTSTRQRFWEIVRDLKAQGVTILYSSHYIEEVEHTADRILVLNKGELIRDTTPLAMRSEGIEKHFILPLAYKEVIEQSNLVENWSQKQDALQVVTREADAFWELLVQAGCGIQEIEVNNRSLLDTIFEETQKGDN

SEQ ID NO: 1547 - protein, 294 aa, Streptococcus pneumoniae R6
MTVVKVEKLSKKIKDKEILRNISFEINDGECVALIGPNGAGKTTLLDCLLGDKLVTSGQVSIQGLPVTSSKLDYTRAYLPQENIIVQKLKVKELIAFFQRIYPNPLSNQEIDQLLQFVKQQKEQLAEKLSGGQKRLFSFILTLIGRPKIVFLDEPTASMDTSTRQRFWEIVQELKAQGVTILYSSHYIEEVEHTADRILLLNKGELIRDTTPLAMRSEEIEKHFILPIAYKEVVEQSNLVENWTLKQDSLQVVTREADAFWELLAQAGCRMQEIEVNNRSLLNTIFEETQKGDN

SEQ ID NO: 1548 - protein, 424 aa, Propionibacterium thoenii
MRLAVDGLTVRYRKRVAVDAVSWRLDEGFHALLGPNGAGKSSLLRAIATLQPTVSGTVELDGRSGTEIRAHLGYCPQENLGRSRFTVREHLAYMCWLHRIPDSRVPSEVDRVIELVDLAERADDRISALSGGMRRRVGIGSALVGRPSLVILDEPSAGLDVAQREALSSVLQRVSAEAITIVSTHIVEDVLDHADTLTVMNQARFAHSGAFDEFAGSRDLEAVRIALPGDGDTVRHTGVMLWARHHRVGPSVAVAVIASAVVRGLVLPISSDGSEIEVAPLWIATVCVVPLLFMFTTETDTDRTAPRSLTARRWALLGIAVLTSAVIALAAFPTTIGEWGLIATWRDAVALLGLGLLSLAVLPPAAIWVAPLVAALASMMFSWPLHPGTVPGTVGSAARRGRPAAGPGRDRSEYSAVPADQGGR

SEQ ID NO: 1549 - protein, 242 aa, Staphylococcus epidermidis ATCC 12228
MSDKILELKNATKYYGDKKVLNDINIELSSGKILGLIGPSGSGKTTTIKCLMGMESLNEGYAKIFDTNMPNRKLLNDIGYMGQSDALYESLSARENLVFFGNLMGLKGKELKQAITDNMKLVNLENELDKTVSNFSGGMKRRLSLAITLLSNPNLIILDEPTVGIDPSLRKEIWKQLRELTNKDKSVIVTTHVMDEAERCDYVGLIVNGKLFTIGTPQELKEKFKVDSIEEVFIKAELEVKS

SEQ ID NO: 1550 - protein, 249 aa, Staphylococcus epidermidis ATCC 12228
MLLEVKNVKKVYGRGMNTTMALNQMNLEIDENEFVAIMGESGSGKSTLLNLIATFDRTTEGLIKLDGLPLNQLKNKDIARFRREMMGFVFQDFNVLNTMSNKDNILMPLVLANERPKIMQKRLMEISEQLGIEDLLEKYPSEISGGQKQRIAIARALIARPKLLLADEPTGALDSKTSKNLMCLFRKINQKHQTILMVTHSNIDASYANRVIFIKDGRLYHEIYRGEESQTDYQKRIADSLAILNGVGD

SEQ ID NO: 1551 - protein, 655 aa, Anopheles gambiae str. PEST
PGSCLSSPTAPPPPPAGSGTGRCYQSSLRSYSKWSPTEQGATLVWRDLCVYATAGPAKGGGCGGGGGPPGCHRPTIKRIINNVSGAVTPGTLIALMGSSGAAKSTLMSALAYRTPPGTVVQGDILVNGQPVGPYMYRLSGFVHQDDLFVGSLTVHEHMYFMAKLRLDRRVGHRAIDQTIRDLLERVGLARCAGTRIGEAGDGKMLSGGEKKRLAFATELLTKPTLLFCDEPTTGLDSYGAQALVSTLQQLARRGTAIICTIHQPSSQLFSMFDQVMLLAEGRVAYAGRPHEALAFFARHGHACPPSYNPAEYLIGALATAPGYEQASQRAAHRLCDLFAVSEAAGQRDVLINLEVHMAESGDYRVTDEVQHLAGRPHWLHTTAWLTYRALLTVVRDPTVQYLRLLQKIAIALMAGLCFTGAIEPTQLGVQATQGLLFILISENTFTPMYAVLAVFPETFPLFMRETKNGLYHPSQYYVANVAAMLPGLVLEPLVFVLIAYWLAALRPTLHAFLVTAAAATLVMNVSTACGCFFSAAFNSLPLAMAYLVPFDYILMITSGVFIHLNTMPAATRWLPYISWMMYANEAMSIAQWEGVSNITCPAVDDKLPCLRTGGEVLEHYSFSETHLAPNLWAMVLLYFGFHLLGYLFLWRKTKR

SEQ ID NO: 1552 - protein, 665 aa, Anopheles gambiae str. PEST
MLSFWHARNHHPPSVMSAREAVVSTAVCCTVDNLDGMPGVTVAQHEVAAAAADDDVTLIWQNLTITPIRSKPGAGEQHPVLNDISGTLQPGTLVALMGPSGAGKTTLMSALAYRMSDKMTIAGDIRVNGCPIGPYMYNISGYIYQDELLPDSITVQEHLQLMANLKLGKSVTAERKRAMIAHILSRTGLERCANTKIADATGIGKTLSGGEKKRLAFAVELLSKPKFLFCDEPTTGLDSYSARQLVEMMKSLTRTGTTVLCSIHQPAEKLLYEFDSLILLTGGRTGFIGAPSEAVQFLRLQGLECEAGYNTADFLLKVLSSTTTTTRKGNQFTTGAIGPKTICNNYSASEAARRQEALISVELYRTTVDSGGDEAFRRRLTESRDRCWFYTLYWLMYRHVLQSHRNPNLQYFKIVQRIAIAVLVGLCFSDAIELSQRGVQAMQGVIFLIVSENTFLPMYAALSLFPERFPLFQREKKANLYSTAQFYISTIMSMTPFVLLETCAFILIVYFLANLRPTLLGLLVTVVVSVLVMNVSIACGCFFSVLFPTVASAMSYLVPFDYILMITSGIFIKIWSMPTYLQWMPFISWMMFASEAISIAQWDGVKSIECSNIIPSVCLHNGEQVLDQYSFSRQHLRTDLVVLVGQYFIYHLMAMLCLARRVSRN

SEQ ID NO: 1553 - protein, 744 aa, Anopheles gambiae str. PEST
IRKLPTTRRTKTPRQVKVCARKNYFRYVPNVPKMNVQQSEVRNPRPTNNVSNPTAAMAATALAITTTANTTSSSGAFGCCPTANGESSSIDDSIELNDSQEGGNNNTLYHNGLLEKQDYHFPKRPPVDIVFRDIRYDVRRFNIAKAKFESKEILHGLNGSFKSGELTAIMGPSGAGKSTLLNIMAGYVSSGVSGMVQVNGKSRSHNSESFRKLSCYIQQHDALRPWLTVTEAMTCATHLKLGFGIGMAEKRRLIEKILFMLGLEQKGNTPTMGLSGGQKKRLAIALEMISNPPILFLDEPTTGLDSSSCAQCISLLKRLAQDGRTIVCTIHTPSALLFEMFDQLYTVVQGHCFYQGPTKEMLPFLGDLGYHCPSYHNPADFMMEIAVGEYGADVGKVIKAALKKYYEISSRCIELDSTFDDNVKLMESYSIGGGGKAEEMCKLQKQQEALDNSSYEEEDIFSKTKPASLVMQFLLLFYRNLLMTRRNYFLLFCRIIAHAAVATIFGYLYLGVGPNANQVLANYVYLYGSMLMMVYTGKMAVVLSFQIEMESLTREHFNRWYKLGPYFLSVLVLEIPIQICCSLIYVVISYHLTGNYVNMERFCIFALFCVAGSICAQSWGFFVGATLSVKLAVFIGPILAVLFSVFGFCTRYVDITPVFKWMWHISYYRASFHGIMNSVYGMNRGDLHCPETQIYCHFKNPVLFQKDMDIEHVDMQSNFVLIMLIIITMYISTVLVLWYKLNKR

SEQ ID NO: 1554 - protein, 352 aa, Giardia lamblia ATCC 50803
MKNKMQPTLSVSHLYYDVPITIKAKFHAYLHHRLLRKPRDWDQMPGYKRILRDINFKIYPGEFVAIIGPSGSGKTSLINILANRVITETYCGEVKLKGKQLGPWIKPYLGYVQQEDTLYATDTARETLQFTANLKLKGDSQMKKSIIDSIINSLNLSHVADQLMGAAAGQGFDASNVKTGLSGGERRRVSIANEIISSPRLLLLDECTSGLDTSTATTVVSTLRKIADSRYSKDVSRFLESNTDKDPSKRGDNITVMATLHQPSSFMWNLFDKILVLAAGRTIFYGRPEHFWTAMHSIGYQVPPSYNPADYLIEVVSKDENKFPPLLRGQVRPNPCHFANVRCRSKHNQLHH

SEQ ID NO: 1555 - protein, 1085 aa, Giardia lamblia ATCC 50803
MVLGEDSPLAKSRRNRQWLGVFLKNWTLFCASFGGFLSVLVLTFVLMLCIILLHRYYLNSVSTASLKYDVTGGPSGDSSNDSNIVVGNWISNPYPSLAPTNIFNIHYLSHFDLGSLLYSNTLGQSKGYLSALEKPFNDISLGLALRTEYGTTSVIRTNPAHELVSDSTQNYLALKAKVPYYTNFTSYYDNYLYMNFTGPGVEYSKAPDNITAAGVSNEDKLFYHAKRTSELYRDAVSNTSNPIYYNDGIVGIKVNEIPSFGIRFGQAVSPSPIRIARESDGDVLSIDYSYDTFFYSKMQAYYIDQTDHDRLLEIQVLHFHLCLRNMVNQIYGVSTSATGSVEVDGPLIIGKNAPFWRRSTGDFLGPDGMTPLLLGLVIPLLMFIVSPLMIFALVEEKSSGMVHLHSMMGQRYTNRWLADFTYNFILSFCVAVLLVIMCYAGDLNGIRMNTFAAWLPMFLLFSANVAIFSAFIAAFFESGRIAALLAVVIAFGYAVGGFLGTANFASTTIIDRSISPWFALIPFFGPISVHSQLQSLAILQTDSLYLHITDLRFYVYDSLLSRAYVGQSVSISLILSVISTVLMALLSMYIDLVMPKKTGIPNHWLFFLLPVVNKVDKLRGRRTKHITTGSICKAVTWALVHPDRMCCSQRRNTHISLMDSTDFKPYIPESERSKEEHVPGHLLSTAVDPLSPNGGRFESSTQVTSNAMSIDHLKTIKSTTHIDCISESDVSAESKRAKCATKGFNERPVLIRAIDLTKTYPATRLSPEKHAVRGVSFTVAEGECLGLLGPNGAAKTTTINILTMLHRATTGEAYVLDKSLVDPYNKAYIQSVTGICPQFDILYPTLTCRQHLKYSCRLKNIAKEDEKTHIDELLESVGLVEKANSKVKSLSGGQKRRLSVAIALTGSPSVLYLDEPSTGLDPVSKRLLWNIILRIRSHRAILLTTHAMDEAQALCNRIAIMDRGLLKCIGKCTYLQERYGGALQIMVEVTHDSKPGSGVTVNGVSLNYELEEMGHKLMEETFGSSVLLRNNVAGTLTYDVSDKLTAPHAFIEMAKLARTQKKVICDWSLLQASLDRVFFNVILSS

SEQ ID NO: 1556 - protein, 294 aa, Pyrococcus furiosus DSM 3638
MIIALEIKGLKKRYGNVEALKGITLEVYEGEIFALLGPNGAGKTTLIRILAEGLKYDEGEIKVFGRTLSRETRRLIGYVPQESIAYDLLTVKENLEFYADIYNAPRERIKELIELFSLPEKKKAKELSGGFKRRLNLAIALLYDPKILILDEPTTGLDVPSRRDFWEIIRGFKKDGKTVLLATHYMEEAEELADRVAIMNEGKVISIGTPEELKRLIGEESIITIKGLLKGLEEISYPFIEKDNEIRVRVRNPREALPKIVENLIKAGSIIKEIRVEEPTLEDVFIKLTGRRLE

SEQ ID NO: 1557 - protein, 333 aa, Methanosarcina acetivorans C2A
MTANVIEVNGLEHSYGSVKAVDNISFAVKEGEIFSFLGPNGAGKSTVINILTTLRKIQKGEAKVNGYDVERESKHVRQSIGIVFQMLCIDHEMTVCENLEYHGKIYSMSKKERKERIDELLKLIELEHKRDTLVKDLSGGMKRRLELARGLMTKPAVLFLDEPTIGFDIQTRMRMWEYLREIKREGTTIFLTTHYMEEADQLSDRISIIDHGKIIVTGTSEELKNKLGKDLIYLETDDNNTVAEILRTIGSVKTVTEDTKSLRVMIGEDVTHVLPQIIDKIRKAGIDITTINIKKPSMDDVFVHYTGHGLREGEPQEKVEGLEPMGEPMGVSA

SEQ ID NO: 1558 - protein, 235 aa, Methanopyrus kandleri AV19
MPPAIVAEDLRKEYGEVVALRDVSVEIEAGELVAILGPNGAGKSTFIKIVCGVTRPTSGRIEVLGGDPADPEIKRRVGIVPQQGGLYPEQTVRENLRFYSKLYGREPDPEPLEMLEVDRFMDRKAGQLSGGMRKRAAIAITLALEPEVLVLDEPTNELDPMARRDVIRVTKEFHRRGTTVLYVSHDVYEVEQLRPDRVLIFLEGRKELDEPFDEVMERHGSVLEAYEGVASCPGE

SEQ ID NO: 1559 - protein, 336 aa, Methanosarcina mazei Goe1
MKVLFNMSAIMVKELTKRFGEFTAVDRVSFSVETGELFGLLGPNGAGKTTIINMLTTLLLPTAGDAEIAGYDLRRDPARVRNNIGIIFQDPSLDIGLTGRENLEFHAMMYSIVSDEREERIREVLEVVGLSDKADILVEYYSGGMKRRLEIARGLIHYPKVLFLDEPTLGLDAQTRRSIWDHIRKLNRNYGTSVILTTHYMEEADYLCDRIAIIDQGKIIALDTPSGLKKRLKGDCVSLDIEGKVDLIASALGKKEWVKEVARNEKMLDVIISDYEKNIPDIFRTASSLGIGIRSINFSKPSLEDVFLRLTGSTIREQEGSRLSVRRERMRRRMLR

SEQ ID NO: 1560 - protein, 329 aa, Methanosarcina mazei Goe1
MTANVIEVNNLEHSYGSVKAVDNISFSVKEGEIFSFLGPNGAGKSTVINILTTLRKIQKGEARVNGYDVAKEAKSVRKSIGIVFQMLCLDHEMTVCENLEYHGKIYSMPKNERKKRIEELLILTELEHKKDTLAKDLSGGMKRRLELARGLMTKPAVLFLDEPTIGFDIQTRMRMWEYLREIKREGTTIFLTTHYMEEADQLSDRISIIDHGKIIVTGTADELKNKLGKDLIYLETSDNKIAADILRAIKSVKTVTEDTKSLRVMIGEDVTHVLPQIIEQIRKAGLEITTVNIKKPSMDDVFVHYTGHGLREGEPQEKPEGIEVLGASE

SEQ ID NO: 1561 - protein, 256 aa, Clostridium perfringens str. 13
MGKEVLKVSNIEKYYGKKGNVTKAINDISFTVSEGEFVGIMGASGSGKTTLLNCISTIDKVTSGHIYLEGEDVTSFSSKKLAKFRREKIGFIFQDFNLLDTLTAYENIALALTIQRVNNKEIDKRVRLVAEALNISNELNKYPYEMSGGQKQRVASARAIVTNPSLVLADEPTGALDSKAATMLLESLEDLNKNLNATIMMVTHDAFTASYANRILFIKDGKIFNELIKGTDSRKEFFNRIIEVITLLGGDSNNVF

SEQ ID NO: 1562 - protein, 247 aa, Corynebacterium glutamicum ATCC 13032
MSTVTAVQVNGLKVSISSGFSRKKTKTILHDLDFTVETGKITGLLGPSGSGKTTLMRAIVGVQNFDGTLEVFDQPAGAASLRGKIGYVTQNASVYHDLSVIENLKYFGALAKGTSTPRTPEKILEVLDIADLAQRQVSTLSGGQRGRVSLGCALIASPELLVMDEPTVGLDPITRQALWEEFTTIAKAGAGVVISSHVLEEAARCDNLILLRDGRIIWRGTPTRLLEDTGKSSYEDAFLAAIDGVRS

SEQ ID NO: 1563 - protein, 1009 aa, Thermosynechococcus elongatus BP-1
MTILVTKWKWGFSTRDMAVPILSLLGADGSRQQIQLGRDRLIIGTDPQSQVILVGEGISRHHALILATETGYQVVDLGSASGTFLNGTKLQPRTPVVLKAGDRLKIGDFEAIFDPDGRATTALPGTVVMGAASTPILQVATPHWLQEFPLLKEELILGRDPKADIILDHPFVSFHHAKLVRSGDHYKIIDLGSKNGLHWRGTTISEHILAPGDVIHVGESLRLTYLLMPATQVVEQTRPLQLRDRQQVRIGRDPSNDMVLDHPVVSRFHARLYLQEGQWYLVDLESANGTFVNNRRLEPRKPVVLPTGALVRIGPYSSVFTPDETIVPHNDSGNLRLDAIHLSKTTAKGAKLLQDISLSILPREFVAIVGGSGAGKSTLLDALSGFRPATRGTVLVNGYDLYRSFGTYRTQIGYVPQDDIIHRELTVAQALDYAARLRLPADFTDQERQEQVNQVLAELELTAQRHVLVKELSGGQRKRVSIGVELLTRPSLFFLDEATSGLDPGTETQMMRLLRQLADQGRTILLITHATKNVMLCDLVVFLARGGHLAYFGPPDQALSYFDVQDFDEIYLKIESEPNPALWQQRYCQSHLYQTYVVERQRPLNVDTEATRQVQPQRQKATIPRVAPWRQWWILIQRNLAILRQDRAALILMLSLAPILAALDFVLWKPTILDPDQGDAGQAFTMAFVTVLIAVMVGSLATMREIVKELEIYRRERMVGLGLWPYIFSKLGPAVVLALYQAAIFLGMKFLAIHLSLGIGAIAGLYLTLFLVTFGGMVMGLLVSALSPTQTVAPLLTILFLVPQITFAGAIIPLKDLGPVGNWISDVTLTRWSYANVVSLLGFGQDVAQDPCWQQPKSLREKLSPEALAQCPCFGENLFRRCRFPGVRKEYHPAVDEPEPPQPAEPGDPPALPKSVLEFNQAYRDRVEAYNQQVKDYQRAMDRWQDQFALWKEQRGRAIASGEALIDRFWSLQGQTFNANVTANQLRLGGIIALMLGLVGVFQKRKDVL

SEQ ID NO: 1564 - protein, 1029 aa, Thermosynechococcus elongatus BP-1
MTQAAWLELVKSVSEQGVRLPVSGLKVGRAPDNDIVLNDISVSRHHAFFEWREGQVHLVDLGSKAGTHLNGQAVVPNTPIPLEDGDLITLGNSAVRFRLIWQYHNYQPGATEVSKDAAVPVIEVCTKTWRQRWGLQEQTALLGTHPACDVVVDTPELLPCHLKLRFAEQHLQVVDLSDPQPAMNVHLGIGESYALTEFVRLTYVGQQLPDRIDKERHALVFSPATELGLTGTATVLAVPEADAPPSVPVKTISLVGYNTFTIGRDPNNDLVIGHPTVSRHHAKIERRNGDFLLTDLGSSNGTFVNGREVEEPTLLRVGDSIRIGSDRLVLNVDETLTQYAESGHMRLDAINLRKLVGKGTQILHDISLSIMPKEFVAILGPSGSGKSTLLDALNGLRPATTGTVLVNGTNFYRNYQAFQAQLGYVPQKNIIHEELTIAQALEYAAKLRMPPDTTAAERQQRVTEVLTELGLNHRRDVPIARLSGGQQRRVCIGAELLTQPSLFFLDEATSGLDPGTEADLMFLLRQLADQGRTILIITHATQNIRECDLVIYLAEGGRLAYFGPPNQLLPYFRATFGDRLSGIKLEDFSGIYRALDKEKNPHAPTSEELEQAYRRSRLYQEYVVGRQQMLVHLPDESQQGTKGKSRRSSEPKSKISPWQQFLILTQRNLTLLSQDRIHLLLTLLIAPLLGSLSFVSWRRDVFNPETGNGGQALTMIFVTSLIAVMIGAMTTMRELVKEVEVYQRERMIGLRLLPYLGSKGAIALGLALYQAATYLAVTKLAVDLPGDWGVTFAMYITLALAIFGGMAMGLLVSALAPSQNIVPLLVLMFLVPQIIFSGGIQPVSSFGLPGQMMSHLTVIKWPFEAMVKLTGMGDDIANDPCWREPEEERQNMTEQMQRDFCLCYGPGLFQTCNFPGIRSKYVPAVDEPAPPQPEPPGDPPTDPAALQDYLRRLQAYQAAMDQWEVKYSEWNRQRSRAINEAQGTISRFQRDQGYMFTVDVQRHWRNQSLLILAMLVALPFCQKRRDFGR

SEQ ID NO: 1565 - protein, 821 aa, Thermosynechococcus elongatus BP-1
MRSPPPKTVVDLPTVILTLESQGKTLTYSLTQPEHRLGRDHQWADLVVPDDPLWSVISSRHAVFKQQGATYYLWDGDGHQRRSTNGTFYNQRRIGIEEGFALGETLRLEIGQDPKNKVQLLVQIQFSATASPPPLPQQRRLVLKTLKEWPLTLGRQASNSYRHWQLDAPTVSLHHASIDRTSAGLYVLRDLGSSNGTYVNAKLLKGPYTLRNGDQIRIGPFVLLYHHETLEIRDQGSHLRIDAWGLERRVKTPAGDRALLQEVAFVAEPRQLVGIVGGSGTGKSTLLKVLMGLDPPQEGQVLLNGLNLHRHLASYRHQIGYVPQDDIVHARLTVAEVLNYAAQLRLPADTDAQNRRAAVERVLEQVQLRGTEHQRVASLSGGQRKRVSIAVELLANPKLFFLDEPTSGLDPGLDFLLMQLLRQLADQERTIVLVTHATSHVYLCDRLLVLGPGGRLCYFGPADEARQFFSPTGDRPLNSVAEIYALLTPENSAAWSQKFRQSAHYQRYLASHLSIGPHYESTSVLGAESRPNAETPPQQPAPPHLYQWRVLCHRQWQLLWRDRLSLVLNLISVPIALLLTRFASDRSPFVPQDPPSLLQAAQTLRILFVFTCACLWVGLSGWAQALITEAAIYRRERLANLSLWAYMAAKLTLGKGMALAQTLLITLVGLLAFGLPKGALLPWPLGFGITTFLTLVASLCLGLLISAAVHNSDQASKILPPLLLPQIIFAGVLFKLTGIATALSWLTIGRWTMGAYGALIDVNSMVPPPLDFGLFEPPPQPFDPTPVYAPTWGNLLLNWGMLMLHSLTYMGVATYLQRRKG

SEQ ID NO: 1566 - protein, 186 aa, Coccidioides posadasii
PEEEKFAYVEEIISLLELENLADAIIGDPETGLSVEERKRVTIGVELAAKPQLLLFLDEPTSGLDSQSAFNIVRFLRKLAAAGQAILCTIHQPNSALFENFDRLLLLQRGGECVYFGDIGTDARVLRDYFHRNGADCPSNANPAEWMLDAIGAGQTPRIGSRDWGDAWKTSPEFEQVKQRIVEIKD

SEQ ID NO: 1567 - protein, 323 aa, Thermobifida fusca
MNPMTSSSQPARPEPSPDPSADSPPAISLRGVVKRFGDITAVNGLDLDVPQGVVLGLLGPNGAGKSTTMRILTAQSTVDEGHVSVLGHPIPQKSKWARSLMGVVPQHDNLDEELTVEENLRSFTYLYRVPRRERDAAVERALRIAHLEHRRHEFTEKLSGGMRRRLLIARGLVHRPRVLLLDEPTVGLDPQVRQELWGLISALRDEGVTVLMSTHYIEEAERLSDEVALMAKGRIVERGEPADLIAKYAGKTVEEYQIGAEGVEELEKVIHHAGFTTRRTGSTLSVLRAEELPDSLRDRLGTGMRRASNLEDVFVTLTGETVE

SEQ ID NO: 1568 - protein, 806 aa, Trichodesmium erythraeum IMS101
MPRNLKSNIIMSNKIGQTTLLSNNPYIELNNQGQIITFQLTQKRHILGRDRRRANLVVPSNWLPISNYHALIKKSDDRYHIYDGDGYRPSTNGLFLNQTRITPSEGHPLENGIEIKIGLEPQNQILLKYFEPNNSTALTSLPKTSSISLQNRSVLLGRDPDATLELNAPIISRHHATIEPNAQGEYVLQDYSSNGVFVNGVRVQSTIVVTEGAVIKIGPFTLIRRGDNLEVLDPGNEIRLDAYRLYRIVRDQRGKTQVLLNDISLAIEPGQFVALVGGSGTGKSTLMRTLLGIDPTTKGQVYINGEDLRNNFNIYRTQIGYVPQDDIIHPELTVLEALTYTAKLRLPPDTNVQEVVEKTIEQIEMAERKNILVSQLSGGQRKRVSIGLELLADPKLFFLDEPTSGLDPGLDKKMMQLLKKLANQGRTIILVTHATANIRICDRIVFLGRSGRLCYFGSPKEAMNFFSINTGDFADIYNELETSDENINEWVNNFRQSEYYRRYISNHLSVNNLKPPTNLPPKKQLPSFAKQLFILIQRYLKLIFRDPINLGLSLLTAPIGIGLILFAVRDKNPLIGDPEPTLAPLALRVLFVFTCACLWVGLSSSLQEIVKESAIYIRERLVNLGLFAYLASKVIVLGLLAIFQTLLIAGVIILGFESPQPEIISWSMGVSITTFLTLISCISMGLMISSIVKNASQANSALPLILLPQIIFSGVLFEMKGIASKFSWVMLSRWSVAAYGALVNVNKMVPEATKLPDGSRVSLPFSGSDIYNLNWGNLGLSWGVLCLHSLIYLGLTIWFKKQKDII

SEQ ID NO: 1569 - protein, 339 aa, Trichodesmium erythraeum IMS101
MTPAVLIENLQKSYGSSVAVKDVSFKIESGEIFGLLGPNGAGKTTTLRALCTLITPDAGRLEVSGISVVDQPRIARQRLGYVAQEVALDKVLTGRELLELQGAIYHIPSKLAKERIDKVISLLEIKDWADKKTGTYSGGIRKRLDLAAGLLHQPDVLVLDEPTVGLDIDSRVAVWDFLRQLRDSGTTVLITSHYLEEVDALADRVAIIDKGVVIATGTPSELKDRVGGDRITLRIREFSPAEEAERAKTLLAPLPIVQEVIINAAQGNSLNLVVTPQSDALIKIQRSLQEAGLPIFGIAQARPSLDDVYLAATGKTLMDAELAASNSRDLKAEKKQSMR

SEQ ID NO: 1570 - protein, 238 aa, Streptococcus agalactiae 2603V/R
MKKVIDLKKLQKAYASETVLNNINLEVFKGEIIGLIGPSGAGKSTLIKTMLGMEKADKGTALVLDTQMPDRNILNQIGYMAQSDALYESLTGLENLLFFGKMKGIQKTELKQQITHISKVVDLENQLDKFVSGYSGGMKRRLSLAIALLGNPTVLILDEPTVGIDPSLRRKIWQELINIKDEGHSIFITTHVMDEAELTSKVALLLRGNIIAFDTPLHLKKQFNVSTIEEVFLKAEGE

SEQ ID NO: 1571 - protein, 238 aa, Streptococcus agalactiae NEM316
MKKVIDLKKLQKAYASETVLNNINLEVFKGEIIGLIGPSGAGKSTLIKTMLGMEKADKGTALVLDTQMPDRNILNQIGYMAQSDALYESLTALENLLFFGKMKGIQKTELKQQITHISKVVDLENQLDKFVSGYSGGMKRRLSLAIALLGNPTVLILDEPTVGIDPSLRRKIWQELINIKDEGRSIFITTHVMDEAELTSKVALLLRGNIIAFDTPLHLKKQFNVSTIEEVFLKAEGE

SEQ ID NO: 1572 - protein, 235 aa, Methanocaldococcus jannaschii
MIKLKNVTKTYKMGEEIIYALKNVNLNIKEGEFVSIMGPSGSGKSTMLNIIGCLDKPTEGEVYIDNIKTNDLDDDELTKIRRDKIGFVFQQFNLIPLLTALENVELPLIFKYRGAMSGEERRKRALECLKMAELEERFANHKPNQLSGGQQQRVAIARALANNPPIILADEPTGALDSKTGEKIMQLLKKLNEEDGKTVVVVTHDINVARFGERIIYLKDGEVEREEKLRGFDDR

SEQ ID NO: 1573 - protein, 247 aa, Lactobacillus plantarum WCFS1
MATDYVIAKQVSKHFGHQQVLNQIDLTLPAGMIYGLIGPSGAGKTTLIKSILGMEAVDSGTVKVMDTVMPNRAVMAQVGYMAQSDALYETLTARENLTFFGQLMSVPKIKLAQMIDYAAGLVDLTSQLDKRVSGYSGGMKRRLSLAIALIQDPQLLILDEPTVGIDPELRQQIWTELNKLKDTGKSMLVTTHVMDEAERCDYLMLIRHGIALAEGTPAALKQQYAVDTIEQVFLKAGRMQDANDGNR

SEQ ID NO: 1574 - protein, 313 aa, Lactobacillus plantarum WCFS1
MDEEMMIQMTHVQKRFGTKVAVQDLSLQVQRGEIFGLLGPNGAGKTTVIRMMTTLLRQDAGKILVNGFDSLSQARRVCQQFGLTGQTASIDQDLSARENLQIFGRLNGLSRAAAKHRAMELLTDFDLKHSADHVLATFSGGMRRRLDLAVSLIGKPAILFLDEPTTGLDPRTRAQMWQAIRQLVADGSTVVLTTQYLEEADQLADHIALIDHGQLVASGTPTALKQTVGGQELELEVSATTAVTPAKDILQAMLGQDVRVAERTLTVPLDTASLTPVTEILMRLQAAQITVSNFAMHAPSLDDVFFKLTVGTN

SEQ ID NO: 1575 - protein, 345 aa, Methanosarcina barkeri
MTGVIRYGRGKGVDSLMTSNVIEVNNLEHSYGSVKAVDNISFTVKQGEIFSFLGPNGAGKSTVINILTTLRKLQKGNARVNGYDVTKEPNSVRRSIGIVFQMLCLDHEMTVSENLEYHGRIYSMKKKERNKRIEELLKLTDLENKKDTLGKDLSGGMKRRLELARGLMTKPAVLFLDEPTIGFDIQTRMRMWEYLREIKREGTTIFLTTHYMEEADQLSDRISIIDHGKIIVTGTSNELKNKLGKDLIYLETSDNKAAAEILRSLVSVKSVTEDTKSLRIMIGEDVTHVLPQIMEKIRREGIDIIIVNIKKPSMDDVFVHYTGHGLREGDEDEKQQVIEMVGISK

SEQ ID NO: 1576 - protein, 275 aa, Archaeoglobus fulgidus DSM 4304
MLEVRNLFKRYGSFEAVKGISFSVRRGEVLGLIGENGAGKSTTLKILAGLIRPDGGEVRYFGKDFDEEMKRIIGYLPEIDALYDNMTVSEYLNLFADIYDVRADIDGLLERLNLPDKYISDLSKGMRRKVSIARTLLHDPEVLVYDEPTGGLDPTTSLSIAELLRELAERGKIIVFSAHNMYYVERIADKVVVMKGGKALYFGSLEELIGQNTIYKVEYTIDGRKESVKLFEVEELLDFAEKVRKQGGKIIEIEREVPRLENVYFSLIGRKEIKA

SEQ ID NO: 1577 - protein, 285 aa, Archaeoglobus fulgidus DSM 4304
MNILEISNLSVRFGDFYAVKGLTLNVRRGEILGLLGPNGSGKTTTIRAIFGMVPYEGEIRNYATSVGWMPQNSPLYLNLSVEENLRFFASLYGIEDERRVEEMLKLVQLERYRKRLVKNLSGGMRQRAMLACAMLHDPELLVLDEPTAGVDPPLRVSFWEQFEKLREEGKTILVTTHYMDEAERCERLVLIRNGSKIAEGTPEEIKRRACGDRLLLEVDDALAASRILSDYRSWINGKVVVEVDDAASEAPKIIEMLSRAGVKVFRVEIRRCTLEEAFMRLMEHA

SEQ ID NO: 1578 - protein, 226 aa, Archaeoglobus fulgidus DSM 4304
MKVIELVDVYKIYRTAYYEVHALDGVSMEVEAGEFVAIMGPSGSGKSTLLNMIGCLDKPTKGEVIINGVKTSGLSDRELTKLRRDSIGFIFQQYNLIPTLTALENVELPMIFRGVARAERERRAKELLKVVGIEELADRRPREMSGGQQQRVAIARALANNPKILLCDEPTGNLDTKSGRQVMGILKNLNEENGVTVVLVTHDPSLSEYADRVIRIRDGKVVEDVY

SEQ ID NO: 1579 - protein, 843 aa, Streptomyces avermitilis MA-4680
MPELVLELNGRTWTLDASRPYTLGRDPQGDITLDDARVSWRHATISWNGRSWVIEDHGSTNGTFVQGQRIHQMEIGPGSAVHLGNATDGPRLNLSGAAAAVAAPQQAQPQQQPYVAKGASPGWAQQAPPQQQAPQQQAPQQGWQQPQQSAAVPQQQGPGGGAGAPPVYGDRSPTTFHQFSLGRVMRIGRALENELVVSDLQVSRNHAEFHATPDGRFEIRDLGSHNGTYVNGMPIAKGGSALLGPNDIVGVGHSTFRLIGDRLEEFVDTGEVSFSARHLTVTVDGGKQILKDVSFGVPEKSLIAVIGPSGSGKSTLLKALTGYRPANQGDVLYDNRNLYKQFAELRQRIGLVPQDDILHKELTVKKALKYAAKLRFPADTTGQEREARIDEVLRELKLDIHKEKKVTSLSGGQRKRVSVALELLTKPSLIFLDEPTSGLDPGMDRDVMQLLRGLADDGRTVLVVTHSVAELAICDKLLVMAPGGSVAYFGPPEEALNFFGYDTWADVFSAFENYRDYDWAGRWKGSQHYQMYAADIDAVAPQSVHMPPPQQMRPPKPQGWGSQLMTLIRRYVSVIVSDKGFLALTVILPAVLGAVSLLIDSDKGLLVNPANPKTGVHIPNGTATTVLLILAVGACFAGAANSVRELIKERVIYERERATGLSRSAYLMSKVIVLGTITVLQGAMVGAIGFSSREIPDKGLVLGNAVLLELSIPIMALGFTSMMFGLIISSLVKTAEKTMPLLVMFAIIQVVFTGCLFTLHGAVGVNEFSYLMPSRWAVAAAGTTLDFNNIAPNTDDPTSTDPLWDHAAGAWTMDMAALIVLGVICGFFVARFLRRHEPEVMRK

SEQ ID NO: 1580 - protein, 780 aa, Streptomyces avermitilis MA-4680
MGERPVAPTAPELVLETETGSTVMSPSRDYHVGRDPSSDIVLDDVRVSWHHAVLSVEADHWTLEDEHSTNGTYADGRRIHEWGVGPGSEIRFGNPSDGPRAVLVDCARLATEHPSAVFMPSATGTFRQPTTVRPLPTRTVRIGRGGGNDLDIDDLMVSHRHAELQALPDGTYEIVDLGSHNGTYLNGQPVTRAPVTPGDIVGIGHSVFCLVGDQLQEYVDTGEVSLDVRDLTVELDHDHKILLDQVSFPVGEKCLLAVIGPSGSGKSTLLNALTGQRPADRGTVLYDGRDLYRDYAELRRRIGLVPQDDILHAQLTVHRALGYAAELRFPQDTEKAERRARVDEVIRELGLEQRADQPIHSLSGGQRKRVSVALELLTKPSLLFLDEPTSGLDPGMDRSVMHMLRGLADDGRTVIVVTHSVLSLDVCDRLLVLAPGGTVAYYGPPDETLPFFGFVQWPEAFEAFEHDRDRDWAGEYRDSLQHEQYIEGVGTPPYLPSAAPAAAVGPPPKAQSWGAQLGTLVRRYAATLSADRTFLAIMIALPFVMGAMARALAGGKLTQETAMNALLILCVGGVLTGAANAVRELVKERAIHQRERAVGLSRSAYLMSKVVVLGTITVLQAIVLTLVALLGVDLDAPGGEGVLMPPLVELTLAVALLSFTAMMLGLLVSALVRREEVTMPLLVLLAIVQVVFCGALLKLNGVAVIQQLSWLVPSRWALGAMAGTIGLARIVPGDLTGDPLFRRSAGVWLLDMGMLVVLSLVFGYAVDRLLRRHEPLVMRK

SEQ ID NO: 1581 - protein, 275 aa, Streptomyces avermitilis MA-4680
MNIRRPRPPDPGNPATPALAVRAEGLTVVRGTRKVLKGLDFAVPPGRITGLLGPSGCGKSTLMRSIVGTQAKVTGTLDVLGLPAGDPALRSRIGYVTQAPSVYDDLTVRQNLDYFAAILDPGRAAAERRRAHVTSAIADVDLVSHADALAGNLSGGQRSRVSLAVALLGTPELLVLDEPTVGLDPVLRRDLWTLFHAIAADRGATLLVSSHVMDEAERCHRLLLMREGEILADGTPDALRTRTASETVEAAFLRLVDEASAASPAATAQGKEPVR

SEQ ID NO: 1582 - protein, 297 aa, Sulfolobus solfataricus
MIVVSSIVKKYGNKIALDNISLEVKKGEFVSLIGPNGAGKTTLIRILLTLMKPDKGEVQILGENPFRNKRIFKAIGYVQEIPNYPPFLTGRQVLELSAKIRGVDKSEVKRVLEFVEMENYANSPIIKYSKGMVQRIAIAESLLGNPSILIMDEPNMGIDPIFSLKTRELLNKLKRKDNVSILMTSHELEDVKKLSDRIFMIYKGKIVFSGTVEDMIKEFLGIQVIVETDEIENAEEALKGIEYVKGVFNDGNRLIVKLNEDRREDLLRDLVTSGVKVKGFYIDLNLEEAYMRALRNV

SEQ ID NO: 1583 - protein, 275 aa, Sulfolobus solfataricus
MYVIEVNNVWKAYGKIIANEDITMRVKEGEIVALLGPNGAGKTTLVKQIYGELTPTKGEIRVLGKKPTDRHVKKFLGVIPQECEPYGDLTVWDNIYYMGRLKGASKDEIKKRGEELLERLDLRSKRNTLARDLSGGLKRRTLIAMALINNPKLLILDEPTTGLDPEARREVWEILLNMRKEGQSMLLTTHYLDEAERLADKIYFLSRKIIVEGTPTQIKEKFADWYEVIDYTNGKVYKVKGEEELKKIIMTINGKFEVRMPSLEEIYLQVMKDVE

SEQ ID NO: 1584 - protein, 1236 aa, Saccharomyces castellii
MSFSTDSTSTRDELPLVENNSLDHPYMGFDKTAQDQIRDLARTLTQLSVAHPSESAIDQGSDVQSIYSTGLPGINPVYTNPDTPGYDEKLDPASDNFSSTAWVKNMANIAKSDPDFYKPYSLGCVWKNLSASGDSADVSYQATILNMPWKIITYVYRKVTPTREIDTFQILKSMDGILNPGELLVVLGRPGSGCTTLLKSISSNTHGFDISKDSIISYNGLTPKDIRRHYRGEVVYNAESDIHLPHLTVYQTLLTVARLKTPSNRIKDVTREDYANHLTQVTMATYGLLHTRDTKVGDDLVKGVSGGERKRVSIAEVSICGSKVQCWDNATRGLDSATALEFIRALKTQATILNTTATVAIYQCSQDTYDLFDKVCVLDDGYQLYYGPSDRAKKYFQDMGYVCPPRQTTADFLTSVTSPTERILNQDMLKNGKKIPQTPREMGEYWLESPDYQQLMQQIDAELSSNQDEQRDVIREAHIAKQSKRARPSSPYVVSYMMQVKYLLIRNYWRIKQRASVTIFQVVGNSVIAFILGSMFYKVQKKADSSTFYFRGAAMFFAILFNAFSSLLEIFTLFEARPITEKHRTYSLYHPSADAFASVLSEVPAKLVTSVCFNIIYYFLVNFKRDAGIFFFYFLISIVSTFALSHLFRCNGSLSKTLPGAMVPASMLLLAISMYTGFAIPETKMLGWSKWIWYINPLAYLFESLMINEFHDRRFPCAQFIPAGPPYQNATGTERVCAAVGSVPGQDFVNGDIFLLESYGYQHKHKWRGFGVGMAFVVFFFFGYLILCEYNEGAKQRGEMLIFPQNIVRKMKKQGKLKGKHPNKDDIEAAASSMECNTTEKSILNSSSINYDDMESEVGLSKSEAIFHWRNLCYEIPIKKEIRHILNNIDGWVKPGTLTALMGASGAGKTTLLDCLAQRVTVGTITGDVFVNGCLRDESFPRSIGYCQQQDLHLKTSTVRESLRFSAYLRQPFDVPVEEKNKYVEEIIKTLEMETYADAVVGVPGEGLNVEQRKRLTIGVELAAKPKLLVFLDEPTSGLDSQTAWATCQLMKKLAQNGQAILCTIHQPSAILMQNFDRLLFLQKGGETVYFGDLGSGCQTMIDYFEKEGAEKCPPEANPAEWMLQIIGAAPGSHAIKDFHKAWRNSEEYKAVQKELDWMEQELPRRASETTPEEHKRFATSVWYQFKLVSVRLFQQYWRSPEYLWSKYLLTVFNETFIGFTFFKADRTMQGLQNQM

SEQ ID NO: 1585 - protein, 1035 aa, Saccharomyces castellii
VAKQSKRARPSSPYTVSYGLQVKYLLERNFWRIRNNASISLFMIFGNSSMAFILGSMFYKVMRKGDTSTFYFRGAAMFFAILFNAFSCLLEIFSLYEARPITEKHRTYSLYHPSADAFASIISEIPTKFCIAVCFNIIFYFLVNFRMNGGVFFFYLLMNVVGVFCMSHMFRCVGSLTKSLSEAMVPASMLLLALSMYTGFAIPKKKMLRWSRWIWYINPLSYLFESLMINEFHDVKYPCAQYIPFGPAYANISGTERVCSAVGAVPGQAYILGDDYIKESYGYKHSEKWRSLGIGLAYAIFFLGVYLFLCEYNEGAKQAGEILVFPRSVIKRLKKEGKLREKNTAEDIEMAADTSVTDKQLLSSDEMAEESGANIGLSKSEAIFHWRNLCYDVQIKDETRRILNNVDGWVKPGTLTALMGASGAGKTTLLDCLAERVTMGVITGDVLVNGRPRDQSFPRSIGYCQQQDLHLKTSTVRESLRFSAYLRQPADVSIEEKNQYVEDVIKILEMEAYADAVVGVAGEGLNVEQRKRLTIGVELTAKPKLLVFLDEPTSGLDSQTAWSICQLMKKLADHGQAILCTIHQPSAILMQEFDRLLFMQRGGRTVYFGDLGKGCQTMIDYFERNGSHPCPADANPAEWMLEVVGAAPGSHANQDYHEVWRNSAEYKAVQEELDWMAQELPKKQVEESAADQREFATSVPYQAKIVSIRLFEQYWRSPEYLWSKFILTIFNQLFIGFTFFKADTSLQGLQNQMLSIFMFVCIFNPILQQYLPSFVQQRDLYEARERPSRTFSWKAFIFSQIVVEVPWNLLAGTLAFFIYYYPIGFYANASAAGQLHERGALFWLFSCAFYVYVGSMGLAAISFNQLAENAANLASLLFTMSLSFCGVMTTPGAMPRFWIFMYRVSPLTYFIDATLAVGVANVDVHCSDYELLRFTPASRMTCGEYMTPYMEMMGTGYLKDSSATDQCEFCTVSHTNEYLSQVNSSYSRRWRNYGIFICYIAINYIFAVLFYYMARVQRIRVRVPVRAFYPSSRNN

SEQ ID NO: 1586 - protein, 478 aa, Saccharomyces castellii
MSEKKTLDVSSINSIDPSNDNSANSTNSENLHEYHGFDQTAEEEIRELARTLTIQSVNNASVHESINELENQSIFTPEMEGINPVFTNPANPGYNPKLDPVSEDFSSKAWVQNMANISLADPDFYKPYSLGCVWKNLSASGESSDVAYQSTFLNMPYKILSTGYRKLKSSKTEDRFEILKPMDGCLNPGELLVVLGRPGSGCTTLLKSISSNTHGFKISDESTISYSGLTPKEVKRHYRGEVVYNAEADIHLPHLTVFQTLYTVARLKTPTNRIKGVDRDTFARHMTEVAMATYGLSHTRNTKVGNDLVRGVSGGERKRVSIAEVSICGSKFQCWDNATRGLDSATALEFIRALKTQATISNSAATVAIYQCSQDAYDLFDKVCVLDGGYQLYYGPGNKAKKYFQDMGYLCPERQTTADFLTSVTSPAERVINPEFIKKGIKVPQTPKDMGDYWLNSQNYKELITEIDRKLSENVEST

SEQ ID NO: 1587 - protein, 215 aa, Saccharomyces castellii
QLHERGALYWLLCTAFFVYIGSMAVAVISFIEIADTAGQLASLLFTMALSFCGVMVTPSALPRFWIFMYRISPLTYLIDAFLSVGIANVDVECASFEFVQFSPPPGMDCGTYMAPYIQMTGTGYLSDSSATDTCHFCQFSHTNDFLKSVGSDYSKRWRNWGIFICYIAINYIAAVSFYYLARVPKSTGEIKEQNQKTREGENLTGSSEDQQKVSA

SEQ ID NO: 1588 - protein, 679 aa, Bactrocera cucurbitae
MGQEDQEVLIRGGKATSTSAESLDNNNGQSYEQSSINQGFSKNYGTLSPPSPTLTTDNLTYSWYNLDVFGAVHQPGSGWKQLLNRVKGVFCNERHIPAPRKHLLKNVSGVAYPGELLAVMGSSGAGKTTLLNAIAFRSSKGVQISPSTVRMLNGNPIDAKEMQARCAYVQQDDLFIGSLTAREHLIFQAMVRMPRHTTQKQKVQRVDQVIQDLSLGKCQNTLIGVPGRVKGLSGGERKRLAFASEALTDPPLLICDEPTSGLDSFMAHSVVQVLKKLSQKGKTVILTIHQPSSELFELFDKILLMAEGRVAFLGTPGEAVDFFSYIGAQCPNNYNPADFYVQVLAVVPGREAESRERIAKICDNFAVGKVSREMEQNFQRLEKSNGLPKEDENGFTYKASWFMQFRAVLWRSWLSVLKEPLLVKVRLFQTTMVAVLIGLIFLGQQLTQVGVMNINGAIFLFLTNMTFQNAFATITVFTSELPVFMRETRSRLYRCDTYFLGKTIAELPLFLIVPLIFTAIAYPMIGLRPGVDHFLTALALVTLVANVSTSFGYLISCACSSTSMALSVGPPVIIPFLLFGGFFLNSGSVPVYFKWLSYLSWFRYANEGLLINQWADVKAGEITCTSSNTTCPSSGEVILETLNFSASDLPFDFVGLALLIVGFRISAYIALTVRARRKE

SEQ ID NO: 1589 - protein, 1525 aa, Kluyveromyces lactis
MDADSTSSLVEYQGFDHQVQEQIRDLARTLSRNSLKEQASQQESTGNVLASDDDGAKSIFSTRYEGVNPVFTDSDASGYDVRLDPNSDEFSSAAWIKNMVALANNDPEYYKHYTIGCCWKDLRAFGDSTDVAYQSTVLNLPGKIFSSVKRHFVKSKPEDVFDILKPMDGLLKPGDLLVVLGRPGSGCTTLLKTISSNIDGYNVDENSVISYNGLDPRTIKKHFRGEVVYNAESDVHFPHLSVYETLYNIALLVTPSNRIKGATREEFANHVTQVAMATYGLSHTRDTKVGNELVRGVSGGERKRVSIAEVTICGSRFQCWDNATRGLDSATALEFIRALKTSTDISGSTGVIAIYQCSQDAYDLFDKVCVLHEGYQIFYGNAKAAKAYFERMGYVSPSRQTTADFLTAVTNPAERIVNQEFVKEGRFIPSTAKQMEEYWRNSPEYKQLRGEIEEELNKDSTQTRQELIEAHIARQSKRQRKESPYIVNYGMQVKYLTMRNFLRIKKSYGITVGTIVGNTAMSLVLGSIFYKSMKDTTTNTFFYRGAAMFIAVLFNSFSSMLEIFSLYEARPIIEKHKRYSLYHPSADALASMLSELPAKIITAICFNLILYFMVNFRREAGPFFFYFLMNFLATLVMSAIFRCVGSATKTLSEAMVPASCLLLAISLYVGFSIPKKNLLGWSRWIWYINPLSYIFESLMINEFNGRDFPCAAYIPSGSGYENIGLYERVCNTVASQPGLSYVSGRAFIEEAYGYNPSHRWRALGIALAYFIFFTAFYLLFCEFNESAVQKGEILLFPKSVLKRAKKQKLIKAKHDVEAVQDSEGALTDQKLLQDSLVESNISSSSDKSVNVGLSKSEAIFHWRNVCYDVQIKKETRRILSNVDGWVKPGTLTALMGSSGAGKTTLLDCLASRVTMGVITGDMFVNGHLRDNSFPRSIGYCQQQDLHLSTSTVRESLRFSAYLRQPSSVSIEEKNNYVEDVINILEMQQYADAVVGVAGEGLNVEQRKRLTIGVELAAKPKLLLFLDEPTSGLDSQTAWSVCQLMRKLADHGQAILCTIHQPSALLMQEFDILLFLQKGGKTVYFGNLGEGCQEMINYFEKHGASKCPEGANPAEWMLDVIGAAPGSHATQDYHEVWRNSDEYQAVQKELDWMESELRKKPLDTSSEQSEFGTSLFYQYKVVTLRLFEQYYRTPSYIWSKLFLTIFSQLFIGFTFFKANLSIQGLQNQLFAIFTFTVIFNPACQQYLPLFVSQRDLYEARERPSRTFSWLAFIFSQITVEIPLNICFGTIAFFVFYYPIGFYNNASYAGQLNERGVLFWLFSVSFYVFISSMGQLCIAGLQYAEAAGNMASLMFTMSLNFCGVFGGSGVLPGFWIFMYRISPLTYFIDGVLSTGLANNPVTCANYEYVSFNPRSGETCGEYMADYIDKNGGYLLDSNATEDCNFCKISETNAFLTSFQSSYHRRWRNFGIFIVFIVFNWCGCVFLYWLARVPKKKNRVADERDPDHGKKIENVQKEKVEPQSNEQV

SEQ ID NO: 1590 - protein, 1441 aa, Spirodela polyrhiza
MEIAGYRGGSLRGSLQGSLRRSVSAWRSPSTSDVFGRSSREEDDEEALKWAALEKLPTYDRLRKGIMTGDGGEIQEVDIQGLGFQERKNLLEKLVRNAEEDNERFLLKLRNRMERVGIDNPTIEVRFEHLNINAEAFVGNRGVPTLVNFFVNKAIWILSALHLMPSGKRPISILHDVSGIIKPCRMTLLLGPPGAGKTTLLLALAGKLDNTLKVTGNVTYNGHGMHEFVPQRTSAYISQHDVHIGEMTVRETLAFSSRCQGVGTRYEMLTELSRREKEANIKPDPDVDVYMKAVAVEGQESVVTDYILKILGLDICADTMVGDGMIRGISGGQKKRVTTGEMLVGPSKALFMDEISTGLDSSTTFQIVNSLRQSVHILGGTALIALLQPAPETYDLFDDILLLSDGQIVYQGPRENVLEFFESMGFKCPERKGVADFLQEVTSRKDQQQYWVRENEPYRFVPVNEFSEAFKSFHVGAKLHEELSTPFDRSRNHPAALTTSKYGISKMELLKACIDREWLLMKRNSFVYIFKVVQLIVLALIAMTVFFRTKLPRNGLEDATIFFGAMFLGLVTHLFNGFAELAMSIAKLPVFYKQRDLLFYPPWAYALPTWILKIPISFVECGVWIAMTYYVIGFDPNVVRMFRHYLLLVLISQVASGLFRLLAAVGRDMVVADTFGAFAQLVLLVLGGFIIAREKIKKFWIWGYWSSPLMYAQNAIAVNEFLGHSWNKLVDATGQTLGERFLRNRGIFVDKNWYWIGVGALIGYMVLFNFLFILFLEWLDPLGKGQTTVSEEALQEKEANRTGANVELATRGSAATSDGGSVEIRKDGNRKKGMVLPFTPLSITFDNVKYSVDMPQEMKDRGVTEDKLLLLKGVSGAFRPGVLTALMGVSGRGKTTLMDVLAGRKTGGYIEGDIRISGYPKNQETFARISGYCEQNDIHSPHVTVYESLLYSAWLRLPAEVDEKQRKMFVDEVMDLVELNSLRGSLVGLPGVTGLSTEQRKRLTIAVELVANPSIIFMDEPTSGLDARAAAIVMRAVRNTVDTGRTVVCTIHQPSIDIFEAFDELFLMKRGGEEIYVGPLGRQSSHLIKYFESIDGVKKIKERYNPATWMLEVTTISQEEILGLNFAEVYRNSDLYKRNKDLIKELSTPPPGSKDLFFATQFSQSFVMQCLACLWKQHKSYWRNPSYTATRLFFTVVIALIFGTIFWDLGKKRSTSLDLINAMGSMYAAVLFIGIQNAQTVQPIVDVERTVFYREKAAGMYSALPYAYAQVLIEVPHILVQTLLYGLLVYSMIGFDWTAAKFLWYMFFMFFTFLYFTYYGMMAVAMTPNSDIAAIVAAAFYAIWNIFAGFIIPRPRIPIWWRWYYWACPVAWTLYGLVVSQFGEYTDTMSDVDETVKDFLRRFLGFRHDFLPVVGVMVVVFTVLFASIFAFSIKTLNFQRR

SEQ ID NO: 1591 - protein, 341 aa, Pseudomonas stutzeri
MKDVALQLKNVGKSYGNKVVLESIDFEVRHGSMVALLGTSGAGKSTLFRCLTGLEPIDSGSIVALGESIHELSPARLRAVRGQIGFVFQQLHLVKRFSALENVLGARLAEMPIWRVTLKSFSRADKVLAFECLDRVGMLDYANTPTQLLSGGQQQRIAIARALAQKPKIIIADEPVSSLDPLTARSVLQTLKAAATDLNVAVLCSLHQVDLAREFGDRIVGMRDGRVVFDGTPAEFTDERVHALYQVPAGKMHQRPRATRSTRWPVWLWHEGRSDDHIHTPHTRAAPGHRTALAPERALQRQTSAGADRRHGAVVRDRTTHRNGPHGGHDGTGRGQDRGPG

SEQ ID NO: 1592 - protein, 696 aa, synthetic construct
MGQEDQELLIRGGSKHPSAEHLNKVTADASQSCINQGFGQAKNYGTLLPPSPPEDSGSGSGQLAENLTYAWHNMDIFGAVNQPGSGWRQLVNRTRGLFCNERHIPAPRKHLLKNVCGVAYPGELLAVMGSSGAGKTTLLNALAFRSPQGIQVSPSGMRLLNGQPVDAKEMQARCAYVQQDDLFIGSLTAREHLIFQAMVRMPRHLTYRQRVARVDQVIQELSLSKCQHTIIGVPGRVKGLSGGERKRLAFASEALTDPPLLICDEPTSGLDSFTAHSVVQVLKKLSQKGKTVILTIHQPSSELFELFDKILLMAEGRVAFLGTPSEAVDFFSYITLHLNSYPAWVPSVLPTTIRRTFTYRCWPLCPDGRSSPVIGSPRYGDNFAISKVARDMEQLLATKNLEKPLEQPENGYTYKATWFMQFRAVLWRSWLSVLKEPLLVKVRLIQTTMVAILIGLIFLGQQLTQVGVMNINGAIFLFLTNMTFQNVFATINVFTSELPVFMREARSRLYRCDTYFLGKTIAELPLFLTVPLVFTAIAYPMIGLRAGVLHFFNCLALVTLVANVSTSFGYLISCASSSTSMALSVGPPVIIPFLLFGGFFLNSGSVPVYLKWLSYLSWFRYANEGLLINQWADVEPGEISCTSSNTTCPSSGKVILETLNFSAADLPLDYVGLAILIVSFRVLAYLALRLRARRKE

SEQ ID NO: 1593 - protein, 1483 aa, Penicillium digitatum
MEARRHDPTASVNTEDTANEKSEVGDEKYTDAEVTRLAQQLTRQSTRFSVSPQNAENPFIETHEDSTLNPHSGNFKAKNWMKNLLAIQSRDPERYPKRQAGLAFKNLSVHGFGSPTDYQKDVANSVLEIGAFFRTMAGTGKQKIQILRDFDGLVKNGEMLIVLGRPGSGCSTFLKTIAGEMNGIFKDANSHMNYQGISDKEMRNQFRGEAIYTAETDVHFPQLSVGNTLKFAALARAPRNRLPGVSRDQYAEHMRDVVMAMLGLSHTINTRVGNDFIRGVSGGERKRVSIAEATLCGSPLQCWDNSTRGLDSANALEFCKTLNLMSKYSGTTCAVAIYQASQSAYDVFDKVTVLYEGRQIYFGRTTEAREFFTNMGFHCPDRQTTADFLTSLTSPAERVVKPGFEKMVPRTPDEFAKGWKNSAAYKELQKEIDDYNTQYPIGGESFQQFVESRKAMQSKGQRAKSPYTLSVAEQVQICVTRGFQRLKSDYSLTISALIGNTIMALIVGSVFYQLPDDVTSFYSRGALLFFAVLLNSFSSALEILTLYAQRPIVEKQARYAMYHPFAEAISSMLCDMPYKILNAITFNVTLYFMTGLRQNAGAFFTFMLFSFVTTLTMSMIFRTIASYSRTLSQALVPAAILILGLVIYTGFTIPTRNMLGWSRWMNYIDPIAYGFETLIVNEFHGRNFPCNPESFIPAGDSYADVGRFNKICSAKGAVAGQNFVSGEAYYTASFQYSNSHRWRNMGIMIGFMVFFMVTYLVGTEYISEAKSKGEVLLFRRGYAPKNSGNSDGDVEQTHGVSSAEKKDGAGSGGEQESAAIQRQTSIFQWQDVCYDVHIKNEERRILDHVDGWVKPGTCTALMGVSGAGKTTLLDVLATRVTMGVVSGEMLVDGRPRDQSFQRKTGYVQQQDLHLHTTTVREALRFSAILRQPRHVSHQEKLDYVEEVIKLLGMEHYADAVVGVPGEGLNVEQRKRLTIGVELAAKPQLLLFLDEPTSGLDSQTSWSILDLIDTLTKHGQAILCTIHQPSAMLFQRFDRLLFLAKGGRTVYFGEIGEHSSTLSNYFERNGAPKLSPEANPAEWMLEVIGAAPGTHSDIDWPAVWRESPERKAVQNHLAELRNNLSLKPVATTDNDPAGFNEFAAPFAVQLWQCLIRVFSQYWRTPIYIYSKTALCSLTALYVGFSFFHAQNSMQGLQNQMFSIFMLMTIFGNLVQQIMPHFVTQRSLYEVRERPSKTYSWQAFMSANILVELPWNALMSVLIFLCWYYPVGLQRNASADDLHERGALMWLLILTFMLFTSTFSHMMIAGIELAETGGNLANLLFSLCLIFCGVLATPDKMPHFWIFMYRVSPFTYLVSAMLSTGTSGAKVECESVELLHFEPTAGKTCFEYMNTYMNGLVVNGTQVAAPAGGYLVDNNATSNCAFCTIADTDTYLASVLSYYKDAWRNFGIMWAFIIFNIFGAVCIYWLARVPKGTRSKKTKTA

SEQ ID NO: 1594 - protein, 1469 aa, Arabidopsis thaliana
MDYNPNLPPLGGGGVSMRRSISRSVSRASRNIEDIFSSGSRRTQSVNDDEEALKWAAIEKLPTYSRLRTTLMNAVVEDDVYGNQLMSKEVDVTKLDGEDRQKFIDMVFKVAEQDNERILTKLRNRIDRVGIKLPTVEVRYEHLTIKADCYTGNRSLPTLLNVVRNMGESALGMIGIQFAKKAQLTILKDISGVIKPGRMTLLLGPPSSGKTTLLLALAGKLDKSLQVSGDITYNGYQLDEFVPRKTSAYISQNDLHVGIMTVKETLDFSARCQGVGTRYDLLNELARREKDAGIFPEADVDLFMKASAAQGVKNSLVTDYTLKILGLDICKDTIVGDDMMRGISGGQKKRVTTGEMIVGPTKTLFMDEISTGLDSSTTFQIVKCLQQIVHLNEATVLMSLLQPAPETFDLFDDIILVSEGQIVYQGPRDNILEFFESFGFKCPERKGTADFLQEVTSKKDQEQYWVNPNRPYHYIPVSEFASRYKSFHVGTKMSNELAVPFDKSRGHKAALVFDKYSVSKRELLKSCWDKEWLLMQRNAFFYVFKTVQIVIIAAITSTLFLRTEMNTRNEGDANLYIGALLFGMIINMFNGFAEMAMMVSRLPVFYKQRDLLFYPSWTFSLPTFLLGIPSSILESTAWMVVTYYSIGFAPDASRFFKQFLLVFLIQQMAASLFRLIASVCRTMMIANTGGALTLLLVFLLGGFLLPKGKIPDWWGWAYWVSPLTYAFNGLVVNEMFAPRWMNKMASSNSTIKLGTMVLNTWDVYHQKNWYWISVGALLCFTALFNILFTLALTYLNPLGKKAGLLPEEENEDADQGKDPMRRSLSTADGNRRGEVAMGRMSRDSAAEASGGAGNKKGMVLPFTPLAMSFDDVKYFVDMPGEMRDQGVTETRLQLLKGVTGAFRPGVLTALMGVSGAGKTTLMDVLAGRKTGGYIEGDVRISGFPKVQETFARISGYCEQTDIHSPQVTVRESLIFSAFLRLPKEVGKDEKMMFVDQVMELVELDSLRDSIVGLPGVTGLSTEQRKRLTIAVELVANPSIIFMDEPTSGLDARAAAIVMRAVRNTVDTGRTVVCTIHQPSIDIFEAFDELMLMKRGGQVIYAGPLGQNSHKVVEYFESFPGVSKIPEKYNPATWMLEASSLAAELKLSVDFAELYNQSALHQRNKALVKELSVPPAGASDLYFATQFSQNTWGQFKSCLWKQWWTYWRSPDYNLVRFIFTLATSLLIGTVFWQIGGNRSNAGDLTMVIGALYAAIIFVGINNCSTVQPMVAVERTVFYRERAAGMYSAMPYAISQVTCELPYVLIQTVYYSLIVYAMVGFEWKAEKFFWFVFVSYFSFLYWTYYGMMTVSLTPNQQVASIFASAFYGIFNLFSGFFIPRPKIPKWWIWYYWICPVAWTVYGLIVSQYGDVETRIQVLGGAPDLTVKQYIEDHYGFQSDFMGPVAAVLIAFTVFFAFIFAFCIRTLNFQTR

SEQ ID NO: 1595 - protein, 1416 aa, Arabidopsis thaliana
METLSRSLSKSLGELLASNSNNHFSRRSGSTIDDHDEEALKWAALEKLPTFARLRTTIIHPHEDLVDVTKLGVDDRQKFIDSIFKVTEEDNEKFLKKFRNRIDRVRIKLPTVEVRFEKVTIEANCHIGKRALPTLPNAALNIAERGLRLLGFNFTKTTKVTILRDVSGIIKPSRMTLLLGPPSSGKTTLLLALAGKLDQSLKVTGRVTYNGHGLEEFVPQKTSAYISQNDVHVGVMTVQETLDFSARCQGVGTRYDLLSELVRREKDAGILPEPEVDLFMKSIAAGNVKSSLITDYTLRILGLDICKDTVVGDEMIRGISGGQKKRVTTGEMIVGPTKTLFMDEISTGLDSSTTYQIVKCLQEIVRFTDATVLMSLLQPAPETFELFDDIILLSEGQIVYQGPRDHVLTFFETCGFKCPDRKGTADFLQEVTSRKDQEQYWADSKKPYSYISVSEFSKRFRTFHVGANLEKDLSVPYDRFKSHPASLVFKKHSVPKSQLFKVCWDRELLLMKRNAFFYITKTVQIIIMALIASTVYLRTEMGTKNESDGAVYIGALMFSMIVNMFNGFAELALMIQRLPVFYKQRDLLFHPPWTFSLPTFLLGIPISIFESVVWVTITYYMIGFAPELSRFLKHLLVIFLTQQMAGGIFRFIAATCRSMILANTGGALVILLLFLLGGFIVPRGEIPKWWKWAYWVSPMAYTYDALTVNEMLAPRWINQPSSDNSTSLGLAVLEIFDIFTDPNWYWIGVGGILGFTVLFNILVTLALTFLNPLEKQQAVVSKENTEENRAENGSKSKSIDVKRGMVLPFTPLTMSFDNVNYYVDMPKEMKEQGVSKDKLQLLKEVTGVFRPGVLTALMGVSGAGKTTLMDVLAGRKTGGYIEGDIRISGFPKRQETFARISGYCEQNDIHSPQVTVKESLIYSAFLRLPKEVTKYEKMRFVDEVMELVELESLKDAVVGLPGITGLSTEQRKRLTIAVELVANPSIIFMDEPTSGLDARAAAIVMRTVRNTVDTGRTVVCTIHQPSIDIFEAFDELLLLKRGGQVIYAGPLGQNSHKIIEYFQAIHGVPKIKEKYNPATWMLEVSSMAAEAKLEIDFAEHYKTSSLYQQNKNLVKELSTPPQGASDLYFSTRFSQSLLGQFKSCLWKQWITYWRTPDYNLARFFFTLAAAVMLGSIFWKVGTKRENANDLTKVIGAMYAAVLFVGVNNSSSVQPLIAVERSVFYRERAAEMYSALPYALAQVVCEIPYVLIQTTYYTLIIYAMMCFEWTLAKFFWFYFVSFMSFLYFTYYGMMTVALTPNQQVAAVFAGAFYGLFNLFSGFVIPRPRIPKWWIWYYWICPVAWTVYGLIVSQYGDVEDTIKVPGMANDPTIKWYIENHYGYDADFMIPIATVLVGFTLFFAFMFAFGIRTLNFQQR

SEQ ID NO: 1596 - protein, 1397 aa, Arabidopsis thaliana
MAQTGEDVDKAKSFQVEFACGNGVDDEEKLRSQWATVERLPTFKRVTTALLHTGDDSSDIIDVTKLEDAERRLLIEKLVKQIEADNLRLLRKIRKRIDEVGIELPTVEVRFNDLSVEAECQVVHGKPIPTLWNTIKGSLSKFVCSKKETKIGILKGVSGIVRPGRMTLLLGPPGCGKTTLLQALSGRLSHSVKVGGKVSYNGCLLSEFIPEKTSSYISQNDLHIPELSVRETLDFSACCQGIGSRMEIMKEISRREKLKEIVPDPDIDAYMKAISVEGLKNSMQTDYILKILGLDICADTRAGDATRPGISGGQKRRLTTGEIVVGPATTLLMDEISNGLDSSTTFQIVSCLQQLAHIAGATILISLLQPAPETFELFDDVILLGEGKIIYHAPRADICKFFEGCGFKCPERKGVADFLQEVMSRKDQEQYWCHRSKPYSYISVDSFIKKFNESNLGFLLKEELSKPFDKSQTRKDSLCFRKYSLSKWEMLKACSRREILLMKRNSFIYLFKSGLLVFNALVTMTVFLQAGATRDARHGNYLMGSMFTALFRLLADGLPELTLTISRLGVFCKQKDLYFYPAWAYAIPSIILRIPLSVLDSFIWTVLTYYVIGYSPEVGRFFRHFIILLTFHLSCISMFRAIASICRTFVACSITGAISVLLLALFGGFVIPKSSMPTWLGWGFWLSPLSYAEIGLTANEFFSPRWRKLTSGNITAGEQVLDVRGLNFGRHSYWTAFGALVGFVLFFNALYTLALTYRNNPQRSRAIVSHGKNSQCSEEDFKPCPEITSRAKTGKVILPFKPLTVTFQNVQYYIETPQGKTRQLLFDITGALKPGVLTSLMGVSGAGKTTLLDVLSGRKTRGIIKGEIRVGGYPKVQETFARVSGYCEQFDIHSPNITVEESLKYSAWLRLPYNIDAKTKNELVKEVLETVELEDIKDSMVGLPGISGLSTEQRKRLTIAVELVSNPSIIFLDEPTTGLDARAAAIVMRAVKNVAETGRTVVCTIHQPSIDIFETFDELILMKDGGQLVYYGPLGKHSSKVIKYFESIPGVPKVQKNCNPATWMLDITCKSAEHRLGMDFAQAYKDSTLYKENKMVVEQLSSASLGSEALSFPSRYSQTGWGQLKACLWKQHCSYWRNPSHNLTRIVFILLNSLLCSLLFWQKAKDINNQQDLFSIFGSMYTIVIFSGINNCATVMNFIATERNVFYRERFARMYSSWAYSFSQVLVEVPYSLLQSLLCTIIVYPMIGYHMSVYKMFWSLYSIFCSLLIFNYCGMLMVALTPNIHMALTLRSTFFSMVNLFAGFVMPKQKIPKWWIWMYYLSPTSWVLEGLLSSQYGDVEKEITVFGEKKSVSAFLEDYFGYKHDSLAVVAFVLIAFPIIVASLFAFFMSKLNFQKK

SEQ ID NO: 1597 - protein, 1400 aa, Arabidopsis thaliana
MIQTGEEDEEKATSLEVEFASGNGVDDEEELRLQWATVERLPTFKRVTTALLARDEVSGKGRVIDVTRLEGAERRLLIEMLVKQIEDDNLRLLRKIRKRIDKVGIELPTVEVRFNNLSVEAECQVIHGKPIPTLWNTIKGLLSEFICSKKETKIGILKGVSGIVRPGRMTLLLGPPGCGKTTLLQALSGKFSDSVKVGGEVCYNGCSLSEFIPEKTSSYISQNDLHIPELSVRETLDFSACCQGIGSRMEIMKEISRMEKLQEIIPDPAVDAYMKATSVEGLKNNLQTDYILKILGLDICADTRVGDATRPGISGGEKRRLTTGELVVGPATTLFMDEISNGLDSSTTFQIVSCLQQLAHIAEATILISLLQPAPETFELFDDVILMGEGKIIYHAPRADICRFFEEFGFKCPERKGVADFLQEIMSKKDQEQYWCHRDKPYSYISVDSFINKFKESNLGLLLKEELSKPFNKSQTRKDGLCYKKYSLGKWEMLKACSRREFLLMKRNSFIYLFKSALLVFNALVTMTVFLQVGATTDSLHGNYLMGSLFTALFRLLADGLPELTLTISRLGVFCKQKDLYFYPAWAYAIPSIILKIPLSVLDSFIWTLLTYYVIGYSPEVKRFFLQFLILSTFNLSCVSMFRAIAAIFRTIIASTITGAISILVLSLFGGFVIPKSSMPAWLGWGFWLSPLSYAEIGLTANEFFSPRWSKVISSKTTAGEQMLDIRGLNFGRHSYWTAFGALVGFVLFFNALYVLALTYQNNPQRSRAIISHEKYSRPIEEDFKPCPKITSRAKTGKIILPFKPLTVTFQNVQYYIETPQGKTRQLLSDITGALKPGVLTSLMGVSGAGKTTLLDVLSGRKTRGIIKGEIKVGGYPKVQETFARVSGYCEQFDIHSPNITVEESLKYSAWLRLPYNIDSKTKNELVKEVLETVELDDIKDSVVGLPGISGLSIEQRKRLTIAVELVANPSIIFMDEPTTGLDARAAAIVMRAVKNVAETGRTVVCTIHQPSIDIFETFDELILMKNGGQLVYYGPPGQNSSKVIEYFESFSGLPKIQKNCNPATWILDITSKSAEEKLGIDFSQSYKDSTLYKQNKMVVEQLSSASLGSEALRFPSQFSQTAWVQLKACLWKQHYSYWRNPSHNITRIVFILLDSTLCGLLFWQKAEDINNQQDLISIFGSMYTLVVFPGMNNCAAVINFIAAERNVFYRERFARMYSSWAYSFSQVLIEVPYSLLQSLLCTIIVYPTIGYHMSVYKMFWSLYSIFCSLLIFNYSGMLMVALTPNIHMAVTLRSSFFSMLNLFAGFVIPKQKIPKWWIWMYYLSPTSWVLEGLLSSQYGDVDKEILVFGEKKRVSAFLEDYFGYKHESLAVVAFVLIAYPIIVATLFAFFMSKLSFQKK

SEQ ID NO: 1598 - protein, 1413 aa, Arabidopsis thaliana
MGSSFRSSSSRNEHEDGGDEAEHALQWAEIQRLPTFKRLRSSLVDKYGEGTEKGKKVVDVTKLGAMERHLMIEKLIKHIENDNLKLLKKIRRRMERVGVEFPSIEVRYEHLGVEAACEVVEGKALPTLWNSLKHVFLDLLKLSGVRTNEANIKILTDVSGIISPGRLTLLLGPPGCGKTTLLKALSGNLENNLKCYGEISYNGHGLNEVVPQKTSAYISQHDLHIAEMTTRETIDFSARCQGVGSRTDIMMEVSKREKDGGIIPDPEIDAYMKAISVKGLKRSLQTDYILKILGLDICAETLVGNAMKRGISGGQKKRLTTAEMIVGPTKALFMDEITNGLDSSTAFQIIKSLQQVAHITNATVFVSLLQPAPESYDLFDDIVLMAEGKIVYHGPRDDVLKFFEECGFQCPERKGVADFLQEVISKKDQGQYWLHQNLPHSFVSVDTLSKRFKDLEIGRKIEEALSKPYDISKTHKDALSFNVYSLPKWELFRACISREFLLMKRNYFVYLFKTFQLVLAAIITMTVFIRTRMDIDIIHGNSYMSCLFFATVVLLVDGIPELSMTVQRLSVFYKQKQLCFYPAWAYAIPATVLKIPLSFFESLVWTCLTYYVIGYTPEPYRFFRQFMILFAVHFTSISMFRCIAAIFQTGVAAMTAGSFVMLITFVFAGFAIPYTDMPGWLKWGFWVNPISYAEIGLSVNEFLAPRWQKMQPTNVTLGRTILESRGLNYDDYMYWVSLSALLGLTIIFNTIFTLALSFLKSPTSSRPMISQDKLSELQGTKDSSVKKNKPLDSSIKTNEDPGKMILPFKPLTITFQDLNYYVDVPVEMKGQGYNEKKLQLLSEITGAFRPGVLTALMGISGAGKTTLLDVLAGRKTSGYIEGEIRISGFLKVQETFARVSGYCEQTDIHSPSITVEESLIYSAWLRLVPEINPQTKIRFVKQVLETIELEEIKDALVGVAGVSGLSTEQRKRLTVAVELVANPSIIFMDEPTTGLDARAAAIVMRAVKNVAETGRTIVCTIHQPSIHIFEAFDELVLLKRGGRMIYSGPLGQHSSCVIEYFQNIPGVAKIRDKYNPATWMLEVTSESVETELDMDFAKIYNESDLYKNNSELVKELSKPDHGSSDLHFKRTFAQNWWEQFKSCLWKMSLSYWRSPSYNLMRIGHTFISSFIFGLLFWNQGKKIDTQQNLFTVLGAIYGLVLFVGINNCTSALQYFETERNVMYRERFAGMYSAFAYALAQVVTEIPYIFIQSAEFVIVIYPMIGFYASFSKVFWSLYAMFCNLLCFNYLAMFLISITPNFMVAAILQSLFFTTFNIFAGFLIPKPQIPKWWVWFYYITPTSWTLNLFFSSQYGDIHQKINAFGETKTVASFLEDYFGFHHDRLMITAIILIAFPIALATMYAFFVAKLNFQKR

SEQ ID NO: 1599 - protein, 1390 aa, Arabidopsis thaliana
MAQTGEDVDKAKSFQVEFACGNGVDDEEKLRSQWATVERLPTFKRVTTALLHTGDDSSDIIDVTKLEDAERRLLIEKLVKQIEADNLRLLRKIRKRIDEVGIELPTVEVRFNDLSVEAECQVVHGKPIPTLWNTIKGSLSKFVCSKKETKIGILKGVSGIVRPGRMTLLLGPPGCGKTTLLQALSGRLSHSVKVGGKVSYNGCLLSEFIPEKTSSYISQNDLHIPELSVRETLDFSACCQGIGSRMEIMKEISRREKLKEIVPDPDIDAYMKAISVEGLKNSMQTDYILKILGLDICADTRAGDATRPGISGGQKRRLTTATTLLMDEISNGLDSSTTFQIVSCLQQLAHIAGATILISLLQPAPETFELFDDVILLGEGKIIYHAPRADICKFFEGCGFKCPERKGVADFLQEVMSRKDQEQYWCHRSKPYSYISVDSFIKKFNESNLGFLLKEELSKPFDKSQTRKDSLCFRKYSLSKWEMLKACSRREILLMKRNSFIYLFKSGLLVFNALVTMTVFLQAGATRDARHGNYLMGSMFTALFRLLADGLPELTLTISRLGVFCKQKDLYFYPAWAYAIPSIILRIPLSVLDSFIWTVLTYYVIGYSPEVGRFFRHFIILLTFHLSCISMFRAIASICRTFVACSITGAISVLLLALFGGFVIPKSSMPTWLGWGFWLSPLSYAEIGLTANEFFSPRWRKLTSGNITAGEQVLDVRGLNFGRHSYWTAFGALVGFVLFFNALYTLALTYRNNPQRSRAIVSHGKNSQCSEEDFKPCPEITSRAKTGKVILPFKPLTVTFQNVQYYIETPQGKTRQLLFDITGALKPGVLTSLMGVSGAGKTTLLDVLSGRKTRGIIKGEIRVGGYPKVQETFARVSGYCEQFDIHSPNITVEESLKYSAWLRLPYNIDAKTKNELVKEVLETVELEDIKDSMVGLPGISGLSTEQRKRLTIAVELVSNPSIIFLDEPTTGLDARAAAIVMRAVKNVAETGRTVVCTIHQPSIDIFETFDELILMKDGGQLVYYGPLGKHSSKVIKYFESIPGVPKVQKNCNPATWMLDITCKSAEHRLGMDFAQAYKDSTLYKENKMVVEQLSSASLGSEALSFPSRYSQTGWGQLKACLWKQHCSYWRNPSHNLTRIVFILLNSLLCSLLFWQKAKDINNQQDLFSIFGSMYTIVIFSGINNCATVMNFIATERNVFYRERFARMYSSWAYSFSQVLVEVPYSLLQSLLCTIIVYPMIGYHMSVYKMFWSLYSIFCSLLIFNYCGMLMVALTPNIHMALTLRSTFFSMVNLFAGFVMPKQKIPKWWIWMYYLSPTSWVLEGLLSSQYGDVEKEITVFGEKKSVSAFLEDYFGYKHDSLAVVAFVLIAFPIIVASLFAFFMSKLNFQKK

SEQ ID NO: 1600 - protein, 1443 aa, Arabidopsis thaliana
MAAASNGSEYFEFDVETGRESFARPSNAETVEQDEEDLRWAAIGRLPSQRQGTHNAILRRSQTQTQTSGYADGNVVQTIDVKKLDRADREMLVRQALATSDQDNFKLLSAIKERLDRFVTTLRILSVSNFREKKVGMEVPKIEVRFENLNIEADVQAGTRALPTLVNVSRDFFERCLSSLRIIKPRKHKLNILKDISGIIKPGRMTLLLGPPGSGKSTLLLALAGKLDKSLKKTGNITYNGENLNKFHVKRTSAYISQTDNHIAELTVRETLDFAARCQGASEGFAGYMKDLTRLEKERGIRPSSEIDAFMKAASVKGEKHSVSTDYVLKVLGLDVCSDTMVGNDMMRGVSGGQRKRVTTGEMTVGPRKTLFMDEISTGLDSSTTFQIVKCIRNFVHLMDATVLMALLQPAPETFDLFDDLILLSEGYMVYQGPREDVIAFFESLGFRLPPRKGVADFLQEVTSKKDQAQYWADPSKPYQFIPVSDIAAAFRNSKYGHAADSKLAAPFDKKSADPSALCRTKFAISGWENLKVCFVRELLLIKRHKFLYTFRTCQVGFVGLVTATVFLKTRLHPTSEQFGNEYLSCLFFGLVHMMFNGFSELPLMISRLPVFYKQRDNSFHPAWSWSIASWLLRVPYSVLEAVVWSGVVYFTVGLAPSAGRFFRYMLLLFSVHQMALGLFRMMASLARDMVIANTFGSAAILIVFLLGGFVIPKADIKPWWVWGFWVSPLSYGQRAIAVNEFTATRWMTPSAISDTTIGLNLLKLRSFPTNDYWYWIGIAVLIGYAILFNNVVTLALAYLNPLRKARAVVLDDPNEETALVADANQVISEKKGMILPFKPLTMTFHNVNYYVDMPKEMRSQGVPETRLQLLSNVSGVFSPGVLTALVGSSGAGKTTLMDVLAGRKTGGYTEGDIRISGHPKEQQTFARISGYVEQNDIHSPQVTVEESLWFSASLRLPKEITKEQKKEFVEQVMRLVELDTLRYALVGLPGTTGLSTEQRKRLTIAVELVANPSIIFMDEPTSGLDARAAAIVMRTVRNTVDTGRTVVCTIHQPSIDIFEAFDELLLMKRGGQVIYGGKLGTHSQVLVDYFQGINGVPPISSGYNPATWMLEVTTPALEEKYNMEFADLYKKSDQFREVEANIKQLSVPPEGSEPISFTSRYSQNQLSQFLLCLWKQNLVYWRSPEYNLVRLVFTTIAAFILGTVFWDIGSKRTSSQDLITVMGALYSACLFLGVSNASSVQPIVSIERTVFYREKAAGMYAPIPYAAAQGLVEIPYILTQTILYGVITYFTIGFERTFSKFVLYLVFMFLTFTYFTFYGMMAVGLTPNQHLAAVISSAFYSLWNLLSGFLVQKPLIPVWWIWFYYICPVAWTLQGVILSQLGDVESMINEPLFHGTVKEFIEYYFGYKPNMIGVSAAVLVGFCALFFSAFALSVKYLNFQRR

SEQ ID NO: 1601 - protein, 1426 aa, Arabidopsis thaliana
MAAASNGSEYFEFDVETGRESFARPSNAETVEQDEEDLRWAAIGRLPSQRQGTHNAILRRSQTQTQTSGYADGNVVQTIDVKKLDRADREMLVRQALATSDQDNFKLLSAIKERLDRVGMEVPKIEVRFENLNIEADVQAGTRALPTLVNVSRDFFERCLSSLRIIKPRKHKLNILKDISGIIKPGRMTLLLGPPGSGKSTLLLALAGKLDKSLKKTGNITYNGENLNKFHVKRTSAYISQTDNHIAELTVRETLDFAARCQGASEGFAGYMKDLTRLEKERGIRPSSEIDAFMKAASVKGEKHSVSTDYVLKVLGLDVCSDTMVGNDMMRGVSGGQRKRVTTGEMTVGPRKTLFMDEISTGLDSSTTFQIVKCIRNFVHLMDATVLMALLQPAPETFDLFDDLILLSEGYMVYQGPREDVIAFFESLGFRLPPRKGVADFLQEVTSKKDQAQYWADPSKPYQFIPVSDIAAAFRNSKYGHAADSKLAAPFDKKSADPSALCRTKFAISGWENLKVCFVRELLLIKRHKFLYTFRTCQVGFVGLVTATVFLKTRLHPTSEQFGNEYLSCLFFGLVHMMFNGFSELPLMISRLPVFYKQRDNSFHPAWSWSIASWLLRVPYSVLEAVVWSGVVYFTVGLAPSAGRFFRYMLLLFSVHQMALGLFRMMASLARDMVIANTFGSAAILIVFLLGGFVIPKADIKPWWVWGFWVSPLSYGQRAIAVNEFTATRWMTPSAISDTTIGLNLLKLRSFPTNDYWYWIGIAVLIGYAILFNNVVTLALAYLNPLRKARAVVLDDPNEETALVADANQVISEKKGMILPFKPLTMTFHNVNYYVDMPKEMRSQGVPETRLQLLSNVSGVFSPGVLTALVGSSGAGKTTLMDVLAGRKTGGYTEGDIRISGHPKEQQTFARISGYVEQNDIHSPQVTVEESLWFSASLRLPKEITKEQKKEFVEQVMRLVELDTLRYALVGLPGTTGLSTEQRKRLTIAVELVANPSIIFMDEPTSGLDARAAAIVMRTVRNTVDTGRTVVCTIHQPSIDIFEAFDELLLMKRGGQVIYGGKLGTHSQVLVDYFQGINGVPPISSGYNPATWMLEVTTPALEEKYNMEFADLYKKSDQFREVEANIKQLSVPPEGSEPISFTSRYSQNQLSQFLLCLWKQNLVYWRSPEYNLVRLVFTTIAAFILGTVFWDIGSKRTSSQDLITVMGALYSACLFLGVSNASSVQPIVSIERTVFYREKAAGMYAPIPYAAAQGLVEIPYILTQTILYGVITYFTIGFERTFSKFVLYLVFMFLTFTYFTFYGMMAVGLTPNQHLAAVISSAFYSLWNLLSGFLVQKPLIPVWWIWFYYICPVAWTLQGVILSQLGDVESMINEPLFHGTVKEFIEYYFGYKPNMIGVSAAVLVGFCALFFSAFALSVKYLNFQRR

SEQ ID NO: 1602 - protein, 1451 aa, Arabidopsis thaliana
MDYDPAHAMSRGGSMRQTISRSVSKASRNMEDIFNTSSRRTKSVNEDEEALKWASIEKLPTYNRLRTSLMPELGEDDVYGNQILNKAVDVTKLDGEERQKFIDMVFKVAEQDNERILTKLRNRIDRVGIQLPTVEVRYDHLTVKADCYTGDRSLPSLLNAVRNMGEAALGMIGIRLAKKAQLTILKDVSGIVKPSRMTLLLGPPSSGKTTLLLALAGKLDKSLDVSGEVTYNGYRLNEFVPIKTSAYISQNDLHVGIMTVKETLDFSARCQGVGTRYDLLNELARREKDAGIFPEADVDLFMKASAAQGVKSSLITDYTLKILGLDICKDTIVGDDMMRGISGGQKKRVTTGEMIVGPTKTLFMDEISTGLDSSTTFQIVKCLQQIVHLTEATVLISLLQPAPETFDLFDDIILLSEGQIVYQGPRDHILEFFESFGFKCPERKGTADFLQEVTSKKDQEQYWVDPNRPYRYIPVSEFASSFKKFHVGSKLSNELSVPYDKSKSHKAALMFDKYSIKKTELLKSCWDKEWMLMKRNSFFYVFKTVQIIIIAAITSTLYLRTEMHTRNEIDANIYVGSLLFAMIVNMFNGLAEMAMTIQRLPVFYKQRDLLFHPPWTYTLPTFLLGIPISIFESTAWMVVTYYSIGYAPDAERFFKQFLIIFLIQQMAAGIFRFIASTCRTMTIANTGGVLVLLVVFLTGGFLLPRSEIPVWWRWAYWISPLSYAFNAITVNELFAPRWMNKMSGNSTTRLGTSVLNIWDVFDDKNWYWIGVGGLLGFTVIFNGFFTLALTYLDLTYMCIMTTALGKAQAILPKEEDEEAKGKAGSNKETEMESVSAKKGMVLPFTPLAMSFDDVKYFVDMPAEMREQGVQETRLQLLKGVTSAFRPGVLTALMGVSGAGKTTLMDVLAGRKTGGYIEGDVRVSGFPKKQETFARISGYCEQTDIHSPQVTVRESLIFSAFLRLAKEVSKEDKLMFVDQVMELVELVDLRDAIVGLPGVTGLSTEQRKRLTIAVELVANPSIIFMDEPTSGLDARAAAIVMRAVRNTVDTGRTVVCTIHQPSIDIFEAFDELLLMKRGGHVIYSGPLGRNSHKVVEYFESFPGVPKIPEKYNPATWMLEASSLAAELKLGVDFAELYKASALCQRNKALVQELSVPPQGATDLYFATQFSQNTWGQFKSCLWKQWWTYWRSPDYNLVRFIFTLATSLMIGSVFWQIGGKRSNVQDLTMVIGAIYAAVVFVGINNCSTVQPMVAVERTVFYREKAAGMYSAIPYAISQVTCELPYVLIQTTYYSLIIYSMVGFEWKASKFLWFIFINYFSFLYWTYYGMMTVSLTPNQQVASIFASAFYGIFNLFSGFFIPRPKIPKWWVWYYWICPVAWTIYGLITSQYGDVETPIALLGGAPGLTVKQYIKDQYGFESDYMGPVAGVLVGFTVFFAFIFAFCIKTLNFQSR

SEQ ID NO: 1603 - protein, 1442 aa, Arabidopsis thaliana
MDYDPAHAMSRGGSMRQTISRSVSKASRNMEDIFNTSSRRTKSVNEDEEALKWASIEKLPTYNRLRTSLMPELGEDDVYGNQILNKAVDVTKLDGEERQKFIDMVFKVAEQDNERILTKLRNRIDRVGIQLPTVEVRYDHLTVKADCYTGDRSLPSLLNAVRNMGEAALGMIGIRLAKKAQLTILKDVSGIVKPSRMTLLLGPPSSGKTTLLLALAGKLDKSLDVSGEVTYNGYRLNEFVPIKTSAYISQNDLHVGIMTVKETLDFSARCQGVGTRYDLLNELARREKDAGIFPEADVDLFMKASAAQGVKSSLITDYTLKILGLDICKDTIVGDDMMRGISGGQKKRVTTGEMIVGPTKTLFMDEISTGLDSSTTFQIVKCLQQIVHLTEATVLISLLQPAPETFDLFDDIILLSEGQIVYQGPRDHILEFFESFGFKCPERKGTADFLQEVTSKKDQEQYWVDPNRPYRYIPVSEFASSFKKFHVGSKLSNELSVPYDKSKSHKAALMFDKYSIKKTELLKSCWDKEWMLMKRNSFFYVFKTVQIIIIAAITSTLYLRTEMHTRNEIDANIYVGSLLFAMIVNMFNGLAEMAMTIQRLPVFYKQRDLLFHPPWTYTLPTFLLGIPISIFESTAWMVVTYYSIGYAPDAERFFKQFLIIFLIQQMAAGIFRFIASTCRTMTIANTGGVLVLLVVFLTGGFLLPRSEIPVWWRWAYWISPLSYAFNAITVNELFAPRWMNKMSGNSTTRLGTSVLNIWDVFDDKNWYWIGVGGLLGFTVIFNGFFTLALTYLDPLGKAQAILPKEEDEEAKGKAGSNKETEMESVSAKKGMVLPFTPLAMSFDDVKYFVDMPAEMREQGVQETRLQLLKGVTSAFRPGVLTALMGVSGAGKTTLMDVLAGRKTGGYIEGDVRVSGFPKKQETFARISGYCEQTDIHSPQVTVRESLIFSAFLRLAKEVSKEDKLMFVDQVMELVELVDLRDAIVGLPGVTGLSTEQRKRLTIAVELVANPSIIFMDEPTSGLDARAAAIVMRAVRNTVDTGRTVVCTIHQPSIDIFEAFDELLLMKRGGHVIYSGPLGRNSHKVVEYFESFPGVPKIPEKYNPATWMLEASSLAAELKLGVDFAELYKASALCQRNKALVQELSVPPQGATDLYFATQFSQNTWGQFKSCLWKQWWTYWRSPDYNLVRFIFTLATSLMIGSVFWQIGGKRSNVQDLTMVIGAIYAAVVFVGINNCSTVQPMVAVERTVFYREKAAGMYSAIPYAISQVTCELPYVLIQTTYYSLIIYSMVGFEWKASKFLWFIFINYFSFLYWTYYGMMTVSLTPNQQVASIFASAFYGIFNLFSGFFIPRPKIPKWWVWYYWICPVAWTIYGLITSQYGDVETPIALLGGAPGLTVKQYIKDQYGFESDYMGPVAGVLVGFTVFFAFIFAFCIKTLNFQSR

SEQ ID NO: 1604 - protein, 1423 aa, Arabidopsis thaliana
MEGTSFHQASNSMRRNSSVWKKDSGREIFSRSSREEDDEEALRWAALEKLPTFDRLRKGILTASHAGGPINEIDIQKLGFQDTKKLLERLIKVGDDEHEKLLWKLKKRIDRVGIDLPTIEVRFDHLKVEAEVHVGGRALPTFVNFISNFADKFLNTLHLVPNRKKKFTILNDVSGIVKPGRMALLLGPPSSGKTTLLLALAGKLDQELKQTGRVTYNGHGMNEFVPQRTAAYIGQNDVHIGEMTVRETFAYAARFQGVGSRYDMLTELARREKEANIKPDPDIDIFMKAMSTAGEKTNVMTDYILKILGLEVCADTMVGDDMLRGISGGQKKRVTTGEMLVGPSRALFMDEISTGLDSSTTYQIVNSLRNYVHIFNGTALISLLQPAPETFNLFDDIILIAEGEIIYEGPRDHVVEFFETMGFKCPPRKGVADFLQEVTSKKDQMQYWARRDEPYRFIRVREFAEAFQSFHVGRRIGDELALPFDKTKSHPAALTTKKYGVGIKELVKTSFSREYLLMKRNSFVYYFKFGQLLVMAFLTMTLFFRTEMQKKTEVDGSLYTGALFFILMMLMFNGMSELSMTIAKLPVFYKQRDLLFYPAWVYSLPPWLLKIPISFMEAALTTFITYYVIGFDPNVGRLFKQYILLVLMNQMASALFKMVAALGRNMIVANTFGAFAMLVFFALGGVVLSRDDIKKWWIWGYWISPIMYGQNAILANEFFGHSWSRAVENSSETLGVTFLKSRGFLPHAYWYWIGTGALLGFVVLFNFGFTLALTFLNSLGKPQAVIAEEPASDETELQSARSEGVVEAGANKKRGMVLPFEPHSITFDNVVYSVDMPQEMIEQGTQEDRLVLLKGVNGAFRPGVLTALMGVSGAGKTTLMDVLAGRKTGGYIDGNITISGYPKNQQTFARISGYCEQTDIHSPHVTVYESLVYSAWLRLPKEVDKNKRKIFIEEVMELVELTPLRQALVGLPGESGLSTEQRKRLTIAVELVANPSIIFMDEPTSGLDARAAAIVMRTVRNTVDTGRTVVCTIHQPSIDIFEAFDELFLLKRGGEEIYVGPLGHESTHLINYFESIQGINKITEGYNPATWMLEVSTTSQEAALGVDFAQVYKNSELYKRNKELIKELSQPAPGSKDLYFPTQYSQSFLTQCMASLWKQHWSYWRNPPYTAVRFLFTIGIALMFGTMFWDLGGKTKTRQDLSNAMGSMYTAVLFLGLQNAASVQPVVNVERTVFYREQAAGMYSAMPYAFAQVFIEIPYVLVQAIVYGLIVYAMIGFEWTAVKFFWYLFFMYGSFLTFTFYGMMAVAMTPNHHIASVVSSAFYGIWNLFSGFLIPRPSMPVWWEWYYWLCPVAWTLYGLIASQFGDITEPMADSNMSVKQFIREFYGYREGFLGVVAAMNVIFPLLFAVIFAIGIKSFNFQKR

SEQ ID NO: 1605 - protein, 1450 aa, Arabidopsis thaliana
MAHMVGADDIESLRVELAEIGRSIRSSFRRHTSSFRSSSSIYEVENDGDVNDHDAEYALQWAEIERLPTVKRMRSTLLDDGDESMTEKGRRVVDVTKLGAVERHLMIEKLIKHIENDNLKLLKKIRRRIDRVGMELPTIEVRYESLKVVAECEVVEGKALPTLWNTAKRVLSELVKLTGAKTHEAKINIINDVNGIIKPGRLTLLLGPPSCGKTTLLKALSGNLENNLKCSGEISYNGHRLDEFVPQKTSAYISQYDLHIAEMTVRETVDFSARCQGVGSRTDIMMEVSKREKEKGIIPDTEVDAYMKAISVEGLQRSLQTDYILKILGLDICAEILIGDVMRRGISGGQKKRLTTAEMIVGPTKALFMDEITNGLDSSTAFQIVKSLQQFAHISSATVLVSLLQPAPESYDLFDDIMLMAKGRIVYHGPRGEVLNFFEDCGFRCPERKGVADFLQEVISKKDQAQYWWHEDLPYSFVSVEMLSKKFKDLSIGKKIEDTLSKPYDRSKSHKDALSFSVYSLPNWELFIACISREYLLMKRNYFVYIFKTAQLVMAAFITMTVFIRTRMGIDIIHGNSYMSALFFALIILLVDGFPELSMTAQRLAVFYKQKQLCFYPAWAYAIPATVLKVPLSFFESLVWTCLSYYVIGYTPEASRFFKQFILLFAVHFTSISMFRCLAAIFQTVVASITAGSFGILFTFVFAGFVIPPPSMPAWLKWGFWANPLSYGEIGLSVNEFLAPRWNQMQPNNFTLGRTILQTRGMDYNGYMYWVSLCALLGFTVLFNIIFTLALTFLKSPTSSRAMISQDKLSELQGTEKSTEDSSVRKKTTDSPVKTEEEDKMVLPFKPLTVTFQDLNYFVDMPVEMRDQGYDQKKLQLLSDITGAFRPGILTALMGVSGAGKTTLLDVLAGRKTSGYIEGDIRISGFPKVQETFARVSGYCEQTDIHSPNITVEESVIYSAWLRLAPEIDATTKTKFVKQVLETIELDEIKDSLVGVTGVSGLSTEQRKRLTIAVELVANPSIIFMDEPTTGLDARAAAIVMRAVKNVADTGRTIVCTIHQPSIDIFEAFDELVLLKRGGRMIYTGPLGQHSRHIIEYFESVPEIPKIKDNHNPATWMLDVSSQSVEIELGVDFAKIYHDSALYKRNSELVKQLSQPDSGSSDIQFKRTFAQSWWGQFKSILWKMNLSYWRSPSYNLMRMMHTLVSSLIFGALFWKQGQNLDTQQSMFTVFGAIYGLVLFLGINNCASALQYFETERNVMYRERFAGMYSATAYALGQVVTEIPYIFIQAAEFVIVTYPMIGFYPSAYKVFWSLYSMFCSLLTFNYLAMFLVSITPNFMVAAILQSLFYVGFNLFSGFLIPQTQVPGWWIWLYYLTPTSWTLNGFISSQYGDIHEEINVFGQSTTVARFLKDYFGFHHDLLAVTAVVQIAFPIALASMFAFFVGKLNFQRR

SEQ ID NO: 1606 - protein, 1420 aa, Arabidopsis thaliana
MWNSAENAFSRSTSFKDEIEDEEELRWAALQRLPTYSRIRRGIFRDMVGEPKEIQIGNLEASEQRLLLDRLVNSVENDPEQFFARVRKRFDAVDLKFPKIEVRFQNLMVESFVHVGSRALPTIPNFIINMAEGLLRNIHVIGGKRNKLTILDGISGVIRPSRLTLLLGPPSSGKTTLLLALAGRLGTNLQTSGKITYNGYDLKEIIAPRTSAYVSQQDWHVAEMTVRQTLEFAGRCQGVGFKYDMLLELARREKLAGIVPDEDLDIFMKSLALGGMETSLVVEYVMKILGLDTCADTLVGDEMIKGISGGQKKRLTTGELLVGPARVLFMDEISNGLDSSTTHQIIMYMRHSTHALEGTTVISLLQPSPETYELFDDVILMSEGQIIYQGPRDEVLDFFSSLGFTCPDRKNVADFLQEVTSKKDQQQYWSVPFRPYRYVPPGKFAEAFRSYPTGKKLAKKLEVPFDKRFNHSAALSTSQYGVKKSELLKINFAWQKQLMKQNAFIYVFKFVQLLLVALITMTVFCRTTMHHNTIDDGNIYLGSLYFSMVIILFNGFTEVPMLVAKLPVLYKHRDLHFYPSWAYTLPSWLLSIPTSIIESATWVAVTYYTIGYDPLFSRFLQQFLLYFSLHQMSLGLFRVMGSLGRHMIVANTFGSFAMLVVMTLGGFIISRDSIPSWWIWGYWISPLMYAQNAASVNEFLGHNWQKTAGNHTSDSLGLALLKERSLFSGNYWYWIGVAALLGYTVLFNILFTLFLAHLNPWGKFQAVVSREELDEREKKRKGDEFVVELREYLQHSGSIHGKYFKNRGMVLPFQPLSLSFSNINYYVDVPLGLKEQGILEDRLQLLVNITGAFRPGVLTALVGVSGAGKTTLMDVLAGRKTGGTIEGDVYISGFPKRQETFARISGYCEQNDVHSPCLTVVESLLFSACLRLPADIDSETQRAFVHEVMELVELTSLSGALVGLPGVDGLSTEQRKRLTIAVELVANPSIVFMDEPTSGLDARAAAIVMRTVRNIVNTGRTIVCTIHQPSIDIFESFDELLFMKRGGELIYAGPLGQKSCELIKYFESIEGVQKIKPGHNPAAWMLDVTASTEEHRLGVDFAEIYRNSNLCQRNKELIEVLSKPSNIAKEIEFPTRYSQSLYSQFVACLWKQNLSYWRNPQYTAVRFFYTVVISLMLGTICWKFGSKRDTQQQLFNAMGSMYAAVLFIGITNATAAQPVVSIERFVSYRERAAGMYSALPFAFAQVFIEFPYVLAQSTIYSTIFYAMAAFEWSAVKFLWYLFFMYFSIMYFTFYGMMTTAITPNHNVASIIAAPFYMLWNLFSGFMIPYKRIPLWWRWYYWANPVAWTLYGLLVSQYGDDERSVKLSDGIHQVMVKQLLEDVMGYKHDFLGVSAIMVVAFCVFFSLVFAFAIKAFNFQRR

SEQ ID NO: 1607 - protein, 1388 aa, Arabidopsis thaliana
MPQTDGVEFASRNNLENGDGDQVRSQWVAIERSPTCKRITTALFCKRDEQGKRSQRRVMDVSKLEDLDRRLFIDELIRHVEDDNRVLLQKIRTRTDEVGIDLPKIEVRFSDLFVEAECEVVHGKPIPTLWNAIASKLSRFTFSKQEDKISILKGVSGIIRPKRMTLLLGPPGCGKTTLLLALSGRLDPSLKTRGEVSYNGHLFSEFVPEKTSSYVSQNDLHIPELSVRETLDFSGCFQGAGSRLEMMKEISRREKLKGIVPDPDIDAYMKAASIEGSKTNLQTDYILKILGLTICADTRVGDASRPGISGGQKRRLTTGEMIVGPIKTLFMDEISNGLDSSTTFQILSCLQQFARLSEGTILVSLLQPAPETFELFDDLILMGEGKIIYHGPRDFICSFFEDCGFKCPQRKSVAEFLQEVISRKDQEQYWCHRDKPYCYVSIDSFIEKFKKSDLGLQLQDELSKTYDKSQTQKDGLCIRKYSLSNWDMFKACSRREFLLMKRNSFVYVFKSGLLIFIGSIAMTVYLRTGSTRDSLHANYLMGSLFFSLIKLLADGLPELTLTVSRIAVFCKQKELYFYPAWAYAIPSAILKIPISFLESFLWTMLTYYVIGYSPEAGRFIRQVLILFALHLSCISMFRAIGAVFRDFDVATTIGSISIVLLSVFGGFIVRKPSMPSWLEWGFWLSPLSYAEIGLTSNEFFAPMWRKMTSENRTLGEQVLDARGLNFGNQSYWNAFGALIGFTLFFNTVFALALTFLKTSQRSRVIVSHDKNTQSSEKDSKIASHSKNALPFEPLTFTFQDVQYFIETPQGKKLQLLSDVTGAFKPGVLTALMGVSGAGKTTLLDVLSGRKTRGDIKGQIEVGGYVKVQDTFSRVSGYCEQFDIHSPNLTVQESLKYSAWLRLPCNISSETKSAIVNEVLETIELEEIKDSLVGVPGISGVTAEQRKRLTIAVELVSNPSIIFMDEPTTGLDARAAAIVMRAVKNIAETGRTVVCTIHQPSIDIFEAFDELILMKNGGKIIYYGPLGQHSSKVIEYFMSIPGVPKLKENSNPATWILDITSKSSEDKLGVDLAHIYEESTLFKENKMVIEQTRCTSLGSERLILSSRYAQTSWEQFKACLWKQHLSYWRNPSYNLTRIIFMCFTCMLCGILFLQKAKEINNQQDLFNVFGSMFTVVLFSGINNCSTVIFCVATERNVFYRERFSRMYNPWAYSLAQVLVEIPYSLFQSIIYVIIVYPMVGYHWSVYKVFWSFYSIFCSLLIFNYFGMLLVVVTPNVHIAFTLRSSFYAIVNLFAGYVMPKPNIPRWWIWMYYLSPTSWVLNGLLTSQYGDMEKEILAFGEKKKVSAFLEDYFGYRYDSLALVAVVLIAFPILLASLFAFFIGKLNFQKK

SEQ ID NO: 1608 - protein, 1392 aa, Arabidopsis thaliana
MTMSQTDGVEFASRNTNENGHDDDDQLRSQWVAIERSPTFERITTALFCKRDEKGKKSQRRVMDVSKLDDLDRRLFIDDLIRHVENDNHVLLQKIRKRIDEVGIDLPKIEARFSDLFVEAECEVVYGKPIPTLWNAISSKLSRFMCSNQAKKISILKGVSGIIRPKRMTLLLGPPSCGKTTLLLALSGRLDPSLKTRGDISYNGHLFSEFVPEKTSSYVSQNDLHIPELSVRETLDFSGCFQGTGSRLEMTKEISRREKLKGIVPDPDIDAYMKAASIEGSKTNLQTDYILKILGLTICADTRVGDASRPGISGGQKRRLTTGEMIVGPIKTLFMDEISNGLDSSTTFQILSCLQQFARLSEGTILVSLLQPAPETFELFDDLILMGEGKIIYHGPRDFVCSFFEDCGFKCPNRKSVAEFLQEVISRKDQEQYWCHIEKTYCYVSIESFIEKFKKSDLGLELQDRLSKTYDKSQTQKDGLCFRKYSLSNWDMLKACSRREFLLMKRNSFVYVFKSGLLIFIGFIAMTVYLRTGSTRDSLHANYLMGSLFFSLFKLLADGLPELTLTISRIAVFCKQKELYFYPAWAYAIPSAILKIPISFLESFLWTMLTYYVIGYSPEMGRFIRQFLILFALHLSCISMFRAIAAVFRDFVVATTVGSISIVLLSVFGGFIVRKPSMPSWLEWGFWLSPLSYAEIGLTANEFFAPRWGKITSENRTLGEQVLDARGLNFGNQSYWNAFGALIGFTLFFNTVFALALTFLKTSQRSRVIVSHEKNTQSSENDSKIASRFKNALPFEPLTFTFQDVQYIIETPQGKKLQLLSGVTGAFKPGVLTALMGVSGAGKTTLLDVLSGRKTFGDIKGQIEVGGYVKVQDTFSRVSGYCEQFDIHSPNLTVQESLKYSAWLRLTSNISSETKCAIVNEVLETIELEEIKDSIVGIPGISGLTTEQRKRLTIAVELVSNPSIIFMDEPTTGLDARAAAIVMRAVKNIAETGRTVVCTIHQPSIDIFEAFDELILMKNGGKIIYYGPLGQHSSKVIEYFMRIHGVPKLKENSNPATWILDITSKSSEDKLGVDLAQMYEESTLFKENKMVIEQTRCTSLGSERLILSSRYAQTSWEQFKACLWKQHLSYWRNPSYNLTRIIFMSFTCMLCGILFWQKAKEINNQQDLFNVFGSMFTVVLFSGINNCSTVLFSVATERNVFYRERFSRMYNSWAYSLAQVLVEIPYSLFQSIVYVIIVYPMVGYHWSVFKVFWSFYSIFCTLLIFNYFGMLLVVVTPNVHIAFTLRSSFYAIVNLFAGYVMPKPNIPRWWIWMYYLSPTSWVLNGLLTSQYGDMEKEILAFGEKKKVSDFLEDYFGYRYDSLALVAVVLIAFPILLASLFAFFIGKLNFQKK

SEQ ID NO: 1609 - protein, 1390 aa, Arabidopsis thaliana
MTMPQTDGVEFASRNNLENGDGDQVRSQWVAIERSPTCKRITTALFCKRDEQGKRSQRRVMDVSKLEDLDRRLFIDELIRHVEDDNRVLLQKIRTRTDEVGIDLPKIEVRFSDLFVEAECEVVHGKPIPTLWNAIASKLSRFTFSKQEDKISILKGVSGIIRPKRMTLLLGPPGCGKTTLLLALSGRLDPSLKTRGEVSYNGHLFSEFVPEKTSSYVSQNDLHIPELSVRETLDFSGCFQGAGSRLEMMKEISRREKLKGIVPDPDIDAYMKAASIEGSKTNLQTDYILKILGLTICADTRVGDASRPGISGGQKRRLTTGEMIVGPIKTLFMDEISNGLDSSTTFQILSCLQQFARLSEGTILVSLLQPAPETFELFDDLILMGEGKIIYHGPRDFICSFFEDCGFKCPQRKSVAEFLQEVISRKDQEQYWCHRDKPYCYVSIDSFIEKFKKSDLGLQLQDELSKTYDKSQTQKDGLCIRKYSLSNWDMFKACSRREFLLMKRNSFVYVFKSGLLIFIGSIAMTVYLRTGSTRDSLHANYLMGSLFFSLIKLLADGLPELTLTVSRIAVFCKQKELYFYPAWAYAIPSAILKIPISFLESFLWTMLTYYVIGYSPEAGRFIRQVLILFALHLSCISMFRAIGAVFRDFDVATTIGSISIVLLSVFGGFIVRKPSMPSWLEWGFWLSPLSYAEIGLTSNEFFAPMWRKMTSENRTLGEQVLDARGLNFGNQSYWNAFGALIGFTLFFNTVFALALTFLKTSQRSRVIVSHDKNTQSSEKDSKIASHSKNALPFEPLTFTFQDVQYFIETPQGKKLQLLSDVTGAFKPGVLTALMGVSGAGKTTLLDVLSGRKTRGDIKGQIEVGGYVKVQDTFSRVSGYCEQFDIHSPNLTVQESLKYSAWLRLPCNISSETKSAIVNEVLETIELEEIKDSLVGVPGISGVTAEQRKRLTIAVELVSNPSIIFMDEPTTGLDARAAAIVMRAVKNIAETGRTVVCTIHQPSIDIFEAFDELILMKNGGKIIYYGPLGQHSSKVIEYFMSIPGVPKLKENSNPATWILDITSKSSEDKLGVDLAHIYEESTLFKENKMVIEQTRCTSLGSERLILSSRYAQTSWEQFKACLWKQHLSYWRNPSYNLTRIIFMCFTCMLCGILFLQKAKEINNQQDLFNVFGSMFTVVLFSGINNCSTVIFCVATERNVFYRERFSRMYNPWAYSLAQVLVEIPYSLFQSIIYVIIVYPMVGYHWSVYKVFWSFYSIFCSLLIFNYFGMLLVVVTPNVHIAFTLRSSFYAIVNLFAGYVMPKPNIPRWWIWMYYLSPTSWVLNGLLTSQYGDMEKEILAFGEKKKVSAFLEDYFGYRYDSLALVAVVLIAFPILLASLFAFFIGKLNFQKK

SEQ ID NO: 1610 - protein, 1453 aa, Arabidopsis thaliana
MLGRDEDLVRTMSGRGSLGSTSHRSLAGAASKSFRDVFAPPTDDVFGRSDRREEDDVELRWAALERLPTYDRLRKGMLPQTMVNGKIGLEDVDVTNLAPKEKKHLMEMILKFVEEDNEKFLRRLRERTDRVGIEVPKIEVRYENLSVEGDVRSASRALPTLFNVTLNTIESILGLFHLLPSKKRKIEILKDISGIIKPSRMTLLLGPPSSGKTTLLQALAGKLDDTLQMSGRITYCGHEFREFVPQKTCAYISQHDLHFGEMTVRESLDFSGRCLGVGTRYQLLTELSRREREAGIKPDPEIDAFMKSIAISGQETSLVTDYVLKLLGLDICADTLVGDVMRRGISGGQRKRLTTGEMLVGPATALFMDEISTGLDSSTTFQICKFMRQLVHIADVTMVISLLQPAPETFELFDDIILLSEGQIVYQGSRDNVLEFFEYMGFKCPERKGIADFLQEVTSKKDQEQYWNRREHPYSYVSVHDFSSGFNSFHAGQQLASEFRVPYDKAKTHPAALVTQKYGISNKDLFKACFDREWLLMKRNSFVYVFKTVQITIMSLIAMTVYFRTEMHVGTVQDGQKFYGALFFSLINLMFNGMAELAFTVMRLPVFFKQRDFLFYPPWAFALPGFLLKIPLSLIESVIWIALTYYTIGFAPSAARFFRQLLAYFCVNQMALSLFRFLGALGRTEVIANSGGTLALLVVFVLGGFIISKDDIPSWLTWCYYTSPMMYGQTALVINEFLDERWGSPNNDTRINAKTVGEVLLKSRGFFTEPYWFWICIGALLGFTVLFNFCYIIALMYLNPLGNSKATTVVEEGKDKHKGSHSGTGGSVVELTSTSSHGPKKGMVLPFQPLSLAFNNVNYYVDMPAEMKAQGVEGDRLQLLRDVGGAFRPGVLTALVGVSGAGKTTLMDVLAGRKTGGYVEGSINISGYPKNQATFARVSGYCEQNDIHSPHVTVYESLIYSAWLRLSADIDTKTREMFVEEVMELVELKPLRNSIVGLPGVDGLSTEQRKRLTIAVELVANPSIIFMDEPTSGLDARAAAIVMRTVRNTVDTGRTVVCTIHQPSIDIFESFDELLLMKRGGQVIYAGTLGHHSQKLVEYFEAIEGVPKIKDGYNPATWMLDVTTPSMESQMSVDFAQIFVNSSVNRRNQELIKELSTPPPGSNDLYFRTKYAQPFSTQTKACFWKMYWSNWRYPQYNAIRFLMTVVIGVLFGLLFWQTGTKIEKEQDLNNFFGAMYAAVLFLGATNAATVQPAVAIERTVFYREKAAGMYSAIPYAISQVAVEIMYNTIQTGVYTLILYSMIGYDWTVVKFFWFYYYMLTCFVYFTLYGMMLVALTPNYQIAGICLSFFLSFWNLFSGFLIPRPQIPIWWRWYYWASPVAWTLYGIITSQVGDRDSIVHITGVGDMSLKTLLKNGFGFDYDFLPVVAVVHIAWILIFLFAFAYGIKFLNFQRR

SEQ ID NO: 1611 - protein, 1450 aa, Arabidopsis thaliana
MLGRDEDLVRTMSGRGSLGSTSHRSLAGAASKSFRDVFAPPTDDVFGRSDRREEDDVELRWAALERLPTYDRLRKGMLPQTMVNGKIGLEDVDVTNLAPKEKKHLMEMILKFVEEDNEKFLRRLRERTDRVGIEVPKIEVRYENLSVEGDVRSASRALPTLFNVTLNTIESILGLFHLLPSKKRKIEILKDISGIIKPSRMTLLLGPPSSGKTTLLQALAGKLDDTLQMSGRITYCGHEFREFVPQKTCAYISQHDLHFGEMTVRESLDFSGRCLGVGTRYQLLTELSRREREAGIKPDPEIDAFMKSIAISGQETSLVTDYVLKLLGLDICADTLVGDVMRRGISGGQRKRLTTGEMLVGPATALFMDEISTGLDSSTTFQICKFMRQLVHIADVTMVISLLQPAPETFELFDDIILLSEGQIVYQGSRDNVLEFFEYMGFKCPERKGIADFLQEVTSKKDQEQYWNRREHPYSYVSVHDFSSGFNSFHAGQQLASEFRVPYDKAKTHPAALVTQKYGISNKDLFKACFDREWLLMKRNSFVYVFKTVQITIMSLIAMTVYFRTEMHVGTVQDGQKFYGALFFSLINLMFNGMAELAFTVMRLPVFFKQRDFLFYPPWAFALPGFLLKIPLSLIESVIWIALTYYTIGFAPSAARFFRQLLAYFCVNQMALSLFRFLGALGRTEVIANSGGTLALLVVFVLGGFIISKDDIPSWLTWCYYTSPMMYGQTALVINEFLDERWGSPNNDTRINAKTVGEVLLKSRGFFTEPYWFWICIGALLGFTVLFNFCYIIALMYLNPLGNSKATTVVEEGKDKHKGSHSGTGVELTSTSSHGPKKGMVLPFQPLSLAFNNVNYYVDMPAEMKAQGVEGDRLQLLRDVGGAFRPGVLTALVGVSGAGKTTLMDVLAGRKTGGYVEGSINISGYPKNQATFARVSGYCEQNDIHSPHVTVYESLIYSAWLRLSADIDTKTREMFVEEVMELVELKPLRNSIVGLPGVDGLSTEQRKRLTIAVELVANPSIIFMDEPTSGLDARAAAIVMRTVRNTVDTGRTVVCTIHQPSIDIFESFDELLLMKRGGQVIYAGTLGHHSQKLVEYFEAIEGVPKIKDGYNPATWMLDVTTPSMESQMSVDFAQIFVNSSVNRRNQELIKELSTPPPGSNDLYFRTKYAQPFSTQTKACFWKMYWSNWRYPQYNAIRFLMTVVIGVLFGLLFWQTGTKIEKEQDLNNFFGAMYAAVLFLGATNAATVQPAVAIERTVFYREKAAGMYSAIPYAISQVAVEIMYNTIQTGVYTLILYSMIGYDWTVVKFFWFYYYMLTCFVYFTLYGMMLVALTPNYQIAGICLSFFLSFWNLFSGFLIPRPQIPIWWRWYYWASPVAWTLYGIITSQVGDRDSIVHITGVGDMSLKTLLKNGFGFDYDFLPVVAVVHIAWILIFLFAFAYGIKFLNFQRR

SEQ ID NO: 1612 - protein, 1454 aa, Arabidopsis thaliana
MAAMLGRDEDPVGALSGRVSLASTSHRSLVGASKSFRDVFMPQTDEVFGRSERREEDDMELRWAAIERLPTFDRLRKGMLPQTSANGKIELEDIDLTRLEPKDKKHLMEMILSFVEEDNEKFLRDLRERTDRVGIEVPKIEVRYENISVEGDVRSASRALPTLFNVTLNTLESILGFFHLLPSKRKKIQILKDISGIVKPSRMTLLLGPPSSGKTTLLQALAGKLDDTLQMSGRITYCGHEFREFVPQKTCAYISQHDLHFGEMTVREILDFSGRCLGVGSRYQLMSELSRREKEEGIKPDPKIDAFMKSIAISGQETSLVTDYVLKILGLDICADILAGDVMRRGISGGQKKRLTTGEMLVGPARALFMDEISTGLDSSTTFQICKFMRQLVHISDVTMIISLLQPAPETFELFDDIILLSEGQIVYQGPRDNVLEFFEYFGFQCPERKGVADFLQEVTSKKDQEQYWNKREQPYNYVSVSDFSSGFSTFHTGQKLTSEFRVPYDKAKTHSAALVTQKYGISNWELFKACFDREWLLMKRNSFVYVFKTVQITIMSLITMTVYLRTEMHVGTVRDGQKFYGAMFFSLINVMFNGLAELAFTVMRLPVFYKQRDFLFYPPWAFALPAWLLKIPLSLIESGIWIGLTYYTIGFAPSAARFFRQLLAYFCVNQMALSLFRFLGAIGRTEVISNSIGTFTLLIVFTLGGFIIAKDDIRPWMTWAYYMSPMMYGQTAIVMNEFLDERWSSPNYDTRINAKTVGEVLLKSRGFFTEPYWFWICIVALLGFSLLFNLFYILALMYLNPLGNSKATVVEEGKDKQKGENRGTEGSVVELNSSSNKGPKRGMVLPFQPLSLAFNNVNYYVDMPSEMKAQGVEGDRLQLLRDVGGAFRPGILTALVGVSGAGKTTLMDVLAGRKTGGYIEGSISISGYPKNQTTFARVSGYCEQNDIHSPHVTVYESLIYSAWLRLSTDIDIKTRELFVEEVMELVELKPLRNSIVGLPGVDGLSTEQRKRLTIAVELVANPSIIFMDEPTSGLDARAAAIVMRTVRNTVDTGRTVVCTIHQPSIDIFESFDELLLMKRGGQVIYAGSLGHHSQKLVEYFEAVEGVPKINDGYNPATWMLDVTTPSMESQMSLDFAQIFSNSSLYRRNQELIKDLSTPPPGSKDVYFKTKYAQSFSTQTKACFWKQYWSYWRHPQYNAIRFLMTVVIGVLFGLIFWQIGTKTENEQDLNNFFGAMYAAVLFLGALNAATVQPAIAIERTVFYREKAAGMYSAIPYAISQVAVEIMYNTIQTGVYTLILYSMIGCNWTMAKFLWFYYYMLTSFIYFTLYGMMLMALTPNYQIAGICMSFFLSLWNLFSGFLIPRPQIPIWWRWYYWATPVAWTLYGLITSQVGDKDSMVHISGIGDIDLKTLLKEGFGFEHDFLPVVAVVHIAWILLFLFVFAYGIKFLNFQRR

SEQ ID NO: 1613 - protein, 1435 aa, Arabidopsis thaliana
MAAMLGRDEDPVGALSGRVSLASTSHRSLVGASKSFRDVFMPQTDEVFGRSERREEDDMELRWAAIERLPTFDRLRKGMLPQTSANGKIELEDIDLTRLEPKDKKHLMEMILSFVEEDNEKFLRDLRERTDRVGIEVPKIEVRYENISVEGDVRSASRALPTLFNVTLNTLESILGFFHLLPSKRKKIQILKDISGIVKPSRMTLLLGPPSSGKTTLLQALAGKLDDTLQTCAYISQHDLHFGEMTVREILDFSGRCLGVGSRYQLMSELSRREKEEGIKPDPKIDAFMKSIAISGQETSLVTDYVLKILGLDICADILAGDVMRRGISGGQKKRLTTGEMLVGPARALFMDEISTGLDSSTTFQICKFMRQLVHISDVTMIISLLQPAPETFELFDDIILLSEGQIVYQGPRDNVLEFFEYFGFQCPERKGVADFLQEVTSKKDQEQYWNKREQPYNYVSVSDFSSGFSTFHTGQKLTSEFRVPYDKAKTHSAALVTQKYGISNWELFKACFDREWLLMKRNSFVYVFKTVQITIMSLITMTVYLRTEMHVGTVRDGQKFYGAMFFSLINVMFNGLAELAFTVMRLPVFYKQRDFLFYPPWAFALPAWLLKIPLSLIESGIWIGLTYYTIGFAPSAARFFRQLLAYFCVNQMALSLFRFLGAIGRTEVISNSIGTFTLLIVFTLGGFIIAKDDIRPWMTWAYYMSPMMYGQTAIVMNEFLDERWSSPNYDTRINAKTVGEVLLKSRGFFTEPYWFWICIVALLGFSLLFNLFYILALMYLNPLGNSKATVVEEGKDKQKGENRGTEGSVVELNSSSNKGPKRGMVLPFQPLSLAFNNVNYYVDMPSEMKAQGVEGDRLQLLRDVGGAFRPGILTALVGVSGAGKTTLMDVLAGRKTGGYIEGSISISGYPKNQTTFARVSGYCEQNDIHSPHVTVYESLIYSAWLRLSTDIDIKTRELFVEEVMELVELKPLRNSIVGLPGVDGLSTEQRKRLTIAVELVANPSIIFMDEPTSGLDARAAAIVMRTVRNTVDTGRTVVCTIHQPSIDIFESFDELLLMKRGGQVIYAGSLGHHSQKLVEYFEAVEGVPKINDGYNPATWMLDVTTPSMESQMSLDFAQIFSNSSLYRRNQELIKDLSTPPPGSKDVYFKTKYAQSFSTQTKACFWKQYWSYWRHPQYNAIRFLMTVVIGVLFGLIFWQIGTKTENEQDLNNFFGAMYAAVLFLGALNAATVQPAIAIERTVFYREKAAGMYSAIPYAISQVAVEIMYNTIQTGVYTLILYSMIGCNWTMAKFLWFYYYMLTSFIYFTLYGMMLMALTPNYQIAGICMSFFLSLWNLFSGFLIPRPQIPIWWRWYYWATPVAWTLYGLITSQVGDKDSMVHISGIGDIDLKTLLKEGFGFEHDFLPVVAVVHIAWILLFLFVFAYGIKFLNFQRR

SEQ ID NO: 1614 - protein, 1434 aa, Arabidopsis thaliana
MAAMLGRDEDPVGALSGRVSLASTSHRSLVGASKSFRDVFMPQTDEVFGRSERREEDDMELRWAAIERLPTFDRLRKGMLPQTSANGKIELEDIDLTRLEPKDKKHLMEMILSFVEEDNEKFLRDLRERTDRVGIEVPKIEVRYENISVEGDVRSASRALPTLFNVTLNTLESILGFFHLLPSKRKKIQILKDISGIVKPSRMTLLLGPPSSGKTTLLQALAGKLDDTLQMSGRITYCGHEFREFVPQKTCAYISQHDLHFGEMTVREILDFSGRCLGVGSRYQLMSELSRREKEEGIKPDPKIDAFMKSIAISGQETSLVTDYVLKILGLDICADILAGDVMRRGISGGQKKRLTTGEMLVGPARALFMDEISTGLDSSTTFQICKFMRQLVHISDVTMIISLLQPAPETFELFDDIILLSEGQIVYQGPRDNVLEFFEYFGFQCPERKGVADFLQEVTSKKDQEQYWNKREQPYNYVSVSDFSSGFSTFHTGQKLTSEFRVPYDKAKTHSAALVTQKYGISNWELFKACFDREWLLMKRNSFVYVFKTVQITIMSLITMTVYLRTEMHVGTVRDGQKFYGAMFFSLINVMFNGLAELAFTVMRLPVFYKQRDFLFYPPWAFALPAWLLKIPLSLIESGIWIGLTYYTIGFAPSAARFLGAIGRTEVISNSIGTFTLLIVFTLGGFIIAKDDIRPWMTWAYYMSPMMYGQTAIVMNEFLDERWSSPNYDTRINAKTVGEVLLKSRGFFTEPYWFWICIVALLGFSLLFNLFYILALMYLNPLGNSKATVVEEGKDKQKGENRGTEGSVVELNSSSNKGPKRGMVLPFQPLSLAFNNVNYYVDMPSEMKAQGVEGDRLQLLRDVGGAFRPGILTALVGVSGAGKTTLMDVLAGRKTGGYIEGSISISGYPKNQTTFARVSGYCEQNDIHSPHVTVYESLIYSAWLRLSTDIDIKTRELFVEEVMELVELKPLRNSIVGLPGVDGLSTEQRKRLTIAVELVANPSIIFMDEPTSGLDARAAAIVMRTVRNTVDTGRTVVCTIHQPSIDIFESFDELLLMKRGGQVIYAGSLGHHSQKLVEYFEAVEGVPKINDGYNPATWMLDVTTPSMESQMSLDFAQIFSNSSLYRRNQELIKDLSTPPPGSKDVYFKTKYAQSFSTQTKACFWKQYWSYWRHPQYNAIRFLMTVVIGVLFGLIFWQIGTKTENEQDLNNFFGAMYAAVLFLGALNAATVQPAIAIERTVFYREKAAGMYSAIPYAISQVAVEIMYNTIQTGVYTLILYSMIGCNWTMAKFLWFYYYMLTSFIYFTLYGMMLMALTPNYQIAGICMSFFLSLWNLFSGFLIPRPQIPIWWRWYYWATPVAWTLYGLITSQVGDKDSMVHISGIGDIDLKTLLKEGFGFEHDFLPVVAVVHIAWILLFLFVFAYGIKFLNFQRR

SEQ ID NO: 1615 - protein, 1405 aa, Arabidopsis thaliana
MAHYRVSSEVENIMNRDRSHRKNEEEDEEEALKLAAMEKLQRLPTYDRARKAVLKGITGGFKEIDMKDLGLAERRELFDRVMTMDDEDWHGEYLRRLKSRFDRVSLHLPTIEVRFEDLNVTAEAYAGSKTVPTVLNSYVNLLKGIGTKIRVLPDRKKRISILNDVSGIIKPGRLTLLLGPPGSGKSTLLKALSGKTETGLRSTGKVTYNGHELHEFVPERTAGYIDQYDVHLPDLTVRETLKFSAKCQGVGTGYDMLAELLRREKDLNIKPDPYLDALMKASVIKGHKEYVVTDYVLKVLGLEICADTIVGNHMKRGISGGQKKRVTTGEMLVGPVGAFFMDNISDGLDSSTTFQIVKSIKQMIHVFDKTALISLLQPPPETFELFDDVIILGEGHIVYQGPREDVLEFFEFMGFKCPERKGIADYLQEILSKKDQEQYWANPELPYRYVTAKKFEEGFKIHHFGRAMRSQLATPFDRLKNHRAALTRTTYGASKLELLKACLERESILMKRNLRTFVLKSLQLIINAILIGVVFWQQKNYPSTVEDGIIYMGAIYLEVQMIVFSGFFELPMTIDKLPVFYKQRHFSFYPSWAFSLPTSIITFPLSFVEVFIVVLITYFTIGYDLTVPSFLKHYLVLALCGQMSYGLFRCIAAVTRNHVVSNTMGCLAVMWLMTFSGYVLSRNQVHKWLTWAYWTSPMMYIQTAVSVNEFRSESWKDVISKKPQGLGVAVLKSRGFFVETYWYWIGLLALILSTILSNIITSLCLAFLKQYGISKTAVLPDEREEADSNNTTGRDYTGTTMERFFDRVVTTRTCNDKKLRIPFKPLYMTFENITYSVDTPKEMKEKGIRENKLVLLNGLSGAFRPGVLTALMGVSGAGKTTLMDVLAGRKNTGYIQGEIYVSGFPKKQDSFARVSGYCEQSDIHSPLLTVYESLLYSAWLRLPPDIDTHTRELFIEEVMELIELKALREMLVGYVGISGLSTEQRKRMTIAVELVANPSILFMDEPTSGLDARAAAIVMRTVRNTVDTGRTVVCTIHQPSIDIFESFDELFLLTRGGEEIYVGPIGHHSSQLIEYFEGIRGVGKIKEGYNPATWALEVTTRAQEDVLGVTFAQVYKKSNLYRRNKDLIKELNNIPPHAQDIHFSTKYSQSYLSQFQACLWKQHKSYWRNVPYNAVRFSFGAAVGIMYGIIFWSLGKRKGTRQDIFNSVGAMSTVVGFLSSQSAATVRPVVIAERTVFYREAGAGMYSALPYAFSQVIIEIPYTMAQACIYGVIVYGMIGYEWTASKFFLNIFFTFISILYSIYTGIMVISVSPNQEIASILNGVISTSWNVFSGFTIPRPRMHVWLRWFTYVCPGWWGLYGLTIAQYGDVETRLDTDSEFPKEVRKFRGGHFGLTLGSVRFGSVY

SEQ ID NO: 1616 - protein, 760 aa, Arabidopsis thaliana
MFRAIAAIFRTIIASTITGAISILVLSLFGGFVIPKSSMPAWLGWGFWLSPLSYAEIGLTANEFFSPRWSKVISSKTTAGEQMLDIRGLNFGRHSYWTAFGALVGFVLFFNALYVLALTYQNNPQRSRAIISHEKYSRPIEEDFKPCPKITSRAKTGKIILPFKPLTVTFQNVQYYIETPQGKTRQLLSDITGALKPGVLTSLMGVSGAGKTTLLDVLSGRKTRGIIKGEIKVGGYPKVQETFARVSGYCEQFDIHSPNITVEESLKYSAWLRLPYNIDSKTKNELVKEVLETVELDDIKDSVVGLPGISGLSIEQRKRLTIAVELVANPSIIFMDEPTTGLDARAAAIVMRAVKNVAETGRTVVCTIHQPSIDIFETFDELILMKNGGQLVYYGPPGQNSSKVIEYFESFSGLPKIQKNCNPATWILDITSKSAEEKLGIDFSQSYKDSTLYKQNKMVVEQLSSASLGSEALRFPSQFSQTAWVQLKACLWKQHYSYWRNPSHNITRIVFILLDSTLCGLLFWQKAEDINNQQDLISIFGSMYTLVVFPGMNNCAAVINFIAAERNVFYRERFARMYSSWAYSFSQVLIEVPYSLLQSLLCTIIVYPTIGYHMSVYKMFWSLYSIFCSLLIFNYSGMLMVALTPNIHMAVTLRSSFFSMLNLFAGFVIPKQKIPKWWIWMYYLSPTSWVLEGLLSSQYGDVDKEILVFGEKKRVSAFLEDYFGYKHESLAVVAFVLIAYPIIVATLFAFFMSKLSFQKK

SEQ ID NO: 1617 - protein, 1326 aa, Arabidopsis thaliana
MIQTGEEDEEKATSLEVEFASGNGVDDEEELRLQWATVERLPTFKRVTTALLARDEVSGKGRVIDVTRLEGAERRLLIEMLVKQIEDDNLRLLRKIRKRIDKVGIELPTVEVRFNNLSVEAECQVIHGKPIPTLWNTIKGLLSEFICSKKETKIGILKGVSGIVRPGRMTLLLGPPGCGKTTLLQALSGKFSDSVKVGGEVCYNGCSLSEFIPEKTSSYISQNDLHIPELSVRETLDFSACCQGIGSRMEIMKEISRMEKLQEIIPDPAVDAYMKATSVEGLKNNLQTDYILKILGLDICADTRVGDATRPGISGGEKRRLTTGELVVGPATTLFMDEISNGLDSSTTFQIVSCLQQLAHIAEATILISLLQPAPETFELFDDVILMGEGKIIYHAPRADICRFFEEFGFKCPERKGVADFLQEEELSKPFNKSQTRKDGLCYKKYSLGKWEMLKACSRREFLLMKRNSFIYLFKSALLVFNALVTMTVFLQVGATTDSLHGNYLMGSLFTALFRLLADGLPELTLTISRLGVFCKQKDLYFYPAWAYAIPSIILKIPLSVLDSFIWTLLTYYVIGYSPEVKRFFLQFLILSTFNLSCVSMFRAIAAIFRTIIASTITGAISILVLSLFGGFVIPKSSMPAWLGWGFWLSPLSYAEIGLTANEFFSPRWSKVISSKTTAGEQMLDIRGLNFGRHSYWTAFGALVGFVLFFNALYVLALTYQNRKIILPFKPLTVTFQNVQYYIETPQGKTRQLLSDITGALKPGVLTSLMGVSGAGKTTLLDVLSGRKTRGIIKGEIKVGGYPKVQETFARVSGYCEQFDIHSPNITVEESLKYSAWLRLPYNIDSKTKNELVKEVLETVELDDIKDSVVGLPGISGLSIEQRKRLTIAVELVANPSIIFMDEPTTGLDARAAAIVMRAVKNVAETGRTVVCTIHQPSIDIFETFDELILMKNGGQLVYYGPPGQNSSKVIEYFESFSGLPKIQKNCNPATWILDITSKSAEEKLGIDFSQSYKDSTLYKQNKMVVEQLSSASLGSEALRFPSQFSQTAWVQLKACLWKQHYSYWRNPSHNITRIVFILLDSTLCGLLFWQKAEDINNQQDLISIFGSMYTLVVFPGMNNCAAVINFIAAERNVFYRERFARMYSSWAYSFSQVLIEVPYSLLQSLLCTIIVYPTIGYHMSVYKMFWSLYSIFCSLLIFNYSGMLMVALTPNIHMAVTLRSSFFSMLNLFAGFVIPKQKIPKWWIWMYYLSPTSWVLEGLLSSQYGDVDKEILVFGEKKRVSAFLEDYFGYKHESLAVVAFVLIAYPIIVATLFAFFMSKLSFQKK

SEQ ID NO: 1618 - protein, 626 aa, Arabidopsis thaliana
SAAEASGGAGNKKGMVLPFTPLAMSFDDVKYFVDMPGEMRDQGVTETRLQLLKGVTGAFRPGVLTALMGVSGAGKTTLMDVLAGRKTGGYIEGDVRISGFPKVQETFARISGYCEQTDIHSPQVTVRESLIFSAFLRLPKEVGKDEKMMFVDQVMELVELDSLRDSIVGLPGVTGLSTEQRKRLTIAVELVANPSIIFMDEPTSGLDARAAAIVMRAVRNTVDTGRTVVCTIHQPSIDIFEAFDELMLMKRGGQVIYAGPLGQNSHKVVEYFESFPGVSKIPEKYNPATWMLEASSLAAELKLSVDFAELYNQSALHQRNKALVKELSVPPAGASDLYFATQFSQNTWGQFKSCLWKQWWTYWRSPDYNLVRFIFTLATSLLIGTVFWQIGGNRSNAGDLTMVIGALYAAIIFVGINNCSTVQPMVAVERTVFYRERAAGMYSAMPYAISQVTCELPYVLIQTVYYSLIVYAMVGFEWKAEKFFWFVFVSYFSFLYWTYYGMMTVSLTPNQQVASIFASAFYGIFNLFSGFFIPRPKIPKWWIWYYWICPVAWTVYGLIVSQYGDVETRIQVLGGAPDLTVKQYIEDHYGFQSDFMGPVAAVLIAFTVFFAFIFAFCIRTLNFQTR

SEQ ID NO: 1619 - protein, 979 aa, Arabidopsis thaliana
MKEISRMEKLQEIIPDPAVDAYMKILGLDICADTRVGDATRPGISGGEKRRLTTGELVVGPATTLFMDEISNGLDSSTTFQIVSCLQQLAHIAEATILISLLQPAPETFELFDDVILMGEGKIIYHAPRADICRFFEEFGFKCPERKGVADFLQEIMSKKDQEQYWCHRDKPYSYISVDSFINKFKESNLGLLLKEELSKPFNKSQTRKDGLCYKKYSLGKWEMLKACSRREFLLMKRNSFIYLFKSALLVFNALVTMTVFLQVGATTDSLHGNYLMGSLFTALFRLLADGLPELTLTISRLGVFCKQKDLYFYPAWAYAIPSIILKIPLSPRGQKVLPAVPYLIYIQPFLCINVSRYCGNLSHNYCFHNHWSYFHIGSLIIWWLRYSKIGLRNDKISFHIFRLFFIGKIILPFKPLTVTFQNVQYYIETPQGKTRQLLSDITGALKPGVLTSLMGVSGAGKTTLLDVLSGRKTRGIIKGEIKVGGYPKVQETFARVSGYCEQFDIHSPNITVEESLKYSAWLRLPYNIDSKTKNVRNYTLKTNRLKEIELVKEVLETVELDDIKDSVVGLPGISGLSIEQRKRLTIAVELVANPSIIFMDEPTTGLDARAAAIVMRAVKNVAETGRTVVCTIHQPSIDIFETFDELILMKNGGQLVYYGPPGQNSSKVIEYFENKMVVEQLSSASLGSEALRFPSQFSQTAWVQLKACLWKQHYSYWRNPSHNITRIVFILLDSTLCGLLFWQKAEDINNQQDLISIFGSMYTLVVFPGMNNCAAVINFIAAERNVFYRERFARMYSSWAYSFSQVLIEVPYSLLQSLLCTIIVYPTIGYHMSVYKMFWSLYSIFCSLLIFNYSGMLMVALTPNIHMAVTLRSSFFSMLNLFAGFVIPKQKIPKWWIWMYYLSPTSWVLEGLLSSQYGDVDKEILVFGEKKRVSAFLEDYFGYKHESLAVVAFVLIAYPIIVATLFAFFMSKLSFQKK

SEQ ID NO: 1620 - protein, 1418 aa, Arabidopsis thaliana
MAHYRVSSEVENIMNRDRSHRKNEEEDEEEALKLAAMEKLQRLPTYDRARKAVLKGITGGFKEIDMKDLGLAERRELFDRVMTMDDEDWHGEYLRRLKSRFDRVSLHLPTIEVRFEDLNVTAEAYAGSKTVPTVLNSYVNLLKGIGTKIRVLPDRKKRISILNDVSGIIKPGRLTLLLGPPGSGKSTLLKALSGKTETGLRSTGKVTYNGHELHEFVPERTAGYIDQYDVHLPDLTVRETLKFSAKCQGVGTGYDMLAELLRREKDLNIKPDPYLDALMKASVIKGHKEYVVTDYVLKVLGLEICADTIVGNHMKRGISGGQKKRVTTGEMLVGPVGAFFMDNISDGLDSSTTFQIVKSIKQMIHVFDKTALISLLQPPPETFELFDDVIILGEGHIVYQGPREDVLEFFEFMGFKCPERKGIADYLQEILSKKDQEQYWANPELPYRYVTAKKFEEGFKIHHFGRAMRSQLATPFDRLKNHRAALTRTTYGASKLELLKACLERESILMKRNLRTFVLKSLQLIINAILIGVVFWQQKNYPSTVEDGIIYMGAIYLEVQMIVFSGFFELPMTIDKLPVFYKQRHFSFYPSWAFSLPTSIITFPLSFVEVFIVVLITYFTIGYDLTVPSFLKHYLVLALCGQMSYGLFRCIAAVTRNHVVSNTMGCLAVMWLMTFSGYVLSRNQVHKWLTWAYWTSPMMYIQTAVSVNEFRSESWKDGLGVAVLKSRGFFVETYWYWIGLLALILSTILSNIITSLCLAFLKQYGISKTAVLPDEREEADSNNTTGRDYTGTTMERFFDRVVTTRTCNDKKLRIPFKPLYMTFENITYSVDTPKEMKEKGIRENKLVLLNGLSGAFRPGVLTALMGVSGAGKTTLMDVLAGRKNTGYIQGEIYVSGFPKKQDSFARVSGYCEQSDIHSPLLTVYESLLYSAWLRLPPDIDTHTRELFIEEVMELIELKALREMLVGYVGISGLSTEQRKRMTIAVELVANPSILFMDEPTSGLDARAAAIVMRTVRNTVDTGRTVVCTIHQPSIDIFESFDELFLLTRGGEEIYVGPIGHHSSQLIEYFEGIRGVGKIKEGYNPATWALEVTTRAQEDVLGVTFAQVYKKSNLYRRNKDLIKELNNIPPHAQDIHFSTKYSQSYLSQFQACLWKQHKSYWRNVPYNAVRFSFGAAVGIMYGIIFWSLGKRKGTRQDIFNSVGAMSTVVGFLSSQSAATVRPVVIAERTVFYREAGAGMYSALPYAFSQVIIEIPYTMAQACIYGVIVYGMIGYEWTASKFFLNIFFTFISILYSIYTGIMVISVSPNQEIASILNGVISTSWNVFSGFTIPRPRMHVWLRWFTYVCPGWWGLYGLTIAQYGDVETRLDTGETVVEFMKNYYGYEYNFLWVVSLTLIAFSMFFVFIYAFSVKILNFQKR

SEQ ID NO: 1621 - protein, 1177 aa, Arabidopsis thaliana
MKEISRMEKLQEIIPDPAVDAYMKILGLDICADTRVGDATRPGISGGEKRRLTTGELVVGPATTLFMDEISNGLDSSTTFQIVSCLQQLAHIAEATILISLLQPAPETFELFDDVILMGEGKIIYHAPRADICRFFEEFGFKCPERKGVADFLQEIMSKKDQEQYWCHRDKPYSYISVDSFINKFKESNLGLLLKEELSKPFNKSQTRKDGLCYKKYSLGKWEMLKACSRREFLLMKRNSFIYLFKSALLVFNALVTMTVFLQVGATTDSLHGNYLMGSLFTALFRLLADGLPELTLTISRLGVFCKQKDLYFYPAWAYAIPSIILKIPLSPRGQKVLPAVPYLIYIQPFLCINVSRYCGNLSHNYCFHNHWSYFHIGSLIIWWLRYSKIGLRNDKISFHIFRLFFIGKIILPFKPLTVTFQNVQYYIETPQGKTRQLLSDITGALKPGVLTSLMGVSGAGKTTLLDVLSGRKTRGIIKGEIKVGGYPKVQETFARVSGYCEQFDIHSPNITVEESLKYSAWLRLPYNIDSKTKNVRNYTLKTNRLKEIELVKEVLETVELDDIKDSVVGLPGISGLSIEQRKRLTIAVELVANPSIIFMDEPTTGLDARAAAIVMRAVKNVAETGRTVVCTIHQPSIDIFETFDELILMKNGGQLVYYGPPGQNSSKVIEYFENKMVVEQLSSASLGSEALRFPSQFSQTAWVQLKACLWKQHYSYWRNPSHNITRIVFILLDSTLCGLLFWQKAEDINNQQDLISIFGSMYTLVVFPGMNNCAAVINFIAAERNVFYRERFARMYSSWAYSFSQVLIEVPYSLLQSLLCTIIVYPTIGYHMSVYKMFWSLYSIFCSLLIFNYSGMLMVALTPNIHMAVTLRSSFFSMLNLFAGFVIPKQDRIFIIFMEMITWSMGANNVYRVSFVKVIIFTNILTSISFSLFNLDFHYCYIQDNSSEAARICFVLLFLQIWNTNENGHDDDDQLRSQWVAIERSPTFERITTALFCKRDEKGKKSQRRVMDVSKLDDLDRRLFIDDLIRHVENDNHVLLQKIRKRIDEVGIDLPKIEARFSDLFVEAECEVVYGKPIPTLWNAISSKLSWFSCRMTLLLGPPSCGKTTLLLALSGRLDPSLKTRGDISYNGHLFSEFVPEKTSSYVSQNDLHIPELSVRETLDFSGCFQGTGSRL

SEQ ID NO: 1622 - protein, 1406 aa, Arabidopsis thaliana
MAHYRVSSEVENIMNRDRSHRKNEEEDEEEALKLAAMEKLQRLPTYDRARKAVLKGITGGFKEIDMKDLGLAERRELFDRVMTMDDEDWHGEYLRRLKSRFDRVSLHLPTIEVRFEDLNVTAEAYAGSKTVPTVLNSYVNLLKGIGTKIRVLPDRKKRISILNDVSGIIKPGRLTLLLGPPGSGKSTLLKALSGKTETGLRSTGKVTYNGHELHEFVPERTAGYIDQYDVHLPDLTVRETLKFSAKCQGVGTGYDMLAELLRREKDLNIKPDPYLDALMKASVIKGHKEYVVTDYVLKVLGLEICADTIVGNHMKRGISGGQKKRVTTGEMLVGPVGAFFMDNISDGLDSSTTFQIVKSIKQMIHVFDKTALISLLQPPPETFELFDDVIILGEGHIVYQGPREDVLEFFEFMGFKCPERKGIADYLQEILSKKDQEQYWANPELPYRYVTAKKFEEGFKIHHFGRAMRSQLATPFDRLKNHRAALTRTTYGASKLELLKACLERESILMKRNLRTFVLKSLQLIINAILIGVVFWQQKNYPSTVEDGIIYMGAIYLEVQMIVFSGFFELPMTIDKLPVFYKQRHFSFYPSWAFSLPTSIITFPLSFVEVFIVVLITYFTIGYDLTVPSFLKHYLVLALCGQMSYGLFRCIAAVTRNHVVSNTMGCLAVMWLMTFSGYVLSRNQVHKWLTWAYWTSPMMYIQTAVSVNEFRSESWKDVISKKPFFKFSTSHFKDIKLNRVVYDFQGLGVAVLKSREYGISKTAVLPDEREEADSNNTTGRDYTGTTMERFFDRVVTTRTCNDKKLRIPFKPLYMTFENITYSVDTPKEMKEKGIRENKLVLLNGLSGAFRPGVLTALMGVSGAGKTTLMDVLAGRKNTGYIQGEIYVSGFPKKQDSFARVSGYCEQSDIHSPLLTVYESLLYSAWLRLPPDIDTHTREVMELIELKALREMLVGYVGISGLSTEQRKRMTIAVELVANPSILFMDEPTSGLDARAAAIVMRTVRNTVDTGRTVVCTIHQPSIDIFESFDELFLLTRGGEEIYVGPIGHHSSQLIEYFEGIRGVGKIKEGYNPATWALEVTTRAQEDVLGVTFAQVYKKSNLYRRNKDLIKELNNIPPHAQDIHFSTKYSQSYLSQFQACLWKQHKSYWRNVPYNAVRFSFGAAVGIMYGIIFWSLGKRKGTRQDIFNSVGAMSTVVGFLSSQSAATVRPVVIAERTVFYREAGAGMYSALPYAFSQVIIEIPYTMAQACIYGVIVYGMIGYEWTASKFFLNIFFTFISILYSIYTGIMVISVSPNQEIASILNGVISTSWNVFSGFTIPRPRMHVWLRWFTYVCPGWWGLYGLTIAQYGDVETRLDTGETVVEFMKNYYGYEYNFLWVVSLTLIAFSMFFVFIYAFSVKILNFQKR

SEQ ID NO: 1623 - protein, 1168 aa, Arabidopsis thaliana
MSQTDGVEFASRNTNENGHDDDDQLRSQWVAIERSPTFERITTALFCKRDEKGKKSQRRVMDVSKLDDLDRRLFIDDLIRHVENDNHVLLQKIRKRIDEVGIDLPKIEARFSDLFVEAECEVVYGKPIPTLWNAISSKLSRFMCSNQAKKISILKGVSGIIRPKRMTLLLGPPSCGKTTLLLALSGRLDPSLKTRGDISYNGHLFSEFVPEKTSSYVSQNDLHIPELSVRETLDFSGCFQGTGSRLEMTKEISRREKLKGIVPDPDIDAYMKILGLTICADTRVGDASRPGISGGQKRRLTTGEMIVGPIKTLFMDEISNGLDSSTTFQILSCLQQFARLSEGTILVSLLQPAPETFELFDDLILMGEGKIIYHGPRDFVCSFFEDCGFKCPNRKSVAEFLQEVISRKDQEQYWCHIEKTYCYVSIESFIEKFKKSDLGLELQDRLSKTYDKSQTQKDGLCFRKYSLSNWDMLKACSRREFLLMKRNSFVYVFKSGLLIFIGFIAMTVYLRTGSTRDSLHANYLMGSLFFSLFKLLADGLPELTLTISRIAVFCKQKELYFYPAWAYAIPSAILKIPISFLESFLWTMLTYYVIGYSPEMGRFIRQFLILFALHLSCISMFRAIAAVFRDFVVATTVGSISIVLLSVFGGFIVRKPSMPSWLEWGFWLSPLSYAEIGLTANEFFAPRWGKITSENRTLGEQVLDARGLNFGNQSYWNAFGALIGFTLFFNTVFALALTFLKSAFKPGVLTALMGVSGAGKTTLLDVLSGRKTFGDIKGQIEVGGYVKVQDTFSRVSGYCEQFDIHSPNLTVQESLKYSAWLRLTSNISSETKCAIVNEVLETIELEEIKDSIVGIPGISGLTTEQRKRLTIAVELVSNPSIIFMDEPTTGLDARAAAIVMRAVKNIAETGRTVVCTIHQPSIDIFEAFDELILMKNGGKIIYYGPLGQHSSKVIEYFMRIHGVPKLKENSNPATWILDITSKSSEDKLGVDLAQMYEESTLFKNNQQDLFNVFGSMFTVVLFSGINNCSTVLFSVATERNVFYRERFSLVVTPNVHIAFTLRSSFYAIVNLFAGYVMPKPNIPRWWIWMYYLSPTSWVLNGLLTSQYGDMEKEILAFGEKKKVSDFLEDYFGYRYDSLALVAVVLIAFPILLASLFAFFIGKLNFQKK

SEQ ID NO: 1624 - protein, 472 aa, Arabidopsis thaliana
MELVELESLKDAVVGLPGITGLSTEQRKRLTIAVELVANPSIIFMDEPTSGLDARAAAIVMRTVRNTVDTGRTVVCTIHQPSIDIFEAFDELLLLKRGGQVIYAGPLGQNSHKIIEYFQAIHGVPKIKEKYNPATWMLEVSSMAAEAKLEIDFAEHYKTSSLYQQNKNLVKELSTPPQGASDLYFSTRFSQSLLGQFKSCLWKQWITYWRTPDYNLARFFFTLAAAVMLGSIFWKVGTKRENANDLTKVIGAMYAAVLFVGVNNSSSVQPLIAVERSVFYRERAAEMYSALPYALAQVVCEIPYVLIQTTYYTLIIYAMMCFEWTLAKFFWFYFVSFMSFLYFTYYGMMTVALTPNQQVAAVFAGAFYGLFNLFSGFVIPRPRIPKWWIWYYWICPVAWTVYGLIVSQYGDVEDTIKVPGMANDPTIKWYIENHYGYDADFMIPIATVLVGFTLFFAFMFAFGIRTLNFQQR

SEQ ID NO: 1625 - protein, 1459 aa, Monilinia fructicola
MAANEAEGFTSIVRRERPVSAISRPVSGLSRVLSTSSAFSERRASRLYDDFDEDNKDEPISMAEDWGLMPEIQAMREQGEKDQVKRRDLGVTWRNLTVKGIGADAAINENVGSQFNIPKIIKEGRASPPLRTLVDSSHGCVKPGEMLLVLGRPGAGCTTLLKMLANNRAGYAEVTGDVHFGSLNHTEAHQYRGQIVMNTEDELFFPTLTVGQTIDFATRMKGPHNLPSNQSTPLEYQQRSRDFLLKSMGISHTHETKVGNEYVRGVSGGERKRVSIIETLATRGSVMCWDNSTRGLDASTALEYTKAVRALTDIFGLASIVTLYQAGNGIYNLFDKVLVLDEGKQIYYGPMKQARPFMEDLGFICDDSANVADFLTGVTVPTERKIRDGFHDRFPRTADEILAAYNNHPIKSEMEKDYDYPNTAVAKQRTSDFRESVQHEKYPRLSKKSPLTTSFTTQVKACIIRQYQIIWGDKATFIIKQLSTLAQALIAGSLFYNAPNNSAGLFVKSGALFLSLLFNALLAMSEVTDSFSGRPVLAKHKAFALYHPAAFCIAQIAADIPVLFVQISHFSLVMYFMVGLRQDAGAFFTYWVIIFATTMCMTALFRAVGAGFSTFDAASKVSGFLISALIMYTGYMIQKPDMHPWFVWIYWIDPLAYGFSAVLANEFKGQIIPCVGTNLVPNGPGYADLTYQACAGVGGALPGAVSVTGEQYLNSLSYSTDNIWRNFGILWAWWVLFVGLTIYCTSNWSSSAGKSGFLLIPREKAHHNASVLKAANAGDEESGAAQEKRQQDVHSASEDTKVGDENDDQLMRNTSVFTWKNLTYTVKTPSGDRVLLDNVQGWVKPGMLGALMGSSGAGKTTLLDVLAQRKTDGTIKGSILVDGRPLSVSFQRSAGYCEQLDVHEPFATVREALEFSALLRQSRTIPEAEKLKYVDTIIDLLEMHDIENTLIGTTGAGLSIEQRKRLTIGVELVSKPSILIFLDEPTSGLDGQAAFNTVRFLRKLADVGQAILVTIHQPSAQLFAQFDSLLLLAKGGKTVYFGDIGENSQTIKEYFARYDAPCPESSNPAEHMIDVVSGSLSKGKDWNEVWLNSPEYQYTVTELDRIINTAAAAPPGTSDDGFEFAMPMWQQIKLVTNRMNVSIYRNTEYINNKFALHIGSALFNGFSFWMIKDSVGGLQLRLFTIFNFIFVAPGVMAQLQPLFLERRDIYEVREKKSKMYSWWAFATGNVVSELPYLCICAVLYFVCWYYTGGFPSDSNKAGAVLFVMICYEFIYTGIGQFVAAYAPNVVFASLVNPLVIGTLVSFCGVLVPYAQITAFWRYWMYYLNPFNYLMGSLLVFTTWDTPVRCRESEFAIFNPASGTCGEYLSSYLQGMGAAANLTNPDATSGCRVCEYRSGKDYLQSLNLQTYSYGWRDAGICALFVFSGYALVFLLMKLRTKKNKGAEVGWPRGGVSTIVY

SEQ ID NO: 1626 - protein, 1038 aa, Glycine max
  unsure (1)..(1038): unsure at all Xaa locations
XVVFRCPERKGTADFLQEVTLWKDQEQYWADKNMPYRYVTVTEFANKFKRFHVGIRLESELSVAFDKSSAHKAALVYSKNSVPTMDLFKACWDKEWLLIKRNSFVYIFKTAQIIFIAFIAATLWLXRTEMHRNNEDDAALYIGAILFTMIMNMFNGFAELALTIGRLPVFYKHRDHLFHPAWTYTLPNFLLRIPISVFESLVWVGVTYYIIGFAPDASRFFKQLLLVFLIQQMAAGMFRVISGVCRTMIIANTGGALMLLLVFLLGGFILPKREIPDWWVWAYWVSPLTYGFNALSVNEMLAPRWMHPQTSSDKNTTLGLSVLRNFDVYAKKDWYWIGAAALLGFTVLYNVLFTLALMYLNPLGKKQAIISEEDASEMESGGESMLRSLSTADGNNSREVAMQRMGSQATNDSATGVAPKKGMILPFQPLAMSFDTVNYYVDMPAEMRDQGXVTEDRLQXLLRGVTSSFRPGVLTALMGVSGAGKTTLMDVLAGRKTGGYIEGDIRISGFPKNQETFARVSGYCEQTDIHSPQVTIRESLLYSAYLRLPKDVFMFENQQPVGXHGVYLLEXDNLKDAITALPRVTGLSTHHQKRPSIAVELVANPSIIYMDEPTYGLDARAAAIVMMTDTNTVDTLRDSFCTIHQPXSIDIFEAFDELLLMKRGGQVIYSGPLGRNSHKITEYFEAIPGVPKIKEMYNPATWMLEVSSVAAEVRLGMDFAEYYKTSSLFQRNKALVKELSTPPPGATDLYFPTKYSQSTLGQFKSCFWKQWLTYWRSPDYNLVRYFFTLACALMIGTVFWRIGKHRESSADLTMIIGAMYAAVIFVGINNCQTVQPIVAVERTVFYRERAAGMYAPLPYALAQVFCEIPYVFFQTVYYSLIVYAMVSFEWKVEKFFWFFFVSFFSFLYFTYYGMMTVSITPNHQVASIFAAAFYGLFNLFSGFFIPRPKIPKWWVWYYWICPVAWTVYGLIVSQYRDIEDPLFVPGSTTQITVKGYIEDHYGFKSDFMGPVAAVLVAFTVFFAFVFSFCIKALNFQTR

SEQ ID NO: 1627 - protein, 797 aa, Glycine max
  unsure (1)..(797): unsure at all Xaa locations
LTYYVIGFDPSRXGIPKQHLILLFIGQMASALFRAIAALGRNMIVSNTFGAFAVLTFLTLGGYVMSKNDIKNWWIWGYWISPLMYGQNALMVNEFLSNSWHNTSRNLGVEYLESRGFPSSSYWYWLGLGAMAGFVLLFNVMFSAALEILGPFDRPQATITEEESPNEGTVASGRGDSVVESSHGKKKGMVLPFEPHSITFDEVIYSVDMPQEMKEQGVQEDRLVLLKGVSGAFRPGVLTALMGVSGAGKTTLMDVLAGRKTGGYIDGSIKISGYPKKQETFARISGYCEQNDIHSPHVTVYESLLYSAWLRLPSGVDSKTRKMFIEEVMELVELNPLRNSLVGLPGVSGLSTEQRKRLTIAVELVANPSIIFMDEPTSGLDARAAAIVMRTVRNTVDTGRTVVCTIHQPSIDIFEAFDELFLMKRGGQEIYVGPLGRHSTHLIKYFESIGGVSKIKDGYNPATWMLEVTTSAQELSLGVDFTDLYKNSDLYRRNKQLIQELGQPAPGSKDLYFPTQYSQSFLVQCQACLWKQRWSYWRNPPYTAVRFFFTTFIALMFGTMFWDLGSRRTTRGDLLNALGSMYSAVLFLGIQNASSVQPVVAVERTVFYREKAAGMYSALPYAFAQVLVEIPYIFAQAVTYGLIVYAMIGFDWTAEKFFWYLFFSFFSLLYFTFYGMMAVGVTPNHHVAAIVAAAFYAIWNLFSGFIVVRPKMPVWWRWYYWACPVAWTLYGLIASQFGDITERMPGEDNKMVKEFIEDYFGFKHDFVGICAVVVAGIAVAFALIFGAAIKTFNFQKR

SEQ ID NO: 1628 - protein, 658 aa, Glycine max
  unsure (1)..(658): unsure at all Xaa locations
XQPKMSRALVSKKRLSQLRERETSNSVELKSVTVDIGHTPRENQSTGKMVLPFEPLSIAFKDVQYFVDIPPEMKKHGSDEKRLQLLCDITGAFRPGILTALMGVSGAGKTTLMDVLSGRKTGGIIEGDIRIGSYPKVQKTFERVSGYCEQNDIHSPYITVEESVTYSAWLRLPTEIDSVTKGKFVEEVLETIELDGIKDCLVGIPRQSGLSTEQRKRLTIAVELVSNPSIIFMDEPTSGLDARAAAVVMRAVKNVVATGRTTVCTIHQPSIDIFETFDELILMKSGGRIIYSGMLGHHSSRLIEYFQNIPGVPKIKDNYNPATWMLEATSASVEAELKIDFAQIYKESHLCRDTLELVRELSEPLPGSKDLHFSTRFPQNSLGQFMACLWKQHLSYWRSPEYNLTRFIFMIVCAIIFGAVFWXKGKKINNQQDLFNVLGSMYIAVIFLGLNYCSTILPYVATERAVLYREKFAGMYSSTAYSFAQVVIEIPYILVQSILYVAITYPMIGFHWSVQKVFWYFYTTFCTFLYFVYLGMMVMSMSSNLDIASVLSTAVYTIFNLFSGFLMPGPKIPKWWVWCYWICPTAWSLNGLLTSQYGDIEKEVLVFGERKSVGSFLRDYYGFRHDRLSLVAVVLIVYPIVYASLFAYFIXKMNYQKR

SEQ ID NO: 1629 - protein, 613 aa, Glycine max
  unsure (1)..(613): unsure at all Xaa locations
LPFQPXAIFFSNINYYVDVPLELKQQGIVEDKLQLLVNVTGAFRPGVLTALVGVSGAGKTTLMDVLAGRKTGGVIEGSVYISGYPKRQDSFARISGYCEQTDVHSPCLTVWESLLFSAWLRLSSDVDLETQKAFVEEVMELVELTPLSGALVGPTMISXDGLSTERRKRLTIAVELVAXNPSIVFMDEPTSGLDARAAAIVMRTVRNIVNTGRTIVCTIHQPSIYIFGFAQEFFXRKRGGELIYAGPLGPKSSELISYFEAIEGVPKIRSGYNPATWMLEATSSVEENRLGVDFAEIYRKSSLYQYNQELVERLSKPSGNSKELHFPTKYCRSSFEQFLTCLWKQNLCYWRNPQYTAVRFFYTVIISLMLGSICWRFGAKRETQQDLFNAMGSMYSAILFIGITNGTAVQPVVSVERFVSYRERAAGMYSALSFAFAQVVIEFPYVFAQAIIYSSIFYSMASFVWTFDRFIWYLFFMYFTMLYFTFYGMMTTAVTPNHNVAAIIAAPFYMLWNLFSGFMIPHKRIPIWWRWYYWANPVAWSLYGLLTSQYGGDTHLVKLSNGXXSMTIREVLKHVFGYRHDFLCVTAVMVAGFCIFFAIIFAFAIKSFNFQRR

SEQ ID NO: 1630 - protein, 556 aa, Glycine max
  unsure (1)..(556): unsure at all Xaa locations
GWLGLGAMAGFVLLFNVMFSAALEILGPFDKPQATITEEESPNEGTVAEVELPRIESSGRGDSVVESSHGKKKGMVLPFEPHSITFDEVIYSVDMPQEMKEQGVQEDRLVLLKGVSGAFRPGVLTALMGVSGAGKTTLMDVLAGRKTGGYIDGSIKISGYPKKQETFARISGYCEQNDIHSPHVTVYESLLYSAWLRLPSGVDSKTRKMFIEEVMELVELNPLRNSLVGLPGVSGLSTEQRKRLTIAVELVANPSIIFMDEPTSGLDARAAAIVMRTVRNTVDTGRTVVCTIHQPSIDIFEAFDELFLMKRGGQEIYVGPLGRHSTHLIKYFESIGGVSKIKDGYNPATWMLEVTTSAQELSLGVDFTDLYKNSDLYRRNKQLIQELGQPAPGSKDLYFPTQYSQSFLVQCQACLWKXRWSYWXXSLLYXTFYGMMAVGVTPNHHVAAIVAAAFYAIWNLFSGFIVVRPKMPVWWRWYYWACPVAWTLYGLIASQFGDITERMPGEDNKMVKEFIEDYFGFKHDFVGICAVVVAGIAVAFALIFGAAIKTFNFQKR

SEQ ID NO: 1631 - protein, 272 aa, Glycine max
  unsure (1)..(272): unsure at all Xaa locations
YMKCYFIQLLLQELNHQGIVEDKLQLLVNVTGAFRPGVLTALVGVSGAGKPTLMDVLAGRXTGGVIEGSVYISGYPKRQDSFARISGYCEQTDVHSPCLTVWESLLFSAWLRLSSDVDLETQKAFVEEVMELVELTPLNGALVGLPGIDGLSTEQRKRLTIAVELVANPSIVFMDEPTSGLDARAAAIVMRTVRNIVNTGRTIVCTIHQPSIDIFESFDELLFMKRGGELIYAGPLGPKSCELISYFEXSVDARLAFTEQVVYGRMVIKQSX

SEQ ID NO: 1632 - protein, 420 aa, Glycine max
  unsure (1)..(420): unsure at all Xaa locations
XARDLFYPGWAWSLATWILGVPYSLVEAVIWSCVVYYTVGFAPAPGRFFRYMLLLFMLHQMALGLFRFMAALARDMAIANTFGTAALMIIFLLGGFIIPKGMIKPWWIWGYWLSPLTYGQRAISVNEFTATRWMQHSAFGSNTVGLNILKGFDIPAEDYWYWVGLGVLTLYALIFNCLVTLGLSYLNPLQKARAILLGDEDERVLIKMDLNLVVMXGKAKGMSLPFEPMTMTFHGVNYYVDMPKEIANQGIAETRLKLLSNVSGVFAPGVLTALMGSSGAGKTTLMDVLAGXXXGGIIEGDIRIGGYPKVQKTFERVSGYCEQNDIHSPYITVEESVTYSAWLRLPTEIDSVTKGKFVEEVLETIELDGIKDCLVGIPGQSGLSTEQRKRLTIAVELVSNPSIIFMDEPTSGLDARAAAX

SEQ ID NO: 1633 - protein, 724 aa, Glycine max
  unsure (1)..(724): unsure at all Xaa locations
MRNSEAPTHGGMMEIEATTRPSAGNGSTITLPGLSPLSETLWREKANTAEIIGDVSARLTWKDLTVMVTLSNGETQNVLEGLTGYAEPGTFTALMGPSGSXKSTLLDALSSRLAAKALLSGTILLNGRKAKLSFGTAAYVTHDDNXIGTLTVRETISYSARLRLPDNMPWADKRALVESTIVAMGLQDCADTVIGNWHLRGISGGEKRRVSIALEILMRPRLLFLDEPTSGLDSASAFFVTQTLRALARDGRTVIASIHQPSSEVFELFDQLYLLSSGKTVYFGQASEAYEFFAQAGFPCPALRNPSDHFLRCINSDFDKVKATLKGSMKLRFEGSDDPLDRITTAEAIRTLIDFYRTSQHSYAARQKVDEISKVKGTVLEAGGSEASFLMQSYTLTKRSFINMSRDFGYYWLRLVIYIVVTVCIGTIYLNVGTGYNSILARGSCASFVFGFVTFMSIGGFPSFVEDMKVFQRERLNGHYGVTSFVISNTLSAMPFLILITFLSGTICYFMVRLHPGFWHYLFFVLCLYASVTVVESLMMAIASIVPNFLMGIIIGAGIQGIFMLVSGYFRLPHDIPKPVWRYPMSYISFHFWALQGQYQNDLRGLIFDNQTPDLPKIPGEYILEKVFQIDVNRSKWINLSVIFSMIVIYRIIFFIMIKVNEDVTPWIRGYLARRRMQQKSGAQNTTIAPDVLTQSPSLRTYVSTQTKXRHQKFDSNNEAFIIK

SEQ ID NO: 1634 - protein, 625 aa, Glycine max
  unsure (1)..(625): unsure at all Xaa locations
XDNFIYKXASADAVLDPRIXVSSKWENRMTLXLTWENLEATVTNGKNRXXLILHGLTGYAQPGRLLAIIGPSGSGKSTLLDALAGRLTSNIKQTGKILINGHKQELAYGTSGYVTQDDAMLSCLTAGETLYYSAMLQFPNTMSVEEKKERADMTLREMGLQDAINTRVGGWNCKGLSGGQRRRLSICIEILTHPKLLFLDEPTSGLDSAASYYVMSGIANLIQRDGIQRTIVASVHQPSSEVFQLFHDLFLLSSGETVYFGPASDANQFFASNGFPCPPLYNPSDHYLRIINKDFNQDADEGITTEEATKILVNSYKSSEFSNHVQSEIAKSETDFGACGKKKKIHAAFITQCLILIRRASLQIYRDTNNYWARLVVFIFISLSVGSYXFFHSGGPDLRSIMDRGSLLCFFVSVVTFPPLRPLPPFVREMKVFKRERLNGHYGITAFLISNIFSAVPYNFLMSIIPGAVVTYLSGLHKGVDNFVFLISVLFATVTWVESLMMVVGSVFPNYVMGVIVCGGIEGVMILTSGFYRLPNDLPKPVWKFPFYYISFLTYAFQGLLKNEFEDLPFSSEVLADTWHVQMGHSKWVDLAIMFAMIVLYRVLFLAISKVNQNKNKIVIXNLQK

SEQ ID NO: 1635 - protein, 1509 aa, Oryza sativa (japonica cultivar-group)
MADPQHVQEEAAGAEAVHAHAARHDGAVVMEILSRSLQSMPASPDVSAYFSGASSRRPSAADEVDDEEALRWAALERLPSFDRLRTGLMRADADSSGVGVGAVGRGRRWYAHREVDVRTLELAQRQAFVERVFHVAEEDNERFLKKLRARIDRAGIQMPTVEVRFRNVNVQAECHVGTRALPTLANVSRDVGESLLGLVGLNFAKRKALHILKDVSGIVRPSRMTLLLGPPSSGKTTLLLALAGKLDPTLETSGEVTYNGYGLDEFVPQKTAAYISQHDVHAGEMTVKETLDFSAKCQGVGQRYELLKELAKKERQLGIYPDPEVDLFMKATSVEGSTLQTDYILRILGLDMCADVIVGDELRRGISGGQKKRLTTAEMLVGPTKVLFMDEISTGLDSSTTFQIIRCIQQIVHMGEATVLVSLLQPAPEIFELFDDVMLLSEGQIVYQGPREHVLEFFERCGFRCPERKGVADFLQEVTSKKDQEQYWIQSEKPYRYVSVPEFVAKFKKFHMGKSLKKQLSVPFNKGKIHKSALVFSKQSVSTLELLKTSCSKEWLLMKRNSFVYIFKTVQGILVALIASTVFLRTQLNTRDEDDGQIYIGALIFVMITNMFSGFADLSLTLARLPVFYKHRDFLFYRPWTFALPNVLVRIPSSLFESIIWVAITYYTMGFAPEASRFFKHLLVVFMLQQMAAGLFRVTAGLCRTVVVTNTAGSLAVLIMFVLGGFILPKDAIPKWWVWAYWCSPLTYAYIAFSSNEMHSPRWMDKFVPDGKRLGVAVLENSGVFTNKEWYWIATGALLGFTILFNVLFSLSLMYLNPVGKPQSILPEETDSQENIQEGKNKAHIKQIITVETPEPVSPNSIITLDKVIQQLRGYSANTSDRSHSYINAAGRTAPGRGMVLPFEPLYMSFNEINYYVDMPLEMKSQGVTADKLQLLSGISGAFRPGVLTALMGVSGAGKTTLMDVLSGRKTGGYIEGEIYISGYPKNQATFARISGYCEQNDIHSPQITVRESLLFSAFLRLPKEVNDQEKKIFVDEVMELVELTGLKDAIVGLPGVNGLSTEQRKRLTIAVELVANPSIIFMDEPTSGLDARAAAIVMRTVRNTVNTGRTVVCTIHQPSIDIFEAFDELLLLKRGGQVIYSGPLGTNSHKVVEYFEAIPGVPKIEENRNPATWMLDVSSAASEVRLEIDFAEYYRSSTMHQRTKALVKELSNPPPGSDDLYFPSQYSQSTFNQFKLCLWKQWWTYWRSPDYNLVRIFFALFTALMLGTIFWRVGHKMESSKDLLVIIGSMYAAVLFVGFENSVTVQPVVAVERTVFYRERAAGMYSAIPYALAQVVVEIPYVFVETVIYTLIVYPMMSFQWTPAKFFWFFYVSFFTFLYFTYYGMMNVSVSPNLQVASILGAAFYTLFNLFSGFFIPRPKIPKWWVWYYWLCPVAWTVYGLIVSQYGDVEDFITVPGQSDQQVRPFIKDYFGYDPDFMGVVAAVLAGFTVFFAFTYAYSIRTLNFQQR

SEQ ID NO: 1636 - protein, 1457 aa, Oryza sativa (japonica cultivar-group)
MDAAGEIQKVASMRLGGSMRGDSGSMWRRGDDVFSRSSREEDDEEALRWAALEKLPTYDRVRRAILPLGGDDGAGDGGGKGVVDVHGLGPRERRALLERLVRVADEDNEKFLLKLKDRVDRVGIDMPTIEVRFEHLEAEAEVRVGNSGLPTVLNSITNTLEEAGNALGILPNRKQTMPVLHDVSGIIKPRRMTLLLGPPGSGKTTLLLALAGRLGKDLKASGKVTYNGHGMEEFVPERTAAYISQHDLHIGEMTVRETLAFSARCQGVGSRFDMLTELSRREKAANIKPDADIDAFMKAAAMGGQEANVNTDYILKILGLEICADTMVGDEMLRGISGGQRKRVTTGEMLVGPARALFMDEISTGLDSSTTFQIVNSLRQTVHILGGTAVISLLQPAPETYNLFDDIILLSDGQIVYQGPREDVLEFFESMGFKCPDRKGVADFLQEVTSKKDQRQYWARHDKPYRFVTVKEFVSAFQSFHTGRAIANELAVPFDKSKSHPAALATTRYGAPGKELLKANIDREILLMKRNSFVYMFRTFQLMVVSLIAMTLFFRTKMKRDSVTSGGIYMGALFFGVLMIMFNGFSELALTVFKLPVFFKQRDLLFYPAWSYTIPSWILKIPITFIEVGGYVFLTYYVIGFDSNVGSFFKQYLLMLAINQMAGSLFRFIGGAARNMIVANVFASFMLLIFMVLGGFILAREQVKKWWIWGYWISPMMYAQNAISVNELMGHSWNKIVNSSASNETLGVQVLKSRGVFPEARWYWIGFGAMIGFTILFNALFTLALTYLRPYGNSRQSVSEEELKEKRANLNGEIVGDVHLSSGSTRRPMGNGTENDSTIVDDDTEVTQRGMVLPFTPLSLSFDNVRYSVDMPQEMKAQGVADDRLELLKGVSGSFRPGVLTALMGVSGAGKTTLMDVLAGRKTGGYIEGSINISGYPKKQETFARVSGYCEQNDIHSPQVTVYESLLFSAWLRLPEDVDSNTRKMFIEEVMELVELKSLRDALVGLPGVNGLSTEQRKRLTIAVELVANPSIIFMDEPTSGLDARAAAIVMRTVRNTVNTGRTVVCTIHQPSIDIFEAFDELFLMKRGGEEIYAGPLGHHSSELIKYFESIPGVSKIKDGYNPATWMLEVTTIGQEQALGVDFSDIYKKSELYQRNKALIKDLSQPAPDSSDLYFPTQYSQSSLTQCMACLWKQNLSYWRNPPYNAVRFFFTTVIALLFGTIFWDLGGKVTKSQDLFNAMGSMYAAVLFIGVMNCTSVQPVVAVERTVFYRERAAGMYSAFPYAFGQVVIEIPYTLVQATVYGIIVYAMIGFEWTAAKFFWYLFFMVFTLLYFTFYGMMAVGLTPNYHIASIVSSAFYAIWNLFSGFVIPRPRVPIWWRWYCWACPVAWTLYGLVVSQFGDIETPMEDGTPVKVFVENYFGFKHSWLGWVATVVAAFAFLFASLFGFAIMKFNFQKR

SEQ ID NO: 1637 - protein, 1432 aa, Oryza sativa (japonica cultivar-group)
MDAAGEIQKVASMRLGGSMRGDSGSMWRRGDDVFSRSSREEDDEEALRWAALEKLPTYDRVRRAILPLGGDDGAGDGGGKGVVDVHGLGPRERRALLERLVRVADEDNEKFLLKLKDRVDRVGIDMPTIEVRFEHLEAEAEVRVGNSGLPTVLNSITNTLEEAGNALGILPNRKQTMPVLHDVSGIIKPRRMTLLLGPPGSGKTTLLLALAGRLGKDLKASGKVTYNGHGMEEFVPERTAAYISQHDLHIGEMTVRETLAFSARCQGVGSRFDMLTELSRREKAANIKPDADIDAFMKAAAMGGQEANVNTDYILKILGLEICADTMVGDEMLRGISGGQRKRVTTGEMLVGPARALFMDEISTGLDSSTTFQIVNSLRQTVHILGGTAVISLLQPAPETYNLFDDIILLSDGQIVYQGPREDVLEFFESMGFKCPDRKGVADFLQEVTSKKDQRQYWARHDKPYRFVTVKEFVSAFQSFHTGRAIANELAVPFDKSKSHPAALATTRYGAPGKELLKANIDREILLMKRNSFVYMFRTFQLMVVSLIAMTLFFRTKMKRDSVTSGGIYMGALFFGVLMIMFNGFSELALTVFKLPVFFKQRDLLFYPAWSYTIPSWILKIPITFIEVGGYVFLTYYVIGFDSNVGSFFKQYLLMLAINQMAGSLFRFIGGAARNMIVANVFASFMLLIFMVLGGFILAREQVKKWWIWGYWISPMMYAQNAISVNELMGHSWNKIVNSSASNETLGVQVLKSRGVFPEARWYWIGFGAMIGFTILFNALFTLALTYLRPYGNSRQSVSEEELKEKRANLNGEIVGDVHLSSGRGMVLPFTPLSLSFDNVRYSVDMPQEMKAQGVADDRLELLKGVSGSFRPGVLTALMGVSGAGKTTLMDVLAGRKTGGYIEGSINISGYPKKQETFARVSGYCEQNDIHSPQVTVYESLLFSAWLRLPEDVDSNTRKMFIEEVMELVELKSLRDALVGLPGVNGLSTEQRKRLTIAVELVANPSIIFMDEPTSGLDARAAAIVMRTVRNTVNTGRTVVCTIHQPSIDIFEAFDELFLMKRGGEEIYAGPLGHHSSELIKYFESIPGVSKIKDGYNPATWMLEVTTIGQEQALGVDFSDIYKKSELYQRNKALIKDLSQPAPDSSDLYFPTQYSQSSLTQCMACLWKQNLSYWRNPPYNAVRFFFTTVIALLFGTIFWDLGGKVTKSQDLFNAMGSMYAAVLFIGVMNCTSVQPVVAVERTVFYRERAAGMYSAFPYAFGQVVIEIPYTLVQATVYGIIVYAMIGFEWTAAKFFWYLFFMVFTLLYFTFYGMMAVGLTPNYHIASIVSSAFYAIWNLFSGFVIPRPRVPIWWRWYCWACPVAWTLYGLVVSQFGDIETPMEDGTPVKVFVENYFGFKHSWLGWVATVVAAFAFLFASLFGFAIMKFNFQKR

SEQ ID NO: 1638 - protein, 1500 aa, Oryza sativa (japonica cultivar-group)
  unsure (1)..(1500): unsure at all Xaa locations
MEKVWESGRRMSRSIGRGMGMEAWGVDEAFMPQNSGGGGGSRGRRRSGRGGTADDDEEALRWAAIERLPTYSRMRTXILSFAEEEAAAAAAGAGKQQYKEVDVRRLGVGERQEFIERVFRVAEEDNQRFLQKLRNRIDRVGIELPTVEVRFEELMVQARCHVGSRALPTLLNTARNIAEAALGLVGVRPGRQATLTILRGVSGAVRPSRMTLLLGPPSSGKTTLLLALAGKLDPSLRRGGEVTYNGFELEEFVAQKTAAYISQTDVHVGEMTVKETLDFSARCQGVGTKYDLLTELARREKEAGIRPEPEVDLFMKATSMEGVESSLQTDYTLRILGLDICADTIVGDQMQRGISGGQKKRVTTGEMIVGPTKVLFMDEISTGLDSSTTFQIVKCLQQIVHLGEATILMSLLQPAPETFELFDDIILLSEGQIVYQGPREYVLEFFESCGFRCPERKGTADFLQEVTSKKDQEQYWADKHRPYRYISVSEFAQRFKRFHVGLQLENHLSVPFDKTRSHQAALVFSKQSVSTTELLKASFAKEWLLIKRNSFVYIFKTIQLIIVALVASTVFLRTQMHTRNLDDGFVYIGALLFSLIVNMFNGFAELSLTITRLPVFFKHRDLLFYPAWIFTLPNVILRIPFSIIESIVWVIVTYYTIGFAPEADRFFKQLLLVFLIQQMAGGLFRATAGLCRSMIIAQTGGALALLIFFVLGGFLLPKAFIPKWWIWGYWVSPLMYGYNALAVNEFYSPRWMNKFVLDNNGVPKRLGIALMEGANIFTDKNWFWIGAAGLLGFTMFFNVLFTLSLVYLNPLGKPQAVISEETAKEAEGNGDARHTVRNGSTKSNGGNHKEMREMRLSARLSNSSSNGVSRLMSIGSNEAGPRRGMVLPFTPLSMSFDDVNYYVDMPAEMKQQGVVDDRLQLLRDVTGSFRPAVLTALMGVSGAGKTTLMDVLAGRKTGGYIEGDMRISGYPKNQETFARISGYCEQNDIHSPQVTVRESLIYSAFLRLPEKIGDQEITDDIKIQFVDEVMELVELDNLKDALVGLPGITGLSTEQRKRLTIAVELVANPSIIFMDEPTSGLDARAAAIVMRTVRNTVDTGRTVVCTIHQPSIDIFEAFDELLLLKRGGQVIYSGQLGRNSQKMIEYFEAIPGVPKIKDKYNPATWMLEVSSVAAEVRLNMDFAEYYKTSDLYKQNKVLVNQLSQPEPGTSDLHFPTKYSQSTIGQFRACLWKQWLTYWRSPDYNLVRFSFTLFTALLLGTIFWKIGTKMGNANSLRMVIGAMYTAVMFIGINNCATVQPIVSIERTVFYRERAAGMYSAMPYAIAQVVMEIPYVFVQTAYYTLIVYAMMSFQWTAAKFFWFFFVSYFSFLYFTYYGMMTVAISPNHEVAAIFAAAFYSLFNLFSGFFIPRPRIPKWWIWYYWLCPLAWTVYGLIVTQYGDLEQIISVPGQSNQTISYYVTHHFGYHRKFMPVVAPVLVLFAVFFAFMYAICIKKLNFQHR

SEQ ID NO: 1639 - protein, 1470 aa, Oryza sativa (japonica cultivar-group)
MAAAPSASGRRSMSWGSSISQSFRQAEADDPFGRAASQQGHDDDEENLRWAALEKLPTYDRMRRGVIRTALLHHDGGGDGGGAAAAAKDGRMELVDIQKLAAGNLGRALLDRVFQDDSERFLRRLRDRIDMVGIELPTIEVRYEQLSIQAEVFVGSRALPTLTNAATNVLQGLIGRFGSSNKRTINILQDVSGIIKPSRMTLLLGPPSSGKSTLMRALTGKLDKNLKVSGDITYCGHTFSEFYPERTSAYVSQYDLHNAEMTVRETLDFSGRCLGIGARYDMLAELARRERNAGIKPDPEIDAFMKATAVQGHKTNITTDVTLKALGLDICADIIIGDEMIRGISGGQKKRVTTGEMLTGPARALFMDEISTGLDSSSTFEIVKYIGHLVHVMNETVMISLLQPPPETYNLFDDIILLSEGYIVYHGPRENILEFFENAGFRCPERKGIADFLQEVTSKKDQQQYWYHDQERYRYVSVPEFAQRFKSFHVGQKMQKEMQIPYDKSSTHPAALTTTKYGLSSWESLRAVMSREWLLMKRNSFIYIFKVTQLIILAFMSMTVFLRTKMPSGTISDGTKFLGALTFSLITILFNGFAELQLTIKKLPVFYKHRDFLFFPAWTFGVANILLKVPVSLVEAAVWVVLTYYVMGFAPSAGRFFRQFIAFFVTHQMAMAMFRFLGAILKTMVVANTFGMFVLLIVFIFGGFLISRNDIKPWWIWGYWASPMMYSQQAISINEFLASRWAIPNTDATIDEPTVGKAILKSKGLITSDGGFWISIGALIGFLVVFNILYILALTYLSPGGSSNTIVSDEDSEDKTDMKTRNEQQMSQIVHNNGASNTSATSSIPMSGSRSTNQQSRSQIVLPFQPLSLCFNHVNYYVDMPTEMKEQGFTESRLQLLSDISGVFRPGVLTALVGVSGAGKTTLMDVLAGRKTSGVIEGDITLSGYPKKQETFARISGYCEQTDIHSPNVTVYESILYSAWLRLSSDVDTNTRKMFVDEVMSLVELDVLRNALVGLPGVSGLSTEQRKRLTIAVELVANPSVIFMDEPTSGLDARAAAIVMRTVRNTVNTGRTVVCTIHQPSIDIFESFDELLLLKRGGQVIYAGELGRHSHKLVEYFEAVPGVPKITEGYNPATWMLEVTSPIAEARLNVNFAEIYANSELYRKNQELIKELSTPPPGYQDLSFPTKYSQNFYSQCIANFWKQYRSYWKNPPYNAMRYLMTLLNGLVFGTVFWQKGTKISSQQDLFNLLGATYAATFFLGAANCITVQPVVSIERTVFYRERAAGMYSSLSYAFAQACVEVIYNILQGILYTIIIYAMIGYDWKADKFFYFMFFIVASFNYFTLFGMMLVACTPSAMLANILISFVLPLWNLFAGFLVVRPLIPIWWRWYYWANPVSWTIYGVVASQFGKNGDVLSVPGGSPTVVKQFLEDNLGMRHSFLGYVVLTHFGYIIVFFFIFGYAIKYFNFQKR

SEQ ID NO: 1640 - protein, 1468 aa, Oryza sativa (japonica cultivar-group)
MSSAGVVEMQKAASFRREGGGSMASMWLSADGNGAFSRSSSSSSRRMRGEEDDEEALRWAALQKLPTYDRVRAAILPMVEGEGGEAGGGGGGRRVVVDVHSLGPHERRALLERLVRVADDDNERFLLKLKERISRVGIDMPTIEVRFEHLEVEAEVRVGNSGIPTVLNSITNKIEEAANALGILPTRKQTLRILHDISGIIKPKRMTLLLGPPGSGKTTFLLALAGRLKDLKFSGQVTYNGHQMEDFVPQRTAAYISQHDLHIGEMTVRETLSFSARCQGVGSRFDMLTELTRREKAANIKPDADVDAFMKASAMEGQESNLITDYILKILGLEICADTMVGDDMVRGISGGQRKRVTTGEMLVGPANAFFMDEISTGLDSSTTFQIVKSLRQTIHILGGTAVISLLQPAPETYDLFDDIILLSDGHIVYQGPRENVLEFFELMGFKCPERKGVADFLQEVTSRKDQKQYWAQHDKPYRYVPIKEFASAFQSFHTGRSIANELATPFDKSKSHPAALTTSRYGVSAMELLKANIDRELLLIKRNSFVYIFRTIQLMTVSAMAMTVFFRTKMHRDSVADGVIFMGALFFAVMMIMLNGLSELPLTIFKLPVFFKQRDLLFFPAWTYTIPSWILKSPMSFIEVGGFCFMSYYVIGFDPNVGRFFKQYLLMLAVSQMAAALFRFVGGAARNLIVANVFGSFMLLIFMVLGGFILARDKVNKWWIWGYWISPMMYAQNAVSVNEFLGHSWDKVLNNSLSNETLGVQALMSRGIFPEAKWYWIGFGALLGFIMLFNILFTLALTYLKPDGKSQPSISEEELKEKQANINGNVLDVDTMASSNNLAIVGSTGTGSEIADNSQPTQRGMVLPFTPLSLTFEDIKYSVDMPQEMKAHGIVEDRLELLKGVSGCFRPGVLTALMGVSGAGKTTLMDVLAGRKTGGYIEGNISISGYPKKQETFARVSGYCEQNDIHSPQVTVSESLLFSAWLRLPKDVDSNTRKMFIEEVMELVELKPLRDALVGLPGVNGLSIEQRKRLTIAVELVANPSIIFMDEPTSGLDARAAAIVMRTVRNTVNTGRTVVCTIHQPSIDIFEAFDELFLMKRGGEEIYVGPLGHHSSELIKYFEGIQGVSKITDGYNPATWMLEVTTVSQEQALDVDFCDIYRKSELFQRNKALIQELSTPPPGSSELYFPTQYSQSFLIQCLACLWKQHLSYWRNPPYNAIRLFFTTVIALIFGTIFWDLGGKMGQSQDLFNAMGSMYAAVLFIGVLNGQSVQPVVSVERTVFYRERAAGMYSALPYAFGQVAIEFPYTLVQSVIYSIIVYSMIGFQWTVAKFFWYLFFMFFTLLYFTFYGMMAVGLTPSYHVASIVSSAFYAIWNLFTGFVISRPATPVWWRWYCWICPVAWTLYGLIVSQYGDIVTPMDDGIPVNVFVENYFDFKHSWLGFVAVVIVAFTMLFAFLFGFAIMKLNFQKR

SEQ ID NO: 1641 - protein, 1450 aa, Oryza sativa (japonica cultivar-group)
MQKAASFRREGGGSMASMWLSADGNGAFSRSSSSSSRRMRGEEDDEEALRWAALQKLPTYDRVRAAILPMVEGEGGEAGGGGGGRRVVVDVHSLGPHERRALLERLVRVADDDNERFLLKLKERISRVGIDMPTIEVRFEHLEVEAEVRVGNSGIPTVLNSITNKIEEAANALGILPTRKQTLRILHDISGIIKPKRMTLLLGPPGSGKTTFLLALAGRLKDLKFSGQVTYNGHQMEDFVPQRTAAYISQHDLHIGEMTVRETLSFSARCQGVGSRFDMLTELTRREKAANIKPDADVDAFMKASAMEGQESNLITDYILKILGLEICADTMVGDDMVRGISGGQRKRVTTGEMLVGPANAFFMDEISTGLDSSTTFQIVKSLRQTIHILGGTAVISLLQPAPETYDLFDDIILLSDGHIVYQGPRENVLEFFELMGFKCPERKGVADFLQEVTSRKDQKQYWAQHDKPYRYVPIKEFASAFQSFHTGRSIANELATPFDKSKSHPAALTTSRYGVSAMELLKANIDRELLLIKRNSFVYIFRTIQLMTVSAMAMTVFFRTKMHRDSVADGVIFMGALFFAVMMIMLNGLSELPLTIFKLPVFFKQRDLLFFPAWTYTIPSWILKSPMSFIEVGGFCFMSYYVIGFDPNVGRFFKQYLLMLAVSQMAAALFRFVGGAARNLIVANVFGSFMLLIFMVLGGFILARDKVNKWWIWGYWISPMMYAQNAVSVNEFLGHSWDKVLNNSLSNETLGVQALMSRGIFPEAKWYWIGFGALLGFIMLFNILFTLALTYLKQEELKEKQANINGNVLDVDTMASSNNLAIVGSTGTGSEIADNSQPTQRGMVLPFTPLSLTFEDIKYSVDMPQEMKAHGIVEDRLELLKGVSGCFRPGVLTALMGVSGAGKTTLMDVLAGRKTGGYIEGNISISGYPKKQETFARVSGYCEQNDIHSPQVTVSESLLFSAWLRLPKDVDSNTRKMFIEEVMELVELKPLRDALVGLPGVNGLSIEQRKRLTIAVELVANPSIIFMDEPTSGLDARAAAIVMRTVRNTVNTGRTVVCTIHQPSIDIFEAFDELFLMKRGGEEIYVGPLGHHSSELIKYFEGIQGVSKITDGYNPATWMLEVTTVSQEQALDVDFCDIYRKSELFQRNKALIQELSTPPPGSSELYFPTQYSQSFLIQCLACLWKQHLSYWRNPPYNAIRLFFTTVIALIFGTIFWDLGGKMGQSQDLFNAMGSMYAAVLFIGVLNGQSVQPVVSVERTVFYRERAAGMYSALPYAFGQVAIEFPYTLVQSVIYSIIVYSMIGFQWTVAKFFWYLFFMFFTLLYFTFYGMMAVGLTPSYHVASIVSSAFYAIWNLFTGFVISRPATPVWWRWYCWICPVAWTLYGLIVSQYGDIVTPMDDGIPVNVFVENYFDFKHSWLGFVAVVIVAFTMLFAFLFGFAIMKLNFQKR

SEQ ID NO: 1642 - protein, 1450 aa, Oryza sativa (japonica cultivar-group)
MDREVHRMASLRREGSMWRSGGDVFSRSSSRFQDEDDDEEALRWAALERLPTYDRVRRGILAVSSEDGGAGGEKVEVDVGRLGARESRALIERLVRAADDDHERFLLKLRERMDRVGIDYPTIEVRFENLEVEADVHVGNRGLPTLLNSVTNTVEAIGNALHILPNKKQPMTVLHDVSGIIKPRRMTLLLGPPGSGKTTLLLALAGKLDKDLKVSGKVTYNGHGMHEFVPERTAAYISQHDLHIGEMTVRETLAFSARCQGVGTRYEMLTELARREKAANIKPDHDIDIYMKASAMGGQESSVVTDYILKILGLDICADTVVGNEMLRGISGGQRKRVTTGEMLVGPARALFMDEISTGLDSSTTYQIVNSLRQTIHILGGTAVISLLQPAPETYNLFDDIILLSDGQVVYQGPREHVLEFFEFMGFRCPARKGVADFLQEVTSRKDQGQYWCRRDRPYRFVPVKQFADAFRSFHVGRSIQNELSEPFDRTRSHPAALATSKYGVSRKELLKATIDRELLLMKRNAFMYIFKAVNLTLMALIVMTTFFRTSMRHDRDYGMIYLGALYFALDTVMFNGFAELAMTVMKLPVFFKQRDLLFFPAWAYTIPSWILQIPITFLEVGVYVFITYYVIGFDPSVSRFFKQYLLLLALNQMSSALFRFIAGIGRDMVVSHTFGPLSLLAFAALGGFILARPDVKKWWIWGYWISPLSYAQNAISTNEFLGHSWSQILPGENVTLGVSVLKSRGIFTEAKWYWIGLGALLGYTLLFNLLYTVALSVLSPFTDSHASMSEDALKEKHANLTGEVVEGQKDTKSRKQELELSHIADQNSGINSADSSASRKGMVLPFAPLSISFNDVRYSVDMPEAMKAQGITEDRLLLLKGVSGSFRPGVLTALMGVSGAGKTTLMDVLAGRKTGGYIEGDIRISGYPKKQETFARISGYCEQNDIHSPHVTVYESLVFSAWLRLPSEVDSEARKMFIEEVMDLVELTSLRGALVGLPGVSGLSTEQRKRLTIAVELVANPSIIFMDEPTSGLDARAAAIVMRTVRNTVNTGRTVVCTIHQPSIDIFEAFDELFLMKRGGEEIYVGPVGQNSSKLIEYFEGIDGVSRIKDGYNPATWMLEVTSSAQEEMLGVDFSEIYRQSELYQRNKELIEELSTPPPGSTDLNFPTQYSRSFITQCLACLWKQNWSYWRNPSYTAVRLLFTIVIALMFGTMFWNLGTRTKKQQDLFNAMGSMYAAVLYIGVQNSGSVQPVVVVERTVFYRERAAGMYSAFPYAFGQVAIELPYIMVQTLIYGVLVYSMIGFEWTVAKFLWYLFFMYFTLLYFTFYGMMAVGLTPNESIAAIISSAFYNVWNLFSGYLIPRPKIPVWWRWYCWICPVAWTLYGLVASQFGDIQHVLEGDTRTVAQFVTDYFGFHHNFLWVVAVVHVVFAVTFAFLFSFAIMKFNFQRR

SEQ ID NO: 1643 - protein, 1417 aa, Oryza sativa (japonica cultivar-group)
MASLRREGSMWRSGGDVFSRSSSRFQDEDDDEEALRWAALERLPTYDRVRRGILAVSSEDGGAGGEKVEVDVGRLGARESRALIERLVRAADDDHERFLLKLRERMDRVGIDYPTIEVRFENLEVEADVHVGNRGLPTLLNSVTNTVEAIGNALHILPNKKQPMTVLHDVSGIIKPRRMTLLLGPPGSGKTTLLLALAGKLDKDLKVSGKVTYNGHGMHEFVPERTAAYISQHDLHIGEMTVRETLAFSARCQGVGTRYEMLTELARREKAANIKPDHDIDIYMKASAMGGQESSVVTDYILKILGLDICADTVVGNEMLRGISGGQRKRVTTGEMLVGPARALFMDEISTGLDSSTTYQIVNSLRQTIHILGGTAVISLLQPAPETYNLFDDIILLSDGQVVYQGPREHVLEFFEFMGFRCPARKGVADFLQEVTSRKDQGQYWCRRDRPYRFVPVKQFADAFRSFHVGRSIQNELSEPFDRTRSHPAALATSKYGVSRKELLKATIDRELLLMKRNAFMYIFKAVNLTLMALIVMTTFFRTSMRHDRDYGMIYLGALYFALDTVMFNGFAELAMTVMKLPVFFKQRDLLFFPAWAYTIPSWILQIPITFLEVGVYVFITYYVIGFDPSVSRFFKQYLLLLALNQMSSALFRFIAGIGRDMVVSHTFGPLSLLAFAALGGFILARPDVKKWWIWGYWISPLSYAQNAISTNEFLGHSWSQILPGENVTLGVSVLKSRGIFTEAKWYWIGLGALLGYTLLFNLLYTVALSVLSQGQKDTKSRKQELELSHIADQNSGINSADSSASRKGMVLPFAPLSISFNDVRYSVDMPEAMKAQGITEDRLLLLKGVSGSFRPGVLTALMGVSGAGKTTLMDVLAGRKTGGYIEGDIRISGYPKKQETFARISGYCEQNDIHSPHVTVYESLVFSAWLRLPSEVDSEARKMFIEEVMDLVELTSLRGALVGLPGVSGLSTEQRKRLTIAVELVANPSIIFMDEPTSGLDARAAAIVMRTVRNTVNTGRTVVCTIHQPSIDIFEAFDELFLMKRGGEEIYVGPVGQNSSKLIEYFEGIDGVSRIKDGYNPATWMLEVTSSAQEEMLGVDFSEIYRQSELYQRNKELIEELSTPPPGSTDLNFPTQYSRSFITQCLACLWKQNWSYWRNPSYTAVRLLFTIVIALMFGTMFWNLGTRTKKQQDLFNAMGSMYAAVLYIGVQNSGSVQPVVVVERTVFYRERAAGMYSAFPYAFGQVAIELPYIMVQTLIYGVLVYSMIGFEWTVAKFLWYLFFMYFTLLYFTFYGMMAVGLTPNESIAAIISSAFYNVWNLFSGYLIPRPKIPVWWRWYCWICPVAWTLYGLVASQFGDIQHVLEGDTRTVAQFVTDYFGFHHNFLWVVAVVHVVFAVTFAFLFSFAIMKFNFQRR

SEQ ID NO: 1644 - protein, 1464 aa, Oryza sativa (japonica cultivar-group)
MDAAAEMQKVVSLRRGGGGSSSRGAASMWWSADNGVFSRSRASSSGEDGEDDEEALRWAALEKLPTYDRVRRAVLPVVEEGGGGGEAGKKVVDVLSLGPQERRALLERLVRVAEDDNERFLLKLKERIDRVGIDIPTIEVRFEHLEAEAEVRVGNSGLPTVLNSMTNKLEGAANALGILPNKKQTMPILHDVSGIVKPRRMTLLLGPPGSGKTTLLLALAGRLGKDIKFSGQVTYNGHQMEDFVPQRTAAYISQHDLHIGEMTVRETLSFSARCQGVGSRFDMLTELSRREKAANIKPDADIDAFMKASAMEGQETNLITDYILKILGLDICADTMVGDDMVRGISGGQRKRVTTGEMLVGPANALFMDEISTGLDSSTTFQIVKSLRQAIHILGGTAVISLLQPAPETYDLFDDIILLSDGQIVYQGPREGVLEFFELMGFKCPERKGVADFLQEVTSRKDQKQYWMQHDKPYRYVPVKDFASAFQSFHTGKSIANELATPFDKSKNHPAALTTSRYGVSAMELLKANIDREFLLMKRNSFVYIFRACQLMVVSAIAMTVFFRTKMHRDSVTDGVIFMGALFFSVMMIMFNGLSELPLTIFKLPVFFKQRDLLFFPAWTYTIPSWILKIPMSFIEVGGFVFMSYYVIGFDPSAGRFFKQYLLMLAINQMAAALFRFVGGAARNMIVANVFGSFMLLIFMVLGGFILVREKVKKWWIWGYWISPMMYAQNAISVNEFLGHSWDKVLNNSLSNETLGVQALRSRGVFPEAKWYWIGFGALLGFIMLFNGLFTLALTYLKPYGKSQPSVSEEELKEKQANINGNVLDVDTMASSTNLAIVDNTETSSEIADNSQPTQRGMVLPFAPLSLTFDNIKYSVDMPQEMKAHGIVEDRLELLKGVSGSFRPGVLTALMGVSGAGKTTLMDVLAGRKTGGYIEGNITISGYPKKQETFARVSGYCEQNDIHSPQVTVSESLLFSAWLRLPKDVDSNTRKMFIEEVMELVELKPLRDALVGLPGVNGLSTEQRKRLTIAVELVANPSIIFMDEPTSGLDARAAAIVMRTVRNTVDTGRTVVCTIHQPSIDIFEAFDELFLMKRGGEEIYVGPLGHQSSELIKYFEGIKGVSRIKDGYNPATWMLEVSTISQEQALGVDFCDIYRKSELFQRNKALIQELSTPPPGSSELYFPTKYSLSFLNQCLACLWKMHLSYWRNPPYNAIRLFFTTVIALLFGTIFWDLGGKTGKSQDLFNAMGSMYSAVLFIGVLNSQSVQPVVSVERTVFYRERAAGMYSAFPYAFGQVAIEFPYTLVQSIIYGIIVYSMIGFKWTAAKFFWYLFFMFFTFLYFTFYGMMAVGLTPSYHVASIVSSAFYGIWNLFSGFIIPRPKVPIWWRWYCWICPVAWTLYGLVASQFGDIMTPMDDGTPVKIFVENYFDFKHSWLGVVAVVIVAFTMLFAFLFGFAIMKLNFQKR

SEQ ID NO: 1645 - protein, 1447 aa, Oryza sativa (japonica cultivar-group)
MQKVVSLRRGGGGSSSRGAASMWWSADNGVFSRSRASSSGEDGEDDEEALRWAALEKLPTYDRVRRAVLPVVEEGGGGGEAGKKVVDVLSLGPQERRALLERLVRVAEDDNERFLLKLKERIDRVGIDIPTIEVRFEHLEAEAEVRVGNSGLPTVLNSMTNKLEGAANALGILPNKKQTMPILHDVSGIVKPRRMTLLLGPPGSGKTTLLLALAGRLGKDIKFSGQVTYNGHQMEDFVPQRTAAYISQHDLHIGEMTVRETLSFSARCQGVGSRFDMLTELSRREKAANIKPDADIDAFMKASAMEGQETNLITDYILKILGLDICADTMVGDDMVRGISGGQRKRVTTGEMLVGPANALFMDEISTGLDSSTTFQIVKSLRQAIHILGGTAVISLLQPAPETYDLFDDIILLSDGQIVYQGPREGVLEFFELMGFKCPERKGVADFLQEVTSRKDQKQYWMQHDKPYRYVPVKDFASAFQSFHTGKSIANELATPFDKSKNHPAALTTSRYGVSAMELLKANIDREFLLMKRNSFVYIFRACQLMVVSAIAMTVFFRTKMHRDSVTDGVIFMGALFFSVMMIMFNGLSELPLTIFKLPVFFKQRDLLFFPAWTYTIPSWILKIPMSFIEVGGFVFMSYYVIGFDPSAGRFFKQYLLMLAINQMAAALFRFVGGAARNMIVANVFGSFMLLIFMVLGGFILVREKVKKWWIWGYWISPMMYAQNAISVNEFLGHSWDKVLNNSLSNETLGVQALRSRGVFPEAKWYWIGFGALLGFIMLFNGLFTLALTYLKQELKEKQANINGNVLDVDTMASSTNLAIVDNTETSSEIADNSQPTQRGMVLPFAPLSLTFDNIKYSVDMPQEMKAHGIVEDRLELLKGVSGSFRPGVLTALMGVSGAGKTTLMDVLAGRKTGGYIEGNITISGYPKKQETFARVSGYCEQNDIHSPQVTVSESLLFSAWLRLPKDVDSNTRKMFIEEVMELVELKPLRDALVGLPGVNGLSTEQRKRLTIAVELVANPSIIFMDEPTSGLDARAAAIVMRTVRNTVDTGRTVVCTIHQPSIDIFEAFDELFLMKRGGEEIYVGPLGHQSSELIKYFEGIKGVSRIKDGYNPATWMLEVSTISQEQALGVDFCDIYRKSELFQRNKALIQELSTPPPGSSELYFPTKYSLSFLNQCLACLWKMHLSYWRNPPYNAIRLFFTTVIALLFGTIFWDLGGKTGKSQDLFNAMGSMYSAVLFIGVLNSQSVQPVVSVERTVFYRERAAGMYSAFPYAFGQVAIEFPYTLVQSIIYGIIVYSMIGFKWTAAKFFWYLFFMFFTFLYFTFYGMMAVGLTPSYHVASIVSSAFYGIWNLFSGFIIPRPKVPIWWRWYCWICPVAWTLYGLVASQFGDIMTPMDDGTPVKIFVENYFDFKHSWLGVVAVVIVAFTMLFAFLFGFAIMKLNFQKR

SEQ ID NO: 1646 - protein, 1479 aa, Oryza sativa (japonica cultivar-group)
MSSAGVVEMQKAASFRREGGGSMASMWLSADGNGAFSRSSSSSSRRMRGEEDDEEALRWAALQKLPTYDRVRAAILPMVEGEGGEAGGGGGGRRVVVDVHSLGPHERRALLERLVRVADDDNERFLLKLKERISRVGIDMPTIEVRFEHLEVEAEVRVGNSGIPTVLNSITNKIEEAANALGILPTRKQTLRILHDISGIIKPKRMTLLLGPPGSGKTTFLLALAGRLKDLKFSGQVTYNGHQMEDFVPQRTAAYISQHDLHIGEMTVRETLSFSARCQGVGSRFDMLTELTRREKAANIKPDADVDAFMKASAMEGQESNLITDYILKILGLEICADTMVGDDMVRGISGGQRKRVTTGEMLVGPANAFFMDEISTGLDSSTTFQIVKSLRQTIHILGGTAVISLLQPAPETYDLFDDIILLSDGHIVYQGPRENVLEFFELMGFKCPERKGVADFLQEVTSRKDQKQYWAQHDKPYRYVPIKEFASAFQSFHTGRSIANELATPFDKSKSHPAALTTSRYGVSAMELLKANIDRELLLIKRNSFVYIFRTIQLMTVSAMAMTVFFRTKMHRDSVADGVIFMGALFFAVMMIMLNGLSELPLTIFKLPVFFKQRDLLFFPAWTYTIPSWILKSPMSFIEVGGFCFMSYYVIGFDPNVGRFFKQYLLMLAVSQMAAALFRFVGGAARNLIVANVFGSFMLLIFMVLGGFILARDKVNKWWIWGYWISPMMYAQNAVSVNEFLGHSWDKVLNNSLSNETLGVQALMSRGIFPEAKWYWIGFGALLGFIMLFNILFTLALTYLKPDGKSQPSISEEELKEKQANINGNVLDVDTMASSNNLAIVGSTGTGSEIADNSQPTQRGMVLPFTPLSLTFEDIKYSVDMPQEMKAHGIVEDRLELLKGVSGCFRPGVLTALMGVSGAGKTTLMDVLAGRKTGGYIEGNISISGYPKKQETFARVSGYCEQNDIHSPQVTVSESLLFSAWLRLPKDVDSNTRKMFIEEVMELVELKPLRDALVGLPGVNGLSIEQRKRLTIAVELVANPSIIFMDEPTSGLDARAAAIVMRTVRNTVNTGRTVVCTIHQPSIDIFEAFDELFLMKRGGEEIYVGPLGHHSSELIKYFEGIQGVSKITDGYNPATWMLEVTTVSQEQALDVDFCDIYRKSELFQRNKALIQELSTPPPGSSELYFPTQYSQSFLIQCLACLWKQHLSYWRNPPYNAIRLFFTTVIALIFGTIFWDLGGKMGQSQDLFNAMGSMYAAVLFIGVLNGQSVQPVVSVERTVFYRERAAGMYSALPYAFGQVAIEFPYTLVQSVIYSIIVYSMIGFQWTVAKFFWYLFFMFFTLLYFTFYGMMAVGLTPSYHVASIVSSAFYAIWNLFTGFVISRPLNSIFPGPCAQATPVWWRWYCWICPVAWTLYGLIVSQYGDIVTPMDDGIPVNVFVENYFDFKHSWLGFVAVVIVAFTMLFAFLFGFAIMKLNFQKR

SEQ ID NO: 1647 - protein, 1444 aa, Oryza sativa (japonica cultivar-group)
MDIVRMGSVASGGGSVRRTASSWRGTSGRSDAFGRSVREEDDEEALKWAAIEKLPTYDRMRKGILTAGGVEEVDIGGLGLQERRNLIERLVRTAEEDNERFLLKLRDRMERVGIDNPTIEVRFENLSIDAEAYVGNRGIPTFTNFFSNKIMDVLSAMRIVSSGKRPISILHDISGIIRPGRMSLLLGPPGSGKTSLLLALAGKLDSTLKVSGRVTYNGHDMDEFVPQRTSAYIGQHDLHIGEMTVRETLAFSARCQGVGTRYDMLTELSRREKEASIKPDPDIDVYMKAISVEGQESVVTDYILKILGLEICADTMVGDAMIRGISGGQKKRVTTGEMLVGPAKALFMDEISTGLDSSTTYQIVNSLRQSVHILGGTALIALLQPAPETYDLFDDIVLLSEGQIVYQGPRENILEFFEAMGFKCPERKGVADFLQEVTSRKDQHQYWCRRDEPYRYISVNDFSEAFKEFHVGRNLGSELRVPFDRTRNHPAALTTSRYGISKMELTKACFSREWLLMKRNSFVYIFKILQLIILGSIGMTVFLRTKMHRRSVEDGAIFLGAMFLGLVTHLFNGFAELAMSIAKLPIFYKQRDLLFYPSWAYALPTWVLKIPISFLECAVWICMTYYVMGFDPNIERFFRHYVLLVLISQMASGLFRLLAALGREMVVADTFGSFAQLILLVLGGFLISRENIKKWWIWGYWSSPLMYAQNAIAVNEFLGHSWNKVVDPTQSNDTLGVQVLKVRGIFVDANWYWIGVGALLGYIMLFNILFILFLEWLDPLGKGQAVVSEEELREKHVNRTGENVELLTLGTDSQNSPSDANAGRGEITGADTRKRGMVLPFTPLSITFDNIRYSVDMPQEMKDKGVTEDRLLLLKGVSGAFRPGVLTALMGVSGAGKTTLMDVLAGRKTGGYIEGDISISGYPKKQETFARIAGYCEQNDIHSPHVTVYESLLYSAWLRLPSEVDSEARKMFVEEVMELVELTSLRGALVGLPGVNGLSTEQRKRLTIAVELVANPSIIFMDEPTSGLDARAAAIVMRTVRNTVDTGRTVVCTIHQPSIDIFEAFDELFLMKRGGEEIYVGPLGHNSCHLINYFEGIQGVRKIKDGYNPATWMLEVTTLAQEDILGINFAEVYRNSDLYQRNKTLISELSTPPPGSTDLHFPTQFSQPFFTQCMACLWKQHKSYWRNPSYTATRIFFTTVIALIFGTIFLNLGKKINKRLDLFNSLGSMYAAVLFIGIQNGQTVQPIVDVERTVFYREKAAGMYSALPYAFAQVLIEIPHIFLQTVVYGLIVYSLIGFDWTVEKFFWYMFFMFFTFMYFTFYGMMAVAMTPNSDIAAIVSTAFYCIWNIFAGFLIPRPRIPIWWRWYSWACPVAWTLYGLVASQYGDITNSTLEDGEVVQDYIRRYFGFRHDYLGYVATAVVGFAALFAFVFAFSIKVFNFQRR

SEQ ID NO: 1648 - protein, 1468 aa, Oryza sativa (japonica cultivar-group)
MEFREEAGSVRKRAPRAFHQVEAEDPFRRAQSMRGHDEEEEDLRWAALEKLPTYDRMRRGVVRSALLRDGDDDHKDDDDAGTGKAVELVDIGRLATGDAARALVERLLQDDSERFLRRLRDRIDMYARYERNGKGISGEWGKQNQGGEGIGEEEKNNSGEMETQENLRMEIEENLNINMGGERGAVHGRIRDELSWQGNRSADLRMTLLLGPPSSGKSTLMRALTGKLDKNLKVFGNITYCGHKFSEFYPERTSAYVSQYDLHNAEMTVRETLDFSRWCLGIGSRYDMLTEISRRERNAGIKPDPEIDAFMKATAMQGQETNIITDLILKVLGLDICADTIVGDEMIRGISGGQMKRVTTGEMLTGPARALLMDEISTGLDSSSTFHIVKFIRHLVHIMNETVMISLLQPPPETYNLFDDIVLLSEGYIVYHGPRENILEFFEASGFRCPQRKAVADFLQEVTSKKDQQQYWFLDKEPYCYVSVPEFAERFKSFYIGQQMMKEQHIPFEKSKIHPAALTTMKNALSNWESLKAVLCREKLLMKRNSFLYIFKVTQLIILAFLSMTVFLRTKMPHGQFSDGTKFLGALTFNLITVMFNGLSELNLTVKKLPVFYKHRDFLFFPPWTFGVANILIKVPVSLVEATVWVVITYYVMGFAPAAGRFFRQFLAFFVTHLMAMALFRFLGAILQTMVIAISFGMLVLLIVFVFGGFVIRKNDIRPWWIWCYWASPMMYSQNAISINEFLASRWAIPNNDTTIDAKTVGEAILKSKGLFTGEWGFWLSIGALVGFIILFNTLYILALTYLSPIRSANALVIDEHNETELYTETRNEEHRSRTSTTTSSIPTSANGEGNRPTQSQFVLPFQPLSLCFNHLNYYVDMPSEMKQQGLMESRLQLLSDISGAFRPGLLTALVGVSGAGKTTLMDVLAGRKTSGTIEGSITLSGYSKKQETFARISGYCEQADIHSPNVTVYESILYSAWLRLPSDVDSNTRKMFVEEVMALVELDVLCNAMVGLPGVSGLSTEQRKRLTIAVELVANPSIIFMDEPTSGLDARAAAIVMRTVRNTVNTGRTVVCTIHQPSIDIFESFDELLLLKRGGRVIYAGELGDHSHKLVEYFETILGVPSITEGYNPATWMLEVSSTLEEARMNVDFAEIYANSLLYRKNQELIEELSIPPPGYRDLLFATKYSQSFYIQCVANLWKQYKSYWKNPSYNSLRYLTTFLYGLFFGTVFWQKGTKLDSQQDLYNLLGATYAAIFFIGATNCMSVQPVVSIERAVYYRESAAGMYSPLSYAFAQASVEFIYNIIQGILYTVIIYAMIGYDWKASKFFYFLFFIVSSFNYFTFFGMMLVACTPSALLANILITFALPLWNLFAGFLIFRKAIPIWWRWYYWANPVSWTIYGVIASQFGGNGGSISVPGGSHVAMSQILEDNVGVRHDFLGYVILAHFGFMAAFVLIFGYSIKFLNFQKR

SEQ ID NO: 1649 - protein, 1441 aa, Oryza sativa (japonica cultivar-group)
MEDKKQQQQQQREEAEAEEEAPVVPSSLRAAATCRSLSSLSSSLRWDHRGDDDEEEAELRWAAIERLPTLDRMRTSVLSSEAVDVRRLGAAQRRVLVERLVADIQRDNLRLLRKQRRRMERVGVRQPTVEVRWRNVRVEADCQVVSGKPLPTLLNTVLATARGLSRRPHARIPILNDVTGILKPSRLTLLLGPPGCGKTTLLLALAGKLDKNLKVTGEVEYNGANLNTFVPEKTSAYISQYDLHVPEMTVRETLDFSARFQGVGTRAEIMKEVIRREKEAGITPDPDIDTYMKAISVEGLERSMQTDYIMKIMGLDICADIIVGDIMRRGISGGEKKRLTTGEMIVGPSRALFMDEISTGLDSSTTFQIVSCLQQVAHISESTILVSLLQPAPETYDLFDDIILMAEGKIVYHGSKSCIMNFFESCGFKCPERKGAADFLQEVLSKKDQQQYWSRTEETYNFVTIDHFCEKFKASQVGQNLVEELANPFDKSEVYNNALSLNIYSLTKWDLLKACFAREILLMRRNAFIYITKVVQLGLLAVITGTVFLRTHMGVDRAHADYYMGSLFYALILLLVNGFPELAIAVSRLPVFYKQRDYYFYPAWAYAIPSFILKIPLSLVESITWTSISYYLIGYTPEASRFFCQLLILFLVHTGALSLFRCVASYCQTMVASSVGGTMSFLVILLFGGFIIPRLSMPNWLKWGFWISPLSYAEIGLTGNEFLAPRWLKTTTSGVTLGRRVLMDRGLDFSSYFYWISASALIGFILLLNVGYAIGLTIKKPTGTSRAIISRDKFSTFDRRGKDMSKDMDNRMPKLQVGNALAPNKTGTMVLPFSPLTISFQDVNYYVDTPVEMREQGYKERKLQLLHNITGAFQPGVLSALMGVTGAGKTTLLDVLAGRKTGGVIEGDIRVGGYPKIQQTFARISGYCEQTDVHSPQITVEESVAYSAWLRLPTEVDSKTRREFVDEVIQTIELDDIRDALVGLPGVSGLSTEQRKRLTIAVELVSNPSVIFMDEPTSGLDARAAAIVMRAVKNVADTGRTVVCTIHQPSIEIFEAFDELMLMKRGGELIYAGPLGLHSCNVIHYFETIPGVPKIKDNYNPSTWMLEVTCASMEAQLGVDFAQIYRESTMCKDKDALVKSLSKPALGTSDLHFPTRFPQKFREQLKACIWKQCLSYWRSPSYNLVRILFITISCIVFGVLFWQQGDINHINDQQGLFTILGCMYGTTLFTGINNCQSVIPFISIERSVVYRERFAGMYSPWAYSLAQVAMEIPYVLVQILLIMFIAYPMIGYAWTAAKFFWFMYTIACTLLYFLYFGMMIVSLTPNIQVASILASMFYTLQNLMSGFIVPAPQIPRWWIWLYYTSPLSWTLNVFFTTQFGDEHQKEISVFGETKSVAAFIKDYFGFRHDLLPLAAIILAMFPILFAILFGLSISKLNFQRR

SEQ ID NO: 1650 - protein, 1451 aa, Oryza sativa (japonica cultivar-group)
MAREIHKIASLRRESSLWRRGDDGVYFSRSSTGASSSRFRDEEDDEEALRWAALERLPTRDRVRRGILLQAAEGNGEKVEVDVGRMGARESRALIARLIRAADDDHALFLLKLKDRMDRVGIDYPTIEVRFEKLEVEAEVHVGNRGLPTLLNSIINTVQAIGNALHISPTRKQPMTVLHDVSGIIKPRRMTLLLGPPGSGKTTLLLALAGKLEDNLKVSGKVTYNGHGMDEFVPQRTAAYISQHDLHIGEMTVRETLAFSARCQGVGSRYDMLTELSRREKAENIKPDQDIDVYMKASAIGGQESSVVTEYILKILGLDICADTVVGNDMLRGVSGGQRKRVTTGEMLVGPARALFMDEISTGLDSSTTYQIVNSIGQTIRILGGTAVISLLQPAPETYNLFDDIILLSDGQIVYQGAREHVLEFFELMGFRCPQRKGVADFLQEVTSKKDQEQYWYRNDIPYSFVPVKQFADAFRSFHVGQSIQNELSEPFDRSRSHPASLATSKFGVSWMALLKANIDRELLLMKRNSFVYIFKAANLTLTAFLVMTTFLRTKMRHDTTYGTIYMGALYFALDTIMFNGFAELGMTVMKLPVFFKQRDLLFFPAWTYTIPSWILQIPVTFFEVGVYVFTTYYVVGFDPNVSRFFKQYLLLVALNQMSSSLFRFIAGIGRDMVVSQTFGPLSLLAFTALGGFILARPDVKKWWIWGYWISPLSYAQNAISTNEFLGRSWNKSFPGQNDTVGISILKSRGIFTEAKWYWIGFGALIGYTLLFNLLYTVALSFLKPLGDSYPSVPEDALKEKRANQTGEILDSCEEKKSRKKEQSQSVNQKHWNNTAESSQIRQGILPFAQLSLSFNDIKYSVDMPEAMTAQGVTEERLLLLKGVSGSFRPGVLTALMGVSGAGKTTLMDVLAGRKTGGYIEGDITISGYPKKQETFARISGYCEQNDIHSPHVTVYESLVFSAWMRLPSEVDSETRKMFIEEVMELVELTSLRGALVGLPGVNGLSTEQRKRLTVAVELVANPSIIFMDEPTSGLDARAAAIVMRTVRKTVDTGRTVVCTIHQPSIDIFEAFDELFLMKRGGEEIYVGPLGQNSSKLIEYFEGIEGISKIKDGYNPATWMLEVTSTTQEEMLGIDFSEIYKRSELYQRNKELIQDLSTPTPGSTDLHFPTQYSRSFFTQCIACLWKHKLSYWRNPSYTAVRLLFTIIIALLFGTMFWDLGRKTKKEQDLFNAVGSMYAAVLYIGIQNSGCVQPVVVVERTVFYRERAAGMYSGFPYAFGQVAIELPYILVQTLVYGVLVYSMIGFEWTVAKFIWYLFFMYFTLLYFTFFGMMAVGLTPNESIAAIISPAIYNAWNLFSGYLIPRPKIPVWWRWYCWICPVAWTLYGLVASQFGNIQTKLDGKDQTVAQFITEYYGFHHDLLWLVAVVHVVFTVMFAFLFSFAIMKFNFQRR

SEQ ID NO: 1651 - protein, 1336 aa, Oryza sativa (japonica cultivar-group)
MWAAEAAFARSGSWREEEDEQEALRWAALQRLPTVARARRGLLRSPAPGEDRVQGDDALCEVDVAGLSPGDRTALVDRLLADSGDVEDFFRRIRSRFDAVQIEFPKIEVRYEDLTVDAYVHVGSRALPTIPNFICNMTEAFLRHLRIYRGGRVKLPILDNVSGIIRPSRMTLLLGPPSSGKTTLLLALAGRLGPGLKVSGNITYNGHHLNEFVPQRTSAYVSQQDWHASEMTVRETLEFAGRCQGVGIKYDMLVELLRREKNEGIKPDEDLDVFMKALALEGKQTSLVAEYIMKVYGLDICADTIVGDEMIKGISGGQKKRLTTGELLVGSARVLFMDEISTGLDSATTYQIIKYLRHSTHALDGTTIISLLQPAPETYELFDDVILISEGQIVYQGPREYAVDFFAGMGFRCPERKNVADFLQEVLSKKDQQQYWCHYDYPYQYVSVSKFAEAFKTFVIGKRLHDELAVPYNRHRNHPAALSTSNYGVRRLELLKSNFQWQHLLMKRNSFIYVFKFIQLLLVALITMTVFFRSTMHRDSVDDGIIYLGALYFAIVMILFNGFTEVSLLVTKLPILYKHRDLHFYPPWAYTLPSWLLSIPTSLIESGMWVLVTYYVVGYDPQFTRCLGQFLLLFFLHQTSLALFRVMASLGRNMIVANTFGSFALLVVMILGGFIITKESIPAWWIWGYWISPMMYAQNAISVNEFLGHSWSQQFANQNITLGEAILTGYGLFKEKYWFWIGVGALFGYAIVLNFLFTLFLTLLNPIGNIQAVVSKDDIQHRAPRRKNGKLALELRSYLHSASLNGHNLKDQKGMVLPFQPLSMCFKNINYYVDVPAELKSQGIVEDRLQLLIDVTGAFRPGILTALVGVSGAGKTTLMDVLAGRKTGGLIEGSITISGYPKNQETFTRISGYCEQNDVHSPCLTVIESLLYSACLRLPSHVDVNTRRVFVEEVMELVELNALSGALVGLPGVNGLSTEQRKRLTIAVELVANPSIVFMDEPTSGLDARSAAIVMRTVRNIVNTGRTIVCTIHQPSIDIFESFDELLFMKRGGQLIYAGPLGSKSRNLVEFFEAIPGVPKIRDGYNPAAWMLEVTSTQMEQILGVDFAEYYRQSKLFQQTQEMVDILSRPRRESKELTFATKYSQPFFAQYAACLWKQNLSYWRNPQYTAVRFFYTVIISLMFGTICWKFGSRRETQHDIFNAMGAMYAAVLFIGITNATSVQPVISIERFVSYRERAAGMYSALPFAFSLVTVEFPYILVQSLIYGTIFYSLGSFEWTAVKFLWYLFFMYFTLLYFTFYGMMTTAITPNHTVAPIIAAPFYTLWNLFCGFMIPRK

SEQ ID NO: 1652 - protein, 1441 aa, Oryza sativa (japonica cultivar-group)
MAFAAGGIDHHVAVDVEGEEESRRRAVAEEADLLWAAFERLPSAKRRSHAVVLPDPDGLGGGDGGGRGEGQLVDVRKLDRPGLQRVLRHALATSELDNANLLHGIKARFDAVGLEVPRVEVRFQNLTVSTDVHVGRRALPTLVNYVHDIAERILISSHLLRPDKHKLVILDDVSGVIKPGRMTLLLGPPASGKSTLLLALADKLDSQLKKSGEVAYNGMALDQFCVQRTSAYISQTDNHIGELTVRETLDFAAKCQGASENWQECLKELVNLEKERGIRPSPEIDAFMKTASFRREKHNLVSDYVLRVLGLDICADTPVGSDMERGVSGGQKKRVTTGEMIIGPRKTLLMDEISTGLDSSTTFQIVNCMRNFVHEMEATVLMSLLQPAPETFELFDDLILLSEGKIIYQGPIKHVVDYFKSLGFSLPPRKGIADFLQEVTSKKDQAQYWSDQSKQHIFVSASEMAAVFKESQYGTYLEANLSSSCGNKDSALVLPRSKFAVPKFSLVRACFARELILISRNRFLYTFRTCQVAFVGIITSTLFLRTRLHPVDEQNGNLYLACLFFGLVHMMFNGFTEMTMTISRLPVFYKQRDNFFHPAWAFSLPNWILRIPYSFIEAVVWSCVVYYTVGFAPTVDRFFRFMLLLFSIHQMALGLFRMMGAIARDMTIASTFGSAVLLAIFLLGGFVVPKGFIKPWWDWAYWISPLMYAQRAVSVNEFSASRWSKVSVSGNMTVGTNILISHSLPTDDHWFWIGVGVLLAYSIFFNIMFTLALAFLNPLRKPQSMVPSDAGDGRDVHINTDSNKNTIGEIFENNDGFEGQTECKSKKGMILPFQPLTMTFHNVNYYVNMPKEMQAKGVPEKRLQLLSEVSGIFRPRVLTALVGASGSGKTTLMDVLAGRKTGGYIEGDIRISGHKKEQRTFARIAGYVEQNDIHSPQVTVEESLWFSSTLRLPNDISRETRHAFVEEVMALVELDQIRYALVGKQGLTGLSTEQRKRLTIAVELVANPSIIFMDEPTSGLDARAAAIVMRTVRNTVDTGRTVVCTIHQPSIDIFEAFDELLLMKRGGRVIYGGSLGVNSVDMINYFQGIPRVVPITEGYNPATWMLEVTTQASEERLGIDFATVYKNSYQFRNVENLIVELSIPASGTEPLKFSSEFSQNRLTQFMVCLRKQSLVYWRSPEYNVVRLFFTSVAAIIFGSIFWNVGMKRESTEDILLLMGALYAACLFLGVNNASSVQPVVSVERTVYYRERAANMYSSFPYAAAQVYHGLVEIPYIAVQTLIFGLITYFMVNYERNIRKLVLYLIYMFLTFTYFTFYGMVAVGLTPTQHMASVVSSAFYSLWNLLSGFLIPQSRIPGWWIWFYYICPVAWTLRGVITSQLGDVDTRIVGPGFDGTVHEFLQQNLGFEQGMTGATVAVLVAFSVFFFSIYAISIKMINFQRS

SEQ ID NO: 1653 - protein, 1441 aa, Oryza sativa (japonica cultivar-group)
MAFAAGGIDHHVAVDVEGEEESRRRAVAEEADLLWAAFERLPSAKRRSHAVVLPDPDGLGGGDGGGRGEGQLVDVRKLDRPGLQRVLRHALATSELDNANLLHGIKARFDAVGLEVPRVEVRFQNLTVSTDVHVGRRALPTLVNYVHDIAERILISSHLLRPDKHKLVILDDVSGVIKPGRMTLLLGPPASGKSTLLLALADKLDSQLKKSGEVAYNGMALDQFCVQRTSAYISQTDNHIGELTVRETLDFAAKCQGASENWQECLKELVNLEKERGIRPSPEIDAFMKTASFRREKHNLVSDYVLRVLGLDICADTPVGSDMERGVSGGQKKRVTTGEMIIGPRKTLLMDEISTGLDSSTTFQIVNCMRNFVHEMEATVLMSLLQPAPETFELFDDLILLSEGKIIYQGPIKHVVDYFKSLGFSLPPRKGIADFLQEVTSKKDQAQYWSDQSKQHIFVSASEMAAVFKESQYGTYLEANLSSSCGNKDSALVLPRSKFAVPKFSLVRACFARELILISRNRFLYTFRTCQVAFVGIITSTLFLRTRLHPVDEQNGNLYLACLFFGLVHMMFNGFTEMTMTISRLPVFYKQRDNFFHPAWAFSLPNWILRIPYSFIEAVVWSCVVYYTVGFAPTVDRFFRFMLLLFSIHQMALGLFRMMGAIARDMTIASTFGSAVLLAIFLLGGFVVPKGFIKPWWDWAYWISPLMYAQRAVSVNEFSASRWSKVSVSGNMTVGTNILISHSLPTDDHWFWIGVGVLLAYSIFFNIMFTLALAFLNPLRKPQSMVPSDAGDGRDVHINTDSNKNTIGEIFENNDGFEGQTECKSKKGMILPFQPLTMTFHNVNYYVNMPKEMQAKGVPEKRLQLLSEVSGIFRPRVLTALVGASGSGKTTLMDVLAGRKTGGYIEGDIRISGHKKEQRTFARIAGYVEQNDIHSPQVTVEESLWFSSTLRLPNDISRETRHAFVEEVMALVELDQIRYALVGKQGLTGLSTEQRKRLTIAVELVANPSIIFMDEPTSGLDARAAAIVMRTVRNTVDTGRTVVCTIHQPSIDIFEAFDELLLMKRGGRVIYGGSLGVNSVDMINYFQGIPRVVPITEGYNPATWMLEVTTQASEERLGIDFATVYKNSYQFRNVENLIVELSIPASGTEPLKFSSEFSQNRLTQFMVCLRKQSLVYWRSPEYNVVRLFFTSVAAIIFGSIFWNVGMKRESTEDILLLMGALYAACLFLGVNNASSVQPVVSVERTVYYRERAANMYSSFPYAAAQVYHGLVEIPYIAVQTLIFGLITYFMVNYERNIRKLVLYLIYMFLTFTYFTFYGMVAVGLTPTQHMASVVSSAFYSLWNLLSGFLIPQSRIPGWWIWFYYICPVAWTLRGVITSQLGDVDTRIVGPGFDGTVHEFLQQNLGFEQGMTGATVAVLVAFSVFFFSIYAISIKMINFQRR

SEQ ID NO: 1654 - protein, 1426 aa, Oryza sativa (japonica cultivar-group)
MAGEITPSGSRRSWLSSGAASLARSLRDGDDPFRRSAAASRRDAGDDEENLRWAALEKLPTYDRMRRGILRKAVDGGGDGEGAGSLFKADEVDIANLDPREGRELMERVFKAVEDDNERFLRRFRDRLDQVGIELPKIEVRYQHLDIEADVHVGKRALPTLLNATINTLEGLVSLFISSNKRKLKILNDVNGIIKPSRMTLLLGPPSSGKSTLMRALTGKPDKNLKVSGEITYCGHTFKEFYPERTSAYVSQHDLHNPEMTVRETLDFSRRCLGSGARYDMLSELTRRERNAGIKPDPEIDALMKATVVEGKQNNIVTDLVLKALGLDICADTIVGGAMIRGISGGQKKRVTTGEMLTGPATALFMDEISTGLDSSSTFQIVKYIRQVTHVMNATVMMSLLQPPPETYALFDDIVLIAEGYIVYHGPRENILEFFESAGFRCPERKGVADFLQEVTSRKDQQQYWFLEQDHYRYVSVEEFAQNFKKFHVGQKLQKELQVPYDKSKTHPAALTTKKYGLSSLESLKAVMSREWLLMKRNSFLFIFKAFQLFVLGFITMTLFLRTKMPHEKFSDTSKYVGALTASLITIMFNGFGELQLTIDKLPIFYKQRDFLFFPAWTYGLANIILKVPLSLMESSLWIVLTYYVVGFAPAAGRFFKQFLAYFWTHQMALALFRLLGAILRSMVVANTFGMFVLLLIFLFGGFLVSRKDIKPWWIWGYWTSPMMYSNNALSVNEFLASRWAIPNNDSSISAPTIGKAFLQSKGYFTGEWGYWLSIGAMIGFMIVFNILYLCALTFLRPIGSASTVVSDDDTKSELEAESNQEQMSEVINGTNGTENRRSQRGMVLPFQPLSLSFNHMNYYVDMPAEMKAQGFTESRLQLLSDISGAFRPGVLTALVGVSGAGKTTLMDVLAGRKTSGTIEGDIKLSGYPKKQETFARISGYCEQTDIHSPNLTVYESIVYSAWLRLSSEVDKNTRKVFVEEVMSLVELDVLRDALVGLPGVSGLSTEQRKRLTIAVELVANPSIIFMDEPTSGLDARAAAIVMRTLLLLKRGGRVIYAGQLGLHSQILVEYFEAIPGVPKITEGYNPATWMLEVSSSLAEARLDIDFAEVYANSALYRSNQELIKQLSVPPPGFQDLSFPTKYSQNFLNQCVANTWKQFQSYWKDPPYNAMRYVMTLLYGLVFGTVFWRRGKNIESVNDLNNLLGATYAAVFFLGAANLLTLLPVVSVERTVFYREKAAGMYSPLSYAFAQGFVEFCYSAVQGVLYTILIYSMIGYEWKADKFFYFLFFMIAAFAYFTLFSMMLVACTASEMLAAVLVSFVLSSWNNFAGFIIPRPLIPVWWRWFYWANPVSWTIYGVIASQFADSDRVVTVPGQSTTMVVKDFLEKNMGFKHDFLGYVVLAHFGYVIIFFFLFGYGIKCLNFQKR

SEQ ID NO: 1655 - protein, 1333 aa, Oryza sativa (japonica cultivar-group)
MAAAVELTGDGGTTAETRWLSPPLTHDDNRGFLQMLREKKERLGVGAAKVEVRLEKLTVEADVRVGRRAVPTLLNCAINAAQELAACAHMCTTRKKPMKIINEATGTIRPSRMTLLLGAPGSGKTTLLKALAGKLDSSLKMKGKVTYNGEEVNSSTPQYLHAYVSQYDLHHAEMTVRETIDFSSKMLGTNNEFGKTTSSVWRATTFGEGSNLTTNYIIKILGLSECADTLVGDEMRRGISGGQKKRATIGEMLVGLARCFFMDDISTGLDSSTTFEIMKFLQQMAHLMDLTMVISLLQPPPETLELFDDIILLCEGQIVYHGPRENATDFFETMGFKCPSRKNVADFLQEVTSKMDQKQYWIGNANKYQYHSIEKFAESFRTSYLPRLVENDHFESTNAGKSKEVKTSTSRMISSWNIFKACFSREVLLLKRNSPVHIFKTIQITVLALVISTLFLRTNMRHDTVLDANKYMGALFMAVVIVNFNGMTEIAMTIKRLPIFYKQREILALPGWALLSSVFLLSLPISFVETGLWTGLTYYVIGYAPSFVRFIQHFVVLFAMHQMSMSLYRFLAAIGRTQVMANMLGTAALIAIYILGGFVISKDNLQPWLRWGYWTSPFTYAQNAVALNEFLDDRWATEFHFANANTVGETILKVRGLLTEWHWYWICVSILFGFSLVFNILSIFALQYMRSPHKHQVNINATKVKVDYNSQIVGNGTASTDQVILPFQPLSLVFDHINYFVDMPKEMTKYGVTDKKLQLLQDVSGAFRPGVLTALMGITGAGKTTLLDVLAGRKTGGYIEGTVKIAGYPKKQETFSRISGYCEQSDIHSPNLTVYESLQFSAWLRLPSNVKSHQRNMFIDEVMDLVELTGLKNAMVGLAGATGLSAEQRKRLTIAVELVASPSIIFMDEPTTGLDARAAAIVMRTVRKTVDTGRTVVCTIHQPSIEIFESFDELLLMKRGGQLIYSGSLGPLSSNMIKYFEAIPGVPRIKEGQNPAAWMLDISSRTAEYEIGVDYAEIYQRSSLYWENRQLIDDLGKPEPNTEDLHFPPKYWQDFRAQCMACLWKQNCAYWKNSEHNVVRFINTFAVSIMFGIVFWKIGSTIKDEQDVFNILGVVYGSALFLGFMNCSILQPVVGMERVVLYREKAAGMYSTMAYAIAQVAVELPYMFVQVFIFSAIVYPMIGFQMTATKFFWFALYMVLSFLYYTLYGMMTVALTPNIEIAAGLSFLIFIFWNVFSGFIIGRQMIPVWWRWVYWANPAAWTVYGLMFSQLGDRTELIQVPGQPEQTVKEFLEGYLGLQDRYFNLVTSLHVAIIALFTFLFFLSIKHLKFQRR

SEQ ID NO: 1656 - protein, 1501 aa, Botryotinia fuckeliana
MATSAPFGVLPQSEAVAEKVEEVVQEKTYQNIDHKRKDSDSESSTLDSTREREDATIRTLARQITQKSMEGAYDHNINPFLGSNDPRLDPSSEKFSSRAWTKHLVHLQSRDPERYPNRTAGIAYKNLNAHGFGEPTDYQKTFGNYPLEIIGMSKRVLGLSKPTKIQILRDFDGLIRSGEMLVVLGRPGSGCSTLLKTISGETSGFFVDSNTYINYQGIPMETMHNDFRGECIYQAEVDVHFPQLTVAQTLGFAAKAKAPRNRIPGVTRDQYAEHLRDVTMATFGLSHTFNTKVGNDFIRGVSGGERKRVSIAEAAVGGSPLQCWDNSTRGLDSATALEFVKTLRNSTELSGSTAVVAIYQASQSIYDLFDKVAVLYEGRQIYFGDINAAKTFFVNLGFDCPARQTTADFLTSITSPAERIVRPGFEGRTPYTPDEFAAVWQKSEDRAQLLREIDQFDAEFPIGGQALDDFKNSRKAVQAKGQRIKSPYTISLPMQIRLCVERGFQRLRGDMSLLLTGLIGQSVMALIIGSVFYNLADDTNSLYSRGALLFFSILMAAFQSALEILTLYAQRPIVEKHTKYAFYHPVAEACASMLCDIPNKVFSTIFFDLALYFMTNLRREPGYFFVFFLFTFLCTLTMSMYFRSIASLSRSLSEAMAPAAIFILAIVTYTGFAVPIRDMHPWFRWINYLDPVSYGFEALMINEFHGRKIPCSVFVPSGGNYGNVGADERICSTTGAAAGADYVDGDRYLEVNYGYNHSHLWRNLGVMIAFMFLGLFIYLSASEFISAKKSKGEVLLFRRGRIPYVSKASDEEAKIDDRMTAATVTRTKTVPDAPPSIQKQTAIFHWDDVHYDIKIKGEPRKLLDGVDGWVKPGTLTALMGVSGAGKTTLLDVLASRVTMGVVTGQMLVDGRQRDIGFQRKTGYVQQQDLHLATSTVREALAFSAILRQPKATPHAEKIAYVDEVIKVLEMEEYADAIVGVPGEGLNVEQRKRLTIGVELAAKPALLLFLDEPTSGLDSQTAWSICALLRKLADNGQAILCTIHQPSAILFQEFDRLLFLARGGRTVYFGEIGEHSKVLTNYFERNGAHPCGDLANPAEWMLEVIGASPGASNTIDWPETWKNSPERQQVKSHLAELKTTLSQKQVEHDPTSLNSFAAGFGTQMQVVLVRVFQQYWRTPPYLYSKTALCLCVGLFLGFSFYDTKTSLQGMQNQLFAIFMLFTIFGNLVQQILPHFVTQRSLYEVRERPSKTYSWKVFILSNIIVELPWNTLMAVIIFVTWYYPIGLYRNAEMTNAVNERSGLMFAFIWMFLMFTSTFADFIIAGIDTAENAGNIANLMFSLCLIFCGVLASPTALPGFWIFMYRVSPFTYLVSGMMSTGLANTEVVCDSIEYLHFNPPSAKTCGEYLGPYMSAAGGYLNNPEAMTDCEFCSIKDTNVFLAGVNSYYSDVWRNWGLMWVYLAFNIAGAIGMYWLVRVPKGASQGEDNEEGAKKGWFSKKKADA

SEQ ID NO: 1657 - protein, 1448 aa, Botryotinia fuckeliana
MERLEHMSWRNKTPCMGLSWGTQHWTPTPQILTYINGLKCKFWHVQVFIWTQTNCTCRMMRLVDENGVIQRRAGIVFKNLKVCGSGSAINVQKNVGSLLMAPLRFKEFIGKGPEKTILNDFNGVLKSGEMLIVLGRPGSGCSTFLKSLMGELYGLDMKAQSEIHYNGITQKQMLKQFRGEIVYNQEVDKHFPHLTVGETLEFAASVRTPQQRLVEGTTRSAWAKHMTKVVMAIYGLSHTYNTKVGNDFVRGVSGGERKRVSIAEMALAGSPIASWDNATRGLDAATALEFTKSLRMTANLSGSCHLVAIYQASQQIYDQFDKAIVLYEGRQIYYGPCDQAKQYFEDMGWECPSRQTTGDFLTSITNPSERKARPGYENKVPRTPEEFEKYFKDSKIFQRMMSEMKSHEEEFPMGRKTLEQFKASRKGMQADHLRPESPYTVSIVMQTKLCARRAVQRLWNDKTSTITTIVGQIAMALIIGSIFYNTPSNTASFFQKGGVLFFAVLLNALIAISEINTLYSQRPIVEKQASYAFYHPFTEALAGVVVDIPVKFAIATCFNIILYFLSGLKREAGAFFVFFLFNFVAILTMSQIYRSIAAATKTISQALAIAGVATLAIVIYTGFVIPRPLMHPWFKWISWINPVAYAFEALFVNELHGKEFVCSTLVPTGPGYVQAGNNFVCAVAGSVVGATTVSGDDYLQAQFQYSYSHIWRNLGFLFAFMIFFLAFYLLATEFNASTDSKAEVLVFRRGHVPTNLLAAEKAAKNDEEAHAGNGSAVKEGNSDKQGDEVQALAPQTDIFTWKDVCYDIKIKNEPRRLLDNVSGWVKPGTLTALMGVSGAGKTTLLDVLAQRVSMGVITGDMLVSGKPLDASFQRKTGYVQQQDLHLETTTVREALRFSAMLRQPKTVSKKEKYDFVEEVIKMLNMEEFSEAVVGVPGEGLNVEQRKLLTIGVELAAKPALLLFLDEPTSGLDSQSSWAIVSFLRKLADNGQAVLATIHQPSAILFQEFDRLLFLAKGGRTVYFGDIGHNSETLLNYFESHGAAKCGEDENPAEYMLTMVGAGAQGKSTQDWHEVWKASDEAKGIQTEISRIQQEMGHQPSQDDSNSHGEFAMPFTVQLLEVMKRVFQQYWRTPGYVYSKLVLGVASALFIGFSFFHADASQQGLQDVIFSIFMITTIFTTLVQQIMPRFILQRDLYEVRERPSKAYSWKAFIIANIAVEIPYQIILGIMVFASYFYPIYTKNGIPPSGRQGLILLLLIQFFVFASTFAHMLISALPDAETAGNIATLMFSLTLTFNGVFQPPQALPGFWIFMYRVSPLTYLVSAIASTGLSGRQVICSDNELAVMQPPAGDTCGSYLQSYATAAGGSIYNPEAMADCQYCSSSNADQFLSSVAISYTTRWRDYGIVFVYIFFNIFMAVLLYYLIRVRKSSGKSLKEKFGALGALFKKN

SEQ ID NO: 1658 - protein, 1436 aa, Nicotiana plumbaginifolia
MEPADLSNLRGRSLRASIRGSMRGSIRENSNSIWRNNGAEVFSRSARDEDDEEALKWAALEKLPTYDRLRKGILFGSQGAAAEVDVDDSGVLERKNLLERLVKVADEDNEKFLLKLKNRIDRVGIDFPSIEVRFEHLNIDADAYVGSRALPTFTNFISNFVEGLLDSIHILPSKKRQVTILKDVSGIVKPCRMTLLLGPPGSGKTTLLLALAGKLDSALKVTGKVTYNGHELHEFVPQRTAAYISQHDLHIGEMTVRETLEFSARCQGVGSRYEMLAELSRREKAANIKPDADIDMFMKAASTEGQEAKVVTDYILKILGLDICADTMVGDQMIRGISGGQKKRVTTGEMIVGPSKALFMDEISTGLDSSTTYSIVNSLKQSVRIMKGTALISLLQPAPETYNLFDDIILLSDGYIVYEGPREEVLEFFESMGFKCPERKGAADFLQEVTSKKDQQQYWIRRDEPYRFITSKEFAEAYQSFHVGRKVSDELKTTFDKSKSHPAALTTQKYGIGKRQLLKVCTERELLLMQRNSFVYLFKFFQLLIIALMTMTIFFRTKMPRDSAEDGGIYSGALFFVVIMIMFNGLSELPMTLYKLPVFYKQRDFLFYPSWAYAIPSWILKIPVTFAEVGMWVFLTYYVMGFDPNVGRFFKQFLLLLLVNQMASALFRFIAAVGRTMGVASTFGAFALLLQFALGGFILARNDVKDWWIWGYWTSPLMYSVNAILVNEFDGQKWKHIVAGGTEPLGAAVVRARGFFPDAYWYWIGVGALAGFIVMFNIAYSVALAYLNPFDKPQATISDESENNESESSPQITSTQEGDSASENKKKGMVLPFDPHSITFDEVVYSVDMPPEMRESGTSDNRLVLLKSVSGAFRPGVLTALMGVSGAGKTTLMDVLAGRKTGGYIDGSIKISGYPKKQDTFARISGYCEQNDIHSPYVTVFESLVYSAWLRLPQDVNEEKRMMFVEEVMDLVELTPLRSALVGLPGVNGLSTEQRKRLTIAVELVANPSIIFMDEPTSGLDARAAAIVMRAVRNTVDTGRTVVCTIHQPSIDIFEAFDELFLMKRGGQEIYVGPLGRQSCHLIKYFESIPGVSKIVEGYNPATWMLEVTASSQEMALGVDFTDLYKKSDLYRRNKALIDELSVPRPGTSDLHFDSEFSQPFWTQCMACLWKQHWSYWRNPAYTAVRLIFTTFIALIFGTMFWDIGTKVSRNQDLVNAMGSMYAAVLFLGVQNSSSVQPVVSVERTVFYREKAAGMYSAIPYAFAQVLIEIPYIFVQATVYGLIVYSMIGFEWTVAKFFWDFFFMFFTFLYFTFFGMMTVAVTPNQNVASIVAGFFYTVWNLFSGFIVPRPRIPIWWRWYYWGCPIAWTLYGLVASQFGDLQDPLTDQNQTVEQFLRSNFGFKHDFLGVVAAVIVAFAVVFAFTFALGIKAFNFQRR

SEQ ID NO: 1659 - protein, 1434 aa, Nicotiana tabacum
MEPANLSNLRGSSLRGSTRGSLRANSNSIWRNNGVEIFSRSSRDEDDEEALKWAALEKLPTFDRLRKGLLFGSQGAAAEVDINDLGFQERKNLLERLVKVADEDNEKFLLKLKNRIDRVGIDLPTIEVRYEHLNIDADAYVGSRSLPTFMNFMTNFVETLLNSLHILSSRKRQLTILKDISGIIKPCRMTLLLGPPSSGKTTLLLALAGKLDPALKVTGKVSYNGHELHEFVPQRTAAYISQHDLHIGEMTVRETLEFSARCQGVGSRFEMLAELSRREKAANIKPDADIDIYMKAAATEGQEANVVTDYVLKILGLDICADTMVGDDMIRGISGGQKKRVTTGEMLVGPSKALFMDEISTGLDSSTTYSIVNSLRQSVQILKGTAVISLLQPAPETYNLFDDIILLSDGYIVYQGPRDDVLEFFESMGFKCPQRKGVADFLQEVTSKKDQQQYWSKRNEPYRFITSKEFAEAYQSFHVGRKLGDELATPFDKTKCHPAALTNEKYGIGKKELLKVCTERELLLMKRNSFVYMFKFSQLTIMALITMTLFFRTEMPRDTTDDGGIYAGALFFVVIMIMFNGMSELAMTIFKLPVFYKQRDLLFFPSWAYAIPSWILKIPVTLVEVGLWVILTYYVIGFDPNITRFLKQFLLLIVVNQMASGMFRFIGAVGRTMGVASTFGSFALLLQFALGGFVLSRDDVKSWWIWGYWISPMMYSVNSILVNEFDGKKWNHIVPGGNETLGSTVVKSRGFFPEAYWYWIGVGALVGFTVVFNFCYSLALAYLNPFDKPQAVLPEDGENAENGEVSSQIPSTDGGDSISESQNNKKGMVLPFEPHSITFDDVVYSVDMPQEMKEQGAGEDRLVLLKGVSGAFRPGVLTALMGVSGAGKTTLMDVLAGRKTGGYIDGEIKISGYPKKQETFARISGYCEQNDIHSPYVTVYESLVYSAWLRLPQDVDEKTRKMFVDEVMELVELGPLRSALVGLPGVNGLSTEQRKRLTIAVELVANPSIIFMDEPTSGLDARAAAIVMRTVRNTVDTGRTVVCTIHQPSIDIFEAFDELFLMKRGGQEIYVGPLGRHSCHLIKYFESNPGVAKIKEGYNPATWMLEVTASAQEMMLGIDFTEVYKNSDLYRRNKALISELGVPRPGSKDLHFETQYSQSFWTQCVACLWKQHWSYWRNPAYTAVRFIFTTFIALIFGTMFWDLGTKVSKSQDLLNAMGSMYAAVLFLGVQNASSVQPVVAIERTVFYRERAAGMYSAIPYAFGQVSIEIPYIFVQSVFYGIIVYAMIGFEWDVGKFFWYLFIMFFTLLYFTFYGMMGVAVTPNQNVASIVAAFFYGVWNLFSGFIIPRPRMPVWWRWYYWANPVAWTLYGLVASQFGDIQTKLSDNETVEQFLRRYFGFKHDFLGVVAAVLTAYVFMFAFTFAFAIKAFNFQRR

SEQ ID NO: 1660 - protein, 155 aa, Solanum tuberosum
TTLMDVLAGRKTDGYIEGTISIPGYPKQQETFARIAGYCEQTDIHSPHVTVYESLLYSAWLRLPREVDTETQKSFIEEVMELVELTPLREALVGLPGVNGLSTEQRKRLTVAVELVANPSIIFMDEPTSGLDARAAAIVMRTVRNTVDTGRTVVC

SEQ ID NO: 1661 - protein, 155 aa, Solanum tuberosum
TTLMDVLAGRKTGGYIDGSIKISGYPKKQETFARISGYCEQNDIHSPYVTVYESLVYSAWLRLPQDVDEHKRMMFVEEVMDLVELTPLRSALVGLPGVNGLSTEQRKRLTIAVELVANPSIIFMDEPTSGLDARAAAIVMRAVRNTVDTGRTVVC

SEQ ID NO: 1662 - protein, 155 aa, Solanum tuberosum
  unsure (1)..(155): unsure at all Xaa locations
TTLMDVLAGRKTGGHITGNIYISGHPEKQETFARVSGYCEQNDVHSPCLTIHESLLFSAWLRLSSQVDVKTQKAFVEEVMELVELTSLRRALVGLPGVDGLSQSKGKRLTIAVELVANPSIVFMDEPTSGLDARSAAIVLITXKNIVYTGRTILC

SEQ ID NO: 1663 - protein, 155 aa, Solanum tuberosum
TTFLDVLAGRKTSVHVEGEIKVGGYLKVQETFARVSGYCEQTDIHSPQITVEESVIFSAWLRLHPQIDSKTKYEFVKEVLETIELDGIKDTMVGMPGVSGLSTEQRKRLTIAVELVANPSIIFMDEPTTGLDARSAAIVMRAVKNVADTGRTIVC

SEQ ID NO: 1664 - protein, 1501 aa, Candida dubliniensis
MSDSKMSSQDESKLERATSQDSSSENHSINEYHGFDAHTSENIQNLARTFTHDSFKDDSSAGLLKYLTHMSEVPGVNPYEQEEINNEQLDPDSENFNAKFWVKNLRKLFESDPEYYKPSKLGIGYKNLRAYGVANDSDYQPTVTNALWKLATEGLRHFQKDDESRYFDILKSVDAIMRPGELTVVLGRPGAGCSTLLKTIAVNTYGFHIGKESQITYDGLSPKDIEHHYRGDVIYSAETDVHFPHLSVGDTLEFAARLRTPQNRGEGIDRETYAKHMASVYMATYGLSHTRNTNVGNDFVRGVSGGERKRVSIAEASLSGANIQCWDNATRGLDSATALEFIRALKTSAVILDTTPLIAIYQCSQDAYDLFDKVVVLYEGYQIFFGKATKAKEYFEKMGWKCPQRQTTADFLTSLTNPAEREPLPGYEDKVPRTPQEFEAYWKNSPEYAELIQEIDEYFVECEKSNTRETYRESHVAKQSNNTRPASPYTVSFFMQVRYGVARNFLRMKGDPSIPIFSVFGQLVMGLILSSVFYNLNQTTGSFYYRGASMFFAVLFNAFSSLLEIMSLFEARPIVEKHKKYALYRPSADALASIISELPVKLAMSMSFNFVFYFMVNFRRNPGRFFFYWLMCVWCTFVMSHLFRSIGAVSTSIAGAMTPATVLLLAMVIYTGFVIPTPSMLGWSRWINYINPVGYVFEALMVNEFHGREFQCAQYVPSGPGFENVSRSNQVCTAVGSIPGNEMVSGTNYLAGAYQYYNSHKWRNLGITIGFAVFFLAIYIALTEFNKGAMQKGEIVLFLKGSLKKHKRKTAAAKKGDIEAGPVSGKLDYQDEAEAVSNEKFTEKGSTGSVDFPENREIFFWKDLTYQVKIKKEDRVILDHVDGWVKPGQITALMGASGAGKTTLLNCLSERVTTGVITDGERLVNGHALDSSFQRSIGYVQQQDVHLPTSTVREALQFSAYLRQSNKIPKKEKDDYVDYVIDLLEMTDYADALVGVAGEGLNVEQRKRLTIGVELVAKPKLLLFLDEPTSGLDSQTAWSICKLMRKLADHGQAILCTIHQPSALIMAEFDRLLFLQKGGRTAYFGELGENCQTMINYFEKYGADPCPKEANPAEWMLQVVGAAPGSHAKQDYFEVWRNSSEYQAVRDEISRMEVELSKLPRDNDPEALLKYAAPLWKQYLLVSWRTIVQDWRSPGYIYSKIFLVVSAALFNGFSFFKAKNNMQGLQNQMFSVFMFFIPFNTLVQQMLPYFVKQRDVYEVREAPSRTFSWFAFIAGQITSEIPYQVVVGTIAFFCWYYPLGLYSNATPTDSVNPRGVLMWMLVTSFYVYTSTMGQLCMSFSELADNAANLATLLFTMCLNFCGVLAGPSVLPGFWIFMYRCNPFTYLIQAMLSTGLANTFVRCADREYVSVQPPNGQTCSSYLDPYIKMAGGYFETNNDGSCSFCQMSSTNTFLKSINSLYSERWRNFGIFIAFIAINIILTVLFYWLARVPKGNREKKNKK

SEQ ID NO: 1665 - protein, 1500 aa, Candida dubliniensis
MSTTSNTSLSQQLDEKPWVDVSDDSSVQEYQGFDATASHNIQDLARKLTHDSTKGDHHAANNLARYLSHMSDIPGVSPFNGNINHEQLDPDSENFNAKYWVKNLKKLFDSDSEYYKPSKLGVAYRNLRAFGVANDSDYQPTVTNALWKFTTEAINKLKKPDDSKYSDILKSMDAIMRPGELTVVLGRPGAGCSTLSKTISANTYGFNIGKESHITYDGLTPKDIESNYRGDVIYSAETDYHFPHLSVGDTLEFAARLRTPQNRGEGIDRETYAKHMANVYMATYGLSHTRNTKVGNDFVRGVSGGERKRVSIAEASLSGANIQCWDNATRGLDSATALEFIRALKTSAVILDTTPLIAIYQCSQDAYDLFDNVVVLYEGHQIFFGRASKAKEYFEKMGWKCPQRQTTADFLTSLTNPAEREPLPGYEDKAPRTAQEFEVYWKNSPEYAALVGEIDNHLIECEKSNTKSYYHETHVAKQSNNTRPSSPYTVSFFMQVRYVMARNFLRMKGDPSIPLVSILTQLVMGLILASVFFNLRKSTDTFYFRGGALFFSVLFNAFSSLLEILSLYEARPIVEKHRKYALYRPSADALASIISELPVKLLMTMSFNIVYYFMVNLRRTPGNFFFYWLMCALCTLVMSHLFRSIGAVTTTIATAMSISTVFLLAMIIYAGFVLPIPYILGWSKWIRYINPVTYIFESLMVNEFHGREFKCGQYIPSGPGYESLSVENKVCTTVGSTPGSTVVQGTEYIKLAYQFYSSHKWRNFGITVAFAVFFLGVYVALTEFNKGAMQKGEIVLFLRGSLKKHKRKTAASNKGDIEAGPVSGKLDYQDEAEAVSNEKFTEKGSTGSVDFPENREIFFWKDLTYQVKIKKEDRVILDHVDGWVKPGQITALMGASGAGKTTLLNCLSERVTTGVITDGERLVNGHALDSSFQRSIGYVQQQDVHLETTTVREALQFSAYLRQSKKISKKEKDDYVDYVIDLLEMTDYADALVGVAGEGLNVEQRKRLTIGVELVAKPKLLLFLDEPTSGLDSQTAWSICKLMRKLADHGQAILCTIHQPSALIMAEFDRLLFLQKGGRTAYFGELGENCQTMINYFEKYGADPCPEEANPAEWMLQVVGAAPGSHSKQDYFEVWRNSSEYQAVKDEISRMEVELSKLPRDNDPEALLKYAAPLWKQYLLVSWRTIVQDWRSPGYIYSKIFLVVSSSLFIGFSFFKSKNNLQGLQSQMLAVFMFFIPFTTFIDQMLPYFVKHRAVYEVREAPSRTFSWFAFIAGQITSEIPFQIVVGTISYFCWYYPVGLYANAEPTDSVNSRGVLMWMLLTAFYVYTSTMGQLAISFNELIDNAASLATTLFTLCLMFCGVLAGPDVIPGFWIFMYRCNPFTYLIQAILSTGLANAKVTCAPRELVTLKPPMGETCSSFIGPYTKAAGGYFSTNSDGTCSVCRIDSTNQFLESINAMFSQRWRNFGIFVAFIAINIILTIFFYWLAKVPKGNREKKMKK

SEQ ID NO: 1666 - protein, 755 aa, Candida dubliniensis
MSDSKMSSQDESKLERATSQDSSSENHSINEYHGFDAHTSENIQNLARTFTHDSFKDDSSAGLLKYLTRMSEVPGVNPYEQEEINNEQLDPDSENFNAKFWVKNLRKLFESDPEYYKPSKLGIGYKNLRAYGVANDSDYQPTVTNALWKLATEGLRHFQKDDESRYFDILKSMDAIMRPGELTVVLGRPGAGCSTLLKTIAVNTYGFHIGKESQITYDGLSPKDIEHHYRGDVIYSAETDVHFPHLSVGDTLEFAARLRTPQNRGEGIDRETYAKHMASVYMATYGLSHTRNTNVGNDFVRGVSGGERKRVSIAEASLSGANIQCWDNATRGLDSATALEFIRALKTSAVILDTTPLIAIYQCSQDAYDLFDKVVVLYEGYQIFFGKATKAKEYFEKMGWKCPQRQTTADFLTSLTNPAEREPLPGYEDKVPRTPQEFEAYWKNSPEYAELIQEIDEYFVECEKSNTRETYRESHVAKQSNNTRPASPYTVSFFMQVRYGVARNFLRMKGDPSIPIFSVFGQLVMGLILSSVFYNLNQTTGSFYYRGASMFFAVLFNAFSSLLEIMSLFEARPIVEKHKKYALYRPSADALASIISELPVKLAMSMSFNFVFYFMVNFRRNPGRFFFYWLMCVWCTFVMSHLFRSIGAVSTSIAGAMTPATVLLLAMVIYTGFVIPTPSMLGWSRWINYINPVGYVFEALMVNEFHGREFQCAQYVPSGPGFENVSRSNQVCTAVGSIPGNEMVSGTNYLAGAYQ

SEQ ID NO: 1667 - protein, 1439 aa, Dictyostelium discoideum
MEENSNKFEQELKEIGQDRNQFPHISVEESLQEFDSFSNKIENESKQFGAQKDPESYMAGGETEEDFKLRKYFENSERMHLENGGNEKKMGVSIRNLTVVGLGADASVIADMSTPFFSILNFFKPSFWTKKTSTFDILHDVTTFCKDGEMVLVLGRPGAGCSTLLRVIANQTASYVSVKGDVRYGGIPSKEFERYRAESIYTPEEDSHHPTLTVRETLDFALKCKTPGNRLPDETKRSFREKVFNLLLSMFGIVHQADTIVGNEYVRGLSGGERKRLTITEAMVSSASITCWDCSTRGLDAASAFDYAKSIRIMSDTLHKTTIASFYQASDSIYNVFDKVCVLEKGRCIYFGPVGMAKQYFMSLGFDCEPRKSTPDFLTGVTNPQERIIKKGFEGRTPETSADFEAAWKNSDIYRDQLQEQKEYEELIERTQPKVAFVQEVKDENSKTNFKKSQYTTSFITQVVALTKRNFQLILNDKFGLFTKYLSVLIQAFVYSSVFYNMASDINGLFTRGGAILSAVIFNAFLSVGEMSMTFIGRRVLQKHKSYALYRPSALHIAQVVNDIPFTLLQVFLFSIIAYFMFGLEYDGGKFFIFSFTLVGASLACTALFRCFGYLCPSMYIAQNISNVFIIFMLTYSGYTVPIPKMHPWFSWFRHINIFTYAFKAIMANEFEGKEFNCLESAIPYGPAYQGSEFDAYRICPLGGIEQGSLYFKGEFYMDKTLRFKEGEMSQNVIIVYCWWIFFVICNMLAMEYIDHTSGGYTHKVYKKGKAPKMNDVEEEKQQNAIVANATNNMKDTLHMDGGIFTWQNIRYTVKVPGGERLLLNNIEGWIKPGQMTALMGSSGAGKTTLLDVLAKRKTLGVVEGDSHLNGRELEIDFERITGYVEQMDVHNPGLTVREALRFSAKLRQEPEVSLEEKFKYVEHVLEMMEMKHLGDALIGTLETGVGISVEERKRLTIGVELVAKPQILFLDEPTSGLDAQSSYNIIKFIRKLADAGMPLVCTIHQPSSVLFEHFDRILLLAKGGKTVYFGDIGEKSKTLTSYFERHGVRPCTESENPAEYILEATGAGVHGKSDVNWPETWKQSPELADISRELAALKEQGAQQYKIRSDGPAREFSQSTWYQTKEVYKRLNLIWWRDPYYTYGSFVQSALCGLIIGFTFWNLQGSSSDMNQRIFFIFEALMLGILLIFVVMPQLISQREYFKRDFASKFYSWFPFAISIVVVELPFIVISGTIFFFCSFWTAGLDKTSDSEQTFYFWFIFVIFLVFCVSFGQAVAAVCINMFFAMTLIPLLIVFLFLFSGVMTPPSSIPTFWRGWVYHLNPCRYFMEGIVTNILKTVDVKCSYEDMITFTFPKSYNTCQNYTSAFQSYGPSGYVESSILNGEPACSYCIYKNGEQYYKTLGWSDDNRWRNVGIIICFFVFNILMVILFVYLTRKGSR

SEQ ID NO: 1668 - protein, 1475 aa, Dictyostelium discoideum
MDSNENKKNGGDSLKLNIINNNNDNNNNNDNNNNSTEEHIESVEQSIKEFNNVANELETEFRDYLVETHKNDVNNIKNDIEAPPSGEFEPGGGAEDEDFKLRNYFKQSKVDAIQNGGKLKKMGVSFKNLTVIGKGADQSVVSDLATPFTFLISKLNVKNWFKKSKPSTFDILHDVSGFCKDGEMLLVLGRPGSGCSSLLRTISNQTGSYVDVLGSVTYGGIDQKKWDKYKAECIYVPEEDTHYPTLTVRETLEFALKCKTPSNRLPNEKKRTFRSKIFNLLLGMFGMVHQAETMVGNEFVRGLSGGERKRITIAESMVSASSINCYDCSTRGLDAASALDYAKSIRIMSDTLHKTTIASFYQASDSIYNLFDRVLILEKGRCVYFGPVGLAKQYFIDMGFECEPRKSTPDFLTGVTNPQERKVRPGFTVPESSAEFEEAWKQSEIYAQSCQEQREYEKLIEIEQPSIDFIQEITEQKSKSTSKSSPYTTGFFVQVIALTIRNFQIIWGDKFSLISRYSSVLVQAPIYGSVFFAMSNSIDGAFTRGGAIFSSILFNALLSEQELSITFTGRRILQKHKTYAMYRPAALHFAQIITEIPIIMIQVFLFSIVTYFMFGLDSSGSKFFINCFTLIGFTLATNNLYRLAGNLTPSVYIGQNIMNVLFLTMMTFTSYIIPYHQMPVWFGWYHYCNPFSFAFRALMGNEFNGLKFDCIEDAIPKGEFYQNETFTPYRSCATTAAEPGQLYFTGERYLEKSFGWEIKPSTQGFIAYNICIVYGFWILFIICNCIVLNIIDWTSGGFTCKVYLKGKAPKMNDVENEKQQNLLVQQATNNMKESLSMPGGLFTWQHMYYSVPIGGNTMKLLLDDIQGWIKPGQMTALMGSSGAGKTTLLDVLAKRKTTGQVQGTTLLNGKPLEIDFERITGYVEQMDVLNPALTVRETLRFSAKLRGEPTISLEEKFKYVEQVLEMMEMKHLGDALIGDLETGVGISVEERKRTTIGVELVAKPHILFLDEPTSGLDAQSSYNIIKFIRKLADAGMPLVCTIHQPSSVLFEHFDRILLLAKGGKTVYFGDIGEKSKTLTSYFQRHGVRECSDSENPAEYILEACGAGRHGKSVVDWPQAWKESPEYQSICQELKELQVTGSSYASIHVDNGKPREYATSLTYQTIEVYKRLNLIWWRSPGYSYGTFIQSALVGLINGWTFYNLQDSANDMNQRIFFIFNVTMLGILLMFLVLPQFITQQDYFKRDYASKFYHWLPFALSIIVVELPFVLVSGTIFFFCSFWTAGLNSDASTNFFFWLIFMLFLFYCVGFGQAIGAVCINITVALNLLPVLIIFLFLFCGVLVIPDQIPHFWKWVYHLNPCTHFLEAMVTNVLKHVNVVCTTDDLIKFVKPSSFSTCSDYAFEFLNGSNHSVSGSVQSLGGDNCGYCLYKNGEEYYSKLGWSYDNRWRGFGIIAGYFVLNIFLVVLFVFLTRKGKR

SEQ ID NO: 1669 - protein, 1449 aa, Dictyostelium discoideum
MEEYELREIALQEGGSNLDINTPPNYDNPVGDGSSPPDSPDIQKSENQFKNVERELEIDSKQYLAGHDAENNHDENDEDFKLRRYFENSQRMALGNGQKPKKMGVSIRNLTVVGRGADQSVIADMSTPFISFFNLFKPSTWKEKGSTFDILHDITLFNRDGGMLLVLGRPGSGCSTLLRLISNQRGSYVEVKGDIKYGGIPAKEWKRYQGESIYTPEEDTHHPTLTVRQTLDFALKCKTIHNRLPDEKKRTYRQKIFDLLLGMFGIVHQADTIVGNEFIRGLSGGERKRLTITEAMVSSASITCYDCSTRGLDAASALDYAKSIRIMSDTLDKTTIASFYQASDSIYNLFDNVAIIEKGRLIYFGPGNKAKQYFIDLGFDCEPRKSTPDFLTGVTNPQERIIRQGFEGRVPETSADFEAAWRNSSMYRDMLEEQKEYERKIEIEQPAVDFIQEVKAEKSRTTPKRSIYTTSYITQVKALIVRNSQIIWGDKFSLISRYLSVFTQSFVYGSIFFQMEKTIPGLFTRGGAIFSAILFNAFLSEAELPLTMYGRRILQKQRSYAMYRPSALHIAQIVTDIPLTMIQVFLFSIVVYFMFGLQYNAGKFFIFCFTLVGATLATTNLFRVFGNFSPSLYISQNVMNVILIFMITYCGYTIPKPKMHPWFAWFYWANPFSYAFKALMANEFGDLSFDCHDTAIPFDPKNPTRYDNDYRVCASPGAVEGILSVEGKDYLDQYLHFRSDDLTQNVFITYLWWVLFTAMNMFAMEYFDWTGGGYSHKVYKKGKAPKMNDAEEEKKQNQIVANATSKMKDTLKMRGGIFTWQNINYTVPVKGGKRLLLDNVEGWIKPGQMTALMGSSGAGKTTLLDVLAKRKTMGEVQGKCFLNGKPLEIDFERITGYVEQMDVHNPGLTVREALRFSAKLRQEPSVSLEEKFDYVEHVLEMMEMKHLGDALIGTLETGVGISVEERKRLTIGVELVAKPHILFLDEPTSGLDAQSSYNIVKFIRKLADAGMPLVCTIHQPSSVLFEHFDRILLLAKGGKTVYFGDIGERSKTLTSYFERYGVRPCTESENPAEYILEATGAGVHGKSDVNWPETWKQSPELQEIERELAALEAAGPSSTEDHGKPREFATSVWYQTIEVYKRLNLIWWRDPFYTYGSFIQSALAGLIIGFTFWSLQGSSSDMNQRVFFIFEALILGILLIFVVLPQFIMQKEYFKRDFASKFYSWFPFAISIVVVELPFITVSGTIFFFCSFWTAGLNTEYNDINFYFWFIFILFLYFCVSFGQAVAAICFNMFLAHTLIPLLIVFLFLFCGVMVIPSSIPTFWRGWVYHLNPCRYFMEGIVTNVLKHTDVKCTSEDFTHFTNPEAVNGVTCKQYFPISEPLTGYVEAINEGDESKCGYCLYNNGEEYYNTLGWSFDNRWRNLALIICFWIFNTLMVITFVYITRKPRR

SEQ ID NO: 1670 - protein, 1449 aa, Dictyostelium discoideum
MKEFELNEYSFQEVENLNINTPNNNNNFGVVGDDFQLNSPDIQNSENQFKYIANELETDSKQYLSNLDAENNHNENDEDFKLRKYFENSQRVALGNGQKPKKMGVSVRNLTVVGVGADQSVISDLSTPIFKILNLFKPSTWKEKGSTFDILHDITLFNRDGGMLLVLGRPGSGCSTLLRLISNQRGSYVEVKGDITYGGIPAKEWKRYQGESIYTPEEDTHHPTLTVRQTLDFALKCKTIHNRLPDEKKRTYRKRIFDLLLGMFGIVHQADTIVGNEFIRGLSGGERKRLTITEAMVSSASITCYDCSTRGLDAASALDYAKSIRIMSDTLDKTTIASFYQASDSIYNLFDNVAVIEKGRLIYFGPGNKAKQYFIDLGFDCEPRKSTPDFLTGVTNPQERIIRQGFEGRVPETFADFEAAWRNSSMYRDMLEEQKEYERKIEIEQPAVDFIQEVKAEKSKTTSKRSIYTTSFLTQVKALIVRNFQIIWGDKLSLGSRYLSVFTQSFVYGSIFYNLETNINGLFTRGGTLFSVILFNALLCECEMPLTFGQRGILQKQHSYAMYRPSALHIAQIVTDIPLTIIQVFLFSIVVYFMFGLQYDAGKFFIFCFTLVGATLATTNLFRMFGNFSPSLYISQNVMNIFIISMITYTGYTIPKPKMHPWFSWFYWCNPFSYAFKALMANEFGDLSFDCQDTAIPSDPNKIIVYDNSYRICASPGASMGNLTVSGSKYIEESFHFRSDDLTQNVFILYLWWILYIVLNMFAMEYFDWTGGGYSHKVYKKGKAPKMNDVEEEKKQNQIVANATSKMKDTLKMRGGIFTWQNINYTVPVKGGKRLLLDNVEGWIKPGQMTALMGSSGAGKTTLLDVLAKRKTMGEVQGKCFLNGKPLEIDFERITGYVEQMDVHNPGLTVREALRFSAKLRQEPSVLLEEKFDYVEHVLEMMEMKHLGDALIGTLETGVGISVEERKRLTIGVELVAKPHILFLDEPTSGLDAQSSYNIVKFIRKLADAGMPLVCTIHQPSSVLFEHFDRILLLAKGGKTVYFGDIGEGSKTLTSYFERYGVRPCTESENPAEYILEATGAGVHGKSDVNWSETWKQSPELQEIERELAALEAQGPSSTEDHGKPREFATPIWYQTIEVYKRLNIIWWRDPFYTYGSFIQASMAGLIMGFTFWSLKGSSSDMSQRVFFIFETLILGILLIFVVLPQFIMQQEYFKRDFASKFYSWFPFAISIVAVEIPIVIISGTFFFFCSFWTAGLYTKFNEINFYFWFILILYLLFCVSFGQAVSAISFNLFLAHTLIPLLIVFLFLFCGVMVIPSSIPTFWRGWVYHLNPCRYFMEGIVTNVLKHTDVKCTSEDFTHFTNPEAVNGVTCKQYFPISEPLTGYVEAINEGDESKCGYCLYNNGEEYYNTLGWSFDNRWRNLAILICFWIFNILMVITFVYITRKPRR

SEQ ID NO: 1671 - protein, 1476 aa, Dictyostelium discoideum
MGEDKTFQSIRISENNNNNNNNNNNNNNNNNNNLNNNNDNDYDYDSINNIEEKFENVSKELEGQSIKFREIDGGKNNNNHDIELGERKPENEEDFKLRQYFEDSQRQKMLINHKPKKMGVSIKNLTVVGQGADNSVIVDNSTPFKALGKLLNPFNYFKKDKNKINTFNILNDINAFIEDGKMLLVLGRPGAGCSTLLRVIANQRESYISVDGDVTYGNIAASDWSKYRGETLYTGEEDIHHPTLTVRETLDFTLKLKTPGNRLPEESKRNFRTKIYELLVSMYGLVNQGDTMVGNEFVRGLSGGERKRITITEAMVSGSSITCWDCSTRGLDAASAYDYAKSLRIMSDTLDKTTIASFYQASDSIYNLFDKVIVLDKGRCIYFGPIGLAKQYFLDLGFDCEPRKSTPDFLTGITNPQERIVKVGFEGRVPETSVDLEDAWKKSQLFQSMKHAQLEYEKQVEQQKPSVDFKEQVLNEKSRTTSKNSEYSSSFYAQTIALTQRQLSLTWGDKFTLTSRFLTILVLSFIFGGIYFQQPLTTDGLFTRGGAIFTSIIFNCILTQGELHGALSGRRILQKHKSYALYRPSAYFVSQILIDIPFILVQVFLHSFIVYFMYGFEYRADKFFIFCFTLVGVSLSSASLFRGFANFTPSLFTAQNLMNFVFIFEVNYFGYSQTPDKMHSWFKWTYYINPLAYAFKSLMINEFKGLDFSCLDSAIPFDHFNNSTYSDMSHRICAVPGSIEGSLSVKGENYLWDALQINSDHRALNVVVIFLFWLFYIGLNLFAVEYFDWTSGGYTHKVYKRGKAPKLNDVEEERNQNQIVKKATDNMKDTLKMRGGLFSWKSISYTVPVAGTNKLLLDDIMGWIKPGQMTALMGSSGAGKTTLLDVLAKRKTMGTVTGESLLNGKQLEIDFERITGYVEQMDVHNPGLTVREALRFSAKLRQEPWVPLKDKYQYVEHVLEMMEMKHLGDALIGTLETGVGISVEERKRLTIGVELVAKPQILFLDEPTSGLDAQSSYNIIKFIRKLADAGMPLVCTIHQPSSVLFEHFDRILLLARGGKTVYFGDIGDKSKTLTSYFERHGVRPCTESENPAEYILEATGAGIHGKTDVNWPEAWKQSSEYQNVVNELDLLRTKEELGKYILDSDLQVDGKQAPPREFANGFLTQFIEVYKRLNIIYYRDVFYTMGSFAQSAVSGLVIGFTFYDLKNSSSDQQQRIFMSWEAMILGVLLIYLVLPMFFIQKEYFKRDTASKYYSWHAFSLSMIAVEIPYVVLSSTLFFIATYWTSGIDSTASANFYYWLMHTMFSVYIVSFAQALGAACVNIAISIAALPIVLFYLFLLCGVQIPPPAMSSFYQDWLYHLNPAKYFLEGLITTVLKPIEVLCTDVDLIKFTAPSGTDCQTYSAPFLQQATGYVVPLSNTTNECGYCIYSSGSDYFETSLGWDYGHRWRNFGIIVAYWGSSILAVLFFVYLTQKPRR

SEQ ID NO: 1672 - protein, 1942 aa, Dictyostelium discoideum
MSTIKISSFFKSIFSTINGKDKSINLNNNDNIKNNNNNNSIKNNNNNNIKNNNPSDNDIKPTEGGIDDMTLITATSLTIPPTKGGDYIESDTLKSMLIIDDTNDDNSSTTTVGCGDNNEQQQQQQQQQEQQQEQQQEQHEEFKIPMIQIQTPQINDNNIEWPTWCKDYENRYDLRPISRNGLDDTSNRLNSGFKGENFVYQNTKFVSKLYWKGNSPIFGDIEVDPDNNNNFDITASPTSGGIKQLNIRTSYNGIVNEDDDRMLLGIVYWKNTSEGPPGCVHGGALASMFDDSMACCIRYFYNNNFDDLNLQKQKQKQKQQQQEQEQPQGNRNGIVIPPITNSKTYVVTANLSVNYKKFVVLESFSSVETRIQKRDGKKIFISSTIKDQNGVIRAESTAIWIVVKIDTPISTTSSPPSFLSPLPSPTSNKLNENKLNENENNNNNNNNNNNNNNNNNIQFDNNSCSKCHSYDTIDMLSISENNNNNNNNNNNNNNNNNNNLNNNNDNDYDYDSINNIEEKFENVSKELEGQSIKFREIDGGKNNNNHDIELGERKPENEEDFKLRQYFEDSQRQKMLINHKPKKMGVSIKNLTVVGQGADNSVIVDNSTPFKALGKLLNPFNYFKKDKNKINTFNILNDINAFIEDGKMLLVLGRPGAGCSTLLRVIANQRESYISVDGDVTYGNIAASDWSKYRGETLYTGEEDIHHPTLTVRETLDFTLKLKTPGNRLPEESKRNFRTKIYELLVSMYGLVNQGDTMVGNEFVRGLSGGERKRITITEAMVSGSSITCWDCSTRGLDAASAYDYAKSLRIMSDTLDKTTIASFYQASDSIYNLFDKVIVLDKGRCIYFGPIGLAKQYFLDLGFDCEPRKSTPDFLTGITNPQERIVKVGFEGRVPETSVDLEDAWKKSQLFQSMKHAQLEYEKQVEQQKPSVDFKEQVLNEKSRTTSKNSEYSSSFYAQTIALTQRQLSLTWGDKFTLTSRFLTILVLSFIFGGIYFQQPLTTDGLFTRGGAIFTSIIFNCILTQGELHGALSGRRILQKHKSYALYRPSAYFVSQILIDIPFILVQVFLHSFIVYFMYGFEYRADKFFIFCFTLVGVSLSSASLFRGFANFTPSLFTAQNLMNFVFIFEVNYFGYSQTPDKMHSWFKWTYYINPLAYAFKSLMINEFKGLDFSCLDSAIPFDHFNNSTYSDMSHRICAVPGSIEGSLSVKGENYLWDALQINSDHRALNVVVIFLFWLFYIGLNLFAVEYFDWTSGGYTHKVYKRGKAPKLNDVEEERNQNQIVKKATDNMKDTLKMRGGLFSWKSISYTVPVAGTNKLLLDDIMGWIKPGQMTALMGSSGAGKTTLLDVLAKRKTMGTVTGESLLNGKQLEIDFERITGYVEQMDVHNPGLTVREALRFSAKLRQEPWVPLKDKYQYVEHVLEMMEMKHLGDALIGTLETGVGISVEERKRLTIGVELVAKPQILFLDEPTSGLDAQSSYNIIKFIRKLADAGMPLVCTIHQPSSVLFEHFDRILLLARGGKTVYFGDIGDKSKTLTSYFERHGVRPCTESENPAEYILEATGAGIHGKTDVNWPEAWKQSSEYQNVVNELDLLRTKEELGKYILDSDLQVDGKQAPPREFANGFLTQFIEVYKRLNIIYYRDVFYTMGSFAQSAVSGLVIGFTFYDLKNSSSDQQQRIFMSWEAMILGVLLIYLVLPMFFIQKEYFKRDTASKYYSWHAFSLSMIAVEIPYVVLSSTLFFIATYWTSGIDSTASANFYYWLMHTMFSVYIVSFAQALGAACVNIAISIAALPIVLFYLFLLCGVQIPPPAMSSFYQDWLYHLNPAKYFLEGLITTVLKPIEVLCTDVDLIKFTAPSGTDCQTYSAPFLQQATGYVVPLSNTTNECGYCIYSSGSDYFETSLGWDYGHRWRNFGIIVAYWGSSILAVLFFVYLTQKPRR

SEQ ID NO: 1673 - protein, 1449 aa, Dictyostelium discoideum
MEEYELREIALQEGGSNLDINTPPNYDNPVGDGSSPPDSPDIQKSENQFKNVERELEIDSKQYLAGHDAENNHDENDEDFKLRRYFENSQRMALGNGQKPKKMGVSIRNLTVVGRGADQSVIADMSTPFIKFFNLFKPSTWKEKGSTFDILHDITLFNRDGGMLLVLGRPGSGCSTLLRLISNQRGSYVEVKGDITYGGIPAKEWKRYQGESIYTPEEDTHHPTLTVRQTLDFALKCKTIHNRLPDEKKRTYRKRIFDLLLGMFGIVHQADTIVGNEFIRGLSGGERKRLTITEAMVSSASITCYDCSTRGLDAASALDYAKSIRIMSDTLDKTTIASFYQASDSIYNLFDNVAVIEKGRLIYFGPGNKAKQYFIDLGFDCEPRKSTPDFLTGVTNPQERIIRQGFEGRVPETFADFEAAWRNSSMYRDMLEEQKEYERKIEIEQPAVDFIQEVKAEKSKTTSKRSIYTTSFLTQVKALIVRNFQIIWGDKLSLGSRYLSVFTQSFVYGSIFYNLETNINGLFTRGGTLFSVILFNALLCECEMPLTFGQRGILQKQHSYAMYRPSALHIAQIVTDIPLTIIQVFLFSIVVYFMFGLQYDAGKFFIFCFTLVGATLATTNLFRMFGNFSPSLYISQNVMNIFIISMITYTGYTIPKPKMHPWFSWFYWCNPFSYAFKALMANEFGDLSFDCQDTAIPSDPNKIIVYDNSYRICASPGASMGNLTVSGSKYIEESFHFRSDDLTQNVFILYLWWILYIVLNMFAMEYFDWTGGGYSHKVYKKGKAPKMNDVEEEKKQNQIVANATSKMKDTLKMRGGIFTWQNINYTVPVKGGKRLLLDNVEGWIKPGQMTALMGSSGAGKTTLLDVLAKRKTMGEVQGKCFLNGKPLEIDFERITGYVEQMDVHNPGLTVREALRFSAKLRQEPSVSLKEKFDYVEHVLEMMEMKHLGDALIGTLETGVGISVEERKRLTIGVELVAKPHILFLDEPTSGLDAQSSYNIVKFIRKLADAGMPLVCTIHQPSSVLFEHFDRILLLAKGGKTVYFGDIGERSKTLTSYFERYGVRPCTESENPAEYILEATGAGVHGKSDVNWPETWKQSPELQEIERELAALEAAGPSSTEDHGKPREFATSVWYQTIEVYKRLNLIWWRDPFYTYGSFIQSALAGLIIGFTFWSLQGSSSDMNQRVFFIFEALILGILLIFVVLPQFIMQKEYFKRDFASKFYSWFPFAISIVGGELPFITVSGTIFFFCSFWTAGLNTEYNDINFYFWFIFILFLYFCVSFGQAVAAICFNMFLAHTLIPLLIVFLFLFCGVMVIPSSIPTFWRGWVYHLNPCRYFMEGIVTNVLKHTDVKCTSEDFTHFTNPEAVNGVTCKQYFPISEPLTGYVEAINEGDESKCGYCLYNNGEEYYNTLGWSFDNRWRNLALIICFWIFNTLMVITFVYITRKPRR

SEQ ID NO: 1674 - protein, 1466 aa, Dictyostelium discoideum
MSDDYELKELQPPEGANCNYNINTPQYENNNNNNNNTSGNESPNILNSENQFNQVANELENDSKQFFSNQDPEMNVEHSNVAQNEQDFKLRSYFENSQRIALGNGQKPKKMGISIRNLTVVGKGADISVISDLSTPFVTIFNLFRPSTWRKSSGSTFDILHDVTLFNRDAEMLLVLGRPGAGCSTLLRVISNQRSSYVSVSGDVTYGGINFDEWKNFKGESIYTPEEDTHHPTLTVRETLNFALKCKTIHNRLPDEKKKTFRKKIYDLLVGMFGISKQSDTLVGNEFIRGLSGGERKRLTITEAMVSSASITCYDCSTRGLDAASALDYAKSIRIMSDTLHKTTIASFYQASDSIFNLFNNVAILEKGRLIYFGPVGLAKQYFLDLGFDCEPRKSTPDFLTGVTNPQERKVRPGFEGRAPETSSDFEKAWKSSDLYQVMLQQQLEYEKKIELEQPSTNFIEQIRNENSKTNPTKSIYTTSYFTQVRALIARNSQIIWGDRFALISKYISIIVQTFVYASLFYNMKSDVTGLFNRGGAIYAAILFNAFVSAGELGLTFYGRRILQKQHSYAMYRPSALHIAMVITDIPLTAIQVTIFSVIVYFMYGLQVDAGKFFIFLFTIFGSTLSMVAFFRALGNLSPSLYVSQNILNVFILFMFTYGGYSIPKNKMHPWFSWYFWINPFSFPYKALMANEFGDMNFTCNDQTAIPNGNYIASNGSTMSYQDQYRACPSAGAIEGQMVNGEFYVAGSNYIDAALDFKSDDRTLNVIITFLWWIFFVIINMIALELFDWTSGGMPHKVYKRGKAPKINDDEEERQQNAMVENATSKMKDTLKMRESCFTWNHIHYTVQLNGKDLLLLNDVEGWIKPGQMTALMGSSGAGKTTLLDVLAKRKTMGTVTGKCLLNGKELNIDFERITGYVEQMDVHNPGLTVREALRFSAKLRQEPTVSLQDKYEYVEQVLEMMEMKHLGDALIGSLETGIGISVEERKRLTIGIELVAKPHILFLDEPTSGLDSQSSYNIVKFIRKLADAGMPLVCTIHQPSSVLFEYFDRILLLAKGGKTVYYGDIGEKSKTLTSYFERNGVRSCTESENPAEYILEAIGAGTNPGVSTIDWPEVWKQSPELQDVQAELASLETAATVQISSDDQDHGPPREFATSIWYQTWEVYKRLNLIWWRDMSYVYGIFTQAAASGLIIGFTFWNLDLSSSDMNQRVFFIFEILFLGILYIFIAIPQFLIQKAYFKKDYASKFYSWCPFAISIVIVELPFVAVAGTICFFCSFWTAGIYYNGEYDFYFYITFILFLFICVSLGQVVSAFCFNVMLAQTILPLLLVMLFLFCGVLVPYEQIPNFWKFVYHSNPCRYFLEGVVTSVLKNVFVDCSNEDLTKFSNPTNLTCKEYFKPTYGNVRAVTKGDESECGYCVFKSGEEYYKTLGWSYENRLRNYGILWAFFIFNIIMVVSFVYLTKKPNR

SEQ ID NO: 1675 - protein, 1441 aa, Dictyostelium discoideum
MVHNNDGDNNDQEMQEIGINEKRSQFPHISVEESRQEFDSFSNNIEGESKQFGMNRDAESNMAVESEEDFKLRKYFENSNRMHLENGGNEKKMGVSIRNLTVVGLGADASVIADMSTPFYGLVKLFTPSFWTKKTSTFDILHDVTTFCKDGEMVLVLGRPGAGCSTLLRVIANQTASYVSVKGDITYGGIPSKEFEKYRGEPIYTPEEDSHHPTLTVRETLDFALKCKTPGNRLPDETKRSFRDKVFNLLLSMFGIVHQADTIVGNEFIRGLSGGERKRLTITEAMVSSASITCWDCSTRGLDAASAFDYAKSIRIMSDTLHKTTIASFYQASDSIYNVFDKVCVLEKGRCIYFGPVGMAKQYFMSLGFDCEPRKSTPDFLTGVTNPQERIIKKGFEGRTPETSADFEEAWKNSDIYRDQLQEQKEYEELIERTQPKVAFVQEVRDANSKTNFKKSQYTTSFVTQVIALIKRNFALVLNDKFGMYSKYLSVLIQGFVYASLFYNMDTDITGLFTRGGAILSAVIFNAFLSIGEMAMTFYGRRVLQKHKSYALYRPSALHIAQVVTDIPFTAIQVFLFSIIAYFMFGLQYDAGKFFIFCFTLLGASLACTALFRCFGYLCPSMYIAQNISNVFIIFMLTYSGYTIPIPKMHPWFSWFRHINIFTYAFKALMANEFEGLDFNCKESAIPYGPAYQGSEFDAYRICPLGGIEQGSLYFKGDFYMDKTLSFATGEMSQNVIIVYCWWVFFVVCNMFAMEYIDHTSGGYTHKVYKKGKAPKMNDVEEEKQQNAIVAKATSNMKDTLHMDGGIFTWQNIRYTVKVPGGERLLLDNIEGWIKPGQMTALMGSSGAGKTTLLDVLAKRKTLGVVEGDSHLNGRELEIDFERITGYVEQMDVHNPGLTVREALRFSAKLRQEPEVSLEEKFKYVEHVLEMMEMKHLGDALIGTLETGVGISVEERKRLTIGVELVAKPQILFLDEPTSGLDAQSSYNIIKFIRKLADAGMPLVCTIHQPSSVLFEHFDRILLLAKGGKTVYFGDIGEKSKTLTSYFERHGVRPCTESENPAEYILEATGAGVHGKSDVNWPEAWKQSPELADISRELAALKEQGAQQYKPRSDGPAREFSQSTWYQTKEVYKRLNLIWWRDPYYTYGSFVQAALCVKYWFYIWNLQGSSSDMNQRIFFIFEALMLGILLIFVVMPQLIIQREYFKRDFASKFYSWFPFAISIVVVELPFIVISGTIFFFCSFWTAGLHKTSDDEQTFYFWFIFIIFMFFCVSFGQAVAAVCINMFFAMTLIPLLIVFLFLFCGVMVPPSSIPTFWRGWVYHLNPCRYFMEGIITNILKTVRVECSEEDMAIFTFPKSYNTCQNYTSAFQSYKPSGYVESATLNGEPACGYCIYKNGEEYYETLGWSADNRWRNVGIIIGFFVFNILMVILFVYLTRKGSR

SEQ ID NO: 1676 - protein, 1448 aa, Dictyostelium discoideum
MDNNVEYELKEVSIQEGGSNLNINTPSGMSDGDFNSGANSPDIVKSENDFDKLAESLEKESKQYFAAQDNENNAGESEEDFKLRRYFENSQRMALSNGSKPKKMSICIRNLTVVGRGADLSVIADLLTPFNWFISLFKPSTWKIEKTSTFNILNNVTCFNRDGQMLLVLGRPGAGCSTLLRLISNQRGSYISVDGDIKYGGIPAKEWERYKGEAIYTPEEDSHHPTLTVRETLDFALKCKTIHNRLPDEKKVTFREKISSLLLSMFGIVHQADTIVGNEYIRGLSGGERKRLTITEAMVSSASITCWDCSTRGLDAASALDYAKSIRIMSDTLHKTSIASFYQASDSIYNLFDNVLVLEKGRCIYFGPVGQAKQYFLDLGFDCEPRKSVPDFLTGVTNPQERIIRKGFEGRVPETSADFEQAWKASELCREMERQQTEHEKKIEVEQPHLDFIEEVRANKSKTNTKTSVYTTSFPTQVRALIVRHSQIIWGDKFSLVSRYLSVIIQSFVYGSVFYNMQTNLSGLFTRGGAIFAAILFNAFLSEGELFATFYGRRILQKQQSYAMYRPSAFHIAQVVTDIPLTTVQVFLFSIVVYFMFGLQYEAGKFFIFCFTLIGATLATTNMFRAFGNLSPSLYVSQNVMTGILIFMISYCGYSIPKNKMHPWFGWFFWANPFTYAFKALMANEFMDLNFSCETEAIPYGTDPTTGAPYDNSVRVCASAGSRPNTLEVKGSDYLMDALTFKSDDRTLNIFITYLWWVLFIIINMVAVEYLEWTSGGFTTKTYKKGKAPKLNDAEEERKQNEIVAKATSEMKDTLKMRGGVFTWENIKYTVPVGKTQKLLLDDVEGWIKPGQMTALMGSSGAGKTTLLDVLAKRKTLGTVQGKTFLNGKALEIDFERITGYVEQMDVHNPGLTVREALRFSAKLRQEPSVSLEEKYDYVEHVLEMMEMKHLGDALVGTLETGVGISVEERKRLTIGVELVAKPHILFLDEPTSGLDAQSSYNIVKFIRKLADAGMPLVCTIHQPSSVLFEHFDRILLLAKGGKTVYFGDIGERSKTLTSYFERQGVRPCTEFENPAEYILEATGAGVHGKTEINWPEVWKQSPELQEVRRELSSLEASGSSSSSNENGVPREFATSIWYQTWEVYKRMNVIYFRDPFYAYGSILQAVMTGIIVGFTFWDLKDSSSDMNQRIFFIFQALLLGILLIFVVMVQFLVQKEYFKRDYASKFYSWFPFAISIVLVEIPYTIVCGSVFFFCSFWTAGLFMEGQNGANFYFWIIFIIYLFFCVSFGGAIAAVCNHMFLAMTLVPLLIVFLFLFCGVMVPPSQIPTFWKGWVYHLNPCRYFMEGIITNVLEHQKVNCSYEDLTKFNNPTTLTCEEYFVPATGYVTNTTSDNSECGYCIFNSGEQYYKTLEWDASNKGRSIAILIAFWMFNIFLVVSFVYLTRKPSR

SEQ ID NO: 1677 - protein, 1328 aa, Dictyostelium discoideum
MAPPEIGNDEIPLQEFGQKSFAADNTIGGMQSISYDNSGAPMGLYKEKKGMYVTARNLSMSIGTEKKGDKRNILSDLNFFLKPGSMVLILGSPGCGKTSVMKALANQLHSETVSGSLLFNGKAANKSTHHRDVAYVVQGDHHMAPFTVRETFKFSADLQMSEGTSEEEKNARVDYILKTLDLTRQQDTVVGNEFLRGVSGGQKKRVTIGVEMVKDAGLFLMDEPSTGLDSTTTLELMKHFRELSNVNQVSSLVALLQPGVEVTKLFDFLMIMNAGHMVYFGPMSDAISYFEGLGFKLPKHHNPAEFFQEIVDEPELYFEGEGEPPLRGAEEFANAYKNSAMFQSIVNDLDNTQPDLTFCKDSSHLPKYPTPLSYQIRLASIRAFKMLISSQVAVRMRIIKSIVMGLILGSLFYGLDLNQTDGNNRSGLIFFSLLFIVFSGMGAIAILFEQREVFYIQKDGKYYKTFAFFLSLIFSEIPIALLETVVFCVLVYWMCGLQANAEKFIYFLLMNFVGDLAFQSFFKMVSAFAPNATLASVIAPAALAPFILFSGFMAPKRSIGGWWIWIYWISPIKYAFEGLMSNEHHGLIYSCDDSETIPPRNTPNFELPYPRGSGNSSICQITRGDQFLDQLGMPQNNWFKWIDLLIVFAFGALFSFGMYFFLKNVHVDHRASDPKNDKRSKKASKRSKKIKDSKVDIKENRMVKAQKEIPIGCYMQWKDLVYEVDVKKDGKNQRLRLLNEINGYVKPGMLLALMGPSGAGKSTLLDVLANRKTGGHTKGQILINGQERTKYFTRLSAYVEQFDVLPPTQTVKEAILFSAKTRLPSDMPNEEKIKFVENIIETLNLLKIQNKQIGHGEEGLSLSQRKRVNIGVELASDPQLLFLDEPTSGLDSSAALKVMNLIKKIASSGRSIICTIHQPSTSIFKQFDHLLLLKRGGETVYFGPTGDKSADLLGYFENHGLICDPLKNPADFILDVTDDVIETTLDGKPHQFHPVQQYKESQLNSDLLAKIDAGVMPVGTPVPEFHGVYSSSYQTQFVELGKRSWLAQVRRVQNIRTRLMRSLFLGVVLGTLFVRMEETQENIYNRVSILFFSLMFGGMSGMSSIPIVNMERGVFYREQASGMYSIPIYLFTFIVTDLPWVFLSAIIYTVPMYFISGLRLDPNGAPFFYHSFISFTTYFNFSMLAMVFATVLPTDEIAHALGGVALSISSLFAGFMIPPASIAKGWHWFYQLDPTTYPLAIVMINEFQDLEFHCTSSESVTIPNVLTVNGTYIDVGPICPITNGNQILQRYEMKPEDKYKFLAVIFGYSVFFFICIFIALKFIRHQTK

SEQ ID NO: 1678 - protein, 1528 aa, Dictyostelium discoideum
MKLTNSISPTNLDGEINKNSQPSNDNQQQQQPKINKIINKFSESINSVSKTIGKGIGDLTSSNALDEHIKNHNSNFIDPFYNEEAVVVVDDENIRSLIGDNCSSIGNIGVNGIEAFYGEHNNKKSELIKQFLKINSTNNKSNQTIVVDHMDYSVMERQSSSSSSSSSRSTGVSKLIPFLKRKEKIEILKDLSFYLKPGMMVLLLSEAGSGVSTLFKCLTNRIPKRGSINGDILFDNEPIDGESHHSQYLFVQQSDHHISTLTVKETLEFSIECQSNLSREAKKQLSSNILSILGISHVADTYIGNQSIRGISGGQKKRMTVAVELVKGAKAIMIDQATNGLDSTSAFELLNSIQMISKVSNVPALVSLLQPSPEIFSIFSHILMMKDGEITFFGEKHQIFDHFSDYGLECKDKQNPAEFLSSIYHQAQLDPDCQLKSSSDFIVAYKQSQYYKDCLIKISQERLSNHKFSGDKSIKIIENEKEQQQQEIYQLSLIKQIQLNLKRAFLTTIRDRASILSRVIKSSLLGLLIGTLFFQLDSSQKSANLLPSLSFFLLTFVVFGSLAGVGQVFSERPVFYDQKIGKYYKSIAYFFAGLVSDLIWNFIDVIIFCSISYWLIGLNHSADRFFFFLLAIYLLDCLVNRVSKMVSIYSPNAAIASTIAPLYFSLFLLMAGYLIHRNSIPIYWRWMHYISPFKWVFEAILSNQLHGQTFTCKSDELLPPIGYPLLNVSFPDGYSGSQVCPIIDGIEILKSKDINSDYSYKYYSVWIILSMYLLFSILSIIGLSNITFDNIISNKEKNNGNGNNNYNGKESINEESIKLSIKQHQQKQFESNEKCYLTFKNLTYKVLIKKKNHQKVSRTLLHDINGYVKPGSMVALIGSSGAGKSTLLDILANRKDQGIISGEILLNGKARDKCFNRYVAYVEQEDTLPDFQTVREAITFSALLRLPNDTMTHQDKLDTVDYILDVLELNSIANTLIGKVDHGITQEQRKRVNIAIEMASLPDILFLDEPTTGLTSVAAELIMQLIKRVALDGRSVICTIHQPSETIFKKFDSILLLTQGGFVAYFGELGPNCRTVLNYCSDLGFNCPQGKNPADFLLDFSASFNSASRLASNDKMIPSIRSRIKNVGNYCFDGSSNLNNKNEIKQQQTTTQNVNLGNEDKQQQQQEEANDDNNIQEATSSNSNNNNNNDIIDNYQFSNLNRDTIEIIDSGLPIGFISKTFKEKNATSFLFQFFMLLFRFFVCAIRRRNLIMTRIIRSILLSVVTGTLYLQLKNDQDGVMDRISFIFFTSTFASISCLSNIPTVFEDRFLFYHELNSNTYRHLSYILAMILADLPFTIMYSLLFSAPIYWIVGLQNDVDKFLFFIFVYYLYLQVLVSFSQLLGMVSPTLATANEITGISFSVFSLFAGFIIKKDDIPSYYKWLNYVSITRYLVEPLTVNEMTGSVSFHCEPHQLIPVPIHYTPTNATASEPTKLVFKSFCPITQGNQVLYQFDINDTDKFEDTFVLIGLFIGFLLLILIFSKILKFKK

SEQ ID NO: 1679 - protein, 1476 aa, Dictyostelium discoideum
MENEEKREYLAKSRSNSRNFLNDSIESKNIFGVDKKSEPNLKQSIDGGLNFSTTSSYNPSNLPRTSVFVSARNLSSTVGHGKNEKKILTDLNFFLKPGSMVLLLGSPGCGKTSLMNTLALLTSNEKITGNLLFNGKTGDPNTHHRHVSYVVQDDFHMAPLTVRDTFKFSADCQSGDKSEKERIEIVDNVLDFLDLKHVQNTVVGDEFLRGISGGQKKRVTIGVELVKESNLLLMDEPTNGLDSSISLEMLTKIKNKVQQEKMSCLISLLQPGLEITKLFDYLMIMNQGQMSYFGPMNQAIGYFEGLGFKFPKHHNPAEFFQEIVDEPELYCGIDDGSSDGGSGDSGSSSGGSNYNYNFKNKASSTMMMMNNNNKIIPPLKGSDEFAMAYRKSIIYKHILEYIDSHIPDEEERSKFIDYSTTLKPYSTGFGRQLSLNVKRGFKLFLGNKASIRLRLLKNVIIGFILGTLYWKLDTTQADGSNRSGLLFFSLLTFVFGGFGSISVFFDQRQVFYSERAWKYYNTITYFLSMIVTDLPMSIVEVLIFSNFVYWMTGLNKTWDRFIYFFLTCLVCDVMSLSIIRSVCSFTKTKYAASAISPAVVSPFILMCGYMKHSNEIPGWWIWLYWISPIHYGFEGLLLNEHSGLDYHCSPDELMPPSFLPTFNTSYPVGFEGNQVCPITKGEQILDSIGFHTEFYYRWVDLAIISAFTLLFWLITLVCMKFLVFRVYRKDPVGIKKSKPNKTTTLIKMNRNSTDSTTTNNSMNYFNNKHNKKQNDDSDSGEEMESVDVDVKSSGKANLRKDIPIGCYMQWKDLVYEVDVKKDGKNQRLRLLNGINGYVKPGMLVALMGPSGAGKSTLLDVLANRKTGGHTKGQILINGQERTKYFTRTSAYVEQMDILTPVSTVREVILFSAKNRLPNSVPIQEKEEFVDNILETLNLLKIQHSLIGDVESGLSLSQRKRVNMGIELASDPQLLFLDEPTSGLDSSAALKVMNLIKKIASSGRSVICTIHQPSTTIFKKFDHLLLLKRGGETVYFGPTGTNSKIVLNYFAERGLICDPFKNPADFILDVTEDIIEIIQPPQTLPTSTSNENNNNNNNNNNNNNNNNNNNNNNNNNNNNGNTSDTLNNNNKKNLESSLSSSSISFDPVESFKESKENQKLLSIVENSIMPVGTPVAVYHGKYSSTIKTQFIELLKRSWKGGIRRVDTIRTRVGRSFVLGLVIGTLFLRLDKEQNDVFNRISFLFFSLMFGGMAGLSIIPTVSTERGVFYREQASGMYRVWIYYLTFVLSDLPFVIITSYAYVIPVYFLTGLSLSNHGWDFFYHSFISVMLYLNFGLTSIAFATSLPVEEMAFLLNGVLLSVTSLFAGFMIPPPSMPAAWKWAFYLDFISYPLKAFLITEFKDMEFVCTDNKGAIPIPIPSQNTTKFFCPITHGTQVLDRIDYKISFQYWDILIMASFTFALLVGGYLSLKFIRYQNK

SEQ ID NO: 1680 - protein, 1476 aa, Dictyostelium discoideum
MENEEKREYLAKSRSNSGNFLNDSIESKNIFGVDKKSEPNLKQSIDGGLNFSTTSSYNPSNLPRTSVFVSARNLSSTVGHGKNEKKILTDLNFFLKPGSMVLLLGSPGCGKTSLMNTLALLTSNEKITGNLLFNGKTGDPNTHHRHVSYVVQDDFHMAPLTVRDTFKFSADCQSGDKSEKERIEIVDNVLDFLDLKHVQNTVVGDEFLRGISGGQKKRVTIGVELVKESNLLLMDEPTNGLDSSISLEMLTKIKNKVQQEKMSCLISLLQPGLEITKLFDYLMIMNQGQMSYFGPMNQAIGYFEGLGFKFPKHHNPAEFFQEIVDEPELYCGIDDGSSDGGSGDSGSSSGGSNYNYNFKNKASSTMMMMNNNNKIIPPLKGSDEFAMAYRKSIIYKHILEYIDSHIPDEEERSKFIDYSTTLKPYSTGFGRQLSLNVKRGFKLFLGNKASIRLRLLKNVIIGFILGTLYWKLDTTQADGSNRSGLLFFSLLTFVFGGFGSISVFFDQRQVFYSERAWKYYNTITYFLSMIVTDLPMSIVEVLIFSNFVYWMTGLNKTWDRFIYFFLTCLVCDVMSLSIIRSVCSFTKTKYAASAISPAVVSPFILMCGYMKHSNEIPGWWIWLYWISPIHYGFEGLLLNEHSGLDYHCSPDELMPPSFLPTFNTSYPVGFEGNQVCPITKGEQILDSIGFHTEFYYRWVDLAIISAFTLLFWLITLVCMKFLVFRVYRKDPVGIKKSKPNKTTTLIKMNRNSTDSTTTNNSMNYFNNKHNKKQNDDSDSGEEMESVDVDVKSSGKANLRKDIPIGCYMQWKDLVYEVDVKKDGKNQRLRLLNGINGYVKPGMLVALMGPSGAGKSTLLDVLANRKTGGHTKGQILINGQERTKYFTRTSAYVEQMDILTPVSTVREVILFSAKNRLPNSVPIQEKEEFVDNILETLNLLKIQHSLIGDVESGLSLSQRKRVNMGIELASDPQLLFLDEPTSGLDSSAALKVMNLIKKIASSGRSVICTIHQPSTTIFKKFDHLLLLKRGGETVYFGPTGTNSKIVLNYFAERGLICDPFKNPADFILDVTEDIIEIIQPPQTLPTSTSNENNNNNNNNNNNNNNNNNNNNNNNNNNNNGNTRDTLNNNNKKNLESSLSSSSISFDPVESFKESKENQKLLSIVENSIMPVGTPVAVYHGKYSSTIKTQFIELLKRSWKGGIRRVDTIRTRVGRSFVLGLVIGTLFLRLDKEQNDVFNRISFLFFSLMFGGMAGLSIIPTVSTERGVFYREQASGMYRVWIYYLTFVLSDLPFVIITSYAYVIPVYFLTGLSLSNHGWDFFYHSFISVMLYLNFGLTSIAFATSLPVEEMGFLLNGVLLSVTSLFAGFMIPPPSMPAAWKWAFYLDFISYPLKAFLITEFKDMEFVCTDNKGAIPIPIPSQNTTKFFCPITHGTQVLDRIDYKISFQYWDILIMASFTFALLVGGYLSLKFIRYQNK

SEQ ID NO: 1681 - protein, 1393 aa, Dictyostelium discoideum
MEDKNNIELQEKAPDNYNNNNNNNNNNNNNNNNNNNNNNNNNNNNNNDINNNDDDNNKIIYQNPTPASSSHIDSIEIDINYDLSNHIKQRVTQNKTGMFVSANNISYYIPKSIKKGESEELSKLYLLNNISFTMKPGRMILLMGIPGAGKSLLLKVLGNRLGKGKIEGELKFNNHEVDETTHQRDTIFVSQDDRHIALLTVRETLEFSAKCNMGENVSQEEQSERVDLVLDQLGLSHTSNTIIGNQFFRGISGGQKRRVTIANEFTKRSPNLILMDEPSTGLDSATSYNVISKVKTIAKEAKASVMVSLLQPSVELTNLFDDILILGEGGNLIYFGELNNLLPYFSSIGLAPLPNQPLAEFMQEVSVEPSKYMITDKIELSSKDGGDDESKSLLLGGADSGNVEKMDLVKLFKESELNQKTIQSMQQLIPSDIKVSDHLIKKLETGDNGKSSVRYELKHLLARHIKVMKIMKMQYAVRFFQAIFMGCVIGSLFVKMGFTQADARNRFGLVYFAMVLHIWTTIGSVEEFFTLRGIFDDQKDSKYYRNFPYFLSLVITKIPISLIEAILFSSCCYWIAGFQARVDNFIVFILGMALTNLIAQGIFQVTSAFTSAQLLASLICPAIVVLFMIMSGYMISRLQIPGWWIWLNALSPLRYVIDMVSSNELYGLEFHCSPMEKIPPSNYPLLNVSYADGGYQGNQICQYSTGSDFLNQFGFSDNSYMRWVDIVIILGFVCTFFFIFFLGVKYIRFENKKPPRQIKLKKKKEKKDKKDKEVKHKWNGCYMTFQNLNYVVPSVKDNKETGKKEKVTLELLKDVNGFIVPGMCALMGPSGAGKSTLMDVLAKRKNVGTITGDIRINGQLVKDMNITRFTGYVEQQDILSANLTVREAIEFSANCRLPSSYLQKDRVKLIDEILSVLSLTKMQNTTIGPNPTLGISLANRKKVSIGIELASDPHLIFLDEPTSGLDSSAALKVMNCVKKIAESGRTVVCTIHQPSQEIFEKFDQLLLLDKGKVIYFGDTGDNSSTVIQHFTSAGYQYEHGRNPADFILEIAEHPPSTGQSASDYFKSSIHYSNSIQRLESKTIVPEGVDVPKYKGKYSAPATAQLHSLVKRGWLNHVRRPQTILLRFLRSFIPAIVIGTLFLRLDNDQTGARNRIALVFLGFLFGGMASIGKVPTIVEDRSVYYRESSAGTYPAHLYILASVITDLPMMVLTAFSYWIPMFFLTGLTLGDHGWKFFFSLSVYLLVIMCYDSLATLFALTLPTIPIAILVSGVGLNFLGLFGGFFIPVNNIPRGWIWMHYLVFSKYGLETLSITELKGEPFFCEEDQYSIIPIAGTNFTKKYCAIQSGDTMLLQYGMNDAYDRQFYNLIILGGYFCAYTFLGYLALRFINHMKR

SEQ ID NO: 1682 - protein, 1520 aa, Dictyostelium discoideum
NLSLPINNNNNENLDNDQELLNNNNNNNNNNNNNNNIINNNNNNNNNNNNLISSSRKHKDEESNYDSDDEKSVYQIAKEHEGEDDGDDEYFPIPLDELMPNHENDELTKKIKQTRPEDKTGLYVYCRNATYTVKHRENKKVKIKLIDDISFYLKPKEMTLILGTPGCGKSTIFQMLAGQLKDKHFKGELLFNGHPINHKNHHRDISYVTQDDIHVPTLTVKETFRFALDCLGRKELTNEEKKETVDNCMNLLGLKESENTVVGDNFVRGISGGQKKRVTIGVGVIKGSNLLLMDEPTSGLDSSTSFEILSDVKKFVTYGYSPALITLLQPSVQLTSLFDNLMILNKGRICYFGPMNKALGYFKKLGFACPSHNNPAEFFQEVVDAPERYSFIHPPKCKTSKDFVRAYRESEFYKDLMEKMDANKDGIVDDNKPKVLVDSTAKELGMYPHGIGYQTKICMKRGFTMIRRNYYNFLTRVAKGIFFGLLLGTLYWRIGHNQSGGMERFGLLFFIMVTIIFSSFAAVNSFFGERKVFYSQKALYYYKTGAYFISSIICDIPAGILEVAFFGPIVYWLANLRPVFIRFVYFMLLLIMTDNLSLSFAKMCAAISPTIEIANVIASVILSIWLLFSGFTAPKNDIGGWWIWLYYISPYTWIFQGLSINEFTYQEYGCKTSELIPPRTPQNLLPYPEGFGGNQVCQFTSGEQIMDAFGITNPNYFKWVVFGILSAYIVFFYVVCFFALKYFNFEDKKSKLAVKKLKKKKKVKTTKQDEESAAISSEALERIDDDNDDDADYETEIKKKKSHKKQKEDPVIDVKSPSSLTTGSPYYNINNNNNNLSGSGNNIKKRKVKTPSNLSPSVNSPITINSPMPTSPSNNNNNNNSNEKSKNGKDIGSETGSYLQFKKLCYAVDVKVDDPDNPKKKKSQRLQLLTDIDGYVKPGQMLALMGPSGAGKSTLLDVLAQRKTGGHITGEILINGKPPSEFTNRIRAYVEQMDVLPPTQTVREAIAFSARCRLPPEVTKEERESYVDKIVEVLSLSSIKDLKIGVLGDGLSVSQRKRVNIGVELASNPEILFLDEPTSGLDSGDAFKVIDVVNKIAKVMNRTVICTVHQPSAAIFEFFDQLLLLKQGGETIYFGPLGNQSSVILDYCDKLGMHIKPHINPADFVMTLADQGKMVEGPNGEQVPLDAKKAYFESDICKKEYEIMEGQLIPDDFVIKTYDSRFASSWMTQFRALCMRSWLSRLRRPAIFVSNCIRSILLAVLLGTLFVRMDYEQKDARSRVSLLFFSFLFAGMVAIGNIPTTVLERGVFYREVTAGFYHSTAYMTSYVLTSYPFTLSTGILYIIPTFWIAGLDSGRHSSKFWYCLFIFIITYVMYDAFGLCLAVCLPNEVMASTICGIGLSLSTLFGGFVIARPNYPSAYYWCHYLDWLRYPLEASCTNEFTGLTFVCTNNKGAVPIPIIENGVQIAIKYYCPITNGDDFMLTYGFHKFMRYIDIAAIFGYIFIFVGLSFWGFKKIRWFNR

SEQ ID NO: 1683 - protein, 1509 aa, Dictyostelium discoideum
MVKQDPRDKSSYSPNLSIPINNQEEPTLNNNNNNNNNNNNNNNNNNNNNNNNNNNNNNNKNNNNNNIKHKDEENDFEDSIYQIAKEHEGEEDDEYFPIPLDELMPNHENDELTKKIKQTRPEDKTGLYVYCRNATYPVKHRENKKVKIKLLDDVSFFLRPKQMTLILGTPGCGKSTIFQMLAGQLKDKHFEGELLFNGHPINHKNHHRDISYVTQDDIHVPTLTVKETFRFALDCLGKKELTREEKQVSVDNCMKLLGLKHAENTLVGDNFIRGISGGQKKRVTIGVGVIKGSNLLLMDEPTSGLDSSTSFEILSDVKKFVTYGYSPALITLLQPSVQLTSLFDNLMIMSKGKICYFGPMNRALGYFKKLGFACPSHNNPAEFFQEVVDAPERYSFIHPPKCKTSDDFVKAYRESDIYLELMEKMDANKDGIVDDNKPKVLVDSTAKELGMYPHGIGYQTKICLKRGFIMISRNYYNFATRVFKGIFFGLLLGTLYWRIGHNQSGGMERLGLLFFIMTTIIFSSFAAVNSFFGERKVFYSQKALHYYKTGAYFISSIICDIPAGLIEVAFFGPIVYWLANLRPVFIRFVYFMILLFITDNLSLSFAKMCAAISPTIEIANVTASVILSIWLLFSGFTAPKNDIGGWWIWLYYISPYTWIFQGLSINEFTYQAYGCKDSELIPPRTPQNLLPYPEGFGGNQVCQYTSGEQIMDAFGINNPDYFKWIVYAILGAYIVFFYSVCFFALKYLNFEDKKSKLAVKKLKKKKKVIVCKEDEEPNCKVTTEALERVSDDNDDNADISNYDDDTVIDMKSPLTSPNYNNNNNLSGSGNNIKRRKVKTPSTLSPMVNSPLTNLSPMVNTPSKNGNHSKQKPISTSQKDISSETGSYLQFKKLCYAVDVKADDPDNPKKKKSQRLQLLTDIDGYVKPGQMLALMGPSGAGKSTLLDVLAQRKTGGHITGEILINGKPPSEFTNRIRAYVEQMDVLPPTQTVREAIAFSARCRLPPEVTKEEREIFVDKIVEVLSLSSIKDLKIGVLGNGLSVSQRKRVNIGVELASNPEILFLDEPTSGLDSGDAFKVIDVVNKIAKVMNRTVICTVHQPSAAIFEFFDQLLLLKKGGETIYFGPLGNQSSVILDYCDKLGMHIKPHINPADFVMTLADQGKMVEGPNGEQVPLDAKKAYFESDICKKEYEIMEGQLIPDDFVIKTYDSRFASSWMTQFRALCMRSWLSRLRRPAIFVSNCLRSILLAVLLGTLFVRMDYEQKDARSRVSLLFFSFLFAGMVAIGNIPTTVLERGVFYREVTAGFYHSTAYMISYVLTSYPFILSTGILYIIPTFWIAGLDSGRHSSKFWYCLFIFIITYIMYDAFALCLAVCLPNEVMASTICGIGLSLATLFGGFVIARPNYPSAYYWCHYLDWLRYPLEASCTNEFTGLTFVCTNNKGAVPIPIIENGVQIAIKYYCPITNGDDFMLTYGFHKFMRYIDIAAIFGYIFIFVGLSFWGFKKIRWFNR

SEQ ID NO: 1684 - protein, 391 aa, Dictyostelium discoideum
VRPCTESENPAEYILEATGAGVHGKSDVNWPETWKQSPELADISRELAALKEQGAHQYKIRSDGPAREFSQSTWYQTKEVYKRLNLIWWRDPYYTYGSFVQSALCGLIIGFTFWNLQGSSSDMNQRIFFIFEALMLGILLIFVVMPQLISQREYFKRDFASKFYSWFPFAISIVVVELPFIVISGTIFFFCSFWTAGLDKTSDSEQTFYFWFIFVIFLVFCVSFGQAVAAVCINLFFAMTLIPLLIVFLFLFSGVMTPPSSIPTFWRGWVYHLNPCRYFMEGIVTNILKTVDVKCSYEDMITFTFPKSYNTCQNYTSAFQSYGPSGYVESSILNGEPACSYCIYKNGEQYYKTLGWSDDNRWRNVGIIICFFVFNILMVILFVYLTRKGSR

SEQ ID NO: 1685 - protein, 124 aa, Hordeum vulgare
GRTVVCTIHQPSIDIFEAFDELCLMKRGGEEIYAGPLGHHSADLFNYYEGVHGVRKIKDGYNPATWMLEVTRIGQEQMLGVDFSDIYKKSELYQINKALIKELSQPAPGSTDLYFPTQYSQSSI

SEQ ID NO: 1686 - protein, 1432 aa, Oryza sativa; identical to SEQ ID NO: 1637

SEQ ID NO: 1687 - protein, 1431 aa, Oryza sativa
  unsure (1)..(1431): unsure at all Xaa locations
XRMSRSIGRGMGMEAWGVDEAFMPQSGRGGTADDDEEALRWAAIERLPTYSRMRTXILFFAEEDAAGAGKQQYKEVDVRRLGVGERQEFIERVFRVAEEDNQRFLQKLRNRIDRVGIELPTVEVRFEELMVQARCHVGSRALPTLLNTARNIAEAALGLVGVRPGRQATLTILRGVSGAVRPSRMTLLLGPPSSGKTTLLLALAGKLDPSLRRGGEVTYNGFELEEFVAQKTAAYISQTDVHVGEMTVKETLDFSARCQGVGTKYDLLTELARREKEAGIRPEPEVDLFMKATSMEGVESSLQTDYTLRILGLDICADTIVGDQMQRGISGGQKKRVTTGEMIVGPTKVLFMDEISTGLDSSTTFQIVKCLQQIVHLGEATILMSLLQPAPETFELFDDIILLSEGQIVYQGPREYVLEFFESCGFRCPERKGTADFLQEVTSKKDQEQYWADKHRPYRYISVSEFAQRFKRFHVGLQLENHLSVPFDKTRSHQAALVFSKQSVSTTELLKASFAKEWLLIKRNSFVYIFKTIQLIIVALVASTVFLRTQMHTRNLDDGFVYIGALLFSLIVNMFNGFAELSLTITRLPVFFKHRDLLFYPAWIFTLPNVILRIPFSIIESIVWVIVTYYTIGFAPEADRFFKQLLLVFLIQQMAGGLFRATAGLCRSMIIAQTGGALALLIFFVLGGFLLPKAFIPKWWIWGYWVSPLMYGYNALAVNEFYSPRWMNKFDNNGVPKRLGIALMEGANIFTDKNWFWIGAAGLLGFTMFFNVLFTLSLVYLNPLGKPQAVISEETAKEAEGNGDARHTVRNGSTKSKRGMVLPFTPLSMSFDDVNYYVDMPAEMKQQGVVDDRLQLLRDVTGSFRPAVLTALMGVSGAGKTTLMDVLAGRKTGGYIEGDMRISGYPKNQETFARISGYCEQNDIHSPQVTVRESLIYSAFLRLPEKIGDQEITQFVDEVMELVELDNLKDALVGLPGITGLSTEQRKRLTIAVELVANPSIIFMDEPTSGLDARAAAIVMRTVRNTVDTGRTVVCTIHQPSIDIFEAFDELLLLKRGGQVIYSGQLGRNSQKMIEYFEAIPGVPKIKDKYNPATWMLEVSSVAAEVRLNMDFAEYYKTSDLYKQNKVLVNQLSQPEPGTSDLHFPTKYSQSTIGQFRACLWKQWLTYWRSPDYNLVRFSFTLFTALLLGTIFWKIGTNRGNANSLRMVIGAMYTAVMFIGINNCATVQPIVSIERTVFYRERAAGMYSAMPYAIAQVVMEIPYVFVQTAYYTLIVYAMMSFQWTAAKFFWFFFVSYFSFLYFTYYGMMTVAISPNHEVAAIFAAAFYSLFNLFSGFFIPRPRIPKWWIWYYWLCPLAWTVYGLIVTQYGDLEQIISVXXGQSNQTISYYVTHHFGYHRKFMPVVAPVLVLFAVFFAFMYAICIKKLNFQHR

SEQ ID NO: 1688 - protein, 1450 aa, Oryza sativa; identical to SEQ ID NO: 1641

SEQ ID NO: 1689 - protein, 1417 aa, Oryza sativa; identical to SEQ ID NO: 1643

SEQ ID NO: 1690 - protein, 1447 aa, Oryza sativa; identical to SEQ ID NO: 1645

SEQ ID NO: 1691 - protein, 1419 aa, Oryza sativa
VRMGSVASGGGSVRRTASSWRGTSGRSDAFGRSVREEDDEEALKWAAIEKLPTYDRMRKGILTAGGVEEVDIGGLGLQERRNLIERLVRTAEEDNERFLLKLRDRMERVGIDNPTIEVRFENLSIDAEAYVGNRGIPTFTNFFSNKIMDVLSAMRIVSSGKRPISILHDISGIIRPGRMSLLLGPPGSGKTSLLLALAGKLDSTLKVSGRVTYNGHDMDEFVPQRTSAYIGQHDLHIGEMTVRETLAFSARCQGVGTRYDMLTELSRREKEASIKPDPDIDVYMKAISVEGQESVVTDYILKILGLEICADTMVGDAMIRGISGGQKKRVTTGEMLVGPAKALFMDEISTGLDSSTTYQIVNSLRQSVHILGGTALIALLQPAPETYDLFDDIVLLSEGQIVYQGPRENILEFFEAMGFKCPERKGVADFLQEVTSRKDQHQYWCRRDEPYRYISVNDFSEAFKEFHVGRNLGSELRVPFDRTRNHPAALTTSRYGISKMELTKACFSREWLLMKRNSFVYIFKILQLIILGSIGMTVFLRTKMHRRSVEDGAIFLGAMFLGLVTHLFNGFAELAMSIAKLPIFYKQRDLLFYPSWAYALPTWVLKIPISFLECAVWICMTYYVMGFDPNIERFFRHYVLLVLISQMASGLFRLLAALGREMVVADTFGSFAQLILLVLGGFLISRENIKKWWIWGYWSSPLMYAQNAIAVNEFLGHSWNKVMQQSNDTLGVQVLKVRGIFVDANWYWIGVGALLGYIMLFNILFILFLEWLDPLGKGQAVVSEEELREKHVNRTGENRGEITGADTRKRGMVLPFTPLSITFDNIRYSVDMPQEMKDKGVTEDRLLLLKGVSGAFRPGVLTALMGVSGAGKTTLMDVLAGRKTGGYIEGDISISGYPKKQETFARIAGYCEQNDIHSPHVTVYESLLYSAWLRLPSEVDSEARKMFVEEVMELVELTSLRGALVGLPGVNGLSTEQRKRLTIAVELVANPSIIFMDEPTSGLDARAAAIVMRTVRNTVDTGRTVVCTIHQPSIDIFEAFDELFLMKRGGEEIYVGPLGHNSCHLINYFEGIQGVRKIKDGYNPATWMLEVTTLAQEDILGINFAEVYRNSDLYQRNKTLISELSTPPPGSTDLHFPTQFSQPFFTQCMACLWKQHKSYWRNPSYTATRIFFTTVIALIFGTIFLNLGKKINKRLDLFNSLGSMYAAVLFIGIQNGQTVQPIVDVERTVFYREKAAGMYSALPYAFAQVLIEIPHIFLQTVVYGLIVYSLIGFDWTVEKFFWYMFFMFFTFMYFTFYGMMAVAMTPNSDIAAIVSTAFYCIWNIFAGFLIPRPRIPIWWRWYSWACPVAWTLYGLVASQYGDITNSTLEDGEVVQDYIRRYFGFRHDYLGYVATAVVGFAALFAFVFAFSIKVFNFQRR

SEQ ID NO: 1692 - protein, 1435 aa, Oryza sativa
  unsure (1)..(1435): unsure at all Xaa locations
MGSVASGGGSVRRTASSWRGTSGRSDAFGRSVREEDDEEALKWAAIEKLPTYDRMRKGILTAGGVEEVDIGGLGLQERRNLIERLVRTAEEDNERFLLKLRDRMERVGIDNPTIEVRFENLSIDAEAYVGNRGIPTFTNFFSNKIMDVLSAMRIVSSGKRPISILHDISGIIRPGRMSLLLGPPGSGKTSLLLALAGKLDSTLKVSGRVTYNGHDMDEFVPQRTSAYIGQHDLHIGEMTVRETLAFSARCQGVGTRYDMLTELSRREKEASIKPDPDIDVYMKAISVEGQESVVTDYILKILGLEICADTMVGDAMIRGISGGQKKRVTTGEMLVGPAKALFMDEISTGLDSSTTYQIVNSLRQSVHILGGTALIALLQPAPETYDLFDDIVLLSEGQIVYQGPRENILEFFEAMGFKCPERKGVADFLQEVTSRKDQHQYWCRRDEPYRYISVNDFSEAFKEFHVGRNLGSELRVPFDRTRNHPAALTTSRYGISKMELTKACFSREWLLMKRNSFVYIFKILQLIILGSIGMTVFLRTKMHRRSVEDGAIFLGAMFLGLVTHLFNGFAELAMSIAKLPIFYKQRDLLFYPSWAYALPTWVLKIPISFLECAVWICMTYYVMGFDPNIERFFRHYVLLVLISQMASGLFRLLAALGREMVVADTFGSFAQLILLVLGGFLISRENIKKWWIWGYWSSPLMYAQNAIAVNEFLGHSWNKVVDPTQSNDTLGVQVLKVRGIFVDANWYWIGXVGALLGYIMLFNILFILFLEWLDPLGKGQAVVSEEELREKHVNRTGENVELLTLGTASDANAGRGEITGADTRKRGMVLPFTPLSITFDNIRYSVDMPQEMKDKGVTEDRLLLLKGVSGAFRPGVLTALMGVSGAGKTTLMDVLAGRKTGGYIEGDISISGYPKKQETFARIAGYCEQNDIHSPHVTVYESLLYSAWLRLPSEVDSEARKMFVEEVMELVELTSLRGALVGLPGVNGLSTEQRKRLTIAVELVANPSIIFMDEPTSGLDARAAAIVMRTVRNTVDTGRTVVCTIHQPSIDIFEAFDELFLMKRGGEEIYVGPLGHNSCHLINYFEGIQGVRKIKDGYNPATWMLEVTTLAQEDILGINFAEVYRNSDLYQRNKTLISELSTPPPGSTDLHFPTQFSQPFFTQCMACLWKQHKSYWRNPSYTATRIFFTTVIALIFGTIFLNLGKKINKRLDLFNSLGSMYAAVLFIGIQNGQTVQPIVDVERTVFYREKAAGMYSALPYAFAQVLIEIPHIFLQTVVYGLIVYSLIGFDWTVEKFFWYMFFMFFTFMYFTFYGMMAVAMTPNSDIAAIVSTAFYCIWNIFAGFLIPRPRIPIWWRWYSWACPVAWTLYGLVASQYGDITNSTLEDGEVVQDYIRRYFGFRHDYLGYVATAVVGFAALFAFVFAFSIKVFNFQRR

SEQ ID NO: 1693 - protein, 1391 aa, Oryza sativa
MASLRREGSMWRSGGDVFSRSSSRFQDEDDDEEALRWAALERLPTYDRVRRGILAVSSEDGGAGGEKVEVDVGRLGARESRALIERLVRAADDDHERFLLKLRERMDRVGIDYPTIEVRFENLEVEADVHVGNRGLPTLLNSVTNTVEAIGNALHILPNKKQPMTVLHDVSGIIKPRRMTLLLGPPGSGKTTLLLALAGKLDKDLKVSGKVTYNGHGMHEFVPERTAAYISQHDLHIGEMTVRETLAFSARCQGVGTRYEMLTELARREKAANIKPDHDIDIYMKASAMGGQESSVVTDYILKILGLDICADTVVGNEMLRGISGGQRKRVTTGEMLVGPARALFMDEISTGLDSSTTYQIVNSLRQTIHILGGTAVISLLQPAPETYNLFDDIILLSDGQVVYQGPREHVLEFFEFMGFRCPARKGVADFLQEVTSRKDQGQYWCRRDRPYRFVPVKQFADAFRSFHVGRSIQNELSEPFDRTRSHPAALATSKYGVSRKELLKATIDRELLLMKRNAFMYIFKAVNLTLMALIVMTTFFRTSMRHDRDYGMIYLGALYFALDTVMFNGFAELAMTVMKLPVFFKQRDLLFFPAWAYTIPSWILQIPITFLEVGVYVFITYYVIGFDPSVSRFFKQYLLLLALNQMSSALFRFIAGIGRDMVVSHTFGPLSLLAFAALGGFILARPDVKKWWIWGYWISPLSYAQNAISTNEFLGHSWSQILPGENVTLGVSVLKSRGIFTEAKWYWIGLGALLGYTLLFNLLYTVALSVLSQGQKDTKSRKQELELSHIADQNSGINSADSSASRKGMVLPFAPLSISFNDVRYSVDMPEAMKAQGITEDRLLLLKGVSGSFRPGVLTALMGVSGAGKTTLMDVLAGRKTGGYIEGDIRISGYPKKQETFARISGYCEQNDIHSPHVTVYESLVFSAWLRLPSEVDSEARKMFIEEVMDLVELTSLRGALVGLPGVSGLSTEQRKRLTIAVELVANPSIIFMDEPTSGLDARAAAIVMRTVRNTVNTGRTVVCTIHQPSIDIFEAFDELFLMKRGGEEIYVGPVGQNSSKLIEYFEGIDGVSRIKDGYNPATWMLEVTSSAQEEMLGVDFSEIYRQSELYQRNKELIEELSTPPPGSTDLNFPTQYSRSFITQCLACLWKQNWSYWRNPSYTAVRLLFTIVIALMFGTMFWNLGTRTKKQQDLFNAMGSMYAAVLYIGVQNSGSVQPVVVVERTVFYRERAAGMYSAFPYAFGQVAIELPYIMVQTLIYGVLVYSMIGFEWTVAKFLWYLFFMYFTLLYFTFYGMMAVGLTPNESIAAIISSAFYNVWNLFSGYLIPRPFGDIQHVLEGDTRTVAQFVTDYFGFHHNFLWVVAVVHVVFAVTFAFLFSFAIMKFNFQRR

SEQ ID NO: 1694 - protein, 1449 aa, Oryza sativa
  unsure (1)..(1449): unsure at all Xaa locations
MWAAEAAFARSGSWREEEDEQEALRWAALQRLPTVARARRGLLRSPAPGEDRVDVAGLSPGDRTALVDRLLADSGDVEDFFRRIRSRFDAVQIEFPKIEVRYEDLTVDAYVHVGSRALPTIPNFICNMTEAFLRHLRIYRGGRVKLPILDNVSGIIRPSRMTLLLGPPSSGKTTLLLALAGRLGPGLKVSGNITYNGHHLNEFVPQRTSAYVSQQDWHASEMTVRETLEFAGRCQGVGIKYDMLVELLRREKNEGIKPDEDLDVFMKALALEGKQTSLVAEYIMKILGLDICADTIVGDEMIKGISGGQKKRLTTGELLVGSARVLFMDEISTGLDSATTYQIIKYLRHSTHALDGTTIISLLQPAPETYELFDDVILISEGQIVYQGPREYAVDFFAGMGFRCPERKNVADFLQEVLSKKDQQQYWCHYDYPYQYVSVSKFAEAFKTFVIGKRLHDELAVPYNRHRNHPAALSTSNYGVRRLELLKSNFQWQHLLMKRNSFIYVFKFIQLLLVALITMTVFFRSTMHRDSVDDGIIYLGALYFAIVMILFNGFTEVSLLVTKLPILYKHRDLHFYPPWAYTLPSWLLSIPTSLIESGMWVLVTYYVVGYDPQFTRCLGQFLLLFFLHQTSLALFRVMASLGRNMIVANTFGSFALLVVMILGGFIITKESIPAWWIWGYWISPMMYAQNAISVNEFLGHSWSQVIPDLNNITLGEAILTGYGLFKEKYWFWIGVGALFGYAIVLNFLFTLFLTLLNPIGNIQAVVSKDDIQHRAPRRKNGKLALELRSYLHSASLNGNARDQKGMVLPFQPLSMCFKNINYYVDVPAELKSQGIVEDRLQLLIDVTGAFRPGILTALVGVSGAGNATVMDVVGGRKTGGLIEGSITISGYPKNQETFTRISGYCEQNDVHSPCLTVIESLLYSACLRLPSHVDVNTRRVFVEEVMELVELNALSGALVGLPGVNGLSTEQRKRLTIAVELVANPSIVFMDEPTSGLDARSAAIVMRTVRNIVNTGRTIVCTIHQPSIDIFESFDELLFMKRGGQLIYAGPWGSKSRNLVEFFEAIPGVPKIRDGYNPAAWMLEVTSTQMEQILGVDFAEYYRQSKLFQQTQEMVDILSRPRRESKELTFATKYSQPFFAQYAACLWKQNLSYWRNPQYTAVRFFYTVIISLMFGTICWKFGXSRRETQHDIFNAMGAMYAAVLFIGITNATSVQPVISIERFVSYRERAAGMYSALPFAFSLVTVEFPYILVQSLIYGTIFYSLGSFEWTAVKFLWYLFFMYFTLLYFTFYGMMTTAITPNHTVAPIIAAPFYTLWNLFCGFMIPRXRIPAWWRWYYWANPVSWTLYGLLTFLFGDLDQSLLLAYGITTTTADDLLRDHFGFRHDFLGVVAGMVAGFCVLFAVVFALAIKYLNFQRRAWIDPLVPAFYYYHLSFHDDRSIFLYIDDSL

SEQ ID NO: 1695 - protein, 1316 aa, Oryza sativa
  unsure (1)..(1316): unsure at all Xaa locations
XRVGIKLPTVEVRYENLNIEAESYVGRRGLPTILNTYTIIMEGLTNALCITKKITHKIPILHNVSGIIKPHRMTLLLGPPGSGKTSLLLALAGETLQLXKVSGTITYNGHSMEEFVPQRSAAYVSQHDVHMAELTVRETVNFAAKCQGVGHHYDLLMELLRREKEQNIKPDPEIDIYLKAATTGEQKAEVVTNHILKILGLDICADTIVGNNMLRGISGGQKKRLTTGNMIVTPGRALFMDEISTGLDSSTTFQIVNTIRQTIRILGGTAVIALLQPAPETYELFDDIILLSDGQVVYNGPRDHVLEFFKSVGFKCPERKCVADFLQEVTSRKDQKQYWIGSDDTYQYVPVTMIAEAFQSFHVGQAIRSELAIPFEKSKNHPAALATSKYGVSMKELLKANIYREILLMKRNSFLYIFKAIQLKLVAINAMTVFIRTNMYRDSIENGRSYMGALFYGMMMIVYSALAEMGPAIAKLPVLFKQRDLLYYPSWTYSLPSWIIKIPISFLNTTVWVFLTYYVIGFDPNVLRFFRQFLVLFVLCEVIYALFRFIVALTRHPVIASNMGPFCILIFMLSCGFILTRDDVKKWWIWLYWISPLMYALNALAVNEFLGQIWNKSILGXXKGPLGRLVLGSSSFLPETKWYWISIGALLGYVLLFNVLYTICLTFLNXHSKVNFHLCCVWXMLXEIINDEANSYHATRHSSAGNKGMVLPFVPLSITFEDIRYSVDTPEAFKAKGMTEGRLELLKDISGSFRQGVLTALMGVSGAGKTTLLDVLAGRKTSGYVQGSITISGYPKKQETFARISGYCEQNDIHSPNVTVYESLMFSAWLRLPVEIDSATRKMFVYEVMELVEILSLKDALVGLPGVSGLSSERRKRLTIAVELVANPSIIFMDEPTSGLDARAAAIVMRAIRNTVDTGRTVVCTIHQPSIEIFESFDELFLMKQGGEEIYVGPIGRQSCELIKYFEAIQGVSKIKDGYNPSTWMLEVTSTTQEQRTCVDFSQIYKNSELYRRNKNLIKELSAPPEGSSDLSFPTQYSQLFLTQWLACLWKQHLSYWRNPPYIVVRYLFTIVVALLFGTMFWGIGKKRQNQQTLFSIMGAMYSACMAMGVQNSSSVQPAIFVEXRTIFYRERASHMYSALSYALGQVAIEFPYIFLQTIIYCVLVYAMVGYEWTCAKFLWYLFFMFFTLSYFTFYGMMMAGLTPNNAMSAVVSTAFYNIWNLFSGFLIPRIRIPVWWRWYYWMCPVAWTLNGLLTSQFGDVNDKFNNGVSVSDFIESYFGYKQDLLWVAAVAVVSFAILFAFLFGLSLRLFNFQKR

SEQ ID NO: 1696 - protein, 1130 aa, Oryza sativa
  unsure (1)..(1130): unsure at all Xaa locations
XIYMNVGNARKSYNMKRRKYLLQILGLDICADTMVGDDMVRGISGGQRKRVTTGEMLVGPANALFMDEISTGLDSSTTFQIVKSLRQAIHILGGTAVISLLQPAPETYDLFDDIILLSDGQIVYQGPREGVLEFFELMGFKCPERKGVADFLQEVTSRKDQKQYWMQHDKPYRYVPVKDFASAFQSFHTGKSIANELATPFDKSKNHPAALTTSRYGVSAMELLKANIDREFLLMKRNSFVYIFRACQLMVVSAIAMTVFFRTKMHRDSVTDGVIFMGALFFSVMMIMFNGLSELPLTIFKLPVFFKQRDLLFFPAWTYTIPSWILKIPMSFIEVGGFVFMSYYVIGFDPSAGRFFKQYLLMLAINQMAAALFRFVGGAARNMIVANVFGSFMLLIFMVLGGFILVREKVKKWWIWGYWISPMMYAQNAISVNEFLGHSWDKVLNNSLSNETLGVQALRSRGVFPEAKWYWIGFGALLGFIMLFNGLFTLALTYLKQELKEKQANINGNSSEIADNSQPTQRGMVLPFAPLSLTFDNIKYSVDMPQEMKAHGIVEDRLELLKGVSGSFRPGVLTALMGVSGAGKTTLMDVLAGRKTGGYIEGNITISGYPKKQETFARVSGYCEQNDIHSPQVTVSESLLFSAWLRLPKDVDSNTRKMFIEEVMELVELKPLRDALVGLPGVNGLSTEQRKRLTIAVELVANPSIIFMDEPTSGLDARAAAIVMRTVRNTVDTGRTVVCTIHQPSIDIFEAFDELFLMKRGGEEIYVGPLGHQSSELIKYFEGIKGVSRIKDGYNPATWMLEVSTISQEQALGVDFCDIYRKSELFQRNKALIQELSTPPPGSSELYFPTKYSLSFLNQCLACLWKMHLSYWRNPPYNAIRLFFTTVIALLFGTIFWDLGGKTGKSQDLFNAMGSMYSAVLFIGVLNSQSVQPVVSVERTVFYRERAAGMYSAFPYAFGQVFIELPYIMVQTLIYGVLVYSMIGFEWTVAKFLWYLFFMYFTLLYFTFYGMMAVGLTPNESIAAIISSAFYNVWNLFSGYLIPRPKIPVWWRWYCWICPVAWTLYGLVASQFGDIQHVLDDTRTVAQFVTDYFGFHHNFLWVVAVVHVVFAVTFAFLFSFAIMKFNFQRR

SEQ ID NO: 1697 - protein, 1255 aa, Oryza sativa
  unsure (1)..(1255): unsure at all Xaa locations
XLKKKKEWFEVNHDLGMGRRKSRMTLLLGPPSSGKSTLMRALTGKLDKNLKVFGNITYCGHKFSEFYPERTSAYVSQYDLHNAEMTVRETLDFSRWCLGIGSRYDMLTEISRRERNAGIKPDPEIDAFMKATAMQGQETNIITDLILKVLGLDICADTIVGDEMIRGISGGQMKRVTTGEMLTGPARALLMDEISTGLDSSSTFHIVKFIRHLVHIMNETVMISLLQPPPETYNLFDHIVLLSEGYIVYHGPRENXIEFFEASGFRCPQRKAVSDFLQEVTSKKDQQQYWFLDKEPYCYVSVPEFAERFKSFYIGHQMMKEQHIPFEKSKIHSAAXKTMKNALSPWESLKGVLCREKLLMKRTSFFXIFRVTQLIILAFLSMPVFFRTKMPHGQFSEGIKFLGALTFILIPVMFNGLSELNLTVKKLPVFYKHRDFLFFPPWTFGVANILIKVPVSLVEATVWVVITYYVMGFAPAAGRFLGAILQTMVIAISFGMLVLLIVFVFGGFVIRKNDIRPWWIWCYWASPMMYSQNAISINEFLASRWAIPNNDTTIDAKTVGEAILKSKGLFTGEWGFWLSIGALVGFIILFNTLYILALTYLSHLSHNDVTCQVVDNKLPTIVNINVCFSXGANGEGNRPTQSQFVLPFQPLSLCFNHLNYYVDMPSEMKQQGLMESRLQLLSDISGAFRPGLLTALVGVSGAGKTTLMDVLAGRKTSGTIEGSITLSGYSKKQETFARISGYCEQADIHSPNVTVYESILYSAWLRLPSDVDSNTRKMFVEEVMALVELDVLCNAMVGLPGVSGLSTEQRKRLTIAVELVANPSIIFMDEPTSGLDARAAAIVMRTVRNTVNTGRTVVCTIHQPSIDIFESFDELWFLKRGGRXVIYAGELGDHSHKLVEYFETILGVPSITEGYNPATWMLEVSSTLEEARMNVDFAEIYANSLLYRKNQRLIEELSIPPPSYRDLLFATKYSQSFYIQCVANLWKQYKSYWKNPSYNSLRYLTTFLYGLFFGTVFWQKGTKLDSQQDLYNLLGATYAAIFFIGATNCMSVQPVVSIERAVYYRESAAGMYSPLSYAFAQASVEFIYNIIQGILYTVIIYAMIGYDWKASKFFYFLFFIVSSFNYFTFFGMMLVACTPSALLANILITFALPLWNLFAGFLIFRKAIPIWWRWYYWANPVSWTIYGVIASQFGGNGGSISVPGGSHVAMSQILEDNVGVRHDFLGYVILAHFGFMAAFVLIFGYSIKFLNFQKR

SEQ ID NO: 1698 - protein, 1172 aa, Oryza sativa
  unsure (1)..(1172): unsure at all Xaa locations
XIYMNVGNARKSYNMKRRXSTYFRLDXANSFYLLLYICNMLQILGLDICADTMVGDDMVRGISGGQRKRVTTGEMLVGPANALFMDEISTGLDSSTTFQIVKSLRQAIHILGGTAVISLLQPAPETYDLFDDIILLSDGQIVYQGPREGVLEFFELMGFKCPERKGVADFLQEVTSRKDQKQYWMQHDKPYRYVPVKDFASAFQSFHTGKSIANELATPFDKSKNHPAALTTSRYGVSAMELLKANIDREFLLMKRNSFVYIFRACQLMVVSAIAMTVFFRTKMHRDSVTDGVIFMGALFFSVMMIMFNGLSELPLTIFKLPVFFKQRDLLFFPAWTYTIPSWILKIPMSFIEVGGFVFMSYYVIGFDPSAGRFFKQYLLMLAINQMAAALFRFVGGAARNMIVANVFGSFMLLIFMVLGGFILVREKVKKWWIWGYWISPMMYAQNAISVNEFLGHSWDKVLNNSLSNETLGVQALRSRGVFPEAKWYWIGFGALLGFIMLFNGLFTLALTYLKQELKEKQANINGNVLDVDTMASSTNLAIVDNTETSSEIADNSQPTQRGMVLPFAPLSLTFDNIKYSVDMPQEMKAHGIVEDRLELLKGVSGSFRPGVLTALMGVSGAGKTTLMDVLAGRKTGGYIEGNITISGYPKKQETFARVSGYCEQNDIHSPQVTVSESLLFSAWLRLPKDVDSNTRKMFIEEVMELVELKPLRDALVGLPGVNGLSTEQRKRLTIAVELVANPSIIFMDEPTSGLDARAAAIVMRTVRNTVDTGRTVVCTIHQPSIDIFEAFDELFLMKRGGEEIYVGPLGHQSSELIKYFEGIKGVSRIKDGYNPATWMLEVSTISQEQALGVDFCDIYRKSELFQRNKALIQELSTPPPGSSELYFPTKYSLSFLNQCLACLWKMHLSYWRNPPYNAIRLFFTTVIALLFGTIFWDLGGKTGKSQDLFNAMGSMYSAVLFIGVLNSQSVQPVVSVERTVFYRERAAGMYSAFPYAFGQVAIELPYIMVQTLIYGVLVYSMIGFEWTVAKFLWYLFFXMNFTLLYFXTFYGMMAVGLTPNESIXSIISSAFYNVWNLFSGYLIPRPKIPVWWRWYCWICPVAWTLYGLVASQFGDIQHVLDDTRTVAQFVTDYFGFHHNFLWVVAVVHVVFAVTFAFLFSFAIMKFNFQRR

SEQ ID NO: 1699 - protein, 1325 aa, Oryza sativa
  unsure (1)..(1325): unsure at all Xaa locations
VLXEHYNFTFLLMFRLYRVGIKLPTIEVRYKNLNVEAESYVGSRGLPTILNTYANILKGLANTLHMTTRSKQKISVLHNASGIIKPHRMTLLLGSPGSGKTSLLLALAGTLPSTVKVSGMITYNGHTMDKFIPQRSAAYVSQHDLHMAELTVRETINFSAKCQGVGHHYDLFLELLRREEEENITPDPETDIYLKTCIRDNNSFTLFFYHLKILRLDICADTIVGDNMLRGISGGQKRXLTTAEMLVTLGRALFMDEISNGLDSSTTFQIVNTIQQTIHVLGGTAVIALLQPAPETYELFDDIILLSDGQVVYSGPRDHVLEFFKSLGFKCLERIGVADFLQEVTSRKDQKQYWIHGDDTYRYIPVTVIAEAFQCFHVGQAIRSELAIPFDNSKSHIAALKTSKHGVNLKKILKANIDREILLLKRKSFLYIFNALQLTLVAIIAMSVFIHTNMHHDSIENGRMYMGVQFFGTLAIMFKGLAEMGAALANLPVFFKQRDLLFYPAWTYSLPSWIIKTPISFLNTIIWVSITYYVIGFDPNIERCFRQFLVLFVMSEAICGLFRFIAALTRHPVVASTVSEFCILIVMVSSGFILSRDEVKKWLIWEYWTSPLMYALNALAVNEFLSPSWNEALPGFREPLGRLVLESRGVFPEAKWYWIGLGALLGYVLLFNILYTICLSILTLLKRNVREMSQEAELPMIKDQAMQIXXNSSPARKGSILPFVPVYMTFEDIRYSIDMPKALKVQGMAGSRLELLKDLSGSFRPGVLTALMGISGAGKTTLLDVLAGRKTSGHIHGNITVSGYPKKQETFSRVSGYCEQNDIHSPNLTVYESLMFSAWLRLPAEIDSMARKRFIDEFMELVELFPLKDALVGLLGLSGLSTEQRKRLTIAVELVANPSIIFMDEPTSGLDARAAAIVMRTVRNIVDMGRTVVCTIHQPSIDIFESFDELFLMKRGGEAIYVGPLGQHSCELIKYFESIEGVRKIKHGYNPSTWMLEVTCTLQEQITGVNFTQVYKNSELYRRNKNLIKELSTPHDGSSDLLFPTKYSQTFVIQCLACLWKQRLSYWRNPPYIAVNFFFTVVIALLFGTMFWGVGRKRQSQQALLSAMGSMYSTCFTLGVQNSSSVQPVVNIERTVFYRERASHMYSPLPYALGQVVVELPYIFLQTLIYGVIVYSMMGYEWTCTKFFWYMFFMYFTLSYFTFYGMMAAGLTPNYTMSSIVSTTFYAIWHLFSGFLIPKTRIPIWWRWYYWICPVAWTINGLVTSQFGDVDDKFDNGVRVSDFVESYFGYNLDLLWVAAMAVVSFAILFAILFGFSLKLFNFQKR

SEQ ID NO: 1700 - protein, 1125 aa, Oryza sativa
  unsure (1)..(1125): unsure at all Xaa locations
MDGGGGETYGCGGGRREGGWAWAAAAADSVFSRSSSSAXXEDDEEDLRWAALEKLPTYDRARTALLALPPDGELREVNVRRLAADEQRALLERVAGVADDHAGFLCMFKERLDRVGIKLPTIEVRYENLNVEAESYVGSRGFPTIFNTYANIFEGLGNALHITRKKKQKISILHNVSGIVKPHRMTLLLGPPGSGKTSLLMALAGTLPSTVKVSGTITYNGHTMDEFVPQRSAAYVSQHDLHMAELTVRETVSFSAKCQGVGHHYDMLMELLRREKEENIKPDPEIDLYLKATTGEQKAEVVTNHILKILGLDICADTIVGNNMVRGISGGQKKRLTTAEMLVTPGRALFMDEILTGLDSSTTFQIVNSIRQTVHILGGTTIIALLQPAPETYELFDEIIILSDGQVVYNGPRDHVLEFFQSIGFKCPERKGVADFLQEVTSRKDQKQYWTHGDSTYRYISAAEIAEAFQSFHVGQAVRTELVVPFGKGKSHPAALRTSKYGVSMKELLQANIDREILLMKRNSFLYIFQAIRLTVMAINTMTVFMRTNMHRDSIENGRIYMGAQFYGMLMIMFNGLAEMGLAIAKLPVFFKQRDLFFYPAWTYSLPSWILKTPISFLNTIVWVFLTYYVIGFDPNIERFFRQFLALFVMSEATSGLFRFIASLTRDPVVASTMGSSCILISMLSSGFILSREEIKKWWIWGYWISPLMYALNTLAVNEFLGNSWNKTISGFSEPLGRLVLESRGFFPEAKWYWIGVGALLGYVILLNVLYTICLIFLKETFHKKQANITGQVLEAPSGEQATDNTRSNHMIGNSSSGIKGMVLPFVPLSITFEDIKYSIDMPEVPQILPTTESRLELLKDISGSFRPGVLTALMGVSGAGKTTLLDVLAGRKTSGYIEGNITISGYPKKQETFARVSGYCEQNDIHSPNVTIYESLMFSAWLRLPTKIDSATRKMIIEEVMELVELYPLKDALVGLPGVSGLSIEQRKRLTIAVELVANPSIIFLDEPTSGLDARAAAIVMRAIRNTVDTGRTVVCTIHQPSIDIFESFDELFLMKRGGEEIYVGPLGQHSCELIRYFEAIEGVSKIKHGYNPSTWMLEVTSPMQEQKTGVNFTQVYKNSELYX

SEQ ID NO: 1701 - protein, 1163 aa, Oryza sativa
  unsure (1)..(1163): unsure at all Xaa locations
GGGGETYGCGGGRREGGWAWAAAAADSVFSRSSSSAREDDEEDLRWAALEKLPTYDRARTALLALPPDGELREVNVRRLAADEQRALLERVAGVADDHAGFLCMFKERLDRVGIKLPTIEVRYENLNVEAESYVGSRGFPTIFNTYANIFEGLGNALHITRKKKQKISILHNVSGIVKPHRMTLLLGPPGSGKTSLLMALAGTLPSTVKVSGTITYNGHTMDEFVPQRSAAYVSQHDLHMAELTVRETVSFSAKCQGVGHHYDMLMELLRREKEENIKPDPEIDLYLKAATTGEQKAEVVTNHILKILGLDICADTIVGNNMVRGISGGQKKRLTTAEMLVTPGRALFMDEILTGLDSSTTFQIVNSIRQTVHILGGTTIIALLQPAPETYELFDEIIILSDGQVVYNGPRDHVLEFFQSIGFKCPERKGVADFLQEVTSRKDQKQYWTHGDSTYRYISAAEIAEAFQSFHVGQAVRTELVVPFGKGKSHPAALRTSKYGVSMKELLQANIDREILLMKRNSFLYIFQAIRLTVMAINTMTVFMRTNMHRDSIENGRIYMGAQFYGMLMIMFNGLAEMGLAIAKLPVFFKQRDLFFYPAWTYSLPSWILKTPISFLNTIVWVFLTYYVIGFDPNIERFFRQFLALFVMSEATSGLFRFIASLTRDPVVASTMGSSCILISMLSSGFILSREEIKKWWIWGYWISPLMYALNTLAVNEFLGNSWNKTISGFSEPLGRLVLESRGFFPEAKWYWIGVGALLGYVILLNVLYTICLIFLSQFIADVRVVCVPGTVDVNNDEATSNHMIDSSSGIKGMVLPFVPLSITFEDIKYSIDMPEEALKTQATESRLELLKDISGSFRPGVLTALMGVSGAGKTTLLDVLAGRKTSGYIEGNITISGYPKKQETFARVSGYCEQNDIHSPNVTIYESLMFSAWLRLPTKIDSATRKMIIEEVMELVELYPLKDALVGLPGVSGLSIEQRKRLTIAVELVANPSIIFLDEPTSGLDARAAAIVMRAIRNTVDTGRTVVCTIHQPSIDIFESFDELFLMKRGGEEIYVGPLGQHSCELIRYFEAIEGVSKIKHGYNPSTWMLEVTSPMQEQKTGVNFTQVYKNSELYSPNREITSSSTSSLPSSQPDEAPATTSREKFXWGLRGVSMDPGAVVG

SEQ ID NO: 1702 - protein, 1121 aa, Oryza sativa
  unsure (1)..(1121): unsure at all Xaa locations
XPRRGAGGAGCRRXAASLARSLRDGDDPFRRSAAASRRDAGDDEENLRWAALEKLPTYDRMRRGILRKAVDGGGDGEGAGSLFKADEVDIANLDPREGRELMERVFKAVEDDNERFLRRFRDRLDQVGIELPKIEVRYQHLDIEADVHVGKRALPTLLNATINTLEGLVSLFISSNKRKLKILNDVNGIIKPSRMTLLLGPPSSGKSTLMRALTGKPDKNLKVSGEITYCGHTFKEFYPERTSAYVSQHDLHNPEMTVRETLDFSRRCLGSGARYDMLSELTRRERNAGIKPDPEIDALMKATVVEGKQNNIVTDLVLKALGLDICADTIVGGAMIRGISGGQKKRVTTGEMLTGPATALFMDEISTGLDSSSTFQIVKYIRQVTHVMNATVMMSLLQPPPETYALFDDIVLIAEGYIVYHGPRENILEFFESAGFRCPERKGVADFLQEVTSRKDQQQYWFLEQDHYRYVSVEEFAQNFKKFHVGQKLQKELQVPYDKSKTHPAALTTKKYGLSSLESLKAVMSREWLLMKRNSFLFIFKAFQLFVLGFITMTLFLRTKMPHEKFSDTSKYVGALTASLITIMFNGFGELQLTIDKLPIFYKQRDFLFFPAWTYGLANIILKVPLSLMESSLWIVLTYYVVGFAPAAGRFFKQFLAYFWTHQMALALFRLLGAILRSMVVANTFGMFVLLLIFLFGGFLVSRKDIKPWWIWGYWTSPMMYSNNALSVNEFLASRWAIPNNDSSISAPTIGKAFLQSKGYFTGEWGYWLSIGAMIGFMIVFNILYLCALTFLRPESNQEQMSEVINGNTAVNVSHISSSVLSIRTNGTGSQRGMVLPFQPLSLSFNHMNYYVDMPAEMKAQGFTESRLQLLSDISGAFRPGVLTALVGVSGAGKTTLMDVLAGRKTSGTIEGDIKLSGYPKKQETFARISGYCEQTDIHSPNLTVYESIVYSAWLRLSSEVDKNTRKVFVEEVMSLVELDVLRDALVGLPGVSGLSTEQRKRLTIAVELVANPSIIFMDEPTSGLDARAAAIVMRTVRNTVNTGRTVVCTIHQPSIDIFESFDELLLLKRGGRVIYAGQLGXHSQILVEYFEAIPGVPKITEGYNPATWMLEVSSSLAEAX

SEQ ID NO: 1703 - protein, 1100 aa, Oryza sativa
  unsure (1)..(1100): unsure at all Xaa locations
LVYLVGESNQSVVYIRHTDAXLDYARQFRKGKREVEMSSSSSHHPEFASCTANDDEHHLDEFELELVVQDVQRQQNNGSANTDQHERENLLLLDDSSKSGALKRRLFFDNLLKNVQDDHIRFLHRQKERIDRVDVKLPAIEVRYNNLSVEAECRTANGDHLPSLWNSTKGAFSGLVKLLGLETERAKINVLEDVSGIIKPCRLTLLLGPPGCGKSTLLRALSGKLDKSLKVTGDISYNGYQLDEFVPEKTAAYISQYDLHIPEMTVRETLDFSSRCQGVGRRPKILKEVSARESAAGIIPDADIDIYMKAISVEASKRSLQTDYILKIMGLEICADTMVGDAMIRGLSGGQKKRLTTAEMIVGPARAYFMDEISNGLDSSTTFQIISCFQQLTNISEYTMVISLLQPTPEVFDLFDDLILMAEGKIIYHGPRNEALNFFEECGFICPERKEVADFLQEILSCKDQQQYWSGPNESYRYISPHELSSMFKENHRGRKLEEPIVSPKSELGKEALAFNKYSLQKLEMFKACGAREALLMKRSMFVYVFKTGQLAIIALVTMSVFLRTRMTTDFTHATYYMGALFFSILMIMLNGTPEISMQIRRLPSFYKQKSYYFYSSWAYAIPASVLKVPVSILDSLVWICITYYGIGYTASVSRFFCQFLMLCFVHQSVTSLYRFIASYFQTPTASFFYLFLALTFFLMFGGFTLPKPSMPGWLNWGFWISPMTYAEIGTVINEFQAPRWQKVKYQNITIGNRILINHGLYYSWHFYWISIGALFGSIILFYIAFGLALDYVKTXTSQYQVIVRNEGPTKKSNKPSXQSCVSKAKCMLLQCIDLFAAKMTIPVMELPITFHNLNYYIDTPPEMLKQGYPTKRLQLLNNITGALRPGVLSALMGVSGAGKTTLLDVLAGRKTGGYIEGDIRIGGYPKVQETFVRILGYCEQADIHSPQLTVEESVTYSAWLRLPSHVDKKTRSEFVAEVLETVELDQIKDVLVGTPQKNGLSMEQRKRLTIAVELVSNPSVILMDEPTTGLDTRSAAIVIRAVKNICKTGRTVVCTIHQPSTKIFEAFDELILMKNGGKIIYNGPIGERSSKVIEYFEAX

SEQ ID NO: 1704 - protein, 1333 aa, Oryza sativa
  unsure (1)..(1333): unsure at all Xaa locations
XGYSEDGERGERRXGSVRRTASSWRGTSGRSDAFGRSVREEDDEEALKWAAIEKLPTYDRMRKGILTAGGVEEVDIGGLGLQERRNLIERLVRTAEEDNERFLLKLRDRMERVGIDNPTIEVRFENLSIDAEAYVGNRGIPTFTNFFSNKIMDVLSAMRIVSSGKRPISILHDISGIIRPGRMSLLLGPPGSGKTSLLLALAGKLDSTLKVSGRVTYNGHDMDEFVPQRTSAYIGQHDLHIGEMTVRETLAFSARCQGVGTRYDMLTELSRREKEASIKPDPDIDVYMKAISVEGQESVVTDYILKILGLEICADTMVGDAMIRGISGGQKKRVTTGEMLVGPAKALFMDEISTGLDSSTTYQIVNSLRQSVHILGGTALIALLQPAPETYDLFDDIVLLSEGQIVYQGPRENILEFFEAMGFKCPERKGVADFLQEVTSRKDQHQYWCRRDEPYRYISVNDFSEAFKEFHVGRNLGSELRVPFDRTRNHPAALTTSRYGISKMELTKACFSREWLLMKRNSFVYIFKILQLIILGSIGMTVFLRTKMHRRSVEDGAIFLGAMFLGLVTHLFNGFAELAMSIAKLPIFYKQRDLLFYPSWAYALPTWVLKIPISFLECAVWICMTYYVMGFDPNIERFFRHYVLLVLISQMASGLFRLLAALGREMVVADTFGSFAQLILLVLGGFLISRENIKKWWIWGYWSSPLMYAQNAIAVNEFLGHSWNKVVDPTQSNDTLGVQVLKVRGIFVDANWYWIGVGALLGYIMLFNILFILFLEWLDPLGKGQAVVSEEELREKHVNRTGENVELLTLGTDSQNSPSDXXADTRKRGMVLPFTPLSITFDNIRYSVDMPQEMKDKGVTEDRLLLLKGVSGAFRPGVLTALMGVSGAGKTTLMDVLAGRKTGGYIEGDISISGYPKKQETFARIAGYCEQNDIHSPHVTVYESLLYSAWLRLPSEVDSEARKMFVEEVMELVELTSLRGALVGLPGVNGLSTEQRKRLTIAVELVANPSIIFMDEPTSGLDARAAAIVMRTVRNTVDTGRTVVCTIHQPSIDIFEAFDEGIQGVRKIKDGYNPATWMLEVTTLAQEDILGINFAEVYRNSDLYQNKRLDLFNSLGSMYAAVLFIGIQNGQTVQPIVDVERTVFYREKAAGMYSALPYAFAQVLIEIPHIFLQTVVYGLIVYSLIGFDWTVEKFFWYMFFMFFTFMYFTFYGMMAVAMTPNSDIAAIVSTAFYCIWNIFAGFLIPRPRIPIWWRWYSWACPVAWTLYGLVASQYGDITNSTLEDGEVVQDYIRRYFGFRHDYLGYVATAVVGFAALFAFVFAFSIKVFNFQRR

SEQ ID NO: 1705 - protein, 1335 aa, Oryza sativa
  unsure (1)..(1335): unsure at all Xaa locations
LQLLVISSPARRDAAAKLRERERDMESAMEKNSGGGGGSRGRRRSGRGGTADDDEEALRWAAIERLPTYSRMRTXILFFAEEEVDVRRLGVGERQEFIERVFRVAEEDNQRFLQKLRNRIDRVGIELPTVEVRFEELMVQARCHVGSRALPTLLNTARNIAEAALGLVGVRPGRQATLTILRGVSGAVRPSRMTLLLGPPSSGKTTLLLALAGKLDPSLRRGGEVTYNGFELEEFVAQKTAAYISQTDVHVGEMTVKETLDFSARCQGVGTKYDLLTELARREKEAGIRPEPEVDLFMKATSMEGVESSLQTDYTLRILGLDICADTIVGDQMQRGISGGQKKRVTTGEMIVGPTKVLFMDEISTGLDSSTTFQIVKCLQQIVHLGEATILMSLLQPAPETFELFDDIILLSEGQIVYQGPREYVLEFFESCGFRCPERKGTADFLQEVTSKKDQEQYWADKHRPYRYISVSEFAQRFKRFHVGLQLENHLSVPFDKTRSHQAALVFSKQSVSTTELLKASFAKEWLLIKRNSFVYIFKTIQLIIVALVASTVFLRTQMHTRNLDDGFVYIGALLFSLIVNMFNGFAELSLTITRLPVFFKHRDLLFYPAWIFTLPNVILRIPFSIIESIVWVIVTYYTIGFAPEADRFFKQLLLVFLIQQMAGGLFRATAGLCRSMIIAQTGGALALLIFFVLGGFLLPKAFIPKWWIWGYWVSPLMYGYNALAVNEFYSPRWMNKFVLDNNGGLGIALMEGANIFTDKNWFWIGAAGLLGFTMFFNVLFTLSLVYLNPLGKPQAVISEETAKEAEGNGDARSNEAGPRRGMVLPFTPLSMSFDDVNYYVDMPAEMKQQGVVDDRLQLLRDVTGSFRPAVLTALMGVSGAGKTTLMDVLAGRKTGGYIEGDMRISGYPKNQETFARISGYCEQNDIHSPQVTVRESLIYSAFLRLPEKIGDQEITDDIKIQFVDEVMELVELDNLKDALVGLPGITGLSTEQRKRLTIAVELVANPSIIFMDEPTSGLDARAAAIVMRTVRNTVDTGRTVVCTIHQPSIDIFEAFDEAIPGVPKIKDKYNPATWMLEVSSVAAEVRLNMDFAEYYKTSDLYKXXNANSLRMVIGAMYTAVMFIGINNCATVQPIVSIERTVFYRERAAGMYSAMPYAIAQVVMEIPYVFVQTAYYTLIVYAMMSFQWTAAKFFWFFFVSYFSFLYFTYYGMMTVAISPNHEVAAIFAAAFYSLFNLFSGFFIPRPRIPKWWIWYYWLCPLAWTVYGLIVTQYGDLEQIISVPGQSNQTISYYVTHHFGYHRKFMPVVAPVLVLFAVFFAFMYAICIKKLNFQHR

SEQ ID NO: 1706 - protein, 1302 aa, Oryza sativa
  unsure (1)..(1302): unsure at all Xaa locations
MEKVWESGRRMSRSIGRGMGMEAXGRRRGLHAAELXGGGGGSRGRRRSGRGGTADDDEEALRWAAIERLPTYSRMRTXILFFAEEEVDVRRLGVGERQEFIERVFRVAEEDNQRFLQKLRNRIDRVGIELPTVEVRFEELMVQARCHVGSRALPTLLNTARNIAEAALGLVGVRPGRQATLTILRGVSGAVRPSRMTLLLGPPSSGKTTLLLALAGKLDPSLRRGGEVTYNGFELEEFVAQKTAAYISQTDVHVGEMTVKETLDFSARCQGVGTKYDLLTELARREKEAGIRPEPEVDLFMKILGLDICADTIVGDQMQRGISGGQKKRVTTGEMIVGPTKVLFMDEISTGLDSSTTFQIVKCLQQIVHLGEATILMSLLQPAPETFELFDDIILLSEGQIVYQGPREYVLEFFESCGFRCPERKGTADFLQEVTSKKDQEQYWADKHRPYRYISVSEFAQRFKRFHVGLQLENHLSVPFDKTRSHQAALVFSKQSVSTTELLKASFAKEWLLIKRNSFVYIFKTIQLIIVALVASTVFLRTQMHTRNLDDGFVYIGALLFSLIVNMFNGFAELSLTITRLPVFFKHRDLLFYPAWIFTLPNVILRIPFSIIESIVWVIVTYYTIGFAPEXLTEQXAGLCRSMIIAQTGGALALLIFFVLGGFLLPKAFIPKWWIWGYWVSPLMYGGSLQSLRKYHKDNNGVPKRLGIALMEGANIFTDKNWFWIGAAGLLGFTMFFNEMKQQGVVDDRLQLLRDVTGSFRPAVLTALMGVSGAGKTTLMDVLAGRKTGGYIEGDMRISGYPKNQETFARISGYCEQNDIHSPQVTVRESLIYSAFLRLPEKIGDQEITDDIKIQFVDEVMELVELDNLKDALVGLPGITGLSTEQRKRLTIAVELVANPSIIFMDEPTSGLDARAAAIVMRTVRNTVDTGRTVVCTIHQPSIDIFEAFDELLLLKRGGQVIYSGQLGRNSQKMIEYFEAIPGVPKIKDKYNPATWMLEVSSVAAEVRLNMDFAEYYKTSDLYKQNKVLVNQLSQPEPGTSDLHFPTKYSQSTIGQFRACLWKQWLTYWRSPDYNLVRFSFTLFTALLLGTIFWKIGTKMGNANSLRMVIGAMYTAVMFIGINNCATVQPIVSIERTVFYRERAAGMYSAMPYAIAQVVMEIPYVFVQTAYYTLIVYAMMSFQWTAAKFFWFFFVSYFSFLYFTYYGMMTVAISPNHEVAAIFAAAFYSLFNLFSGFFIPRPRIPKWWIWYYWLCPLAWTVYGLIVTQXXFMPVVAPVLVLFAVFFAFMYAICIKKLNFQHR

SEQ ID NO: 1707 - protein, 844 aa, Oryza sativa
  unsure (1)..(844): unsure at all Xaa locations
MTDSMVLCHYRLMVVSLIAMTLFFRTKMKRDSVTSGGIYMGALFFGVLMIMFNGFSELALTVFKLPVFFKQRDLLFYPAWSYTIPSWILKIPITFIEVGGYVFLTYYVIGFDSNVGSFFKQYLLMLAINQMAGSLFRFIGGAARNMIVANVFASFMLLIFMVLGGFILAREQVKKWWIWGYWISPMMYAQNAISVNELMGHSWNKIVNSSASNETLGVQVLKSRGVFPEARWYWIGFGAMIGFTILFNALFTLALTYLRPYGNSRQSVSEEELKEKRANLNGEIVGDVHLSSGRGMVLPFTPLSLSFDNVRYSVDMPQEMKAQGVADDRLELLKGVSGSFRPGVLTALMGVSGAGKTTLMDVLAGRKTGGYIEGSINISGYPKKQETFARVSGYCEQNDIHSPQVTVYESLLFSAWLRLPEDVDSNTRKXKRLTIAVELXANPSIIFMDEPTSGLDARAAAIVMRTVRNTVNTGRTVVCTIHQPSIDIFEAFDELFLMKRGGEEIYAGPLGHHSSELIKYFESIPGVSKIKDGYNPATWMLEVTTIGQEQALGVDFSDIYKKSELYQRNKALIKDLSQPAPDSSDLYFPTQYSQSSLTQCMACLWKQNLSYWRNPPYNAVRFFFTTVIALLFGTIFWDLGGKVTKSQDLFNAMGSMYAAVLFIGVMNCTSVQPVVAVERTVFYRERAAGMYSAFPYAFGQVVIEIPYTLVQATVYGIIVYAMIGFEWTAAKFFWYLFFMVFTLLYFTFYGMMAVGLTPNYHIASIVSSAFYAIWNLFSGFVIPRPFGDIETPMEDGTPVKVFVENYFGFKHSWLGWVATVVAAFAFLFASLFGFAIMKFNFQKR

SEQ ID NO: 1708 - protein, 1209 aa, Oryza sativa
  unsure (1)..(1209): unsure at all Xaa locations
XGGGDNPVGEPAELAVVGALARSLRDGDDPFRRSAAASRRDAGDDEENLRWAALEKLPTYDRMRRGILRKAVDGGGDGEGAGSLFKADEVDIANLDPREGRELMERVFKAVEDDNERFLRRFRDRLDQVGIELPKIEVRYQHLDIEADVHVGKRALPTLLNATINTLETTTPIEYTMPSNKRKLKILNDVNGIIKPSRFEAXXPENSERXXNVSGEITYCGHTFKEFYPERTSAYVSQHDLHNPEMTVRETLDFSRRCLGSGARYDMLSELTRRERNAGIKPDPEIDALMKATVVEGKQNNIVTDLVLKALGLDICADTIVGGAMIRGISGGQKKRVTTGEMLTGPATALFMDEISTGLDSSSTFQIVKYIRQVTHVMNATVMMSLLQPPPETYALFDDIVLIAEGYIVYHGPRENILEFFESAGFRCPERKGVADFLQEVTSRKDQQQYWFLEQDHYRYVSVEEFAQNFKKFHVGQKLQKELQVPYDKSKTHPAALTTKKYGLSSLESLKAVMSREWLLMKRNSFLFIFKAFQLFVLGFITMTLFLRTKMPHEKFSDTSKYVGALTASLITIMFNGFGELQLTIDKLPIFYKQRDFLFFPAWTYGLANIILKVPLSLMESSLWIVLTYYVVGFAPAAGRFFKQFLAYFWTHQMALALFRLLGAILRSMVVANTFGMFVLLLIFLFGGFLVSRXYWQCXXALLFLXXDDTKSELEAESNQEQMSEVINGTNXXTENRRSQRGMVLPFQPLSLSFNHMNYYVDMPAEMKAQGFTESRLQLLSDISGAFRPGVLTALVGVSGAGKTTLMDVLAGRKTSGTIEGDIKLSGYPKKQETFARISGYCEQTDIHSPNLTVYESIVYSAWLRLSSEVDKNTRKVFVEEVMSLVELDVLRDALVGLPGVSGLSTEQRKRLTIAVELVANPSIIFMDEPTSGLDARAAAIVMRTVRNTVNTGRTVVCTIHQPSIDIFESFDELLLLKEGGRVIYAGQLGLHSQILVEYFEAIPGVPKITEGYNPATWMLEVSSSLAEARLDIDFAEVYANSALYRSNQELIKQLSVPPPGFQDLSFPTKYSQNFLNQCVANTWKQFQSYWKDPPYNAMRYVMTLLYGLVXFGTVFWRRGKNIESVNDLNNLLGATYAAVFFLGAANLLTLLPVVSVERTVFYREKAAGMYSPLSYAFAQGFVEFCYSAVQGVLYTILIYSMIGYEWKX

SEQ ID NO: 1709 - protein, 805 aa, Oryza sativa
  unsure (1)..(805): unsure at all Xaa locations
XLMVVSLIAMTLFFRTKMKRDSVTSGGIYMGALFFGVLMIMFNGFSELALTVFKLPVFFKQRDLLFYPAWSYTIPSWILKIPITFIEVGGFFKQYLLMLAINQMAGSLFRFIGGAARNMIVANVFASFMLLIFMVLGGFILAREQVKKWWIWGYWISPMMYAQNAISVNELMGHSWNKIVNSSASNETLGVQVLKSRGVFPEARWYWIGFGAMIGFTILFNALFTLALTYLRPYGNSRQSVSEEELKEKRANLNGEIVGDVHLSSGRGMVLPFTPLSLSFDNVRYSVDMPQEMKAQGVADDRLELLKGVSGSFRPGVLTALMGVSGAGKTTLMDVLAGRKTGGYIEGSINISGYPKKQETFARVSGYCEQNDIHSPQVTVYESLLFSAWLRLPEDVDSNTRKMFIEEVMELVELKSLRDALVGLPGVNGLDARAAAIVMRTVRNTVNTGRTVVCTIHQPSIDIFEAFDELFLMKRGGEEIYAGPLGHHSSELIKYFESIPGVSKIKDGYNPATWMLEVTTIGQEQALGVDFSDIYKKRNKALIKDLSQPAPDSSDLFFFTTVIALLFGTIFWDLGGKVTKSQDLFNAMGSMYAAVLFIGVMNCTSVQPVVAVERTVFYRERAAGMYSAFPYAFGQVVIEIPYTLVQATVYGIIVYAMIGFEWTAAKFFWYLFFMVFTLLYFTFYGMMAVGLTPNYHIASIVSSAFYAIWNLFSGFVIPRPRVPIWWRWYCWACPVAWTLYGLVVSQFGDIETPMEDGTPVKVFVENYFGFKHSWLGWVATVVAAFAFLFASLFGFAIMKFNFQKR

SEQ ID NO: 1710 - protein, 1054 aa, Oryza sativa
  unsure (1)..(1054): unsure at all Xaa locations
MASLRREGSMWRSGGDVFSRSSSRFQDEDDDEEALRWAALERLPTYDRVRRGILAVSSEDGGAGGEKVEVDVGRLGARESRALIERLVRAADDDHERFLLKLRERMDRVGIDYPTIEVRFENLEVEADVHVGNRGLPTLLNSVTNTVEAIGNALHILPNKKQPMTVLHDVSGIIKPRRMTLLLGPPGSGKTTLLLALAGKLDKDLKVSGKVTYNGHGMHEFVPERTAAYISQHDLHIGEMTVRETLAFSARCQGVGTRYEMLTELARREKAANIKPDHDIDIYMKASAMGGQESSVVTDYILKILGLDICADTVVGNEMLRGISGGQRKRVTTGEMLVGPARALFMDEISTGLDSSTTYQIVNSLRQTIHILGGTAVISLLQPAPETYNLFDDIILLSDGQVVYQGPREHVLEFFEFMGFRCPARKGVADFLQEVTSRKDQGQYWCRRDRPYRFVPVKQFADAFRSFHVGRSIQNELSEPFDRTRSHPAALATSKYGVSRKELLKATIDRELLLMKRNAFMYIFKAVNLTLMALIVMTTFFRTSMRHDRDYGMIYLGALYFALDTVMFNGFAELAMTVMKLPVFFKQRDLLFFPAWAYTIPSWILQIPITFLEVGVYVFITYYVIGFDPSVSRFFKQYLLLLALNQMSSALFRFIAGIGRDMVVSHTFGPLSLLAFAALGGFILARPFTDSHASMSEDALKEKHANLTGEVVXXGQKDTKSRKQELELSHIADQNSGINSADSSASRKGMVLPFAPLSISFNDVRYSVDMPEAMKAQGITEDRLLLLKGVSGSFRPGVLTALMGVSGAGKTTLMDVLAGRKTGGYIEGDIRISGYPKKQETFARISGYCEQNDIHSPHVTVYESLVFSAWLRLPSEVDSEARKMFIEEVMDLVELTSLRGALVGLPGVSGLSTEQRKRLTIAVELVANPSIIFMDEPTSGLDARAAAIVMRTVRNTVNTGRTVVCTIHQPSIDIFEAFDELFLMKRGGEEIYVGPVGQNSSKLIEYFEGIDGVSRIKDGYNPATWMLEVTSSAQEEMLGVDFSEIYRQSELYQX

SEQ ID NO: 1711 - protein, 846 aa, Oryza sativa
  unsure (1)..(846): unsure at all Xaa locations
XELIXHHTIQNLPLVLQIEHHLDEFELELVVQDVQRQQNNGSANTDQHERENLLLLDDSSKIDRHGLVKLLGLETERAKINVLEDVSGIIKPCRLTLLLGPPGCGKSTLLRALSGKLDKSLKVTGDISYNGYQLDEFVPEKTAAYISQYDLHIPEMTVRETLDFSSRCQGVGRRPKILKEVSARESAAGIIPDADIDIYMKIMGLEICADTMVGDAMIRGLSGGQKKRLTTAEMIVGPARAYFMDEISNGLDSSTTFQIISCFQQLTNISEYTMVISLLQPTPEVFDLFDDLILMAEGKIIYHGPRNEALNFFEECGFICPERKEVADFLQELAIIALVTMSVFLRTRMTTDFTHATYYMGALFFSILMIMLNGTPEISMQIRRLPSFYKQKSYYFYSSWAYAIPASVLKVPVSILDSLVWICITYYGIGYTASVSRFFCQFLMLCFVHQSVTSLYRFIASYFQTPTASFFYLFLALTFFLMFGGFTLPKPSMPGWLNWGFWISPMTYAEIGTVINEFQAPRWQKETIQNITIGNRILINHGLYYSWHFYWISIGALFGSIILFYIAFGLALDYITSIEEYHGSRPIKRLXXQEQEKDSNIRKESDGHSNISRAKMTIPVMELPITFHNLNYYIDTPPEMLKQGYPTKRLQLLNNITGALRPGVLSALMGVSGAGKTTLLDVLAGRKTGGYIEGDIRIGGYPKVQETFVRILGYCEQADIHSPQLTVEESVTYSAWLRLPSHVDKKTRSEFVAEVLETVELDQIKDVLVGTPQKNGLSMEQRKRLTIAVELVSNPSVILMDEPTTGLDTRSAAIVIRAVKNICKTGRTVVCTIHQPSTKIFEAFDE

SEQ ID NO: 1712 - protein, 654 aa, Oryza sativa
  unsure (1)..(654): unsure at all Xaa locations
XCQRLASRLDLLMELLRREKEQNIKPDPEIDIYLKILGLDICADTIVGNNMLRGISGGQKKRLTTAEMIVTPGRALFMDEISTGLDSSTTFQIVNTIRQTIRILGGTAVIALLQPAPETYELFDDIILLSDGQVVYNGPRDHVLEFFKSVGFKCPERKCVADFLQELKLVAINAMTVFIRTNMYRDSIENGRSYMGALFYGMMMIVYSALAEMGPAIAKLPVLFKQRDLLYYPSWTYSLPSWIIKIPISFLNTTVWVFLTYYVIGFDPNVLRHPVIASNMGPFCILIFMLSCGFILTRDAKEXSSMMKQIRTMQQDXSSAGNKGMVLPFVPLSITFEDIRYSVDTPEAFKAKGMTEGRLELLKDISGSFRQGVLTALMGVSGAGKTTLLDVLAGRKTSGYVQGSITISGYPKKQETFARISGYCEQNDIHSPNVTVYESLMFSAWLRLPVEIDSATRKMFVYEVMELVEILSLKDALVGLPGVSGLSSERRKRLTIAVELVANPSIIFMDEPTSGLDARAAAIVMRAIRNTVDTGRTVVCTIHQPSIEIFESFDELFLMKQGGEEIYVGPIGRQSCELIKYFEAIQGVSKIKDGYNPSTWMLEVTSTTQEQRTCVDFSQIYKNSELYRERASHIARTQTLPLXASSKTGPAKYX

SEQ ID NO: 1713 - protein, 746 aa, Oryza sativa
  unsure (1)..(746): unsure at all Xaa locations
MTLLLGPPSSGKRISGGQMKRVTTVMFNGLSELNLTVKKLPVFYKHRDFLFFPPWTFGVANILIKVPVSLVEATVWVVITYYVMGFAPAAGRFFRQFLAFFVTHLMAMALFRFLGAILQTMVIAISFGMLVLLIVFVFGGFVIRKNDIRPWWIWCYWASPMMYSQNAISINEFLASRWAIPNNDTTIDAKTVGEAILKSKGLFTGEWGFWLSIGALVGFIILFNTLYILALTYLSPIRSANALVINEEHRSRTSTTTSSIPTSANGEGNRPTQSQFVLPFQPLSLCFNHLNYYVDMPSEMKQQGLMESRLQLLSDISGAFRPGLLTALVGVSGAGKTTLMDVLAGRKTSGTIEGSITLSGYSKKQETFARISGYCEQADIHSPNVTVYESILYSAWLRLPSDVDSNTRKMFVEEVMALVELDVLCNAMVGLPGVSGLSTEQRKRLTIAVELVANPSIIFMDEPTSGLDARAAAIVMRTXXILGVPSITEGYNPATWMLEVSSTLEEARMNVDFAEIYANSLLYRKNQELIEELSIPPPGYRDLLFATKYSQSFYIQCVANLWKQYKSYWKNPSYNSLRYLTTFLYGLFFGTVFWQKGTKLDSQQDLYNLLGATYAAIFFIGATNCMSVQPVVSIERAVYYRESAAGMYSPLSYAFAQAIPIWWRWYYWANPVSWTIYGVIASQFGGNGGSISVPGGSHVAMSQILEDNVGVRHDFLGYVILAHFGFMAAFVLIFGYSIKFLNFQKR

SEQ ID NO: 1714 - protein, 317 aa, Oryza sativa
  unsure (1)..(317): unsure at all Xaa locations
SREMRLSARLGNFSSNGVSRLMSIGSNEAGPRRGMVLPFTPLSMSFDDANYYVDMPAEMKQQGAVDDRLQLLRDVTGSFRPAVRPALMGVSGAGKTTLMDVLAGRKTGGYIEGDMRISGYPKNQETFARISGYCEQNDIHSPQVTVRESLIYSAFLRLPEKIGDQEITDDIKIQFVDEVMELVELDNLKDALVGLPGITGLSTEQRKRLTIAVELVANPSIIFMDEPTSGLDARAAAIVMRTVRNTVDTGRTVVCTIHQPSIDIFEAFDELLLLKRGGQVIYSGQLGRNSQKMIEYFEAIPGVPXIKEXYNPATWMX

SEQ ID NO: 1715 - protein, 679 aa, Oryza sativa
  unsure (1)..(679): unsure at all Xaa locations
ILGLDICADTMVGDDMVRGISGEMLVGPANALFMDEISTGLDSSTTFQIVKSLRQAIHILGGTAVISLLQPAPETYDLFDDIILLSDGQIVYQGPREGVLEFFELMGFKCPERKGVADFLQEHDKPYRYVPVKDFASAFQSFHTGKSIANELATPFDKSKNHPAALTTSRYGVSAMELLKANIDREFLLMKRNSFVYIFRACQLMVVSAIAMTVFFRTKMHRDSVTDGVIFMGALFFSVMMIMFNAWTYTIPSWILKIPMSFIEVGGFVFMSYYVIGFDPSAGRFFKQYLLMLAINQMAAALFRFVGGAARNMIVANVFGSFMLLIFMVLGGFILVREKVKKWWIWGYWISPMMYAQNAISVNEFLGHSWDKVLNNSLSNETLGVQALRSRGVFPEAKWYWIGFGALLGFIMLFNGLFTLALTYLKQELKEKQANINGNVLDVDTMASSTNLAIVDNTETSSEIADNSQPTQRGMVLPFAPLSLTFDNIKYSVDMPQEMKAHGIVEDRLELLKGRKTGGYIEGNITISGYPKKQETFARVSGYCEQNDIHSPQMFIEEVMELVELKPLRDALVGLPGVNGLSTEQRKRLTIAVELVANPSIIFMDEPTSGLDARAAAIVMRTVRNTVDTGRTVGIKGVSRIKDGYNPATWMLEVSTISQEQALGVDFCDIYRKSELFQX

SEQ ID NO: 1716 - protein, 983 aa, Oryza sativa
  unsure (1)..(983): unsure at all Xaa locations
MDGGGGETYGCGGGRREGGWAWAAAAADSVFSRSSSSAXXEDDEEDLRWAALEKLPTYDRARTALLALPPDGELREVNVRRLAADEQRALLERVAGVADDHAGFLCMFKERLDRVGIKLPTIEVRYENLNVEAESYVGSRGFPTIFNTYANIFEGLGNALHITRKKKQKISILHNVSGIVKPHRMTLLLGPPGSGKTSLLMALAGTLPSTVKVSGTITYNGHTMDEFVPQRSAAYVSQHDLHMAELTVRETVSFSAKCQGVGHHYDMLMELLRREKEENIKPDPEIDLYLKILGLDICADTIVGNNMVRGISGGQKKRLTTAEMLVTPGRALFMDEILTGLDSSTTFQIVNSIRQTVHILGGTTIIALLQPAPETYELFDEIIILSDGQVVYNGPRDHVLEFFQSIGFKCPERKGVADFLQEVTSRKDQKQYWTHGDSTYRYISAAEIAEAFQSFHVGQALTVMAINTMTVFMRTNMHRDSIENGRIYMGAQFYGMLMIMFNGLAEMGLAIAKLPVFFKQRDLFFYPAWTYSLPSWILKTPISFLNTIVWVFLTYYVIGFDPNXXERDPVVASTMGSSCILISMLSSGFILSREEIKKWWIWGYWISPLMYALNTLAVNEFLGNSWNKTISGFSEPLGRLVLESRGFFPEAKWYWIGVGALLGYVILLNVLYTICLIFLXXCTVDVNNDEATSNHMIGNSSSGIKGMVLPFVPLSITFEDIKYSIDMPEALKTXXATESRLELLKDISGSFRPGVLTALMGVSGAGKTTLLDVLAGRKTSGYIEGNITISGYPKKQETFARVSGYCEQNDIHSPNVTIYESLMFSAWLRLPTKIDSATRKMIIEEVMELVELYPLKDALVGLPGVSGLSIEQRKRLTIAVELVANPSIIFLDEPTSGLDARAAAIVMRAIRNTVDTGRTVVCTIHQPSIDIFESFDEAIEGVSKIKHGYNPSTWMLEVTSPMQEQKTGVNFTQVYKNSELYRX

SEQ ID NO: 1717 - protein, 779 aa, Oryza sativa
  unsure (1)..(779): unsure at all Xaa locations
RQQHPEIKMSQLEVKRLTTAPETYDLFDDIILMAEGKIVYHGSKSCIMNFFESCGFKCPERKGAADFLQEVLSKKDQQQYWSRTEETYNFVTIDHFCEKFKASQVGQNLVEELANPFDKSEVYNNALSLNIYSLTKWDLLKACFAREILLMRRNAFIYITKVVQLLILFLVHTGAFVSMCRLILSNNGGYSVGGTMSFLVILLFGGXXIIPRLSMPNWLKWGFWISPLSYAEIGLTGNEFLAPRWLKVRVVASLAYLLDKTTTSGVTLGRRVLMDRGLDFSSYFYWISASALIGFILLLNVGYAIGEMLWHLTRXGTMVLPFSPLTISFQDVNYYVDTPEERKLQLLHNITGAFQPGVLSALMGVTGAGKTTLLDVLAGRKTGGVIEGDIRVGGYPKIQQTFARISGYCEQTDVHSPQITVEESVAYSAWLRLPTEVDSKTRREFVDEVIQTIELDDIRDALVGLPGVSGLSTEQRKRLTIAVELVSNPSVIFMDEPTSGLDARAAAIVMRAVKNVADTGRTVVCTIHQPSIEIFEAFDETIXPGYPRSRIIXXTHQHGCSKLLVHLWKLNWGXDFAQIYRESTMCKNDQQGLFTILGCMYGTTLFTGINNCQSVIPFISIERSVVYRERFAGMYSPWAYSLAQACTLLYFLYFGMMIVSLTPNIQVASILASMFYTLQNLMSGFIVPAPQIPRWWIWLYYTSPLSWTLNVFFTTQFGDEHQKEISVFGETKSVAAFIKDYFGFRHDLLPLAAIILAMFPILFAILFGLSISKLNFQRR

SEQ ID NO: 1718 - protein, 447 aa, Triticum aestivum
  unsure (1)..(447): unsure at all Xaa locations
FGTRQNDIHSPQVTIRESLIYSAFLRLPEKIGDQDITDEIKIQFVDEVMELVELDNLKDALVGLPGISGLSTEQRKRLGAWVELVANPSIIXFMDEPTSGLDARAAAIVMRTVRNTVDTGRTVVCTIHQPSIDIFEAFDELLLLKRGGQVIYSGKLGRNSQKMTEYFEAIPGVPKIKDKYNPATWMLEVSSVAAEVRLSMDFADYYRTSDLYKQNKVLVSQLSRPEPGTSDLYFPTEYSQSIIGQFKACLWKHWLTYWRSPDYNLVRFSFTLFTALLLGSIFWKIGTNMGDANTLRMVIGAMYTAVMFVGINNCATVQPIVSIERTVFYRERAAGXMYSALPYAIAQVVMEIPYVFVQTSYYTLIVYAMMSFQWTAVKFFWLFFVSYFSFLYFTYYGLMTVSILPNHEVASFFAAAFYFLFNLFFXGFFIPRPKIPKWGILYYWICP

SEQ ID NO: 1719 - protein, 188 aa, Triticum aestivum
  unsure (1)..(188): unsure at all Xaa locations
XLTALMGVSGAGKTTLMDVLVGRKTSGYIEDNITISGYPKKQETFARVSGYCEQNDIHSPNVTVYESLAFSAFLRLPANVESSTRKMFIDEVMELVELNPLKHALVGLPGVSGLSTEQRKRLTIAVELVANPSIIFMDEPTSGLDARAAAIVMRAIRNTVDTGRTVVCTIHQPSINIFESFDELFLMK

SEQ ID NO: 1720 - protein, 198 aa, Triticum aestivum
  unsure (1)..(198): unsure at all Xaa locations
XEXHSPNVTVYESLVYSAWLRLPSDVESETRKMFIEQVMELVELNSLRDALVGLPGVNGLSTEQRKRLTIAVELVANPSIIFMDEPTSGLDARAAAIVMRTVRNTVDTGRTVVCTIHQPSIDIFEAFDELFLMKRGGEEIYVGPLGHQSCDLIQYFEGIERVSKIKPGYNPATWMLEVTSQAQEDILGVSFAEVYKNX

SEQ ID NO: 1721 - protein, 226 aa, Triticum aestivum
  unsure (1)..(226): unsure at all Xaa locations
XMGCLPSRASNRMASTDAPPANTKALLDGVSGKAREGELFAVMGASGSGKSTLVDALAGRIARDSLRGHVTLNGEPLHGSRLRAISAYVMQDDLLYPMLTVRETLLFAAELRLSRALSPAAKRERVDRLIDQLGLSRAADTIIGDEGHRGVSGGERRRVSIGTDIIHDPILLFLDEPTSGLDSASAFMVVQVLRTIARSGSVVVMTIHQPSARILGILGRLLLLSX

SEQ ID NO: 1722 - protein, 431 aa, Triticum aestivum
  unsure (1)..(431): unsure at all Xaa locations
XFMDVPTYDLDARVAAIVMRVVRTSVMMARMLICTIHQHSNDIFESFEELLLMTRGGQXVIYAGELGLHSXKLVEYFEAIPRVREKITEGYNPATWMLEVSSPSAEARLNVNFADIYANSDLYRKNQELIKELSVPPPGYEDLSFPTKYSQNFYNQCVANFWKQYKSYWKNPPHNAMRFLMTMIYGLVFGTVFWQKGTKIDSQQDLSNLLGATYAAVFFLGSANCITVQPVVSIERTVFYREKAAGMYSPLSYALAQTCVEMIYNVVQGIQYTVIIYAMIGYEWKAAKFFYFLFFTISCFNYFTLFGMMLVALTSSSMLANIPIAFVLPLWNLFAGFLVARPLLPIWWRWYYWANPVSWTIYGVIGSQFGDNTSPLSVPDGSRPVVKQFLEDNLGIKHDFLGYVVLAHFAYVIAFFLVFGYSIKVLNFQKR

SEQ ID NO: 1723 - protein, 395 aa, Triticum aestivum
AVVCTIHQPSIDIFEAFDELFLMKRGGEEIYAGPLGHHSADLINYYEGIHGVSKIKDGYNPATWMLEVTTIGQEQMLAIDFSDIYKKSELYQRNKALIKELSQPAPGSTDLYFPTQYSQSSSTQCIACLWKQNLSYWRNPPYNAVRFLFTTVIALLFGTIFWDLGGKMSQSQDLFNAMGSMYAAVLFIGIMNCTSVQPVVAVERTVFYRERAAGMYSAFPYAFGQVVIELPYTLAQATVHGVIVYSMIGFEWTAPKFFWYLFFMYFTLLYFTFYGMMAVGLTPNYHIASIVSSAFYAIWNLFSGFIIPRPKVPIWWRWYCWVCPVAWTLYGLVVSQFGDVTTPMEDGTPVKDFIEGYFDFKHSWLGYVATVVVAFAVLFAFLFGFAIMKLNFQKR

SEQ ID NO: 1724 - protein, 221 aa, Triticum aestivum
  unsure (1)..(221): unsure at all Xaa locations
XRHEAEDELKEKHANLNGEVLDNDRMLSPSNDAIRMNTGNDSAIVEENSSPMQRGMVLPFLPLSLTFDNIRYSVDMPLEMKAQGVVEDRLELLKGVSGSFRPGVLTALMGVSGAGKTTLMDVLAGRKTGGYIQGNISISGYPKKQETFARVSGYCEQNDIHSPQVTVYESLLFSAWLRLPEDVDSNKRRMFIEEVMELVELKPLKDALVGLPGVNGLSTEQ

SEQ ID NO: 1725 - protein, 1147 aa, Zea mays
  unsure (1)..(1147): unsure at all Xaa locations
AVQGQETNIITDLTLKVLGLDICADVIIGDEMIRGISGGQKKRVTTGEMLTGPATALFMDEISTGLDSSSTFQIVKFMRHLVHIMNETVMISLLQPPPETYNLFDDIILLSEGYIVYHGPRENILEFFESVGFRCPDRKGVADFLQEVTSKKDQQQYWYLDQEQYHYVSVPDFAERFKSFHACQQMQKELQIPFEKSKTHPAALTTKKYGLSSWESLKAVMSREQLLMKRNSFIYIFKVTVLIILAFVSMTVFLRTKMPHGQIADGTKFFGALTFGLITIMFNGFAELQLTIKKLPVFYKHRDFLFFPAWTFGVANILLKVPISLVESVVWVVLTYYVMGFAPAAGRFFRQFIAFFATHQMAMALFRFLGAVLKTMVVANTFGMFVLLIIFIFGGFVIRRNDIKPWWIWGYWASPMMYSQNAISINEFLASRWAIPNNDTTIDAPTVGKAILKSKGLFTEEWGFWLSIGALIGFIILFNSLYLWALTYLSPSSGSNALVSEGEDDVMVLKGRSKDDQAQVVYSDPGTNGATNTGVTLPLXTLALCFNHVNYYVDLPKEMXNHSLIEVALLMLSDLTGTVGVRVLGKLTFFSGAGRRTTSGALAGRKTSGAIEGDITLSGYPKKQETFARISGYCEQTDIHSPNVTVFESITYSAWLRLSSDIDDGTKKMFXVEEVMTLVELDVLRDALVGLPGVSGLSTEQRKRLTIAXVELVANPSITRMDELGIRLDARAAAIVMRTVRNTVNTGRTVVCTIHQPSIDIFESFDELLLLKRGGQVIYAGELGRHSHKLVEYFEAIPGVPKITEGYNPATWVLEVSSPLSEARLNMNFAEIYASSVLYRKNQEVIKELSIPRSDNQDLSFPTKYSQNFYGQCAANFWKQYRSYWKNPPYNAMRYLMTCLFGLVFGTVFWQKGKNIDSQQDLYNLLGATYAATFFLGASNCITVQPVVSIERAVFYREKAAGMYSPLSYAFAQTCVEVIYTILQGILYTVIIYAMIGYDWKADKFFYFLFFITASFNYFTLFGMMLVACTPSALLANILITFALPLWNLFAGFLIVRPAIPIWWRWYYWANPVSWTIYGVVASQFGENEGELSVPGGTPVVVKQFLKDNLGIQHDLLGYVVLVHFAYVIVFFFVFGYSIKFFNFQKR

SEQ ID NO: 1726 - protein, 764 aa, Zea mays
  unsure (1)..(764): unsure at all Xaa locations
XPASAPRPIFLFAXILLPRQDIKHWWIWAYWSSPMTYSNNAISVNEFLATRWAMPNNEANIVAPTIGKAILKYKGYFGGQWGYWLSIGAMIGYTILFNILFLCALTFLSPGGSSNTVVSVSDDGDKEKSTDQEMFDVANGTNEAANRRTQTGMVLPFQPLSLSFNHMNYYVDMPAAMSRXGFTESRLQLLSDISGAFRPGVLTALVGVSGAGKTTLMDVLAGRKTSGTIEGDIKLSGYPKKQETFARVSGYCEQTDIHSPNVTVYESLVYSAWLRLSSEVDDNTRKMFVEEVMSLVELDVLRDALVGLPGVSGLSTEQRKRLTIAVELVANPSIIFMDEPTSGLDARAAAIVMRTVRNTVNTGRTVVCTIHQPSIDIFEAFDELLLLKRGGRVIYAGQLGVQSRVLVEYFEAIPGVPKITEGYNPATWMLEVSSPLAEARLDVDFAEIYANSALYRHNQELIKELSIPPPGYQDLSFPTKYAQNFLNQCMANTWKQFRSYWKNPPYNAMRYLMTILYGLVFGSVFWRMGKNVKSEQELQNLLGATYAAVFFLGSANLLSSVPVFSIERTVFYREKAAGMFSPLSYSFAVTVVELVYSIAQGILYTIPLYSMIGYEWKADKFFYFMFFLTCSFLYFSLFGAMLVTCTPSAMLASIVVSFSLTGWNIFAGFLVPRPALPIWWRWFYWCNPVSWTIYGVTASQFGDVGRNVTATGNAGTVVVKEFLEQNLGMKHDFLGYVVLAHFGYILLFVFLFAYGTKALNFQKR

SEQ ID NO: 1727 - protein, 607 aa, Zea mays
  unsure (1)..(607): unsure at all Xaa locations
XPLSMCFRNINYYVDVPVELKKQGVAEDRLQLLVDVTGAFRPGILTALVGVSGAGKTTLMDVLAGRKTGGLIEGSITISGYPKNQETFTRISGYCEQNDVHSPCLTVIESLLYSACLRLPSHVDADTQRAFVEEVMELVELNPLSGALVGLPGVNGLSTEQRKRLTIAVELVANPSIVFMDEPTSGLDARSAAIVMRTVRNIVNTGRTIVCTIHQPSIDIFESFDELLFMKRGGQLIYAGPLGAKSRNLVDFFEAIPGVPKIRDGYNPAAWMLEVTSTQMEQILGVDFAEYYRQSKLFQQTREIVEALSRPSSESKELTFATKYAQPFCAQYMACLWKHNLSYWRNPQYTAVRFFYTVIISLMFGTICWKFGSRRGTQHDIFNAMGAMYAAVLFIGITNATSVQPVISIERFVSYRERAAGMYSALPFAFSLVTVEFPYILVQSLIYGSIFYSLGSFEWTAAKFLWYLFFMYFTLLYFTFYGMMTTAITPNHTIAPIIAAPFYTLWNLFCGFMIPRKRIPVWWRWYYWANPVSWTLYGLLTSQFGDLDQPLLMADGVTSTTVVAFLEEHFGFRHDFLGAVAAMVAGFCVLFAVVFALAIKYLNFQRR

SEQ ID NO: 1728 - protein, 501 aa, Zea mays
RFFRQFIAFFATHQMAMALFRFLGAVLKTMVVANTFGMFVLLIIFIFGGFVIRRNDIKPWWIWGYWASPMMYSQNALSVNEFLASRWASPNNDTIIDAPTVGKAILISKGLFTGEWGFWLSIGALVGFIILFNMLYLWALTYLSLSASSGSNALVSEGEDDVMVLKGRSKDEMSQTNTVAQSSRVTLPFQPLALCFNHVNYYVDMPAEMKEQGFTESRLQLLSDISGTFRPGVLTALVGVSGAGKTTLMDVLAGRKTSGAIEGDITLSGYPKKQETFARISGYCEQTDIHSPNVTVFESITYSAWLRLSSDIDDGTKKMFVEEVMALVELDVLRDALVGLPGVSGLSTEQRKRLTIAVELVANPSIIFMDEPTSGLDARAAAIVMRTVRNTVNTGRTVVCTIHQPSIDIFESFDELLLLKRGGQVIYAGELGRHSHKLVEYFESISGVPKITEGYNPATWVLEVSSPLSEARLNMNFAEIYANSVLYRKNQELIKGVEYPP

SEQ ID NO: 1729 - protein, 302 aa, Zea mays
  unsure (1)..(302): unsure at all Xaa locations
XXRIPLHFMSFSVIISMTQEMKSQGVTADKLQLLSGISGAFRPGVLTALMGVSGSGKTTLMDVLSGRKTGGYIEGEIYISGYPKNQETFARISGYCEQNDIHSPQITIRESLLFSAFMRLPKEVTDQEKKIFVDEVMELVELNGLKDAIVGLPGVNGLSTEQRKRLTVAVELVANPSIIFMDEPTSGLDARAAAVVMRTVRNTVNTGRTVVCTIHQPSIDIFEAFDELLLLKRGGRVIYDGSLGVNSIDMIDYFQSIPGVNHISEGYNPATWMLEITTQACEEILGLDFAVVYKNSDQFRXX

SEQ ID NO: 1730 - protein, 358 aa, Zea mays
  unsure (1)..(358): unsure at all Xaa locations
XGMVLPXXPLSMCFRNINYYVDVPVELKKQGVAEDRLQLLVDVTGAFRPGILTALVGVSGAGKTTLMDVLAGRKTGGLIEGSITISGYPKNQETFTRISGYCEQNDVHSPCLTVIESLLYSACRRLPSHVDADTQRAFVEEVMELVELNPLSGALVGLPGVNGLSTEQRKRLTIAVELVANPSIVFMDEPTSGLDARSAAIVMRTVRIIVNTGRTIVCTIHQPSFDIFGSFDELLFMKRGGQLIYAGPLGAKSRNLVDFFEAIPGVPKIRDGYNPAAWMLEVTSTQMEQILGVDSAEYYRQSKLFQQTREIVEALSRPSSESKELTFATKYAQPFCAQYMACLWKHNLSYWRNPQYTX

SEQ ID NO: 1731 - protein, 150 aa, Phytophthora infestans
TLMDVIAGRKTGGKVRGEILLNGFPATDLAIRRCTGYCEQIDVHADSATILEALTLSAFLRQGSDVSSESKYDSVTECLELLELDSIADRCVRGCSVEQLQRLTIGVELAAQPSVLFLDEPTSGLDARAAKVIMDGVRKVANTGRTILCT

SEQ ID NO: 1732 - protein, 119 aa, Issatchenkia orientalis
LLDVLANRVTMGVVSGSMFVNGRLRDQSFQRSTGYVQQQDLHLQTSTVREALRFSAYLRQSRTISKKEKDEYVESIIDILEIRSYADAVVGVAGEGLNVEQRKRLTIGVDVAAKPKLLL

SEQ ID NO: 1733 - protein, 119 aa, Issatchenkia orientalis
LLNVLSRRTEVGVITGDMFVNGAPVDSSFERRTGYVQQQDLHVAELTVKESLLFSARLRRPRSVPDEEKIEYVDKVMKILNMEDYADSIAGVPGYGLNVEQRKKLSIATELVAKPSLLL

SEQ ID NO: 1734 - protein, 1053 aa, Saccharomyces bayanus
  unsure (1)..(1053): unsure at all Xaa locations
PTVFNAPYKLIKNATRIFQNSNEGSTFQILKPMEGCLNPGELLVVLGRPGSGCTTLLKSISSNTHGFDLGKDTEISYSGYSGDDIKKHYRGEVVYNAEADIHLPHLTVFQTLLTVARLKTPQNRIKGVDRESYANHLAEVAMATYGLSHTRNTKVGSDLVRGVSGGERKRVSIAEVSICGSKFQCWDNATRGLDSATALEFIRALKIQANISNTSATVAIYQCSQDAYDLFNKVCVLDDGYQIYYGPGDKAKKYFEDMGYVCPSRQTTADFLTSVTSVSERILNEDMLKKGISIPQTPKDMNDYWVKSQNYKELMEEIDQKINNNDEAAREAIKEAHIAKQSNRARPTSPYTVNYMMQVKYLLARNMWRIRNNIGFTLFMILGNSGMALILGSMFYKIMKNGDTSTFFFRGSAMFFAILFNAFSSLLEIFSLYEARSITEKHRTYSLYHPSADAFASVLSEVPTKLTIAVCFNIIFYFLVDFRRNGGVFFFYLLINIVAVFSMSHLFRCVGSLTKTLSEAMVPASMLLLSLSMYTGFAIPKKKILGWSKWIWYINPLAYLFESLLINEFHDRKFPCAQYIPRGTAYANSTGTETICSVVGAIPGQDYVXGDDFIKESYQYYHSHKWRGFGIGMAYVIFFFFVYLFLCEYNEGAKQKGEILVFPRSVVKKMKKQGALKEKNGNDPENVGERSDFSSDKKMLQESSEEESDTYGDVGLSKSEAIFHWRNLCYEVQIKTETRRILNNVDGWVKPGTLTALMGASGAGKTTLLDCLADRVTMGVITGDIFVNGIPRDESFPRSIGYCQQQDLHLKTATVRESLRFSAYLRQPAEVSIEEKNVYVEEVIKILEMEKYADAVVGIAGEGLNVEQRKRLTIGVELTAKPKLLVFLDEPTSGLDSQTAWSICQLMKKLANHGQAILCTIHQPSAILMQEFDRLLFMQRGGKTVYFGDLGDGCKTMIDYFENHSSHKCPPSANPAEWMLEVVGAAPGTHADQDYHEVWRNSDEYRAVQSELDWMEKELPKKGPITAEADQHEFAQSIVYQTKLVSIRLFQQY

SEQ ID NO: 1735 - protein, 459 aa, Saccharomyces bayanus
DTKDVEDRASRSSGQGSSSSSAAQSIAQHPYRGLDNEAAERVHELARTLTSQSMLHSTTSNNADQNSSSSTHNTQHNNADSRSIFSTDMMGVNPVFTNPDTPGYNPKLDPNSDEFSSTAWVQNMANISSSDPEFYKPYTLGCVWKNLSASGDSADVSYQSTFVNIVPKLLTKAFRILKPRKDEDTFQILKPMDGCLNPGELLVVLGRPGSGCTTLLKSISSNSHGFKVAKDSTVSYDGLSSSDIKKHYRGEVVYNAESDIHLPHLTVYQTLFTVARLKTPQNRIKGVDRESYANHVTEVAMATYGLSHTRDTKVGNDLVRGVSGGERKRVSIAEVAICGSRFQCWDNATRGLDSATALEFIRALKTQADIGKSAATVAIYQCSQDSYDLFDKVCVLDDGYQLYFGSSKKAKKYFQDMGYVCPPRQTTADFLTSITSPTERIINKEYIAKGIKVPQTARE

SEQ ID NO: 1736 - protein, 333 aa, Saccharomyces bayanus
HWRDLCYDVPVKGGERRILNNVDGWVKPGTLTALMGASGAGKTTLLDCLAERVTMGVITGNIFVDGRLRDESFPRSIGYCQQQDLHLKTATVRESLRFSAYLRQPSSVSLEEKDKYVEEVIKILEMEKYSDAVVGVAGEGLNVEQRKRLTIGVELAARPKLLVFLDEPTSGLDSQTAWDTCQLMRKLATHGQAILCTIHQPSAILMQQFDRLLFLQRGGQTVYFGDLGDGCKTMIDYFESHGAHKCPPEANPAECMLEIVGAAPGSHATQDYNEVWRNSDEYRAIQEELAWMEKKLPGKSKDPTADAHKPYAAPISYQFKMVTVRVCQQYWRS

SEQ ID NO: 1737 - protein, 1023 aa, Saccharomyces kluyveri
  unsure (1)..(1023): unsure at all Xaa locations
MSFEDNIGDDSITKEIPAIEGDVAPDHRPYFGLENDLKEQENIRRLARSLTRQSLHSVSNNSLADNENPNDTNSEFGLKRSLTSISHVPGQVPFSSKDIDPRLDXESDTFDPAFWAQNLRKLYLSDKDYYKPVELGVCLKNMRVSGVSVDSDYQSTVLNLPLKWGEKLYTNLFRSNDESRYFDILKPMDALFEPGRLCVVLGRPGAGCSTLLKTISARTYGFKIQPESVISYDGITQKEITKHYRGDVIYSAEMDYHFASLPVGYTLEFAARCRCPESRPEGITREQYYKHYAAVVMATNGLSHTYNTKVGNDFIRGVSGGERKRVSISEVTLAGAKVQCWDNSTRGLDSATALEFVRALKTNANVSRITPLIAIYQCSQDAYDLFDDVLLLYEGYEIYFGKAEDAKQYFLDMGWDCPPRQTTADFLTSVSSPAERRAKPEWENKVPRTAKEFYDIWLHSKEYAKLKVKIDKHLAKSEDGETKRQLAEHHRARQSKNLRPQSPFIISFGMQVKAVIHRNIQRIKGDPSVYLSAIISNSVMGLLVSSMFYNQKSNTGSFYYRTSALFTAILFNSFSSFLEILALFEARKIVEKHKTYAFYHPSADALASIITELPSKILVALGFNLSFYFMVNFRRTPGHFFFYFLVSVTSTFAMSHLFRTIGAASTSLQMAMTPASLLLLIISIYVGFVIPKGSLLGWSKWLYYLNPIARSMESMVANEFAHRTFECSHFIPSGPGYENVTLANKVCAVVGSVAGQSTVDGTSYMEKSFSYYDKHRWRNWGIVLCYAVFFLIVYMVLIEYNKGEMQKGEVILFTRSTLNKKRKKNEALKGDIESNDSITKDLTVSEESYSNEKENSLQKIGSEDIFHWRDVCYDVKIKSETRRILSNVDGWVKPGTLTALMGSSGAGKTTLLDVLANRVSTGVITGNMFVNGHLRDESFQRSTGYCQQQDLHGRTQTVREALRFSAHLRQPQDVSKAEKDEYVEEIIKLLEMEAYSDALVGVTGEGLNVEQRKRLPIGVELVA

SEQ ID NO: 1738 - protein, 1551 aa, Venturia inaequalis
MAYAGTKGDGIIRTASGHETYAPDGLGTPQREYEEEIAPSEDPSRATSERYAPITGHLYRRNSSDTEKGSDEDFTMATRSKSFTENMDTDDKDKLNRILTSLSQHQTRSSTLRRNDTISGLKEDDPVFDPSHKDFDLYKYLRLFMRDLQADGRETKKAGIVFRNLSVSGSGAALQLQSTVSDFVLAPFRLRELFSSSKSHKQIIDKFDGVLKSGELLIVLGRPGSGCSTFLKTLCGELTGLTVDKGSVIHYNGIPQKKMIKEFKGEVVYNQEVDKHFPHLTVGQTLEFAAAVRTPSNRLHGESRTEFSSQVAKVVMAVFGLSHTYNTKVGNDFVRGVSGGERKRVSIAEMAVAGAPLAAWDNSTRGLDSATALKFVEATRISADLTGSSHAIAIYQASQAIYDRFDKAVVLYSGRQIYFGPASKAKQFFEEQGWYCPKRQTTGDFLTSITNPSERRPREGMEKQVPRTPEDFEKYWRNSEMYQSLQKEIEDHETEFPIGGETLGKLQQQKRNAQASHTRPKSPYMISVPMQIKLCTKRAYQRIWNDMSSTLTMFISQIIMSLIIGSVFYGTPNATAGFFSKGAVLFFAVLLNALVAMTEINSLYDQRPIVEKHNSYAFYHPATEAIAGIVSDIPVKFLLAVGFNVIFYFLAGLRREPSQFFLYFLVSYVIMFVMAAVFRTMAAVTKTISQAMSLAGVLVLALVIYTGFVIPVSYMKPWFGWIHYINPIYYAFEILIANEFHGRDFTCSAIIPAYTPLQGDSWICSIVGAVPGRRTVSGDDFIMQMYQYSYSHVWRNFGILLGFLCGFMCIYFVGVEVNSSTSSAAEFLIFRRGYVPAYMQDDPKHAGNDEEKMADGTTDAKEDGGDVSAIPPQKDIFTWRDIVYDIQIKGEDRRLLDHVTGWVRPGTLTALMGVSGAGKTTLLDVLAQRTTMGVITGDMLVNGKPLDASFQRKTGYVQQQDLHLETATVRESLRFSAELRQPKTVTLQEKFDYVEDVIKMLNMEDFAEAIVGSPGEGLNVEQRKLLTIGVELAAKPKLLLFLDEPTSGLDSQSAWAICAFLRKLADAGQAVLCTIHQPSAILFQEFDRLLFLAKGGKTVYFGPVGKNSETLIDYYESNGARKCGEEENPAEYMLEIVNKGSSGQGQDWHEVWKGSKEREAVNEELKQIHKEKEGEAIAGANEEGAQDEFAMPFTAQVKAVTVRVFQQYWRMPSYVFAKWALGIASGLFIGFSFFQANTTQQGVQNVLFSAFMIATIFSSLVQQIMPLFVNQRSLYEVRERPSKAYSWKAFMIANIVVEIPYNIFLGVPVFACYLYAIAGIISSVRQVLILLLMIQFFVYAGTFAAMCIAALPDAETAAAVVTLLFATSLTFNGVMQSPQALPGFWIFMYRISPFTYWISSLVSTMLHGRRIECSSSETSRFSPPAGQTCQQYLADYLQTAPGTLQNPNDTTNCRYCSLSTADQLLAGSNVKYDTRWRDFGIVWSYVIFNIFVAVLTYYLFRVKKWNKGTGKSDGAKKAGFLGKILKKGANKGNDAKTEKGEQQANQHQRAI

SEQ ID NO: 1739 - protein, 1452 aa, Aspergillus fumigatus
MNESHEAGKNSSTNVEEREEEVLRLARQFTEQSSYSTAGQTPFAAEAGSALDPNGERFNARAWCKAMLQMHIGDKEAHPLRTLGVAFSNLNVHGFGSDTDYQKSVGNVWLKTLSLARIAFGQKQRKVDILQNLEGLVEAGEMLVVLGPPGSGCSTFLKTIAGETYGFHVDKNSNINFQGIAKQMAHEFRGEAIYTAEVDVHFPKLTVGDTLYFAARARTPRHIPGGVNATQYAGHMRDVIMAMFGISHTKNTIVGNDFIRGVSGGERKRVSIAEACLSNAPLQCWDNSTRGLDSANAIEFCKTLRMQADINGTTACVSLYQAPQAAYDYFDKVLVLYEGREIYFGPTSMAKHYFLQMGFVCPDRQTDADFLTSMTSHLERVVQPGYEDRVPRTPDEFAARWKASPQRAQLMQHIKSYNAKFALDGEYLDKFKQSRRAQQAKAQRVSSPYTLSYVQQVKLCLWRGYQRLKADPSVTISSLFGNTIISLVIASIFYNLKADTSTFFQRGALLFFAVLMNALGCGLEMLTLYAQRGIIEKHSRYALYHPSAEAFSSMIMDLPYKILNAITSNIVLYFMTNLRRAPGAFFFFVFTSFILTLTMSMFFRSMASLSRSLVQVLPFSAVLLLGLSMYTGFAIPTGYMLGWARWIAYINPISYGFESLMINEFHNRDFPCMDYVPSGPGYTDVGLNNRVCSTVRSVPGQAFVNGNAYIESAYSYTASHKWRNIGVIFAYMFLLGAVYLVATDFITEKKPKGEILVFPRGHKALKKGKSDEDLEGGGGRSATVEKIGSDGLAMIERQTAIFQWKDVCFDIKIGKENCRILDHVDGWVKPGILTALMGVSGAGKTTLLDVLATRTTMGIISGEMLVDGQPRDESFQRKTGYAQQQDLHLSTATVREALEFSALLRQSAHVPRQEKIDYVTEVIKLLDMTEYADAVIGVPGEGLNVEQRKRLTIGVELAARPQLLLFLDEPTSGLDSQTSWAILDLLDKLKKNGQAILCTIHQPSAMLFQRFDRLLFLQAGGRTVYFGEIGQNSQILIDYFVRNGAPPCPPDANPAEWMLDVIGAAPGSHTSINWFETWRRSPEYARVQEHLAELKHERRHQTNLFRTTSGQKREDKDSYREFAAPFWAQLYQVQVRVFQQIWRSPTYINSKTALCVLSALFVGFSLFHTPNTIQGLQNQMFGIFMLLTLFGQLIQQIMPHFVAQRALYEVRDRPAKTYSWKAFLIANIVVELPWNSLMSVLMFLCWYYPIGLYRNAEPTDAVHLRGTQMWLMIWTFLLFSSTFAHFMIAAFDAAENAGNLGNLLFLLCLLFCGVLATPDQLPRFWIFMYRVSPFTYLVSGMLSVGISNTNVTCADNEYLRFDPVNGTCGEYMGSYMSNLGGYLADEMATANCSFCPIKETNVFLGRVSSSYSDIWRNFGLMWVFIVFNIFAACSLYWWVRVPRDKKPVAKAE

SEQ ID NO: 1740 - protein, 1491 aa, Gibberella pulicaris
MATPDANMSSTRSEQSSHDTIVNNELSTNEKPLQSAPAPGDQTSSTDDEDDGPQTEEMVRRHSIVRDLARNYTNTSHHFNGSNADLFNAADPASPLNPSSENFNARAWAKAMSKSMNENGAGFRQSGLCFQDMNVFGYGAETDYQKDVGNVWLGLPSMAQQLFKPNAGKRRIDILRGFDGVVNAGEMLVVLGPPGSGCSTFLKSISGETNGIYVDDSTYFNYNGIAADEMHKHHKGETIYTAEVDVHFPMLSVGDTLTFAARARCPQNLPSGINHNQYSEHMRDVVMAMYGISHTVNTQVGDNYIRGVSGGERKRVTIAEATLSNAPFQCWDNSTRGLDSANAIEFCKTLRLQSELFGQTCAVSIYQAPQTAYDLFDKALVIYEGRQIFFGPADEAKAYFIGLGFECPDRQTTPDFLTSMTAPSERVVRPGFENKVPRTPDEFATCWKQSQQYQIVRAEVESYKSLYPINGSSADAFRENKQSAQAKGQRLKSPFTLSYMQQVQLCLWRGFKRLVGSPGVTIFQLIANTVVALIASSLFYNMEPTTGDFFKRGAVLFLAVLSNAFASALEILTQYAQRPIVEKHARYAFHHASAESFASILVDMPYKITNSILFNLTLYFMTNLNRDAGAFFFYLLVSFIMVLAMSGIFRSIASISRTLSQAMVPASLLILALVIFAGFVVPVDYMLGWCRWINYLDPVAYAFESLMVNEFSGRNFTCTGFVPNPLIPGYADVDDMNRACSTVGAVPGQSWVNGDDYLNLEYKYFHSNKWRNVGILIAMTIFNHIVYIVATEYISAKKSKGEVLVFRRSNMPANVKSDPEAASSGPIPVTEKNNNEVANIQGSTSVFHWNDVCYDIKIKGEPRRILDHVDGWVKPGTLTALMGVSGAGKTTLLDCLADRISMGVITGEMLVDGKLRDDSFQRKTGYVQQQDLHLETSTVREALTFSALLRQPASTPREEKIAYVDEVIKLLDMQEYADAVVGVLGEGLNVEQRKRLTIGVELAAKPPLLLFVDEPTSGLDSQTSWAILDLLEKLSKAGQSILCTIHQPSAMLFQRFDRLLFLAKGGRTIYFGDIGKNSETLTNYFVKNGSDPCPKGENPAEWMLEVIGAAPGSHTEIDWHQTWRESSEYQEVQGELQRLKAEGNANGGAEIHDAESYREFAAPFGEQLRIATTRVFQQYWRTPSYIYSKAALCIQVGLFIGLVFLNAPLSLRGLQNQMFAIFQVLTVFGQLVQMQMPHFVTQRSLYEVRERPSKTYSWKVFMLSQIMAEIPWNTLMSVFLFVCIYYPVGFQKNAEFAGQTAERGGLMWLLFWQFLIFTCTFAHAAIAITDTAEAGGNLANVVFMLSLFFCGVFGSPDNMPGFWIWMYRVSPFTYLVSAILSTGIGNAEVTCTAQELTTFNPPNGTTCGEYLESYIAQAGGYLTNNDATSDCKFCTIKDTNVYLEALSSSYDNRWRDFGIGMVYIVVNIVGALFLYWAFRMPKNKNKKQKKA

SEQ ID NO: 1741 - protein, 1547 aa, Neurospora crassa
MSFMVGTGSFGNYDHTARTSGAPLGRRQTHDLEEETVAANPSDPTHPEPGSSHSHNDQMTGTRATSMTDVDGSTARSEKEKDAQHANDSDSTCEEDEDRIEENRRASQVLALARKYTSQSHAAVPEGKTVFQVDDENSPLNPNGPNFNSRAWAKALVEQISGDGLQFRTTGVAFQNLNVFGFGSATDYQKDVLNVGLEIFSQVRNLIGMGRQRRIDILRDFDGVVRKGEMLVVLGPPGSGCTTFLKTIAGEHDGIFIDDQSYFNYQGMTAKEIHTHHRGEAIYSAEVDTHFPQLTVGETLTFAARARAPRHIPDGVTKTDFSNHLRDVVMAMFGISHTINTRVGNEYIRGVSGGERKRVSIAEAALSGAPLQCWDNSTRGLDSANAIEFVKTLRLQTELFGSTACVSIYQAPQSAYDLFDKAAVLYEGRQIFFGRADEAKQYFVNLGFECPARQTTPDFLTSMTSPTERIVRPGFEGKAPRTPDEFAAAWKNSAEYKSLQAEIEEYKKEHPINGPDAEAFRASKKAQQAKGQRAKSPFTLSYIQQVQLCLWRGWRRLVGDPSITMGSLIGNFIMALIISSVFYNLQPNTDSFYRRGALLFFAILMNAFSSALEILTLYAQRPIVEKHARYALYHPSAEAVASMLVDMPYKLANSIVFNVTLYFMTNLRREPGPFFFFLLVSFVTVLVMSMIFRTIASSSRTLSQAMVPAAIIILALVIFTGFAIPTTYMLGWCRWINYIDPIAYAFESLMLNEFVGRKFQCEAYVPSPSIPTYANVGNLNRVCSAVGSVAGQDYVLGDDYLRESFNYVNSHRWRNFGIIIAFICFFLFTYIVAAEAVSAKKSKGEVLVFRRGYKPASFKENKGDAESGGVQVAGKGHVSDGNTSDKEAGFLQAQTSVFHWNNVSYHVPIKKEIRQILNNVDGWVKPGTLTALMGVSGAGKTTLLDCLADRINVGVITGEMLVDGKPRDTSFQRKTGYVQQQDLHLETTTVREALNFSALLRQPAHVPRAEKLAYVDEVIKLLDMEEYADAIIGVPGEGLNVEQRKRLTIGVELAAKPPLLLFVDEPTSGLDSQTSWAILDLLEKLTKSGQAILCTIHQPSAMLFQRFDRLLFLAKGGRTVYFGDIGKNSKTMASYFERQSGVKCPPDANPAEWMLEVIGAAPGTHSEIDWHDAWRSSPEYQAVQEELQRLKNNSNHADALEMDGDAGGYREFAAPFFEQLREVTYRVFQQYWRTPSYIYSKTALCISVALFIGFVFYNAPNTIQGLQNQMFAIFNLLTIFGQLVQQTMPHFVVQRSLYEVRERPSKVYGWKVFMLSQIIVELPWNALMGAIMYFCWYYPVGLYRNAEPMGQVTERGGLMFLLLLAFMWFTSTFTDFMIAGFETAEAGGNIAQLLFSLCLIFCGVLASPEAMPGFWIFMYRVSPFTYLVSAMLSVGVANTDVHCSDVEFLKFNPLNGTCGEYMSDYIKAAGGYLLNPDATDECSFCPIDKTNMFLASVSSDYADRWRNFGILFAYIAFNILAALAVYWLVRVPKKNGIFGFLKKQKKE

SEQ ID NO: 1742 - protein, 1543 aa, Cryptococcus neoformans
MSATGVPAELNNLGAPITATTQNPSGLANSQVTSGPASSATQHDEHRSSAGNTLADEENDKAVESEKAEVIDAAADGKQKRLAADSSENIVTELEPHHVSIHRGKEEFAALERRYSTLSQQSQHELHRPTTRHSVRSSFSRKDRVVSRLTQDDAEKAKEGEGEFNLVDVLRSGRENQDEAGIKRKAVGVIWEDLEVIGAGGMRINIRNFSSAIIEQFMMPAFKILSIFGVNPFAPKPKAILHPSSGLLKPGEMCLVLGRPGAGCTTFLKTITNQRAGFMEIKGNVEYAGVGWKEMRKRYGGEVVYNQEDDDHLPTLTVAQTIRFAPATKTPKKKIPGVSAKQFQDDMLDLLLSMLNIKHTANTIVGNAYVRGVSGGERKRVSIAEMFCSGATVCSWDNSTRGLDASTALDYAKSLRLLTDIMGQTTFVSLYQAGEGIYDQFDKVLVLNEGHVAYFGPAKEARQYMIGLGYRDLPRQTTADYLSGCTDVNERRFADGRDETNVPATPEEMDKAYKESEVCARMTREREEYKQLMAEDATAREDFRQAVLEQKHKGVSKKSPYTVSFLQQVFIIFKRQLRLKFQDHFGISTGYATAIISALIVGSVYFRLPETASGAFTRGGLLFLGLLFNALTSFSELPSQMLGRSVLYRQNEYRFYRPAAFALAAVLADVPYNASVIFLFSIVLYFMGGLYSSGGAFFMFFLFVFLTFMVMSAFFRTLGVATSDYNVAARLASVLISFMVTYTGYMIPVQRMKRWLFWIFYLNPLSYGYEAIFANEFSRINLTCDSSYTIPRNIPEAGITGYPDTLGPNQMCSIFGSTPGDPNVSGSDYMATGYSYYKAHIWRNFGILLGFFAFFMFLQMLFIEVLEQGAKHFSINVYKKEDKDLKAKNERLAERLEAFRAGELEQDLSELKMRPEPFTWEVLNYTVPVPGGHRQLLNDIYGYVKPGSLTALMGASGAGKTTVLDVRASRKNIGVIEGDVLMNGRPIGTGFQRGCGYAEQQDTHEWTTTVREALRYSAYLRQPQHVPKQEKDDYVEDIIELLELQELADAMIGFPGYGLSVEARKRVTIGVELAAKPELLLFLDEPTSGLDGQSAYNIVRFLKKLCAAGQKILCTIHQPNALLFQSFDRLLLLQRGGECVYFGDIGPDSKVLIDYLERNGAKVPHDANPAEFMLEAIGAGSRKRIGSDWGEKWRNSPEFAEVKREIQELKAEALAKPVEEKSNRTEYATSFFFQLKTVLRRTNVALWRNADYQWTRLFAHLAIGLIVTLTFLQLDNSVQSLQYRVFAIFFATVLPALILAQIEPQYIMSRMTFNREASSKMYSSTVFALTQLLSEMPYSLGCAVSFFLLLYYGVGFPYASSRAGYFFLMILVTEVYAVTLGQAVAALSPTILIAALFNPFLLVLFSIFCGVTAPPPTLPYFWRKWMWPLDPFTRLISGLVSTVLQDQEVVCKDGEYQVFPAPSGQTCQQWAGAFAEAIGGYINNPDSTGDCQFCQYRTGQAFFTPLEISFSTRWRDFGIFICYVVFNILVLLIAARFLKWQRR

SEQ ID NO: 1743 - protein, 122 aa, Colletotrichum lagenarium
TLLDVLATRVSIGVVSGDTLINGVPTDATFQHQVGYVQQQDIHLSTMTVREALESSAVLRQSSEVPRKERLQYVNHVIEMLEMQDFAGAVIGVPGEGLNVEQRKRLTIGVELAARPQLLVFF

SEQ ID NO: 1744 - protein, 1499 aa, Mycosphaerella graminicola
MTARMASESKIDDFGDEKSNRHSPSNDTLMKEKNESPGDVSSPSSTSINERNKEVNCLARRFSEISGWNEIPSNPLEAAKGTELDPLSPNFKARTWVKSMLKFSKQDGRTPMRTGGVAFRNLSAHGFGLATDYQKDVGNIWLDSISIVKKLFGMEKSRRIDILQDFEGLLESGEMLVVLGPPGSGCSTFLKTLTGETHGFQVDKNSYMNFQGIPAGEMHSVFRSEAIYTAEVDIHFPQLTVGETLTFAARARTPRFIPGDVERNVYAEHMRDVVMAMYGISHTINTRVGNDYLRGVSGGERKRVTIAEASLSGAALQAWDNSTRGLDSANAVEFCKSVRLGCELGGSAAMVAIYQAPRAAYEQFDKVIVLYEGRQIYFGNIHAGKTYFEDLGFQCPDRQTTPDFLTSMTSAVERVVKPGWEDKVPRSPDEFAAAWKASPTRQKLIQDIEDYERRFPFKGEAYQQFVDSRKAQKAKSHRFKSPYTISYLQQCQVCLWRGYRRLCADPELLYTSLFMNSILALIVGTLFYNLKLTTASFYQRGAVIFFGTMMNAFGSSLEILTLYHQRPIVEKHERYALYHPSAEAVASMIMDLPYKISNCIIFNTVLYFMVNLRREPGAFFFFIFLAFITTLTMSMMFRTIASCSRTLSQAMTPSALILLWLLIFTGFAIPVDYMLGWCRWLNYIDPVAYAFESLMINEFSGRNYACKSDDLVPSYGTLAAQSQVCNAVGAVAGRDYVEGEAYINSAYSYYRSHKWRNIGIIFAFMVGFLTVYLVASENIRAKKSKGEVLLFQKGRIPAALKEKSQDEEMSEVNRVSSVMCRQMSNVEATDVILRQTAVFSWRNVCYDIKIKGEERRILDNVDGWVKPGTLTALMGVSGAGKTTLLDVLATRVTMGVISGEMLVDGRERDNSFQRKTGYVQQQDLHLATSTVREALNFSALLRQPASVSRQEKLDYVDEVIKLLDMQEYADAVVGVPGEGLNVEQRKRLTVGVELAAKPQLLLFLDEPTSGLDSQTSWAICDLMEKLKNSGQAILCTIHQPSAMLFQRFNRLLFLAKGGKTVYFGEVGPGAKILSTYFERNGGHPCPPDANPAEWMLEVIGAAPGSRTDIDWHQVWRASPEYAATQRELDHLKDNGALVRQPSMVESDNESFNAFAAGFWSQLREVLVRVALQYWRTPSYIYAKLSLCTLAGLFIGFIFYKAPLTHQGLTNQMLSIFMIFTLFSNVSQQIMPHFVLQRSLYEARERPSKTYSWQVFLISNILIELPWNAFAGLLFFLCYYYPIGLYANASPTDSVAERGGYFFLMILAFFLFTSTFTNLMIAGMDSAETSGNIATLLFSLCLIFNGILASPKTMPKFWLFLYRVSPFTYITGGLMSAGLMDQTTHCAANEFVTFQPDGGEGGGTTCGTYMDPYISGANGTVGKGGYILNPSADADCKYCSFNTTNHFLKLVSIDPADRWRDLGITWVYILVNVAGAVALYWLFRVPKGSKKKAEKKEKTG

SEQ ID NO: 1745 - protein, 1635 aa, Mycosphaerella graminicola
MATGGSASTPIVGDYNPERVEQLFDIPRPEQGNIYVEAENAARTPSGAQESQLSGSTPGINTADHADDSYLTANGREAAESINDDKKSSGFNSDDDQPINAEERNILRRLATNSRRSMNNTNEDPEALQRTGTLDGLGMDDPVFDPNSPRFDLYKWLKLTLKLVNDEDIKIKRSGLAFKDLHVSGSGSALNLQPTVSSMLSAPLRIGEMFSMAKKPHKQILRSFDGLMKSGELLIVLGRPGSGCSTLLKSLTGQMHGLTMDEKTTIHYNGIDQKQMIKEFQGEVIYNQEVDKHFPHLTVGQTLEHAAALRMSQQRPLGTSRQSAVEYLTQVVMAVYGLSHTYNTKVGNDFVRGVSGGERKRVSIAEMALAGSALAAWDNSTRGLDSATALTFIKALRLNADLVGSAHAVAIYQASQAIYDLFDKAIVLYEGREIFFGKASVAKKYFEDMGFYCPSRQTTGDFLTSVTNPAERQLREGYEDRAPRTGDDFEKYWHDSPEYQTLQKEIQGHTKEGSTPSATSSGTSKLSAASKNDNQAKHARPKSPYVVSVPMQIKLNTKRSWQRIWGDKAQTFTPMIFNVIIALIIGSIFFNSPPATSAFTARGAVLFFAILINALSAISEINSLYDQRPIVEKHKSYAFYHPATEAIAGIVMDVPLKFVVAVCFNLVLYFMSGLRREPAQFFLFFLIAFVSTFVMSAVFRTLAALTKTISQAMALSGVMVLALVIYTGFVVPTKYMKPWFGWIRWINPIFYAFEILVANEFHAREFECSQFIPTYTQFGGETFICSVVGAVAGELTVTGDAYIAEMYGYYYSHVWRNFGILLAFFFAFMVIYFVAVELNSSTFSTAEVLVFRRGHVPAYMQNIDKPGKEDGEAAAAEKGPEKGDEGGDVSAIPPQTDIFTWRDVDYDIEIKGEPRRLLDHVSGWVKPGTLTALMGTSGAGKTTLLDVLAQRTTMGVVTGNMFVNGAPLDDSFQRKTGYVQQQDLHLETSTVRESLRFSAMLRQPRTVSKQEKYEYVEEVIKMLNMEDFAEAVVGVPGEGLNVEQRKLLTIGVELAAKPKLLLFLDEPTSGLDSQSAWAICAFLRKLADAGQAVLCTIHQPSAILFQEFDRLLFLRKGGHTVYFGDIGKNSRTLLDYFESNGARDCGEEENPAEYMLEIVGDDSSDWVGTWNDSKEARRGTAGDRTHSQGTLLRGEELDRRQRRPLRPRRIRHAFRRPTQDGHSPRVPTILAYAELPVRENGSLHRRWSLHRFLLLLRDATLQGMQNVIYSLFMLTTIFSTLVQQIQPLFVTQRSLYEVRERPSKAYSWKAFLIANMVVEIPYQIIAGILVYATFYYPVVGIQSSERQVLVMLLCIVLFVYASTFAHMCIAAMPDAQTAGAIVTFLFFMALIFNGVMQPPSALPGFWIFMYRVSPFTYWVASMASAMLHDRQVTCSDTEISTFQPPQGQTCGQYMQPYLEGGAAGYLQNPDATADCGYCSIRVADTFLSGVGISWSNRWRDFGLVWVYVFFNLGMAVFLYWFFRVRSHSKKTSKKSKKSGDKKGAAAVAGTEKDDKKVKKTDTSSSSEGNTPAAASVDPEKDAEAQRSGSTTSAKAVKRQTSRTAGLTRTVSEMGQSVLTTNKGRSRANERNAHVY

SEQ ID NO: 1746 - protein, 1501 aa, Candida albicans
MSDSKMSSQDESKLEKAISQDSSSENHSINEYHGFDAHTSENIQNLARTFTHDSFKDDSSAGLLKYLTHMSEVPGVNPYEHEEINNDQLNPDSENFNAKFWVKNLRKLFESDPEYYKPSKLGIGYRNLRAYGVANDSDYQPTVTNALWKLATEGFRHFQKDDDSRYFDILKSMDAIMRPGELTVVLGRPGAGCSTLLKTIAVNTYGFHIGKESQITYDGLSPHDIERHYRGDVIYSAETDVHFPHLSVGDTLEFAARLRTPQNRGEGIDRETYAKHMASVYMATYGLSHTRNTNVGNDFVRGVSGGERKRVSIAEASLSGANIQCWDNATRGLDSATALEFIRALKTSAVILDTTPLIAIYQCSQDAYDLFDKVVVLYEGYQIFFGKATKAKEYFEKMGWKCPQRQTTADFLTSLTNPAEREPLPGYEDKVPRTAQEFETYWKNSPEYAELTKEIDEYFVECERSNTRETYRESHVAKQSNNTRPASPYTVSFFMQVRYGVARNFLRMKGDPSIPIFSVFGQLVMGLILSSVFYNLSQTTGSFYYRGAAMFFAVLFNAFSSLLEIMSLFEARPIVEKHKKYALYRPSADALASIISELPVKLAMSMSFNFVFYFMVNFRRNPGRFFFYWLMCIWCTFVMSHLFRSIGAVSTSISGAMTPATVLLLAMVIYTGFVIPTPSMLGWSRWINYINPVGYVFESLMVNEFHGREFQCAQYVPSGPGYENISRSNQVCTAVGSVPGNEMVSGTNYLAGAYQYYNSHKWRNLGITIGFAVFFLAIYIALTEFNKGAMQKGEIVLFLKGSLKKHKRKTAASNKGDIEAGPVAGKLDYQDEAEAVNNEKFTEKGSTGSVDFPENREIFFWRDLTYQVKIKKEDRVILDHVDGWVKPGQITALMGASGAGKTTLLNCLSERVTTGIITDGERLVNGHALDSSFQRSIGYVQQQDVHLPTSTVREALQFSAYLRQSNKISKKEKDDYVDYVIDLLEMTDYADALVGVAGEGLNVEQRKRLTIGVELVAKPKLLLFLDEPTSGLDSQTAWSICKLMRKLADHGQAILCTIHQPSALIMAEFDRLLFLQKGGRTAYFGELGENCQTMINYFEKYGADPCPKEANPAEWMLQVVGAAPGSHAKQDYFEVWRNSSEYQAVREEINRMEAELSKLPRDNDPEALLKYAAPLWKQYLLVSWRTIVQDWRSPGYIYSKIFLVVSAALFNGFSFFKAKNNMQGLQNQMFSVFMFFIPFNTLVQQMLPYFVKQRDVYEVREAPSRTFSWFAFIAGQITSEIPYQVAVGTIAFFCWYYPLGLYNNATPTDSVNPRGVLMWMLVTAFYVYTATMGQLCMSFSELADNAANLATLLFTMCLNFCGVLAGPDVLPGFWIFMYRCNPFTYLVQAMLSTGLANTFVKCAEREYVSVKPPNGESCSTYLDPYIKFAGGYFETRNDGSCAFCQMSSTNTFLKSVNSLYSERWRNFGIFIAFIAINIILTVIFYWLARVPKGNREKKNKK

SEQ ID NO: 1747 - protein, 1499 aa, Candida albicans
MSTANTSLSQQLDENPWVDASDNSSVQEYQGFDATASHNIQDLARKLTHGSTNGDHHSANDLARYLSHMSDIPGVSPFNGNISHEQLDPDSENFNAKYWVKNLKKLFESDSDYYKPSKLGVAYRNLRAYGIANDSDYQPTVTNALWKFTTEAINKLKKPDDSKYFDILKSMDAIMRPGELTVVLGRPGAGCSTLLKTIAVNTYGFHIGKESQITYDGLSPHDIERHYRGDVIYSAETDVHFPHLSVGDTLEFAARLRTPQNRGEGIDRETYAKHMASVYMATYGLSHTRNTNVGNDFVRGVSGGERKRVSIAEASLSGANIQCWDNATRGLDSATALEFIRALKTSATILDTTPLIAIYQCSQDAYELFDNVVVLYEGYQIFFGKASKAKEYFENMGWKCPQRQTTADFLTSLTNPAEREPLPGYEDKVPRTAQEFETFWKNSPEYAELTKEIDEYFVECERSNTGETYRESHVGKQSNNTRPSSPYTVSFFMQVRYVIARNFLRMKGDPSIPLISILSQLVMGLILASVFFNLRKSTDTFYFRGGALFFSVLFNAFSSLLEILSLYEARPIVEKHRKYALYRPSADALASIISELPVKLLMTMSFNIVYYFMVNLRRTAGNFFFYWLMCASCTLVMSHMFRSIGAVTTTIATAMSLSTVFLLAMIIYAGFVLPIPYILGWSRWIRYINPVTYIFESLMVNEFHGREFECGQYIPSGPGFENLPVENKVCTTVGSTPGSTVVQGTEYIKLAYQFYSSHKWRNFGITVAFAVFFLGVYVALTEFNKGASQKGEIVLFLKGSLKKHKRKTAASNKGDIEAGPVAGKLDYQDEAEAVNNEKFTEKGSTGSVDFPENREIFFWRDLTYQVKIKKEDRVILDHVDGWVKPGQITALMGASGAGKTTLLNCLSERVTTGIITDGERLVNGHALDSSFQRSIGYVQQQDVHLETTTVREALQFSAYLRQSNKISKKEKDDYVDYVIDLLEMTDYADALVGVAGEGLNVEQRKRLTIGVELVAKPKLLLFLDEPTSGLDSQTAWSICKLMRKLADHGQAILCTIHQPSALIMAEFDKLLFLQKGGRTAYFGELGENCQTMINYFEKYGADPCPKEANPAEWMLQVVGAAPGSHAKQDYFEVWRNSSEYQAVREEINRMEAELSKLPRDNDPEALLKYAAPLWKQYLLVSWRTIVQDWRSPGYIYSKLILVISSSLFIGFSFFKSKNNLQGLQSQMLAVFMFFVPFTTFIDQMLPYFVKHRAVYEVREAPSRTFSWFAFIAGQITSEIPFQIVVGTISYFCWYYPVGLYANAEPTDSVNSRGVLMWMLLTAFYVYTSTMGQLAISLNELIDNAANLATTLFTLCLMFCGVLAGPNVIPGFWIFMYRCNPFTYLIQAILSTGLANAKVTCAPRELVTLKPPMGETCSSFIGPYTEAAGGYFSTNSDGTCSVCRIDSTNQFLESINALFSQRWRNFGIFVAFIGINIILTIFFYWLARVPKGNREKKMKK

SEQ ID NO: 1748 - protein, 1490 aa, Candida albicans
MADADTSSNSSKTNEDRSQEGFGTYQGYTDRVASEVQELARIISHASIQQLKLKRQHSRQESQKSNEQESELSGKLGVIPVDENGNFVDQRLNPNSPEFNAAYWIQNAHKLVSSDIDYFKPVTIGVAYKNLRAYGSASDADYQSTLVNLIPKYLSLFFREYILRHTGPTFDILKPMDGLIKPGELTVVLGRPGAGCSTFLKTIASQTYGYHIDKDSVIRYNSLTPHEIKKHYRGEVVYCAETENHFPQLTVGDTLEFAAKMRTPQNRPLGVSRDAYARHLAAVVMAVYGLSHTRNTKVGNDFIRGVSGGERKRVSIAEITLNNAMVQCWDNSTRGLDSATALEFIRALKASADIVHTTPLVAIYQCSQDAYDLFDKVVLMYQGYQIYFGSAKKAKQYFIDMGYECPQRQTTADFLTSLTNPAERIVRQGFEGKVPQTPQEFYEYWKKSPEGQQIVADVDQYLTEHSSAAEKEAIKEAHQARQSDHLKPASPYTVSFFMQVRYIAHRNILRIKGNPSIHLFQIFGNIGMSFILSSIFYNLPTATSSFYHRTAALFFAVLFNAFSCLLEIFSLYEARSIVEKHKKYALYHPAADAFASIVTELPTKFIIAIGFNLVYYFMVNFRRTPGNFFFYLLINFSATLAMSHIFRTIGAATKTLQEAMTPAAILLLALTIFTGFVIPTPNMHGWCRWINYLDPLAYAFESLIANEFHNRDFECSQYVPSGGSYPTAGPNRICTPVGSVPGQDFVDGTRYMEMSFDYRNSHKWRNFGIVIGFIVFFFCTYILLCEINKGAMQKGEILLFQQRALKKRKKANNDIESGEIEKVTPEFDNEYENNQDKMLQSGGDTFFWRDLTYQVKIKSEDRVILDHVSGWVKPGQVTALMGASGAGKTTLLNALSDRLTTGVVTEGIRLVNGRPLDSSFQRSIGYVQQQDLHLETSTVREALEFAAYLRQPKSVSRKEKNEYVDYIIRLLEMEQYADAVVGVSGEGLNVEQRKRLSIGVELVAKPKLLVFLDEPTSGLDSQTAWSICKLIRKLADNGQAILCTIHQPSAILLAEFDRLLFLQRGGQTVYFGDLGKNFTTLINYFEKYGAPKCPPEANPAEWMLEVIGAAPGSKANQDYYDVWLKSSEFQEMNSELDLMSEELVKKPLDDDPDRLKPYAAPYWEQYLFVTKRVFEQNWRTPSYLYSKFLLVVTSSLFNGFSFYKADRSLQGLQNQMFSVFMFLVILHTLIQQYLPTFVSQRDLYEVRERPSKTFSWITFIAAQVTAEIPWNIICGTLGYFCWYYPVGLYQNATYTNTVHQRGAFMWFAIVLFFIYTSTLAQLCISFLEIDDNAANLSVLLFTMCLAFCGVLVTKEQLPGFWVFMYRCSPFTYLVSVMLSVGLVDAPVTCAAKEYLRFSPPQGYTCMQYMEPYMKVAGGYLLNENSTTECEFCTMKVTNVFLKMIGSDYSKRGRDIGIYIAFIGINIIGTFILYWFARVPKNFDIKLRRKR

SEQ ID NO: 1749 - protein, 1501 aa, Candida albicans
MAKTSQAEGQPYKGYYNNKSQGQPYHGYYSGFNKSASAQIHHLARSLTQGVQSHYDDTYTTATMHPNGINPISDKTDPTLDPESPSFSSKRWVQNMWKLYQSDSEYYKPGKLGVAYKNLRVYGDAIESDYQTTVSNGVLKYARNIFNKFRKDNDDYSFDILKPMEGLIKPGEVTVVLGRPGAGCSTFLKTIACRTEGFHVADGSVISYDGITQDEIRNHLRGEVVYCAETETHFPNLTVGETLEFAALMKTPQNRPMGVSREEYAKHVVDVVMATYGLSHTKNTKVGNDFIRGISGGERKRLSIAEVTLVQASIQCWDNSTRGLDAATALEFISSLKTSASILNDTPLIAIYQCSQNAYDLFDKVIVMYEGYQIFFGSSQRAAAYFKKMGFVCQDRQTTPDFLTSITSPAERIIKPGYERLVPRTPKEFYRYWRRSPERQALLEEIDEYLDNCENYDQKQKIFEANNAKKAKHTYNKSSYTVSLPMQVRYIMKRYWDRMRGDIIVPLSTVAGNIAMALILSSVFYNLQPNSSSFYYRTSVMYYALLFNAYSSVLEIYNMYEGRAIVQKHREYALYPPMADAIGSIISDFPLKVVCSVLFNLILYFMVNFKREPGAFFFYLLISFCSTLFMSHLFRTIGAFTNSLAEAMTPSSLLLFALSTFSGFAIPVTYMLGWCKWIRWVNPLAYAYEALISNEFHGRVFDCSNIVPSGFGYPKTGNSVVCASIGALPGEFKVDGDLYLKLAFDYSYSNVWRNFGVLMAFIIFLFGTTIFFVQTNKSSISKGETLVFRRKNIRKMRKMEEDEEAYMDGMAPLDFSGSTEISDYSYDYMDRKLLDTSNIFHWRNLTYTVKIKSEERVILNNIDGWVKPGEVTALMGASGAGKTTLLNALSERLTTGVITSGTRMVNGGELDSSFQRSIGYVQQQDLHLETSTVREALKFSARLRQPNSVSIAEKDSYVEKIIDLLEMRTYVDAIVGVPGEGLNVEQRKRLTIAVELVARPKLLVFLDEPTSGLDSQTAWSICKLIRKLANHGQAILCTIHQPSAILLEEFDRLLLLQKGETVYFGEFGANCHTLIEYFERNGASKCPQHANPAEWMLGVIGAAPGTQANQDYFETWRNSPEYRAVQNELHRLEEMPGLASGEKEPDTNQAYAASFWKQYIFVVHRLFQQYWRTPSYIYSKFAMAVLCSLFNGFTYYKSQNSMQGLKNQMLSIFSMFVVLTTLAQQYVPLFVTQRDLYEARERPSKTFSWLAFIAAQITAEIPYQVLAATISFFSWYYPVGLYRNAVYSGAVTHRGVLMWLIMTLMFIYSSTLAQFCISWNQLADYAANWISLLLTISMIFCGVIATKDSMPKFWVFLYRCTPLTYLTSAMMSIGLGDSFVKCAPTEILTFPPQTPGVQKCQDYMGAYISIAGGYLLNPEATDNCKFCIMDKTNQFLDFMNISIHNFGRDTGIFIVFIVFNMAATVFSYWLFRVPKGNREKGSFFDKLPFLNGGGDTNHENV

SEQ ID NO: 1750 - protein, 1499 aa, Candida glabrata
MSLASDKKDADVASTTTTAQDDDNLSTYHGFDHHVQDQVRQLARTLTQQSSLHQKKEHTLPEEGINPIFTNTEADDYNPRLDPTSDEFSSAEWVQNMSNISNSDPDYYKPYSLGCYWKDLVATGESADIEYQANFLNGPYKGLKTVYNTVVPSTASSKDKNFKILKSMEGAVNPGELLVVLGRPGSGCTTLLKSISSNTHGFNIAKDSTISYSGMTPNDIRKHFRGEVVYNAEADIHLPHLTVYQTLLTVARLKTPQNRLKGIDRETYARHLTEVAMATFGLSHTRNTKVGNDLVRGVSGGERKRVSIAEVSICGSKFQCWDNATRGLDSATALEFIRALKVQASISNAAATVAIYQCSQDAYDLFDKVCVLYDGYQIYLGPAGKAKRYFQKMGYVSPERQTTADFLTAVTSPSERIINQDYINRGIFVPQTPKEMWEYWRASEDHADLIKEIDSKLSDNYDANLAEIKDAHVARQSKRARPSSPYTVSYGMQIKYLLIRNFWRIKQSSGVTLFMVIGNSSMAFILGSMFYKVMKHNTTSTFYFRGAAMFFAVLFNAFSSLLEIFSLFEARPITEKHRTYSLYHPSADAFASILSEVPAKLITAVCFNIIYYFLVNFRRNGGVFFFYFLINIVAVFAMSHLFRCVGSVSKTLSAAMVPASMLLLGLSMYSGFAIPRTKILGWSKWIWYINPLAYLFESLMINEFHDRKFPCSQYIPSGSVYNNVPADSRICSSVGAIRGNDYVLGDDFLRESYSYLHKHKWRGFGIGLAYVIFFLVLYLILCEYNEGAKQKGEILVFPQNIVRRMKKERKLKNVSSDNDVEIGDVSDISDKKILADSSDESEESGANIGLSQSEAIFHWRNLCYDVQIKKETRRILNNVDGWVKPGTLTALMGASGAGKTTLLDCLAERVTMGVITGEVSVDGKQRDDSFARSIGYCQQQDLHLKTSTVRESLRFSAYLRQPADVSIEEKNQYVEDVIKILEMEQYADAVVGVPGEGLNVEQRKRLTIGVELAAKPKLLVFLDEPTSGLDSQTAWSICQLMKKLANHGQAILCTIHQPSAILMQEFDRLLFLQRGGKTVYFGDLGDGCKTMIDYFESHGSHKCPPDANPAEWMLEVVGAAPGSHANQDYHEVWRNSDEYQKVQEELEWMSNELPKKNTNNSETVHKEFATGVLYQCKLVSPRLFQQYWRSPDYLWSKFFLTIFNNIFIGFTFFKADRSLQGLQNQMLAVFMFTVIFNPLLQQYLPSFVQQRDLYEARERPSRTFSWKAFIVSQILVEIPWNILAGTVAFVIYYYAIGFYSNASVAHQLHERGALFWLFSCAFYVYIGSLALFCISFNQVAEAAANMASLMFTLSLSFCGVLVTPNGMPRFWIFMYRVSPLTYLIDGMLSTGVANVAIKCSNYELLRFSPAANLTCGEYLGPYLQTVKTGYIVDPSATDTCELCPYSHTNDFLSSVSSKYSRRWRNWGIFICYIAFNYIAGIFLYWLARVPKKSGKLAKK

SEQ ID NO: 1751 - protein, 1542 aa, Candida glabrata
MNTPDDSSVSSVDSHQPYMGFDDNVEKRIRELARSLTQQSLTSSNRSVNKEAPADGSAPLDRVSTRASSIFSADFKGVNPVFSDEEEDDYDARLDPNSDEFSSKAWVQNMAKITTGDPEFYKPYSIGCCWKDLSASGESADVSYQSTFLNLPVKLLNAVWRKARPARESDTFRILKPMDGLLKPGELLVVLGRPGSGCTTLLKSISSTTHGFQISKDSVISYNGLTPNEIKKHYRGEVVYNAEADIHLPHLTVYQTLVTVARLKTPQNRVKGVTREDFANHVTDVAMATYGLSHTRDTKVGNDLVRGVSGGERKRVSIAEVWICGSKFQCWDNATRGLDSATALEFVRALKTQAHIAKNVATVAIYQCSQDAYNLFNKVSVLYEGYQIYFGDAQHAKVYFQKMGYFCPKRQTIPDFLTSITSPAERRINKEYLDKGIQVPQTPLDMVEYWHNSEEYKQLREEIDETLAHQSEDDKEEIKEAHIAKQSKRARPSSPYVVSYMMQVKYILIRNFWRIKNSASVTLFQVFGNSAMAFILGSMFYKIQKGSSADTFYFRGAAMFFAILFNAFSSLLEIFSLYEARPITEKHRTYSLYHPSADAFASVISEIPPKIVTAILFNIIFYFLVNFRRDAGRFFFYFLINVIAVFAMSHLFRCVGSLTKTLQEAMVPASMLLLALSMYTGFAIPRTKMLGWSKWIWYINPLAYLFESLMVNEFHDRRFPCNTYIPRGGAYNDVTGTERVCASVGARPGNDYVLGDDFLKESYDYENKHKWRGFGVGMAYVIFFFFVYLILCEFNEGAKQKGEMLVFPHSVVKRMKKEGKIRDKTKMHTDKNDIENNSDSITSNATNEKNMLQDTYDENADSESITSGSRGGSPQVGLSKSEAIFHWQNLCYDVPIKTEVRRILNNVDGWVKPGTLTALMGASGAGKTTLLDCLAERTTMGVITGDVMVNGRPRDTSFSRSIGYCQQQDLHLKTATVRESLRFSAYLRQPSSVSIEEKNEYVEAVIKILEMETYADAVVGVPGEGLNVEQRKRLTIGVELAAKPKLLVFLDEPTSGLDSQTAWATCQLMKKLANHGQAILCTIHQPSAMLMQEFDRLLFLQKGGQTVYFGDLGKGCKTMIKYFEDHGAHKCPPDANPAEWMLEVVGAAPGSHANQDYHEVWRNSEQFKQVKQELEQMEKELSQKELDNDEDANKEFATSLWYQFQLVCVRLFQQYWRTPDYLWSKYILTIFNQLFIGFTFFKADHTLQGLQNQMLSIFMYTVIFNPLLQQYLPTFVQQRDLYEARERPSRTFSWKAFILAQIVVEVPWNIVAGTLAYCIYYYSVGFYANASQAHQLHERGALFWLFSIAFYVYVGSLGLFVISFNEVAETAAHIGSLMFTMALSFCGVMATPDAMPRFWIFMYRVSPLTYLIDALLSTGVANVDIRCSNTELVTFTPPQGLTCGQYMTPYLNVAGTGYLTDPSATDECHFCQFSYTNDFLATVSSKYYRRWRNYGIFICFIVFDYVAGIFLYWLARVPKTNGKIAKNGKTAKVNFIRRLIPF

SEQ ID NO: 1752 - protein, 704 aa, Candida glabrata
KFQCWDNARRGLDSATALEFVRALKTQAHIAKNVATGAIYQCSQDAYNLFNKVSVLYEGYQIYFGDAQHAKVYFQKMGYFCPKRQTIPDFLTSITSPAERRINKEYLDKGIKVPQTPLDMVEYWHNSEEYKQLREEIDETLAHQSEDDKEEIKEAHIAKQSKRARPSSPYVVSYMMQVKYILIRNFWRIKNSASVTLFQVFGNSAMAFILGSMFYKIQKGSSADTFYFRGAAMFFAILFNAFSSLLEIFSLYEARPITEKHRTYSLYHPSADAFASVIPEIPPKIVTAILFNIIFYFLVNFRRDAGRFFFYFLINVIAVFAMSHLFRCVGSLTKTLQEAMVPASMLLLALSMYTGFAIPRTKMLGWSKWIWYINPLAYLFESLMVNEFHDRRFPCNTYIPRGGAYNDVTGTERVCASVGARPGNDYVLGDDFLKESYDYENKHKWRGFGVGMAYVIFFFFVYLILCEFNEGAKQKGEMLVFPHSVVKRMKKEGKIRDKTKMHTDKNDIENNSDSITSNATNEKHMLQDTYDENADSESITSGSRGGSPQVGLSKSEAIFHWQNLCYDVPIKTEVRRILNNVDGWVKPGTLTALMGASGAGKTTLLDCLAERTTMGVITGDVMVNGRPRDTSFSRSIGYCQQQDLHLKTATVRESLRFSAYLRQPSSVSIEERNEYVEAVIKILEMETYADAVVGVAGEGLNVEQ

SEQ ID NO: 1753 - protein, 1408 aa, Trichophyton rubrum
LNRRDTLAGVKIGDPVLDPTKPEFDFYKWARMFTHVMEKEGIKRNRTGVMFRNLTVLGSGSAVQYQDTFLSPFAAPFRPGELCGKGRNPEKVILHDFNGAIREGELLMVLGRPGSGCSTFLKAICGELHGLQKKKESIIHYNGVSQHTFKKELRGEAVYSAEDEHHFPHLTVGQTLEFAAAARTPSKRVLGLSRKDFSTHLARVMMSVFGLSHTYNTKVGDDYVRGVSGGERKRVSIAEIALSGAPICCWDNSTRGLDSATALEFTKALKIGSQVGGITQCLAIYQASQAIYDIFDKVIVLYEGRQIFFGPTRIAKQYFEEMGWYCPPRQTTADFLTSVTNPKERIAKEGYENRVPRTAVEFERYWKQSQNNKLLLANMDRFEAEYPPEEGHLEKLRETHGQAQAKHTASKSPYRISVPMQVKLCTVRAYQRLWGDKSSTIATNISQIMMALIIGSLFFDTPQTTDGFFAKGSVIFFAILLNGLMSITEINGLDAQRPIVVKHVNFAFYHAYSEALAGIVADIPIKFLLALVFNIIIYFLGGLERSAAKFFIFFLFTFITILTMSAIFRTLAAATKTIPQALALAGVMILALVIYTGFTLQPSYMHPWFKWILYINPIAYAYEALLVNEVHGNRYRCATPIPPYGSGKNFACAVAGAVPGEMSVSGDAWVESSYDYSYAHIWRNLGILLGFLAFFYFVYLMVSELNLSSASSAEFLVFRRGHLPKNFQGSKDEEAAAGGVMHPNDPARLPPTNTNGAAGETAPGGSTVAVIPPQKDIFTWRNVTYDITIKGEPRRLLDNISGWVRPGTLTALMGVSGAGKTTLLDALAQRTTMGVITGDMLVNGRPLDSSFQRKTGYVQQQDLHLETTTVREALRFSADLRQPKSVSRKEKYEYVEDVIKMLSMEDFSEAVVGNPGEGLNVEQRKLLTIGVELAAKPQLLLFLDEPTSGLDSQSSWSIVTFLRKLADNGQAVLSTIHQPSGILFEQFDRLLFLAKGGRTVYFGDIGKNSETLLNYFETHGAEPCGPSENPAEYMLNIVGAGPSGKSNIDWPVVWKESEESRHVQQELDRIQSETSKRNEGHGQSAEKEPGEFAMPFTSQLYCVTTRVFQQYWRTPSYIWGKLLLGLASALFIGFSFFLQNSSMAGLQNSLFSIFMLTTIFSSLVQQIMPRFVTQRDLFEVRERPSRAYSWKVFLLANIIVEIPYQILLGIIAWASLFYPTFGAHLSSERQGILLLYCVQFFIFASTFAQMIIAGLPDAETAGGIATTMFGLMVTFNGVLQKPNALPGFWRFMWRVSPITYTVGGLAATSLHSREVKCAQNELAIFDPPSGATCAQYLQKLVEAGAPGKLYNPMSTSQCQYCPLSSGDQFLGGSEIHWSDRWRNFGIGWAYIVFNIFATVALYYLIRVR

SEQ ID NO: 1754 - protein, 154 aa, Alternaria alternata
TLLDVLATRVTMGVVSGEMLVDGNPTDQSFQRKTGYVQQQDLHLSTSTVREALEFSALLRQPASVSRKEKIDYADEVIKLLGMEAYADAVVGVPGEGLNVEQRKRLTIGVELAAKPQLLLFLDEPTSGLDSQTSWSILDLIDTLTKHGQAILCT

SEQ ID NO: 1755 - protein, 141 aa, Leishmania donovani
VGSSGCGKTTFLNAICDRLASGGGLRLSGRRQLGDCEFERHFRKAMGFVTQDDIISPLSTPYDALWFSLRTRRGTNCAETEERVQEALDVLRLRHCRDTKVGVPGLEAGLSGGERKRCSIGIELVCDPKILLLDEATSALD

SEQ ID NO: 1756 - protein, 276 aa, Aeropyrum pernix
MLLWVFEYNSVSRASWGDRVPVDKNSCACLEGGYAACLCGVAKSVKGRPVLRGVSLSVKFGEIHVLAGLNGAGKTTSLRVLVGLLSRDSGEARVLGVDPWGGGFERVKGEVGYLPEDASVYERLTGMENILFYARLYSGWRDVEELVENAVFYSGLSREDLARRAGGYSKGMKRRLLLGITLMSKPRLVVLDEPTSGVDPIASNRIKKILRGLSREGRAILVTTHDLALAEEIADRVTIIHGGSTVASGPPYRLVEEYCGETLEDAFVNIVTGGGC

SEQ ID NO: 1757 - protein, 1241 aa, Leishmania major
MMAPQRKEARNAVPRSHHASSLSAATTLIAVFLLLVACASVTQALHVSPASAEAAMWSGTDVFASSDSHSDPITCVNGGIPSGDHCICPLYYTSANCSQRQCPNSVGGEGPHRVLPVNSTNKLCDHCDEKEFTGLSCQICQSNAACRQYAGSAAECDNSTFTRGDNKQFQCTLKNEFFVRLMSGNRNITAEVLFNCTTSDGTAFRKGEQGMCNMAIYRIEPNHSYVDPFFRCDAQACSLKYGQKGPDMSDANNNTLRQRFFRAARTAGQVALIVECALLALLGGFTALLGPRRTTSITVALASVITVTVLVYISLMMLSMQSISAPEQTVIYECKKTHCACAEDPPPQYDPICSQKEELSKQILPSIKNSIRVVCGQNTSLCELTLADLSLVFQADCRASECVDTVRFPDDSSSDSNDDGGGGTAVLAKLNLGFLLVLLVLLVVSGIGTHYYYTCSISYERDRDFLVTFHVSTPYSDDGDVHETGDPAVLDDRHVHLNGNADGSAVEREQEPLLYNSPAPRAERRNFLPRGVSSSRHSEGNVSVRASVYEQARALTPAARARIEELRRLTAAPLELQVSELRYTLNTPLLGAADEGSQRTLLHRINFTVHSGDVLAIMGPSGAGKTTLLDLLSARAKPGEVSGTITLNGTPITTTGSRTAQYRNIIGYVSQEDTLLPSLTVEQTILYAARLKLPKALSHITVRRIVARVIETLKLQHCAQTLIGGETTRGISGGEKRRVSIAVELLANPRILYLDEPTSGLDAVSAKRVVEAVVALAKDSAMSMYAMHYFAFQPIVIFSIHQPSQEIYELFDKVLLLSRGMSIYCGSAASAAATIERRVTAAFGHTREVPRREVHNNQAEYLMKVEEILDDAVRAELQEEDALENTDTAGAPYRSASADGSPLAAARTQVPPCRSPESPAPRAPSQSVGCHDSDDGEQVSGADILSTTFGFRMYYANVYEQLQLLISRSITCLFGSFHLVICHSAVVACLATLMCVLYHEQALDLPGSLNRAGSVSFLLLVTSFLSLSCLEQLIVERKLFNVERENGFYTTCPYLISKIVVDIIPLRIIPAVVLASVIYFPMGFRVDAGLHFFYFILIIVLFSICMTMVILCIGIVSGSFGAAALLSSVLILWNFVFGGALVQAETIPPSLRAFKSISPFFLAFESLMVNELDGQHCVFSPTDETGKKSSASIPIMCVQYLANIGLKPERFNADVMQLAVYCLLFVGLSWVLLSSCSKLVH

SEQ ID NO: 1758 - protein, 1896 aa, Leishmania tropica
MGAANKKTQRDRAASGMSTLSPPRRTRETALCDGTENSPDSCAVQRPGERTCLKPLNNGGAQSGPTSSAQRHSEGDEVELRNVNEVDKSGFGVGGDSHKGGSSRSTGDALEDGKDKYDVYMRAVEAQRRSETSTSLSSDCSSFCFQLVVTVKRMLILQSRDPLSLACELITPIFFLVGSIILWGVIKKGFVPASDYFSVAGESITNAVMTQATGMMCYNATLTGGVPIEGLLECREFLKKPLFLPTLLCAESNITGAPVGLCVSEMYALSAYATMRGYATRNTTRVPTVDEMILLQWAWRLLYQWSGVSLDRFQTVDSAMLSSGTLYFAPASTETEALVAYFRKTSIYFQYVYGGTFATVAEAEARVQSRTWRDPPIWGIVQVSNLTAEMFDVAIRLNATALPRTKWMLARYYVGGVVTEGPVMYILSGFTTLQQTVYHYFLTRILGTTSTPSAELLMLPAPTRGYRDDQFLAYGGRFVPLILVLGFLYPVSQMTKRIVLEKELRLREAMLIMGLSEVVMYTAWFLIYVVQYAAVSLIMAILLRATYLAKSNFGIVFFLLFFFSLSIITLSGLMAVFFNKARLSAILAPLIYFALAIPLFTVQNLQGPAQIGFSFLSPSGLAVGVTILFSHELSGGMTGSDLTYFRDSPKMLAVIIILFMDFIIYLVLMLYLDAVLPKQWGTPKHPLFFIMEPVRWCCRSKTRVLEGGADGRAEDGVFEEITEGGADYAVCATGLRKEYSRGGKRFVAVNNLYWGMREGEISVLLGHNGAGKTTTMNMMTGMVSADAGDCYIYGYSVRNQLEKARQQIGYCPQHNILWPNMTCYEHLWYYAALKGLRGAAQEEAISRMLAGVDLQDKRDCPSKMLSGGQKRKLSVAVAFVGGSRLVFLDEPTAGMDVGARRYTWGLLRAMAKYHTILLSTHFMDEADLLGDSVAIMSKGCLQCAGSNMFLKAKLGVGYVLTLSVVAHVDRMAVAGMVREHVPSATRLGSGAGEMAFRLPMKTKEAFPNLLAEIEGRGSQLGVSAYSVSATTLEEIFIQIAQQGEAKEAMERKREQLTAPFTGTTPVAAAASAGSSANHVSALADISTVDGVCQEPPRPSDVWNVGLIGNELGVLHSQFKAMLWKRLWNALRDLRTQFFQIACPMLCVLLAMLLTLIKLFQYPAITLSSDLYGTVVEIDVVGCESAMNLSIPFSSKAVTVQPPSATSIATLSSYMLETYNTHKAERYTGLVCVDAVTFPLPFTPENRSVSAVIYNTSGLHSSPIGLYNLYNGYYMAHRGNNASVLTTVVQTMPKTKTEVEVQDSIYALIIAIVIMIPFTFIPSTFVSWIVKERECKARHLQNVSGLYFSVYWLANFLFDICCYVITMFLIIIVLAIFSRDEYIGARAVGATIVLFFLYGLSGVAMAYAVSFLFKEHSTAQNVVMLANFITGFLLVLCVSMLSVFESTKKVAEVLPWIFRVVPSFCVGEGISNLAKLKLEESFGTTNTPWSMSVVGWPCVYMAAGLPFYVLVTLFVDHPGRRQRTQRLFHDPDAEPDFVENEDEDVMAERRSVLECEARQSDLVRVENMSKVYSNGKVAVRNVTFGVRPGEVFGFLGTNGAGKTTTISILCQEIYPTTGRASICGNDIVTKSREALQCIGYCPQFDACLDLLTVKEHLELYAGVRAISYDCRKRVVEGLLALCELTNYKHTLAHDLSGGNRRKLSVALSLIGGPRVVFLDEPSAGMDPVARRGLWTAIEAVADNSSVVLTTHHLEEVEALAHRVAIMVDGTLRCIGDKTHLKNKFGTGFEVNVRIRSDDEALKEAVQNFFSESFPGSSLREYRARRFTFELPPGTKLPRTFRLMEEHASALGATDYSVSQTSIEQVFMQISEEAERQHEAEEAEQLAQTTKSYCTCCC

SEQ ID NO: 1759 - protein, 1843 aa, Leishmania tropica
MPGAGPLVPSPNSTTTTQNPLLLFASPGALPGLSFSRNNSEAFGEGQLFTPAVEGEYSPMSGGGSAFLRSDDRMIRGTALRTGEMRATTLEAGNHASPSAAENDVNDGSCVEMTAEQIPLAQADDQYDVLHRRSASANSPARCRPRAGCCQQLGHTILRVLILMKREWCSTLCEFLIPILFVFGSVMLWAVFGTAQNSAGVYYSSTGPEKVSAMTDKISSSLCYNASLASGIAGLTPCLEGQKYYCPHGRGIPTGFCYDPPLKNVVAQLLGALPLTTSPMLPLDTLIACQWVGMDQSIRASTPFSYGGLLYFAPRTPEVESLVSYMRAQSKLFDNAYGGTFATAADATSHILSLTHDDPPTWGVVELDSYTADTFNVKIMVNSSALPATSDSILSGYLGGLDMSTNSPYIFSGYTTLQTLVYNHYTTSVLGKPATKPLTYTAMPTKAYNTSSFLLTGASLAPLILVLGFLYPVSQLTKRIVVEKELRIREAMLIMGLSEWTMYLAWLVVYGVWYTVVSIIITVLLRLTYLPESSPGYVFFMFLLFSWSTIALSGAIAAVFSKARLAAIIAPLIYFAMAIPLFAMERASGGAKMGIMILGPSAFAVGFALLFEHEVNGGAGVGALAYFRDEPKLIVVFVLLFVDIFVYLLLMMYFDRVVPKEWGTTKNPLFFVIDPVRWCFCRRRAGDADNDGDVPGDGRAEDGVFEAVDPAVEEAAAVRIRGLRKTFRRGGKAFAAVDDLCWSLNEGEISVLLGHNGAGKSTTMNLMTGMLEADGGDCYVYGHSVRHELSAVRQEIGLCPQHNILWPQLTVREHLDYYAAIKGLRGSEKEDAIRRLLAAVDLEDKEHYMSKALSGGQKRKLSVAVAFVGGSRLVILDEPTAGMDVGARRHTWSLLKEMAKWHTILLTTHFMDEADLLGDTVAIMSKGRLQCAGSNMFLKSKLGVGFVLTMSVVSHARRGPIEQMVQTLVPAAEAIGSGAGEVAYRLPMASKPMFPDLLCAVEEGIPGLGINAYSLSATTLEEVFIKIAEGPDAERDADALAAKEKAEATAAVWNVEMEKGRWARRRLQFRAMMVKRLWNALRDRRTQFFQIVCPVACVLLAMLLTLVRLFSTPTIVLSSDVYGTAVDIPLANCEGVLDVTTPFSTKAHMDIWTDVPDASAFSTKLNRTYQTHAKERYGGVSCAAAGSGELYHSVFYNTSALHEVAIETANVFAAHLRVATGRDNVSVTTAVASLPKTSQQRAVESSLYAMMIAVIIMIPFTFIPSTFVGWIVRERECKARHLQNVSGLSFYIYWLSNFLFDLCSYIVTMCLVIVVFLAFGRDEYVAVNNIGATFVVFLLYGVSGILMAYALSFAFDNHSTAQNVVMLVNFIVGFLLVLAVSALSLKESTRNLAKVLRWIFRIVPSYCVGEAINNLASLKVTRAFGIDTSTWDMDVVGWVCVYMAIEIPVFLFITLFIDHPGRRQRSQRLFHNPDGAAEVIEDEDEDVAAERRAVLEGGEREGDLVRVLNLRKEYPNGKVAVRNIALGVRPGEVFGFLGTNGAGKTTTISILCQEFYPTSGRAYVCGNDIVTESSEALRCIGYCPQFDACLDLLTVEEHLYLYAGVRGISSRACDRVVRGLMKLCGLTEYRRTKSHELSGGNRRKLSVAVSLIGGPRVVFFDEPSAGMDPVARRGLWNAIETVADNCSVVLTTHHLEEVEALAHRVAIMVDGTLRCIGDKTHLKQKYGTGFEVAVRVADESPEVMAGVELFFEEEFPSSKLTEVRAGRFTYQLPSTVRLSSVFTALEQQKEKLQICDYSVSQTSIEQVFMRISEKAELEHEEEHRQRMESKKSCCVCCCGGLPR

SEQ ID NO: 1760 - protein, 670 aa, Bactrocera tryoni
MGQEDQEVLIRGGKATSTSAESLDNNNEQSYEQSSINQGFSKNYGTLSPPSPTLTADNLTYSWYNLDVFGAVHQPGSGWKQLLNRVKGVLCNERHIPAPRKHLLKNVSGVAYPGELLAIMGSSGAGKTTLLNAIAFRSSKGVQISPSTVRLLNGHPIDAKEMQARCAYVQQDDLFIGSLTAREHLIFQAMVRMPRHTTKKQKIQRVDQVIQDLSLGKCQNTLIGVPGRVKGLSGGERKRLAFASEALTDPPLLICDEPTSGLDSFMAHSVVQVLKKLSQKGKTVILTIHQPSSELFELFDKILLMAEGRVAFLGTPGEAVDFFSYIGAQCPNNYNPADFYVQVLAVVPGREAESRDRIAKICDNFAVGKVSREMEQNFQKLEKSNGLNKEDENGFTYKASWFMQFRAVLWRSWLSVLKEPLLMVAVLIGLIFLGQQLTQVGVMNINGAIFLFLTNMTFQNAFATITVFTSELPVFIRETRSRLYRCDTYFLGKTIAELPLFLIVPLLFTAIAYPMIGLRPGIDHFLTALALVTLVANVSTSFGYLISCACSSTSMALSVGPPVIIPFLLFGGFFLNSGSVPVYFKWLSYLSWFRYANEGLLINQWADVKPGEITCTSSNTTCPSSGEVILETLNFSASDLPFDFIGLALLIVGFRISAYIALRVRARRKE

SEQ ID NO: 1761 - protein, 698 aa, Bactrocera tryoni
MDAAEQIELQDVVGVPSNGNNKHSNDNGRARSSSVNGHSGAEGSPGASGAGSRIAITDISTTPPRTASTRNSSERSLPLRSYSKWSPTEQGATLVWRDLCVYTTGEPNGASGGGSLHKMKRIINNSTGAVQPGNLMALMGSSGSGKTTLMSTLAFRQPAGTIVQGDILINGRRIGPFMHRISGYVYQDDLFIDTLTVLEHMTFMAHLRLDRRVSRRERKEIINDLLERTGLLSVAHTHIGSGDDKKMLSGGERKRLAFAVELLNDPVILFCDEPTTGLDSFSAQQLVQTLYDLAKKGTTILCTIHQPSSQLFDMFNNVLLLADGRVAFTGSPQNALNFFAENGYHCPEAYNPADFLIGVLATDPGYEQASQRSAQHLCDMFAVSGAAKQRDMLVNLEIHMAQTGDYPFDVEVDTFRSAAWYKKFHMIWYRASLSLMRDPTVQRMRFFQKMAMAVIIGACFAGTITVSQLGVQAVQGALFVMISENTYHPMYSVLNAFPQGFPLFLRETRSGMYSTAQYYVANIRAMLPGMIIEPLLFVIICYWITGLRATFFAFSITAISIVLVMNVATACGCFFSTAFNSVPLAMAYLVPVDYIFMITSGIFIKISTLPMAFYWTQSLSWMLYANEAMTIAQWSGSQNITCFEESEDLPCFHTGQDVLDKYSFNESNLYRNLLAIVAIYFGFHILGYYCLWRRAKKI

SEQ ID NO: 1762 - protein, 590 aa, Encephalitozoon cuniculi
MKLESQKSELLWRNLRLTTKGADGAWRTILRGVSGVIEPSTMTALMGTSGAGKTTLMNALAGRISPNMHLKGEILLNSHPRSKDTWPEIVGYVEQEFHAYEYQTVFETLSFASKIKMRGEEMEQKVVNRIEEIVSLLGLKNAKNTYIANLSGGERKRVSIGVELLGNPSILFCDEPTSGLDSFNALNILSLLRDLSNMGKTVLVTIHQPSYEMINFFDKFILMSMGKVIYDGDVKGCIGFFARCGHRLPEFTNPVDFFLKTISLDTRTKSSEEKSLDVINHISAKWRRERKEVVPKLSSEVRMRDKTIKTTLSFFLLWSRNLKNYLRNSEYFKIKAFQKMFFITVFGLAYLRMGYSVESIYTRLGGITFILTNMLFGVCNPIFNVFSSEKMVILRERRSGMYSGFMAFIAKYFSEIFINFMLEIPYLVIIYWTIGLNPDVRVFLVFMAIIISLILLSIAYSLAISTMTSTQNNSQVLGSMGLLVFLIYSGSFNNPNTISKWLKWIVWISPMYYATKASFQNQLNGVVFKSPNVQTTGEEQIKSRGLDGMGVWPCVFVLLGMTLLWMLSGATVLHWTTKNNMKVEINDEEV

SEQ ID NO: 1763 - protein, 584 aa, Encephalitozoon cuniculi
MDTEDIRVEVVWRNVTVESVSEPFKGALIKRIQGKIEPSTMTALLGASGAGKTTMLNAIIGKTNERLKVSGEILLNGYPVDASVWKCAVGFVGEHLHAYETQTVEETLRFAVAISRDTGPETVVNEEVSCLIKALGLSRIAHTQISSISTGERTRLSLGITLAKRPSILIMDEVTNELDSFNVVHILKILMALRQQGKGIMISFQRLPQEMLSFFDKIMIICQGGVVFNGCPEECVEFFRSCGHDLKKYVGSSDFFMDVLSVDTTTPESEKMSLGRIARLKMCWKRIEPLAVSSIIEKTEFPTVSRRYILSFTLIFKRNLSDFLRRHELMRILSIQKLTTLALLVLVYFRLDYTQKGIRDRFGILSFIVMGSFEKTAAAAIIFLDSYRKALKREVCAGMYGAAMSYFASLVSSFCILGTSWIAYIAAAYWIVGLNPNILRFVFFVLILVIVTVFSMSFGIVVALHTKTLVQAQVLTSVLIMSFIILGGAFVDPGTIPGFARWAIWISPVYYALEIALQSQFEGLVFECKGSERCISNGNEALHLYGFRRVGYGVSVGMLLLITTVSIALGAISTNRVFKPRNSI

SEQ ID NO: 1764 - protein, 608 aa, Caenorhabditis elegans
MSFKFPSLHNLHQMKNFENFATLGCETLPNFRKFRVTTIKEKRLLLKNVSGYAKSGELLALMGASGAGKTTLLNMLMCRNLKGLSTEGTITVNGNEMAHKISSISGFAQQEELFVGTLTVKEYLMIQAKLRINGSKKLREDRVTDVLHQLKLWKCRDSKIGVIGEKKGISGGEARRLTFACEMLSNPSLLFADEPTTGLDSFMAESVIQILKGIAKTGRTIICTIHQPSSQLYQMFHRVIYLANGSTAFQGTPQESISFFEKCGHRVPDEYNPSEWIIYKLAVQPGQEKQSNDRIQKIVEQYEDSDHQKRVMEQLSDVSEKIPPPEMHRANVFTQIFALSTRCGIDVWRAPQLTLAKVIQKILFGLFIGLLYLRTPYDARGIHNINGALFFLAGEYIYSTAYAIMFFLNNEFPLVAREYHDGLYNLWTYYFARCISLIPLFSTDGLILLFIVYWLIGLNTSVMQVIVASIITVLASQAASAFGIAMSCIFPTAQMTAVMASPPLVLFRLFGGLYGNTNTFPAAIRWLQWISMYRFAFEGLVVNQWSEIDDFHSNAKNNWTNSTTNDVLDYFAFSESAIPLDIIGLILISLAFYLIGFIALVHRMKKAR

SEQ ID NO: 1765 - protein, 610 aa, Caenorhabditis elegans
MATETCSLLSVGQSEYGAAASMISALEAVDPVTLTWHNISIHAEKSGKQILENVSGIAKPGQLLALMGASGAGKTTLLNMLLSRNLRGLETSGSVKVNGHELGRGITAISGYAQQDELFVGTLTVKEYLDIQAKLRVNGDSEKRRRRVGNVMSQLGLYKCQNTRIGTIGGQKGISGGEMRRLTFACELLSNPSILFCDEPTTGLDSFMAESVVQVLSNLAKSGRTVICTIHQPSSQLYLMFDRVMFMAGGKTAFLGSPRDAIQFFEDAGFACPRNFNPADLIIHTLAVMPNEEDKCRQRIEVIYTKFQNSSYGRTLKFGVEKSDEGQRPSERHKTGILTQIGALLERSAIDTWRNPSLTRAKVIQKSIMGLFIGLLYLQSPLTSIGISNLNGALFYLVCELTYSTIFGILNFLPADFPLVSREYHDGLYSVFSYYVARCLSYLPLFTADGLIMLLVSYWMVGFSSSITQVLYACLIAFLIEQSSSACGIMISCISPSLPIAMSTAGPMLTLLSLTGGLYANVGALPSYISWIQYLSWFRYGFEAFAINQWSSVNEQNTTIWTDEKRDSVLSQLSFRAEMFYPDLFIMSAFILIFYTIGYAGLALRVSKAR

SEQ ID NO: 1766 - protein, 633 aa, Caenorhabditis elegans
MATETCSLLSVGQSEYGAAASMISALEAVDPVTLTWHNISIHAEKSGKQILENVSGIAKPGQLLALMGASGAGKTTLLNMLLSRNLRGLETSGSVKVNGHELGRGITAISGYAQQDELFVGTLTVKEYLDIQAKLRVNGDSEKRRRRVGNVMSQLGLYKCQNTRIGTIGGQKGISGGEMRRLTFACELLSNPSILFCDEPTTGLDSFMAESVVQVLSNLAKSGRTVICTIHQPSSQLYLMFDRVMFMAGGKTAFLGSPRDAIQFFEDAGFACPRNFNPADLIIHTLAVMPNEEDKCRQRIEVIYTKFQNSSYGRTLKFGVEKSDEGQRPSERHKTGILTQIGALLERSAIDTWRNPSLTRAKVIQKSIMGLFIGLLYLQSPLTSIGISNLNGALFYLVCELTYSTIFGILNFLPADFPLVSREYHDEMSYFPFIILRILYYGDPEKCVFNWRQNNTKHFRIHGFAAKYLMGPNFEIRIILRLHNIFEKLEFQVLYACLIAFLIEQSSSACGIMISCISPSLPIAMSTAGPMLTLLSLTGGLYANVGALPSYISWIQYLSWFRYGFEAFAINQWSSVNEQNTTIWTDEKRDSVLSQLSFRAEMFYPDLFIMSAFILIFYTIGYAGLALRVSKAR

SEQ ID NO: 1767 - protein, 639 aa, Caenorhabditis elegans
MATETCSLLSVGQSEYGAAASMISALEAVDPVTLTWHNISIHAEKSGKQILENVSGIAKPGQLLALMGASGAGKTTLLNMLLSRNLRGLETSGSVKVNGHELGRGITAISGYAQQDELFVGTLTVKEYLDIQAKLRVNGDSEKRRRRVGNVMSQLGLYKCQNTRIGTIGGQKGISGNTEKRCGEMRRLTFACELLSNPSILFCDEPTTGLDSFMAESVVQVLSNLAKSGRTVICTIHQPSSQLYLMFDRVMFMAGGKTAFLGSPRDAIQFFEDAGFACPRNFNPADLIIHTLAVMPNEEDKCRQRIEVIYTKFQNSSYGRTLKFGVEKSDEGQRPSERHKTGILTQIGALLERSAIDTWRNPSLTRAKVIQKSIMGLFIGLLYLQSPLTSIGISNLNGALFYLVCELTYSTIFGILNFLPADFPLVSREYHDEMSYFPFIILRILYYGDPEKCVFNWRQNNTKHFRIHGFAAKYLMGPNFEIRIILRLHNIFEKLEFQVLYACLIAFLIEQSSSACGIMISCISPSLPIAMSTAGPMLTLLSLTGGLYANVGALPSYISWIQYLSWFRYGFEAFAINQWSSVNEQNTTIWTDEKRDSVLSQLSFRAEMFYPDLFIMSAFILIFYTIGYAGLALRVSKAR

SEQ ID NO: 1768 - protein, 610 aa, Caenorhabditis elegans
MPFDLLAERKRWNAGYESIDTSSQKLTEVVTPITVTWENIEVKTRKKLFSKKQKQLLNRVSGIAKPGEMVALMGASGAGKTTLMNVLMCRNMKGLEKNGTVKVNGTKIGKEISLISGFAQQQEIFIPTLTVDEYLMIQARLRMKANKHTRRERVDEIIEMLRLQNCRDLKIGTPGLVKGISGGEARRLTFACELLSNPSLLFADEPTSGLDSFMAASVVQILKNLANSGRTLIHQPTAELFFQFDKIIFLSMGKTAFMGTPHESVKFFADCGHPIPKLFNPPEWIQSKLSVIPNNETKSRETIGKIIEFYEKSIIHQKSIVEIRVIATTELPPYIENPGFFAETGALLKRACLDVIRSPAQMRMKLIQKVVMGLFIGSLYWQQPLDPRGVRNTNSALYFLIAELTFSTMFGIMTFMEHELPLIAREYHDGLFYVISYYISRFLSYLPLFTIDGALMIVISYWMIGLNSTWQQVAKSILISVLVEQSATSCGLFLACLFETTSLAIAFAVPASGLFALLSGLYGNTNNFPVYIRWMQWTSWCRYGFEGLVVNQWSQVDNPKWDPFYRELILKQFSFNKDNYQLDVIGLCSIVIFFYLAGYIALFIRIRLSR

SEQ ID NO: 1769 - protein, 559 aa, Caenorhabditis elegans
MPKRRVKEILHNVSGMAESGKLLAILGSSGAGKTTLMNVLTSRNLTNLDVQGSILIDGRRANKWKIREMSAFVQQHDMFVGTMTAREHLQFMARLRMGDQYYSDHERQLRVEQVLTQMGLKKCADTVIGIPNQLKGLSCGEKKRLSFASEILTCPKILFCDEPTSGLDAFMAGHVVQALRSLADNGMTVIITIHQPSSHVYSLFNNVCLMACGRVIYLGPGDQAVPLFEKCGYPCPAYYNPADHLIRTLAVIDSDRATSMKTISKIRQGFLSTDLGQSVLAIGNANKLRAASFVTGSDTSEKTKTFFNQDYNASFWTQFLALFWRSWLTVIRDPNLLSVRLLQILITAFITGIVFFQTPVTPATIISINGIMFNHIRNMNFMLQFPNVPVITAELPIVLRENANGVYRTSAYFLAKNIAELPQYIILPILYNTIVYWMSGLYPNFWNYCFASLVTILITNVAISISYAVATIFANTDVAMTILPIFVVPIMAFGGFFITFDAIPSYFKWLSSLSYFKYGYEALAINEWDSIKVIPESISRLRIKFLIFQFCLECSSEFA

SEQ ID NO: 1770 - protein, 598 aa, Caenorhabditis elegans
MPKRRVKEILHNVSGMAESGKLLAILGSSGAGKTTLMNVLTSRNLTNLDVQGSILIDGRRANKWKIREMSAFVQQHDMFVGTMTAREHLQFMARLRMGDQYYSDHERQLRVEQVLTQMGLKKCADTVIGIPNQLKGLSCGEKKRLSFASEILTCPKILFCDEPTSGLDAFMAGHVVQALRSLADNGMTVIITIHQPSSHVYSLFNNVCLMACGRVIYLGPGDQAVPLFEKCGYPCPAYYNPADHLIRTLAVIDSDRATSMKTISKIRQGFLSTDLGQSVLAIGNANKLRAASFVTGSDTSEKTKTFFNQDYNASFWTQFLALFWRSWLTVIRDPNLLSVRLLQILITAFITGIVFFQTPVTPATIISINGIMFNHIRNMNFMLQFPNVPVITAELPIVLRENANGVYRTSAYFLAKNIAELPQYIILPILYNTIVYWMSGLYPNFWNYCFASLVTILITNVAISISYAVATIFANTDVAMTILPIFVVPIMAFGGFFITFDAIPSYFKWLSSLSYFKYGYEALAINEWDSIKVIPECFNSSMTAFALDSCPKNGHQVLESIDFSASHKIFDISILFGMFIGIRIIAYVALLIRSYNNT

SEQ ID NO: 1771 - protein, 339 aa, Nostoc punctiforme
MAPAVLIQNLQKRYGTVVAVQDVSFQVEPGEIFGLLGPNGAGKTTTLRALCTLTTPDAGKIEVSGISVLDNPRVARQRLGYVAQEVAIDKVLTGKELLQLQAALYHLPRAVAKQRIETVLDLLGLQEYANKKTGTYSGGLRKRLDLAAGLLHAPDVLVLDEPTVGLDIETRFVVWDFLRKLRASGTTVVITSHYLEEIDALADRVAIIDRGVVIASGTPSQLKDKVGGDRITLRIREFSPIEEAEIAKNLLQPLPFVQEVIINSAQGNSLNLVVTPQNDVLINIQQALNTAGLPIFGIAQSRPSLDDVYLAATGRTLMDAELAAVATRDPKAEKKQLMR

SEQ ID NO: 1772 - protein, 650 aa, Nostoc punctiforme
MKLSTPKPLQLSNHSTTTIKVSNLHKHYGQLIAVRGIDFTVNQGEMFGLIGPDGAGKTTTFHILGGVMEATAGEVQVFGQPARDARLRTGYLTQQFSLYLDLSIDENLRYAAGLRQVSDDLLRERRQKYLKLMSLEQFGDRLAGQLSGGMKQKLALCCALVSQPDVLLLDEPTTGVDPVSRREFWDVLAELSADGMTIVVATPYLDEAERCDRVALMYSGQIHEIGTPAALRANLGLHRLEVRTANLEIAEKLLLQNVQTNIVDVQTFGDRLDVLVQDVTLGETQVNQLLQQHHPSIERGEPTLENVFVTRLRQQGSAPEFLSFPRSRGGNREQFKPQNSPDQIAIYAHNLNRVFGNFQAVKNVNVEVRYGEIFGLLGANGAGKTTTIKMLCGLLAASGGDISLGGETGNLRSRDLRRRIGYMSQKFTLYDDLTILQNLEFYSGIYSVPRKLRREKIDWVIATCGLEGQEQMLTGQLPGGWKQRVAFGASVMHEPDILFLDEPTSGVDPLARRQFWKLINDFARNGTAILVTTHYLEEAEQCNRMSFMVAGEIAAEGSPSSIKASQPGQLIEIIVNQNQAASKILKQHLDSWRVSIFADSLHIVLDRPEKEIPEITQLLKSAHLTIESLRPIPFSLEDAFIGIVERAVRD

SEQ ID NO: 1773 - protein, 669 aa, Tribolium castaneum
MENETEPLLSGVVSQINGNSGDSTSSATSIDLSTFRVPTYGTTSHPTSKLVPPDERITYSWTEINAFANVSPSKTKFFNLIKRKDSPVQKKHILKNVFGVAYPGELLAILGSSGAGKTTLLNTLTFHTSSNLTVSGLRCVNGIPVSSKTLASQSAYVQQDDLFIGTLTVKEHLIFQALLRMDRDISYSQRMARVEEVISDLALSKCQNTPIGILGRIKGISGGEKKRLSFAAEVLTNPKLMFCDEPTSGLDSFMALTVMQVLKEMAMTGKTVICTIHQPSSEVYSMFDKLLLMSEGRTAFLGSPEEAETFFRELEAPCPRNYNPADYFIQLLAIVPEKEESSRQAVNLICDKFERSNIGVKIALEAATTEREGGYHDIWMSGESFKSPYKASCWAQFKAVLWRSILAVFKEPLLIKVRLLQTLIISLVIGAIYFGQDLNQDGVMNINGVLFVFLTNMTFQNVFAVINVFSGELPVFLQEHRNGMYRPSIYFISKTLAESPIFIIIPVILTSVCYFMIGLNSQGFRFYIACGIMILVANVAISFGYLISCVSRSVSMALSIGPPLVIPFLLFGGFFLNVSSIPIYFKWLSFLSWFRYGNGALMINQWENVTNIQCPNADLPCPKDGHVILETFHFSEADFVMDVVMLAVLIVGFRLVAFLALLVKTWRFK

SEQ ID NO: 1774 - protein, 669 aa, Tribolium castaneum
MENETEPLLSGVVSQINGNSGDSTSSATSIDLSTFRVPTYGTTSHPTSKLVPPDERITYSWTEINAFANVSPPKTKFFNLIKRKDSPVQKKHILKNVFGVAYPGELLAILGSSGAGKTTLLNTLTFHTSSNLTVSGLRCVNGIPVSSKTLASQSAYVQQDDLFIGTLTVKEHLIFQALLRMDRDISYSQRMARVEEVISDLALSKCQNTPIGILGRIKGISGGEKKRLSFAAEVLTNPKLMFCDEPTSGLDSFMALTVMQVLKEMAMTGKTVICTIHQPSSEVYSMFDKLLLMSEGRTAFLGSPEEAETFFRELEAPCPRNYNPADYFIQLLAIVPEKEESSRQAVNLICDKFERSNIGVKIALEAATTEREGGYHDIWMSGESFKSPYKASCWAQFKAVLWRSILAVFKEPLLIKVRLLQTLIISLVIGAIYFGQDLNQDGVMNINGVLFVFLTNMTFQNVFAVINVFSGELPVFLQEHRNGMYRPSIYFISKTLAESPIFIIIPVTLTSVCYFMIGLNSHGFRFYIACGIMILVANVAISFGYLISCVSRSVSMALSIGPPLVIPFLLFGGFFLNVSSIPIYFKWLSFLSWFRYGNGALMINQWENVTNIQCPNADLPCPKDGHVILETFHFSEADFVMDVVMLAVLIVGFRLVAFLALLVKTWRFK

SEQ ID NO: 1775 - protein, 687 aa, Bombyx mori
MTAGNKKQEPLISTSVDNQRVTYNNSPQDGQTPNDSPQSSVGEVTVAIPQNRNYGAIGGIEKVTYTWADVNAFATESRSRGRRFWSFWKNSSDRMFQQRKQLLRNVNGAAYPGELLAIMGSSGAGKTTLLNTLTFRTPGGVVATGTRALNGQPATPDALTALSAYVQQQDLFIGTLTVREHLVFQAMVRMDRHIPYAQRMKRVQEVIQELALSKCQNTVIGIPGRLKGISGGEMKRLSFASEVLTDPPLMFCDEPTSGLDSFMAQNVIQVLKGLAQKGKTVVCTIHQPSSELYAMFDKLLIMADGRVAFLGSSDEAFQFFKELGAACPANYNPADHFIQLLAGVPGREEVTRHTIDTVCTAFAKSEIGCRIAAEAENALYNERKIQAGLADAPWAMSSTTRAGRSPYKASWCTQFRAVLWRSWLSVTKEPMLIKVRFLQTIMVSILIGVIYFGQNLDQDGVMNINGAIFMFLTNMTFQNIFAVINVFCSELPIFIREHHSGMYRADVYFLSKTLAEAPVFATIPLVFTTIAYYMIGLNPDPKRFFIASGLAALVTNVATSFGYLISCASSSVSMAASVGPPIIIPFMLFGGFFLNSGSVPPYLSWISYLSWFHYGNEALLINQWAGVETIACTRENFTCPASGQVVLETLSFSQDDFAMDVVNMILLFVGFRFLAYLALLWRTRRAK

SEQ ID NO: 1776 - protein, 385 aa, Bombyx mori
DGQTPNDSPRSSGGEVTVAIPQNRNYGAIGGIEKVTYTWADVNAFATESRSRGRRFWSFWKNSSDRMFQQRKQLLRNVNGAAYPGELLAIMGSSGAGKTTLLNTLTFRTPGGVVATGTRALNGQPATPDALTALSAYVQQQDLFIGTLTVREHLVFQAMVRMDRHIPYAQRMKRVQEVIQELALSKCQNTVIGIPGRLKGISGGEMKRLSFASEVLTDPPLMFCDEPTSGLDSFMAQNVIQVLKGLAQKGKTVVCTIHQPSSELYAMFDKLLIMADGRVAFLGSSDEAFQFFKELGAACPANYNPGDHFIQLLAGVPGREEVTRHTIDTVCTAFAKSEIGCRIAAEAENALYNERKIQAGLADAPWAMSSTTRAGRSPYKASWCT

SEQ ID NO: 1777 - protein, 692 aa, Aedes aegypti
MTINTDDHYADNESKSNITSRRYSTSSYQDVDEGINSSFGSNDKSTLIQVWKPKSYGAVKEQIPQHERLTYTWKEIDVFGETPGDTKKEPLCSRLCCCFSRQKKDFNPRKHLLKNVTGMAKSGELLAVMGSSGAGKTTLLNALSFRSPPGVKIAPTSVRALNGIPVNAEQLRARCAYVQQDDLFIPALTTREHLVFHAMLRMGKDVPKSVKMNRVNEVLQELSLAKCADTIIGAPGRMKGLSGGERKRLAFASETLTDPHLLLCDEPTSGLDSFMAHSVLQVLKGMALKGKTIILTIHQPSSELYCLFDKILLVAEGRVAFLGSPYQASEFFSQLGIPCPPNYNPADFYVQMLAIAPNKEAECRDTIKKICDSFAVSPMAREVMEVANSGKNVEEQYYLQPMEGASRTGYRSTWWTQFYYVLWRSWLTVLKDPMLVKVRLLQTAMVATLIGSIYFGQRLDQDGVMNINGALFLFLTNMTFQNVFAVINVFSAELPVFLREKRSRLFRVDTYFLGKTIAEVPLFLAVPFVFTSITYPMIGLKSGATYYLTALLIVVLVANVATSFGYLISCASSSISMALSVGPPVIIPFLIFGGFFLNSASVPSYFEYLSYFSWFRYANEALLINQWSTVQEGDIACTRANVTCPSSGQIILETFNFKVEDFGFDIACLCMLIVIFRLGALFCLWLRSRSKE

SEQ ID NO: 1778 - protein, 695 aa, Anopheles gambiae
MTINTDDQYGDAESKTTISSSRRYSSSSYQDQSMDDALNTTLTNDKATLIQVWKPKSYGSVKGQIPQCERLTYTWKEIDVFGEAPTDGKPREPLCTRLRNCCTRQRKDFNPRKHLLKNVTGVAKSGELLAVMGSSGAGKTTLLNALAFRSPPGVKISPNAVRALNGVPVNAEQLRARCAYVQQDDLFIPSLTTREHLLFQAMLRMGRDVPASVKQHRVQEVLQELSLVKCADTIIGAPGRIKGLSGGERKRLAFASETLTDPHLLLCDEPTSGLDSFMAHSVLQVLKGMAMKGKTIILTIHQPSSELYCLFDKILLVAEGRVAFLGSPYQSAEFFSQLGIPCPPNYNPADFYVQMLAIAPAKEAECRDMIKKICDSFAVSPIAREVLETASVAGKGMDEPYMLQQVEGVGSTGYRSSWWTQFYCILWRSWLSVLKDPMLVKVRLLQTAMVATLIGSIYFGQVLDQDGVMNINGSLFLFLTNMTFQNVFAVINVFSAELPVFLREKRSRLYRVDTYFLGKTIAELPLFIAVPFVFTSITYPMIGLRTGATHYLTTLFIVTLVANVSTSFGYLISCASSSISMALSVGPPVVIPFLIFGGFFLNSASVPAYFKYLSYLSWFRYANEALLINQWSTVVDGEIACTRANVTCPRSEIILETFNFRVEDFALDIACLFALIVLFRLGALLCLWLRSRSKE

SEQ ID NO: 1779 - protein, 673 aa, Anopheles gambiae
RYSSSSYQDQSMDDALNTTLTNDKATLIQVWKPKSYGSVKGQIPQCERLTYTWKEIDVFGEAPTDGKPREPLCTRLRSCCTRQRKDFNPRKHLLKNVTGVAKSGELLAVMGSSGAGKTTLLNALAFRSPPGVKISPNAVRALNGVPVNAEQLRARCAYVQQDDLFIPSLTTREHLLFQAMLRMGRDVPASVKQHRVQEVLQELSLVKCADTIIGAPGRIKGLSGGERKRLAFASETLTDPHLLLCDEPTSGLDSFMAHSVLQVLKGMAMKGKTIILTIHQPSSELYCLFDKILLVAEGRVAFLGSPYQSAEFFSQLGIPCPPNYNPADFYVQMLAIAPAKEAECRDMIKKICDSFAVSPIAREVLETASVAGKGMDEPYMLQQVEGVGSTGYRSSWWTQFYCILWRSWLSVLKDPMLVKVRLLQTAMVATLIGSIYFGQVLDQDGVMNINGSLFLFLTNMTFQNVFAVINVFSAELPVFLREKRSRLYRVDTYFLGKTIAELPLFIAVPFVFTSITYPMIGLRTGATHYLTTLFIVTLVANVSTSFGYLISCASSSISMALSVGPPVVIPFLIFGGFFLNSASVPAYFKYLSYLSWFRYANEALLINQWSTVVDGEIACTRANVTCPRSEIILETFNFRVEDFALDIACLFALIVLFRLGALLCLWLRYARKE

SEQ ID NO: 1780 - protein, 709 aa, Anopheles albimanus
MTINTDDQYADGESKTTISSNRRYSTSSFQDQSMEDDGINATLTNDKATLIQVWRPKSYGSVKGQIPAQDRLTYTWREIDVFGQAAIDGKSREPLCSRLRHCFTRQRLVKDFNPRKHLLKNVTGVARSGELLAVMGSSGAGKTTLLNELAFRSPPGVKISPNAIRTLNGVPVTAEQMRARCAYVQQDDLFIPSLTTKEHLMFQAMLRMGRDVPATPIKMHRVDEVLQELSLVKCADTIIGVAGRVKGLSGGERKRTAFRSETLTDPHLLLCDEPTSSLDSFMAQSVLQVLKGMAMKGKTIILTIHQPSSELYCLFDRILLVAEGVAFLGSPYQSADFFSQLGIPCPPNYNPADFYVQMLAIAPNKETECRETIKKICDSFAVSPIARDIIETASQVNGDGGIELTRTKHTTDPYFLQPMEGVDSTGYRASWWTQFYCILWRSWLSVLKDPMLVKVRLLQTAMVASLIGSIYFGQVLDQDGVMNINGSLFLFLTNMTFQNVFAVINVFSAELPVFLREKRSRLYRVDTYFLGKTIAELPLFIAVPFVFTSITYPMIGLKAAISHYLTTLFIVTLVANVSTSFGYLISCASSSISMALSVGPPVVIPFLIFGGFFLNSASVPAYFKYLSYLSWFRYANEALLINQWADHRDGEIGCTRANVTCPASGEIILETFNFRVEDFALDIGCLFALIVLFRLGALFCLWLRSRSKE

SEQ ID NO: 1781 - protein, 679 aa, Ceratitis capitata
MGQEDQEVLIRGGKATSTSAESLNNNNEQPYEQSSINQGFSKNYGTLSPPSPALTADNLTYSWYNLDVFGAVHQPGSSWKQLVNRVKGVFCNERHIPAPRKHLLKNVSGVAYPGELLAVMGSSGAGKTTLLNAIAFRSSKGVQISPSTIRMLNGHPVDAKEMQARCAYVQQDDLFIGSLTAREHLIFQAMVRMPRHMTQKQKVQRVDQVIQDLSLGKCQNTLIGVPGRVKGLSGGERKRLAFASEALTDPPLLICDEPTSGLDSFMAHSVVQVLKKLSQKGKTVILTIHQPSSELFELFDKILLMAEGRVAFLGTPGEAVDFFSYIGATCPTNYNPADFYVQVLAVVPGREVESRERIAKICDNFAVGKVSREMEQNFQKLVKSNGFGKEDENGYTYKASWFMQFRAVLWRSWLSVLKEPLLVKVRLLQTTMVAVLIGLIFLGQQLTQVGVMNINGAIFLFLTNMTFQNAFATITVFTTELPVFMRETRSRLYRCDTYFLGKTIAELPLFLVVPFLFTAIAYPLIGLRPGVDHFFTALALVTLVANVSTSFGYLISCACSSTSMALSVGPPVIIPFLLFGGFFLNSGSVPAYFKWLSYLSWFRYANEGLLINQWADVKPGEITCTLSNTTCPSSGEVILETLNFSASGLPFDFIGLALLIVGFRISAYIALTMRARRKE

SEQ ID NO: 1782 - protein, 593 aa, Ceratitis capitata
MGQEDQEVLIRGGKATSTSAESLNNNNEQPYEQSSINQGFSKNYGTLSPPSPALTADNLTYSWYNLDVFGAVHQPGSSWKQLVNRVKGVFCNERHIPAPRKHLLKNVSGVAYPGELLAVMGSSGAGKTTLLNAIAFRSSKGVQISPSTIRMLNGHPVDAKEMQARCAYVQQDDLFIGSLTAREHLIFQAMVRMPRHMTQKQKVQRVDQVIQDLSLGKCQNTLIGVPGRVKGLSGGERKRLAFASEALTDPPLLICDEPTSGLDSFMAHSVVQVLKKLSQKGKTVILTIHQPSSELFELFDKILLMAEGRVAFLGTPGEAVDFFSYIGATCPTNYNPADFYVQVLAVVPGREVESRERIAKICDNFAVGKVSREMEQNFQKLVKSNGFGKEDENGYTYKASWFMQFRAVLWRSWLSVLKEPLLVKVRLLQTTMVAVLIGLIFLGQQLTQVGVMNINGAIFLFLTNMTFQNAFATITVFTTELPVFMRETRSRLYRCDTYFLGKNHCRTAALLGGTVSLHRYRISSHWFTSRCRSFFHRSGACHLSSQCFNFLWLFDFLRLLVDINGSIGGSTCYYTIFTFWRFLFKLRLGAGVL

SEQ ID NO: 1783 - protein, 679 aa, Ceratitis capitata
MGQEDQEVLIRGGKATSTSAESLNNNNEQPYEQSSINQGFCKNYGTLSPPSPALTADNLTYSWYNLDVFGAVHQPGSSWKQLVNRVKGVFCNERHIPAPRKHLLKNDSGVAYPGELLAVMGSSGAGKTTLLNASAFRSSKGVQISPSTIRMLNGHPVDAKEMQARCAYVQQDDLFIGSLTAREHLIFQAMVRMPRHMTQKQKVQRVDQVIQDLSLGKCQNTLIGVPGRVKGLSGGERKRLAFASEALTDPPLLICDEPTSGLDSFMAHSVVQVLKKLSQKGKTVILTIHQPSSELFELFDKILLMAEGRVAFLGTPGEAVDFFSYIGATCPTNYTPADFYVQVLAVVPGREVESRDRVAKICDNFAVGKVSREMEQNFQKLVKSNGFGKEDENEYTYKASWFMQFRAVLWRSWLSVLKEPLLVKVRLLQTTMVAVLIGLIFLGQQLTQVGVMNINGAIFLFLTNMTFQNSFATITVFTTELPVFMRETRSRLYRCDTYFLGKTIAELPLFLVVPFLFTAIAYPLIGLRPGVDHFFTALALVTLVANVSTSFGYLISCACSSTSMALSVGPPVIIPFLLFGGFFLNSGSVPVYFKWLSYLSWFRYANEGLLINQWADVKPGEITCTLSNTTCPSSGEVILETLNFSASDLPFDFIGLALLIVGFRISAYIALTMRARRKE

SEQ ID NO: 1784 - protein, 696 aa, Drosophila melanogaster
MGQEDQELLIRGGSKHPSAEHLNNLIFEIPYHCRVTADASQSCINQGFGQAKNYGTLLPPSPPEDSGSGSGQLAENLTYAWHNMDIFGAVNQPGSGWRQLVNRTRGLFCNERHIPAPRKHLLKNVCGVAYPGELLAVMGSSGAGKTTLLNALAFRSPQGIQVSPSGMRLLNGQPVDAKEMQARCAYVQQDDLFIGSLTAREHLIFQAMVRMPRHLTYRQRVARVDQVIQELSLSKCQHTIIGVPGRVKGLSGGERKRLAFASEALTDPPLLICDEPTSGLDSFTAHSVVQVLKKLSQKGKTVILTIHQPSSELFELFDKILLMAEGRVAFLGTPSEAVDFFSYVGAQCPTNYNPADFYVQVLAVVPGREIESRDRIAKICDNFAISKVARDMEQLLATKNLEKPLEQPENGYTYKATWFMQFRAVLWRSWLSVLKEPLLVKVRLIQTTMVAILIGLIFLGQQLTQVGVMNINGAIFLFLTNMTFQNVFATINVFTSELPVFMREARSRLYRCDTYFLGKTIAELPLFLTVPLVFTAIAYPMIGLRAGVLHFFNCLALVTLVANVSTSFGYLISCASSSTSMALSVGPPVIIPFLLFGGFFLNSGSVPVYLKWLSYLSWFRYANEGLLINQWADVEPGEISCTSSNTTCPSSGKVILETLNFSAADLPLDYVGLAILIVSFRVLAYLALRLRARRKE

SEQ ID NO: 1785 - protein, 687 aa, Drosophila melanogaster
MGQEDQELLIRGGSKHPSAEHLNNGDSGAASQSCINQGFGQAKNYGTLRPPSPPEDSGSGSGQLAENLTYAWHNMDIFGAVNQPGSGWRQLVNRTRGLFCNERHIPAPRKHLLKNVCGVAYPGELLAVMGSSGAGKTTLLNALAFRSPQGIQVSPSGMRLLNGQPVDAKEMQARCAYVQQDDLFIGSLTAREHLIFQAMVRMPRHLTYRQRVARVDQVIQELSLSKCQHTIIGVPGRVKGLSGGERKRLAFASEALTDPPLLICDEPTSGLDSFTAHSVVQVLKKLSQKGKTVILTIHQPSSELFELFDKILLMAEGRVAFLGTPSEAVDFFSYVGAQCPTNYNPADFYVQVLAVVPGREIESRDRIAKICDNFAISKVARDMEQLLATKNLEKPLEQPENGYTYKATWFMQFRAVLWRSWLSVLKEPLLVKVRLIQTTMVAILIGLIFLGQQLTQVGVMNINGAIFLFLTNMTFQNVFATINVFTSELPVFMREARSRLYRCDTYFLGKTIAELPLFLTVPLVFTAIAYPMIGLRAGVLHFFNCLALVTLVANVSTSFGYLISCASSSTSMALSVGPPVIIPFLLFGGFFLNSGSVPVYLKWLSYLSWFRYANEGLLINQWADVEPGEISCTSSNTTCPSSGKVILETLNFSAADLPLDYVGLAILIVSFRVLAYLALRLRARRKE

SEQ ID NO: 1786 - protein, 687 aa, Drosophila melanogaster
MGQEDQELLIRGGSKHPSAEHLNNGDSGAASQSCINQGFGQAKNYGTLLPPSPPEDSGSGSGQLAENLTYAWHNMDIFGAVNQPGSGWRQLVNRTRGLFCNERHIPAPRKHLLKNVCGVAYPGELLAVMGSSGAGKTTLLNALAFRSPQGIQVSPSGMRLLNGQPVDAKEMQARCAYVQQDDLFIGSLTAREHLIFQAMVRMPRHLTYRQRVARVDQVIQELSLSKCQHTIIGVPGRVKGLSGGERKRLAFASEALTDPPLLICDEPTSGLDSFTAHSVVQVLKKLSQKGKTVILTIHQPSSELFELFDKILLMAEGRVAFLGTPSEAVDFFSYVGAQCPTNYNPADFYVQVLAVVPGREIESRDRIAKICDNFAISKVARDMEQLLATKNLEKPLEQPENGYTYKATWFMQFRAVLWRSWLSVLKEPLLVKVRLIQTTMVAILIGLIFLGQQLTQVGVMNINGAIFLFLTNMTFQNVFATINVFTSELPVFMREARSRLYRCDTYFLGKTIAELPLFLTVPLVFTAIAYPMIGLRAGVLHFFNCLALVTLVANVSTSFGYLISCASSSTSMALSVGPPVIIPFLLFGGFFLNSGSVPVYLKWLSYLSWFRYANEGLLINQWADVEPGEISCTSSNTTCPSSGKVILETLNFSAADLPLDYVGLAILIVSFRVLAYLALRLRARRKE

SEQ ID NO: 1787 - protein, 666 aa, Drosophila melanogaster
MSDSDSKRIDVEAPERVEQHELQVMPVGSTIEVPSLDSTPKLSKRNSSERSLPLRSYSKWSPTEQGATLVWRDLCVYTNVGGSGQRMKRIINNSTGAIQPGTLMALMGSSGSGKTTLMSTLAFRQPAGTVVQGDILINGRRIGPFMHRNHGYVYQDDLFLGSVSVLEHLNFMAHLRLDRRVSKEERRLIIKELLERTGLLSAAQTRIGSGDDKKVLSGGERKRLAFAVELLNNPVILFCDEPTTGLDSYSAQQLVATLYELAQKGTTILCTIHQPSSQLFDNFNNVMLLADGRVAFTGSPQHALSFFANHGYYCPEAYNPADFLIGVLATDPGYEQASQRSAQHLCDQFAVSSAAKQRDMLVNLEIHMAQSGNFPFDTEVESFRGVAWYKRFHVVWLRAIVTLLRDPTIQWLRFIQKIAMAFIIGACFAGTTEPSQLGVQAVQGALFIMISENTYHPMYSVLNLFPQGFPLFMRETRSGLYSTGQYYAANILALLPGMIIEPLIFVIICYWLTGLRSTFYAFGVTAMCVVLVMNVATACGCFFSTAFNSVPLAMAYLVPLDYIFMITSGIFIQVNSLPVAFWWTQFLSWMLYANEAMTAAQWSGVQNITCFQESADLPCFHTGQDVLDKYTFNESNVYRNLLAMVGLYFGFHLLGYYCLWRRARKL

SEQ ID NO: 1788 - protein, 666 aa, Drosophila melanogaster
MSDSDSKRIDVEAPERVEQHELQVMPVGSTIEVPSLDSTPKLSKRNSSERSLPLRSYSKWSPTEQGATLVWRDLCVYTNVGGSGQRMKRIINNSTGAIQPGTLMALMGSSGSGKTTLMSTLAFRQPAGTVVQGDILINGRRIGPFMHRISGYVYQDDLFLGSLTVLEHLNFMAHLRLDRRVSKEERRLIIKELLERTGLLSAAQTRIGSGDDKKVLSGGERKRLAFAVELLNNPVILFCDEPTTGLDSYSAQQLVATLYELAQKGTTILCTIHQPSSQLFDNFNNVMLLADGRVAFTGSPQHALSFFANHGYYCPEAYNPADFLIGVLATDPGYEQASQRSAQHLCDQFAVSSAAKQRDMLVNLEIHMAQSGNFPFDTEVESFRGVAWYKRFHVVWLRASLTLLRDPTIQWLRFIQKIAMAFIIGACFAGTTEPSQLGVQAVQGALFIMISENTYHPMYSVLNLFPQGFPLFMRETRSGLYSTGQYYAANILALLPGMIIEPLIFVIICYWLTGLRSTFYAFGVTAMCVVLVMNVATACGCFFSTAFNSVPLAMAYLVPLDYIFMITSGIFIQVNSLPVAFWWTQFLSWMLYANEAMTAAQWSGVQNITCFQESADLPCFHTGQDVLDKYSFNESNVYRNLLAMVGLYFGFHLLGYYCLWRRARKL

SEQ ID NO: 1789 - protein, 706 aa, Drosophila melanogaster
MGQEDQELLIRGGSKHPSAEHLNNLIFEIPYHCRVTADASQSCINQGFGQAKNYGTLLPPSPPEDSGSGSGQLAENLTYAWHNMDIFGAVNQPGSGWRQLVNRTRGLFCNERHIPAPRKHLLKNVCGVAYPGELLAVMGSSGAGKTTLLNALAFRSPQGIQVSPSGMRLLNGQPVDAKEMQARCAYVQQDDLFIGSLTAREHLIFQAMVRMPRHLTYRQRVARVDQVIQELSLSKCQHTIIGVPGRVKGLSGGERKRLAFASEALTDPPLLICDEPTSGLDSFTAHSVVQVLKKLSQKGKTVILTIHQPSSELFELFDKILLMAEGRVAFLGTPSEAVDFFSYITLHLNSYPAWVPSVLPTTIRRTFTYRCWPLCPDGRSSPVIGSPRYGDNFAISKVARDMEQLLATKNLEKPLEQPENGYTYKATWFMQFRAVLWRSWLSVLKEPLLVKVRLIQTTMVAILIGLIFLGQQLTQVGVMNINGAIFLFLTNMTFQNVFATINVFTSELPVFMREARSRLYRCDTYFLGKTIAELPLFLTVPLVFTAIAYPMIGLRAGVLHFFNCLALVTLVANVSTSFGYLISCASSSTSMALSVGPPVIIPFLLFGGFFLNSGSVPVYLKWLSYLSWFRYANEGLLINQWADVEPGEISCTSSNTTCPSSGKVILETLNFSAADLPLDYVGLAILIVSFRVLAYLALRLRARRKE

SEQ ID NO: 1790 - protein, 609 aa, Drosophila melanogaster
MADNAVQAQPNGLGPQKQKALELHFSQVSYSLKGATKGSTPIINEACGVFKSGRLTAILGPSGAGKSTLLNALAGFKLQGVTGQFLLNGRPRDIMSFRKMSAYIAQNFVMLNLLTVEETLRVSTDLKMPSSTAAQEKQKIIDDIIDILQLQSCRRTLVKNLSGGEHKRLSIGIELVTNPPIMFFDEPTSGLDCVGSYQVICHLQRLAHDGRIVVCVVHQPGSRLFQLFDDVLVLAHGEVLYAGEQREMLPTFAQSGHICPQYYNPADFALEVCSQSSTTERCESLITQNKMMHSTASNVVKLQVDEETALIDVHKDALDLSHLRGKEQVGFWTQLSVLLRRHLRSMSRDMFAVQMRLVMHVVVALLLGVVYWQIGGDAQKIVSNVSCLFFVILFVFAGNAMPSILLCMQDSAVFIREYYNGWYSLGAYYLSKVLADLPLQLTCPTMFISIGYFMTGQPPEFQRFAMCWALCVMTAFIGHFIGVIAGSLFTMQLAIFLVPSATIPFLLFSGFFIRLNELSWFLRPICDVSFFRYIFEGLMRAIYGYDRGELECYATSNFCYYRTAEQFLKDFQMEGNEFDWDMAVLGIFLILLLLAFFVTLNAVIRRALR

SEQ ID NO: 1791 - protein, 687 aa, Drosophila simulans
MGQEDQELLIRGGSKHPSAEHLNNGDSGAASQSCINQGFGQAKNYGTLRPPSPPEDSGSGSGQVAENLTYAWHNMDIFGAVNQPGSGWRQLVNRTRGLFCNERHIPAPRKHLLKNVCGVAYPGELLAVMGSSGAGKTTLLNALAFRSPQGIQVSPSGMRLLNGQPVDAKEMQARCAYVQQDDLFIGSLTAREHLIFQAMMRMPRHLTYRQRVARVDQVIQELLLSKCQHTIIGVPGRAKGLSGGERKRLAFASEALTDPPLLICDEPTSGLDSFTAHSVVQVLKKLSQKGKTVILTIHQPSSELFELFDKILLMAEGRVAFLGTPSEAVDFFSYVGAQCPTNYNPADFYVQVLAVVPGREIESRDRIAKICDNFAISKVARDMEQLLATKNLEKPLEQPENGYTYKATWFMQFRAVLWRSWLSVLKEPLLVKVRLIQTTMVAILIGLIFLGQQLTQVGVMNINGAIFLFLTNMTFQNVFATINVFTSELPVFMREARSRLYRCDTYFLGKTIAELPLFLTVPLVFTAIAYPMIGLRAGVMHFFNCLALVTLVANVSTSFGYLISCASSSTSMALSVGPPVIIPFLLFGGFFLNSGSVPVYLKWLSYLSWFRYANEGLLINQWADVEPGEISCTSSNTTCPSSGKVILETLNFSAADLPLDYVGLAILIVSFQVLAYLALRLRARRKE

SEQ ID NO: 1792 - protein, 668 aa, Drosophila virilis
  unsure (1)..(668): unsure at all Xaa locations
MPMDEGDAQGSLLLEWKQLNYYVPAQEQSNYSFWNECRKQRELGILHDVSGHLKTGDLIAILGGSGAGKTTLLAAISQRLRGNLTGDVVLNGMAMERDQMTRISSFLREFEINVKTFTAYDDLYFMSHFKMHRRTTKSEKRQAVSDLLLAVGLRDAAHTRIQQLSGGERKRLSLAEELITDPIFLFCDEPTTGLDSFSAYTVIKTLRHLCTRRRIAKHSLTQVYGEDSFATPSDNGSSGSNSIEMEIVDNSHESLLQAMKELPTLGVLNNSPNGTQKKAAICSIHQPTSDIFELFTHIILMDGGRIVYQGRTEQAAKFFTEGFMQPKNCNPADFYLKTLADGQGSKNAGELLRAKYEHETDGLYSGSWLLARNYSGDYMKHVQNFKKIRWIYQVYLLVIRFMTEDLANIRSGLIGFGFFMTTAVTLSLMYSGVGGLTQRTVQDVGGSIFMLSNEMIFTFSYGVTYIFPAALPIIRREVAEGTYSLSAYYVALVLSFVPVAFFKGYMFLSVIYASIYYTRGFLLYITMGFLMSLSAIAAVGYGVFLSSLFETDKMASECAAPFDLIFLIFGGTYMNVDSVPLLKYFSLFFYSNEALMYNFWIDIDNIACXVNDEHPCCQTGLEVLQQASFRTADYTFWLDCASLLVVALVFHIVSFTLIRRYINRSGYY

SEQ ID NO: 1793 - protein, 1837 aa, Plasmodium yoelii yoelii
MKKFGNNSNIFSPYWVKKIVQIKKENNEQREVEINLENEKPNDPVLLYHDIKTETTYYYTSEGNNFYIFFKINHYINKELFYTNTNKYIPSIFIYFYDINKIENNTLPIQIYDQGKNASSMNYQLLLTKYYEIYNHYKKEINIFLKNSNNLIKKNIKKKKEIPINNTNVEGEKQTNQNYIKKNINDEQPTKICTEKLFIKDQKKKKKNMYTQSQSITKKIVDNYVLLTNYENHNEISYFDFINVFENTFHKYNIIHSNFEHNLAKLNFFDGKWNNKTYDEKIDIYFNFKEKYKNDGTNKLSDTDNLKNYKKQLHKYQTNNYFSKERNNIVKNDHTKKSEFHILMKENKIFNWWYNSLFILILTKNKNNFNQISAIKNFKKIIHLLKKNKNQIINNPIYIYTTKSTGGNEFYITYNNVNKSFSIFMSPFLIYFNKDKWSLLNFNEYNSQDQKKKNLRFVLNILLELFLYIRMIYFKKKNIRKLKVYLLERTLNGYARCKMVSAKNKSSNYTKDSTKLNRKNNITYKYTFYSVVDNFFLVQGENYSGNNKLFKKIKKVLLKCTNFNKYVFFEFSKTKLEHICTCIHDLMSWANKFDHEIFKNERKEHVYIHFVQKKTNFVQNSINQSCDKTNVISKRENNLYKICSFKITSYKDKILQISKNICMHLFHLFKSLEKSLNSDTIYILKHAQFILVRFPYICYTICCGKRKVQNLKRVLCKTYVRYRSMWFCKNYLKSTDKNILHLIKKKKKKVLWNIFLNKKNIFLFWYLLKIQKLLIYFYLCMITNYCAKTKSRCCCYCSVKHKKEQKKKEPKQVSYAYNMLHKTFTNLIKEIKSEKQKKKIFLHFRKNTNISCLCKVKNGTFYECLEKSSYFDCYKKAKKKKKKKKTAFTLKSVHMNEYFLKNNKKSVQIIQNGNNNQEEGIVKDTNQIQNSTLQRKYRIEEKRCLKQKNYYNFFKLKNMKKLIIKYGNCLTTKVNEEFNISKKKRKHIFLNANKVKHELIKIAHLFQCEAKDIINFVDIISKETNQTKLEISTEKNINGDKNISSYKNKEKEKEKMKDNLQEINQTCIHTIAISLSKNIQANKNFAIFNILPIILKEKKSYINKNEQINYKIIREFFYSSDYSLNKIYNNSNVHKYYIKLNYLAFFINGHMTYSVDIFSNQYENYFTFLYTHFPYFPSATKMSIKELKNKKDLSSSCEQITYKFSNVKYSVDNGNLEILHGINGMILPQKITIIMGPSGSGKTTLLNILSMQILDGVEGNFLINNKPRTKSVKHHMGYVLQDDYFFANLTVYETLEFAARIKLDIKDKKKLEDLINSVLNIMDLTHVKDTIVGNAFIRGISGGQRKRLSIATEILSNPPLLFMDEPTSGLDSAAALSLVECMQKMSRFSNTTILSSLHQPSSQIFEKFDKLIAISSGYIIYQGKTTDLNIYLKKIGFICPHGWNIADYLMEILSNKKNEPILLENYNKYISFNEEEGYYMDLNNINNTIIHNDHDSEIKKKENLENDSNKNNNEQILLSNNISQQDFDNEIKKRDQDSKKLKAIELLISFEMKKASYIMQFLYLLIRGLKKFIVDELTIIKIIDLSITLTIFGFLWSKAFSDPHRVLDSMGAIFFMIAYWTYYPAYLSLYSFPSERVIIAKERNVKTYQVSNYFLSQALAEFIFFFCLIAVWSLFSHIALYGSFKFDVYIGFVFIITLNSLISSSLGYFISTLFDNLSRSVSLLSVSLLTMTLSNGFYVEVAKLKPPVKYLQWFSFQTYTASAMAKIKFSDIFIECLPNNISIECQNINKIPENMVIKQRFADIQLYVSILILFTFYFIIKTCIYISLRWSNALKMK

SEQ ID NO: 1794 - protein, 677 aa, Lucilia cuprina
  unsure (1)..(677): unsure at all Xaa locations
MGQEDQEFLIQEHKKRTATSVESLNNTPGTLEASAINSGFSKSYGSLVSNESASEKLTYSWCNLDVFGEVHQPGSNWKQLVNRVKGVFCNERHIPKPRKHLIKNVCGVAYPGELLAVMGSSGAGKTTLLNALAFRSARGVQISPSSVRMLNGHPVDAKEMQARCAYVQQDDLFIGSLTAREHLIFQATVRMPRTMTQKQKLQRVDQVIQDLSLIKCQNTIIGVPGRVKGLSGGERKRLAFASEALTDPPLLICDEPTSGLDSFMAASVVQVLKKLSQRGKTVILTIHQPSSELFELFDKILLMAEGRVAFLGTPVEAVDFFSFIGAQCPTNYNPADFYVQVLAVVPGREIESRDRISKICDNFAVGKVSREMEQNFQKIAAKTDGLQKDDETTILYKASWFTQFRAIMWRSWISTLKEPLLVKVRLIQTTMVAVLIGLIFLNQPMTQVGVMNINGAIFLFLTNMTFQNVFAVINVFTSELPVFMRETRSRLYRCDTYFLGKTLAELPLFLVVPFLFIAIAYPMIGLRPGITHFLSALALVTLVANVSTSFGYLISCASTSTSMALSVGPPLTIPFLLFGGVFLNSGSVPVYFKWLSYFSWFRYANEGLLINQWADVQPGEITCTSTNTTCPSSGXVXLETLNFRDKFTFRLYGLILLILIFRIAGYVAXKMRTKRKE

SEQ ID NO: 1795 - protein, 863 aa, Mycobacterium tuberculosis CDC1551
MSQPAAPPVLTVRYEGSERTFAAGHDVVVGRDLRADVRVAHPLISRAHLLLRFDQGRWVAIDNGSLNGLYLNNRRVPVVDIYDAQRVHIGNPDGPALDFEVGRHRGSAGRPPQTTSIRLPNLSAGAWPTDGPPQTGTLGSGQLQQLPPATTRIPAAPPSGPQPRYPTGGQQLWPPSGPQRAPQIYRPPTAAPPPAGARGGTEAGNLATSMMKILRPGRLTGELPPGAVRIGRANDNDIVIPEVLASRHHATLVPTPGGTEIRDNRSINGTFVNGARVDAALLHDGDVVTIGNIDLVFADGTLARREENLLETRVGGLDVRGVTWTIDGDKTLLDGISLTARPGMLTAVIGPSGAGKSTLARLVAGYTHPTDGTVTFEGHNVHAEYASLRSRIGMVPQDDVVHGQLTVKHALMYAAELRLPPDTTKDDRTQVVARVLEELEMSKHIDTRVDKLSGGQRKRASVALELLTGPSLLILDEPTSGLDPALDRQVMTMLRQLADAGRVVLVVTHSLTYLDVCDQVLLLAPGGKTAFCGPPTQIGPVMGTTNWADIFSTVADDPDAAKARYLARTGPTPPPPPVEQPAELGDPAHTSLFRQFSTIARRQLRLIVSDRGYFVFLALLPFIMGALSMSVPGDVGFGFPNPMGDAPNEPGQILVLLNVGAVFMGTALTIRDLIGERAIFRREQAVGLSTTAYLIAKVCVYTVLAVVQSAIVTVIVLVGKGGPTQGAVALSKPDLELFVDVAVTCVASAMLGLALSAIAKSNEQIMPLLVVAVMSQLVFSGGMIPVTGRVPLDQMSWVTPARWGFAASAATVDLIKLVPGPLTPKDSHWHHTASAWWFDMAMLVALSVIYVGFVRWKIRLKAC

SEQ ID NO: 1796 - protein, 865 aa, Mycobacterium tuberculosis H37Rv
MPMSQPAAPPVLTVRYEGSERTFAAGHDVVVGRDLRADVRVAHPLISRAHLLLRFDQGRWVAIDNGSLNGLYLNNRRVPVVDIYDAQRVHIGNPDGPALDFEVGRHRGSAGRPPQTTSIRLPNLSAGAWPTDGPPQTGTLGSGQLQQLPPATTRIPAAPPSGPQPRYPTGGQQLWPPSGPQRAPQIYRPPTAAPPPAGARGGTEAGNLATSMMKILRPGRLTGELPPGAVRIGRANDNDIVIPEVLASRHHATLVPTPGGTEIRDNRSINGTFVNGARVDAALLHDGDVVTIGNIDLVFADGTLARREENLLETRVGGLDVRGVTWTIDGDKTLLDGISLTARPGMLTAVIGPSGAGKSTLARLVAGYTHPTDGTVTFEGHNVHAEYASLRSRIGMVPQDDVVHGQLTVKHALMYAAELRLPPDTTKDDRTQVVARVLEELEMSKHIDTRVDKLSGGQRKRASVALELLTGPSLLILDEPTSGLDPALDRQVMTMLRQLADAGRVVLVVTHSLTYLDVCDQVLLLAPGGKTAFCGPPTQIGPVMGTTNWADIFSTVADDPDAAKARYLARTGPTPPPPPVEQPAELGDPAHTSLFRQFSTIARRQLRLIVSDRGYFVFLALLPFIMGALSMSVPGDVGFGFPNPMGDAPNEPGQILVLLNVGAVFMGTALTIRDLIGERAIFRREQAVGLSTTAYLIAKVCVYTVLAVVQSAIVTVIVLVGKGGPTQGAVALSKPDLELFVDVAVTCVASAMLGLALSAIAKSNEQIMPLLVVAVMSQLVFSGGMIPVTGRVPLDQMSWVTPARWGFAASAATVDLIKLVPGPLTPKDSHWHHTASAWWFDMAMLVALSVIYVGFVRWKIRLKAC

SEQ ID NO: 1797 - protein, 602 aa, Macaca fascicularis
MALLINGFCLLTVTERTTKAKHIQFVSGVSVIVYWLSALLCDFIIFFASCCLVMGVIKYRKLDIYVTDYHILETMLIFTLYGWSAIPFVYLISFVFSGSTSAYIKLLLLSYFSGTFGFLIGEIIENKKLTNISNTTRTVVRNSLLLFPNYNLAKCVSQYTTIYDVKILCTTLKKHPVHLNCSKANTEKNTYSLKEPMIGKYLIDMSTAGFIFLVLIFFWETTSWRLRTFLNQYIYFGIYKRYRKEIVSKELSGRSEDEDVQNERKRILEQPQELLDSIVLVKELIKIYFKCPAILAVKNISLAIQKGECFGLLGFNGAGKTTTFQILTGEASPTSGDVLIDGFSITKDILQVRSRIGYCPQFDALLEYMTAQEIMIMYARIWGVSEPQIKLYVNKWLNSLELESHADRLISTYSEGNKRRLSTAIALMGRSSIIFLDEPSTGMDPVARRLLWNIVTKTRESGRAIVITSHSMEECDALCTSLAIMVQGKFMCLGSPQHLKNKFGNIYILKVKVKTKDKLEDFKRFVTTTFPGSVLKHENQGILNYYIPSKDNRWGKVFGILEQAKEQFDLEDYSVSQITLEQVFLTFANPEKVSSDDENEVP

SEQ ID NO: 1798 - protein, 581 aa, Macaca fascicularis
MDLLISLLSLLMKCLSALLCDFIIFFASCCLVMGVIKYRKLDIYVTDYHILETMLIFTLYGWSAIPFVYLISFVFSGSTSAYIKLLLLSYFSGTFGFLIGEIIENKKLTNISNTTRTVVRNSLQLFPNYNLAKCVSQYTTIYDVKILCTTLKKHPVHLNCSKANTEKNIYSLKEPMIGKYLIDMSTAGFIFLVLIFFWETTSWRLRTFLNQYIYFGIYKRYRKEIVSKELSGQSEDEDVQNERKRILEQPQELLDSIVLVKELIKIYFKCPAILAVKNISLAIQKGECFGLLGFNGAGKTTTFQILTGEASPTSGDVLIDGFSITKDILQVRSRIGYCPQFDALLEYMTAQEIMIMYARIWGVSEPQIKLYVNKWLNSLELESHADRLISTYSEGNKRRLSTAIALMGRSSIIFLDEPSTGMDPVARRLLWNIVTKTRESGKAIVITSHSMEECDALCTSLAIMVQGKFMCLGSPQHLKNKFGNIYILKVKVKTKDKLQDFKRFVTTTFPGSVLKHENQGILNYYIPSKDNRWGKVFGILEQAKEQFDLEDYSVSQITLEQVFLTFANPEKVSSDDENEVP

SEQ ID NO: 1799 - protein, 2281 aa, Bos taurus
  unsure (1)..(2281): unsure at all Xaa locations
MGFARQIKLLLWKNWTLRKRQKIRFVVELVWPLSLFLVLIWLRNVNPLYSKHECHFPNKAMPSAGMLPWLQGIFCNVNNPCFQSPTAGESPGIVSNYNNSILARVYRDFQELLMDAPESQHLGQVWRELRTLSQLMNTLRMHPERIAGRGIRIREVLKDDEMLTLFLVKNIGLSDSVVYLLVNSQVRPEQFARGVPDLMLKDIACSEALLERFLIFPQRRAAQTVRGSLCSLSQGTLQWMEDTLYANVDFFKLFHVFPRLLDSRSQGMNLRSWGRILSDMSPRIQEFIHRPSVQDLLWVTRPLVQTGGPETFTQLMGILSDLLCGYPEGGGSRVFSFNWYEDNNYKAFLGIDSTRKDPIYSYDERTTTFCNALIQSLESNPLTKIAWRAAKPLLMGKILFTPDSPATRRILKNANSTFEELERVRKLVKVWEEVGPQIWYFFDKSTQMSMIRDTLENPTVKAFWNRQLGEEGITAEAVLNFLYNGPREGQADDVDNFNWRDIFNITDRALRLANQYLECLILDKFESYDDEFQLTQRALSLLEENRFWAGVVFPDMHPWTSSLPPHVKYKIRMDIDVVEKTNKIKDRYWDSGPRADPVEDFRYIWGGFAYLQDMVEHGITRSQAQEEVPVGIYLQQMPYPCFVDDSFMIILNRCFPIFMVLAWIYSVSMTVKSIVLEKELRLKETLKNQGVSNRVIWCTWFLDSFSIMSMSICLLTIFIMHGRILHYSNPFILFLFLLAFSIATIMQCFLLSTFFSRASLAAACSGVIYFTLYLPHILCFAWQDRITADMKMAVSLLSPVAFGFGTEYLAXFEEQGVGLQWSNIGNSPMEGDEFSFLMSMKMMLLDAALYGLLAWYLDQVFPGDYGTPLPWYFLLQESYWLGGEGCSTREERALEKTEPITEEMEDPEYPEGINDCFFERELPGLVPGVCVKNLVKIFEPYGRPAVDRLNITFYESQITAFLGHNGAGKTTTLSIMTGLLPPTSGTVLVGGKDIETNLDAIRQSLGMCPQHNILFHHLTVAEHILFYAQLKGRSWDEAQLEMEAMLEDTGLHHKRNEEARDLSGGVQRKLSVAIAFVGDAKVVVLDEPTSGVDPYSRRSIWDLLLKYRSGRTIIMSTHHMDEADILGDRIAIISQGRLYCSGTPLFLKNCFGTGFYLTLVRRMKTIQSQGRGREATCSCASKGFSVRCPACAEAITPEQVLDGDVNELTDMVHHHVPEAKLVECIGQELIFLLPNKNFKQRAYASLFRELEETLADLGLSSFGISDTPLEEIFLKVTEDLDSGHLFAGGTQQKRENINLRHPCSGPSEKAGQTPQGSSSHPGEPAAHPEGQPPPEREGHSRLNSGARLIVQHVQALLVKRFQHTIRSHKDFLAQIVLPATFVFLALMLSLIIPPFGEYPALTLHPWMYGQQYTFFSMDQPDSEWLSALADVLVNKPGFGNRCLKEEWLPEFPCGNSSPWKTPSVSPDVTHLLQQQKWTADQPSPSCRCSTREKLTMLPECPEGAGGLPPPQRIQRSTEILQDLTDRNVSDFLVKTYPALIRSSLKSKFWVNEQRYGGISVGGKLPAPPFTGEALVGFLSDLGQLMNVSGGPMTREAAKEMPAFLKQLETEDNIKVWFNNKGWHALVSFLNVAHNAILRASLHKDKNPEEYGITVISQPLNLTKEQLSEITVLTTSVDAVVAICVIFAMSFVPASFVLYLIQERVNKAKHLQFVSGVSPTTYWLTNFLWDIMNYTVSAALVVGIFIGFQKKAYTSSENLPALVALLMLYGWAVIPMMYPASFLFDIPSTAYVALSCANLFIGINSSAITFVLELFENNRTLLRINAMLRKLLIIFPHFCLGRGLIDLALSQAVTDVYAQFGEAHSSNPFQWDLIGKNLAAMAVEGVVYFLLTLLIQYQFFFSRWTTEPAKEPITDEDDDVAEERQRIISGGNKTDILRLNELTKVYSGTSSPAVDRLCVGVRPGECFGLLGVNGAGKTTTFKMLTGDTAVTSGDATVAGKSILTNISDVHQSMGYCPQFDAIDDLLTGREHLYLYARLRGVPAEEIERVTNWSIQSLGLSLYADRLAGTYSGGNKRKLSTAIALIGCPPLVLLDEPTTGMDPQARRMLWNTIMGIIREERAVVLTSHSMEECEALCTRLAIMVKGAFQCLGTIQHLKSKFGDGYIVTMKIRSPKDDLLPDLGPVEQFFQGNFPGSVQRERHYNTLQFQVSSSSLARIFRLLVSHKDSLLIEEYSVTQTTLDQVFVNFAKQQNETYDLPLHPRTAGASRQAKEVDKGNSAPQG

SEQ ID NO: 1800 - protein, 578 aa, Mus musculus
MSAPRAEEQPSRSGERQPLVARGPRGPRRWRRTAAAAVLLVQMLERAAFFGVTSNLVLYLNSLNFNWDGQQASRATLLFLGASYLLAPVGGWLADVYLGRFLTISLSLLLYLAASGLLLTTITNDGRRSFCGEMPELPLEPACPSSSCQGSWSSPYCATTLYLVLLLLALAASSVRSTLTSFGADQVMDLGRDATRRFFNWFYWSINLGAILSLLVVAFIEQNISFLWGYSIIVGLVGLAFFIFLFATPVFITKPPTGSQVSSMLKLAFQNCCPCRKSSSRDSESAHLLPDQRSNQPGPSPQEDMANFQVLVKILPVMVTLVPYWMVYFQMQSTYVLQGLHLHIPNIFRTNPNISLLLRSDSSNYRIPEAWLLLANVAVILILIPVKDHLIDPLLLRCKLLPSSLQKMALGMFFGFTSIIVAGVLEKERLQYIAANQTVPQLIGKDLYYAAPLSIWWQIPQYLLIGVSEIFASIPGLEFAYSEAPRSMQGAIMGIFFCLSGVGSLLGSGLVALLSFPGGWMYCPKDFGNINNCQMDRYFFLLAGIEAVTAVLFLWIAGRYERTRQDPASQRSSSRVRG

SEQ ID NO: 1801 - protein, 578 aa, Mus musculus
MSAPRAEEQPSRSGERQPLVARGPRGPRRWRRTAAAAVLLVQMLERAAFFGVTSNLVLYLNSLNFNWDGQQASRATLLFLGASYLLAPVGGWLADVYLGRFLTISLSLLLYLAASGLLLTTITNDGRRSFCGEMPELPLEPACPSSSCQGSWSSPYCATTLYLVLLLLALAASSVRSTLTSFGADQVMDLGRDATRRFFNWFYWSINLGAILSLLVVAFIEQNISFLWGYSIIVGLVGLAFFIFLFATPVFITKPPTGSQVSSMLKLAFQNCCPCRRSSSRDSESAHLLPDQRSNQPGPSPQEDMANFQVLVKILPVMVTLVPYWMVYFQMQSTYVLQGLHLHIPNIFRTNPNISLLLRSDSSNYRIPEAWLLLANVAVILILIPVKDHLIDPLLLRCKLLPSSLQKMALGMFFGFTSIIVAGVLEKERLQYIAANQTVPQLIGKDLYYAAPLSIWWQIPQYLLIGVSEIFASIPGLEFAYSEAPRSMQGAIMGIFFCLSGVGSLLGSGLVALLSFPGGWMYCPKDFGNINNCQMDRYFFLLAGIEAVTAVLFLWIAGRYERTRQDPASQRSSSRVRG

SEQ ID NO: 1802 - protein, 574 aa, Mus musculus
MEGERAPLLGSRRPAVSAASAVFAGRRAACGAVLLAELLERAAFYGVTANLVLFLNGAPFDWEGAQASQALLLFMGLTYLGSPFGGWLADARLGRARAILLSLALYLLGLLAFPLLAAPRSRSFLCGDPRPELVRNCSAPFPNGSASCPENAARRCAPATFAGLVLVGLGVATVKANITPFGADQVKDRGPEATRRFFNWFYWSINLGAILSLGGIAYIQQNVSFFTGYLIPTVCVAIAFLVFLCGQSVFITKPPDGSAFTDMFRILTYSCCSQRGGQRRSGEGLGVFQQSSKHSLFDSCKMSRGGPFTEDKVEDVKALVKIVPVFLALIPYWTVYFQMQTTYALQSLHLKIPEISSITTTHHTLPAAWLTMFDAVLILLLIPLKDKLVDPVLRRHGLLPSSLKRIAVGMFFVMCSAFAAGILESKRLDLVKEKTINQTIGGVVYHAADLPIWWQIPQYVLIGISEIFASIAGLEFAYSAAPKSMQSAIMGLFFFFSGIGSFVGSGLLALVSLKAIGWMSSHTDFGNINSCHLHYYFFLLAAIQGATLLLFLIVSVKYDRQRARTDGGPASTRT

SEQ ID NO: 1803 - protein, 740 aa, Mus musculus
MLEERESKEPAMNPFQKNESKETLFSPVSTEEMLPGPPSPPKKSTPKLFGSSYPLSIAFIVVNEFCERFSYYGMKAVLTLYFLYFLHWNEDTSTSVYHAFSSLCYFTPILGAAIADSWLGKFKTIIYLSLVYVLGHVFKSLGAIPILGGKMLHTILSLVGLSLIALGTGGIKPCVAAFGGDQFEEEHAEARTRYFSVFYLSINAGSLISMFITPMLRGDVKCFGEDCYALAFGIPGLLMVLALVVFAMGSKMYRKPPPEGNIVAQVTKCIWFAICNRFRNRSEDIPKRQHWLDWAAEKYPKHLIMDVKALTRILFLYIPLPMFWALLDQQGSRWTLQANKMDGDLGFFVLQPDQMQVLNPFLVLVFIPLFDLVIYRLISKCGVNFSSLRKMAVGMILACLAFAVAALVEIKINGMIHPQPASQEIFLQVLNLADGEIEVTVQGNRNNPLLVESISSFQNTTHYSKLRLETKSQDLHFHLKYNNLSVHNEYSVEEKNCYQLVVHENGESLSSMLVKDTGIKPANGMTAIRFINTLHKDMNISLDANAPLSVGKDYGVSEYRTVQRGKYPAVHCETEDNVFSLNLGQLDFGTTYLFVITNITNRGLQAWKAEDIPANKLSIAWQLPQYVLVTAAEVMFSVTGLEFSYSQAPSSMKSVLQAAWLLTVAVGNIIVLIVAQFSGLVQWAEFVLFSCLLLVVCLIFSVMGYYYVPLKSEGIHEATEKQIPHIQGNMINLETKNTRL

SEQ ID NO: 1804 - protein, 729 aa, Mus musculus
MNPFQKNESKETLFSPVSTEEMLPGPPSPPKKSTPKLFGSSYPLSIAFIVVNEFCERFSYYGMKAVLTLYFLYFLHWNEDTSTSVYHAFSSLCYFTPILGAAIADSWLGKFKTIIYLSLVYVLGHVFKSLGAIPILGGKMLHTILSLVGLSLIALGTGGIKPCVAAFGGDQFEEEHAEARTRYFSVFYLSINAGSLISTFITPMLRGDVKCFGEDCYALAFGIPGLLMVLALVVFAMGSKMYRKPPPEGNIVAQVTKCIWFAICNRFRNRSEDIPKRQHWLDWAAEKYPKHLIMDVKALTRILFLYIPLPMFWALLDQQGSRWTLQANKMDGDLGFFVLQPDQMQVLNPFLVLVFIPLFDLVIYRLISKCGVNFSSLRKMAVGMILACLAFAVAALVEIKINGMIHPQPASQEIFLQVLNLADGEIEVTVQGNRNNPLLVSEISSFQNTTHYSKLRLETKSQDLHFHLKYNNLSVHNEYSVEEKNCYQLVVHENGESLSSMLVKDTGIKPANGMTAIRFINTLHKDMNISLDANAPLSVGKDYGVSEYRTVQRGKYPAVHCETEDNVFSLNLGQLDFGTTYLFVITNITNRGLQAWKAEDIPANKLSIAWQLPQYVLVTAAEVMFSVTGLEFSYSQAPSSMKSVLQAAWLLTVAVGNIIVLIVAQFSGLVQWAEFVLFSCLLLVVCLIFSVMGYYYVPLKSEGIHEATEKQIPHIQGNMINLETKNTRL

SEQ ID NO: 1805 - protein, 729 aa, Mus musculus
MNPFQKNESKETLFSPVSTEEMLPGPPSPPKKSTPKLFGSSYPLSIAFIVVNEFCERFSYYGMKAVLTLYFLYFLHWNEDTSTSVYHAFSSLCYFTPILGAAIADSWLGKFKTIIYLSLVYVLGHVFKSLGAIPILGGKMLHTILSLVGLSLIALGTGGIKPCVAAFGGDQFEEEHAEARTRYFSVFYLSINAGSLISTFITPMLRGDVKCFGEDCYALAFGIPGLLMVLALVVFAMGSKMYRKPPPEGNIVAQVTKCIWFAICNRFRNRSEDIPKRQHWLDWAAEKYPKHLIMDVKALTRILFLYIPLPMFWALLDQQGSRWTLQANKMDGDLGFFVLQPDQMQVLNPFLVLVFIPLFDLVIYRLISKCGVNFSSLRKMAVGMILACLAFAVAALVEIKINGMIHPQPASQEIFLQVLNLADGEIEVTVQGNRNNPLLVESISSFQNTTHYSKLRLETKSQDLHFHLKYNNLSVHNEYSVEEKNCYQLVVHENGESLSSMLVKDTGIKPANGMTAIRFINTLHKDMNISLDANAPLSVGKDYGVSEYRTVQRGKYPAVHCETEDNVFSLNLGQLDFGTTYLFVITNITNRGLQAWKAEDIPANKLSIAWQLPQYVLVTAAEVMFSVTGLEFSYSQAPSSMKSVLQAAWLLTVAVGNIIVLIVAQFSGLVQWAEFVLFSCLLLVVCLIFSVMGYYYVPLKSEGIHEATEKQIPHIQGNMINLETKNTRL

SEQ ID NO: 1806 - protein, 740 aa, Mus musculus
MLEERESKEPAMNPFQKNESKETLFSPVSTEEMLPGPPSPPKKSTPKLFGSSYPLSIAFIVVNEFCERFSYYGMKAVLTLYFLYFLHWNEDTSTSVYHAFSSLCYFTPILGAAIADSWLGKFKTIIYLSLVYVLGHVFKSLGAIPILGGKMLHTILSLVGLSLIALGTGGIKPCVAAFGGDQFEEEHAEARTRYFSVFYLSINAGSLISTFITPMLRGDVKCFGEDCYALAFGIPGLLMVLALVVFAMGSKMYRKPPPEGNIVAQVTKCIWFAICNRFRNRSEDIPKRQHWLDWAAEKYPKHLIMDVKALTRILFLYIPLPMFWALLDQQGSRWTLQANKMDGDLGFFVLQPDQMQVLNPFLVLVFIPLFDLVIYRLISKCGVNFSSLRKMAVGMILACLAFAVAALVEIKINGMIHPQPASQEIFLQVLNLADGEIEVTVQGNRNNPLLVESISSFQNTTHYSKLRLETKSQDLHFHLKYNNLSVHNEYSVEEKNCYQLVVHENGESLSSMLVKDTGIKPANGMTAIRFINTLHKDMNISLDANAPLSVGKDYGVSEYRTVQRGKYPAVHCETEDNVFSLNLGQLDFGTTYLFVITNITNRGLQAWKAEDIPANKLSIAWQLPQYVLVTAAEVMFSVTGLEFSYSQAPSSMKSVLQAAWLLTVAVGNIIVLIVAQFSGLVQWAEFVLFSCLLLVVCLIFSVMGYYYVPLKSEGIHEATEKQIPHIQGNMINLETKNTRL

SEQ ID NO: 1807 - protein, 709 aa, Mus musculus
MGMSKSRGCFGYPLSIFFIVVNEFCERFSYYGMRALLVLYFRNFLGWDDNLSTAIYHTFVALCYLTPILGALIADSWLGKFKTIVSLSIVYTIGQAVISVSSINDLTDHDHNGSPDSLPVHVALSMVGLALIALGTGGIKPCVSAFGGDQFEEGQEKQRNRFFSIFYLAINGGSLLSTIITPILRVQQCGIHSQQACYPLAFGVPAALMAVALIVFVLGSGMYKKFQPQGNIMGKVAKCIGFAIKNRFRHRSKAYPKREHWLDWAKEKYDERLISQIKMVTKVMFLFIPLPMFWGLFDQQGSRWTLQATTMNGKIGANEIQPDQMQTVNAILNVNNGPNVDAVVYRSIAKCGFNFTSLKKMTVGMFLASMAFVVAAIVQVEIDKTLPVFPGGNQVQIKVLNIGNNNMTVHFPGNSVTLAQMSQTDTFMTFDIDKLTSINISSSGSPGVTTVAHDFEQGHRHNLLVWEPSQYRVVKDGPNQKPEKGENGIRFVNTLNEMVTNKMSGKVYEKFTSHNASGYKFLPSGEKQYTINTTAVAPTCLTDFKSSNLDFGSAYTYVIRRASDGCLEVKEFEDIPPNTVNMALQIPQYFLLTCGEVVFSVTGLEFSYSQAPSNMKSVLQAGWLLTVAVGNIIVLIVAGAGHFPKQWAEYILFASLLLVVCVIFAIMARFYTYINPAEIEAQFDEDEKKKGIGKENPYSSLEPVSQTNM

SEQ ID NO: 1808 - protein, 701 aa, Mus musculus
MSKSRGCFGYPLSIFFIVVNEFCERFSYYGMRALLVLYFRNFLGWDDNLSTAIYHTFVALCYLTPILGALIADSWLGKFKTIVSLSIVYTIGQAVISVSSINDLTDHDHNGSPDSLPVHVALSMVGLALIALGTGGIKPCVSAFGGDQFEEGQEKQRNRFFSIFYLAINGGSLLSTIITPILRVQQCGIHSQQACYPLAFGVPAALMAVALIVFVLGSGMYKKFQPQGNIMGKVAKCIGFAIKNRFRHRSKAYPKREHWLDWAKEKYDERLISQIKMVTKVMFLYIPLPMFWGSRWTLQATTMNGKIGAIEIQPDQMQTVNAILIVIMVPIVDAVVYPLIAKCGFNFTSLKKMTVGMFLASMAFVVAAPVQVEIGKTLPVFPGGNQVQIKVLNIGNNNMTVHFPGNSVTLAQMSQTDTFMTFDIDKLTSINISSSGSPGVTTVAHDFEQGHRHTLLVWNPSQYRVVKDGPNQKPEKGENGIRFVNTLNEMVTIKMSGKVYENVTSHNASGYQFFPSGEKQYTINTTAVAPTCLTDFKSSNLDFGSAYTYVIRRASDGCLEVKEFEDIPPNTVNMALQIPQYFLLTCGEVVFSVTGLEFSYSQAPSNMKSVLQAGWLLTVAVGNIIVLIVAGAGHFPKQWAEYILFASLLLVVCVIFAIMARFYTYINPAEIEAQFDEDEKKKGIGKENPYSSLEPVSQTNM

SEQ ID NO: 1809 - protein, 259 aa, Mus musculus
MLRERESKEPAMNPFQKNESKETLFSPVSTEEMLPGPPSPPKKSTPKLFGSSYPLSIAFIVVNEFCERFSYYGMKAVLTLYFLYFLHWNEDTSTSVYHAFSSLCYFTPILGAAIADSWLGKFKTIIYLSLVYVLGHVFKSLGAIPILGGKMLHTILSLVGLSLIALGTGGIKPCVAAFGGDQFEEEHAEARTRYFSVFYLSINAGSLISTFITPMLRGDVKRFGEDCYALAFGIPGLLMVLALGEWSGKGCEQPLIPAT

SEQ ID NO: 1810 - protein, 259 aa, Mus musculus
MLEERESKEPAMNPFQKNESKETLFSPVSTEEMLPGPPSPPKKSTPKLFGSSYPLSIAFIVVNEFCERFSYYGMKAVLTLYFLYFLHWNEDTSTSVYHAFSSLCYFTPILGAAIADSWLGKFKTIIYLSLVYVLGHVFKSLGAIPILGGKMLHTILSLVGLSLIALGTGGIKPCVAAFGGDQFEEEHAEARTRYFSVFYLSINAGSLISTFITPMLRGDVKCFGEDCYALAFGIPGLLMVLALGEWSGKGCEQPLIPAT

SEQ ID NO: 1811 - protein, 248 aa, Mus musculus
MNPFQKNESKETLFSPVSTEEMLPGPPSPPKKSTPKLFGSSYPLSIAFIVVNEFCERFSYYGMKAVLTLYFLYFLHWNEDTSTSVYHAFSSLCYFTPILGAAIADSWLGKFKTIIYLSLVYVLGHVFKSLGAIPILGGKMLHTILSLVGLSLIALGTGGIKPCVAAFGGDQFEEEHAEARTRYFSVFYLSINAGSLISTFITPMLRGDVKCFGEDCYALAFGIPGLLMVLALGEWSGKGCEQPLIPAT

SEQ ID NO: 1812 - protein, 582 aa, Rattus norvegicus
MSALRAEQQPSRSGERQPLVAQGRWGPRRWRRTAAAAVLLVEMLERAAFFGVTSNLVLYLNSLNFNWDGEHASRATLLFLGASYLLAPVGGWLADVYLGRFLAISLSLLLYLAATGLLLTTITDDGRRSFCGEMPELPLKPACPSANCQGSWSSPYCATTLYLVLLLLALAASSVRSNLTSFGADQVMDLGRDATRRFFNWFYWSINLGAILSLLVVAFIEQNISFLQGYSIIVGLVGLAFFIFLIATPVFITKPPTGSQVSSMLNLAFQNCCPGWQWWRRPSSRNSEGAHLLPDQRSNQPGPSPQEDMANFQVLLKVLPVMVTLVPYWMVYFQMQSTYVLQGLHLHIPNIFRTNPNISLPLRSDSSNYRIPEAWLLLANVAVILILVPVKDHLIDPLLLRCKLLPSALQKMALGMFFGFTSIIVAGVLEKERLQYIAANQTVPQLIGKDLYYAAPLSIWWQIPQYLLIGISEIFASIPGLEFAYSEAPRSMQGAIMGIFFCLSGVGSLLGSGLVALLSLPGGWMYCPKDFGNINNCRMDLYFFLLAGIQAVTAVLFLWIAGRYERTRQDPDSQNSTSRVRG

SEQ ID NO: 1813 - protein, 572 aa, Rattus norvegicus
MEGERAPLLGSRRAAAAAGVFAGRRAACGAVLLAELLERAAFYGVTANLVLFLNGAPFNWEGAQASQALLLFMGLTYLGSPFGGWLADARLGRARAILLSLALYLLGMLAFPLLAAPRSRSFLCGDPHPELVRNCSAPFPNGTAVCPDAAARRCAPATFAGLVLVGLGVATVKANITPFGADQVKDRGPEATRRFFNWFYWSINLGAILSLGGIAYIQQNVSFLTGYLIPTVCVAIAFLVFLCGQSVFITKPPDGSAFTDMFRILTYSCCSQRGGQRRSGEGLGVFQQSSKHSLFDSCKMSRGGPFTEDKVEDVKALVKIVPVFLALIPYWTVYFQMQTTYVLQSLHLKIPEISSITTTHHTLPAAWLTMFDAVLILLLIPLKDKLVDPVLRRHGLLPSSLKRIAVGMFFVTCSAFAAGILESKRLDLVKEKTINQTIGGVVYHAADLPIWWQIPQYVLIGISEIFASIAGLEFAYSAAPKSMQSAIMGLFFFFSGIGSFVGSGLLALVSLKAIGWMSSHTDFGNINSCHLHYYFFLLAAIQGATLLLFLIVSVKYDRQRARTDGGTASTRT

SEQ ID NO: 1814 - protein, 710 aa, Rattus norvegicus
MGMSKSRGCFGYPLSIFFIVVNEFCERFSYYGMRALLVLYFRNFLGWDDDLSTAIYHTFVALCYLTPILGALIADSWLGKFKTIVSLSIVYTIGQAVISVSSINDLTDHDHDGSPNNLPLHVALSMIGLALIALGTGGIKPCVSAFGGDQFEEGQEKQRNRFFSIFYLAINAGSLLSTIITPILRVQQCGIHSQQACYPLAFGVPAALMAVALIVFVLGSGMYKKFQPQGNIMGKVAKCIGFAIKNRFRHRSKAFPKREHWLDWAKEKYDERLISQIKMVTKVMFLYIPLPMFWALFDQQGSRWTLQATTMTGKIGTIEIQPDQMQTVNAILIVIMVPIVDAVVYPLIAKCGFNFTSLKKMTVGMFLASMAFVVAAIVQVEIDKTLPVFPSGNQVQIKVLNIGNNDMAVYFPGKNVTVAQMSQTDTFMTFDVDQLTSINVSSPGSPGVTTVAHEFEPGHRHTLLVWGPNLYRVVKDGLNQKPEKGENGIRFVSTLNEMITIKMSGKVYENVTSHSASNYQFFPSGQKDYTINTTEIAPNCSSDFKSSNLDFGSAYTYVIRSRASDGCLEVKEFEDIPPNTVNMALQIPQYFLLTCGEVVFSVTGLEFSYSQAPSNMKSVLQAGWLLTVAIGNIIVLIVAEAGHFDKQWAEYVLFASLLLVVCIIFAIMARFYTYINPAEIEAQFDEDEKKKGVGKENPYSSLEPVSQTNM

SEQ ID NO: 1815 - protein, 710 aa, Rattus norvegicus
MGMSKSRGCFGYPLSIFFIVVNEFCERFSYYGMRALLVLYFRNFLGWDDDLSTAIYHTFVALCYLTPILGALIADSWLGKFKTIVSLSIVYTIGQAVISVSSINDLTDHDHDGSPNNLPLHVALSMIGLALIALGTGGIKPCVSAFGGDQFEEGQEKQRNRFFSIFYLAINAGSLLSTIITPILRVQQCGIHSQQACYPLAFGVPAALMAVALIVFVLGSGMYKKFQPQGNIMGKVAKCIRFAIKNRFRHRSKAFPKRNHWLDWAKEKYDERLISQIKIMTKVMFLYIPLPMFWALFDQQGSRWTLQATTMTGKIGTIEIQPDQMQTVNAILIVIMVPIVDAVVYPLIAKCGFNFTSLKKMTVGMFLASMAFVVAAIVQVEIDKTLPVFPSGNQVQIKVLNIGNNDMAVYFPGKNVTVAQMSQTDTFMTFDVDQLTSINVSSPGSPGVTTVAHEFEPGHRHTLLVWGPNLYRVVKDGLNQKPEKGENGIRFVSTLNEMITIKMSGKVYENVTSHSASNYQFFPSGQKDYTINTTEIAPNCSSDFKSSNLDFGSAYTYVIRSRASDGCLEVKEFEDIPPNTVNMALQIPQYFLLTCGEVVFSVTGLEFSYSQAPSNMKSVLQAGWLLTVAIGNIIVLIVAEAGHFDKQWAEYVLFASLLLVVCIIFAIMARFYTYINPAEIEAQFDEDEKKKGVGKENPYSSLEPVSQTNM

SEQ ID NO: 1816 - protein, 729 aa, Rattus norvegicus
MNPFQKNESKETLFSPVSTEEMLPRPPSPPKKSPPKIFGSSYPVSIAFIVVNEFCERFSYYGMKAVLTLYFLYFLHWNEDTSTSVYHAFSSLCYFTPILGAAIADSWLGKFKTIIYLSLVYVLGHVFKSLGAIPILGGKMLHTILSLVGLSLIALGTGGIKPCVAAFGGDQFEEEHAEARTRYFSVFYLAINAGSLISTFITPMLRGDVKCFGQDCYALAFGVPGLLMVLALVVFAMGSKMYRKPPPEGNIVAQVIKCIWFALCNRFRNRSGDLPKRQHWLDWAAEKYPKHLIADVKALTRVLFLYIPLPMFWALLDQQGSRWTLQANKMNGDLGFFVLQPDQMQVLNPFLVLIFIPLFDLVIYRLISKCRINFSSLRKMAVGMILACLAFAVAALVETKINGMIHPQPASQEIFLQVLNLADGDVKVTVLGSRNNSLLVESVSSFQNTTHYSKLHLEAKSQDLHFHLKYNSLSVHNDHSVEEKNCYQLLIHQDGESISSMLVKDTGIKPANGMAAIRFINTLHKDLNISLDTDAPLSVGKDYGVSAYRTVLRGKYPAVHCETEDKVFSLDLGQLDFGTTYLFVITNITSQGLQAWKAEDIPVNKLSIAWQLPQYVLVTAAEVMFSVTGLEFSYSQAPSSMKSVLQAAWLLTVAVGNIIVLVVAQFSGLAQWAEFVLFSCLLLVVCLIFSVMAYYYVPLKSEDTREATDKQIPAVQGNMINLETKNTRL

SEQ ID NO: 1817 - protein, 453 aa, Rattus norvegicus
  unsure (1)..(453): unsure at all Xaa locations
XEFCERFSYYGMRALLVLYFRNFLGWDDDLSTAIYHTSVALRYLTPILGALIADSWLGKFKTIVSLSIVYTIGQAVISVSSINDLTDHDHDGSPNNLPLHVALSMIGLGLIGLGTGGIKPCVSAFGGDQFGEGQEKQGNPVFSIFYLAINAGSLLSTIITPILRVQQCGIHSQQACYPLAFGVPAALMAVALIVFVLGSGMYKKFQPQGNIMGKVAKCIGFAIKNRFRHRSKAFPKREHWLDWAKEKYDERLISQIKMVTKVMFLYIPLPMSWALFDQQGSRWTLQATTMTGKIGTIEIQPDQMQTVNAILIVIMVPIVDAVVYPLIAKCGFNYTSLKKMTVGMFLASMAFVVAAIVQVEIDKTLPVFPSGNQVQIKVLNIGNNDMAVYFPGKNVTVAQMSQTDTFMTFDVDQLTSINVSSPGSPGVTTVAHEFEPGHRHTLLVWGPNNYRVV

SEQ ID NO: 1818 - protein, 439 aa, Rattus norvegicus
YYGMRALLVLYFRNFLGWDDDLSTAIYHTSVALRYLTPILGALIADSWLGKFKTIVSLSIVYTIGQAVISVSSINDLTDHDHDGSPNNLPLHVALSMIGLGLIGLGTGGIKPCVSAFGGDQFGEGQEKQGNPVFSIFYLAINAGSLLSTIITPILRVQQCGIHSQQACYPLAFGVPAALMAVALIVFVLGSGMYKKFQPQGNIMGKVAKCIGFAIKNRFRHRSKAFPKREHWLDWAKEKYDERLISQIKMVTKVMFLYIPLPMSWALFDQQGSRWTLQATTMTGKIGTIEIQPDQMQTVNAILIVIMVPIVDAVVYPLLIAKCGFNYTSLKKMTVGMFLASMAFVVAAIVQVEIDKTLPVFPSGNQVQIKVLNIGNNDMAVYFPGKNVTVAQMSQTDTFMTFDVDQLTSINVSSPGSPGVTTVAHEFEPGHRHTLLVWG

SEQ ID NO: 1819 - protein, 197 aa, Rattus norvegicus
MSALRAEQQPSRSGERQPLVAQGRWGPRRWRRTAAAAVLLVEMLERAAFFGVTSNLVLYLNSLNFNWDGEHASRATLLFLGASYLLAPVGGWLADVYLGRFLAISLSLLLYLAATGLLLTTITDDGRRSFCGEMPELPLKPACPSANCQGSWSSPYCATTLYLVLLLLALAASSVRSNLTSFGADQDSVDLDYPEAA

SEQ ID NO: 1820 - protein, 493 aa, Escherichia coli O157:H7 EDL933
  unsure (1)..(493): unsure at all Xaa locations
MNKHASQPRAIYYVVALQIWEYFSFYGMRALLILYLTNQLKYNDTHAYELFSAYCSLVYVTPILGGFLADKVLGNRMAVMLGALLMAIGHVVLGASEIHPSFLYLSLAIIVCGYGLFKSNVSCLLGELYEPTDPRRDGGFSLMYAAGNVGSIIAPIACGYAQEEYSWAMGFGLAAVGMIAGLVIFLCGNRHFTHTRGVNKKVLRATNFLLPNWGWLLVLLVATPALITVLFWKEWSVYALIVATIIGLGVLAKIYRKAENQKQRKELRLIVTLTFFSMLFWAFAQQGGSSISLYIDRFVNRDMFGYTVPTAMFQSINAFAVMLCGVFLAWVVKESVAGNRTVRIWGKFALGLGLMSAGFCILTLSARWSAMYGHSSLPXMVLGLAVMGFAELFIDPVAMSQITRIEIPGVTGVLTGIYMLLSGAIANYLAGVIADQTSQASFDASGAINYSINAYIEVFDQITWGALACVGVVLMIWLYQALKFRNRALALES

SEQ ID NO: 1821 - protein, 489 aa, Escherichia coli O157:H7 EDL933
MNTTTPMGMLQQPRPFFMIFFVELWERFGYYGVQGVLAVFFVKQLGFSQEQAFVTFGAFAALVYGLISIGGYVGDHLLGTKRTIVLGALVLAIGYFMTGMSLLKPDLIFIALGTIAVGNGLFKANPASLLSKCYPPKDPRLDGTFTLFYMSINIGSLIALSLAPVIADKFGYSVTYNLCGAGLIIALLVYIACRGMVKDIGSEPDFRPMSFSKLLYVLLGSVVMIFVCAWLMHNVEVANLVLIVLSIVVTIIFFRQAFKLDKTGRNKMFVAFVLMLEAVVFYILYAQMPTSLNFFAINNVHHEILGFSINPVSFQALNPFWVVLASPILAGIYTHLGNKGKDLSMPMKFTLGMFMCSLGFLTAAAAGMWFADAQGLTSPWFIVLVYLFQSLGELFISALGLAMIAALVPQHLMGFILGMWFLTQAAAFLLGGYVATFTAVPDNITDPLETLPVYTNVFGKIGLVTLGVAVVMLLMVPWLKRMIATPESH

SEQ ID NO: 1822 - protein, 731 aa, Anopheles gambiae str. PEST
AAGCSTMVSTRFEVNSTPPVRYPRSIFFIISNEFSERFNYYGMRTVLALYLTQKLAYSNDTATVIYHIFTSLAYFFPLMGAILADSWLGKFKTILYLSIVYCAGSTLIALGAIPPLNLPATSMTVLGLLFIAVGSGGIKPCVSAFGGDQFKLPEQAAQLAKFFSLFYFSINAGSLISTTLTPILREDVHCFGDNSCFSLAFGVPAVLMILAIVIFVCGGAMYTIKKPSGNMIVLVFKCIGNALAVRSKESSTSPRAHWLDYAESKYGKGIVADIKALLKILILYIPLPVFWALFDQQGSRWTFQATRMDGELAGYTIKPDQMQVINPLLILAFIPVFESVIYPALAKIGIRRPLQKLSLGGLLAGAAFVLSGFVEIALDSTEAMLPAAHEAQLRVFNGLPCDYRFHTDIPNLAGFSVPSRGAYEALHVELPPGLANGTFQFRAETSEIGCVRENMTEFSGSFSLQAGGAVSYFISRKGGRSSLLEYADTAAKDRNGLPRMRLLANVRTTKQISLRHNGNADVVYNVALNQYDQLTSVTEGEYGVYVGERPIATVKLSPGGVYTLILDEFLENEFNLQTHTITPSNSVHMLWLIPQYVVITAGEVMFSITGLEFSYSQAPESMKSVIQAFWLLTVAIGNMLVVFIAEAKFVQSQSLEFFLFAALMFLDMGLFMVLAMRYRYSDTTGGASSVESIEVEQQGKKKQHDPLAISDTLSERSAKSTTYANEAYRED

SEQ ID NO: 1823 - protein, 693 aa, Anopheles gambiae str. PEST
KLKYPRAIPFIISNEFCERFNYYGMRTVLVLYLTRKLDFDDDTATVLYHTFTTLVYFMCVIGAIIADSWLGKFRTILYLSIVYTIGSGCITLGAIPTWDLDARAMTIAGLLLIAFGSGGIKPCVAAFGGEQFKLPEQAKYLALFFSMFYFAVNSGSFVSTMVTPILREDVKCFDDDDCFPLAFGVPGVLMVISIIIFIIGKPLYKISAPAGNMFVKVSKCIWTAIRTRSREKSINPREHWLDYSEKRWGRQLVDETRILLNVLKLYIPLPVFWALFDQQGSRWTFQATRMDGDLGFWTIKPDQMQVINPLLILVFIPLYEVAFYPLLSLIGIRRPLQKLTLGGIFAGLAFVISTIVEIQLESTYAVMPKAGEAQLRIFNGMPCDYRIQSNIPEHADFTLKSMSMFEEKYLNVKGSATYTYTLSSTGPGPNCAVAEEQRTFVVDEEKQLSYFIRKQDSGISLLRYEDDTEKSSKGYPVFRVLGNTATNRTVVFRDIDSSDAFDRHKNGSYVYDRVESYPSDYEIYVDGELTLTYTMRLGGVYAFIVSDIDGMSTTPIIVTEPNSVNMLWLIPQYVVMTLGEVMYSITGLEFSFTQAPESMKSVLQGCWQLTVAVGNLIVVIVAEAKIFDEQKWEFVLFAVLMFVDMGLFSILAWRYKQIPLKNYDEEDDPNATLPIDQKEESGLDNPVFKKSDE

SEQ ID NO: 1824 - protein, 601 aa, Anopheles gambiae str. PEST
YPRSIFFIISNEFSERFNYYGMRTVLALYLTQKLAYSNDTATVIYHIFTSLAYFFPLMGAILADSWLGKFKTILYLSIVYCAGSTLIALGAIPPLNLPATSMTVLGLLFIAVGSGGIKPCVSAFGGDQFKLPEQAAQLAKFFSLFYFSINAGSLISTTLTPILREDVHCFGDNSCFSLAFGVPAVLMILAIVIFVCGRTMYTIKKPSGNMIESSTSPRAHWLDYAESKYGKGIVADIKALLKILILYIPLPVFWALFDQQGSRWTFQATRMDGELAGYTIKPDQMQVINPLLILAFIPVFESVIYPALSKIGIRRPLQKLSLGGLLAGAAFVLSGFVEIALDSTEAMLPAAHEAQLRVLQAGGAVSYFISRKGGRSSLLEYADTAAKDRNGLPRMRLLANVRTTKQISLRHNGNADVVYNVALNQYDQLTSVTEGEYGVYVGERPIATVKLSPGGVYTLILDEFLENEFVSNEYIKSIHLDQQSNSDPFPTPSRFNLQTHTITPSNSVHMLWLIPQYVVITAGEVMFSITGLEFSYSQAPESMKSVIQAFWLLTVAIGNMLVVFIAEAKFVQSQSLEFFLFAALMFLDMGLFMVLAMRYRY

SEQ ID NO: 1825 - protein, 537 aa, Xanthomonas axonopodis pv. citri str. 306
MGAGTIGPVFSMTGLPLTTSISPGASAGARLPLQIPFIIGNEACERFSFYGMRNILVQFLITSLLLQEISGPGREAEAKHILHSFMIGVYFFPLLGGWLADRFSGKYNTILWFSLVYCAGHACLALFEGSRDGFFLGLGLIALGAGGIKPLVASFMGDQFDQSNKHLAKVVFDAFYWIINFGSLFASLLIPLALKNLSPAWAFGIPGILMFVATLVFWLGRKRYVLVPLPPKDPHGFAAVVRTALLTHAPGQGRPGLLLAVVSVLLALAGFALIEPLGIVVCLCIALVLLLAGIGGGTWWQLERARGTHPDVAVEGVRALLRVLVIFALVMPFFSLFDQKASTWVLQGREMTMPAWFTASQMQALNPLLVMLLIPFNNLVLYPLLRRGGWEPTPLRRMTSGIAFSGVAWIAVGAIQMIMDGGEPMHIAWQILPYALLTFGEVLVSATGIEFAYSQAPPSMKGVVMSFWYLTTTVGNLWVLLSNVAVRNATVTAHIADTGLSEAAFLMFFFAAFAFLAALAFGLYARRYRMVDNYRTA

SEQ ID NO: 1826 - protein, 493 aa, Shigella flexneri 2a str. 301
MNKHASQPRAIYYVVALQIWEYFSFYGMRALLILYLTNQLKYNDTHAYELFSAYCSLVYVTPILGGFLADKVLGNRMAVMLGALLMAIGHVVLGASEIHPSFLYLSLAIIVCGYGLFKSNVSCLLGELYEPTDPRRDGGFSLMYAAGNVGSIIAPIACGYAQEEYSWAMGFGLAAVGMIAGLVIFLCGNRHFTHTRGVNKKVLRATNFLLPNWGWLLVLLVATPALITVLFWKEWSVYALIVATIIGLGVLAKIYRKAENQKQRKELGLIVTLTFFSMLFWAFAQQGGSSISLYIDRFVNRDMFGYTVPTAMFQSINAFAVMLCGVFLAWVVKESVAGNRTVRIWGKFALGLGLMSAGFCILTLSARWSAMYGHSSLPLMVLGLAVMGFAELFIDPVAMSQITRIEIPGVTGVLTGIYMLLSGAIANYLAGVIADQTSQASFDASGAINYSINAYIEVFDQITWGALACVGLVLMIWLYQALKFRNRALALES

SEQ ID NO: 1827 - protein, 493 aa, Escherichia coli CFT073
MNKHASQPRAIYYVVALQIWEYFSFYGMRALLILYLTNQLKYSDNHAYELFSAYCSLVYVTPILGGFLADKVLGNRMAVMLGALLMAIGHVVLGASEIHPSFLYLSLAIIVCGYGLFKSNVSCLLGELYEPTDPRRDGGFSLMYAAGNVGSIIAPIACGFAQEEYSWAMGFGLAAVGMIAGLVIFLCGNRHFTHTRGVNKKVLRATNFLLPNWGWLLVLLVATPALITVLFWKEWSVYALIVATIIGLGVLAKIYRKAENQKQRKELGLIVTLTFFSMLFWAFAQQGGSSISLYIDRFVNRDMFGYTVPTAMFQSINAFAVMLCGVFLAWVVKESVAGNRTVRIWGKFALGLGLMSAGFCILTLSARWSAMYGHSSLPLMVLGLAVMGFAELFIDPVAMSQITRIEIPGVTGVLTGIYMLLSGAIANYLAGVIADQTSQASFDASGAINYSINAYIEVFDQITWGALACVGLVLMIWLYQALKFRNRALALES

SEQ ID NO: 1828 - protein, 489 aa, Escherichia coli CFT073
MNTTTPMGMLQQPRPFFMIFFVELWERFGYYGVQGVLAVFFVKQLGFSQEQAFVTFGAFAALVYGLISIGGYVGDHLLGTKRTIVLGALVLAIGYFMTGMSLLKPDLIFIALGTIAVGNGLFKANPASLLSKCYPPKDPRLDGAFTLFYMSINIGSLIALSLAPVIADKFGYSVTYNLCGAGLIIALLVYIACRGMVKDIGSEPDFRPMSFSKLLYVLLGSVVMIFVCAWLMHNVEVANLVLIVLSIVVTIIFFRQAFKLDKTGRNKMFVAFVLMLEAVVFYILYAQMPTSLNFFAINNVHHEILGFSINPVSFQALNPFWVVLASPILAGIYTHLGNKGKDLSMPMKFTLGMFMCSLGFLTAAAAGMWFADAQGLTSPWFIVLVYLFQSLGELFISALGLAMIAALVPQHLMGFILGMWFLTQAAAFLLGGYVATFTAVPDNITDPLETLPVYTNVFGKIGLVTLGVAVVMLLMVPWLKRMIATPESH

SEQ ID NO: 1829 - protein, 516 aa, Shewanella oneidensis MR-1
MTTPVDAPKWPRQIPYIIASEACERFSFYGMRNILTPFLMTALLLSIPEELRGAVAKDVFHSFVIGVYFFPLLGGWIADRFFGKYNTILWLSLIYCVGHAFLAIFEHSVQGFYTGLFLIALGSGGIKPLVSSFMGDQFDQSNKSLAQKAFDMFYFTINFGSFFASLSMPLLLKNFGAAVAFGIPGVLMFVATVFFWLGRKRYIHMPPEPKDPHGFLPVIRSALLTKVEGKGNIGLVLALIGGVSAAYALVNIPTLGIVAGLCCAMVLVMGFVGAGASLQLERARKSHPDAAVDGVRSVLRILVLFALVTPFWSLFDQKASTWILQANDMVKPQWFEPAMMQALNPLLVMLLIPFNNFVLYPAIERMGVKLTALRKMGAGIAITGLSWIVVGTIQLMMDGGSALSIFWQILPYALLTFGEVLVSATGLEFAYSQAPKAMKGTIMSFWTLSVTVGNLWVLLANVSVKSPTVTEQIVQTGMSVTAFQMFFFAGFAILAAIVFALYARSYQMQDHYRQAT

SEQ ID NO: 1830 - protein, 574 aa, Lotus japonicus
MEGKGYTLDGTVDLAGRPVLSSLTGKQKACTYILVYRVLERFAYYGVGANLVNFMTTQLNKDVVSSITSFNNWSGLATLTPILGAYIADTYTGRFWTITFSLLIYAIGLVLLVLTTTLKSLRPACENGICREASNLQVALFYTSLYTIAVGSGAVKPNMSTFGADQFDDFRHEEKEQKVSFFNWWAFNGACGSLMATLFVVYIQEKNGWGLAYSLSAIGFLLSSIIFFWGSPVYRHKSRQARSPSMNFIRVPLVAFRNRKLQLPCNPSELHEFQLNYYISSGARKIHHTSHFSFLDRAAIRESNTDLSNPPCTVTQVEGTKLVLGMFQIWLLMLIPTNCWALESTIFVRQGTTMDRTLGPKFRLPAASLWCFIVLTTLICLPIYDHYFIPFMRRRTGNHRGIKLLQRVGIGMAIQVIAMAVTYAVETQRMSVIKKHHIAGPEETVPMSIFWLLPQNIILGVSFAFLATGMLEFFYDQSPEEMKGLGTTLCTSCVAAGSYINTFLVTMIDKLNWIGNNLNDSQSRITIMPFFSVISALNFGVFLWVSSGYIYKKENTSTTEVHDIEMSAEKTVKY

SEQ ID NO: 1831 - protein, 190 aa, Chionodraco hamatus
DSWLGRFKTIVYLSIVYMLGQVVMAISAIHDLTDANMDGTPDNMTLHVALSMVGLILIALGTGGIKPCVAAFGGDQFLDHQEKQRSTFFSIFYLSINAGSLLSTVITPILRAQECGINTKQSCYPLAFGVPAALMVVALVVFILGSRMYIKTPPQGNIMVKVCTCIGFAVKNRFRHRSSQYPKRAHWLDW

SEQ ID NO: 1832 - protein, 604 aa, Cucumis sativus
MEIESLRVSVDEKVLKDEEKNEKEEMKMKMKMKRKLGGVKTMPFILGNEVCDRFASSGFHSNIITYLTQDLNMPLVPASNILTNFAATSSFTSLIGALIADSFAGRFWTITIASIIYELGMVTITISAILPSLHPPPCPTQINCTQASGTQLMILYLALLLTSLGAGGIRPCVVAFAADQFDMTKVGIAGRTWNFFNWYYFCMGMATLTALTVVVYIQDNVGWGWGFGLPTIAMALSVVAFVVGSPLYNKLKPSGSPLVRLAQVVVAAFKNRKAVLPDDSKLLYRNHELDAAIAIQGRLVHTDQFKWLDKAAVITSPDSTANPPNLWRLATVHRVEELKSIIRMLPIWAAGILLVTASSHQHSFTIQQARTMNRHLTPTFQIPPATLSIFGILSMLTGLVLYDRLLVPFAKKLTHNPSGITCLQRMGVGFAINILATLVSSIVEIKRKKVAANHGLLDNPTATIPFSVFWLVPQFWLHGIAEVFMSVGHLEFMYDQSPESLRSTATALYWLAISVGNYIGTLMVYLVHKYTGEEHNWLPDRNLNRGRLEYYYWLVSGIQVMNLVYYVICAWFYTYKPLEEEKINIENKDGDQEWERCEDTIKIA

SEQ ID NO: 1833 - protein, 484 aa, Cucumis sativus
MVTITISAILPSLHPPPCPTQINCTQASGTQLMILYLALLLTSLGAGGIRPCVVAFAADQFDMTKVGIAGRTWNFFNWYYFCMGMATLTALTVVVYIQDNVGWGWGFGLPTIAMALSVVAFVVGSPLYNKLKPSGSPLVRLAQVVVAAFKNRKAVLPDDSKLLYRNHELDAAIAIQGRLVHTDQFKWLDKAAVITSPDSTANPPNLWRLATVHRVEELKSIIRMLPIWAAGILLVTASSHQHSFTIQQARTMNRHLTPTFQIPPATLSIFGILSMLTGLVLYDRLLVPFAKKLTHNPSGITCLQRMGVGFAINILATLVSSIVEIKRKKVAANHGLLDNPTATIPFSVFWLVPQFWLHGIAEVFMSVGHLEFMYDQSPESLRSTATALYWLAISVGNYIGTLMVYLVHKYTGEEHNWLPDRNLNRGRLEYYYWLVSGIQVMNLVYYVICAWFYTYKPLEEEKINIENKDGDQEWERCEDTIKIA

SEQ ID NO: 1834 - protein, 589 aa, Brassica napus
MSLPETKTQTLLDAWDFQGRPADRSKTGGWASAAMILCIEAVERLTTLGIGVNLVTYLTGTMHLGNATAANTVTNFLGTSFMLCLLGGFIADTFLGRYLTIAIFAAIQATGVSILTLSTIIPGLRPPRCDPTTSSHCVQANGIQLTVLYLALYLTALGTGGVKASVSGFGSDQFDDTEPKERSQMTYFFNRFFFCINVGSLMAVTVLVYIQDDVGRKWGYGICALAIVLSLSIFLAGTNRYRFKKLIGSPMTQVGTVLVAAWRNRRLELPSDPSFLYDLDDVIAAEGSMKSKQKLPHTNQFRSLDKAAIKDQEMAMTQNVYNKWTLSTVTDIEEVKQIVRMLPIWATCILFWTVHAQLTTLSVAQSETMDRHIGSFEIPPAAMAVFYIGGLLLTTAVYDRLAIPLCKKLFNYPHGLRPLQRIGLGLLLAAMGMAVAALVEIKRLRTAHAHGPTVKTLPLGFSLLIPQYLIVGIGEALIYTGQLDFFLRECPKGMKTMSTGLLLSTLALGFFFSSVLVTIVEKVTDKAHPWIADDLNKGRLYNFYWLVAVIVALNFLVFLVFSKWYVYKEKRLADLGIELEDEPDIPMGH

SEQ ID NO: 1835 - protein, 588 aa, Brassica napus
MSLPETKSQTLLDAWDFQGRPADRSKTGGWASAAMILCIEAVERLTTLGIGVNLVTYLTGTMHLGNATAANTVTNFLGTSFMLCLLGGFIAHTFLGRYLTIAIFAAIQATGVSILTLSTIIPGFQPPRCPTTSSHCVQPSGIQLTVLYLALYLTALGTGGVKASVSGFGSDQFDETEPKEQSQMTYFFNRFFFCINVGSLLAVTVLVYMQDDVGRKWGYGLCALAIVLSLSIFLAGTNRYRFKKLIGSPMTQVAAVIVAAWWNRRLELPSDPSFLYDLDDVIAAEGSMKSKQKLPHTNQFRSLDKAAIKDQEMAMTQNVYNKWTLSTVTDIEEVKQIVRMLPIWATCILFWTVHAQLTTLSVAQSETMDRHIGSFEIPPAAMAVFYIGGLLLTTAVYDRLAIPLCKKLFNYPHGLRPLQRIGLGLLLAAMGMAVAALVEIKRLRTAHAHGPTVKTLPLGFSLLIPQYLIVGIGEALIYTGQLDFFLRECPKGMKTMSTGLLLSTLALGFFFSSVLVTIVEKVTDKAHPWIADDLNKGRLYNFYWLVAVIVALNFLVFLVFSKWYVYKEKRLADLGIELEDEPDIPMGH

SEQ ID NO: 1836 - protein, 559 aa, Prunus dulcis
  unsure (1)..(559): unsure at all Xaa locations
MGSLEEERSLLEDGLIQDETNGLYTGDGSVDITGKPVLKQSTGNWXACPFILGTECCERLAFYGISTNLVTYLTHKLHEGNVSAARNVTTWSGTCYLTPLIGAVLADAYWGRYWTIAIFSTIYFIGMCTLTISASVPALKPPQCVDSVCPSASPAQYGVFFFGLYLIALRTGGIKPCVSSFGADQFDDTDSRERVKKGSFFNWFYFSINIGALVSSTLIVWVQDNAGWGLGFGIPALFMGIAIVSFFSGTPLYRFQKPGGSPLTRMCQVLVASFRKWNLDVPRDSSLLYETQDKGSAIKGSRKLEHSDELNCLDKAAVISETETKTGDFSNPWRICTVTQVEELKILIRMFPIWATGIVFSAVYAQMATMFVEQGMMMDTSVGSFTIPPASLSSFDVISVIFWVPIYDRFIVPIARKFTGKERGFSELQRMGIGLFLSVLCMSAAAVVEMKRLQLATELGLVDKEVAVPLSIFWQIPQYFLLGAAEIFTFIGQLEFFYDQSSDAMRSLCSALSASDDFIGKLSELFDSDIVTYFTTQGGKAGWIPDNLNDGHLDYFSGS

SEQ ID NO: 1837 - protein, 201 aa, Cicer arietinum
AILITLAVNDRIIMPLWKKMKGKPGFTNLQRIAIGLLLSTFGMAAASLCEVKRLSVAKSVKGNQATIPISVFLLIPQFFLVGSGEAFIYTGQLDFFITQSPKGMKTMSTGLFLTTLSLGFFISSFLVSVVKKVTGTRDGQGWLADNINKGRLDLFFALLTILSFINFVAFLVCAFWYKPKKAKPSMQMGAINNGSSVEEKC

SEQ ID NO: 1838 - protein, 586 aa, Glycine max
  unsure (1)..(586): unsure at all Xaa locations
MKEKMSWTVADAVDYKGFPADRSKTGGWVPAALILGIEIVERLSTMGIAVNLVTYMISIMHLPSSTAANTVTDFMGTSFLLCLLGGFLADSFLGRYKTIGIFASIQTLGTATLAISTKLPGLRPPPCHANSDSCKQANGFQMGILYLSLYLIALGTGGLKSSVSGFGSDQFDEKDEKEKSQMAYFFNRFFFFISFGTLAAVTVLVYLQDEVSRSLAYGICSVSMIIAIIVFLSGTKRYRYKRSLGSPIVHIFQVIAASIKKRKMQLPYNVGSLYEDTPEASRIEHTEQFRFLEKAAIVAEDDFETNLCGSGPNPWKLCSLTRVEEVKMMVRLLPVWATTIIFWTIYAQLITFSVEQASTMERNIGSFQIPAGSVTVFFXVAAILITLAVYDRLIMPLWKKWNGKPGFTDLQRIAIGLVFSIFGMAAASVCERKRLSVAKSVSGGNQATTTLPISVFLLIPQFFLVGSGEAFIYTGQLDFFITRSPKGMKTMSTGLFLTTLSLGFFFSSFLVSVVKKVTGTRDGQGWLADSINKGRLDLFYALLTILSFVNFAAFAVCAVWFKPKKPKQPAAMQMGPVNGSTAEEKC

SEQ ID NO: 1839 - protein, 123 aa, Narcissus pseudonarcissus
QPMSVFWLVPQFFLVGAGEAFCYIGQLDFFLRECPKGMKTMSTGMFLSTLSLGFFLSSALVTIVHKVTGESGQGAWLPDDLNRGKLYDFYWLLAVLSAVNLVAFLVSARWYVYKENRMATDDG

SEQ ID NO: 1840 - protein, 594 aa, Oryza sativa (japonica cultivar-group)
MVLPETAAEGKALTDAWDYKGRPAGRAATGGWGCAAMILGAELFERMTTLGIAVNLVPYMTGTMHLGNAAAANTVTNFIGTSFMLCLLGGFVADTYLGRYLTIAIFEAVQATGVMILTISTAAPGLRPPACGDPKGASAECVAADGTQLGVLYLGLYLTALGTGGLKSSVSGFGSDQFDESDVDGERKKMMRFFNWFYFFVSLGALLAVTVLVYVQDNVGRRWGYGICAAGILAGLAVFLSGTRRYRFKKLVGSPLTQVAAVTAAAWSKRSLPLPSDPDMLYDVDDAAAAGHDVKGKQRMPHSKECRFLDHAAIIDRSAAESPATASKWRLCTRTDVEEVKQVVRMLPIWATTIMFWTIHAQMTTFAVAQAELMDRRLAGGFLIPAGSLTVFLIASILLTVPFYDRLVVPVARRATANPHGLTPLQRVFVGLSLSIAGMAVAAAVERHRATASASAAAAAPTVFLLMPQFLLVGAGEAFTYMGQLDFFLRECPKGMKTMSTGLFLSTCAIGFFFSTLLVTIVHKVTGHGARGGGWLADNLDDGRLDYFYWLLAVISAINLVLFTVAARGYVYKEKRLADAGIELADEETIAVGH

SEQ ID NO: 1841 - protein, 594 aa, Nicotiana plumbaginifolia
MALPETQQDSKALPDAWDYKGRPALRSSSGGWASGAMILGVEAVERLTTLGIAVNLVTYLTGTMHLGNATAANNVTNFLGTSFMLTLLGGFVADTFLGRYLTIGIFATVQAMGVTILTISTIIPSLRPPKCEQVGSSSCIPANSKQLMVLYIALYMTALGTGGLKSSVSGFGTDQFDDGDKKEKGQMIKFFDWFFFFINVGSLGAVTVLVYIQDNLGREWGYGICACAIVIGLVVFLSGTRKYRFKKLVGSPLTQIASVIVAAWKKTHLELPSNSSLLFEIDNIFGEGNKKSKQKLPHSKEYRFLDKAAIKEDNDLESNGTKVVINKWKLATLTDVEEVKLLIRMLPTWATTIMFWTVYAQMTTFSVSKATTMDRHIGTFEIPPASLTVFFVGSILLTVIFYDRIIVPICRRFMNKPHGLTPLHRIFTGLVLSILAMIAAALTEVKRLKVAHLHGLTNDANATIPLTVFWLVPQFLLVGAGEAFTYIGQLDFFLRECPKGMKTMSTGLFLSTLALGFFVSSILVTIVHVVTGTKNPWLADNLNQGRLYDFYWLLAILSVFNLMFFLYSSRKYVYKEKRLAEMGIELEDDGPVCH

SEQ ID NO: 1842 - protein, 590 aa, Nicotiana plumbaginifolia
MALPETQQDTKTLPDAWDYKGRPAVRSSSGGWSSAAMILGIEAVERLTTLGIAVNLVTYLTGTMHLGNASSANNVTNFLGTSFMLTLLGGFVADTFLGRYLTIGIFTTIQAMGVTILTISTIIPSLRPPKCSPGSSTCIPASSKQLMVLYIALYMTALGTGGLKSSVSGFGSDQFDETDKKERGQMIKFFNWFFFFINVGSLGAVTVLVYIQDNLGREYGYGICACAIVIGLVIFLSGTRKYRFKKLVGSPLTQIASVFVAAWNKRHMDLPSDSTLLYNIDDIPGDGNKKAKQRLPHSKEFRFLDKAAIKVQDTESAGITVVNKWNLSTLTDVEEVKLVVRMLPTWATTIMFWTVYAQMTTFSVSQATTMDRHIGNFEIPPASLTLFFVGSILLTCIFYDRAVVPVCRRVLNNPHGTTPLQRIAVGLILSIIAMVAAALTEVKRLNVAHLHGLTNDANAKVPLSVFWLVPQFLLVGAGEAFTYIGQLDFFLRECPKGMKTMSTGLFLSTLSLGFFVSSILVTIVHKVTVKNPWLADNLNQGRLYDFYWLLATLSVLNLMVFLFISRRYVYKEKRLAECGIEMEDSEPACH

SEQ ID NO: 1843 - protein, 594 aa, Nicotiana tabacum
MALPETQQDSKALPDAWDYKGRPALRSSSGGWASGAMILGVEAVERLTTLGIAVNLVTYLTGTMHLGNATAANNVTNFLGTSFMLTLFGGFVADTFLGRYLTIGIFATVQAMGVTILTISTIIPSLRPPKCEQVGSSSCIPANSKQLMVLYIALYMTALGTGGLKSSVSGFGTDQFDDADKKEKGQMIKFFDWFFFFINVGSLGAVTVLVYIQDNLGREWGYGICACAIVIGLVVFLSGTRKYRFKKLVGSPLTQIASVIVAAWKKRHLELLSDSSLLFEIDDIFGEGNKKNKQKLPHSKEYRFLDKAAIKEDHDLESNGTNVVINKWKLATLTDVEEVKLLIRMLPTWATTIMFWTVYAQMTTFSVSQATTMDRHIGTFEIPPASLTVFFVGSILLTVIFYDRVIVPICRRFMNKPHGLTPLQRIFTGLVLSILAMIAAALTEVKRLKVAHLHGLTNDANATIPLSVFWLVPQFLLVGAGEAFTYIGQLDFFLRECPKGMKTMSTGLFLSTLALGFFFSSILVTIVHVVTGTTNPWLADNLNQGRLYDFYWLLAILSVLNLMFFLYFSRKYVYKEKRLAEMGIELEDDGPVCH

SEQ ID NO: 1844 - protein, 594 aa, Nicotiana tabacum
MALPETQQDSKALPDAWDYKGRPALRSSSGGWASGAMILGVEAVERLTTLGIAVNLVTYLTGTMHLGNASSANNVTNFLGTSFMLTLLGGFVADTFLGRYLTIGIFATVQAMGVTILTISTIIPSLRPPKCEQVGSSSCIPANSKQLMVLYIALYMTALGTGGLKSSVSGFGTDQFDDSDKKEKGQMIKFFDWFFFFINVGSLGAVTVLVYIQDNLGREWGYGICACAIVIALVVFLFGTRKYRFKKLGGSPLTQIASVIVAAWKKRHLELPSDSSLLFEIDDIFGEGNKKSKQKLPHSKEYRFLDKAAIKEDDDLESNGTNVVINKWKLATLTDVEEVKILIRMLPTWATTIMFWTVYAQMTTFSVSQATTMDRHIGTFEIPPATLTVFFVGSILLTVIFYDRIIVPICRRFMNKPHGLTPLQRIFTGLVLSILAMIAAALTEVKRLKVAHLHGLTNDANATIPLTVFWLVPQFLLVGAGEAFTYIGQLDFFLRECPKGMKTMSTGLFLSTLALGFFFSSILVTIVHVVTGTTNPWLADNLNQGRLYDFYWLLAILSVFNLMFFLYSSRKYVYKEKRLAEMGIELEDDGPVCH

SEQ ID NO: 1845 - protein, 590 aa, Nicotiana tabacum
MALPETQQDTKTLPDAWDYKGRPAVRSSSGGWSSAAMILGIEAVERLTTLGIAVNLVTYLTGTMHLGNASSANNVTNFLGTSFMLTLLGGFVADTFLGRYLTIGIFTTIQAMGVTILTISTIIPSLRPPKCSPGSSTCIPASSKQLMVLYIALYMTALGTGGLKSSVSGFGSDQFDETDKKERGQMIKFFNWFFFFINVGSLGAVTVLVYIQDNLGREYGYGICACAIVIGLVIFLSGTRKYRFKKLVGSPLTQIASVFVAAWNKRHMELPSDSSLLYNIDDIPGDGNKKAKQRLPHSKEFRFLDKAAIKVQDPESAGITVVNKWNLSTLTDVEEVKLVVRMLPTWATTIMFWTVYAQMTTFSVSQATTMDRHIGNFEIPPASLTLFFVGSILLTCIFYDRAVVPVCRRVLNNPHGTSPLQRIAVGLILSIIAMIAAALTEVKRLNVAHLHGLTNDANAKVPLSVFWLVPQFLLVGAGEAFTYIGQLDFFLRECPKGMKTMSTGLFLSTLSLGFFFSSILVTIVHKVTGKNPWLADNLNQGRLYDFYWLLATLSVLNLMIFLFISRRYVYKEKRLAECGIEMEDSEPACH

SEQ ID NO: 1846 - protein, 590 aa, Nicotiana tabacum
MALPETQQDTKTLPDAWDYKGRPAVRSSSGGWSSAAMILGIEAVERLTTLGIAVNLVTYLTGTMHLGNASSANNVTNFLGTSFMLTLLGGFVADTFLGRYLTIGIFTTIQAMGVTILTISTIIPSLRPPKCSPGSSTCIPASSKQLMVLYIALYMTALGTGGLKSSVSGFGSDQFDETDKKERGQMIKFFNWFFFFINVGSLGAVTVLVYIQDNLGREYGYGICACAIVIGLVIFLSGTRKYRFKKLVGSPLTQIASVFVAAWNKRHMDLPSDSYLLYNIDDIPGDGNKKAKQRLPHSKEFRFLDKAAIKVQDPESAGITVVNKWNLSTLTDVEEVKLVVRMLPTWATTIMFWTVYAQMTTFSVSQATTMDRHIGNFEIPPASLTLFFVGSILLTCIFYDRAVVPVCRRVLNNPHGTTPLQRIAVGLILSIIAMVAAALTEVKRLNVAHLHGLTNDANAKVPLSVFWLVPQFLLVGAGEAFTYIGQLDFFLRECPKGMKTMSTGLFLSTLSLGFFFSSILVTIVHKVTVKNPWLADNLNQGRLYDFYWLLATLSVLNLMIFLFISRRYVYKEKRLAECGIEMEDSEPACH

SEQ ID NO: 1847 - protein, 297 aa, Nepenthes alata
DQFDDTDPREKIKKGSFFNWFYFSVNIGALISSSLIVWVQENLGWALGFGIPAISMGIAIASFFSGTALYRLQKPGGSPLTRMCQVLVASFRKSKLALPEDSNLLYETSDENSVIEGGRKLEHTNDLKCLDKAAVVSDKEIKCEDFSNPWRLCTVTQIEELKILIRMFPIWATGIVFSAIYAQMSTMFVEQGEVMDRTIGSFTIPAASLSMFDTISVIFWVPVYDKILVPLARKSTGKQRGFSELQRMGIGLFISILSMAAAALVEMKRLQLAKELGLVDEDVAVPLSIFWQIPPYF

SEQ ID NO: 1848 - protein, 582 aa, Dictyostelium discoideum
MAIEEESSNSGVSTSIDNLGSSIDGKGSSKGKQGDMEGIDNEVFVYGGDENHFPSSIKYIMGNEICERYSYYALRGILTNYLISFMGYSEKNASSIGHGFNAGAYIFSLVGAYVADGVLGKYKTILYFSILYCFGAAIFSITAIPGITGDSPGERSPWGLIVGLTCIAIGTGGIKPVVSSFCGDQFGPHQKKLLQNLFQVFYWCVNLGSFFSSILSPILRTNVGYWCAFVIPAGILIISILIYLVGNKQYVKRKPQGSVLSTAFCIVGTGISESVKKTFRGSKYNDHYYNNSFLDRAKLKYSPRIVEQVKLVLRVLTVFVPLPFFWALYDQTGTRWTIQANSMDRHLGSWEIDSEIINCINPLLVMIFVPIFEYGIYRPLERKKINFTLLRRMGTGMFLSVIAFYISAIIQVHIDNSPPESVHIALQIPQYVVLTAAEVLLSITGLEFAYANSPRSMKSLVIAGWLICVSIGNMFDAFVIELIELPEYVLSLLFGSVMFVFIFIFIIIAYRFKEIDQSVLDELNGDTPMTDDNANANSKELDVVTQKDLSSSSNPIINNNNNNNNSTLGNSIDYGYDHEKSN

SEQ ID NO: 1849 - protein, 748 aa, Dictyostelium discoideum
MGGIDEDGMINHLFDDIPEFANSSGNDSGGKSSIYSKNETNKNSESTIENTSENVGIELGNQLEKDEFQYGGDETHFPPSIKFILGNEIGERYSYFAMKSILNNYLIMFMGYNSKTAETIGHIFNASAYFFTLFGAYIADARLGKFKTILLFSVIYCFGAGIFSITAIPGVTGSGPGSRSPWGLILGLGGIAIGTGGIKPLISSFCGDQFGPHQKKLLTSLFQVFYWCVNLGSFFSSILSPILRTQVGYWIAFLIPSIILIISIVIFICGTKKFIKRKPQGSVFSTFLKIIICGIQEKIKYLKATDDEPYQDIYYQDSYLDRAKFKFSSQSVDQVKQVLRVLLVFTPLPFFWALYDQTGTRWTTQGNIMNRRIGSITMDTEIIGALNPLLILIFVPIFEYGLYRPIAKRGINFSPLRRMAAGMILSVIAFYIAAFVQLAIDNSPPNSVHIALQIPQYVVLTWGEILLSITGLEFAYANSPRSMKSIVMAGWLISVSIGNLFDAFVIGLIKASEFILYILFGSVMLVFIFIFVFIAYYFKPIDPSVLDALNGQAPTNIDELNSIEVDQQRLDNEIVQQQQQQEEQQQQKQQGKEQQQEKSIISSKNSSPRSLKSNSLNGSTKLRKSKGFKKGDYENNIDDIDIPTSSSMCRRNTSNNNSLNNSKGNEISTNSGEIVNNNISNDNNNNNNNNNNNNNNNNNNNNNNNNNNNNNNNNNNNNNNNNNNEELQEIDIDTSSQYTINSNKSNAK

SEQ ID NO: 1850 - protein, 594 aa, Oryza sativa
  unsure (1)..(594): unsure at all Xaa locations
MVGMLPETNAQAAAEEVLGDAWDYRGRPAARSRTGRWGAAAMILVAELNERLTTLGIAVNLVTYLTATMHAGNAEAANVVTNFMGTSFMLCLLGGFVADSFLGRYLTIAIFTAVQASGVTILTISTAAPGLRPAACAAGSAACERATGAQMGVLYLALYLTALGTGGLKSSVSGFGSDQFDESDSGEKSQMMRFFNWFFFFISLGSLLAVTVLVYVQDNLGRPWGYGACAAAIAAGLVVFLAGTRRYRFKKLVGSPLTQIAAVVVAAWRKRRLELPSDPAMLYDIDLAASSKKSKLKQRLPHTKQFRFLDHAAIKTRRTASXSKWTLATLTDVEEVKTVARMLPIWATTIMFWTVYAQMTTFSVSQATTMDRHIGASFQIPAGSLTVFFVGSILLTVPIYDRLVVPVARRATGNPHGLTPLQRIGVGLVLSIVAMVCAALTEVRRLRVXXGTRASAAARXVPMTVFWLIPQFLFVGAGEAFTYIGQLDFFLRECPKGMKTMSTGLFLSTLSLGFFVSSALVAAVHKLTGDRHPWLADDLNKGQLHKFYWLLAGVCLANLLVYLVAARWYKYKAGRAAAAGDGGVEMADAEPCLH

SEQ ID NO: 1851 - protein, 594 aa, Oryza sativa; identical to SEQ ID NO: 1840

SEQ ID NO: 1852 - protein, 596 aa, Oryza sativa
MGERIRKLEELELVVVDMAMVLPETAAEGKALTDAWDYKGRPAGRAATGGWGCAAMILGAELFERMTTLGIAVNLVPYMTGTMHLGNAAAANTVTNFIGTSFMLCLLGGFVADTYLGRYLTIAIFEAVQATGVMILTISTAAPGLRPPACGDPKGASAECVAADGTQLGVLYLGLYLTALGTGGLKSSVSGFGSDQFDESDVDGERKKMMRFFNWFYFFVSLGALLAVTVLVYVQDNVGRRWGYGICAAGILAGLAVFLSGTRRYRFKKLVGSPLTQVAAVTAAAWSKRSLPLPSDPDMLYDVDDAAAAGHDVKAIIDRSAAESPATASKWRLCTRTDVEEVKQVVRMLPIWATTIMFWTIHAQMTTFAVAQAELMDRRLAGGFLIPAGSLTVFLIASILLTVPFYDRLVVPVARRATANPHGLTPLQRVFVGLSLSIAGMAVAAAVERHRATASASAAAAAPTVFLLMPQFLLVGAGEAFTYMGQLDFFLRECPKGMKTMSTGLFLSTCAIGFFFSTLLVTIVHKVTGHGARGGGWLADNLDDGRLDYFYWLLAVISAINLVLFTVAARGYVYKEKRLADAGIELADEETIAVGH

SEQ ID NO: 1853 - protein, 729 aa, Zea mays
  unsure (1)..(729): unsure at all Xaa locations
MALTGRRQTFGSSPHRTHTHRQQHSDLPSALPRPHPAQSSSARCRPATAAGRIRSLGLLLLLPPLNPPRVGSSRILTRSPARHLAAGRRHTDRERERDRERERGRGSEETRTRAKMVGLLPETNAAAETDVLLDAWDFKGRPAPRATTGRWGAAAMILVAELNERLTTLGIAVNLVTYLTGTMHLGNAESANVVTNFMGTSFMLCLLGGFVADSFLGRYLTIAIFTAVQASGVTILTISTAAPGLRPASCSATGGGVVGECARASGAQLGVLYLALYLTALGTGGLKSSVSGFGSDQFDESDGGEKRQMMRFFNFFFFFISLGSLLAVTVLVYVQDNLGRRWGYGACACAIAAGLLVFLAGTRRYRFKKLAGSPLTQIAAVVVAAWRKRRLPLPADPAMLYDVDVGKAAGKKSKRKERLPHTDQFRFLDHAAINEDPAAGASSSSKWRLATLTDVEEVKTVARMLPIWATTIMFWTVYAQMTTFSVSQATTMDRRVGGSFQIPAGSLTVFFVGSILLTVPVYDRLVVPVARRVSGNPHGLTPLQRIAVGLALSVVAMAGAALTEVRRLRVARESSESASGGVVPMSVFWLIPQFFLVGAGEAFTYIGQLDFFLRECPKGMKTMSTGLFLSTLSLGFFVSSALVAAVHRVTGDRHXXWIANDLNKGRLDNFYWLLAAVCLANLLVYLVAARWYKYKAGRPGADGIEMADEPTLHXSIHVRSIDEARDGRP

SEQ ID NO: 1854 - protein, 590 aa, Zea mays
  unsure (1)..(590): unsure at all Xaa locations
XDPRGSAGPARPTGRWGAAAMILVAELNERLTTLGIAVNLVTYLTGTMHLGNAESANVVTNFMGTSFMLCLLGGFVADSFLGRYLTIAIFTAVQASGVTILTISTAAPGLRPASCSATGGGVVGECARASGAQLGVLYLALYLTALGTGGLKSSVSGFGSDQFDESDGGEKRQMMRFFNWFFFFISLGSLLAVTVLVYVQDNLGRRWGYGACACAIAAGLLVFLGGTRRDRFKKLAGSPLTQIAAVVVAAWGKRGLPLPADPAMLYDVDGGKAAALDDGSSSKKSKRKERLPHTDQFRFLDHAAIXXEDPAAGASSSSKWRLATLTDVEEVKTVARMLPIWATTIMFWTVYAQMTTFSVSFCXTTMDRRVGGSFQIPAGSLTVFFVGSILLTVPVYDRLVVPVARRVSGNPHGLTPLQRIAXVGLALSVVAMAGAALTEVRRLRVARESSESASGGVVPMSVFWXLIPQFFLVGAGEAFTYIGQLDFFLRECPKGMKTMSTGLFLSTLXALGFFVSSALVAAVHRVTGXTAHPWIANDLNKGRLDNFYWLLAAVCLANLLVYLVAARWYKYKAGRPGADGIEMADEPTLH

SEQ ID NO: 1855 - protein, 489 aa, Escherichia coli
  unsure (1)..(489): unsure at all Xaa locations
MNTTTPMGMLQQPRPFFMIFFVELWERFGYYGVQGVLAVFFVKQLGFSQEQAFVTFGAFAALVYGLISIGGYVGDHLLGTKRTIVLGALVXAIGYFMTGMSLLKPDLIFIALGTIAVGNGLFKANPASLLSKCYPPKDPRLDGAFTLFYMSINIGSLIALSLAPVIADRFGYSVTYNLCGAGLIIALLVYIACRGMVKDIGSEPDFRPMSFSKLLYVLLGSVVMIFVCAWLMHNVEVANLVLIVLSIVVTIIFFRQAFKLDKTGRNKMFVAFVLMLEAVVFYILYAQMPTSLNFFAINNVHHEILGFSINPVSFQALNPFWVVLASPILAGIYTHLGNKGKDLSMPMKFTLGMFMCSLGFLTAAXAGMWFADXQGLTSPWFIVLVYLFQSLGELFISALGLAMIAALVPQHLMGFILGMWFLTQXAAFLLGGYVATFTAVPDNITDPLETLPVYTNVFGKIGLVTLGVAVVMLLMVPWLKRMIATPESH

SEQ ID NO: 1856 - protein, 477 aa, Encephalitozoon cuniculi
MTIMNGTTLFLIICNEFCERFCFYGLKSLLFSFTRSEYGFTIKESTVNLHFFISMSYLFTLFGGLLSDMFLGRYSTIVLLSSLYLTGTSLLTYCSIVSGSPGLMVGSLLMIAVGTGGIKPCVAAFGGDQFGPDDAQDLRRFFDFFYFAINIGSMVSMVLTPTMSSVGCLGKQSCYPLAFGTSSTLLGASILLFIIGKRFYVIKPVRKEQFSRTFHSLVQNLKELFRRQSRDSERKTQGTLKTVSEAACISHEEDDKEKTLKILRILGPAAFFWMLSDQQSSSWVEQGTKMETHQSILGYGMDILPSQMQAFNAVFILLFIPLFSKMIYPLMGLAGVFSSPEEKMGFGIALASLSFFCSGYLEYRIGLPAPAGQRLSIMWQLPQYVLMTAGEIMLNVTGMEYMYTEAPEPMKSLVSSMWLLTVTAGNLLVMVLTFLDPVALFSSRAHDMWSFVAYGTAGLLASRCMFQASKAAKRNRK

SEQ ID NO: 1857 - protein, 785 aa, Caenorhabditis elegans
MGASHLHDDPRPGSPVDHQPTTWGGIIKKWPKQTFLIVGNELCERFSFYGMRAVLTLYFFNILNFSQSFSTVLFHAFTVICYSSPLLGSILADGYIGKFWTIFFISIFYACGQILLAFSSIAPSGSSHHPLLDLLGLLIVGLGTGGIKPCVSAFGGDQFPAHYTRMISLFFSMFYFSINAGSLISMWLTPYFRSMSCFGHDSCYPLAFGIPAILMIVATLVFMAGSFWYKKVPPKENIIFKVIGTITTALRKKASSSSTHQRSHWLEYSLDGHDCALSTECKNLHGNCAQRRYIEDIKRLFRVIVMMIPVPMFWALYDQQGSTWVLQAVGMDAKVFGFEILPDQMGVLNAFLILFFIPIFQSIVYPTIEKLGFQMTMLRKMAGGGILTAVSFFVCGIVQLFVNPTLPYIPMANEAHLTIINTIPSCDFNVLIDSREPFDLLRKSGIAPDDSVRKPISFTGDDFFQPNITFDNLAPNCPKFTAEPMLAPATSYVLTLSPNGWAYNAVRPEKPKSGKGELSMGLNLIVPCDKIPSNVTWEQCNGTEGYSGAIALCKVESDVITDNNNVCDPTAKGKFYVLSNANPLDVHDFSKKSTVTAFGRTYSPIEMKPGTYRLFYTDDSRTHFTPLNLPPVQQDHMGGQYLITVSTRSKNDSEVLATTESLVSYNRVSILWQIPQYVILTAGEVLFSITGLEFAYTEASPQLKSVVQALWLFTTAIGDLIVVVIFMLNIFSDVAVQMFVFGGIMLFVIFVFILLAVFYYEYADYSNESEVLTEKMIVDDDHTRI

SEQ ID NO: 1858 - protein, 786 aa, Caenorhabditis elegans
MGASHLHDDPRPGSPVDHQPTTWGGIIKKWPKQTFLIVGNELCERFSFYGMRAVLTLYFFNILNFSQSFSTVLFHAFTVICYSSPLLGSILADGYIGKFWTIFFISIFYACGQILLAFSSIAPSGSSHHPLLDLLGLLIVGLGTGGIKPCVSAFGGDQFPAHYTRMISLFFSMFYFSINAGSLISMWLTPYFRSMSCFGHDSCYPLAFGIPAILMIVATLVFMAGSFWYKKVPPKENIIFKVIGTITTALRKKASSSSTHQRSHWLEYSLDGHDCALSTECKNLHGNCAQRRYIEDIKRLFRVIVMMIPVPMFWALYDQQGSTWVLQAVGMDAKVFGFEILPDQMGVLNAFLILFFIPIFQSIVYPTIEKLGFQMTMLRKMAGGGILTAVSFFVCGIVQLFVNPTLPYIPMANEAHLTIINTIPSCDFNVLIDSREPFDLLRKSVGIAPDDSVRKPISFTGDDFFQPNITFDNLAPNCPKFTAEPMLAPATSYVLTLSPNGWAYNAVRPEKPKSGKGELSMGLNLIVPCDKIPSNVTWEQCNGTEGYSGAIALCKVESDVITDNNNVCDPTAKGKFYVLSNANPLDVHDFSKKSTVTAFGRTYSPIEMKPGTYRLFYTDDSRTHFTPLNLPPVQQDHMGGQYLITVSTRSKNDSEVLATTESLVSYNRVSILWQIPQYVILTAGEVLFSITGLEFAYTEASPQLKSVVQALWLFTTAIGDLIVVVIFMLNIFSDVAVQMFVFGGIMLFVIFVFILLAVFYYEYADYSNESEVLTEKMIVDDDHTRI

SEQ ID NO: 1859 - protein, 785 aa, Caenorhabditis elegans
MGASHLHDDPRPGSPVDHQPTTWGGIIKKWPKQTFLIVGNELCERFSFYGMRAVLTLYFFNILNFSQSFSTVLFHAFTVICYSSPLLGSILADGYIGKFWTIFFISIFYACGQILLAFSSIAPSGSSHHPLLDLLGLLIVGLGTGGIKPCVSAFGGDQFPAHYTRMISLFFSMFYFSINAGSLISMWLTPYFRSMSCFGHDSCYPLAFGIPAILMIVATLVFMAGSFWYKKVPPKENIIFKVIGTITTALRKKASSSSTHQRSHWLEYSLDGHDCALSTECKNLHGNCAQRRYIEDIKRLFRVIVMMIPVPMFWALYDQQGSTWVLQAVGMDAKVFGFEILPDQMGVLNAFLILFFIPIFQSIVYPTIEKLGFQMTMLRKMAGGGILTAVSFFVCGIVQLFVNPTLPYIPMANEAHLTIINTIPSCDFNVLIDSREPFDLLRKSGIAPDDSVRKPISFTGDDFFQPNITFDNLAPNCPKFTAKPMLAPATSYVLTLSPNGWAYNAVRPEKPKSGKGELSMGLNLIVPCDKIPSNVTWEQCNGTEGYSGAIALCKVESDVITDNNNVCDPTAKGKFYVLSNANPLDVHDFSKKSTVTAFGRTYSPIEMKPGTYRLFYTDDSRTHFTPLNLPPVQQDHMGGQYLITVSTRSKNDSEVLATTESLVSYNRVSILWQIPQYVILTAGEVLFSITGLEFAYTEASPQLKSVVQALWLFTTAIGDLIVVVIFMLNIFSDVAVQMFVFGGIMLFVIFVFILLAVFYYEYADYSNESEVLTEKMIVDDDHTRI

SEQ ID NO: 1860 - protein, 835 aa, Caenorhabditis elegans
MGYSESRSESVSSKGKTSYGHELETVPLPEKKIYTTWPDMIRHWPKTTLCIVSNEFCERFSYYGMRTVLTFYLLNVLKFTDSQSTIFFNGFTVLCYTTPLLGSIVADGYIGKFWTIFSVSILYAIGQVVLALASTKNFQSSVHPWMDLSGLLIIAFGTGGIKPCVSAFGGDQFELGQERMLSLFFSMFYFSINAGSMISTFISPIFRSQPCLGQDSCYPMAFGIPAILMIVATLVFMGGSFWYKKNPPKDNVFGEVSRLMFRAVGNKMKSGSTPKEHWLLHYLTTHDCALDAKCLELQAEKRNKNLCQKKKFIDDVRSLLRVLVMFLPVPMFWALYDQQGSVWLIQAIQMDCRLSDTLLLLPDQMQTLNAVLILLFIPLFQVIIYPVAAKCVRLTPLRKMVTGGLLASLAFLITGFVQLQVNTTLPTLPEEGEASISFWNQFETDCTITVMSGIHKRVLPHDKYLHEDKKNKSGIYNLFTTKSPAKGNGDWTLTYDLSYDGACGDTSKLEKTVKVTAKSKKIIYVGVGSFGYYQNTANTDKPTDGTGEFSMGIVTVFNSSYGGNFAMCRQNTSDFDVNHPCNPRHPADFYFWETDYNSHTDDRDQNATITGSLSSQPAVTYKQKSVKPGYWQLYYLLNTPKDVDRQTYNKTATLVAPTNYGFHRVKQGGVFIYALTGTYENPKIHELQIVQSNSVSILWQIPQIVVITAAEILFSITGYEFAYSQSAPSMKALVQALWLLTTAAGDSIIVVITILNLFENMAVEFFVYAAAMFVVIAIFALLSIFYYTYNYYTTDEEDGEIGVDDEEEIEDHNPRYSIDNKGFHPDEKDTFDMHF

SEQ ID NO: 1861 - protein, 796 aa, Caenorhabditis elegans
MIRHWPKTTLCIVSNEFCERFSYYGMRTVLTFYLLNVLKFTDSQSTIFFNGFTVLCYTTPLLGSIVADGYIGKFWTIFSVSILYAIGQVVLALASTKNFQSSVHPWMDLSGLLIIAFGTGGIKPCVSAFGGDQFELGQERMLSLFFSMFYFSINAGSMISTFISPIFRSQPCLGQDSCYPMAFGIPAILMIVATLVFMGGSFWYKKNPPKDNVFGEVSRLMFRAVGNKMKSGSTPKEHWLLHYLTTHDCALDAKCLELQAEKRNKNLCQKKKFIDDVRSLLRVLVMFLPVPMFWALYDQQGSVWLIQAIQMDCRLSDTLLLLPDQMQTLNAVLILLFIPLFQVIIYPVAAKCVRLTPLRKMVTGGLLASLAFLITGFVQLQVNTTLPTLPEEGEASISFWNQFETDCTITVMSGIHKRVLPHDKYLHEDKKNKSGIYNLFTTKSPAKGNGDWTLTYDLSYDGACGDTSKLEKTVKVTAKSKKIIYVGVGSFGYYQNTANTDKPTDGTGEFSMGIVTVFNSSYGGNFAMCRQNTSDFDVNHPCNPRHPADFYFWETDYNSHTDDRDQNATITGSLSSQPAVTYKQKSVKPGYWQLYYLLNTPKDVDRQTYNKTATLVAPTNYGFHRVKQGGVFIYALTGTYENPKIHELQIVQSNSVSILWQIPQIVVITAAEILFSITGYEFAYSQSAPSMKALVQALWLLTTAAGDSIIVVITILNLFENMAVEFFVYAAAMFVVIAIFALLSIFYYTYNYYTTDEEDGEIGVDDEEEIEDHNPRYSIDNKGFHPDEKDTFDMHF

SEQ ID NO: 1862 - protein, 701 aa, Caenorhabditis elegans
MEEKSLLQKLRSYPPAVFFMLGNEFCERFSFYGMKTILFIYLITEHEFSPSKATFIYHLFTCIAYLTPLIGSIMADSVFGRFKVILYGSSIYVVGHVLLSLGAVPFLSYPIRSSLDFSGLFVIAFATGCIKPCVSAFAADQFTEDQKDLRSQFFSFFYFAINGGSLFAIIITPILRGRVQCFGNAHCFPLAFGVPGVLMLLALILFLMGWSMYKKHPPSKENVGSKVVAVIYTSLRKMVGGASRDKPVTHWLDHAAPEHSQKMIDSTRGLLNVAVIFCPLIFFWALFDQQGSTWVLQARRLDGRVGHFSILPEQIHAINPVCVLILVPIFEGWVYPALRKITRVTPLRKMAVGGLLTAFSFAIAGVLQLKVNETMEFPPSLGRIYLQRVGNESLISDFRYKSDGRLIGDGMLPKGRTELDAGIYTFNTGLKNESQEIDISTPNKGYVMAVFRLKDAVEVVKFDYKVEKTDNGATRVFVVTAREDADTLVYAINKKGKILSSCELKSGSYVDVIPGIISDPNVRLYWGPKNSCSGVDCPNTVTLNAQMGAVHVLHIHPSTTEGDFNLLVRPNSVSILWSLPQYIIITLGEVLLSVTGLEFAYSQAAPNMKSVLTAMWLLTVFAGNLIDMMISGTRLIPHPALEFFFYSTLMVIVMGVFILLAMQYTYVEDNDDEITITESEKKDVIALTEIESGTATSDKKE

SEQ ID NO: 1863 - protein, 701 aa, Caenorhabditis elegans
MEEKSLLQKLRSYPPAVFFMLGNEFCERFSFYGMKTILFIYLITEHEFSPSKATFIYHLFTCIAYLTPLIGSIMADSVFGRFKVILYGSSIYVVGHVLLSLGAVPFLSYPIRSSLDFSGLFVIAFATGCIKPCVSAFAADQFTEDQKDLRSQFFSFFYFAINGGSLFAIIITPILRGRVQCFGNAHCFPLAFGVPGVLMLLALIQFLMGWSMYKKHPPSKENVGSKVVAVIYTSLRKMVGGASRDKPVTHWLDHAAPEHSQKMIDSTRGLLNVAVIFCPLIFFWALFDQQGSTWVLQARRLDGRVGHFSILPEQIHAINPVCVLILVPIFEGWVYPALRKITRVTPLRKMAVGGLLTAFSFAIAGVLQLKVNETMEFPPSLGRIYLQRVGNESLISDFRYKSDGRLIGDGMLPKGRTELDAGIYTFNTGLKNESQEIDISTPNKGYVMAVFRLKDAVEVVKFDYKVEKTDNGATRVFVVTAREDADTLVYAINKKGKILSSCELKSGSYVDVIPGIISDPNVRLYWGPKNSCSGVDCPNTVTLNAQMGAVHVLHIHPSTTEGDFNLLVRPNSVSILWSLPQYIIITLGEVLLSVTGLEFAYSQAAPNMKSVLTAMWLLTVFAGNLIDMMISGTRLIPHPALEFFFYSTLMVIVMGVFILLAMQYTYVEDNDDEITITESEKKDVIALTEIESGTATSDKKE

SEQ ID NO: 1864 - protein, 783 aa, Caenorhabditis elegans
MGYSESRSESVSSKAVLTFYLLNVLKFTDSQSTIFFNGFTVLCYTTPLLGSIVADGYIGKFWTIFSVSILYAIGQVVLALASTKNFQSSVHPWMDLSGLLIIAFGTGGIKPCVSAFGGDQFELGQERMLSLFFSMFYFSINAGSMISTFISPIFRSQPCLGQDSCYPMAFGIPAILMIVATLVFMGGSFWYKKNPPKDNVFGEVSRLMFRAVGNKMKSGSTPKEHWLLHYLTTHDCALDAKCLELQAEKRNKNLCQKKKFIDDVRSLLRVLVMFLPVPMFWALYDQQGSVWLIQAIQMDCRLSDTLLLLPDQMQTLNAVLILLFIPLFQVIIYPVAAKCVRLTPLRKMVTGGLLASLAFLITGFVQLQVNTTLPTLPEEGEASISFWNQFETDCTITVMSGIHKRVLPHDKYLHEDKKNKSGIYNLFTTKSPAKGNGDWTLTYDLSYDGACGDTSKLEKTVKVTAKSKKIIYVGVGSFGYYQNTANTDKPTDGTGEFSMGIVTVFNSSYGGNFAMCRQNTSDFDVNHPCNPRHPADFYFWETDYNSHTDDRDQNATITGSLSSQPAVTYKQKSVKPGYWQLYYLLNTPKDVDRQTYNKTATLVAPTNYGFHRVKQGGVFIYALTGTYENPKIHELQIVQSNSVSILWQIPQIVVITAAEILFSITGYEFAYSQSAPSMKALVQALWLLTTAAGDSIIVVITILNLFENMAVEFFVYAAAMFVVIAIFALLSIFYYTYNYYTTDEEDGEIGVDDEEEIEDHNPRYSIDNKGFHPDEKDTFDMHF

SEQ ID NO: 1865 - protein, 810 aa, Drosophila melanogaster
MTDKKNEIQPAAEPVAEPEPSPAAEIAPASPDGSGPSAAAAEEVTPSVATVEDTTPIAAPAESQPSGESNGTAEAKKLPEIAKKNGKEPDQNDKEPDQNGKELAETNDFKNVSETEGQQKKLPYPKSVFFIISNEFCERFNYYGMRTVLVLYLSRVLGYSDDTATVVFHIFTMFVYFLCVFGAIISDSWLGKFKTILYLSLVYICGSVLLTLGAIGPLNLPMETFTMLGLALIALGSGGIKPCVSAFGGDQFKVPEQVKQITSFFSLFYFSINAGSLISTTVTPILREDVSCFDDINCYPLAFGVPAVLMIVSVIIFVLGRSLYKMKPPAGNMVVLVSSTIWTALTTKCKEKKTNPREHWLDYADKKYDRQLIDDVKVLMRVLFLYLPLPVFWALFDQQGSRWTFQATRMDGDMGSWDIKPDQLQVLNPLLILIFIPLYDVALYPALKLVGIRRPLQKLTMGGILAGIAFIISGVVELSLEKTYPDLPYSQNIQLRIFNADNCDYFFTSNIPGAENVTVTSLNAYTNKDIYAPGSLDVEFSLSSASEACTISADKIPKVLTDNTAWSLFLNPLNGSGYYWEEDFVDKPSQSHPLIRNVANVPQELSIRWEKASTGEVVYDDLASKTLLTRVNSAEYVVMVGERNVGTFDVHTGGVYTLLIKDNNNIYEANLEEVTSPNSVKILWLVPQYVVMTLGEVMFSVTGLEFSYAQAPPSMKSVLQACWLLTVAFGNVIVVVIAEAALFESQASEFFLFAGLMFADMLIFMVMAYYYVPNDPNKVEEAQPLTAGDAKTEIPALEGGVENKGKDINE

SEQ ID NO: 1866 - protein, 803 aa, Drosophila melanogaster
MTDKKNEIQPAAEPVAEPEPSPAAEIAPASPDGSGPSAAAAEEVTPSVATVEDTTPIAAPAESQPSGESNGTAEAKKLPEIAKKNGKEPDQNDKEPDQNGKELAETNDFKNVSETEGQQKKLPYPKSVFFIISNEFCERFNYYGMRTVLVLYLSRVLGYSDDTATVVFHIFTMFVYFLCVFGAIISDSWLGKFKTILYLSLVYICGSVLLTLGAIGPLNLPMETFTMLGLALIALGSGGIKPCVSAFGGDQFKVPEQVKQITSFFSLFYFSINAGSLISTTVTPILREDVSCFDDINCYPLAFGVPAVLMIVSVIIFVLGRSLYKMKPPAGNMVVLVSSTIWTALTTKCKEKKTNPREHWLDYADKKYDRQLIDDVKVLMRVLFLYLPLPVFWALFDQQGSRWTFQATRMDGDMGSWDIKPDQLQVLNPLLILIFIPLYDVALYPALKLVGIRRPLQKLTMGGILAGIAFIISGVVELSLEHTYPLIPSSGNTQLRVFSGIPDCDYRFSTNLGARESFTLRGLDFYYSGSVATNTDGIFQLTYTVESLTEGCAILEGGTQQLYEATAHSLFLRPSHAITKFWYEDEVQKSNRSWAFVRNLANLLATTRVVWREDSGDTVALDLPARNHDLYELSTGGYNVQVADHNLTSIELRAGGVYALLIGQSHGTFVSRIIEVTSPNSMHMLWLVPQYVVMTLGEVMFSVTGLEFSYSQSPPSMKSVLQACWLLTVAFGNVIVVVVAELKFFDSQASEFFLFAGLMFVDMLVFMFVAYYYKPYDEVAALAERVRARRERKWQDLDRFKRD

SEQ ID NO: 1867 - protein, 810 aa, Drosophila melanogaster
MTDKKNEIQPAAEPVAEPEPSPAAEIAPASPDGSGPSAAAAEEVTPSVATVEDTTPIAAPAESQPSGESNGTAEAKKLPEIAKKNGKEPDQNDKEPDQNGKELAETNDFKNVSETEGQQKKLPYPKSVFFIISNEFCERFNYYGMRTVLVLYLSRVLGYSDDTATVVFHIFTMFVYFLCVFGAIISDSWLGKFKTILYLSLVYICGSVLLTLGAIGRLNLPMETFTMLGLALIALGSGGIKPCVSAFGGDQFKVPEQVKQITSFFSLFYFSINAGSLISTTVTPILREDVSCFDDINCYPLAFGVPAVLMIVSVIIFVLGRSLYKMKPPAGNMVVLVSSTIWTALTTKCKEKKTNPREHWLDYADKKYDRQLIDDVKVLMRVLFLYLPLPVFWALFDQQGSRWTFQATRMDGDMGSWDIKPDQLQVLNPLLILIFIPLYDVALYPALKLVGIRRPLQKLTMGGILAGIAFIISGVVELSLEKTYPDLPYSQNIQLRIFNADNCDYFFTSNIPGAENVTVTSLNAYTNKDIYAPGSLDVEFSLSSASEACTISADKIPKVLTDNTAWSLFLNPLNGSGYYWEEDFVDKPSQSHPLIRNVANVPQELSIRWEKASTGEVVYDDLASKTLLTRVNSAEYVVMVGERNVGTFDVHTGGVYTLLIKDNNNIYEANLEEVTSPNSVKILWLVPQYVVMTLGEVMFSVTGLEFSYAQAPPSMKSVLQACWLLTVAFGNVIVVVIAEAALFESQASEFFLFAGLMFADMLIFMVMAYYYVPNDPNKVEEAQPLTAGDAKTEIPALEGGVENKGKDINE

SEQ ID NO: 1868 - protein, 743 aa, Drosophila melanogaster
MASEITNGKNGQNGKNGQKEESDSQIAPPIPYPKSVAFIISNEFCERFNYYGMRTILVLYLTNKLGYNEETATVLFHTFTMLVYIFPLIGALIADGWLGKYKTILYLSLVYSLGAMVVSFGAVPLSGMPTKAVTVVGLLLIAIGTGGIKPCVSAFGGDQFSLPAQSFQLAKFFSLFYFAINAGSLISTTFTPILRADVHCFGDQDCFSLAFGVPAILMIFSVIIFMAGKRLYRCQPPAGNMIFGVSRCIADAFKGWQKRRHSEPMESFLDYAKPTVGSRMVQETKCLGRILRLFLPFPVFWALFDQQGSRWTFQATRMDGNVLGFQIKPDQMQVVNPLLILGFLPLFDYIIYPALARCGIRRPLQKLTLGLLLAALGFFLSAGLEMKMEQAAYRATPIEPDMTHLRIYNGMPCRYEISSAVVQTPRVIEPLNVWEDLSLQMTESKEYTFNAQPVSGECPSIIDKLRLQPGKSVSYFLAQDKLVEFADGLQMAATDTGRTSVRALLNTPDGEGPVLLSTESATSQEPPLTLDKGNVPQLHRITPGFARVDINGKKVASFEAKEGRLYSILVTGSARDGYQHNVIEVVALSTVSILWQLPQIVVMTAAEVMFSVTGLEFSYSQSPPSMKSVLQACWLLSVAIGNMLVVVIAEFKFTSSQSGEFTLFASLMLVDMMIFLWLARSYQYKDQREDFEDDDDATIDSVMQSKPKATTVDTTARKTNGIEAEPGYGAYRNHAYDNDFSEA

SEQ ID NO: 1869 - protein, 734 aa, Drosophila melanogaster
MAFVSNAIVGPENCKSVTPPIPYPKSVAFIISNEFCERFNYYGMRTILVLYLTNKLGYNEETATVLFHTFTMLVYIFPLIGALIADGWLGKYKTILYLSLVYSLGAMVVSFGAVPLSGMPTKAVTVVGLLLIAIGTGGIKPCVSAFGGDQFSLPAQSFQLAKFFSLFYFAINAGSLISTTFTPILRADVHCFGDQDCFSLAFGVPAILMIFSVIIFMAGKRLYRCQPPAGNMIFGVSRCIADAFKGWQKRRHSEPMESFLDYAKPTVGSRMVQETKCLGRILRLFLPFPVFWALFDQQGSRWTFQATRMDGNVLGFQIKPDQMQVVNPLLILGFLPLFDYIIYPALARCGIRRPLQKLTLGLLLAALGFFLSAGLEMKMEQAAYRATPIEPDMTHLRIYNGMPCRYEISSAVVQTPRVIEPLNVWEDLSLQMTESKEYTFNAQPVSGECPSIIDKLRLQPGKSVSYFLAQDKLVEFADGLQMAATDTGRTSVRALLNTPDGEGPVLLSTESATSQEPPLTLDKGNVPQLHRITPGFARVDINGKKVASFEAKEGRLYSILVTGSARDGYQHNVIEVVALSTVSILWQLPQIVVMTAAEVMFSVTGLEFSYSQSPPSMKSVLQACWLLSVAIGNMLVVVIAEFKFTSSQSGEFTLFASLMLVDMMIFLWLARSYQYKDQREDFEDDDDATIDSVMQSKPKATTVDTTARKTNGIEAEPGYGAYRNHAYDNDFSEA

SEQ ID NO: 1870 - protein, 743 aa, Drosophila melanogaster
MASEITNGKNGQNGKNGQKEESDSQIAPPIPYPKSVAFIISNEFCERFNYYGMRTILVLYLTNKLGYNEETATVLFHTFTMLVYIFPLIGALIADGWLGKYKTILYLSLVYSLGAMVVSFGAVPLSGMPTKAVTVVGLLLIAIGTGGIKPCVSAFGGDQFSLPAQSFQLAKFFSLFYFAINAGSLISTTFTPILRADVHCFGDQDCFSLAFGVPAILMIFSVIIFMAGKRLYRCQPPAGNMIFGVSRCIADAFKGWQKRRHSEPMESFLDYAKPTVGSRMVQETKCLGRILRLFLPFPVFWALFDQQGSRWTFQATRMDGNVLGFQIKPDQMQVVNPLLILGFLPLFDYIIYPALARCGIRRPLQKLTLGLLLAALGFFLSAGLEMKMEQAAYRATPIEPDMTHLRIYNGMPCRYEISSAVVQTPRVIEPLNVWEDLSLQMTESKEYTFNAQPVSGECPSITDKLRLQPGKSVSYFLAQDKLVEFADGLQMAATDTGRTSVRALLNTPDGEGPVLLSTESATSQEPPLTLDKGNVPQLHRITPGFARVDINGKKVASFEAKEGRLYSILVTGSARDGYQHNVIEVVAPSTVSILWQLPQIVVMTAAEVMFSVTGLEFSYSQSPPSMKSVLQACWLLSVAIGNMLVVVIAEFKFTSSQSGEFTLFASLMLVDMMIFLWLARSYQYKDQREDFEDDDDATIDSVMQSKPKATTVDTTARKTNGIEAEPGYGAYRNHAYDNDFSEA

SEQ ID NO: 1871 - protein, 734 aa, Drosophila melanogaster
MAFVSNAIVGPENCKSVTPPIPYPKSVAFIISNEFCERFNYYGMRTILVLYLTNKLGYNEETATVLFHTFTMLVYIFPLIGALIADGWLGKYKTILYLSLVYSLGAMVVSFGAVPLSGMPTKAVTVVGLLLIAIGTGGIKPCVSAFGGDQFSLPAQSFQLAKFFSLFYFAINAGSLISTTFTPILRADVHCFGDQDCFSLAFGVPAILMIFSVIIFMAGKRLYRCQPPAGNMIFGVSRCIADAFKGWQKRRHSEPMESFLDYAKPTVGSRMVQETKCLGRILRLFLPFPVFWALFDQQGSRWTFQATRMDGNVLGFQIKPDQMQVVNPLLILGFLPLFDYIIYPALARCGIRRPLQKLTLGLLLAALGFFLSAGLEMKMEQAAYRATPIEPDMTHLRIYNGMPCRYEISSAVVQTPRVIEPLNVWEDLSLQMTESKEYTFNAQPVSGECPSITDKLRLQPGKSVSYFLAQDKLVEFADGLQMAATDTGRTSVRALLNTPDGEGPVLLSTESATSQEPPLTLDKGNVPQLHRITPGFARVDINGKKVASFEAKEGRLYSILVTGSARDGYQHNVIEVVAPSTVSILWQLPQIVVMTAAEVMFSVTGLEFSYSQSPPSMKSVLQACWLLSVAIGNMLVVVIAEFKFTSSQSGEFTLFASLMLVDMMIFLWLARSYQYKDQREDFEDDDDATIDSVMQSKPKATTVDTTARKTNGIEAEPGYGAYRNHAYDNDFSEA

SEQ ID NO: 1872 - protein, 737 aa, Drosophila melanogaster
MAFVSNAIVGPENCKSVTVSLPPIPYPKSVAFIISNEFCERFNYYGMRTILVLYLTNKLGYNEETATVLFHTFTMLVYIFPLIGALIADGWLGKYKTILYLSLVYSLGAMVVSFGAVPLSGMPTKAVTVVGLLLIAIGTGGIKPCVSAFGGDQFSLPAQSFQLAKFFSLFYFAINAGSLISTTFTPILRADVHCFGDQDCFSLAFGVPAILMIFSVIIFMAGKRLYRCQPPAGNMIFGVSRCIADAFKGWQKRRHSEPMESFLDYAKPTVGSRMVQETKCLGRILRLFLPFPVFWALFDQQGSRWTFQATRMDGNVLGFQIKPDQMQVVNPLLILGFLPLFDYIIYPALARCGIRRPLQKLTLGLLLAALGFFLSAGLEMKMEQAAYRATPIEPDMTHLRIYNGMPCRYEISSAVVQTPRVIEPLNVWEDLSLQMTESKEYTFNAQPVSGECPSIIDKLRLQPGKSVSYFLAQDKLVEFADGLQMAATDTGRTSVRALLNTPDGEGPVLLSTESATSQEPPLTLDKGNVPQLHRITPGFARVDINGKKVASFEAKEGRLYSILVTGSARDGYQHNVIEVVAPSTVSILWQLPQIVVMTAAEVMFSVTGLEFSYSQSPPSMKSVLQACWLLSVAIGNMLVVVIAEFKFTSSQSGEFTLFASLMLVDMMIFLWLARSYQYKDQREDFEDDDDATIDSVMQSKPKATTVDTTARKTNGIEAEPGYGAYRNHAYDNDFSEA

SEQ ID NO: 1873 - protein, 737 aa, Drosophila melanogaster
MAFVSNAIVGPENCKSVTVSLPPIPYPKSVAFIISNEFCERFNYYGMRTILVLYLTNKLGYNEETATVLFHTFTMLVYIFPLIGALIADGWLGKYKTILYLSLVYSLGAMVVSFGAVPLSGMPTKAVTVVGLLLIAIGTGGIKPCVSAFGGDQFSLPAQSFQLAKFFSLFYFAINAGSLISTTFTPILRADVHCFGDQDCFSLAFGVPAILMIFSVIIFMAGKRLYRCQPPAGNMIFGVSRCIADAFKGWQKRRHSEPMESFLDYAKPTVGSRMVQETKCLGRILRLFLPFPVFWALFDQQGSRWTFQATRMDGNVLGFQIKPDQMQVVNPLLILGFLPLFDYIIYPALARCGIRRPLQKLTLGLLLAALGFFLSAGLEMKMEQAAYRATPIEPDMTHLRIYNGMPCRYEISSAVVQTPRVIEPLNVWEDLSLQMTESKEYTFNAQPVSGECPSIIDKLRLQPGKSVSYFLAQDKLVEFADGLQMAATDTGRTSVRALLNTPDGEGPVLLSTESATSQEPPLTLDKGNVPQLHRITPGFARVDINGKKVASFEAKEGRLYSILVTGSARDGYQHNVIEVVALSTVSILWQLPQIVVMTAAEVMFSVTGLEFSYSQSPPSMKSVLQACWLLSVAIGNMLVVVIAEFKFTSSQSGEFTLFASLMLVDMMIFLWLARSYQYKDQREDFEDDDDATIDSVMQSKPKATTVDTTARKTNGIEAEPGYGAYRNHAYDNDFSEA

SEQ ID NO: 1874 - protein, 743 aa, Drosophila melanogaster
MASEITNGKNGQNGKNGQKEESDSQIAPPIPYPKSVAFIISNEFCERFNYYGMRTILVLYLTNKLGYNEETATVLFHTFTMLVYIFPLIGALIADGWLGKYKTILYLSLVYSLGAMVVSFGAVPLSGMPTKAVTVVGLLLIAIGTGGIKPCVSAFGGDQFSLPAQSFQLAKFFSLFYFAINAGSLISTTFTPILRADVHCFGDQDCFSLAFGVPAILMIFSVIIFMAGKRLYRCQPPAGNMIFGVSRCIADAFKGWQKRRHSEPMESFLDYAKPTVGSRMVQETKCLGRILRLFLPFPVFWALFDQQGSRWTFQATRMDGNVLGFQIKPDQMQVVNPLLILGFLPLFDYIIYPALARCGIRRPLQKLTLGLLLAALGFFLSAGLEMKMEQAAYRATPIEPDMTHLRIYNGMPCRYEISSAVVQTPRVIEPLNVWEDLSLQMTESKEYTFNAQPVSGECPSIIDKLRLQPGKSVSYFLAQDKLVEFADGLQMAATDTGRTSVRALLNTPDGEGPVLLSTESATSQEPPLTLDKGNVPQLHRITPGFARVDINGKKVASFEAKEGRLYSILVTGSARDGYQHNVIEVVAPSTVSILWQLPQIVVMTAAEVMFSVTGLEFSYSQSPPSMKSVLQACWLLSVAIGNMLVVVIAEFKFTSSQSGEFTLFASLMLVDMMIFLWLARSYQYKDQREDFEDDDDATIDSVMQSKPKATTVDTTARKTNGIEAEPGYGAYRNHAYDNDFSEA

SEQ ID NO: 1875 - protein, 737 aa, Drosophila melanogaster
MAFVSNAIVGPENCKSVTVSLPPIPYPKSVAFIISNEFCERFNYYGMRTILVLYLTNKLGYNEETATVLFHTFTMLVYIFPLIGALIADGWLGKYKTILYLSLVYSLGAMVVSFGAVPLSGMPTKAVTVVGLLLIAIGNGGINPCVSPFGGEQFSLPAQSFQLAKFFSLFYFAINAGSLISTTFTPILRADVHCFGDQDCFSLAFGVPAILMIFSVIIFMAGKRLYRCQPPAGNMIFGVSRCIADAFKGWQKRRHSEPMESFLDYAKPTVGSRMVQETKCLGRILRLFLPFPVFWALFDQQGSRWTFQATRMDGNVLGFQIKPDQMQVVNPLLILGFLPLFDYIIYPALARCGIRRPLQKLTLGFLLAALGFFLSAGLEMKMEQAAYRATPIEPDMTHLRIYNGMPCRYEISSAVVQTPRVIEPLNVWEDLSLQMTESKEYTFNAQPVSGECPSIIDKLRLQPGKSVSYFLAQDKLVEFADGLQMAATDTGRTSVRALLNTPDGEGPVLLSTESATSQEPPLTLDKGNVPQLHRITPGFARVDINGKKVASFEAKEGRLYSILVTGSARDGYQHNVIEVVAPSTVSILWQLPQIVVMTAAEVMFSVTGLEFSYSQSPPSMKSVLQACWLLSVAIGNMLVVVIAEFKFTSSQSGEFTLFASLMLVDMMIFLWLARSYQYKDQREDFEDDDDATIDSVMQSKPKATTVDTTARKTNGIEAEPGYGAYRNHAYDNDFSEA

SEQ ID NO: 1876 - protein, 170 aa, Anguilla anguilla
LGRFRAIIYLSIVYVIGHVVKSVGAIPDVGDTTTHIVLSILGLVLIAFGTGGIKPCVAAFGGDQFTEEHAEERTKFFSIFYMSINAGSVLSTVITPILRGDVQCFGGDCYALAFGVPALLMIIALVVFIAGSGLYKKNPPEGNILLKVCQCIGYAIKNRWRNRKKSHKRA

SEQ ID NO: 1877 - protein, 428 aa, Danio rerio
MAGRDVNESSPLLENSVTSTRSESVFNGRRLACAAILLAESLERMAFYGITSNLVLFLNSSPFYWEGTLASQGPLIFMGVTYLISPFGGWLLFPFVASDNTRNYLCGEEMAFPVQPAECFPENGTVPANVTCVNRPSYCRPAIYSGLVLVALGVGAVKSNITPFGADQVKDRGPEATRRFFNWFYWCINLGAIFSLGGIAYIQQNISFSIGYIIPAVCLGVSLIIFFLGKAVFITKPADGSAFSDMFRILGSALCGRGPKEPSLLRPKPTVLDGAKVTYGGRFSDEKVEEVKSLVKILPVFLALIPYWTVYFQMQTTYYLQSLHLTIPGADPNSTDSHPNTFRFPAAWLTMFDAVLILMLIPLVSEENRCGHVLCHVLGGGGWHFRDEEAGHCPHTGSHPAVAGWSYILCSRSTYMVASASVCPHRCQ

SEQ ID NO: 1878 - protein, 493 aa, Escherichia coli K12
MNKHASQPRAIYYVVALQIWEYFSFYGMRALLILYLTNQLKYNDTHAYELFSAYCSLVYVTPILGGFLADKVLGNRMAVMLGALLMAIGHVVLGASEIHPSFLYLSLAIIVCGYGLFKSNVSCLLGELYEPTDPRRDGGFSLMYAAGNVGSIIAPIACGYAQEEYSWAMGFGLAAVGMIAGLVIFLCGNRHFTHTRGVNKKVLRATNFLLPNWGWLLVLLVATPALITILFWKEWSVYALIVATIIGLGVLAKIYRKAENQKQRKELGLIVTLTFFSMLFWAFAQQGGSSISLYIDRFVNRDMFGYTVPTAMFQSINAFAVMLCGVFLAWVVKESVAGNRTVRIWGKFALGLGLMSAGFCILTLSARWSAMYGHSSLPLMVLGLAVMGFAELFIDPVAMSQITRIEIPGVTGVLTGIYMLLSGAIANYLAGVIADQTSQASFDASGAINYSINAYIEVFDQITWGALACVGLVLMIWLYQALKFRNRALALES

SEQ ID NO: 1879 - protein, 489 aa, Escherichia coli K12
MNTTTPMGMLQQPRPFFMIFFVELWERFGYYGVQGVLAVFFVKQLGFSQEQAFVTFGAFAALVYGLISIGGYVGDHLLGTKRTIVLGALVLAIGYFMTGMSLLKPDLIFIALGTIAVGNGLFKANPASLLSKCYPPKDPRLDGAFTLFYMSINIGSLIALSLAPVIADRFGYSVTYNLCGAGLIIALLVYIACRGMVKDIGSEPDFRPMSFSKLLYVLLGSVVMIFVCAWLMHNVEVANLVLIVLSIVVTIIFFRQAFKLDKTGRNKMFVAFVLMLEAVVFYILYAQMPTSLNFFAINNVHHEILGFSINPVSFQALNPFWVVLASPILAGIYTHLGNKGKDLSMPMKFTLGMFMCSLGFLTAAAAGMWFADAQGLTSPWFIVLVYLFQSLGELFISALGLAMIAALVPQHLMGFILGMWFLTQAAAFLLGGYVATFTAVPDNITDPLETLPVYTNVFGKIGLVTLGVAVVMLLMVPWLKRMIATPESH

SEQ ID NO: 1880 - protein, 493 aa, Escherichia coli O157:H7
MNKHASQPRAIYYVVALQIWEYFSFYGMRALLILYLTNQLKYNDTHAYELFSAYCSLVYVTPILGGFLADKVLGNRMAVMLGALLMAIGHVVLGASEIHPSFLYLSLAIIVCGYGLFKSNVSCLLGELYEPTDPRRDGGFSLMYAAGNVGSIIAPIACGYAQEEYSWAMGFGLAAVGMIAGLVIFLCGNRHFTHTRGVNKKVLRATNFLLPNWGWLLVLLVATPALITVLFWKEWSVYALIVATIIGLGVLAKIYRKAENQKQRKELRLIVTLTFFSMLFWAFAQQGGSSISLYIDRFVNRDMFGYTVPTAMFQSINAFAVMLCGVFLAWVVKESVAGNRTVRIWGKFALGLGLMSAGFCILTLSARWSAMYGHSSLPLMVLGLAVMGFAELFIDPVAMSQITRIEIPGVTGVLTGIYMLLSGAIANYLAGVIADQTSQASFDASGAINYSINAYIEVFDQITWGALACVGVVLMIWLYQALKFRNRALALES

SEQ ID NO: 1881 - protein, 714 aa, Gallus gallus
MAAKSKSKGRSVPNCFGYPLSIFFIVINEFCERFSYYGMRAVLVLYFKYFLRWDDNFSTAIYHTFVALCYLTPILGALIADSWLGKFKTIVSLSIVYTIGQAVMAVSSINDMTDQNRDGNPDNIAVHIALSMTGLILIALGTGGIKPCVSAFGGDQFEEHQEKQRSRFFSIFYLSINAGSLISTIITPILRAQECGIHSRQQCYPLAFGVPAALMAVSLVVFIAGSGMYKKVQPQGNIMVRVCKCIGFAIKNRFRHRSKEYPKREHWLDWASEKYDKRLIAQTKMVLKVLFLYIPLPMFWALFDQQGSRWTLQATTMDGDFGAMQIQPDQMQTVNPILIIIMVPVVDAVIYPLIQKCKINFTPLRRITVGMFLAGLAFVAAALLQVQIDKTLPVFPAAGQAQIKIINLGDSNANVTFLPNLQNVTVLPMESTGYRMFESSQLKSVMVNFGSESRSENIDSISSNTHTVTIKNAAAGIVSSLRSDNFTSKPEEGKNLVRFVNNLPQTVNITMGDTTFGILEETSISNYSPFSGGRTYDIVITAGSTNCKPTSEKLGYGGAYTIVINECSGDVTQLRYIEDIQPNTVHMAWQIPQYFILTCGEVVFSVTGLEFSYSQAPSNMKSVLQAGWLLTVAVGNIIVLIVAGASKLSEQWAEYVLFAALLFAVCIIFAVMAYFYTYTDPNEVEAQLDEEEKKKQIKQDPDLHGKESEAVSQM

SEQ ID NO: 1882 - protein, 489 aa, Salmonella enterica subsp. enterica serovar Typhi
MNTTAPTGLLQQPRPFFMIFFVELWERFSYYGVQGILAVFFVKQLGFSQEQAFITFGAFAALVYGLISIGGYVGDHLLGTKRTLVLGAIVLAIGYFMTGMSLLNPDLIFIALGTIAVGNGLFKANPASLLSKCYQPKDPRLDGAFTLFYMSINIGSLLSLSLAPVIADKFGYAVTYNLCGAGLIVALLVYFACRGMVKNIGSEPDHKPLRFRNLLLVLLGTVVMIFLCAWLMHNVKIANLVLIVLSIVVTIFFFREAFRLDKTGRNKMFVAFILMIEAVLFYILYAQMPTSLNFFAINNVHHEILGFAINPVSFQALNPFWVVVASPVLAAIYTRLGSKGKDLTMPMKFTLGMFLCALGFLTAAAGMWFADAQGLTSPWFIVLVYLFQSLGELLISALGLAMVAALVPQHLMGFILGMWFLTQAAAFLLGGYVATFTAVPENITDPLQTLPIYTGVFSKIGLVTLAVTVVMAIMVPWLNRMINTQGTEQ

SEQ ID NO: 1883 - protein, 493 aa, Salmonella enterica subsp. enterica serovar Typhi
MNKQASQPRAIYYVVALQIWEYFSFYGMRALLILYLTNQLKYDDNHAYELFSAYCSLVYVTPILGGYLADKVLGNRMAVMLGAFLMAIGHLVLGASEIAPTFLYLSLAIIVCGYGLFKSNISCLLGELYQPEDPRRDGGFSLLYAAGNIGSIVAPIACGYVQEEYSWAMGFALAAIGMLAGLVIFLCGNRHFTHTTGVNKAVLCARNYLLPNWGWLLILLVAAPLLITVLFWKEWSVYALIVATAIGLVVLAKIYRQAQTAKQRKELGLIVTLTLFSMLFWAFAQQGGSSISLYIDRFVNRDILGYSVPTAMFQSVNAFAVMLCGVVLAWLVKESVSGNRTVRIWGKFALGLGLMSAGFCILTLSARWSAAYGHSSMPLMVLGLAVMGFAELFIDPVAMSQITRIDIPGVTGVLTGIYMLLSGAIANYLAGVIADQTSQSAFDASGAVNYAINAYVDVFEQITWGALACVGVVLLIWLYQSFKFKSRALAVES

SEQ ID NO: 1884 - protein, 714 aa, Meleagris gallopavo
MAAKSKSKGSSVPNCFGYPLSIFFIVINEFCERFSYYGMRAVLVLYFKYFLRWDDNLSTAIYHTFVALCYLTPILGALIADSWLGKFKTIVSLSIVYTIGQAVMAISSINDMTDQNRDGNPDNIAVHIALSVTGLILIALGTGGIKPCVSAFGGDQFEEHQEKQRSRFFSIFYLSINAGSLISTVITPILRAQECGIHSRQQCYPLAFGVPAALMAVSLIVFIAGSGMYKKVQPQGNIMVQVCKCIGFAIKNRFRHRSKEYPKREHWLDWASEKYDKRLIAQTKMVLKVLFLYIPLPMFWALFDQQGSRWTLQATTMDGDFGALQIQPDQMQTVNPILIIIMVPVVDAVIYPLIQKCKINFTPLRKITVGMFLAGLAFIAAALVQVQIDKTLPVFPAAGQAQIRIINLGNSNANVTFLPDLQNVTVLPMESTNYRIFETSQLKSVIINFGSENRSESIDSTSSNTHTVTIKNAATGIVSSLRSDNFTSKPEEGKNLIRFVNNLPQTVNITMGDTDFGILEETSISNYTLFSGGRTDDIVIVADSTNCTVTSEALGYGGAYTIIINECSEDVTQLRYIEDIQPNTVHMAWQIPQYFLLTCGEVVFSVTGLEFSYSQAPSNMKSVLQAGWLLTVAFGNIIVLIVAGASKLSEQWAEYVLFAALLFAVCIIFAVMAYFYTYIDPNEVEAQLDEEEKKKQIKQDPDLYGKESEADSRM

SEQ ID NO: 1885 - protein, 581 aa, Homo sapiens [sequence omitted]

SEQ ID NO: 1886 - protein, 581 aa, Homo sapiens
MPAPRAREQPRVPGERQPLLPRGARGPRRWRRAAGAAVLLVEMLERAAFFGVTANLVLYLNSTNFNWTGEQATRAALVFLGASYLLAPVGGWLADVYLGRYRAVALSLLLYLAASGLLPATAFPDGRSSFCGEMPASPLGPACPSAGCPRSSPSPYCAPVLYAGLLLLGLAASSVRSNLTSFGADQVMDLGRDATRRFFNWFYWSINLGAVLSLLVVAFIQQNISFLLGYSIPVGCVGLAFFIFLFATPVFITKPPMGSQVSSMLKLALQNCCPQLWQRHSARDRQCARVLADERSPQPGASPQEDIANFQVLVKILPVMVTLVPYWMVYFQMQSTYVLQGLHLHIPNIFPANPANISVALRAQGSSYTIPEAWLLLANVVVVLILVPLKDRLIDPLLLRCKLLPSALQKMALGMFFGFTSVIVAGVLEMERLHYIHHNETVSQQIGEVLYNAAPLSIWWQIPQYLLIGISEIFASIPGLEFAYSEAPRSMQGAIMGIFFCLSGVGSLLGSSLVALLSLPGGWLHCPKDFGNINNCRMDLYFFLLAGIQAVTALLFVWIAGRYERASQGPASHSRFSRDRG

SEQ ID NO: 1887 - protein, 577 aa, Homo sapiens
MEGSGGGAGERAPLLGARRAAAAAAAAGAFAGRRAACGAVLLTELLERAAFYGITSNLVLFLNGAPFCWEGAQASEALLLFMGLTYLGSPFGGWLADARLGRARAILLSLALYLLGMLAFPLLAAPATRAALCGSARLLNCTAPGPDAAARCCSPATFAGLVLVGLGVATVKANITPFGADQVKDRGPEATRRFFNWFYWSINLGAILSLGGIAYIQQNVSFVTGYAIPTVCVGLAFVVFLCGQSVFITKPPDGSAFTDMFKILTYSCCSQKRSGERQSNGEGIGVFQQSSKQSLFDSCKMSHGGPFTEEKVEDVKALVKIVPVFLALIPYWTVYFQMQTTYVLQSLHLRIPEISNITTTPHTLPAAWLTMFDAVLILLLIPLKDKLVDPILRRHGLLPSSLKRIAVGMFFVMCSAFAAGILESKRLNLVKEKTINQTIGNVVYHAADLSLWWQVPQYLLIGISEIFASIAGLEFAYSAAPKSMQSAIMGLFFFFSGVGSFVGSGLLALVSIKAIGWMSSHTDFGNINGCYLNYYFFLLAAIQGATLLLFLIISVKYDHHRDHQRSRANGVPTSRRA

SEQ ID NO: 1888 - protein, 461 aa, Homo sapiens
MLAFPLLAAPATRAALCGSARLLNCTAPGPDAAARCCSPATFAGLVLVGLGVATVKANITPFGADQVKDRGPEATRRFFNWFYWSINLGAILSLGGIAYIQQNVSFVTGYAIPTVCVGLAFVVFLCGQSVFITKPPDGSAFTDMFKILTYSCCSQKRSGERQSNGEGIGVFQQSSKQSLFDSCKMSHGGPFTEEKVEDVKALVKIVPVFLALIPYWTVYFQMQTTYVLQSLHLRIPEISNITTTPHTLPAAWLTMFDAVLILLLIPLKDKLVDPILRRHGLLPSSLKRIAVGMFFVMCSAFAAGILESKRLNLVKEKTINQTIGNVVYHAADLSLWWQVPQYLLIGISEIFASIAGLEFAYSAAPKSMQSAIMGLFFFFSGVGSFVGSGLLALVSIKAIGWMSSHTDFGNINGCYLNYYFFLLAAIQGATLLLFLIISVKYDHHRDHQRSRANGVPTSRRA

SEQ ID NO: 1889 - protein, 708 aa, Homo sapiens [sequence omitted]

SEQ ID NO: 1890 - protein, 605 aa, Homo sapiens
MGMSKSHSFFGYPLSIFFIVVNEFCERFSYYGMRAILILYFTNFISWDDNLSTAIYHTFVALCYLTPILGALIADSWLGKFKTIVSLSIVYTIGQAVTSVSSINDLTDHNHDGTPDSLPVHVVLSLIGLALIALGTGGIKPCVSAFGGDQFEEGQEKQRNRFFSIFYLAINAGSLLSTIITPMLRVQQCGIHSKQACYPLAFGVPAALMAVALIVFVLGSGMYKKFKPQGNIMGKVAKCIGFAIKNRFRHRSKAFPKREHWLDWAKEKYDERLISQIKMVTRVMFLYIPLPMFWALFDQQGSRWTLQATTMSGKIGALEIQPDQMQTVNAILIVIMVPIFDAVLYPLIAKCGFNFTSLKKMAVGMVLASMAFVVAAIVQVEIDKTLPVFPKGNEVQIKVLNIGNNTMNISLPGEMVTLGPMSQTNAFMTFDVNKLTRINISSPGSPVTAVTDDFKQGQRHTLLVWAPNHYQVVKDGLNQKPEKGENGIRFVNTFNELITITMSGKVYANISSYNASTYQFFPSGIKGFTISSTEIPPQCQPNFNTFYLEFGSAYTYIVQRKNDSCPEVKVFEDISANTVNMALQIPQYFLLTCGEVVFSVTGLEF

SEQ ID NO: 1891 - protein, 708 aa, Homo sapiens
MGMSKSHSFFGYPLSIFFIVVNEFCERFSYYGMRAILILYFTNFISWDDNLSTAIYHTFVALCYLTPILGALIADSWLGKFKTIVSLSIVYTIGQAVTSVSSINDLTDHNHDGTPDSLPVHVVLSLIGLALIALGTGGIKPCVSAFGGDQFEEGQEKQRNRFFSIFYLAINAGSLLSTIITPMLRVQQCGIHSKQACYPLAFGVPAALMAVALIVFVLGSGMYKKFKPQGNIMGKVAKCIGFAIKNRFRHRSKAFPKREHWLDWAKEKYDERLISQIKMVTRVMFLYIPLPMFWALFDQQGSRWTLQATTMSGKIGALEIQPDQMQTVNAILIVIMVPIFDAVLYPLIAKCGFNFTSLKKMAVGMVLASMAFVVAAIVQVEIDKTLPVFPKGNEVQIKVLNIGNNTMNISLPGEMVTLGPMSQTNAFMTFDVNKLTRINISSPGSPVTAVTDDFKQGQRHTLLVWAPNHYQVVKDGLNQKPEKGENGIRFVNTFNELITITMSGKVYANISSYNASTYQFFPSGIKGFTISSTEIPPQCQPNFNTFYLEFGSAYTYIVQRKNDSCPEVKVFEDISANTVNMALQIPQYFLLTCGEVVFSVTGLEFSYSQAPSNMKSVLQAGWLLTVAVGNIIVLIVAGAGQFSKQWAEYILFAALLLVVCVIFAIMARFYTYINPAEIEAQFDEDEKKNRLEKSNPYFMSGANSQKQM

SEQ ID NO: 1892 - protein, 729 aa, Homo sapiens
MNPFQKNESKETLFSPVSIEEVPPRPPSPPKKPSPTICGSNYPLSIAFIVVNEFCERFSYYGMKAVLILYFLYFLHWNEDTSTSIYHAFSSLCYFTPILGAAIADSWLGKFKTIIYLSLVYVLGHVIKSLGALPILGGQVVHTVLSLIGLSLIALGTGGIKPCVAAFGGDQFEEKHAEERTRYFSVFYLSINAGSLISTFITPMLRGDVQCFGEDCYALAFGVPGLLMVIALVVFAMGSKIYNKPPPEGNIVAQVFKCIWFAISNRFKNRSGDIPKRQHWLDWAAEKYPKQLIMDVKALTRVLFLYIPLPMFWALLDQQGSRWTLQAIRMNRNLGFFVLQPDQMQVLNPLLVLIFIPLFDFVIYRLVSKCGINFSSLRKMAVGMILACLAFAVAAAVEIKINEMAPAQPGPQEVFLQVLNLADDEVKVTVVGNENNSLLIESIKSFQKTPHYSKLHLKTKSQDFHFHLKYHNLSLYTEHSVQEKNWYSLVIREDGNSISSMMVKDTESRTTNGMTTVRFVNTLHKDVNISLSTDTSLNVGEDYGVSAYRTVQRGEYPAVHCRTEDKNFSLNLGLLDFGAAYLFVITNNTNQGLQAWKIEDIPANKMSIAWQLPQYALVTAGEVMFSVTGLEFSYSQAPSGMKSVLQAAWLLTIAVGNIIVLVVAQFSGLVQWAEFILFSCLLLVICLIFSIMGYYYVPVKTEDMRGPADKHIPHIQGNMIKLETKKTKL

SEQ ID NO: 1893 - protein, 729 aa, Homo sapiens
MNPFQKNESKETLFSPVSIEEVPPRPPSPPKKPSPTICGSNYPLSIAFIVVNEFCERFSYYGMKAVLILYFLYFLHWNEDTSTSIYHAFSSLCYFTPILGAAIADSWLGKFKTIIYLSLVYVLGHVIKSLGALPILGGQVVHTVLSLIGLSLIALGTGGIKPCVAAFGGDQFEEKHAEERTRYFSVFYLSINAGSLISTFITPMLRGDVQCFGEDCYALAFGVPGLLMVIALVVFAMGSKIYNKPPPEGNIVAQVFKCIWFAISNRFKNRSGDIPKRHDWLDWAAEKYPKQLIMDVKALTRVLFLYIPLPMFWALLDQQGSRWTLQAIRMNRNLGFFVLQPDQMQVLNPLLVLIFIPLFDFVIYRLVSKCGINFSSLRKMAVGMILACLAFAVAARVEIKINEMAPAQPGPQEVFLQVLNLADDEVKVTVVGNENNSLLIESIKSFQKTPHYSKLHLKTKSQDFHFHLKYHNLSLYTEHSVQEKNWYSLVIREDGNSISSMMVKDTESRTTNGMTTVRFVNTLHKDVNISLSTDTSLNVGEDYGVSAYRTVQRGEYPAVHCRTEDKNFSLNLGLLDFGAAYLFVITNNTNQGLQAWKIEDIPANKMSIRWQLPQYALVTAGEVMFSVTGLEFSYSQAPSSMKSVLQAAWLLTIAVGNIIVLVVAQFSGLVQWAEFILFSCLLLVICLIFSIMGYYYVPVKTEDMRGPADKHIPHIQGNMIKLETKKTKL

SEQ ID NO: 1894 - protein, 208 aa, Homo sapiens
MDQWGVYFNPVLVSFCQSFFGYPLSIFFIVVNEFCERFSYYGMRAILILYFTNFISWDDNLSTAIYHTFVALCYLTPILGALIADSWLGKFKTIVSLSIVYTIGQAVTSVSSINDLTDHNHDGTPDSLPVHVVLSLIGLALIALGTGGIKPCVSAFGGDQFEEGQEKQRNRFFSIFYLAINAGSLLSTIITPMLRGKRYLKGTSVGLF

SEQ ID NO: 1895 - protein, 282 aa, Homo sapiens
MRAILILYFTNFISWDDNLSTAIYHTFVALCYLTPILGALIADSWLGKFKTIVSLSIVYTIGQAVTSVSSINDLTDHNHDGTPDSLPVHVVLSLIGLALIALGTGGIKPCVSAFGGDQFEEGQEKQRNRFFSIFYLAINAGSLLSTIITPMLRGKRYLKGTSVGLFLVRPSPCLLRFVLFFPSALFSSCQLHAGMHVGIWSKCFLPCEFHLLFVLFKSLIPVTTGESKPSLAWASIFLNCYSCKVMLVVRGKRQERCLGSQAGGRSCHFSLQALLPSDISVT

SEQ ID NO: 1896 - protein, 708 aa, Canis familiaris
MGMSKSYGCFGYPLSIFFIVVNEFCERFSYYGMRALLILYFRRFIGWDDNLSTAIYHTFVALCYLTPILGALIADSWLGKFKTIVSLSIVYTIGQAVTAVSSINDLTDYNKDGTPDNLSVHVALSMIGLALIALGTGGIKPCVSAFGGDQFEEGQEKQRNRFFSIFYLAINAGSLISTIVTPMLRVHECGIYSQKACYPLAFGVPAALMAVSLIVFVIGSGMYKKFQPQGNVMGKVVKCIGFALKNRFRHRSKQFPKREHWLDWAKEKYDERLISQIKMVTKVMFLYIPLPMFWALFDQQGSRWTLQATAMSGKIGLLEVQPDQMQTVNAILIVVMVPIMDAVVYPLIAKCGFNFTSLKRMTVGMFLASMAFVMAAIVQLEIDKTLPVFPKQNEVQIKVLNIGNGAMNVSFPGAVVTVSQMSQSDGFMTFDVDKLTSINISSTGSPVIPVTYNFEQGHRHTLLVWAPNNYRVVKDGLNQKPEKGENGIRFINSLNESLNITMGDKVYVNVTSHNASEYQFFSLGTKNITISSTQQISQNCTKVLQSSNLEFGSAYTYVIGTQSTGCPELHMFEDISPNTVNMALQIPQYFLITCGEVVFSVTGLEFSYSQAPSNMKSVLQAGWLLTVAVGNIIVLIVAGAGQFSEQWAEYILFAALLLVVCVIFAIMARFYTYVNPAEIEAQFDDDEKKNLEKMNVYSTVTPVSQTQM

SEQ ID NO: 1897 - protein, 535 aa, Cytophaga hutchinsonii
MSNQTIQTPTTNGMPSGIPFIVGNEAAERFSFYGMRAILAVFMTSYLHMTESTATEWAHTFNSAVYFTPILGAFLADIFIGKYRTILYLSVLYCFGHLVLALNESKDGLFWGLTLISIGAGGIKPCVSAHVGDQFGIKNKHLIERVFSIFYFAVNFGSLFSTLLIPYLLEHYGPAYAFGLPGILMFVATFIFWSGRNKFVHVPPFGKAYFKTVFGKEGLSAIGRLIFIYAFIAIFWALYDQHASTWVYQSKSAFLNKDINLFGLVEFTLLPSQIQAANPVLVLVLIPAFAFFIYPALNKIITLKPLIKILLGMFMCVLAFLVAAYIEKRISSGIETSVWWQFLAYLILTMAEVMVSITALEFSYTQAPNQMKSTVMGIFMFSISLGNILVAVISNYNNLHEEVKTVEIGTKTYISIKDYTPVKGEKIEFEDGTGLFILQQNSKTSLMDTIPLGGTYLVGDVDAVSNRFTLEDNGWHAIQTIKKSELPKGYKVVFHRFKHQSYFYMYALLMFVTAVLFIGVALKYKGKTYIQGEAV

SEQ ID NO: 1898 - protein, 707 aa, Ovis aries
MGMSVPKSCFGYPLSIFFIVVNEFCERFSYYGMRALLILYFQRFLGWNDNLGTAIYHTFVALCYLTPILGALIADSWLGKFKTIVSLSIVYTIGQVVIAVSSINDLTDFNHDGTPNNISVHVALSMIGLVLIALGTGGIKPCVSAFGGDQFEEGQEKQRNRFFSIFYLAINAGSLLSTIITPMLRVQVCGIHSKQACYPLAFGVPAALMAVSLIVFVIGSGMYKKVQPQGNIMSKVARCIGFAIKNRISHRSKKFPKREHWLDWASEKYDERLISQIKMVTRVMFLYIPLPMFWALFDQQGSRWTLQATTMSGKIGIIEIQPDQMQTVNAILIVVMVPIVDAVVYPLIAKCGLNFTSLKKMTVGMFLASMAFVAAAIVQVDIDKTLPVFPKGNEVQIKVLNIGNNSMTVSFPGTTVTCDQMSQTNGFLTFNVDNLSINISSTGTPVTPVTHNFESGHRHTLLVWAPSNYQVVKDGLNQKPEKGRNGIRFVNAFGESFGVTMDGEVYNNVSGHNASEYLFFSSGVKSFTINSPEISQQCEKQFKTSYLEFGSAFTYVISRKSDGCPEPKIFEDISPNTVSMALQIPQYFLLTCGEVVFSITGLEFSYSQAPSNMKSVLQAGWLLTVAVGNIIVLIVAGAGQFSEQWAEYVLFAALLLVVCIIFAIMARFYTYVNPAEIEAQFDEDDKEDDLEKSNPYAKLDFVSQTQM

SEQ ID NO: 1899 - protein, 707 aa, Oryctolagus cuniculus
MGMSKSLSCFGYPLSIFFIVVNEFCERFSYYGMRALLILYFRNFIGWDDNLSTVIYHTFVALCYLTPILGALIADAWLGKFKTIVWLSIVYTIGQAVTSLSSVNELTDNNHDGTPDSLPVHVAVCMIGLLLIALGTGGIKPCVSAFGGDQFEEGQEKQRNRFFSIFYLAINAGSLLSTIITPMVRVQQCGIHVKQACYPLAFGIPAILMAVSLIVFIIGSGMYKKFKPQGNILSKVVKCICFAIKNRFRHRSKQFPKRAHWLDWAKEKYDERLIAQIKMVTRVLFLYIPLPMFWALFDQQGSRWTLQATTMSGRIGILEIQPDQMQTVNTILIIILVPIMDAVVYPLIAKCGLNFTSLKKMTIGMFLASMAFVAAAILQVEIDKTLPVFPKANEVQIKVLNVGSENMIISLPGQTVTLNQMSQTNEFMTFNEDTLTSINITSGSQVTMITPSLEAGQRHTLLVWAPNNYRVVNDGLTQKSDKGENGIRFVNTYSQPINVTMSGKVYEHIASYNASEYQFFTSGVKGFTVSSAGISEQCRRDFESPYLEFGSAYTYLITSQATGCPQVTEFEDIPPNTMNMAWQIPQYFLITSGEVVFSITGLEFSYSQAPSNMKSVLQAGWLLTVAVGNIIVLIVAGAGQINKQWAEYILFAALLLVVCVIFAIMARFYTYVNPAEIEAQFEEDEKKKNPEKNDLYPSLAPVSQTQM

SEQ ID NO: 1900 - protein, 707 aa, Oryctolagus cuniculus
MGMSKSLSCFGYPLSIFFIVVNEFCERFSYYGMRALLILYFRNFIGWDDNLSTVIYHTFVALCYLTPILGALIADAWLGKFKTIVWLSIVYTIGQAVTSLSSVNELTDNNHDGTPDSLPVHVAVCMIGLLLIALGTGGIKPCVSAFGGDQFEEGQEKQRNRFFSIFYLAINAGSLLSTIITPMVRVQQCGIHVKQACYPLAFGIPAILMAVSLIVFIIGSGMYKKFKPQGNILSKVVKCICFAIKNRFRHRSKQFPKRAHWLDWAKEKYDERLIAQIKMVTRVLFLYIPLPMFWALFDQQGSRWTLQATTMSGRIGILEIQPDQMQTVNTILIIILVPIMDAVVYPLIAKCGLNFTSLKKMTIGMFLASMAFVAAAILQVEIDKTLPVFPKANEVQIKVLNVGSENMIISLPGQTVTLNQMSQTNEFMTFNEDTLTSINITSGSQVTMITPSLEAGQRHTLLVWAPNNYRVVNDGLTQKSDKGENGIRFVNTYSQPINVTMSGKVYEHIASYNASEYQFFTSGVKGFTVSSAGISEQCRRDFESPYLEFGSAYTYLITSQATGCPQVTEFEDIPPNTMNMAWQIPQYFLITSGEVVFSITGLEFSYSQAPSNMKSVLQDRWLLTVAVGNIIVLIVAGAGQINKQWAEYILFAALLLVVCVIFAIMARFYTYVNPAEIEAQFEEDEKKKNPEKNDLYPSVAPVSQTQM

SEQ ID NO: 1901 - protein, 729 aa, Oryctolagus cuniculus
MNPFQQNESKETLFSPVSTEETPPRLSSPAKKTPPKICGSNYPLSIAFIVVNEFCERFSYYGMKAVLTLYFLYFLHWNEDTSTSVYHAFSSLCYFTPILGAAIADSWLGKFKTIIYLSLVNVLGHVIKSLSAFPILGGKVVHTVLSLVGLCLIALGTGGIKPCVAAFGGDQFEEKHAEERTRYFSGFYLAINAGSLISTFITPMLRGDVQCFGEDCYALAFGVPGLLMVIALVVFAMGSKMYKKPPPEGNIVAQVVKCIWFAISNRFKNRSEDIPKRQHWLDWAAEKYPKQLIMDVKTLTRVLFLYIPLPMFWALLDQQGSRWTLQATKMNGNLGFFVLQPDQMQVLNPLLVLIFIPLFDLVIYRLISKCGINFTSLRKMAVGMVLACLAFAAAATVEIKINEMAPPQPGSQEILLQVLNLADDEVKLTVLGNNNNSLLADSIKSFQKTPHYSKIHLNTKSQDFYFHLKYHNLSIYTEHSVEERNWYSLIIREDGKSISSIMVKDMENETTYGMTAIRFINTLQENVNISLGTDISLNVGENYGVSAYRTVQRGEYPAVHCKTEDKDFSLNLGLLDFGASYLFVITNSTKQGLQAWKMEDIPANKVSIAWQLPQYALVTAGEVMFSVTGLEFSYSQAPSSMKSVLQAAWLLTVAIGNIIVLVVAQFSGLVQWAEFVLFSCLLLVVCLIFSIMGYYYIPIKSEDIQGPEDKQIPHMQGNMINLETKKTKL

SEQ ID NO: 1902 - protein, 447 aa, Mus musculus
MLAFPAENFYRGAYPVFNNTSVEEQAGLFHVALLTLCLGTGGIRAVVCPPDMCGSQERESKKPMPFCNWASWSANLNAAVVFLGISSIQPLGSGALGILLPSLSVFTALVTLYLKHCDLIYRPENRCSLLTIARAFVRALKTRCLPYCHFGRDGSSWLDHAMEKQGGHHSELQEEDTRNISALLPLFSFQILYRTCLLQIPSGYYLQTMNSNRNWGGFSLPIALMNAISLLPLLILPPFMDYFSNCLLPSKRDGPFLSACMIAGNICAASSVAMAGFLEIYRKLAREQSPSGKLFSVSSMACVCLVPQYVLLGVSEVLVNPAVSMVTHRVIPGASMAFLTLSHGSACFAGAMLIKLLYLISEGNWFPNTLDKGNLENFFFVLASLMLLNILGLWRASWRYCNLNHFNAQRIRGNRCEETLLLTEKSLKFYGSTQGASSSIDLWETAL

SEQ ID NO: 1903 - protein, 434 aa, Leptospira interrogans serovar lai str. 56601
MDVQNKDVNSHPKGLTILFFTETWERFSFYGMRALLVLFLTKVFHFSDVDANRIYGIYTGLVYLTPLLGGYLADRYLGFKKCIFLGATLMMFGHLSLAFETKPFFFLGLGLLILGVGFFKPNIATVLGRIYDEDNKTRMKDSGFTIFYMGINLGGFLGPLFCGYFSKSWGWGYGFGVAAFGVLFGILILLLGQKQFPEKVFEPGKKYHTVEGQKHSTLKKEEKQKLAVIFIFTLFVIIFWAAFEQIGSSINLFIDRHVNRNLFGYDIPTPFFQSLNPLLILIFAPIIASFWTTLAKNNWKPDTSTRFATGFFILALGFSVLTLVTLDFRPGHKISAVWLLLMVLCITVGELFTSPGGLALVTKLSPKQLGGFMMGVWLLSSFFGNILAGELAGFMKTDSFPTFFGMFAILAFVGGMILYITRKKLQNWMHGADQ

SEQ ID NO: 1904 - protein, 620 aa, Xanthomonas campestris pv. campestris str. ATCC 33913
MVYRHGVQSPNAQWQAATLAGRRPHTGAVRSARNAARPTAAVASPGTPLLPLHRLPRRHTHASAAACGPFRTSNPVPRDGGQQAAAGTIGLVFCSTGLPLTTSTLPAPAADARLPRQIPFIIGNEACERFSFYGMRNILVQFLITSLLLQEVGAPERDAEAKHILHSFMIGVFFFPLLGGWLADRFFGKYTTIIWFSLIYCAGHACLALFEDSRSGFFVGLGLIAFGAGGIKPLVASFMGDQFDQSNKHRAKVVFDAFYWIINFGSLFASLLIPLALKHLGPSWAFGIPGILMFIATAVFWLGRKRYVRVPLPPKDPHGFGAVVRSALLAHAPGQGRPGLALAAISVLLALACLGLTEQLGLVICLCMALVLLLAGIGGGTWWQLERARGTHPDAAVDGVRALLRVLVIFALVTPFFSLFDQKASTWVLQGREMRMPAWFTASQMQALNPLLVMLLIPFNNLVLYPLLRRLGWEPTSLRRMTSGIAFSGVAWIAVGAIQVAMDGGEPMHIAWQILPYALLTFGEVLVSATGIEFAYSQAPPSMKGVVMSFWYLTTTVGNLWVLLSNVAVRNATVTSHIADTGLSEAAFLMFFFAAFAFLAALAFGLYARRYRMVDNYRPA

SEQ ID NO: 1905 - protein, 585 aa, Arabidopsis thaliana
MGSIEEEARPLIEEGLILQEVKLYAEDGSVDFNGNPPLKEKTGNWKACPFILGNECCERLAYYGIAGNLITYLTTKLHQGNVSAATNVTTWQGTCYLTPLIGAVLADAYWGRYWTIACFSGIYFIGMSALTLSASVPALKPAECIGDFCPSATPAQYAMFFGGLYLIALGTGGIKPCVSSFGADQFDDTDSRERVRKASFFNWFYFSINIGALVSSSLLVWIQENRGWGLGFGIPTVFMGLAIASFFFGTPLYRFQKPGGSPITRISQVVVASFRKSSVKVPEDATLLYETQDKNSAIAGSRKIEHTDDCQYLDKAAVISEEESKSGDYSNSWRLCTVTQVEELKILIRMFPIWASGIIFSAVYAQMSTMFVQQGRAMNCKIGSFQLPPAALGTFDTASVIIWVPLYDRFIVPLARKFTGVDKGFTEIQRMGIGLFVSVLCMAAAAIVEIIRLHMANDLGLVESGAPVPISVLWQIPQYFILGAAEVFYFIGQLEFFYDQSPDAMRSLCSALALLTNALGNYLSSLILTLVTYFTTRNGQEGWISDNLNSGHLDYFFWLLAGLSLVNMAVYFFSAARYKQKKASS

SEQ ID NO: 1906 - protein, 586 aa, Arabidopsis thaliana
MGSIEEEARPLIEEGLILQEVKLYAEDGSVDFNGNPPLKEKTGNWKACPFILGNECCERLAYYGIAGNLITYLTTKLHQGNVSAATNVTTWQGTCYLTPLIGAVLADAYWGRYWTIACFSGIYFIGMSALTLSASVPALKPAECIGDFCPSATPAQYAMFFGGLYLIALGTGGIKPCVSSFGADQFDDTDSRERVRKASFFNWFYFSINIGALVSSSLLVWIQENRGWGLGFGIPTVFMGLAIASFFFGTPLYRFQKPGGSPITRISQVVVASFRKSSVKVPEDATLLYETQDKNSAIAGSRKIEHTDDCQYLDKAAVISEEESKSGDYSNSWEDLCTVTQVEELKILIRMFPIWASGIIFSAVYAQMSTMFVQQGRAMNCKIGSFQLPPAALGTFDTASVIIWVPLYDRFIVPLARKFTGVDKGFTEIQRMGIGLFVSVLCMAAAAIVEIIRLHMANDLGLVESGAPVPISVLWQIPQYFILGAAEVFYFIGQLEFFYDQSPDAMRSLCSALALLTNALGNYLSSLILTLVTYFTTRNGQEGWISDNLNSGHLDYFFWLLAGLSLVNMAVYFFSAARYKQKKASS

SEQ ID NO: 1907 - protein, 590 aa, Arabidopsis thaliana
MVNSNEEDERRILDVEESLLTQEEVNNHLTGLSSTAEDGSIDIYGNPPSKKKTGNWKACPFILGNECCERLAYYGIAKNLITYYTSELHESNVSAASDVMIWQGTCYITPLIGAVIADSYWGRYWTIASFSAIYFIGMALLTLSASLPVLKPAACAGVAAALCSPATTVQYAVFFTGLYLIALGTGGIKPCVSSFGADQFDDTDPRERVRKASFFNWFYFSINIGSFISSTLLVWVQENVGWGLGFLIPTVFMGVSIASFFIGTPLYRFQKPGGSPITRVCQVLVAAYRKLKLNLPEDISFLYETREKNSMIAGSRKIQHTDGYKFLDKAAVISEYESKSGAFSNPWKLCTVTQVEEVKTLIRMFPIWASGIVYSVLYSQISTLFVQQGRSMNRIIRSFEIPPASFGVFDTLIVLISIPIYDRFLVPFVRRFTGIPKGLTDLQRMGIGLFLSVLSIAAAAIVETVRLQLAQDFVAMSIFWQIPQYILMGIAEVFFFIGRVEFFYDESPDAMRSVCSALALLNTAVGSYLSSLILTLVAYFTALGGKDGWVPDDLNKGHLDYFFWLLVSLGLVNIPVYALICVKHTKKKAL

SEQ ID NO: 1908 - protein, 593 aa, Oryza sativa (japonica cultivar-group)
MAEVTVVRAEREEESTLEQGLLAIPEESNQLTYTGDGSVDFSGNPVVKERTGRWRACPFILGNECCERLAYYGISTNLVTYLTKKLHDGNASAASNVTAWQGTCYLTPLIGAILADAYWGRYWTIATFSTIYFIGMAVLTLSASVPTFMPPPCEGSFCPPANPLQYTVFFLGLYLIALGTGGIKPCVSSFGADQFDDTDPVERIQKGSFFNWFYFSINIGALISSSFLVWVQDNIGWGIGFGIPTIFMGLAIISFFSGTSLYRFQKPGGSPITRVCQVVVASFRKWNVHVPEDSSRLYELPDGASAIEGSRQLEHTDELRCLDKAATITDLDVKADSFTNPWRICTVTQVEELKILVRMFPVWATTIVFSAVYAQMSTMFVEQGMMLDTSVGPFKIPPASLSTFDVVSVIIWVPLYDSILVPIARRFTGNPRGFTELQRMGIGLVISIFSMAAAAVLEIKRLDIARAEHLVDQNVPVPLNICWQIPQYFLVGASEVFTFVGSLEFFYDQSPDAMRSLCSALQLVTTALGNYLSAFILTLVAYFTTRGGNPGWIPDNLNQGHLDYFFWLLAGLSFLNFVIYVICANKYKSKKAA

SEQ ID NO: 1909 - protein, 618 aa, Schizosaccharomyces pombe
MSSIEEQITKSDSDFIISEDQSYLSKEKKADGSATINTADEQSSTDELQKSMSTGVLVNGDLYPSPTEEELATLPRVCGTIPWKAFIIIIVELCERFAYYGLTVPFQNYMQFGPKDATPGALNLGESGADGLSNFFTFWCYVTPVGAALIADQFLGRYNTIVCSAVIYFIGILILTCTAIPSVIDAGKSMGGFVVSLIIIGLGTGGIKSNVSPLMAEQLPKIPPYVKTKKNGSKVIVDPVVTTSRAYMIFYWSINVGSLSVLATTSLESTKGFVYAYLLPLCVFVIPLIILAVSKRFYKHTPPSGSIFVRVGQVFFLAAQNKFNLEKTKPSCTTTVGRVTLKDQWDDLFIDELKRALRACKTFLFYPIYWVCYGQMTNNLISQAGQMQTGNVSNDLFQAFDSIALIIFIPICDNIIYPLLRKYNIPFKPILRITLGFMFATASMIYAAVLQAKIYQRGPCYANFTDTCVSNDISVWIQIPAYVLIAFSEIFASITGLEFAFTKAPPSMKSIITALFLFTNAFGAILSICISSTAVNPKLTWMYTGIAVTAFIAGIMFWVCFHHYDAMEDEQNQLEFKRNDALTKKDVEKEVHDSYSMADESQYNLEKATAEEEIMKST

SEQ ID NO: 1910 - protein, 601 aa, Saccharomyces cerevisiae
MLNHPSQGSDDAQDEKQGDFPVIEEEKTQAVTLKDSYVSDDVANSTERYNLSPSPEDEDFEGPTEEEMQTLRHVGGKIPMRCWLIAIVELSERFSYYGLSAPFQNYMEYGPNDSPKGVLSLNSQGATGLSYFFQFWCYVTPVFGGYVADTFWGKYNTICCGTAIYIAGIFILFITSIPSVGNRDSAIGGFIAAIILIGIATGMIKANLSVLIADQLPKRKPSIKVLKSGERVIVDSNITLQNVFMFFYFMINVGSLSLMATTELEYHKGFWAAYLLPFCFFWIAVVTLIFGKKQYIQRPIGDKVIAKSFKVCWILTKNKFDFNAAKPSVHPEKNYPWNDKFVDEIKRALAACKVFIFYPIYWTQYGTMISSFITQASMMELHGIPNDFLQAFDSIALIIFIPIFEKFVYPFIRRYTPLKPITKIFFGFMFGSFAMTWAAVLQSFVYKAGPWYNEPLGHNTPNHVHVCWQIPAYVLISFSEIFASITGLEYAYSKAPASMKSFIMSIFLLTNAFGSAIGCALSPVTVDPKFTWLFTGLAVACFISGCLFWLCFRKYNDTEEEMNAMDYEEEDEFDLNPISAPKANDIEILEPMESLRSTTKY

SEQ ID NO: 1911 - protein, 601 aa, Saccharomyces cerevisiae
MLNHPSQGSDDAQDEKQGDFPVIEEEKTQAVTLKDSYVTDDVANSTERYNLSPSPEDEDFEGPTEEEMQTLRHVGGKIPMRCWLIAIVELSERFSYYGLSAPFQNYMEYGPNDSPKGVLSLNSQGATGLSYFFQFWCYVTPVFGGYVADTFWGKYNTICCGTAIYIAGIFILFITSIPSVGNRDSAIGGFIAAIILIGIATGMIKANLSVLIADQLPKRKPSIKVLKSGERVIVDSNITLQNVFMFFYFMINVGSLSLMATTELEYHKGFWAAYLLPFCFFWIAVVTLIFGKKQYIQRPIGDKVIAKSFKVCWILTKNKFDFNAAKPSVHPEKNYPWNDKFVDEIKRALAACKVFIFYPIYWTQYGTMISSFITQASMMELHGIPNDFLQAFDSIALIIFIPIFEKFVYPFIRRYTPLKPITKIFFGFMFGSFAMTWAAVLQSFVYKAGPWYNEPLGHNTPNHVHVCWQIPAYVLISFSEIFASITGLEYAYSKAPASMKSFIMSIFLLTNAFGSAIGCALSPVTVDPKFTWLFTGLAVACFISGCLFWLCFRKYNDTEEEMNAMDYEEEDEFDLNPISAPKANDIEILEPMESLRSTTKY

SEQ ID NO: 1912 - protein, 410 aa, Streptomyces coelicolor A3(2)
MAEHPAYPVGLRLAGRRVVVLGGGQVAQRRLPALVAAGADIRLVSPEATPSVEAMADAGEITWEQRPYAEGDLADAWYALIATSDTAANDAASAEGERHRVWCVRSDDADRATAWTPATGHSEGVTVAVLTTEARHRDPRHTAAIRDAVVEGLRDGTLVAPHRRTRTPGVALVGGGPGDPDLITVRGRRLLAEADVVIADRLGPRDLLAELPPHVEVIDAAKIPYGRFMAQEAINNALIEHARQGKAVVRLKGGDPFVFGRGMEEAQALAEAGIACTVVPGISSTISVPGAAGIPVTHRGVAHEFTVVSGHVAPDDERSLVDWPSLAKLTGTLVILMGVDKIGKIAGTLIAHGKSPDTPVALVQEGTTAAQRRVDATLATVAEVAVAEEVRPPAVIVVGEVVAVGPHGTA

SEQ ID NO: 1913 - protein, 565 aa, Streptomyces coelicolor A3(2)
MSPTTLPAGPEHGHVTFLGAGPGDPGLLTLRAVEALAHADVLVAEHEVLDVVRTHAKQGVSEVHTDADPSDPGTGAPQLTVVDGASTTFGAPAVRDAAHLVMEAARGGRRVVRAVTGDPGLDAYAAEEMLACAAAGVPFEVVPGIANAVGVPAYAGVPLRDAEGADVRFVDARTASDRCWTEVGASDGTVVVSTTLDSVAAAAGELVSAGRKPDTPLTVTIAGTTTRQRTWTATLGTVAQTLKQAKVLPSPDGGRPVIAVVGERSSAARRDQLSWFESKPLFGWKVLVPRTKEQAASLSDQLRSYGAVPSEVPTIAVEPPRTPQQMERAVKGLVTGRYEWIAFTSVNAVKAVREKFEEYGLDARAFAGIKVAAVGEQTANALIAFGVKPDLVPSGEQSAAGLLEDWPPYDPVFDPIDRVFLPRADIATETLVAGLIELGWEVDDVTAYRTVRASPPPATTREAIKGGGFDAVLFTSSSTVRNLVGIAGKPHNVTVIACIGPATAKTAEEHGLRVDVMSPEPSVTKLAEALADFGLRRRAAALEAGDPVTRPSERRPGSRRRRSST

SEQ ID NO: 1914 - protein, 242 aa, Rhodobacter capsulatus
MSGFVSFVSSGPGDPELLTLKAADRLAKADVVLFDDLSAGADPGAMPARGAELIAVGKRAGRPSPKQDHVSRLLVDHALTGQRVVRLKSGDSGLFGRLEEELDALTGAGIGYEIIPGVPSACAAAAASGLPLTRRLTARRVQFVTGADVTGDLPEGLNWAALADKGATTVVFMGKRTFPKLAADLIAHGLAPDTPALLAEAVGHPGQSVTRSTVTDLAASLAAERSDKPALILYGPLYAPEA

SEQ ID NO: 1915 - protein, 407 aa, Rhodobacter sphaeroides
MSPASRCASSTSGRSRRALRNFRCHSASCSEVRISTKKQASSPSASASRSAVCRRITPASRIRRMRFHTGVFDEPTLRAISSSDWLASACSSARIFLSISSSRTAIRATPLPAEPGSIRRSIRNDLPYLQADMASKGENVLDWAANSQQWMARMLNPLTAPGQVIFVGAGPGSIDHLTMGACRALTQAEVVIHDRLVGPEILDLIPPQALRIEAGKEGFGPSTPQETINALIVDHAASGRRVVRLKSGDSGIFGRLDEEIEALDAAGLGWRIVPGLTTAAAAAAAIGQGLTKRGRNAALRIVTGHDMAGYAEQDWRGLARVGEVAAIYMGKKSARFIQGRLMMHGADPETPVTVIENVSRADERIVAATLATLPEAVAGLSGPAIVLYGLAPRRAAAALPLLKEATA

SEQ ID NO: 1916 - protein, 241 aa, Rhodobacter sphaeroides
MTGFVSFVSSGPGDPELLTLKAVDRLGRADAVLFDDLSSGPILAHARPEADLVGVGKRAGRASPKQDHVSRLLVDYARTGGRVVRLKSGDAGLFGRLEEEIEALEAAGIGYEIVPGVPSACAAAAAAGIPLTRRLTARRVQFLTGADVTGGLPQQNLAALADPAATTVVFMGKRTFPTLAAALFAAGLPETTPALLAEGVSTPAQRIWRGTLGTLVEEVARAGEAPALILYGPLADAEEER

SEQ ID NO: 1917 - protein, 499 aa, Rhodopseudomonas palustris
MACVVMVEKIILNSPSGDGVDMRFLPVFLDLATGPVVLVGAGEMARAKLRLLLGAGASVRWYVTDGDRDLAGLTEPERSRISFPEGAPLHADLTGAIALLCAGAGDVAAPLAAKARALGVPVNVMDELSHSTFIFPAIVDRGDVVVAIGTGGSSPVVARRLRELIETVVPARIGELAALIGRWRTPIKARIPEFPLRRRFWERVVDGPIGRAVLEGRLTDAETELKTIDDATDYARHSLGRRADGHVSIVGAGPGDPDLLTLKALRALSDADVVFYDELVSPEILDRIRRDAKRVPVGRRVGQPGIGQDAINKLLIETARSGQRAVRLKGGDPFVFGRGGEEVEALREAGVSYSVVPGISAALGAASQFEVPLTYRHEALRITFLTAHKAKDAEAVDWSALTDQKMTVVVYMGMSAAPTIRDGLLAAGRAADTPVGVFARVTRSDAVSAVGTLNDLPALVDEVDGGPALLVIGDVVAHSAPWRQQQLLQLVSTYQMAAE

SEQ ID NO: 1918 - protein, 249 aa, Rhodopseudomonas palustris
MSKLIESAPAAGRITLVGAGPGDADLLTLRAIKRLQAADVVLYDDLAGEDFMAYLHPDAELVAVGKRAGHPSPRQDEVSRLAISYALRGKHVVRLKAGDPTLFARADEELRAARDAGIAVEIVPGITTATAAAAAIGASLTKRGVARRVQFVTGHDVDGRLPRDLDLAALADATATTCVYMGKATFPALVAQLIARGLSAATPAVMVESLGTDATNVQRGSVSEIAARLTADRPSGPCMILYGAALEES

SEQ ID NO: 1919 - protein, 473 aa, Buchnera aphidicola str. APS (Acyrthosiphon pisum)
MNYLPIFIDLKSKNVLVIGAGEVGLNKIRILLRAKAKVNVIAKELCSEVKLLLRDQKINWLSKNFDLIYLNKIFLVVSATNDIKLNQYIFKKCNERCVLVNIVDDKLKCSFIFPSIIDRSPLIVAISSGGTAPVLLRLLREKIEAILPNKLGDVAKIAGKWRLAIKKHFSNFLERRKFWEKLFHSIFVEHILNGNKEQAINVLKKNMNQNISLTGEIILVGAGPGDSGLLTLRGLQVLQQADVVLYDYLVSEDILDLIRRDAKRICVGKRVGLKNITQNEIIKLLIFFAQKGKKVVRLKGGDPFIFGRGSEEIEAAKDAGIHFQVVPGITSAIGIAAYTGIPLTHRKYSQGVIFITGHKCIDGFLNNWSILSDPSYTLVVYMGTLKAVYIAQKLITFGRSKLTPIAIIVQGTTIHQKVIVGCLGEIEKIIPFAATPSLLIIGDVVHLHKKLAWFQSENILKKIKNKFSTLTFI

SEQ ID NO: 1920 - protein, 291 aa, Rhodospirillum rubrum
MKQSFAFSRLGLALPPVEPGWVWLVGAGPGDPGLLTVLAAHALAEADVVVHDALIDGRVLGLAREEAVLIPAGKRGGRPSHSQPDISARLVDLARAGKRVVRLKGGDPFVFGRGAEEARTLVAAGVPFRIVPGVTAGVGGLAYAGIPATTRDTNATVTFVTGHAATGEVPDTFDWEALARLPVLVFYMALKTLDVIAARLMEHGRSGETPVAFVSDATTAAQRVHITTLAQAVTERDRLGIAPPALVVLGDVVPLARDLAWWSPPKQGCGGEVWPDPMQSIPGSATPLIGD

SEQ ID NO: 1921 - protein, 244 aa, Rhodospirillum rubrum
DDLVGEGILDMARRDAARIYVGKRKGRASLTQEQIGRLMCDLAAAGRVVVRLKGGDPAVFARLSEEIDALAAAGVAWTVVPGITAASAAAAAIGISLTDRDGAPSVTLLSGHRRAPAAGESEAAVDWRAAARTGGTLAVYMGLSRATAAAEGLIEGGLSAETPVAVVHDASRQGQRVSRGTLGELPRLVAQGALAAPDAPGLVLVGKVVAKAGRLPAIAPVFSTPRAFAGDPSFASQALPSQAG

SEQ ID NO: 1922 - protein, 268 aa, Chloroflexus aurantiacus
MSGKAYLVGAGPGRADLITVRGLTVLRQADVVLYDRLIAAALLDEAPAHAERIFVGKRPGHHAFRQDGINETLVRLVREGLQVVRLKGGDPGVFAHVAEEAAALAAAGLPFEIVPGVSSALAVPLYAGIPLTWRGVATAFTVVSGHEATPHGCSGISWSLLAASPTVVVLMALGRLEQVCSALIAAGRNPDTPAALISRGATSQQATLRATLATLCDQQRLIQLPPPRCWWWERLRRWQIDLPGTTLPDLLATPCCGKSSDTAPISHG

SEQ ID NO: 1923 - protein, 268 aa, Chloroflexus aurantiacus
MSKVYLVGAGPGDPELLTLRALRVLGEADVVLYDRLVSAEILAYVNPQAERIYVGKAKGDQDRVQREILHLLLHYARAGRTVVRLKGGDPMVYGRGAEEWLFLAQHGITVELVPGLSSALALPGMAGIPLTLRGIGRSFAVICGQEQGGAAPEIAPYARIDTLVILMGVERRAELAQALIQAGRDAWEPCAFIENGSTPNERIVLAALEAVAQGRVAVQAPAVWVIGPVVAVREQLQAVAADEPVHAMPVPAYTGMHQARDVVVVERG

SEQ ID NO: 1924 - protein, 239 aa, Sulfolobus tokodaii
MGKVFIVGAGPGDPELITLKAYNLIKKANVIIYDRLVPKTLLEDTKAELIYVGKEIGDSKLQDYINELLVEKAKTNSIVVRLKGGDPYVFGRGEEECIYVLSHGIECEVVPGVSSAIAVPAYAGIPVTSRLTNSSSFTVITGTRADNKIIDASYIPREGTLIILMGIHVIEQLERVLLSVRDYEEYVAIIENGTTEKQRVITGRLKDLSKLIIEHKIRPPAIIVVGDVVKLREKLWKLT

SEQ ID NO: 1925 - protein, 243 aa, Synechococcus sp. PCC 7942; identical to SEQ ID NO: 501

SEQ ID NO: 1926 - protein, 505 aa, Selenomonas ruminantium subsp. ruminantium
MTYMAGMVYLVGAGPGDYRLISMKAVDCLKMADVVVYDRLADDRILRWAPEDAEFIYVGKASSNHTMKQEDINQLLVDKAKEGKCVVRLKGGDPFVFGRGGEEGLLLRENNLPFEIVPGITSAISVPAYAGIPVTHRAVATSFAVVTGHEDPTKGKSNMRWEHLATGVDTLVFLMGVANLPHITGKLIENGRSADTPAAVIRWGTKPEQRTLITTVGKAAEDVAKNGIKPPAIFIVGEVVKLRDSLQWFDNLSQRPLFGKRILVTRARSQASKLTAKLEKLGAEVLEAPAISMADPADNYAALDKAIDHVADYHWLIFTSANGVGRFFARLFKAGKDARALGYAKIAAIGLATAEKLKQYGLVADVIPQEYRAEGVLEALKGKLPPHAKILIPRAEEAREVLPDTLREMGAEVEVAPAYRTICGQVDGEALAAELKEGNIDLVTFTSSSTVKNLVNIIGSAEVLKGVKTACIGPVTADTAKSLGIEPDIIAKEYTIDGLVEAICK

SEQ ID NO: 1927 - protein, 254 aa, Ralstonia metallidurans
MDRQHGKATGKVYLIGAGPGAADLITVRGARLLGEAQVVLHDALVSPEMLAWCPQAELVEVGKRCGQRSTAQLFINRQIVDLATKHERVVRLKGGDPMLFGRADEELQALEAAGIEYEVVPGITAALAAASAIGRPLTKRGVSRSVAFATQAKAADAVDVEADVKADTIIYYMGRDQAANIATQLIARGKPASTPAWVVEAATTPRQRSHQFTLGQMAAGEAARWMDPVQPSLLMIGEALGSRATEYVEAERAA

SEQ ID NO: 1928 - protein, 285 aa, Ralstonia metallidurans
MQTTGKVWLVGVGPGDPELATMKAVRALREADVWLVDDLVPEAMLCYANPGTQIISVGKRGGRCSVSQSSIHEQALEHAQAGRCVARVKGGDPLLFGRGGEEAEFLRGHGIEVEIVNGISSGMAAAQALGIALTHRQHCHGVTFVTAHTRDDGDPDWAALVGSRTTLVIYMGMSRLAAIRDALLQAGMRSEMPVAVVMHASRGDEKRWVGSLATLTEAADAGLASPAVILVGEVVDIPNPASLTDQHAFGDLAAGLPSKQPEHDLQRERQRAHQEDHITEGTHPA

SEQ ID NO: 1929 - protein, 317 aa, Staphylococcus carnosus
MSVSPTGHVYLIGAGPGNPNLLTRKAEHLIRTADIILYDRLVNPFILQLAPPEIEIIDVGKKPYSRHIQQSEINEVLLDAAYKHRNVVRLKGGDPAIFGRVHEEVDILKEHNIPCEIVPGITTASAAAATLGVGLTCRNVSTSVTLTTGSFKGSEEQEIDIASLIDGGTLAIYMGIKRLHTIITQIYKQVGKDYPICAVFDVSYATQKVITGHLSDIEKKVQANAPEDAPGILLIGDALEYADENTHIQLEETSKYFGKECIVTGPREAAIEKAFEIYDAGGWCMIDPNSDDHYHQSQLDLIYRYMQVNDNTIIVKA

SEQ ID NO: 1930 - protein, 517 aa, Deinococcus radiodurans
MKNWVLIRRPPHKEKSPMSEVSLPAALPAPFVSLVGAGPGDPGLLTLRAREVLAQADVVLTDALVSPALLAHCPQARVVEVGKRGFLPSAKQEDINDLIVREALAGGGQRVVRLKGGDPFVFGRGGEEALACRAAGVPCEIVPGVSSAVAAAAYAGIPVTHRGLSRSFAVLTGTDRHGPAAYAEIAGVDTLVFLMGVRHLPQITADLIAAGRDPQTPAAAVQWASTPQQRTVRATLGTLAQRAAEAGLGAPAVTVVGAVAALHDDLDWFCPAPLPLQGAQVAVTRTREQTGSELAALLSGRGAQVSEIPLLRFVPASSPRTLVGALNGFDGWVLLTSEQAVRALARTLLAAGRDLRVLARARIAAVGSGTAWTLREYGLAPDFVPTRSGSRHLGAELPAAPGEVALHVGSQDTDAVLEMALSARGIEYVAAEAYRSELSELTPAQREQLQEAQVVTLASAVGARALAQVAGTSFTAAVIGPQTELAAREAGFTRLILAEQPTLASLSDAVQRACRAG

SEQ ID NO: 1931 - protein, 292 aa, Burkholderia fungorum
MPESIAVHAPKVRAPALVRACLSSARHDMAPAMHVAMTRAWLIGAGPGDVELMTLKATRALAQADVVLVDDLVNPDVLQFARADARIVHVGKRGGHPSTPQEGIVAQLLEHVRAGRSVARLKGGDPFVFGRGGEEQQALHAAGIEVEVINGITAGIAAPAAIGIPVTHRDHAQGVVFVTGHGAGSAEPAWAALVATRMTLVIYMGMRRLGDIVDALLAAGMSAETPCAAIESATRPGQRHVLARLGEFAGSVSRAGLGSPAIVVIGGVASLALARDAAYADAATLPANGDVA

SEQ ID NO: 1932 - protein, 412 aa, Burkholderia fungorum
MKRVPKGRCAGLWGKWHARAASPARDAFRCSEAHAWCDAALWACEVLARKRCVGGRFLRWRAGAARHRTLVVDAWRSPCMTAPAQTNHNAVFRPTRSREAVHTRQQTDNGVPSRPSRADAVFYLAPAIQLSLADTEPKDTAMNPNTGKVTLLSAGPGDLDLLTLKAAKALAAADVVLLDDLANPEIVTLAPQARVIRVGKRGGCRSTPQAFIERLMRCYALKGLHVVRVKGGEALLFGRAGEELAVLRGAGIPVEIVNGISSGFAAAAGLGISLTHRRHCHGVSFVTAHTEDHGEPDWAALAATRTTLAIYMGMRRIGSIAAALLASLPADTPAAVVQWAGGGNERRLMSRLDRLAEDAVSAGFGSPAVILVGSAIGESIERAWGEDSAGRDEKAAMQADMRIAREAIAQAA

SEQ ID NO: 1933 - protein, 255 aa, Geobacillus stearothermophilus
MTIGKVYLVGAGPGDEKLITVYGRECLEPADVIIYDRLINRKLLRYAKPGAEVLYCGKEPGKHDTVQEQIHELLVWHAQQGKTVVRLKGGDPCVFGRVGEEAEVLAKAGIPFEIVPGVTSGIAVPAYAFRSPTVITPPRWRWSAGIGVQRIDWEALTRGCDTILVYMGAANLPDICGRLMAAGKPSDTPAAIIEWGTTERQRTVAATLSTLSDEAEQAGISHPAIIIIGDVVRLRETLQWFPERQGGVVDADASS

SEQ ID NO: 1934 - protein, 490 aa, Clostridium acetobutylicum
MKRSGKVYIIGAGPGEEELITLKAIRKMKECTAVLYDRLVGQGILKYLNEKCEIYYCGKEPGCHYKTQDEINEMIIKLAKEGHIVGRIKGGDPYIFGRGGEEGLSLLKENIEFEVISGVTSPVAVLNYAGIPVTHRGIARSFHVFTAKTANDDSINFSAAAKIDGTLIFLMGYRQLNDITRKLIENGMDSKMPCAVVMRGTTSLQKKVIGNLSDIKEKCDNANMTSPCIIVVGKVVGFNQQLNWYEKKPLFGRNICITRSKNQSKTMREELLDLGAEVTEVHSIEIENTASNLEEYINKISEYDYIILTSVNAVEVLFDYLASKDYDVRKVRAKFAVIGNATKEALKKRGIVPEIVSRKHNGEGLFDEIRGYLKKDDKIFIPRSENSRKYIKEQLVSLGLSVDECFIYRTVPGKLYDKAAFENADTIVFTSPSTVKNMIALFGEKNIKKKSIIAIGPITGRELGKINAEYSTCSECSVDAIIRECLNSDK

SEQ ID NO: 1935 - protein, 504 aa, Clostridium josui
MEHGFVALVGAGPGDKGLITIRGAELLSQADVVVYDRLVSQEIIKMIPTTAEKIDVGKENKFHPVKQEEINHILLEKSLEGKKVIRLKGGDPFVFGRGGEELELLYENNIPFEVVPGVTSAVAALCYGGIPATHRDFCSSLHIITGHAREGGQLSIPFHELKELNGTIVFLMGDSSLSYLMNGLINAGMEKDMPAAIVENGTRPNQRKLVATVGTLEQKALEMEIKSPAIIAVGKVCSLSEKFSWFMKKPLFGTKILVTRPKESSGTLVEKLRQLGAEPVEYPCIEVVPIPQNEKLYHACENIREYGWILLTSKNGIQIFFDYLNSKGLDARVLANTKIGTVGSQTAKALKEVGLISDFTPEIFDGRHLALGIAERVGENEKVLICDAAIASDDIVNILRSNNIKFDRVPLYNTNYINENSNKVKKSIVHGELKYITFTSASTVEGFIASMKDIPLESLTAVCIGNKTAEAAKKYNLRYVVAEKSTIDSMIDKLLEIGGGNIYD

SEQ ID NO: 1936 - protein, 492 aa, Clostridium perfringens
MSKKAYIIGAGPGDEELLTLKAINALQKCTAVLYDRLVGNNILNYLNDDCEIYYCGKEPGCHYKTQEEINESIVELAKKGHVVGRVKGGDPYVFGRGGEEVLALVEENIPFEVIPGVTSPISVLNYAGIPITHRGLAQSFHIVTGMSARTLNVNWKALSKENGTLVFMMGLSNLETIVEKLLENGKDIETPCGVVMRGTTSKQRKVIGTLENICKKVREAKLESPCIIVVGDVVSLNEKLSWYENLPLFGANICLTRSKEQSKEIKWKLKELGAEVTEINSIKIKETAYNLDEYINTLEKYDHIVFTSVNAVNVFFDYLVKNRVDIRKIKADFAVLGKATKKALIARGIVPSIMAHSFTAEGLFEVLKDNIKEGEEVLIPCSSLSREYLFDNLASLGAKCHRVNIYDTICGDVKNPRAFKEVDMVLYTSPSTVKNMIDMIGLEALKEKVSIAIGPITLKALNESGIEGKMCKTHCGDGFLSEIEGIWQEVKK

SEQ ID NO: 1937 - protein, 476 aa, Xylella fastidiosa Dixon
MTANALFPLFANLHDRAVLVVGGGKVAERKTEALLKVGALPIIGAPSLTTSLQRWAETGRITWRQGTFEDSWLQEDIWLVIAATDQPEVNHAAARAAHAQRLFVNVVDDIALSNVQVPAVVERGPLRIAISSGGGAPMVARYLRQQLESLIDDSWGRLTTLFAQRRDTIRARYPNIEARRRFFETQLAGPLQRLLRKQRHAEAEAVLEAALAETPLTESGSVTLVGAGAGDAGLLTLNALRALNEADIILYDRLVSDTVLQMARRDAEQIEVGKSATGHSVRQEDIHTLMLQHAHAGQRVVRLKGGDPFVFGRGGEELEFLRTHGIPYEVIPGITAALACAAYAGIPLTHRDHAQSLCLITAHCQSSLDTLDWAALAQERQTLTFYMGVAGLPTIQQRLCEAGRAETTPFALIENGARAQQRVLTGTLKTLAHTAQTYAVRPPALLILGEVTALAEHLHWFGTAPLSAPCPPARIL

SEQ ID NO: 1938 - protein, 476 aa, Xylella fastidiosa Ann-1
MTANVLFPLFANLHDRAVLVVGGGKVAERKTEALLKVGALPIIGAPSLTASLQRWAETGRITWRQGTFEDSWLQEDIWLVIAATDQPEVNHAAARAAHAQRLFVNVVDDIALSNVQVPAVVERGPLRIAISSGGGAPMVARYLRQQLESLIDDSWGRLTTLFAQRRDTIRARYPNIEARRRFFETQLVGPLQRLLRKQRHAEAEAVLEAALAETPPTESGSVTLVGAGAGDAGLLTLNALRALNEADIILYDRLVSDTVLQMARRDAEQIEVGKSATGHSVRQEDIHTLMLQHARAGQRVVRLKGGDPFVFGRGGEELEFLRTHGIPYEVIPGITAALACAAYAGIPLTHRDHTQSLCLITAHCQSSLDTLNWVALAQERQTLAFYMGVAGLPTIQQRLCEAGRAETTPFALIENGARAQQRVLTGTLKTLAHTAQTYAVRPPALLILGEVTALAEHLHWFGTTPLSAPCPHARIL

SEQ ID NO: 1939 - protein, 325 aa, Staphylococcus aureus subsp. aureus Mu50
MSVDKYGKVYLIGAGPGNPNYLTKKAERLIREADVILYDRLVNPLILQYANLTTEIIDVGKKPYAKHIQQEKINECIVEAARRYNKVVRLKGGDPAIFGRVQEEVDTLNNFNIAFEIVPGVTSASAAVATMQTGLTMRAVAKSVTFSTGHFKDSEENEVDVNALVNGGTLAIYMGVKRLGKIIAQIQQYTDIDYPIAIVFQASCFNEFVVKGRLSNIVGKLEHYAIEAKPGICIIGEVVGYTENVSTTSNPTQQFYVVSGSRHDALMLCEHLYDEGYGCLLNPNDTSNGTYHSSQYDYYDAFIKQQENVTYISTDRADANTVLCH

SEQ ID NO: 1940 - protein, 476 aa, Xylella fastidiosa 9a5c
MTANVLFPLFANLHDRAVLVVGGGKVAERKTEALLKVGALPIIGAPSLTASLQHWAETGRITWRQGTFENSWLQEDIWLVIAATDQPEVNHAAARAAHAQRLFVNVVDDIALSNVQVPAVVERGPLRIAISSGGGAPMVARYLRQQLESLIDDSWGRLTTLFAQRRDTIRARYPNIEARRRFFETQLTGPLQRLLRKQRHAEAEAVLEAALAETPPTGSGSVTLVGAGAGDAGLLTLNALRALNEADIILYDRLVSDTVLQVARRDAEQIEVGKSATGHSVRQEDIHSLMLQHARAGQRVVRLKGGDPFVFGRGGEELEFLRTHNIPYEVIPGITAALACAAYAGIPLTHRDHAQSLCLITAHCQSSLDTLDWAALAQERQTLAFYMGVAGLPTIQQRLCEAGRAETTPFALIENGARAQQRVLTGTLKTLAHTAQTYAVRPPALLILGEVTTLAEHLHWFGTAPLSAPCPPALIL

SEQ ID NO: 1941 - protein, 493 aa, Listeria innocua
MGKVMLIGAGPGDAQLLTVKGLAALQKADVIVYDRLVEPAMLQERKASCKLIYVGKEPLHHPIPQDEIEQILVREAATNELVVRLKAGDPYVFGRGGEEGETLHKAGIPFEVIPGITSAIGGLAYAGIPVTHRDFASSFHVITGHLKKRRDPLDWEALARLEGTLVFLMGMTNLPNICANLLANGQKPETGVAIVQWASRGKQLTVTGTLQTIEQKVAESGISSPALIVVGDVVSLRPQLNFFEEMPLFHTKVLLPRARAGKSMLAEKIRDLGGEVTMYPNIQVLDILPTKTKAELCETSELLFTSKEAVERFFDYLATLELDIRSLKNTHLTAIGKQTKEAFSEKGIIPDSFIKRRSTELILEHIARFQKNASNLIIGSVVDTAEVSAILSEVKTTEMMPLYDMRPVTERPFDLESFEQICFSSSRSVQNLLDVLTTEEKAILQTKTILSIGRFTSATLQSFGINEFEEAENATPESLIELIQKTKLEGVPQ

SEQ ID NO: 1942 - protein, 590 aa, Corynebacterium glutamicum
MAETTGIETNQVSETIGVESLTHGNLRPVSSFEGQHEGQTEELLPGKVIFVGAGPGNPDLLTVRAREVLGNAVRAITDEQVLSGVRAFVATEIPVPEDKLQAAEDEYERICIEAKENGARRKPPRPAPPTAAEITEVSEATPAQIVELVQNALSYGGDVIRLVTGNPLSSDTTLAEISAVSEAGLEFQVVPGMSLPATVPAFAGIALGSTYTETDVNGQNVDWDQLASAPQPLVLQARVQDLSRIAQELKARNMPLETPVSVTANGTTRLQRTYDTTLGLLHKLDAELNGPLVVTLGKGVDDRSKYSWWENRALYGWRVLVPRAREQAASMSARLSSHGAIPQEVPTISVEPPRNPAQMERAIKGIVEGRYQWVVLTSVNAVKAVWEKITEFGLDSRSFAGVRIAAVGEKTAAEIRALGITPELLPARTRQNAQGLVDVFPEYFEELDPVGRVLLPRADIATDVLVDGLTHLGWEVEDVVAYRTVRAAPPSADIRDMIKTGGFDAVAFTSSSTVKNLVGIAGKPHPRTIVACIGPMTAATAEELGLRVDVMPEIAEVPELIDALAEHVADLRAKGELPPPRKKRRRRKAS

SEQ ID NO: 1943 - protein, 257 aa, Propionibacterium freudenreichii subsp. shermanii
MTTTLLPGTVTLVGAGPGDPELVTVAGLRAVQQAEVILYDRLAPQDLLSEASDDAELVPVGKIPRGHYVPQEEINQLLVAHAREGRKVVRLKGGDSFVFGRGGEEWQACAEAGIPVRVIPGVSSATAGPALAGIPLTHRHLVQGFTVVSGHVSPSDERSEVPWRQLAKDRLTLVILMGVAHMRDIAPELMAGGLPADTPVRVVSNASLASQESWRTTLGDAVADMDAHHVRPPALVVVGTLAGVDLSHPDHRAPSDH

SEQ ID NO: 1944 - protein, 262 aa, Staphylococcus epidermidis ATCC 12228
MVHMGKVYLVGAGPGDPELITLKGLKAIKEADVILYDRLVNKEILNYASPSTKFFYCGKDPHRHSLPQEETNKMMVTLAKKGHIVTRLKGGDPFVFGRGGEEAEELACHNIHFEIIPGITSGIAAPAYAGIPVTHRDYSSSVAFVTAVNKPGMDKGKYWQHLANGPETLCIYMGVKRLSEICELLIQYGRSSETPVALVHMGTSKQQMTVTGTLDTIQERAHHIQNPAMIIVGEVVKMREKINWFVEQATVQNETLTEMSST

SEQ ID NO: 1945 - protein, 311 aa, Staphylococcus epidermidis ATCC 12228
MSITYPGTVYLIGAGPGNPNLLTKKAERLIRSADVILFDRLVNPFILQYASSQTKVINVGKKPYCKHIQQEEINQKIVEVANQYQCVVRLKGGDPAIFGRITEEVQTLENHHIHYEIVPGVTSASAAVATMNMGLTMRSIAPSVTFSTGHFKDSVNHDTDIRNLINGGTLAIYMGVKRLGQIIKQIESYTNEDYPIAIVFNASCYNEKIVIGHLSTIEEQLVSQQLEGHPGICILGNILDDINRTLLNNNKNDKGNLYLIKGDKERAIAKAETLYDEGIQCLIDFDHSYHISQQNVYNEMIKHKSIKTIYV

SEQ ID NO: 1946 - protein, 472 aa, Mycobacterium leprae
MVGATMTTRGRKLRPGRITFVGAGPGAPGLLTAQAVAVLANAALVFIDPDVPEPVLALIGKDLPPVSGPAPAGPAAVTAGRAADGTLEGDHYQAAPMVMSGGADIRPALGDPTEVAKTLTAEARSGVDVVRLVAGDPLTVDAVIAEVNAVARTNLQIEIVPGLVTSSVVPTYAGLPLGSSHTVADVRGDVDWEALAAAPGPLILQATASHLADAAHILIDHGLDDATPCVVTAQGTTCQQRSVETTLEGLADSAVLVGTDTAGPLTGPLVVTIGKTVTSRARLNWWESRALYGWTVLVPRTKDQAGEMSERLTSYGALPVEVPTIAVEPPRSPAQMERAVKGLVDGRFQWVVFTSTNAVRAVWEKFGEFGLDARAFSGVKIACVGEATADRVRAFGISPELVPAGEQSSLGLLDEFPPYDSVFDPVNRVLLPRADIATETLAEGLRGCGWEIEDVTAYRTVRAAAAAGPPGK

SEQ ID NO: 1947 - protein, 563 aa, Mycobacterium leprae
MVGATMTTRGRKLRPGRITFVGAGPGAPGLLTAQAVAVLANAALVFIDPDVPEPVLALIGKDLPPVSGPAPAGPAAVTAGRAADGTLEGDHYQAAPMVMSGGADIRPALGDPTEVAKTLTAEARSGVDVVRLVAGDPLTVDAVIAEVNAVARTNLQIEIVPGLVTSSVVPTYAGLPLGSSHTVADVRGDVDWEALAAAPGPLILQATASHLADAAHILIDHGLDDATPCVVTAQGTTCQQRSVETTLEGLADSAVLVGTDTAGPLTGPLVVTIGKTVTSRARLNWWESRALYGWTVLVPRTKDQAGEMSERLTSYGALPVEVPTIAVEPPRSPAQMERAVKGLVDGRFQWVVFTSTNAVRAVWEKFGEFGLDARAFSGVKIACVGEATADRVRAFGISPELVPAGEQSSLGLLDEFPPYDSVFDPVNRVLLPRADIATETLAEGLRGCGWEIEDVTAYRTVRAAPPPAATREMIKTGGFDAVCFTSSSTVRNLVGIAGKPHARTVIACIGPKTAETASEFGLRVDVQPETAAVGPLVDALAEHVARLRAEGALPPPRKKSRRR

SEQ ID NO: 1948 - protein, 241 aa, Pyrobaculum aerophilum str. IM2
MGSVYIVGAGPGDPELITVKGLRLIERADVILHDRLVSRELLKAAKPGALIIDVGKSPGGVGPSQEEINKMLLSYATSYDIVVRLHGGDPLVFGRGFEECKYLVERGIPCEIVPGVTSGLAAPAKYYIPPVLRGVASSVALVTGREDPSKGTRQVDFKKLASAVDTIIIYMGASVAGDVARELIAGGLSPNTPVAVIKSAFFPDEEFIVTTLGGLSAVPNPSIIVVGEVVKRGVDLWKRRL

SEQ ID NO: 1949 - protein, 394 aa, Anopheles gambiae str. PEST
MDFLPLFCQLQHKPVLIVGGGEVAVRKARLLLDAKARVTINAPHLEPQLMSWAEQGLLAVCAADFHPELLDGKWLVIAATDNPEVNHQVFSEANLRQIFCNVVDSPAHCSAIMPAIIDRSPLMVAISSAGVAPVLSRQLREKLEALLPQHLGQLATLAGKLRERVKAIPDKLARRRVWERLFSHERLACQLARGQQQAAEQSINALLNEPQQSKGSVTLVGAGPGDAGLLTLNGLQQLQQADVVVYDRLVSQEVLALVRRDAERIFVGKEAGRHCVPQQAINQLLLDQALLGKQVVRLKGGDPFIFGRGGEELETLAEAGIPFSVVPGITAASGCAAYSGIPLTHRDHAQRVQFITGHDKEGNIAQEWSALATPRQTLVFYMGLAHAARIQDEL

SEQ ID NO: 1950 - protein, 262 aa, Agrobacterium tumefaciens str. C58 (U. Washington)
MSIPQILNSIAAKGPVFEAGHVWLAGAGPGDVRYLTLEVALALSQADIIVRDALVSDDVVALGPQAEVVFAGKRGGKPSATQDDITASLIDFALQGKKVLRLKGGDPFIFGRGGEEAEALVHAGIPFRILPGMTSSFTALASARIPATMRGISRAVTLATGHAAGTEEDLDWLALAKTQEPIVVYMGLKNIGTIAGLLMQGGRSGKTPVAVIMSATTAKERIFIGTLQSIADDAKRESFEAPALIIIGEIVSMRDRLGVSGS

SEQ ID NO: 1951 - protein, 487 aa, Agrobacterium tumefaciens str. C58 (U. Washington)
MHNEHDFSAAGDRLSTFPAFFRVEGRQVAVFGNGDEAFAKVRLLANTNAHIVAYADHPEADFARYISENSIDHRALAFASPLVDDATLVFAATGDEALDREIVSVARTKKIPANAVDQPEFCDFFTPALVARAPVAIAIGTEGAGPVLAQMIRARIDQMLSPSLGKLARLAVQYRDAAEENVPKGALRRNFWRRFFSGAVADAVALGDTSSARHAADRLLQSPERSEGRVWLVGAGPGAEDLLTLRAQRVLMEADVIVYDALVPQAIVDMGRRDAERLSVGKRKGCHSKSQNDINRLLVRLGLEGKRVVRLKSGDPLVYGRAGEEMAALREAGVAYEIVPGITSAFAAAADFELPLTLRGVASSLIFTTGHDLMGDVLPDWARLAVSGATIAVYMGRSVAASVAKRLIDAGLGVETTVAVIENASRADRRLLHGTLNDLPDLEYRDELIGPVMVIIGDAVAGANFDRSEALALAAKPASLKREYVNG

SEQ ID NO: 1952 - protein, 475 aa, Agrobacterium tumefaciens str. C58 (U. Washington)
MERLAKLPVFWGLEGKRVVLTGGSDGAAWKAELLLACGAQLDLYCEESGLSESLATLVAKSPMLTWHDRCWDADIFKGAELALADCEAEEEAGRFYHAARAAGVPVNVIDKPEFCQFQFGSIVNRSPVVVSISTDGAAPILAQAIRRRIETLLPLSLKDWGALAQTIRERVNLRLAPGAARRSFWEKFVDRAFTERLDEGSEERLLKDVATRTGLAESGRGFVTLVGAGPGDAELLTLKAVRALQAADVILFDDLVSAEVLELARREAKRMLVGKRGGRESCKQEDINDMMIRFAKAGRRVVRLKSGDPMIFGRAGEEIAALEAENIPVEVVPGITAASAMASRLGVSLTHRDHAQSVRFVTGHSRQGKLPENIDWQSLSNPSVTTVFYMGGRTAADIQSCLLAHGMPASTPVVVMISVSRVNEQRWCGSLAQLVAAVERLGVNEPVLIGVGDAFRSASVNGGEQTAAAPFQKAG

SEQ ID NO: 1953 - protein, 297 aa, Agrobacterium tumefaciens str. C58 (Cereon)
MPVVQPRRRVFPSVSICIPIAGTAFSVIVKKQPRTMSIPQILNSIAAKGPVFEAGHVWLAGAGPGDVRYLTLEVALALSQADIIVRDALVSDDVVALGPQAEVVFAGKRGGKPSATQDDITASLIDFALQGKKVLRLKGGDPFIFGRGGEEAEALVHAGIPFRILPGMTSSFTALASARIPATMRGISRAVTLATGHAAGTEEDLDWLALAKTQEPIVVYMGLKNIGTIAGLLMQGGRSGKTPVAVIMSATTAKERIFIGTLQSIADDAKRESFEAPALIIIGEIVSMRDRLGVSGS

SEQ ID NO: 1954 - protein, 493 aa, Agrobacterium tumefaciens str. C58 (Cereon)
MRDICPMHNEHDFSAAGDRLSTFPAFFRVEGRQVAVFGNGDEAFAKVRLLANTNAHIVAYADHPEADFARYISENSIDHRALAFASPLVDDATLVFAATGDEALDREIVSVARTKKIPANAVDQPEFCDFFTPALVARAPVAIAIGTEGAGPVLAQMIRARIDQMLSPSLGKLARLAVQYRDAAEENVPKGALRRNFWRRFFSGAVADAVALGDTSSARHAADRLLQSPERSEGRVWLVGAGPGAEDLLTLRAQRVLMEADVIVYDALVPQAIVDMGRRDAERLSVGKRKGCHSKSQNDINRLLVRLGLEGKRVVRLKSGDPLVYGRAGEEMAALREAGVAYEIVPGITSAFAAAADFELPLTLRGVASSLIFTTGHDLMGDVLPDWARLAVSGATIAVYMGRSVAASVAKRLIDAGLGVETTVAVIENASRADRRLLHGTLNDLPDLEYRDELIGPVMVIIGDAVAGANFDRSEALALAAKPASLKREYVNG

SEQ ID NO: 1955 - protein, 488 aa, Agrobacterium tumefaciens str. C58 (Cereon)
MDALKPQRNEPARMERLAKLPVFWGLEGKRVVLTGGSDGAAWKAELLLACGAQLDLYCEESGLSESLATLVAKSPMLTWHDRCWDADIFKGAELALADCEAEEEAGRFYHAARAAGVPVNVIDKPEFCQFQFGSIVNRSPVVVSISTDGAAPILAQAIRRRIETLLPLSLKDWGALAQTIRERVNLRLAPGAARRSFWEKFVDRAFTERLDEGSEERLLKDVATRTGLAESGRGFVTLVGAGPGDAELLTLKAVRALQAADVILFDDLVSAEVLELARREAKRMLVGKRGGRESCKQEDINDMMIRFAKAGRRVVRLKSGDPMIFGRAGEEIAALEAENIPVEVVPGITAASAMASRLGVSLTHRDHAQSVRFVTGHSRQGKLPENIDWQSLSNPSVTTVFYMGGRTAADIQSCLLAHGMPASTPVVVMISVSRVNEQRWCGSLAQLVAAVERLGVNEPVLIGVGDAFRSASVNGGEQTAAAPFQKAG

SEQ ID NO: 1956 - protein, 478 aa, Xylella fastidiosa Temecula1
MTANVLFPLFANLHDRAVLVVGGGKVAERKTEALLKVGALPIIGAPSLTASLQRWAETGRITWRQGTFENSWLQEDIWLVIAATDQPEVNHAAARAAHAQRLFVNVVDDIALSNVQVPAVVERGPLRIAISSGGGAPMVARYLRQQLESLIDDSWGRLTTLFAQRRDTIRARYPNIEARRRFFETQLAGPLQRLLRKQRHAEAEAVLEAALAKTPPTESGSVTLVGAGAGDAGLLTLNALRALNEADIILYDRLVSDTVLQMARRDAEQIEVGKSATGHSVRQEDIHTLMLQHARAGQRVVRLKGGDPFVFGRGGEELEFLRTHGIPYEVIPGITAALACAAYAGIPLTHRDHAQSLCLITAHCQSSLDTLNWAALAQERQTLAFYMGVAGLPTIQQRLCEAGRTETTPFALIENGARAQQRVLTGTLKTLAHTAQTYAVRPPALLILGEVTALAEHLHWFGTTPLSAPCPPRTHPIS

SEQ ID NO: 1957 - protein, 241 aa, Methanothermobacter thermautotrophicus str. Delta H
MMLMVVYLVGAGPGDPELITLKAIRVLEGADVVIYDRLAGEEILRYAPDDARLIYVGKRAGEHHRTQDEINRILVEEGKKHETVVRLKGGDPFVFGRGGEEILALKEAGIPYRVIPGVTSAVGVPTSVGLPVTHRGVATSFTVVTGHEDPSKPAKQVHWDYNADTLIILMGVGNIRENMEEIMKHRPADTPVCVIESGTLDDERIILGTLGDIADKDLRPPGIIVVGDVVNVYREIRGTEK

SEQ ID NO: 1958 - protein, 279 aa, Leptospira interrogans serovar lai str. 56601
MLNADTNKDSRPGKVYLVGAGPGNPEDLTLRAYRILTKAEIILYDALLDPSFLEIFPKSAIVHYVGKRSGAHSATQEEINQLLLSYALSGKNVVRLKGGDPFVFGRGGEELITLVNHNIKYEIVPGVSSLNAGSSFAGFPLTHRGLSRQVLIMDGHTVLNEETDWEWFAKFKGTIALFMGTSSLPKIANLLLQHGSSADLPVALVENASLENFNIQICSLKEAANSYLEKKTQGPGIIYIGKVVRFLENKKLTSTFSQFSKESFLGQISSEIQGGKNES

SEQ ID NO: 1959 - protein, 246 aa, Methanopyrus kandleri AV19
MAGKLVLVGAGPGDPELLTFKAARAISRGDVILKDRLVPDEIIKEHAPEDAEVIDVGKKPGGEGWTQEEINELIVREGSKGKTVVRVKSGDPLIFGRGAEEIEVALKHGMDVEVVPGVTSAIGVPTSLGLPLTHRKCASSFAVATGHEDPSKPENRVDFGALAEAADTLVVLMGARRLREIAREILEKRGNEPVAILERGTTEQERVKVGTLEDAAEGKLKARPPAVVVVGEVVKWWREVLGRETR

SEQ ID NO: 1960 - protein, 485 aa, Fusobacterium nucleatum subsp. nucleatum ATCC 25586
MKKGKAYIIGAGPGDFELLTIKAKRIIENADCIIYDRLISDDVLKLAKKDAELIYLGKGNTEGGLIQDEINQTLVNKCLDGKNVARVKGGDPFVFGRGGEEIEALFKNEIEFEVIPGITSSISVPAYAGIPVTHRGLARSFHIFTGHTMENGKWHNFENIAKLEGTLIFLMGVKNLDLIVNDLIKYGKDSKTPVAIIEKGATKNQRVTVGNLENILGLVEKNKITPPAITIIGEVVNLRETFKWFETENLAKKILVTRDKKQAVEMSENISKRGGIPVELPFIEIENLKIDLKDLEKYKAILFNSPNGVKAFFENIKDIRCLANIKIGAVGVKTKEILEKYKIVPDFVPNEYLVDKLAEEVVKYTNENDNILIVTSDISPCDTDKYNSLYKRNYEKVVAYNTKKLKVDREKVLETLKDIDIITFLSSSTVEAFYENLDGDFFILGDKKIASIGPMTSETIKKLGMKVDYEAEKYTADGLLDVIFK

SEQ ID NO: 1961 - protein, 307 aa, Caulobacter crescentus CB15
MARQPVRNRPPGLVVVGGKRAGRALGVVWLVGAGPGDPDLLTFRAFNALRAADVVVHDGLVSEEILDLAPSRARRINVAKRKSRHTLPQDDINQLLVALAQEGLTVVRLKGGDPFLFGRGGEELAACREAGVECHVVPGVTAALAASAGAGAPLTHRGAAQAVTFVTGHAAHGEPDLDWVALARPNQTVVVYMGVSTAALIAERLVAAGRAASTRALIVENASRADERRILTTLSGLAEAAASVRGPALLMVGEAMAMAEIQSPPPLTGEGHREAVEGALAAKRAPSVISPLGELTPPPLRWGGEFK

SEQ ID NO: 1962 - protein, 261 aa, Caulobacter crescentus CB15
MSSSVQPGRVLLVGAGPGPVDLMTVRAMRAVQEAGALLYDALCSEEAVALAPPGCIRIQTGKRAGKPSMKQDEINRIMLRLARRGLRVVRLKGGDPSIFGRVGEEAAFLNAYGITTEVVPGVTAACAAAAQFGFPLTHRGQARRVVFTTARVENGAMSHDWRSGADAQATIAVYMGAEAAPDLAKALVTAGRATSTPVAMVERAGAADASLTMTSLGALTSGPITTHGGPVLIVVGEVAAAAQTQASNASDCFREHASRTA

SEQ ID NO: 1963 - protein, 267 aa, Chlorobium tepidum TLS
MSDGKGKVFLVGGGPGDPELLTIRAHNVLQSADVVLHDALISPEILALLPNGAERISVGKRLGDGKDQTDRQTKINDLLVRHAREGKCVVRLKAGDPFMFGRGIEEVRALAAAGVPCEVVPGITTGIAAADLCGIPLTERHRNSSVLFCTGHTADYSLGHFAAVIELMKAGTPLVMYMGFENLDKIVERFIDSGLSPELPACAVSRVSRSDQTLVAATIGTIVQQIRERELSLPVVFIIGEHAVPEGACPDQSDASDPSDQNHNEQQ

SEQ ID NO: 1964 - protein, 461 aa, Chlorobium tepidum TLS
MTGSIHTEPQAAAKRGYVYIAGAGPGDPELLTLKADRVLRGADVILFDDLVLPQMLEPYKAEKIYTGKRKDAHHFAQDEINQEIVRHALMGKTVVRLKGGDPFIFGRGGEEIETLRQHGIGYEIIPGITAAHGASAYSEIPLTMRKVSSSVAFCTGHPVNSIQVPDTDTIVYYMVASNVHDVLDKVAASGRSGETMVAVVQNATRYNQRVITSTLDEFRKREKAVYSPALLIIGQNISQYIEENWFSRKKKVLMTGEAPKKYPPADYITVPFPCQQVAGADLGAVKACIEGIDRFSMLFFQNRFAVRYFFKYLFEHGRDVRHLAHLVICTANRSVASALQEYGIIPDCCLDREGVDAIAAMLRKEELTGQRILLSGAEHVDELVAGQLREGGNEVTPLVVYVHGAQDQVEKIDLDFIDEIYFASADCVKKFRGMYDAIPARIAVTPADERTAEEMRRQFGG

SEQ ID NO: 1965 - protein, 492 aa, Clostridium perfringens str. 13
MSKKAYIIGAGPGDEELLTLKAINALQKCTAVLYDRLVGNNILNYLNDDCEIYYCGKEPGCHYKTQEEINESIVELAKKGHVVGRVKGGDPYVFGRGGEEVLALVEENIPFEVIPGVTSPISVLNYAGIPITHRGLAQSFHIVTGMSARTLNVNWEALSKENGTLVFMMGLSNLETIVEKLLENGKDIETPCGVVMRGTTSKQRKVIGTLENICKKVREAKLESPCIIVVGDVVSLNEKLSWYEKLPLFGANICLTRSKEQSKEIKWKLKELGAEVTEINSIKIKKTAENLDEYINTLEKYDHIVFTSVNAVNVFFDYLVKNRVDIRKIKADFAVLGKATKKALISRGIVPSIMAHSFTAEGLFEVLKDNIKEGEEVLIPCSSLSREYLFDNLASLGAKCHRVNIYDTVCGDVKNPRAFKEVDMVLYTSPSTVKNMIDMIGLEALKEKVSIAIGPITLKALNESGIEGKMCKTHCGDGFLSEIEGIWQEVKK

SEQ ID NO: 1966 - protein, 264 aa, Corynebacterium efficiens YS-314
MNSPDSASATPAGEVPGTVHSVTLIGGGPGAWDLITVRGMNRLREADVILADHLGPTSELDKLCDLSTKEVVDVSKLPYGRQVAQSRTNELLVEYALAGRRVVRLKGGDPYVFGRGFEELEYLARHGIACEVIPGVTSAISVPGAAGVPITQRGIVHCFTVISGHLPPGHPDSLLDWDALARTGGTLSIIMGVKNAGRIADALMQGGLSPHTPVAIIQEGTTQAQRSVRCTLDSLGEVMIREEIQPPAVYVVGEVAGLGQPEVP

SEQ ID NO: 1967 - protein, 673 aa, Corynebacterium efficiens YS-314
MVAFDHIGCGSQWEPPGLTGREFVRRPVTSPSGHGQCPSSTAAGPSDMHESLMLIVVGWLVPSGDGYGFCPGQELEKILMTIAEKAEMADTRGIGTSQVPETTGVETHVARRLVSLVPHEVPCEELIPGKVIFVGAGPGNPDLLTVRAREVLGKTVRAVTDAQVLSSVRDFVAAELPVPEDKLKAAEEEYERLCAEAKEGGARRKPPRPAPPTAAEIIEVDHADPEEIARILAEQLAKGGDVIRLVTGNPLSSDSTLAEITAVSEAGMSFQVVPGMSLPGTVPAFAGIALGSTYTETDVSGEDVDWDQLASAPQPLVLQARAENLATIATELKTRDLPLELPVSVTVNGTTRMQRTYDTTLGALAKLDAELPGPLVVTLGEGVSDREKYSWWENRALYGWRVLVPRAKPQAAAMSARLASHGAIPQEVPTISVEPPRNPAQMERAIKGIVEGRYQWVVLTSVNAVRAVWDMITEFGLDSRSFAGVRIAAVGEKTAAEIRALGITPELLPPRNRQNAQGIVDVFPEYIEELDPVGRVLLPRADIATDVLVDGLVALGWEVDDVVAYRTVRAAPPSADIRDMIKTGGFDAVCFTSSSTVRNLVGIAGKPHPRTIIACIGPMTADTARELGLRVDVMPEIAEVPDLVDALADHVADLRAKGELPPPRKKRRRRKAS

SEQ ID NO: 1968 - protein, 325 aa, Staphylococcus aureus subsp. aureus MW2
MSVEEYGKVYLIGAGPGNPNYLTKKAERLIREADVILYDRLVNPLILQYANLTTEIIDVGKKPYAKHIQQEKINDCIVEAARRYNKVVRLKGGDPAIFGRVQEEVDTLNEHHIAFEIVPGVTSASAAVATMQTGLTMRTVAKSVTFSTGHFKDSEENEVDVNSLVNGGTLAIYMGVKRLGKIITQIQQYKDIDYPIAIVFQASCFNEFVVKGRLSNIISKLQHYSIEAKPGICIIGEVVGYTENVSTTSNPTQQFYVVSGSKHDALMLCEHLYDEGYGCLLNPNNTSNGTYHSSQYDYYDAFIKQQENVTYISTDRADANTVLCH

SEQ ID NO: 1969 - protein, 250 aa, Corynebacterium glutamicum ATCC 13032
MTISQENQPIIQPVSLIGGGPGAWDLITVRGMNRLQEADVILADHLGPTDELEKLCDISSKTVVDVSKLPYGRQVTQERTNEMLVEYAQQGLKVVRLKGGDPYVFGRGFEELEFLGEHGIECEVIPGVTSAVSVPAAAGIPITNRGVVHSFTVVSGHLPPGHPKSLVDWAALAKSGGTLSIIMGVKNAGAIAEALMDGGLDADTPAAVIQEGTTDAQRSVRCTLGTLGAVMVEEEIKPPAVYVIGQVAGL

SEQ ID NO: 1970 - protein, 598 aa, Corynebacterium glutamicum ATCC 13032
MTIAHKPEMAETTGIETNQVSETIGVESLTHGNLRPVSSFEGQHEGQTEELLPGKVIFVGAGPGNPDLLTVRAREVLGNAVRAITDEQVLSGVRAFVATEIPVPEDKLQAAEDEYERICIEAKENGARRKPPRPAPPTAAEITEVSEATPAQIVELVQDALSYGGDVIRLVTGNPLSSDATLAEISAVSEAGLEFQVVPGMSLPATVPAFAGIALGSTYTETDVNGQNLDWDQLASAPQPLVLQARVDDLSRIAQELKARNMSLETPVSVTANGTTRLQRTYDTTLGLLHKLDAELSGPLVVTLGKGVDDRSKYSWWENRALYGWRVLVPRAREQAASMSARLSSHGAIPQEVPTISVEPPRNPAQMERAIKGIVEGRYQWVVLTSVNAVKAVWEKITEFGLDSRSFAGVRIAAVGEKTAAEIRALGITPELLPARTRQNAQGLVDVFPEYFEELDPVGRVLLPRADIATDVLVDGLTHLGWEVEDVVAYRTVRAAPPSADIRDMIKTGGFDAVAFTSSSTVKNLVGIAGKPHPRTIVACIGPMTAATAEELGLRVDVMPEIAEVPELIDALAEHVADLRAKGELPPPRKKRRRRKAS

SEQ ID NO: 1971 - protein, 590 aa, Corynebacterium glutamicum ATCC 13032
MAETTGIETNQVSETIGVESLTHGNLRPVSSFEGQHEGQTEELLPGKVIFVGAGPGNPDLLTVRAREVLGNAVRAITDEQVLSGVRAFVATEIPVPEDKLQAAEDEYERICIEAKENGARRKPPRPAPPTAAEITEVSEATPAQIVELVQDALSYGGDVIRLVTGNPLSSDATLAEISAVSEAGLEFQVVPGMSLPATVPAFAGIALGSTYTETDVNGQNLDWDQLASAPQPLVLQARVDDLSRIAQELKARNMSLETPVSVTANGTTRLQRTYDTTLGLLHKLDAELSGPLVVTLGKGVDDRSKYSWWENRALYGWRVLVPRAREQAASMSARLSSHGAIPQEVPTISVEPPRNPAQMERAIKGIVEGRYQWVVLTSVNAVKAVWEKITEFGLDSRSFAGVRIAAVGEKTAAEIRALGITPELLPARTRQNAQGLVDVFPEYFEELDPVGRVLLPRADIATDVLVDGLTHLGWEVEDVVAYRTVRAAPPSADIRDMIKTGGFDAVAFTSSSTVKNLVGIAGKPHPRTIVACIGPMTAATAEELGLRVDVMPEIAEVPELIDALAEHVADLRAKGELPPPRKKRRRRKAS

SEQ ID NO: 1972 - protein, 501 aa, Thermosynechococcus elongatus BP-1
MGAGLGTPSSLTLEAWTCLQQAQVVLYDALLSPSLLELTPADCLRVAVGKRAGAEAIPQLEINRLLVAYGQQYQRVVRLKSGDPGLFGRLHQELEAVLGAGLEAVVIAGVSSALAAPLLAGICVTAKDVSQSVAILSGHAPETLPWPAIARMETLIFLMATRSLRYIAEALLRQGRSPTEGLAILQWAGQPQQQFWFGTLESYLQSPQFPDMAPAVVVIGAIARKRYPLASLDLVFPEFLRISPSSMSALHGKTILVTRAAAQASDFTQQLTAAGATVLEMPTLEIVPPSSWQPLDQALAQLDTFDWLILTSHNAVTFFMKRLHSHGKDSRALAGLKIAVVGEKTAQTLNRYGLVADFTPREFVADALVVEFPEPVAGLRFLFPRVEKGGRPVLGEAFTAAGAEVVEVPAYNSRCPQTVDAPVLAALQAGQVDIVTFTSSKTVKHFCQLVGPQAAELLQNVQIASIGPQTSQTCRELLGRVDTEATEHTLEGLLQALLRIT

SEQ ID NO: 1973 - protein, 475 aa, Thermobifida fusca
MSRLRGTPRRWHRTAEAVGTRQASTGTRHTPQWSPERFETGQRDLEAASVTYLLGLRLQGRDVLVVGGGQVAQRRVPVLLEAGARVTVVSPHVTTALQGLAESGRIHWEQRPYRRGDVTGLGRFWLVHAATDDPEVNAAVVAEAEEARIWSVHADDRHASSAWTPATGSASGVTVGVITGTDPRRAAGLRDAIVTGLADGTLDARRGRAPLRGVALVGGGPGDPGLITVRGRQLLAQADVVVVDRLAPTSLLDQLSGDVEIIDAAKIPYGRSMSQEGINAVIVDRARQGKFVVRLKGGDPFVFGRGGEELAACVAAGIPVTVVPGVTSALAAPASVGIPVTHRGVAQHFHVVSAHVAPGDERSTVNWETLARSGGTIVVLMGVERLGRIAEALIRYGRDPHTPIAVIQEATLPSQTTLVATLETVEKEAHAAGVHPPAVLVIGEVVNTAQELDILHRSQNAAETPIAPAGGNGRN

SEQ ID NO: 1974 - protein, 493 aa, Clostridium thermocellum ATCC 27405
MADGKGKVYLVGAGPGDEELLTVKAADVIKKADVIVYDRLISDGILSKIPDNAEKIYVGKNAGNHPVPQHEINKILLAKALEAKIVVRLKGGDPFVFGRGGEELEFLHQNGIPFEVVPGITSAIAAAAYAGIPVTHRDFCSSLHIITGHVKDGGNPDIDYESLVKLKGTLIFMMSVASFPQIAQGLIEAGMESDMDAAVIENGTMPNQRKFVSKLCDIPKVIAENQVKSPAIIIVGKVCSLSEKLDWFSKLPLYGCNVLVTGPKKTSERLAGKLRGLGAHVVEYPCIETEPLDFDIDIREHSWIIFTSSLGVTIFFKKLYENKLDSRYLYNKKIAAVGSQTAEELLKHGICADFVPGKFDGRHLAEELLQSGKISPEDKVVIFRAKDGTQAIVDIFENNNIHYTDISVYETKCIENERIDISGFNYITFTSESCVKGFAHSFKNTIDYSKINAICIGEQTAKATRAYGMNTIISDVATVSSMVEKIIEMHCAK

SEQ ID NO: 1975 - protein, 259 aa, Trichodesmium erythraeum IMS101
MKVYIIGAGPGNKEYLTLKAHALITQGEVLIYDALIDDSILELAPENCLKIEMGKRGGKPSISQSEINSLLIEKYNLGKQVIRLKGGDPFIFGRATPEIQALIKAGCEFEIVPGISSTLAAPLLANIPLTDTVMSRAFVILTAHDIKVLDWETISKIETLVILMGAKNLGEIVHQLLKHQRKPQTPVAIIKNCATPKQQIWISNLSNIAKQTYAEYLSPCVIIVGEVVRLRDYLQYPNNMVREKSEAKTEIAPLANKLF

SEQ ID NO: 1976 - protein, 503 aa, Desulfovibrio desulfuricans G20
MKVYLIGAGPGDPGLLTIKGRDILKRADVIVYDYLANDAFLNYAAPGAEIIYVGKKGGDHTLSQEGINRLIVEKAREGKVVARLKGGDPYVFGRGGEEAEELLDAGVNFEVVPGVTSAVAGPAYAGIPLTHRSYSSSVSFITGHEDPSKPESAHNWKALAASASTLVFFMGMKNLPEISRKLIEAGMDPDTPAALVRWGTTSRHRSLAATIATLPEEGKKAGFSSPSLIVVGHVVKLRDRLNWFEQLPLLGRGIVVTRAREQASGLAASLTQLGAEVIQFPTILIRPLEDYAPVHDAIRRLAEYDWLVFTSVNGVKHFWQQMGLLGLDSRALGGVKVAAIGPATADVLREKGIEPDFIPEKYVAEGVVKGMIERGMDGSRVLLPRARVAREVLPEELARAGARVDVLPVYETVPGDANRSHVLEMLEEGRIDCITFGSSSTVDNFFSLVEPEAMRRYEHVHMACIGPVTRKTLERYGFTCSIQPEDYTIPALVDELVRQLGAQ

SEQ ID NO: 1977 - protein, 245 aa, Pseudomonas aeruginosa PAO1
MSGKVWLVGAGPGDPELLTLKAVRALQDADVVMVDDLVNPSILEHCPSARLVRVGKRGGCRSTPQDFIQRLMLRHARQGRSVVRLKGGDPCIFGRAGEEAEWLARHGIDSEIVNGITAGLAGATACGIPLTYRGISRGVTLVTAHTQDDSPLAWEALARSGTTLVVYMGVARLAEIQAGLLAGGMAEDTPLAMIENATLGNQRECRSNLGELLRDAGRFALKSPAILVIGEVTRDIVSQPISLSA

SEQ ID NO: 1978 - protein, 485 aa, Fusobacterium nucleatum subsp. vincentii ATCC 49256
MKKGKAYIIGAGPRDFELLTLKAKRIIENADCIVYDRLISEDILRFAKKDAELIYFGKENTEGGLIQDEINQTLVKKCLEGKNVARVKGGDPFVFGRGGEEIEALFKNKIEFEVIPGITSSISVPAYAGIPITHRGLARSFHIFTGHTMENGKWHNFENIAKLEGTLIFLMGVKNLDLIVNDLIKHGKDSKTPIAIVEKGATKNQRVTVGNLENILELVEKNKITPPAITVIGEVVNLRETFKWFESENLAKKILVTRDKKQAVEMSENISKRGGIPVELPFIEIENLTIDLKDLEKYKAILFNSPNGVKAFFENIKDIRCLANIKIGTVGVKTKEILEKYKIVPDFVPNEYLVDKLAEEVVKYTNENDNILIVTSDISPCDTDKYNSLYKRNYQKVVAYSTKKLKVDREKVLETLKDVDIITFLSSSTVEAFYENLDGNFFILGDKKIASIGPMTSETIRRLGMKVDYEAEKYTADGLLDVIFK

SEQ ID NO: 1979 - protein, 485 aa, Clostridium tetani E88
MGKVYLIGAGPGDEELITLKATRMLQKCTAVMYDRLAGPGFLKYLNEDCEIYYCGKEPGCHYKTQDEINEMLAKLAKKGHVVGRVKGGDPFIFGRGGEEILRLLEDNIEFEVIPGITSAISVPSYAGIPVTHRAIAQGFHVFTGMTAEKLDIDWKAVANVGGTLIFLMGYRNLDIIRNRLMENGMNENTPCAIIMRGTTSNQKKVVGTLKDISEKAEKQGVTSPCIILIGDVVQFNDKFNWYEKKRLFGKNICVTRSRVQAKELREKLSDLGAQVTEINAIKIKSRDDELEKYVERLKDYKFIVLTSVNAVNILFDYLVKKEYDIRNIKGRFAVIGPATEKALLKRGIKADIIAKEFVAEDLFNELKPYLNKDDKIFVPHSKQARQYLVEALKDKGCHVEEVYSYEVVKGEVPNLEIFDDVDIVLYTSPSIVRNMIDMIGLEKLKKKTSISIGPITAKELDKNGIDYIICDEYTTDGMIEKLLTL

SEQ ID NO: 1980 - protein, 231 aa, Methanobacterium ivanovii
MVVYLVGAGPGDPELITLKAVNVLKKADVVLYDKPANEEILKYAEGAKLIYVGKQAGHHYKSQNEINTLLVEEAKENDLVVRLKGGDPFVFGRGGEEILALVEEGIDFELVPGVTSAIGVPTTIGLPVTHRGVATSFTVVTGHEDPTKCKKQVGWDFKADTIVILMGIGNLAENTAEIMKHKDPETPVCVIENGTMEGQRIITGTLENIAGKDIKPPALVVLEMLSMFLKK

SEQ ID NO: 1981 - protein, 112 aa, Methanosarcina barkeri
MSGNYGKVYLVGSGPGDPELLTLKARRLIDSAEVIVYDQLPGKAILDSMPASAEKINVGKYAGSHTMTQAEINEVLVQKAKEGKMVVRLKGGDPYVFGRGGEEAEVLRSRRN

SEQ ID NO: 1982 - protein, 161 aa, Methanosarcina barkeri
MSSEEAEKKPRYFVAEEIEFEVVPGITSAIAVPAYAGIPVTHRESTSMVTFITGHEDPTKEESGLDWETLAKFGGTIVILMGVKMLGRNAEELMKHGKAPDTPVAVIERGTRADQRVTVGTLANIASLAEERKVKAPAITVVGDVVHLHDILGEQRTGVDF

SEQ ID NO: 1983 - protein, 257 aa, Oceanobacillus iheyensis HTE831
MGKVYLVGAGPGDPELITLKGLKAIQQSDIILYDRLVNEELLGYASKNAELIYCGKSPEHHSLTQDNINKLLCAYAKEDKIVTRLKGGDPFIFGRGGEEAMVLRENGLIFEIIPGITSGSAAPTYAGIPLTHRDYSSSVSFVSGVSKTGEEHERYWEHLAKSSDTLCIYMGVKSLPEICERLIRYGRHSTTPIAVIHWGTTEMQQTVTGTLEDITHVTEKLKNPSMIIIGEVVRLRDEIQWFNEETIEHFNPEVVIG

SEQ ID NO: 1984 - protein, 243 aa, Bradyrhizobium japonicum USDA 110
MSGFVSFISAGPGDPELLTLKGAARLREADVVLYDDLASGAILDLARPGANLVAVGKRAGRPSTKQHHVNRLLVDYAATGARVVRLKSGDAGIFGRLEEELETLREAGIGYEIVPGVTSACVAAAQAGIPLTRRHTSRRVQFVTGADVTGELPQNLNWAALADPEATTVVYMGRRTFPALAAKLIAHGLAPTTPALFAESLGRPDERLVRTTIAELAEQLARGGAASTAAVILFGALAGEYPS

SEQ ID NO: 1985 - protein, 474 aa, Bradyrhizobium japonicum USDA 110
MRFLPVFLDLKAGPVVLIGAGELLRAKLRVLTAAGARIRVHAIDGNQDMGLSSEDAARVDIATGDPLIADLSGVIAIVCAGAGDVGVAMSARAKALGLPVNVMDDLEHSSFIFPAIVDRGDVVVAVGTGGTSPVVARRVREKIEALLPARIGELAEFIGDFRKSINERIAEFPLRRRFWERVIDGPIGGAVLAGRKGEADAALKAIADPAAFARADKPEGSVALVGAGPGDPDLLTIKALRALQDADIVFHDELVSREILDRIRRDTTRVAVGRRVGKPGIGQDAINTRMIEAAQSGQRVVRLKGGDPFVFGRGGEEVEALRSAGVAYSIIPGITAGLGGAADFEVPLTYRHEATRITFLTAHRARDAEAVDWSTLTDTKMTVVVYMGMTAAPAVRAGLFAAGRSPETPVGVFARVTRPDAQGAIGTLRDLPELVRRTHGGPAMLIIGDVVRHAGSLRRQTPKQIISDLLDAAE

SEQ ID NO: 1986 - protein, 410 aa, Streptomyces avermitilis MA-4680
MAEHPAYPVGLRLTGRRVVVLGGGQVAQRRLPALIAAGAKVHLVSPEATPSVEAMADTGEITWSRRRYEDGDLAEAWYALIATSDAAANVAASAEAERLRVWCVRSDDADAATAWTPATGHSEGVTVAVLTTNAKGRDPRHTAAIRDAVVEGLRDGTLVAPHHRVRTPGVALVGGGPGDPDLITVRGRRLLAEADVVIADRLGPRDLLAELPPHVEVIDAAKIPYGRFMAQEAINNALIEHARQGKSVVRLKGGDPFVFGRGMEEAQALAEVGIPCTVVPGISSSISVPGAAGIPVTHRGVAHEFTVVSGHVAPDDERSLVDWPALAKLRGTLVILMGVDKIGKIADTLVAHGKPAGTPVALVQEGTTAAQRRVDATLATVAETVRAQDVKPPAVIVIGAVVDVGPQTFE

SEQ ID NO: 1987 - protein, 571 aa, Streptomyces avermitilis MA-4680
MSPTTLPAGPEHGHVTFLGAGPGDPGLLTLRAVEALARADVLVAEHEVLDVVRTHARQGVAVLNTSSDAYSDTSSGTYSATSTPQLAVVDSTSTTAGTPASRDAANLVMEAARGGRRVVRAVSGDPGLDTYAAEEMLACAAAGVPFEVVPGIAAAVGVPAYAGVPLRDAQGADVRFVDARSASERCWTEVGASDGTVVVSATLDSVAAAAGELVAAGRKPDTPMSVTIAGTTTRQRTWSATLGSIAQTLKQAKVLPSPDGGRPVIAVVGERSAAAQRDQLSWFESKPLFGWKVLVPRTKEQAASLSDQLRSYGAVPHEVPTIAVEPPRTPQQMERAVKGLVTGRYEWIAFTSVNAVKAVREKFEEYGLDARAFAGIKVAAVGEQTAKALVAFGVKPDLVPSGEQSAAGLLEDWPPYDPVFDPIDRVFLPRADIATETLVAGLIELGWEVDDVTAYRTVRASPPPAETREAIKGGGFDAVLFTSSSTVRNLVGIAGKPHNVTVIACIGPATAKTAEEHGLRVDVMAPEPSVLKLAEALADFGLRRRASALDAGDPVTRPSERRPGSRRRRTT

SEQ ID NO: 1988 - protein, 242 aa, Sulfolobus solfataricus
MSGKVYLVGAGPGDPELITVKGLKILQRADVVVYDRLISKELLNFCKIEAEKIYVGKNIGDYVIQDEINELLVKKAMENKVVVRLKGGDPYVLGRGEEECLYVISKGIECEVIPGITSAIAVPAYAGIPVTSRIYSASGFTIISGTKAEDKLIDEDYIPRKGTLVILMGLRKIENMVNILIKLRNEREPVAVIENGTTENQRVFTGELKDLVNIVRSNNVTSPAVIVIGEVVKFREYLWKFK

SEQ ID NO: 1989 - protein, 231 aa, Sulfolobus solfataricus
MGKVVLVGAGPGDPELITLKGIKYLQMADVIVYDKLVSRELINYAKPSSFVIFLSNDDIEVDLLRKYALEDKLVIRLKNGDPYIFGRGGKICQELIKDGIECEVIPGVSSVNSVPAYAGIPLTFNGVSDMVTIVSAVSQGGKLFNFQKIPDYGTLVVLMGGRRLEEVSKWLMAKRDPSEDVAVIERGTYLDQKVHVNKLEKLAEVGNNLATPSLLVLGNVVRLREILWKFR

SEQ ID NO: 1990 - protein, 287 aa, Paracoccus denitrificans
MAGKTVTNGAAQGKAARSGADGAVRGKAGMGRVDLIGAGPGDPELLTLRALRLLQQADVVVHDRLVSDEVMACIPAHVRRIPVGKAAGFHPVPQEQINALLVELGLSGLTVARLKGGDPTIFGRGGEEFEAVTRAGIPCDYVPGITAAQGAAVSARFPLTHRGLATGLRHVTGHRARDAALDLDWASLADPQTTLAIYMGAANMAEIARELIRHGMPADLPVLAVSQASTPQEQRLHATLQDIAAALARKPLPAPVLFIVGHVAAMAEDCALPQELYRPEWRLVAHG

SEQ ID NO: 1991 - protein, 251 aa, Cyanidium caldarium
MTHNKTIKKVYIVGAGPGDPELLTLKAQRVLREADVVIYDALVNPEILQHCKPNAEIIKVGKRRNNHSFSQLQIASLLIDRAKKGERVIRLKGGDPLIFGRLGEEILELFSKNIEIEIIPGITSAFAVAADMKFPLTHRQLGSSITFLTGEEFYEKTTNKLKWERIIWGADTIIVYMILYNLPKIIKKFLSVGYSAEKPIVLVQWASLKKKNFLIGTIGTIIHQVIESKFGPPSLAIIGEVIEISSIIQKL

SEQ ID NO: 1992 - protein, 513 aa, Geobacter metallireducens
MPDKSLKKPFVHLIGAGPGDPGLITVKGRESLGRADVVIYDYLANDDLLRFARPDAELIYAGKIGGHHNREQWQINALLVEKALAGNVVARLKGGDSFVFGRGGEECEALVAAGIPFEIVPGVTAGIGVTAYAGIPLTHRGVTTSVTFVTGHEGHDKEVSQIDWEGLSLGSGTVVFYMGIKNLPQITANLMAHGRPPETPVALIRWGTRPEQEVLTGTLADIAEQARRTGFRAPAITVVGEVVRLREKLRWFDNRPLFGTSILVTRAADQAGEFGAMLGALGARVLECPTIAIVPPESWDNLDAAIASLDRFHWAVFTSVNAVRFFFERLAAAGKDSRALGNCRVCAVGPKTAAALAPFGIRPDLIPADYKGEGVVEVFRSEEIAGKRIIFPKGDRARDVIPQGLAELGGEVTAPVAYRNVTPDSLPAGVIAELEERRITCVTFTSSSTVENLAAILGENRFLHLLKGVTIAAIGPITARTCRELGLEVHVEPSKYTLAAMTDALVDFFSRSK

SEQ ID NO: 1993 - protein, 247 aa, Pseudomonas fluorescens
MSAKVWLVGAGPGDPELLTLKAVRALHAADVVLIDDLVNPRVLEHCPDARVITVGKRGGCRSTPQDFIHRLMLAMRAKANAWCDLRAATPCIFGRGGEEALWLRERGVEVELVNGITAGLAGATNCDIPLTLRGVSRGVTLVTAHTQDDSSLNWRALAEGGTTLVVYMGVAKLEEIRQQLLEGAMAADTPVAMIENASLPQQRECRSTLAHMHTDAQVFALKSPAILVIGSVAGAGQAASITVSASA

SEQ ID NO: 1994 - protein, 478 aa, Rhizobium etli
MSPKTEQLSVFPAFFRVEGQKTAVFGNGDELSAKVRLLLNTRARIVAYADRPEADYHAFLIANRIETVRAGFAAEQVEGAALVFAATGNEADDRDIVDAARAARIPANAVDQPDYCDFFTPALVNRAPVAVAIGTEGRGPVLAQMIRAQVDQILSPSLGRLAALATSFRKSVEQFVPRGVSRRFWRRFFSGPVADAVANGNPAQARHAADRLLGSMDKVAGHVWLVGAGPGAEDLLTLRAQRVMMEAEVIVYDALVPQAIVDMGRRDAERLSVGKRKGCHSKSQEEINELLVELGRQGKRVVRLKSGDPLVYGRAGEEMAALRAAGITYEVVPGITSAFAPAADFELPLTLRRVASSLVFTTGHDLTGDVLPDWASLAVSGATIAVYMGRTVAASVAERLMQAGIPAETTVAVIENASRADRRLLHGTLADLPDLQHRDELTGPVMVIIGDAVAGRQFRTVRAAGARRTPGSREFARS

SEQ ID NO: 1995 - protein, 269 aa, Ralstonia solanacearum
MEAKTIPTTKGRVSLIGAGPGAADLITVRGARLLGEAEVVLHDALVSPEVFQYCPQAVLIPVGKRCGKRSTAQRFINRQLVDLATKYQRVVRLKGGDPMLFGRADEELQALEAAGIEYEVVPGITAALAAASAIRQPLTKRGVARSVAFVTQAKAADPDTPAPEGAAPEPAVQADSLVYYMGRDQAASIAADLIARGRAPSTPAWVVEAATMPQQRSACFTLQQMAEGAAAAWIHPEHPSLLMIGEAFAGRAASAAPAQCPGAPHVLAA

SEQ ID NO: 1996 - protein, 369 aa, Arabidopsis thaliana
MALVQRIPISSSSIRNWQQARTNLTPICCLHYNTASSSSSPFTEKHSVERYQRDQWLYKAVEPTPPSTPSPSPFEDEVFVRENDIASQLPELKKLLAVLKEKRVKGCKGGDCGPGDVYLVGTGPGDPELLTLKAVRVIQSADLLLYDRLVSNDVLELVAPDARLLYVGKTAGYHSRTQEEIHELLLNFAEAGATVVRLKGGDPLVFGRGGEEMDFLQQQGIRVQVIPGITAASGIAAELGIPLTHRGVATSVRFLTGHSRKGGTDPLFVAENAADPDTTLVVYMGLGTLPSLAQKLMDHGLPSDTPAVAVERGTTPLQRTVFAELKDFATEIQSAGLVSPTLIIIGKVVELSPLWPHCTKESSCLVETR

SEQ ID NO: 1997 - protein, 369 aa, Arabidopsis thaliana
MALVQRIPISSSSIRNWQQARTNLTPICCLHYNTASSSSSPFTEKHSVERYQRDQWLYKAVEPTPPSTPSPSPFEDEVFVRENDIASQLPELKKLLAVLKEKRVKGCKGGDCGPGDVYLVGTGPGDPELLTLKAVRVIQSADLLLYDRLVSNDVLELVAPDAKLLYVGKTAGYHTKTQEEIHELLLNFAEAGATVVRLKGGDPLVFGRGGEEMDFLQQQGIRVQVIPGITAASGIAAELGIPLTHRGVATSVRFLTGHSRKGGTDPLFVAENAADPDTTLVVYMGLGTLPSLAQKLMDHGLPSDTPAVAVERGTTPLQRTVFAELKDFATEIQSAGLVSPTLIIIGKVVELSPLWPHCTKESSCLVETR

SEQ ID NO: 1998 - protein, 272 aa, Mesorhizobium loti
MSGTSKNNGGNATLEQALARLNFKPRPLEPGHVWLAGAGPGDPGCLTLEVLAALAEADALVYDALVSPDVVAVAANAELFFAGKRGGQPSMKQDDITALLVRLARQGRRVIRLKGGDPYIFGRGGEEALALARENIPFRVLPGLTSGLSALAATGIPATMRGINKAVILATGHAAGTDDDIDWAAIARTGQPVVVYMGMANLPLIAAALLDGGLSPSTPAAVIVAATTPQERTVVATLATIAEEAAAAGLTSPALIVVGGIVAMRAALTRQA

SEQ ID NO: 1999 - protein, 483 aa, Mesorhizobium loti
MPQANAKLNAFPVFVRVEGEAVAIVGGGDEALAKARLIGQSSAVLRIIAENAEPELLAFIGQSGASHVAAAYDASQLEGAVMVFAASGDEALDRRVAADARELGIPVNAVDRPELCDFFTPALVNRAPVAIAIGTEGAGPVLAQMLRGRIDQMLSPSLGSLATLAATLRGAAEKLLPKGNARRRFWNSFFEGAPAHAVEAGQLSQAHDAAVDLLLSNAPASGHIALVGAGPGAEDLLTLRAHRLLMEADVIVHDALVPEAVVAMGRRDAERLPVGKRKGCHTKSQAEINALLVELGRQGKRVVRLKSGDPLVFGRAGEEMAALRDAGIAYEVVPGVTAAFAAAADFELPLTLRGVSSSMVFTTGHDLKGNSLPDWAKLAISGATVAVYMGRSVAAEVAGRLIEAGLSPDTAVAVVENASLANRRRFHGTLADLPSLEARGDLSGPVMTIIGDAVAGANFERSEPLAAHRNEGAAKVAAERVQP

SEQ ID NO: 2000 - protein, 434 aa, Glycine max
  unsure (1)..(434): unsure at all Xaa locations
MSPQPLQSPLHFYHYHSPIQTQTLPDSVYIILEVEARNARPLLCLLANYPTWLSSTRHLSPLSTPIPPIPHHPAATSSSPSPXSPFTEKHSTERYQRDQWVYQSTTQEGQPQTTPFPPLPCDSASLRDDDIALQLPELKKLLQVLREKRXXCINGEGCEPGNVFLVGTGPGDPELLTLKAVRVIKSADLLLYDRLVSNDVLDLVGPGARLLYVGKTAGYHSRTQEEIHELLLSFAEAGATVVRLKGGDPLVFGRGGEEMDFLQQQGIQVKVIPGITAASPRAPELGIPLTHRGIANSVRFLTGHSRKGGSDPLFVSENAADPDSTLVVYMGLATFPSLAQKLMHHGLSPQTPAAAIERGTTLHQRTVFAELKDLHEKITSAQLVSPTLIIIGKVVELSPFWPIPTKEESCLMQAXWMLSRNIIVKLGGNEGLPW

SEQ ID NO: 2001 - protein, 478 aa, Rhizobium leguminosarum bv. viciae
MPPRTEQLSVFPAFFRVEGLKTAVFGNGDEAFAKVRLLLNTKARIIAYADRPEADYHAFLIANRIETVRAAFAAEQVEGSALVFAATGNEADDRSIVDAARAARIPANAVDQPDYCDFFTPALVNRAPVAVAIGTEGAGPVLAQMIRAQIDQLLSPSLGRLAGLATSYRKAVEQLIPRGVSRRVFWRHFFSGSVADAVANGNLPQARHAADRLLHAMDKVAGHVWLVGAGPGAEDLLTLRAQRVMMEADVIVYDALVPQAIVDMGRRDAERLSVGKRKGCHSKSQEEINDLLVDLGRQGKRVVRLKSGDPLVYGRAGEEMAALRAAGITYEVVPGITCAFAAAADFELPLTLRGVASSLVFTTGHDLTGDVLPDWASLAVSGATIAVYMGRTVAASVAERLMQAGIPSETTVAVIENASRAERRLLHGTLADLPDLQHRDELTGPVMVIIGDAVAGANFELSEPLVRANARLEELARS

SEQ ID NO: 2002 - protein, 384 aa, Oryza sativa (japonica cultivar-group)
MALALRPPRFQPLPAPIPASTASTTALAARPSSSAHAIICAAAASPFTEATSSSRYRRDAWSYAASDGDSSSSSAAAAAAAASSGRRDDEIALQLPELRRLLEALRASRGRGAEGEGGGGGPGRVALVGTGPGDPELLTLKAVRAIEAADLVLYDRLVSNDVLDLVGEGARLLYVGKTAGYHSRTQEEIHELLLSFAEAGANVVRLKGGDPLVFGRGGEEMDFLQQQGIRVEVIPGITSASGIAAELGIPLTHRGVATSVRFLTGHSRNGGPDPLYVAENAADPDTTLVVYMGLSTLPSLAPKLMKHGLPPDTPAVAVERGTTPQQRMVFAMLKDFVNEVKSEDLVSPTLIIIGKVVALSPFWIDSSKQGAQSIENLYAAETKR

SEQ ID NO: 2003 - protein, 511 aa, Paenibacillus macerans
MDMTGRVYLVGAGPGDARLITLKGLDCIEKGDVIVYDRLANPSLLRKAKPGAEKIYVGKRTDRHTMKQEDISRLLVDLALAGKTVVRLKGGDPTVFGRGGEEAELLRKHGIPYEIVPGITAAISVPAYAGIPVTHRDLASSVSIIAGHESPDKLDLSINWEKVTNATGTLVFMMGVANIGYISKQLIAHGRPPETPVALVRWGTRAEQETLTGTLADIEQKVLDSGFKRRVTVVGEVVNQREQLLWAEAMPLFGKRILVTRSRSQASDLVRGIEELGGEPYEFPVIQISMPSGAALERTDEALSRLETYDWAFFTSVNGVDYFFKHLERLGKDIRALYKAIAAVGGHAGALRERGIAAEELPGRFQAEPCWKRTARSLCPAKAYCCRTGILPGRGCRSCAIKGWPSPRRSCMRRVPAGEKDEELIKLLEKGRIHAVTFTSSSTVTHLLAALSGMGVRPVAALRGREIACIGPVTARTAEEAGLRVSILAKEATIPSLIEALCDWKERGASV

SEQ ID NO: 2004 - protein, 304 aa, Oryza sativa
  unsure (1)..(304): unsure at all Xaa locations
XLTLKAVRAIEAADLVLYDRLVSNDVLDLVGEGARLLYVGKTAGYHSRTQEEIHELLLSFAEAGANVVRLKGGDPLVFGRGGEEMDFLQQQGIRVEVIPGITSASGIAAELGIPLTHRGVATSVRFLTGHSRNGGPDPLYVAENAADPDTTLVVYMGLSTLPSLAPKLMKHGLPPDTPAVAVERGTTPQQRMVXFAMLKDFVNEVKSEDLVSPTLIIIGKVVALSPFWIDSSQTGCTTXLENLYAAGTKRXQFLXNQMSEXPLSNVIHQIWTFTSKIXANLIWFSLGHANRXWNEPGQEIMHIP

SEQ ID NO: 2005 - protein, 268 aa, Triticum aestivum
  unsure (1)..(268): unsure at all Xaa locations
XPGRVALVGXGPGDPELLTLKAVRAIEAADLVLYDRLVSNEVLDLVADGARLLYVGKTAGYHSRPQEEIHELLLSFAEAGANVVRLKGGDPLVFGRGGEEMDFLQQQGIKVEVIPGITSASGIAAELGIPLTHRGVATSVRFLTGHSRNGGTDPLHVAENAADPDTTLVVYMGLSTLPSLAPKLMKHGLPPDTPAVAVERGTTPXQQRMVFAMLKDLVNEVHSADLVSPTLIIIGKVVALSPLWVESSEHDALNNENSSTSLATLNRX

SEQ ID NO: 2006 - protein, 424 aa, Zea mays
  unsure (1)..(424): unsure at all Xaa locations
MALAVRTPRFQPRPASISAPTTPASTSLAAGNARPRPCAGAAVRASPFTEATSSSRYRRDAWSYAADGSSNSASPSSAAAAAAGRRDDEIALQLPELRRLLDVLRASRGRGAEEGGGPGEVALVGTGPGDPELLTLKAVRAIEAADLVLYDRLVSNDVLDLVGEGARLLYVGKTAGYHSRTQEEIHELLLSFAEAGANVVRLKGGDPLVFGRGGEEMDFLQQQGIKVEVIPGITSASGIAAELGIPLTHRGVATSVRFLTGHSRNGGTDPLYVAGNAADPDTTLVVYMGLSTLPSLAPKLMKHGLPPDTPAVAVERGTTPQQRTVFASLKDLVDEVKSADLVSPTLIIIGKVVSLSPFWVESSEHDALKVQSSYANEAXDDNRFSWFLVTGQYLRNARSQIWEHRFDLVYTETSQEAWILNGGW

SEQ ID NO: 2007 - protein, 423 aa, Zea mays; identical to SEQ ID NO: 503

SEQ ID NO: 2008 - protein, 321 aa, Zea mays
  unsure (1)..(321): unsure at all Xaa locations
QXLLDALRAXXRRGAEGGGGGGRGPGSIAXXGTGPGDPELLTLKAVRAIEAADLVLYDRXXSNDVLDLVGEGSRLRYVGKXXGYHSRTQEEXHEXLXNXAEAGSNXVRLKGGDPLVFXRGGEXMDFLQQQGIKVEIIPGITSSXGIAAELGIPLTHRGVXTSFRFXXXHSRNXGTXPLYVXGXAAXPXTXLVVYMGXSTLPSLAPKLMKHXLPPETPSVAVXPGTTPQQRMXFALLKDLVDXVKSADLVSPTLIIIGKXVXXSPFWVEXSXHDALKIEXSYSXXAXEDNTFXXILVIGQYIRVGVIYXMQXRFDLVYTXFR

SEQ ID NO: 2009 - protein, 112 aa, Zea mays
  unsure (1)..(112): unsure at all Xaa locations
YWARTPYEGGIVWLVGAGPGDVDLLTVKALRLLQRADVVVYDRLVSEAVMAEVASSALCIDVGKQPGHHGLKQTQINQLLVALAASGRNVVRLXGDDPFIFGRGGEEMVSLX

SEQ ID NO: 2010 - protein, 256 aa, Novosphingobium aromaticivorans
MSNSSSRIGTVHLVGAGPGDADLLTLRAARLVMNARVLVHDGLVDPSILAMAPKGCRMISVAKSRSRHTMKQGEINALLVREALAGNDVVRLKGGDPFVFGRGGEEAEDCLAAGVPVQVVPGVSAAMGAAAAAMIPLTHRESASIVSFVAGQCKGLTDQNWAGLAGVGRTLVIYMGVATSEAIAEKLMADGLAPEMPVAVVENAARPQMRVLRGTLAGLGCLVADNKVRSPALIVIGEVAGRGDMMELRQVLEAAR

SEQ ID NO: 2011 - protein, 317 aa, Novosphingobium aromaticivorans
MRLPRRRRERDCRCRLRWRDDARSDRGMHPRRIELRKLPPGHRPDARRDEPGYTGGCGMNDFPAGMVWLVGAGPGDPELLTRKAERLIGRASVVFFDALVGREVLDLASPGARLVDVGKRSGRHSKDQRTIDALIVEAALSGERVVRLKGGDPSIFGRATEELEACRSAGVVVAVCPGVTAASAAAAGLSRSLTLRGLARKLVFVTAHARAGDTLDLDWAALADPGATLAIYMGKSAAGAIARGLQGTGMAGETPVALVENASLPDERRIVTRLDLLELAARTLGDGPALLLIGEAMRTPGRRAVAAAAQAMERETP

SEQ ID NO: 2012 - protein, 496 aa, Schizosaccharomyces pombe
MIVSWSLKDAVVVVVGSGKNAYRRVNLCLSENSSKIFWFCRSSADGGFDVGHLQLDAKKSDAIEILPISEFDPVRSLTTLGKEETDFLVDAVFVSESNHHEKEILHRTCKRYRIPLNIIDNPSLCSFTLPATWSEPPLQISLSTSSNGCRLAQRLLRHVVSSLPSGMPEAIERFGRVRAITKTPEKKQWINHVSDFWPLEKLVRMTEDDLLAIVSDNFSLPLSSSQSSSLANSYESLSTTLDKPSLTLDPEAFPTHKRGSIALIGSGPGSPDLLTVAARKAIMKADYVLADKLVPEAVLQLIPRHTPLFIARKFPGNADKAQDELHQVAFDALSRGDYVVRLKQGDPYIYGRGGEEYLFFTQHGYVPTVIPGISSALMAPISAGIPVTHRGVADQFLVCTGTGQKGSMPKIPSFVPTQTTVFLMALHRLEILVQALIESGWPRVLPVCIAERVSCPDQRFIFSTLEDVVEEYNKYESLPPGLLITGYSCNTLRNTA

SEQ ID NO: 2013 - protein, 251 aa, Schizosaccharomyces pombe
LTLDPEAFPTHKRGSIALIGSGPGSPDLLTVAARKAIMKADYVLADKLVPEAVLQLIPRHTPLFIARKFPGNADKAQDELHQVALDALSRGDYVVRLEQSDPYIYGRGGEEYLFFTQHGYVPTVIPGISSALMPPISAGIPVTHRGVADQFLVCTGTGQKGSMPKIPSFVPTQTTVFLMALHRLEILVQALIESGWPRVLPVCIAERVSCPDQRFIFSTLEDVVEEYNKYESLPPGLLITGYSCNTLRNTA

SEQ ID NO: 2014 - protein, 593 aa, Saccharomyces cerevisiae
MVRDLVTLPSSLPLITAGFATDQVHLLIGTGSTDSVSVCKNRIHSILNAGGNPIVVNPSSPSHTKQLQLEFGKFAKFEIVEREFRLSDLTTLGRVLVCKVVDRVFVDLPITQSRLCEEIFWQCQKLRIPINTFHKPEFSTFNMIPTWVDPKGSGLQISVTTNGNGYILANRIKRDIISHLPPNISEVVINMGYLKDRIINEDHKALLEEKYYQTDMSLPGFGYGLDEDGWESHKFNKLIREFEMTSREQRLKRTRWLSQIMEYYPMNKLSDIKLEDFETSSSPNKKTKQETVTEGVVPPTDENIENGTKQLQLSEVKKEEGPKKLGKISLVGSGPGSVSMLTIGALQEIKSADIILADKLVPQAILDLIPPKTETFIAKKFPGNAERAQQELLAKGLESLDNGLKVVRLKQGDPYIFGRGGEEFNFFKDHGYIPVVLPGISSSLACTVLAQIPATQRDIADQVLICTGTGRKGALPIIPEFVESRTTVFLMALHRANVLITGLLKHGWDGDVPAAIVERGSCPDQRVTRTLLKWVPEVVEEIGSRPPGVLVVGKAVNALVEKDLINFDESRKFVIDEGFREFEVDVDSLFKLY

SEQ ID NO: 2015 - protein, 507 aa, Desulfitobacterium hafniense
MFILAKGYVYLVGAGPGEPKLLTVKGAECIARADVLIYDRLASPRLLSLAGPDCEMIYVGKSPDRHTLRQDEINQLLVQKSLAGKVVTRLKGGDPFVFGRGGEEAEALLAVGIPFEIVPGITSAIAVPAYAGIPVTHREMTSSFAVITGHEDPGKNDSAIAWEHLVPAHGTLIFLMGMENLSLIAQRLIQHGKNPATPVGIIQWGTRPEQRTLVGRLDTIASLVQEQGFTNPATIIVGEVVSLREKLQWFEKKPLFGSRIVVTRARHQAGVLAQAIEDLGGEPWEFPAIEIREPSDPELLTRAMQDLRRFKWLVFTSANGVERFLSGLKDSGKDIRDLSGMEIVAVGPVTQAALEQRGLCVTCMPEEYRAEGILAELTGRILPGEGVLLARAEEARDVLPQSLQTLGAEVWDVPVYKTVSGSANKGLLKSMLEDKQIQAVTFTSSSTVRNFCRLIDNQTELLDGVKLFSIGPLTSAAARELGLPIHKEAARSTIDGLVAALVEGARG

SEQ ID NO: 2016 - protein, 473 aa, Desulfitobacterium hafniense
MLIYDRLASRRLLTLARPDCELIYVGKSPDRHTLRQEEINALLVQKGLEGKIVTRLKGGDPFVFGRGGEEAEDLLQAGIPFDIVPGVTSAISVPAYAGIPVTHRDLTSSFAVITGHEDPTKNSSALAWEHLATAHGTLIFLMGMENLSLIATKLMENGRSPSTPVGIIQWGTRPEQRVLVGELQNIAQLVKEEGFTNPSIIIVGEVVQLREKLQWFEKRPLFGQRIIVTRARHQASALSQGIEDLGGEPWEFPAIEIVPPRDPQPLIQAIKNLKRFEWLIFTSVNGVEEFFKVLMEQGRDVRDLAGMDVVAIGPATRDALEKRCLKVSFVPEEYRAEKIIEGLASRVLPGQSVLLARAEEARDILPESLKALGADVWDVPTYRTVLGNANKEELMKLLEEKAVAAVTFTSSSTVRNFLQLIDGRQSLLDGVKLYSIGPITSKTAQEFGLSIYREAKQYTIKGLLETLARGNEE

SEQ ID NO: 2017 - protein, 452 aa, Desulfitobacterium hafniense
MIYVGKSPDRHTLRQDEINQLLVQKSLAGKVVTRLKGGDPFVFGRGGEEAEALLAVGIPFEIVPGITSAIAVPAYAGIPVTHREMTSSFAVITGHEDPGKNDSAIAWEHLVPAHGTLIFLMGMENLSLIAQRLIQHGKNPATPVGIIQWGTRPEQRTLVGRLDTIASLVQEQGFTNPATIIVGEVVSLREKLQWFEKKPLFGSRIVVTRARHQAGVLAQAIEDLGGEPWEFPAIEIREPSDPELLTRAMQDLRRFKWLVFTSANGVERFLSGLKDSGKDIRDLSGMEIVAVGPVTQAALEQRGLCVTCMPEEYRAEGILAELTGRILPGEGVLLARAEEARDVLPQSLQTLGAEVWDVPVYKTVSGSANKGLLKSMLEDKQIQAVTFTSSSTVRNFCRLIDNQTELLDGVKLFSIGPLTSAAARELGLPIHKEAARSTIDGLVAALVEGARG

SEQ ID NO: 2018 - protein, 622 aa, Neurospora crassa
MASSNLPTAPSAYHTTLLTAQDCREHVHLIIGSNPLAASRVAQSLSVGAKPILIAPVESDMTPTAADSQQNQKRELHHNLANYISSGALTHLDRPFADEDLTTLGRSEVDNVVDAVFVTQHDQLLAERISALCKRKRIPVNVLDNPALCSFSLLSVHVDGPLQIGVTTNGRGCKLASRIRREVASALPKGLGAACARLGDVRRRIITEDAEARTAAGSAIAAAVNEGVDDSIDQSATFNKLVTELDVQAEAAKTRRMRWLAQVCEYWPLKKLVEITDDDVESILQAYPGFSSDNSSASPQPVLPGAVSEGGSSSTTTTSSSSNGRIGRIFLAGSGPGHPDLLTRATYKAIQSADLILADKLVPSGVLDMIPRRTPVSIARKFPGNADRAQEELLEQALEGVRAGKTVLRLKQGDPFIYGRGGEEVAFFREHGLGDRVVVLPGITSSLSAPLFAGIPATQRDVSDQVLICTGTGKKGKPPAPPEYVGSRTVVFLMALHRIGGLVKELTTRLGEADGVAEVQEGEKQRALWPLDTPCAVIERATCPDQRVMRTTLRYVEQAIEQEGSRPPGLLVVGRACEALYTPKQEGQPWVVEDGQFKDLDFEDSLGLSLDATSGVAHTGAA

SEQ ID NO: 2019 - protein, 252 aa, Aeropyrum pernix
MAVLARCRGKVVIVGGGPGDPGLITVKGMKALEEADAILYDRLAPKGLVEKLQTPALKIYVGKKPGEGMSQEEINRLMEILACRGMTVARLKGGDPYTYGRGEEECMYLMEKGVECIVIPGVPSYIAASALHGIPLTSRGISSSFAVITGKEAPGKPAGKRVKLEDIARSVDTLVILMGASTSAELAERLIKVLPPETPVAIASSVSTPEAETLVTDLRGLRELGRQGRVKSPAVIIVGEVVKLRDRLYKEA

SEQ ID NO: 2020 - protein, 261 aa, Prochlorococcus marinus subsp. pastoris str. CCMP1378
MEINVPGIVYLVGAGPGDPELLTLKALRLIKSCDALVHDALVSPQIIKETNKKTEIFNVGKRAGLCSVPQADTNLLIVKLAKEGKNVVRLKGGDPFVFSRGGEEVSFLEKNGISVEIVPGITSGIAAPSNFGIPLTHREAGSSITFVTGHEDINKDKKTVNWRLLAKSSDGLVIYMGMRNIGFIVKELLIGGLDENTKCAVIQEATLNNQKCLISELKNLAETISNKGFSSPSIIVIGSIVGFKVNNYINNLSDAFFPEKK

SEQ ID NO: 2021 - protein, 246 aa, Halobacterium sp. NRC-1
MTGTVYLVGSGPGDPELLTVKATRLLEAADVVLHDKLPGPEILSSIPEGKREDVGKRAGGERTPQSETNARLVELAEDGNDVVRLKGGDPFVFGRGGEEMLYLAEHGVDFEVVPGVTSPVAAPAAADIPVTHRDHASSVSFVTGHEDPGKDESAVDWGALADTGGTIVVLMGVGKLPEYTAALRDAGMDPETPVALVEKGTRPGQQVATGTLATIVAARDEAGISPPAITVIGGVAGLWDGVEGEP

SEQ ID NO: 2022 - protein, 261 aa, Prochlorococcus marinus str. MIT 9313
MSSLDFGTVYLVGAGPGDPDLLTLKAYRLLRQCGALVHDALVPKEVLELVPESCERHFVGKRRERHWVPQSKTNELLVELAQSHSCVVRLKGGDPFLFGRGGEEAAYLQSHGVSVEVVPGITAGMAAPAYVGIPLTHRCGGSSVTFVTGHEKIDKQRPSVNWKDLASASDSLVIYMGLHNLAYIVEELIAGGLDPATSAAIIQQGTVVGQRYLKAPLEQLVQRVQSEGFAAPSIVIVGAVVDEQVAECAPQPAEVVMPIKS

SEQ ID NO: 2023 - protein, 405 aa, Mycobacterium tuberculosis H37Rv
MTENPYLVGLRLAGKKVVVVGGGTVAQRRLPLLIASGADVHVIAPSVTPAVEAMDQITLSVRDYRDGDLDGAWYAIAATDDARVNVAVVAEAERRRIFCVRADIAVEGTAVTPASFSYAGLSVGVLAGGEHRRSAAIRSAIREALQQGVITAQSSDVLSGGVALVGGGPGDPELITVRGRRLLAQADVVVADRLAPPELLAELPPHVEVIDAAKIPYGRAMAQDAINAVLIERARSGNFVVRLKGGDPFVFARGYEEVLACAHAGIPVTVVPGVTSAIAVPAMAGVPVTHRAMTHEFVVVSGHLAPGHPESLVNWDALAALTGTIVLLMAVERIELFVDVLLKGGRTADTPVLVVQHGTTAAQQTLRATLADTPEKVRAAGIRPPAIIVIGAVVGLSGVRGLNNS

SEQ ID NO: 2024 - protein, 92 aa, Archaeoglobus profundus
MTGKVYIVGAGPGDPELLTVKALKVIEMADVILYDRLVGKSIEDMLKRMGKEIIYVGKNSYENGAERQRNINELMVKLAREGKIVVRLKGGD

SEQ ID NO: 2025 - protein, 429 aa, Ferroplasma acidarmanus
MGKAYIVGCGPGNKDLLTIKAIKIIKNADAIIYDHLVNPEILDYATPGTRKIYVGKKPYVKRISQEEINKIIVNEALKYRTVARLKGGDPFVFGRGGEEIEELIRNNIEYEIIPGISSLTGVPESAGIPLTHRNVNHGVLVTTGNSVENLNIPDCRTFNCRMYTLVIFMGAHNLRDIVSRLLSSGYDPALPIALIENGTYNYQKTYTGKLGDIDYSYDDSPSLIVIGDVVQYHKEFSRSEHRIYSGKIVTLFYDLYAPDTDDLENEGITVFKIRCADVFPGNMQTAQLYRKNIAFYGCYTDMLMDILRSSGFDLRWLGKIATDSTGKALLQSYGIFDTTDISESGNDYTWIGSGKEKELQAVKVKPLEMGSYIDDYVKKSDLVIIGGQSDTLPEGIEVKDGAGVIRIEYPYEGLYSKVMSYFGDGDEKN

SEQ ID NO: 2026 - protein, 256 aa, Cytophaga hutchinsonii
MHEPRVTLVGAGPGDPELITLKGMRALSSADVVLYDALIHKEILSFAPITAIQVFVGKKKGVCQFPQDEINALLVEYALKHGHVVRLKGGDPFIFGRGHEELLYVESFNIPTEVIPGISSSIAVPELQRIPLTRRGVNDSFWVLTGTTRDHQLSADIQIAAKSNATVVVLMGMTKLADIIQLFIAEGKSKLPVAIIHNGTMPDETYVLGTVETIVDIVARSGISSPAVIVIGEVVRLHPEYVLDEVQKIVGPEKES

SEQ ID NO: 2027 - protein, 281 aa, Streptomyces coelicolor A3(2)
MRRMHRRGPKTMDSEAKVTFVGAGPGAADLLTFRAARAIAEADVVIWAASLVQAEVLQHAREGAEVLDSATMSLEDVVAVYRRARAEGLRVARIHSGDPALWGGTQEQLDRCAEIGVATEVVPGVSAFSAVAALAQRELTIPEVAQSVVLTRLGGGKTPMPPGEEVREFAKHGTTMAVFLSAARSGQLVRELLEGGYPTETPVIVAYQATWPEELVVRCTIGTLEETVKEHRLWKHTLFLVGPALDAHGTRSHLYHPGHFHGYRKADPEARRELRSRGAST

SEQ ID NO: 2028 - protein, 260 aa, Nostoc sp. PCC 7120
MNRTDNQGQKGLGKVYLVGAGPGDPGLMTVKGKGILECADVVIYDALVSPAILAMINPQAEQINAGKRMGRHSLLQDETTQLLIEQAQNHAVVVRLKGGDPFIFGRGGEEMADLIAAGVPVEVVPGITSGIAAPAYAGIPLTHRLYSSSVTFVTGHESAGKYRPKVNWQAIAHGSETIVIYMGIHNLPYIVEQLKMAGLSLATPIALVRWGTRPEQEELIGELGTIVELVEKTGFEAPAIAVIGSVVNMHSILSVAARVN

SEQ ID NO: 2029 - protein, 517 aa, Nostoc sp. PCC 7120
MTQQNGKVYLVGAGPGDVAYLTVKAYNLLATAQVLVYDALVDEQLLQCVSSDCLKLDVGKRGGKPSTPQTEINNLLVKFCQEGALVVRLKSGDPFIFGRSTSEIEALKAAGCEFEVVPGISSAIAAPLLAGIPLTDPVMSRCFAVLTAHEPEVLDWEALSRLDTLVILMGGKNLADIVHELLRRERSHLTPIAIIRWAGTPSQEIWTGQLGDILQQTAGLSLSPVVIVIGEVVRLRKYLQPEKIFPENSTTPMSSNQPLTGKTILVTRSSGQSSQFSDRLTTLGATVIEMPALEIGPPSSWKELDQAIANLSHFDWLILTSTNGVDYFFERLYIQGKDTRALAGLKIAVVGEKTSQSLKQRGIQADFIPPNFVADSLVEHFPESLLNKKILFPRVESGGREILVKELSAKGADVIEVAAYQSCCPTSIPLAAELALKNRTIHIITFASSKTVQFFCQLADKIFPHNIPNALEGICIASIGPQTSKTCHTLLGRVDIEAEEYTLDGLTQAIIQWSLKP

SEQ ID NO: 2030 - protein, 261 aa, Nostoc sp. PCC 7120
MQNHVNSLASAVYIVGAGPGDPDLLTIKAQKLLSVADVILFADSLIPEELLQFCRKDAEIIQTANKTLEEIIPLMIARVRSQKSVVRLHSGDPSLYSAINEQMQLLAAANIPFEVIPGISVFQAAAAKLKVELTVPGLVQTIILTRISGRTQVPHTEELASLAAHQASLCLYLSARHVENAQAKLLEHYPPDTPVAICFRIGWPDEKIRVVPLQEMADCTQRENLIRTTLYVISPALSHTTGRSRLYHPEHSHLFRTAGDS

SEQ ID NO: 2031 - protein, 261 aa, Rhodobacter capsulatus
MTVHFIGAGPGAADLITIRGRDLIASCPVCLYAGSLVPEALLAHCPPGAKIVNTAPMSLDAIIDTIAEAHAAGQDVARLHSGDLSIWSAMGEQLRRLRALNIPYDVTPGVPSFAAAAATLGAELTLPGVAQSVILTRTSGRASAMPAGETLENFARTGAVLAIHLSVHVLDEVVQKLVPHYGEDCPVAIVWRASWPDQRVVRATLATLQTSLGAELERTALILVGRSLATEDFDESRLYAGDYDRRYRPLGTHPRFPEGSE

SEQ ID NO: 2032 - protein, 260 aa, Rhodobacter sphaeroides
MTVHFIGAGPGAPDLITLRGRDLIAASPVCLYAGSLVPEGVLAHCPPGCRIVNTAPLSLEAIVEEIAAAHAEGKDVARLHSGDLSVWSAMGEQLRRLRALGIPYDVTPGVPSFAAAAATLGAELTLPGVAQSVVLTRTSGRASPMPEGESLAAFAATGAVLAIHLSVHVLGRVLAELLPHYGADCPVAVVWRASWPDERVVRATLGSLEAALGPELERTALILVGRSLGAEDFAESRLYAGDYDRRYRPVGTHPRFPEEA

SEQ ID NO: 2033 - protein, 259 aa, Rhodopseudomonas palustris
MTVHFIGAGPGAPDLITVRGRDLVMRCPVCLYAGSLVPREIVALCPKDARVVDTAPLDLDAITAEFVAAAEAGHDIARLHSGDLSVWSAMGEQIRRLEQHGIPYTVTPGVPSFAAAAAVLGRELTLPEVAQTVVLTRTSGRASAMPPRETLEAFAATGATLAIHLSIHVLADVVERLRPHYGDDGAVAVVVRASWPEQQVIRGTLSSIAAQVAAEGIDRTALILVGPSLAATDFRESSLYAPDYDRRYRRSAEDGRDRD

SEQ ID NO: 2034 - protein, 373 aa, Rhodospirillum rubrum
MDDAGRPWPVGRGVVVCRHPGPQGRSARGAGFGAPPGSAAAAVPGPGAGARDPPPRLALAGRVPGRRLSWRRRGGGPGGGGRVRHSDRRQNPLPARHLRVGPHAARRPVFFGDARQGDDPMTVHFIGAGPGAPDLITLRGLRLIQSCPVVLFAGSLIPREVVAEAGAEARVIDSSALHLDEIIAVMAEATARGEDIARLHSGDPSLYGAIAEQIRRLRGLGIAYDICPGVPSYAAAAAALGNELTLPEVCQTVILTRTSVRASPMPAGEDLESLGRSGALLAIHLSIANLAEVEAKLTPLYGADCPVAVVYRASWPDQTVVRGTLADIAGKIAGVGITRTALILVGRGLGSEDFANSRLYAADCGHAFRSASA

SEQ ID NO: 2035 - protein, 401 aa, Rhodospirillum rubrum
  unsure (1)..(401): unsure at all Xaa locations
MDSFPIFLTLTGVRVLVVGGGAAAAAKARLALKAGARVSVFAPALSADWQDLRGHPALDHRQGFPGQGGEEEWRDVRLVYAAGESLEEDRAVHAAASARGVLVNVVDRPELCDFLTPAIVDRSPIVVAIGTGGRAPVLARRVRAAIDRLLPARLGALARLAEGFRGTVAQALPDGDRRRRFWDRFFDGAPXXXXXXXXXXXXXXXXXXXXXXXXXXXXXXXXXXXXXXXXXXXXXXXXXXXXXXXAAAAIGISLTDRDGAPSVTLLSGHRRAPAAGESEAAVDWRAAARTGGTLAVYMGLSRATAAAEGLIEGGLSAETPVAVVHDASRQGQRVSRGTLGELPRLVAQGALAAPDAPGLVLVGKVVAKAGRLPAIAPVFSTPRAFAGDPSFASQALPSQAG

SEQ ID NO: 2036 - protein, 262 aa, Chloroflexus aurantiacus
MTYPAIPGTVYFVGAGPGAPDLITVRGRDLLAQADLILYADSLVDAALPAAYARADARILGSVEMHLEQIVRLMCEAARAGQVVVRLHSGDPALYGAIHEQMAALDEAGVPYEIVPGVTAAFALAARLGVELTVPELVQTIILTRPAGRTPLPEHEQLSRMAAHGASLAIYLGITRMQQVVRDLLTGGVYTPDTPVVVAYRITWPDEVIIHGTLGDIAEKVKAAGFTRQALILVSLRLIRPTSVPTANHRLTIHLQYRAPSP

SEQ ID NO: 2037 - protein, 278 aa, Sulfolobus tokodaii
MNTAELTLEEITDLMIKKAKEGKLVARLKSGDFSIYGALMEELWALQDAGIDYELVPGITAAIAAASVLGIELTLPKVSQTVIITRASASVPMEGSIKDFAPLLNKGASLVIYTGVHVIDKVVEEIREAGISDDIPVAVVYKATWWGEQKIILGELRDIAEKVKKEKITRDAVIIVGKIVRPEKYKGLVRSSTYDPKHYTSFRTAEVTDKLKYFELRYMTDKIFGEEYLKALIEAYTTSSKEEKEVIVEKIKKVLNEAKINPKLKEEAEKIIKLHLDF

SEQ ID NO: 2038 - protein, 253 aa, Sulfolobus tokodaii
MAGKIYIIGIGPGDEKNRTLRMLEAIKESDVIIAYTTYADLIKDLTDGKEVITARMKEELYRAKMAIKKALEGHTVALVSSGDPQVYGMAPPTLEMMCANNVNVDFEIIPGVTAALAAAARLGSPLSMDFAVISLSDLLVPAEEILHRVRKAAEGDFVIALYNPINKPLLLKAMEIIAEYRKGETPVGIVKGAYRENEEVIVTTLSEWKKYLDKINMVTMMIIGNSRSYICNGKIITPRGYTSRYDYVNAFNS

SEQ ID NO: 2039 - protein, 263 aa, Synechocystis sp. PCC 6803
MVVRLQNGLMGKVYLVGAGPGDPGLITVKGKTLLENAEAVVYDALVSTAILAMVNPQAELIDAGKRRGRHTKLQSETTQLLAQLAEKHAVVVRLKGGDPFIFGRGGEEMEDLVKAGIEVEVVPGITAGIAAPAYAQIPLTHRAYSSSVTFVTGHESAGKYRPEVNWAAIAKGSETIVIYMGVYSLATILPQLMLAGLGEDTPIALIRWGTCPEQQKLVGTFATILAQIEVENFQAPAIVVIGAVVNYPANLRQQLAPILGGVN

SEQ ID NO: 2040 - protein, 538 aa, Synechocystis sp. PCC 6803
MAEKLPHPQCLGVPGRSPRRESNLIFTMLSTDSRAKVYLMGAGLGPVAYLTQRAIAVLGRANVVIYDALVSQELFDLLPPDCERIFVGKRGGQPSTPQAKINQLLVDHYRRGKQVVRLKSGDPWIFGRIMPELATLVTHHCAYEVVPGISSAIAGAGLASIPLTAKDSGAGFFVMDGHDPHRWPWPALAQLPTLVILMGTKNLSLLVNELVRAGKSPHTPMAVIKNAGRPEQQTWEGTLADMVEKTQGQSLAPAVIVIGDVVSQRIIPALPPLPLTEKTILVTRAADQASQFTELLHQQGATVLAMAALEIVPPKDWQPLDQAIAKLGDFDWLILTSANGVEFFFQRLQHHGLDSRALAGLKLAVVGKKTAQSLEKFGLKPDFIPPDFIADALVEHFPHSPAGLKILFPRVESGGRAQLVQELSQKQALVTEVPSYQSACPGHMPEEVWQSIVNQTVDVITFASSKTVSHFRQLLAQTSQANGYQDWRSLINHCQIASIGPQTSERCLRELGRVDIEATEYTLEGLTGAITNYVYQNP

SEQ ID NO: 2041 - protein, 264 aa, Synechocystis sp. PCC 6803
MDSQNSSFSPAVYFVGAGPGDPDLLTIKGQKLLQAADLVLYADSLVPKQILADVRPQAECVATGNKTLETIVPLMITAVRQGKIVVRLHSGDLTLYSAIHEQMQALGEADIPFVCVPGISAFQAAAAILNCELTVPDLVQTIVLTRISGAASAVPEREELAGLAYHQASLGLYLAARHVEKAQNQLLEHYPGDTPVAVCFRVGWPDEKIWLVPLAEMAALSLRENLIRTTLYLISPALKTDLPRRSRLYHPDHSHLFRPVRPLL

SEQ ID NO: 2042 - protein, 483 aa, Neisseria meningitidis MC58
MNYFPIFANLAGRPVLVVGGGAVAARKISLLLKAGAEVRVAAKHLNAELSALAAENKILWLAEEFRAEHIRTVFLIIAASSDQALNRRVFHLAESCQKPVNVVDDRDHCSFIFPSVIDRNPVQIAVSSSGSAPVLARLLRERLEALLPPSLGDMAEISGRWRDAVKGKLKSVTERRRFWEKQFNGRFAALVKNRQNTLAERELAGQLEQSRQNDQGGSVSLVGAGPGDAGLLTLKGLQEIQQADVVLYDALVSDGILSLVRRDAERIFVGKRARGERTPQEDTNALMVRLAREGRRVVRLKGGDPFVFGRGGEELETLARHQIPFSVVPGITAAVGATAYAGIPLTHRDYAQSAVFVTGHRKADAPDIEWQTLARSRQTLVIYMGALKAALIAERLQQHGRSPDTPAAVISQGTLPAQKTATGTLANLAELAETAPNPALIVIGEVVGLHEKLAWFGENGEGENRVGQTYPALGGLNAGQRAA

SEQ ID NO: 2043 - protein, 486 aa, Neisseria meningitidis Z2491
MNYFPIFANLAGRPVLVVGGGAVAARKISLLLKAGAEVRVAAKHLNAELSALAAENKILWLAEEFRAEHIRTVFLIIAASSDQALNRRVFHLAESCQKPVNVVDDRDHCSFIFPSVIDRNPVQIAVSSSGSAPVLARLLRERLEALLPPSLGDMAEISGRWRDAVKGKLKSVTERRRFWEKQFNGRFAALVKNRQNTLAERELAGQLEQSRQNDQGGSVSLVGAGPGDAGLLTLKGLQEIQQADVVLYDALVSDGILSLVRRDAERIFVGKRARGGRTPQEDTNALMVRLAREGRRVVRLKGGDPFVFGRGGEELETLARHQIPFSVVPGITAAVGATAYAGIPLTHRDYAQSAVFVTGHRKADAPDIEWQTLARSRQTLVIYMGALKAALIAERLQQHGRSPDTPAAVISQGTLPAQKTATGTLANLAELAETAPNPALIVIGEVVGLHEKLAWFGENAKKESNPAEHAYFALDGLGTGQEQQAA

SEQ ID NO: 2044 - protein, 241 aa, Burkholderia fungorum
MTVFFIGAGPGDPELITVKGQRLVRSCPVILYAGSLVPAAVLEGHAAVQVVNTAELDLDQIIALLEAAHLKGQDVARVHSGDPSLYGAIGEQIRRLRELKIPYEIVPGVTATAACAAALGCELTLPDISQTLILTRFASKTSMPEGEQLADLARHRATMAIHLGVRHLARIVDELRPHYGGACPIAVIYRASWPDEEKLTGTLDDIVGKVQSSSIERTALILVGQVLAAEGFADSTLYAKD

SEQ ID NO: 2045 - protein, 243 aa, Bacillus megaterium
MTVGKVYLVGAGPGDPKLITVYGMECIQEADVILYDRLANEQLLNYAKKDAELIFCGKLPGKHGVIQDRIHELLVEKALQGKVVTRLKGGDPFVFGRGAEEAEVLANQGIPYEVVPGITSGIAAPAYAGIPVTHRDYATSFAIVTGHGREEKGKDYLNWSALAQGIDTIAFYMGVGNLPHICKQLMDHGRDKHTPVGLVQWGTTKYQRTVTGTLATIEEIAKKAEIAHPAIVLVGDVVTIREK

SEQ ID NO: 2046 - protein, 238 aa, Bacillus megaterium
MGKVYLVGAGPGDPDLITLKGLKAIQQADVILYDRLVNKDLLEYAKSDADIIYCGKLPNYHTLKQETINNFLVKFAKKGKIVTRLKGGDPFVFGRGGEEAEALVQQGISFEIVPGITSGIAAAAYAGIPVTHREYSASFAFVAGHRKDSKHDAIKWDSLAKGVDTLAIYMGVRNLPYICQQLMKHGKTSATPIALIHWGTCADQRTVTGTLGTIVDIVKEEQIENPSMIIVGEVVNFS

SEQ ID NO: 2047 - protein, 258 aa, Bacillus megaterium
MKLYIIGAGPGDPDLITVKGLKLLQQADVVLYADSLVSQDLIAKSKPGAEVLKTAGMHLEEMVGTMLDRMREGKMVVRVHTGDPAMYGAIMEQMVLLKREGVDIEIVPGVTSVFAAAAAAEAELTIPDLTQTVILTRAEGRTPVPEFEKLTDLAKHKCTIALFLSATLTKKVMKEFINAGWSEDTPVVVVYKATWPDEKIVRTTVKDLDDAMRTNGIRKQAMILAGWALDPHIHDKDYRSKLYDKTFTHGFRKGVKSE

SEQ ID NO: 2048 - protein, 285 aa, Bacillus megaterium
MGSSHHHHHHSSGLVPRGSHMKLYIIGAGPGDPDLITVKGLKLLQQADVVLYADSLVSQDLIAKSKPGAEVLKTAGMHLEEMVGTMLDRMREGKMVVRVHTGDPAMYGAIMEQMVLLKREGVDIEIVPGVTSVFAAAAAAEAELTIPDLTQTVILTRAEGRTPVPEFEKLTDLAKHKCTIALFLSSTLTKKVMKEFINAGWSEDTPVVVVYKATWPDEKIVRTTVKDLDDAMRTNGIRKQAMILAGWALDPATPWLSGLGENPAIRAMFVAHLHQALNMAVEEAA

SEQ ID NO: 2049 - protein, 234 aa, Bacillus megaterium
GSHMKLYIIGAGPGDPDLITVKGLKLLQQADVVLYADSLVSQDLIAKSKPGAEVLKTAGMHLEEMVGTMLDRMREGKMVVRVHTGDPAMYGAIMEQMVLLKREGVDIEIVPGVTSVFAAAAAAEAELTIPDLTQTVILTRAEGRTPVPEFEKLTDLAKHKCTIALFLSSTLTKKVMKEFINAGWSEDTPVVVVYKATWPDEKIVRTTVKDLDDAMRTNGIRKQAMILAGWALDP

SEQ ID NO: 2050 - protein, 251 aa, Clostridium acetobutylicum
MVYFIGAGPGDVDLITVKGRKIVEKADIVIYAGSLVSKEHMDFCKKEVKIYNSAHMTLEEVISVIVKAEVENKITVRLHTGDPSIYGAIKEQMDELGKRNIAYEVVPGVSSFTAAASAIKREFTLPGVSQTVILTRIEGRTPVPENEDIEKLASIGASMAIFLSVGMIEKVVEKLKKGYKRNVPIAIIERASWEDERSIIGTLEDITDKVKKAGITKCAQILVGDFIDSNYSKSLLYDKNFTHMYREGKKK

SEQ ID NO: 2051 - protein, 457 aa, Escherichia coli O157:H7 EDL933
MDHLPIFCQLRDRDCLIVGGGDVAERKARLLLDAGARLTVNALAFIPQFTAWADAGMLTLVEGPFDESLLDTCWLAIAATDDDALNQRVSEAAEARRIFCNVVDAPKAASFIMPSIIDRSPLMVAVSSGGTSPVLARLLREKLESLLPLHLGQVAKYAGQLRGRVKQQFATMGERRRFWEKLFVNDRLAQSLANNDQKAITETTEQLINEPLDHRGEVVLVGAGPGDAGLLTLKGLQQIQQADVVVYDRLVSDDIMNLVRRDADRVFVGKRAGYHCVPQEEINQILLREAQKGKRVVRLKGGDPFIFGRGGEELETLCNAGIPFSVVPGITAASGCSAYSGIPLTHRDYAQSVRLITGHLKTGGELDWENLAAEKQTLVFYMGLNQAATIQQKLIEHGMPGEMPVAIVENGTAVTQRVIDGTLTQLGELAQQMNSPSLIIIGRVVGLRDKLNWFSNH

SEQ ID NO: 2052 - protein, 291 aa, Magnetococcus sp. MC-1
FCVCCFLLWKITMHTVDTYTSMAPGSVILAGSGPGDPNLLTLGVYKALQACDTLVYDALVSPEIMALVPASVEQHFVGKRGGHPSIGQEAINAILVQLAKAGKKVLRLKGGDPFVFGRGGEEAYCLSCEGIPFSIIPGVTAGVAGPAYAGIPITHRDVNANVAFLTGHESPTNAAGETVPTTVDWESVGAAFPVIVLYMGVKNLPTIAKRLIAGGRSGETPVALIRWATTPRQQTMITTLNRAADDISECKIKPPSIVVIGEVVNYRDHLSWFADDTLTRDNCKNKLRDDE

SEQ ID NO: 2053 - protein, 292 aa, Magnetococcus sp. MC-1
MGGGAAVASVVRAITKGVRVMVDADKPTVWFVGAGPGDPDLITVKGRRLLERADAVLYAGSLVAEGALAWCRTECVVADSKGMALQEITDWLSAHAGVGKVVVRLQTGDPSLYGSLVEMVQPLDAVGIASRVVPGVSSAFASAAAAVESLTLPEVTQTVMFTRMEGRTPMPAGEQLADLARHGTTLCIFLSVTLLAQVQQALLAAGWHEEAPLLVVYKASWPGEEQIVRGRLGEDLVARCRAAGIKSQTMIIASPALGARGRVGLKKSKLYDAHFSHGFRRGVADDDQGKQT

SEQ ID NO: 2054 - protein, 464 aa, Lactobacillus reuteri
MNGRVTLLGAGPGNPELLTLIGKRRLNEADIVLYDRLIDPSLLAFTNNEAELIDVGKLPLHHKVKQSKINEMLVDYAKQGKKVVRLKAGDPYVFGRGGEEAQVLQQFGVNFEVIPGITSAIAGLAAAGIPITHRDYASSFHIITGHHKKNGQQLDWENIAHQEGTIVFLMGMAQLPKICQQLVEHGKSSQTPVAIIQWATQWRQKMVIGDLENINELVARHQLSSPALIVVGQVVKLSKQLNINKPLTGVHLLIPFSEHQRLFNSLEDLGATADFYQRALIEPLEVTLPSIDEYDAIIVDDVLAYHQFITLLIKNGIDVRQLIDKKIIASNHRVVQALQKTGILAIKGMPQDIPVKRTIEIGGSKPTYNIGTFLSLYEKKKRSLVLPFDLKEFSAVIFPSTASINDFLASLSEKQLSQVSMLKAFAMGKKVQQAAIQAGFGHVVICPPDVKKTVIQVKEEFMHD

SEQ ID NO: 2055 - protein, 463 aa, Pseudomonas putida KT2440
MDYLPLFHKLQGGRVLVVGGGEIALRKARLLADAGGVLRVVAPDVDGQLAALAREGGGEVLVRGYQAADLVGCRLVIAATDDPGLNAQVSADAQALSLPVNVVDAPALCTVIFPAIVDRSPLVIAVSSGGDAPVLARLIRAKLEAWIPSAYGELAGLAARFRHKVKSLYPDVNQRRGFWETVFQGPIAERQLAGQGAEAERLLQAMVDGAPVQQGGEVYLVGAGPGDPDLLTFRALRLMQQADVVLYDRLVAPAIIDMCRRDAERIYVGKRRADHSVPQDQINRLLVDLARQGKRVLRLKGGDPFIFGRGGEEIEELAEHGIPFQVVPGITAASGCSAYGGIPLTHRDYAQSVRFVTGHLKDGTSNLPWNDLVAPAQTLVFYMGLVGLPTICAELIRHGRAASTPAALVQQGTTRNQRVFTGTLADLPDLVAQHEVHAPTLVIVGEVVQLRDKLAWFEGSQNS

SEQ ID NO: 2056 - protein, 246 aa, Pseudomonas putida KT2440
MNAKVWLVGAGPGDPELLTLKAVRALQQAAVVMVDDLVNPAVLEHCPQARIMTVGKRGGCRSTPQAFIQRLMLRHARQGRCVVRLKGGDPCIFGRGGEEALWLQGHGIEVEVINGITAGLAGATQCGIPLTSRGVSRGVTLVTAHTQDDSELNWAALAQGGTTLVVYMGVARLEQVRQGLLAGGMAPGMPVAMIENASLPQQRECRSDVQGMVEAARAFGLRSPAILVIGEVVGEQQAMGRIAIAG

SEQ ID NO: 2057 - protein, 250 aa, Pseudomonas putida KT2440
MTIYFIGAGPGDPELITVKGQRLIRQCPVIIYAGSLVPAAVLEGHQAETVINSAELHLEQIIAAMRSAHEKGQDVARVHSGDPSLYGAIGEQIRHLQALGIDYQIIPGVTATAASAALLGCELTLPQVAQTVILTRYGDSSPMPPGEQLGDLARHGSTLAIHLGVKHLSRIVAELMPHYGAHCPVAVVHRATWPDQDWVCGNLGDIVERVAAKDFRRTALILVGHVLGDTPFAESALYRAGHAHLYRPGD

SEQ ID NO: 2058 - protein, 249 aa, Listeria innocua
MAEVHFVGAGPGDKELITLKGYQLLKNADVVIYAGSLVNPELLEYCKPDCEIHNSASMNLIEIIDCMEAGVTAGKEVVRLQTGDFSIYGSIREQVEEMKKRSIPFTCTPGVSSFLGAASSFGVEYTVPEVSQSVIITRMAGRTPVPSRESLRSYAAHQTSMVIFLSVQGIRKVVSELIKGGYKPETPAAVIYKATWAEEKKVTGTLQDIAEKVTEAGITKTALIMVGDFLGEEFYYSKLYDKDFKHEYR

SEQ ID NO: 2059 - protein, 493 aa, Listeria monocytogenes EGD-e
MGKVMLIGAGPGDAQLLTVKGLAALQKADVIVYDRLVEPAMLQERKASCKLIYVGKEPLHHPIPQDEIERILVREAATNELVVRLKAGDPYVFGRGGEEGETLHKAGIPFEVIPGITSAIGGLAYAGIPVTHRDFASSFHVITGHLKKGRDPLDWEALARLEGTLVFLMGMTNLPNICANLLEHGQKPETGVAIVQWATRGKQLTVTGNLQTIEQKVAESGISSPALIVVGDVVSLRPQLNFFEEMPLFHTKVLLPRARAGKSMLAEQIRDLGGEVTMYPNIQVLDVAPTKTKEQLSEVSELLFTSKEAVERFFDYLAKLDLDIRSLKNSHLTAIGKQTKEAFSEKGIIPDSFIKRRSTELILEHLPRLQKNVSNLIIGSVVDTTEVNVILADVKAIEMMPLYDMRPVTERPFDLESFEQVCFSSSRSVQNLLDVLTIEEKAILQTKTILSIGRFTSATLASFGMNNFIEAESATPESLIELIQKTKLEGVPQ

SEQ ID NO: 2060 - protein, 249 aa, Listeria monocytogenes EGD-e
MAEVHFVGAGPGDKELITLKGYQLLKEADVVIYAGSLVNPELLEYCKASCEIHNSASMNLIEIIDCMEAGVTAGKEVVRLQTGDFSIYGSIREQVEEMKKRSIPFTCTPGVSSFLGAASSFGVEYTVPEVSQSVIITRMAGRTPVPSRESLRSYAAHQTSMVIFLSVQGIRKVVSELIKGGYKPETPAAVIYKATWAEEKKVTGTLEDIAEKVTEAGITKTALIMVGDFLGEEFYYSKLYDKDFKHEYR

SEQ ID NO: 2061 - protein, 319 aa, Propionibacterium freudenreichii subsp. shermanii
MSDTRSHEPDPAAGNEAAPLRGKVVFVGAGPGAADLISVRGAHVIAQADIIIWASSLVLPTWWPTTSRAPKLVDSAALSLEDFEPLLTRAHDEDLLVARVHTGDPSIYGATAEQRDLCRSLDLAFETVPGISAFSAAAARMNVELTVPEVSQSITITRLEGGRTPMPEGETIASFAAHGATMAVYLSAARNRALQEALIEGGYAPATPCIIGFEVTWPGEMMMRCRLDELSDTMREHKLWKHTIVLVGPALAEGPIATRSHLYHPGFRHEYRDAEPQASKELREQGALGINADSSKAINQHGAGNDTTGAHRSTEGEQA

SEQ ID NO: 2062 - protein, 881 aa, Propionibacterium freudenreichii subsp. shermanii
MIRVHGFLGGISEALRADLATADLVVGGRRQLDDAGVLAAQRVELGALAPAIERLKALDDDKLAVVIASGDPGFFGILRPLRRAGLHCEVVPTITSLQAAFAAVALPWDDAQLVSAHSGGIEAAIRIAGVHPKVGVLTAPGKGLAQLVAALRGRDKHFVVAERLGEADERVRVFDEAAALTVDEDDLASPYVVLILDAAPESAEAVGHSPQLAGDPNAPGPDDPKPASNTRADGSDRAPIIGQVVNTTRARHQADQIDQALGVESKRYDGPASAGLVAAWGECDLIVSHLALGATTRLIAPLLADKHTDPGVVVVDEAGHFAVPLVGGHIGGANELARRIGEALDATAVVSTATDSLGIPALDQLGWAVSGDVAGVTAAIIDGAPVSVLREHLWPMPPLPGNVLVPAPGEPAAPGTVGRVVVTDRAAPTAGGASDDQLPTVVLHPDSLVVGMGCNKGTSVEALRELLDATLAGAGLAKESIAALVSVDAKAGELGLIKLADELGVPYVTYPADQLAEQDAPNPSAVVEREIGSGSVSEASVLARGAELIVEKHKSTEATCAIGRIPARGRLHVVGLGPGSRDLLTPRAANVVRHANLVVGYGPYVRQVRDLVSPHAEVMATKMGTEEQRTRAAIDAARSGLDVAFLSGGDPAIYAMASPTLEMGTDGVDVDIVPGVTAELAASAILGAPLGHDHATISLSDLHTDWDLILKRVRAAAQGDFVITLYNPRSRSRIHQLPDALAIIAEYRGPDTPVASVSQAERPQQHVHMSSLADFQPEWVDMNTIVIVGSDTTTFATSGEGRRIIVTPRDYHWMDGAVSGHKRLNYPHGSRPRVSRAEFKGQAAPQADAAQPQSALPQVTQSRTTAAQPGSDVPTQEDSHD

SEQ ID NO: 2063 - protein, 262 aa, Pyrobaculum aerophilum str. IM2
MAGKVVFIGAGPGDPELLTVKAVKYLSQAEVVVYAGSLVNAEVLKYARQDAEVYNSASMVTEEIVKLMIQKAREGKLVARLKSGDPSIYGALWEEIIPLQLAGIEYEIVPGVTAALAAAAQLRIELTVPKRVQHVVITRASHRVPMRGSLKDVADFILKTGAVAVIYTGVHVIDKVVKELEEGGLSPGTPVAVVYKATWPDQKIIQGTLRDIAEKVKAERIVRDAVIIVGESVQPPEIPRSAVYNPDHAHSYRPRRELREDA

SEQ ID NO: 2064 - protein, 219 aa, Pyrobaculum aerophilum str. IM2
MPIYVVGAGPGDPKLLTLRAVELLREADVVAYGDLVPEELVHTYAPQAEKIKIGHKKSEHDAVVERLVEKAAGWARVVVLKNGDPTLFGRGIQICKKAEARGVPCEVVPGVSAFTAAAALHKIELTDGKTLRHVALFSFPHFDEDILGNIAADTAVIFMMGERLDVVRRAIERNCKKGVEVFVCHAVSMGGSCQQVKIEKLDTFNGYKPVLIIVRRCKS

SEQ ID NO: 2065 - protein, 194 aa, Pyrobaculum aerophilum str. IM2
MENKGAVVLGKIYVVGAGPGDPELITLRGFFLLLSADAVIAGSLVPEELVDIMREKVVYRERLTKERHEEAVATAIRLAKEGKTVVVLKNGDPVLYGRGFEICEEANREGVPCEIVPGVTSLTAAAAKYKIPIGRGGRPILLKTGRSSGDPDVVIFMPENGAEGLVVEDLYGPGERIYQGKPRGRPAIVFQIKG

SEQ ID NO: 2066 - protein, 245 aa, Pyrobaculum aerophilum str. IM2
MRGRLRIVGIGPGDPSVRTFRAVEAIKESEVVVGYETYIGLIKDLLEGKEVIPAKMRQEIFRAEISISKALEGRKVALVSDGDPNVYGMAPLVFELMAKRGVEVDVEVIPGVTAALAAAAKLGAPLGSDFAVINLSDLLTPREAILRRVKAAAEADFVLVFYNPIDSGLTKAALEVVRSVRGDSTPVGLVKNAYRQGEEVRITALGEVDMDWIDMRTTIIVGNSETFTWRGYLITPRGYSNKYRL

SEQ ID NO: 2067 - protein, 257 aa, Agrobacterium tumefaciens str. C58 (Cereon)
MTVHFIGAGPGAADLITVRGRDLIAACPVCLYAGSLVPKALIDYCPPGARIVDTAALSLDEIEAEFVAAAKAGKDVARLHSGDLSIWSAMGEQIRRLERLGLDYTVTPGVPSFAAAAATLQRELTVPEMAQSLVLTRISGRASKMPEGETLKAFGATGATLAIHLAIHAIGKVVEELTPLYGSDCPVAIVVRASWPDERIIRGTLFDIEGKLVAEPVERTALIFVGHGLASTDFRESALYSADYVRRFRSPKEDGAG

SEQ ID NO: 2068 - protein, 249 aa, Rhodococcus erythropolis
MTVYFIGAGPGAADLITVRAQRIIAASPVCLYAGSLVPQELLAECPEGARVIDTARLSLDEIVALLIEADAAGQDVARLHSGDPSIFSAVAEQVRRLESAGVAYQVVPGVPAFTAAAASLGRELTVPGVSQSIVLTRVSTLSTAMPEGEDLRSLGRSGATMVVHLGAHRIDQIAEELIEDYGRDCPAAVVAFASRPDEIVLRGTLATIADQVKAAGVTKTAVVIVGRVLAAEGFPDSYLYSATRERTTH

SEQ ID NO: 2069 - protein, 482 aa, Yersinia pestis KIM
MPCNRLKTEGLPMDYFPIFCQLQHKACLLVGGGEIAERKARLLLDAGALVTVNACEFTPQFHHWADQGQLSLISGEFVPELLADKWLVIAATDQLSVNALVYQSANQQRIFCNVVDDPKRTSFIMPSIIDRSPIMIAVSSGGKAPVLARLLREKLEALLPQHLGQLAGNLRQRVKQHFTVMTERRRFWEKLLTHDRLAQSLANNDHVQADQHVEQLFSAPLTDRGEVVLVGAGPGDAGLLTLKGLQQIQQADVVVYDRLVSDEVMNLVRRDAERIFVGKQSGHHCVPQEQINQILLQQAQSGKRVVRLKGGDPFIFGRGGEELEELAGYGIPFSVVPGITAASGCSAYSGIPLTHRDHAQSVRLVTGHAKKEGQLDWANLAAEKQTLVFYMGLSQAGEIQQQLIQHGMPATTQVALVENGTSRHQRVVSGELSQLALLSQQVSSPSLIIVGSVVSLREKLNWFSSRHHDDQPKVTECVAHVG

SEQ ID NO: 2070 - protein, 244 aa, Methanothermobacter thermautotrophicus str. Delta H
MGAGPGDPELITLKAVRALRGADVVIYAGSLVNRDILEYAPEDAEVHNSAHMNLEEITDIMVEACRAGKTVARVHTGDPSIYGAIKEQIRVLEKNSIPYTIIPGVSSVFAAAATLNTELTLPEVSQTVIITRPAGRTPVPPGEDLEELAVHGSTMCIFLGVHMIEDVAEKLMTHYPPDTPVAVVKRASWPDEEVVRGTLSDIAERVRAAGISKTAMIIVGSVLEPGDFKPSKLYDAGFSHEYRP

SEQ ID NO: 2071 - protein, 296 aa, Magnetospirillum magnetotacticum
MAPSSPIPGSMPRTIPMSCAPRRGKTRGAQRPIVRATMLDLPIDLPEFLPGSVWLAGAGPGDPGLLTLLALHAIKSAEVVIHDALVDGRILALIPAAAEIESMGKRGGEASVRQAEITARMIHLAKAGKRVLRLKGGDPFVFGRGPEEALALAGAGVPFRIVPGITAGIGGLAYAGIPVTAKETNSAVAFVTGHGPDGEMPDAFDWDALARGAPVLVFYMGLKHLERLTSRLMAAGRRPDEAAALVCNAATERQSVLETTLAEAAGAVERAGLKPPALFVVGQVVALRRQLDWWRG

SEQ ID NO: 2072 - protein, 366 aa, Magnetospirillum magnetotacticum
MTLHERRWTPEDLQGAAFAIGAMEDEEDCIAFVAAARAAGAIVNAVDRPHLCDVKFGAIVNRSPLVVGISTEGAAPVFGQTVRARIEAMLPRGFKHWVAAARDWREAVSARFHGFSERRGFWERFTDRAFAEPDRTPTEADLADLLGQAEALPVGGAVTLVGAGPGDAELLTLKALRALRNADVILYDDLVAPEILDYARREARTMLVGKTGHGPSCRQDDINALMVSLAKSGKQVVRLKSGDPLVFGRAGEEIEACEAAGIPCTIVPGVSAAQGAAASLGVSLTHRDAARRLQFVTGHDRRGALPEDLNWGALADRSVTTVVYMPKRTLGALLDRAIAEGLAPETPALVVFNATRAKQATVSGTA

SEQ ID NO: 2073 - protein, 186 aa, Magnetospirillum magnetotacticum
GQRRYDLLLVSGAFGPRRGAPQGRRSLRLRTRRARNALFLARHGIGFEVVPGISAARRAVPPMPGIPLTHRGLATGVRFVTGHLREDRSLDLDWPKLADPDITLAVYMGLQALPEISSRLIAAGLPGDTPAAAVERGTTPRQRRVIGTLTTLLDLTRAAGLQAPTLLIIGRVVSLADELDWFSKHA

SEQ ID NO: 2074 - protein, 253 aa, Magnetospirillum magnetotacticum
MTVHFIGAGPGAPDLITVRGLNLIRRCPVVLYAGSLVPPEIVAEAMTDARVIDTAPLHLDEIIAEMEMAHNLGQQVARVHSGDPSIYGAIAEQMRRLDALGIPYDVTPGVPAFAAAAAALATELTLPDISQTVILTRTSVRSSAMPNNEDLATLGKSGATLAIHLSVSNLAHVVKELSPLYGADCPVVVAFRVGWPDQSFIRGCLSDIRDKVKAAGLTRTALILVGRVLGGAEFTDSRLYAEDHTHVLRPAKG

SEQ ID NO: 2075 - protein, 255 aa, Methanosarcina acetivorans C2A
MSENYGKVYLVGSGPGDPELLTLKARRLIDNAEVIVYDQLPGKSILGSMPKSAEKIDVGKYAGNHTMTQSEINEVLVWKAKEGKMVVRLKGGDPYVFGRGGEEAEVLVAEGIEFEIVPGITSAIAVPAYAGIPVTHRESTSMVTFITGHEDPTKEESGLDWETLAKFDGTIVIFMGVKMLRRNTEELMKYGKDPKTPVAVIERGTRPDQRVTVGSLENIADLAEERKVKAPAITVIGDVVNLHAILGEQIAGKDF

SEQ ID NO: 2076 - protein, 242 aa, Methanosarcina acetivorans C2A
MERKVYFVGAGPGNPKLITVLGRELLEKADLVMYAGSLVNPEVLNYTKGETVDSYGLTLDETTKIIADAVDAGKFVVRLHSGDPSLYGSVIEQMEELKKYDIEVERVAGVSSVFASAAALGTQLTLNGVSDTLIITRPAGKTLEKDLISELSVYNTTMAIFLGTQKIREIMEKVRCPKDTPVAVVFHASWEDEEVITGTVEDIADKVKDAGITRSAMIIIGGVVDPKNYRRSYLYGVAQEPL

SEQ ID NO: 2077 - protein, 254 aa, Leptospira interrogans serovar lai str. 56601
MKVYIIGAGPGDPELITIKGAKLIEACPIVLYTGSLVPKAVIERTKKDAIVLDSSSMTLDEIISVILSAKENDQDVARVHTGDPSIFGSIAEQIRKLDSLNIQYEIVPGVSSFTAAAAVLGKELTLPEVSQTIIITRISGRTPVPERERLEILAQSGATLTLFLSVLHIRAIVERLTPYYGEKCPVAVIQKATWPEQKVVVGTLDDIVSKVKREKISSTAIIFIGPILDCNDFADSRLYSANFSHGFRKAKRNL

SEQ ID NO: 2078 - protein, 252 aa, Methanopyrus kandleri AV19
MSVTKVYFVGAGPGDPELMTLKGVRVLRRADLVIYPGSLIPRESVEEWAPNAELIDSHGKTLEELVETMVEAVEDSRTVVRLVSGDPFVYSSLYEQVRELRRRGVDYEVIPGVSSVNAAAAALGEELTKPGISQTVILTRPAGRTGKPEGESLSELAEHGCTMVIFLGAAYLERIVKSLLGGAYDEDTPAAVVYKASTPEEKVILGTLGDIAEKAREEGIDRTALIIVGDVLKEEGKRSHLYSEEYARRVRR

SEQ ID NO: 2079 - protein, 254 aa, Methanopyrus kandleri AV19
MIVGKLYVVGTGPGDPDLMTVKAQRVLRHVDVVVGYRTYVDLIEEILPEDVEIKRYGMREELDRAREAVRLAADGFEVALVSGGDPGVYGMAGVVLPIAVEEGVEVEVVPGVTAACAASALLGAPLMLDFAAVSLSDHLVPLEEILERVRAALEADFVLVVYNPNSSERRHIFEAFVDVLEEIVEEDRPVGIVRNAYRERQSVEVVRVRELRDLADRIDMRSILIVGSSRTRMVGDWLVTERGYSSRTGRNSSE

SEQ ID NO: 2080 - protein, 257 aa, Fusobacterium nucleatum subsp. nucleatum ATCC 25586
MEKYKEKVYFIGAGPGNPELITIKGQRIVKEADVIIYAGSLVPKEVIDCHKERAEVYNSASMSLDEVIDVTVKAIKDGKKVARVHTGDPAIYGAHREQMDMLDEYGIEYEVIPGVSSFLASAAALKKEFTLPNVSQTVICTRIEGRTAVPEKESLESLAKHRASMAIFLSVHMIDKVVEALATSYPMTTPVAVVQRASWSDQKIVLGTLETIEEKVKEAGINKTAQILVGDFLGNEYEKSKLYDKYFTHEYRKGIKK

SEQ ID NO: 2081 - protein, 401 aa, Xanthomonas campestris pv. campestris str. ATCC 33913
MTALFPLLADLRGRAVLVVGGGRAAESATASLLQAGAVPLVGAPELTPALRGWAQSGQVRWLVGSFDPQWLALPDQPVWLTIAASDVPAVNAALRSVAGAQRLLTHEAAPAAAALPPIASEPPPPASRLTLTPGSVALVGAGPGDPGLLTRNAVRALRQAEVILYDRLVSPQILRLAQRAARCIEVGKSAQGHSTRQEQIHALMLEHARAGRRVVRLKGGDPFVFGRGGEELEFLHAHGIGFQVVPGITAAVACAAYAGIPLTHRDHAQSLRLITAHCKDSLDTLDWHALGQERQTLAFYMGVAGLDSIQQRLLQAGRAADTPFALVENGSRPEQRVVTGTLSQLAATARLHAVRSPALLILGDVAALSQSLHWFGAAPLTGQPAHSPIATPHAPTLAHAA

SEQ ID NO: 2082 - protein, 258 aa, Xanthomonas campestris pv. campestris str. ATCC 33913
MINSSSRCRDVVLLSAGPGDLELLTIKAVKALATAQVLLLDDLANPQIVELAPQARVIRVGKRGGCRSTPQDFICRLMRRYALQGVQVVRVKGGDALLFGRAGEEIAFLRAAGVGVQVINGVSAAFAAAAALEVSLTHRAHCHGITFVTAHTHDHGGPNWGALAASGTTLGIYMGLRRADAVASALLAHLPATTPAAIVQAATRAEQQRRLTTLGELGRTAATLPPDLPTLLLVGGAMAEANAACDDSLGLLLQQAVG

SEQ ID NO: 2083 - protein, 332 aa, Xanthomonas campestris pv. campestris str. ATCC 33913
MPLFPLFANLQARAVLVIGGGEVATRKVLALLKAGAHIRLYAHALSPELEVLMQAGRFEQLRGSFDAAWIDDVWLVVAATDDTALNQQVAAAAGARQRLVNVVDDAELSTYQVPAIVDRDPLVIAISSAGAAPMLARRLRERLERELDASVGTFAGLFAHYRERIRSQFPDMNRRRRWFDRVIDGPVPLLLQGGDTAAADAAFRQALEDADAVPARGSVQLVGTGPGDPGLLTLKALRAMNLADVLLVAHDVPEAVVELARRDASRRVLPADVAEQQALLLQLAGDGLHVVALRGGAGFEAAHAQRIADALRVQGLACDQVPGVAAEPPSGD

SEQ ID NO: 2084 - protein, 423 aa, Xanthomonas axonopodis pv. citri str. 306
MKSFPTAISRRYGLALPQRCCRTVTPAFPLLADLRGRAVLVVGGGADAERATGQLLQAGALPLVGAPELTAQLRHWAQAGRLRWLAGRFDPAWLAQSDQPLWLTIAASESAALNDALRQAASAHRLLTHAAAPAASATVPARSTGPRSAIGTLAPGNVSLVGAGPGDPGLLTRHALRALRQAEVVLHDRLVSPQILRLARHGAHLIEVGKSAQGHSTRQEQIHGLMLEHARAGRRVVRLKGGDPFVFGRGGEELEFLRAHGIGFQVIPGITAAIACAAYAGIPLTHRDHAQSLRLITAHCKDSLDTLDWQALGQERQTLAFYMGVAGLDAIQQRLLQAGRAPTTPFALVENGSRPQQRVITGTLASLAASARQHAVTAPALLILGEVTALAQTLHWFGSAPLSASPPHSPGATPHTPTLAHAA

SEQ ID NO: 2085 - protein, 512 aa, Xanthomonas axonopodis pv. citri str. 306
MWWMVWRPRGCAHRAGGAGPFCAGKQQALQDRKQIDRAKGLLMEKRGLSEADAYAALRQQAMKQGVKLTEVARRIVAMAEYSRGWVVLHAACERAPDAMWMDRLVAALHLPAGADVLEYCDLRRGPMRRVGWRMHDGHRHIDGVLLTAAQPSDANRSLLATALAGKPWRGARLSVFTHTHSAWRSDRVHLHACLGRSDARRHRRRRHVAQLKQRGGCRSTPQEFICRLMRRYALQGRRVVRVKGDDALLFGHAGEEIAFLRRAGVGVQVIDGVSAAFAAVAALDVSLTHRSHCHGITFVTAHTHDHGEPNWGALAASGTTLGIYMGLRRADALAAALLAGTPAAIVQAATRPEQQRRLTALGDLGTTAAALPPGLPTLLLVGDALSEAAAACDDRDGPMAVQAVGWGQHTTDDAAAGQGHSGSRFPCDMMRAHPEDSLPSLWASRIRAWTACMRNGYGLVSTSAGGTGLHTTAKSFAGCIDVATEGASVRVQIRAQLCVRALPVSTCGCAAV

SEQ ID NO: 2086 - protein, 258 aa, Bacillus anthracis str. A2012
MGKVYIVGAGPGDPDLITVKGLKCIEKADVILYDRLVNKELLSYAKPEADLIYCGKLPNYHTMKQETINTFLIKYAKKGKIVTRLKGGDPFVFGRGGEEAEALAKQGVPFEIVPGISAGIAAPAYAGIPVTHRDASASFAIVTGHRKEDAAEEVKWGNLAKGVETLAVYMGVSNLPYICEQLMKHGKDKSTPAAIIERGTTSMQRTVVGTLGTIVDVAKKEQIQNPSMIVIGEVVRFREKIHWFEKQTESTYQVSGVL

SEQ ID NO: 2087 - protein, 474 aa, Bacillus anthracis str. A2012
MNGYVYLVGAGPGDEGLITKKAIECLKRADIVLYDRLLNPFFLSYTKQTCELMYCGKMPKNHIMRQEMINAHLLQFAQEGKIVVRLKGGDPSIFGRVGEEAETLAAANIPYEIVPGITSSTAASSYAGIPLTHRNYSNSVTLLTGHAKGSLTDHGKYNSSHNSDTIAYYMGIKNLPTICKNLRQAGKKEDTPVAVIEWGTTGKQRVVTGTLSTIVSIVKNENISNPSMTIVGDVVSLRDQIAWKEHKPLHGKKVLFTSATNKTSVMKQKLQEAGAEIYQIPTFKKEEYTLTLEQIIEIFNVNRLVFCSAESVEILMQSCSKYKKDIRSLQAELQHMNVATQEKLMQYGLLSKEAKFSSDTTVYLGRNINRIAFIQEKIGAGSYMMTHKYTIDHRFDEVHSRMLSEFLWDSIVFEGRASIDTFLAEVKRLGFLDIVTLPFSYTDVPTLRYANKVGFHNIDHQLQETLMQKDMVRQ

SEQ ID NO: 2088 - protein, 255 aa, Methanosarcina mazei Goe1
MSGNYGKVYLVGSGPGDPELLTLKARRLIDSAEVIIYDQLPGKTILSSMPETAEKIDVGKYAGNHTMTQSEINDVLVRKAKEGKMVVRLKGGDPYVFGRGGEEAEVLVAEGIEFEVVPGITSAIAVPAYAGIPVTHRESTSMVTFITGHEDPTKEESGLDWKTLAKFNGTIVIFMGVKMLRRNAEELIKHGKDPETPVAVIERGTRPDQRVTVGTLENIADLAEERKVKAPAITVVGEVVNLHEILGEQLTGAEF

SEQ ID NO: 2089 - protein, 242 aa, Methanosarcina mazei Goe1
MERKVYFVGAGPGNPKLITVLGREMLEKADLVMYAGSLVNPEVLNYTKGETVDSYGLTLDETTKIIADAVDAGKFVVRLHSGDPSLYGSVIEQMEELRKYDIEVERVAGVSSVFASAAALGTQLTLNGVSDTLIITRPAGKTLEKDLIPELSAYNTTMAIFLGTQKIREIMDKVRCPKDTPVAVVFHASWEDEEVIAGTVEDIADKVKDAGITRSAMIIIGGVVDPKNYRRSYLYGVAQEPL

SEQ ID NO: 2090 - protein, 300 aa, Chlorobium tepidum TLS
MVKMSQILTRKVLHLFFCQALYFLGNNESRKVIHQMAEHGENRVLIVGAGPGDPELLTVRGAAAIREADVILYDCGTVEPVLALASERAAIVRVDRSPYETGEGRREQTPMIVVIREYRDRGLRVVRLKTGDPSLFGGEVDEGDVLTRLGIPWAAIPGICAGAAAASAYALPISRKFESDAVLNLIAAAITDDFALIRDAAHLLGHGATVVLYMATANLPGILRTFREAGVPDAMPVVAVSKAGWPDEAFARTTLGELTAAGCSIALPEPVVYHIGRYVRVRNVPAGSQEFFVKAPENAG

SEQ ID NO: 2091 - protein, 624 aa, Chlorobium tepidum TLS
MHERIAIIAITETGIALARSLKSLLVADGFAGCGLFSSRVAEGVEPIESVPAFVRHSFGSFDAFLFIGSLGICVRSIAPVLQGKLRDPAVINCDESGRFVQSVLSGHAGGANALAGRVARLLGAQAVLSTSSDVQGLWPLDILGREEGWGVEFASPVAGESMTTAMAAFVNHEPTTLLLDVRDSLTDELERTAPPFVTIAYRYEEVDFSTCSLLLAVTPRIIEASVQTVFYRPKVLCVGVGSERGIDPERFVSSISEQFASNGFSMRSIRSVGSVDFKLNEEAFIAFAEACGTTLTGFTPEQLESVGPVPNPSDVVFRKTGVHSVSEASAALLSGENRWLIEKQKISLDGIPEGEPRHYTFAVSLLRGAERRGRIAIVGAGPGDPELVTVKGKRYLEQADLILYAGSLVPEKLTHYAKPGALVRSSASLSLEEQFALMERFYRQGKFVVRLHTGDPSIYGAIQEQMAFFDAEGFEYEIVPGVSSFQAAAAVLQSQFTVPEKVQTIILTRGSGRTPVPDKERLSELARARATMCIYLSAEWSDQVQSELLEHYAPDTPVAVCYRLTWDDQQVWRGRLDGLASLVRESGKTRTVLLVVGEAIGARGGRSKLYDPSFTHGFREGHGA

SEQ ID NO: 2092 - protein, 251 aa, Clostridium perfringens str. 13
MLYFIGAGPGAVDLITVRGRNLLEKADVVIYAGSLVSKEHLDVCKEGVKIYNSASMTLEEVVEVIKENDGEDKVIVRLHTGDPSIYGAIKEQMDELDKFNIQYEVVPGVSSFTAAASAIKKEFTLPSVTQTVILTRVEGRTPVPETEDLEKLAGIGASMALFLSISMIDKVVEKLKRGYGREDVPIAVISRATWDDQEIIIGTLENISEKVKEAGINKCAQILVGDFIDCNYEKSLLYDKHFTHMFRKGIE

SEQ ID NO: 2093 - protein, 255 aa, Thermosynechococcus elongatus BP-1
MSSSQLIGKVYLVGAGPGDAGLLTVRAKNLLEWADVVLYDALISPEILNLINPKAEKIHVGKRRGNHTLSQPEICRLLIELAQRHAVIVRLKGGDPFVFGRGGEECLALIEAGITVEVVPGITSGVAAPAYAHIPLTHRDFSSSVVFVTGHEAAGRYQPRVNWPALATAVDTIVIYMGLHHLGEIVPQLLAGGRSPQTPLAFIESGTTPQQRVVVTTLERAIATYDEAQIQTPALIVIGEVIHLRSQLGGSLHQA

SEQ ID NO: 2094 - protein, 261 aa, Thermosynechococcus elongatus BP-1
MISRNTAAGVYFVGAGPGDPELLTLKGQRLLQEADVILYADSLVPTGILQFAPPSTLCIPTAALTLEEIIPLMVEAVQAGKKVVRLQSGDPSLYSAIHEQICRLAEAGIAVEVVPGISAYQLAAARLKVELTLPELVQTIILTRASGRTRVPPTEELASLAAHKASLCLYLSANCIQRAQRDLLQHYPPETLVAVGYRLGWPDEQLWLVPLRDIAAFSQQQRLTRTTLYLISPALAVQQQGSDAWRSCLYSPEHHHLFRPH

SEQ ID NO: 2095 - protein, 457 aa, Shigella flexneri 2a str. 301
MDHLPIFCQLRDRDCLIVGGGDVAERKARLLLDAGARLTVNALAFIPQFTAWADAGMLTLVEGPFDESLLDTCWLAIAATDDDTLNQRVSEAAEARRIFCNVVDAPKAASFIMPSIIDRSPLMVAVSSGGTSPVLARLLREKLESLLPLHLGQVAKYAGQLRGRVKQQFATMSERRRFWEKLFVNDRLAQSLANNDQKAITETTEQLINEPLDHRGEVVLVGAGPGDAGLLTLKGLQQIQQADVVVYDRLVSDDIMNLVRRDADRVFVGKRAGYHCVPQEEINQILLREAQKGKRVVRLKGGDPFIFGRGGEELETLCNAGIPFSVVPGITAASGCSAYSGIPLTHRDYAQSVRLITGHLKTGGELDWENLAAEKQTLVFYMGLNQAATIQQKLIEHGMPGEMPVAIVENGTAVTQRVIDGTLTQLGELAQQMNSPSLIIIGRVVGLRDKLNWFSNH

SEQ ID NO: 2096 - protein, 457 aa, Escherichia coli CFT073
MDHLPIFCQLRDRDCLIVGGGDVAERKARLLLDAGARLTVNALAFIPQFTAWADAGMLTLVEGPFDESLLDTCWLAIAATDDDALNQRVSEAAEARRIFCNVVDAPKAASFIMPSIIDRSPLMVAVSSGGTSPVLARLLREKLESLLPLHLGQVAKYAGQLRGRVKQQFATMGERRRFWEKLFVNDRLAQSLANNDQKAITETTEQLINEPLDHRGEVVLVGAGPGDAGLLTLKGLQQIQQADVVVYDRLVSDDIMNLVRRDADRVFVGKRAGYHCVPQEEINQILLREAQKGKRVVRLKGGDPFIFGRGGEELETLCNAGIPFSVVPGITAASGCSAYSGIPLTHRDYAQSVRLITGHLKTGGELDWENLAAEKQTLVFYMGLNQAATIQQKLIEYGMPGEMPVAIVENGTAVTQRVIDGTLTQLGELAQQMNSPSLIIIGRVVGLRDKLNWFSNH

SEQ ID NO: 2097 - protein, 563 aa, Thermobifida fusca
MNPQTETPATGAEHAAKPAAGHIALVGAGPGDAELLTLRGAALLGQADVVLTFREPPHLARHRKGLLSHCRPDTVIVDPDEYGDSGDAFALSKAAQGLRVVRLYPGDPLLSGQGAALAEAASDAGIEFEIVPGLSSITAVPAYAGTELLPHGTNEVRILDAADTDVDWVNAAQSKATLVVLHPDAPTEDDPDAKGPGLDRICKTLIAGGRPDTTPVTVTRMGTTTYQTTITSTLARLAADLKAADAKGHTIPRPSLLIVGEGVAQRQKKLSWFETKPLFGWRVLVPRTRQQAPALSEQLRSYGAVPEEVPTISVEPPRTPQQMERAVRGLVTGRYQWVAFTSVNAVKAIRERIEDYGLDARAFAGVKVAAVGEQTAAALRAFGIHPDLQPPEDKQSAAGLVEVWPPYDPDIDPIERVLLPRADIATEVLSEGLVNLGWEVDDVTAYRTVRAAPPPAPIREAIKGGGFDAVMFTSSSTVRNLVGIAGKPHATTVIAVIGPETAKTAEEFGLRVDVRAPKASVAALAEALAEFGAAQRQAAIEAGKPVLRPSQKRRGRRRKNLMI

SEQ ID NO: 2098 - protein, 328 aa, Thermobifida fusca
MLGGPAARGPHRSARRDFGDGSSLGGTVAAPRRRVDTPLGGTGCPPGVVHGMASGPSGCPVGRDQNRSGKRDMTVHFVGAGPGAADLLTLRAVELLRTTPVCLYAGTYIDAEILAHCPDDAELVDTQHLDLDQIIAHLVDADRRGLDAVRLCSGDPSLYSALTEQTRRLDEAGVAWDVTPGVPAYAAAAALLGTELTVPEVAQTVVLTRTRARSTKMPESEALENVAKIHGTLVLHLAIRHIRVLAEQLVPEYGADCPVAVVAHATRPNELVLRGTLTDIADHVEAAGLRHTAVILVGRALASREWDVSEIVCSHLYDPARERNREAS

SEQ ID NO: 2099 - protein, 458 aa, Microbulbifer degradans 2-40
MDYLPLFFDLKAKPCLIVGGGTIATRKARLLHKAGAKLHVVAPKVSEELEKLVAASNGKVFKQEYDQTFLDDVILVISATDIDAVNSVVAADCHAIKLPVNVVDSPALCSVIMPAIIDRSPLIIGVTSGGEAPVLARRVRSMLESSIPAAYGQLAQLASKFRQRAKDVFENGDLRRRFWENILNGPIAEKVLGGNLAAAEQLIEAQLDSASVEKTGEVYLVGAGPGDPDLLTFKALRLMQQAEVVLYDRLVSEPILEMTRRDAERIYVGKKRAEHAVPQQKINQMLLELAQQGKRVLRLKGGDPFIFGRGGEEIDLLAEHKIPFQVVPGITAASGCASYSGIPLTHRDYSQSVRFITGHLQEGKENFRWSEFVDKQQTLVFYMGLAGLETICSKLIEYGKSPSTPAALIERGTLPEQRVHVSDLAGLAAKIEGLDVHAPTLLIIGDVVRCHEKLNWYK

SEQ ID NO: 2100 - protein, 262 aa, Microbulbifer degradans 2-40
MSNSKPGKVWLVGAGPGDPDLLTVKALRVIQNADLVLFDNLVSQEIRALFPKSVPAFYVGKCKDNHSIAQKDLNSLLVKKAAKGLNVVRIKGGDPFVFGRGGEELLTLIKAGVDAEVVPGITSASGCTTAAGIPLTHRGLAQGCTFVTAHAETELSVDWNALAQINHTLVFYMGVSRAEMIASNLLKAGLSAATPVAIIENGCRENQREVIGQIKDLVSLVANNNVQSPALIVVGEVVSLANDLNPELRAAVSAETLNQHVA

SEQ ID NO: 2101 - protein, 252 aa, Trichodesmium erythraeum IMS101
MNQLKFVGKVYLVGAGPGDPGLITLKGKVLLKQADVVIYDALVSASILEMINPNAEKFNAGKRRDRHSLEQTQTTQLLIEKAKTHAVVVRLKGGDPFVFGRGGEEMEDLMQVGIAVEVIPGVTSGIAAPAYAGIPLTHRNYSSSVTFVTGHEAAGKYRPEVNWEAVAQGAETIVIYMGVHNLQNIIKKLIAAGRDPETPIALIQWGTYPKQKELIGTLNNIVGQIESTGFEAPAITVIGNVVNLHQILGNRE

SEQ ID NO: 2102 - protein, 283 aa, Trichodesmium erythraeum IMS101
MHLPFHLSEDKDSYPEKLMNDTKSLTPAVYILGAGPGAPDLLTVKADKILTTADVILYADSLVPKQMLRNVRHDAEIITTANKTLEEILPLMIDRVRKGLSVVRLHSGDPSLYGAVYEQMQLLAEAGIDFEIVPGISAFQDAAAKLKVELTVPGLVQTIILTRISGKATAVPSREELGSLAAHGASLCLYLSARYVWEAQEKLMEHYSADIPVAICYRLGWPDEKIWVVPLEKMALMTEEKQLVRTTLYVISPALEKLEKVGRSGLYNPEHNHLFRGKHNRKN

SEQ ID NO: 2103 - protein, 282 aa, Brucella suis 1330
MIAKSKVALPVMEPGHVWLVGAGPGDPGLLTLHAVNALQQADVIVYDALVDDSCLSLKNATATLEYAGKRGGKPSPRQRDISLRLVELARQGKKVLRLKGGDPFVFGRGAEEALTLVEYHVPFRIVPGVTAGVGGLAYAGIAATHRDINQAVTFLTGHDATGAMPDGVDWAGIARSSPVIVMYMAMKHIGLIAGRLIEAGRSPDEPVAFVCNASLPDQTVLETTLGRAAIEVEAAGLQPPAIVVVGEVVRLRAGLDWIGAMAGKSLVSDPLGKRTQQGVQSA

SEQ ID NO: 2104 - protein, 477 aa, Brucella suis 1330
MPVSLSQTRLLADFPAFFRVSGEVVAVVGGGEEALNKARLVAQTAARLRIIAEKAEPHLAAFIESHGVEHIASPFAPELLDGAKLVFVATGDEAGDRAAAAAARARKIPVNVVDRPALCDFLTPAIVNRAPVTIAIGSQGTAPVLAQMVRARIDAAFSPRLGELAHFAESWRPLVERALPKGLARRGFWRTFFSGKVARAVESGDHEAAHRAAAELIGQGQDASGHVWLVGAGPGAEDLLTLRAQRVLMEADVIVHDALVPEGVIAMGRRDAERLPVGKRKGCHSKSQDEINRLLVKLGQEGKRVVRLKSGDPLVFGRAGEEMAALRAAGIGFEVVPGITSAFAAAADMELPLTLRGVASSLVFTTGHDMTGDVLPGWAKLAVSGATIAVYMGSTVAASVASRLIAAGLHEDTAVAVVENASRSNKRMFHGTLKDLPQLENRKELSGPVMVVIGDAVAGAAIGRAQALSLKPVPVAA

SEQ ID NO: 2105 - protein, 252 aa, Brucella suis 1330
MTVHFIGAGPGAADLITVRGLRLIENCPVCIYAGSLVPKEVVAGAPKNARLIDSSSLTLDEIIAEMEVAHAQGLDVARVHSGDPSIYGAMAEQMRRLDALGIAYDVTPGVPAFAAAAAAMKQELTIPELNQTIILTRTSMKSSAMSEGEDLATLGKSGATLVIHLSIRNLAKIESDLTPLYGADCPVVVAYRVGWPDEQILRGTLCDIAGKIEASGLRRTAMIFVGRGLDPKNFRDSALYHEAHSHAARSKV

SEQ ID NO: 2106 - protein, 464 aa, Pseudomonas syringae pv. syringae B728a
MEFLPLFHNLRGSRVLVVGGGEIALRKSRLIADAGAVLRVVAPEIEAQLSELVVQSGGEMILRGYSECDLDGCVLIIAATDDEPLNAQVSRDARLRCVPVNVVDAPALCTVIFPAIVDRSPLVIAVSSGGDAPVLARLIRAKLETWIPSSYGQLAGLAARFRNQVKGLFPNVQQRRAFWEEVFQGAIADRQLAGQGAEAERMLIAKIAGEPPPETGEVYLVGAGPGDPDLLTFRALRLMQQADVVLYDRLVAPTILDLCRRDAERVYVGKRRAEHAVPQEQINQQLVALAKQGKRVVRLKGGDPFIFGRGGEEIEELAAHGIPFQVVPGITAASGCAAYAGIPLTHRDHAQSVRFITGHLKNGTTDLPWSDLVAPAQTLVFYMGLIGLPVICEQLIRHGRSADTPAALVEQGTTVNQRVFTGTLANLPQLVAEHDVHAPTLVIIGEVVKLREKLAWFEGAQATL

SEQ ID NO: 2107 - protein, 253 aa, Pseudomonas syringae pv. syringae B728a
MSAKVWLVGAGPGDPELLTLKAVRALHEADVVLIDDLVNPAVLEHCPGARVIAVGKRGGCRSTPQAFIHRLMLRYVRQGKCVVRLKGGDPCIFGRGGEEAQWLQEHGVAVELVNGITAGLAGATQCGISLTLRGISRGVTLVTAHTQDDSTLNWQALAQGGTTLVVYMGVAKLAEIRESLLAGGMSGEMPVAMIENASLPWQRECRSTLNAMQQDAAAFQLKSPAILVIGAVAAYSNELLNQTLMDHAQLNAS

SEQ ID NO: 2108 - protein, 332 aa, Pseudomonas syringae pv. syringae B728a
MLQRCATGGLGTAPHAPFCAGVPEHWLSWRRRRLGSGAGGATGRRYRHAADRTAEKRAGHICLGNQPCAQRIISPRSFTPENSLTVYFIGAGPGDPELITVKGQRLIRSCPVIIYAGSLVPLAVLEGHQAVQVTNSAELHLEQIIDLIKRAHAQGQDVARVHSGDPSLYGAIGEQIRHLRELNIPFEIIPGVTATAACAALLGVELTLPDVSQSVILTRYADKTSMPSGEELASLASHRATMAIHLGVNNLQRIVEELMPHYGADCPIAVVHRASWPDQDWAVGTLADIEEKVQAKGFRRTALILVGRVLADDTFSESSLYRAGHAHLFRPV

SEQ ID NO: 2109 - protein, 464 aa, Pseudomonas fluorescens PfO-1
MKYLPLFHNLRGSRVLVVGGGEIALRKSRLLADAGALLRVVAPEIEAQLRELVAASGGECLLRGYAEADLDGCGLIIAATDDEALNAHVSADAHRRCVPVNVVDAPALCSVIFPAIVDRSPLIIAVSSGGDAPVLARLIRAKIETWIPSTYGHLAGLAARFRDQVKGLFPDVQQRRGFWEDVFQGPIADRQLAGQGAEAERLLQAKIDGEAMVTTGEVYLVGAGPGDPDLLTFRALRLMQQADVVLYDRLVAPAILELCRRDAERVYVGKRRADHAVPQDQINQQLVDLAKAGKRVVRLKGGDPFIFGRGGEEIEELAAHGIPFQVVPGITAASGCAAYAGIPLTHRDYAQSVRFVTGHLKDGSTDLPWSDLVAPAQTLVFYMGLVGLPIICEQLIKHGRAAETPAALIQQGTTVNQRVFTGTLADLPRLVAEHEVHAPTLVIVGEVVQLREKLAWFEGAQGQI

SEQ ID NO: 2110 - protein, 250 aa, Pseudomonas fluorescens PfO-1
MNAKVWLVGAGPGDPELLTLKAVRALREAEVVLIDDLVNEAVLEHCPAARIIAVGKRGGCRSTPQAFIHRLMLRYARQGKCVVRLKGGDPCIFGRGGEEAQWLRERGVEVELVNGITAGLAGATQCDIPLTLRGVARGVTLVTAHTQDDSHLNWRALAQGGTTLVIYMGVAKLGEIREQLLAGGMAADTPVAMIENASLPEQRECRSDLTAMEDDALGFQLKSPAILVIGAVAAAATQVGSIGWAADRLA

SEQ ID NO: 2111 - protein, 261 aa, Pseudomonas fluorescens PfO-1
MKHRPAPFLQDPTMTVYFIGAGPGDPELITVKGQRLIRRCPVIIYAGSLVPTAVLEGHCAETVVNSAELHLEQIIDLIKTAHAKGQDVARVHSGDPSLYGAIGEQIRYLRELDIPFEIIPGVTATAACAALLGAELTLPDISQSVILTRYADKTAMPAGEELDNLAQHGATMAIHLGVNHLEKIVAELLPHYGADCPIAVIHRATWPDQDWVTGTLEDIAEKVAAKGFRRTALILVGRVLGSDHFSESSLYRAGHAHLYRP

SEQ ID NO: 2112 - protein, 270 aa, Desulfovibrio desulfuricans G20
MENSVTANPADPRVWFIGAGPGDPELITVKGQRIISQADLVLYAGSLVPPQVVACARPDAVVADSAPMNLQQTHAMIRETVHSGGLVARVHTGDPALYGAIREQMALLALENIACGVVPGVTSAFAAAAAAGVSLTLPEITQSVIITRVQGRTPVPEAEQLRHLARRGTAMAIYLSAALPETITEELRAGGLPESTRIIAAYRVGWPDQRLVECTLATLTDTVQQEKLNRQTVFLVLPGNSMHSGIQHPDAASPPCSRLYDADFSHGWRK

SEQ ID NO: 2113 - protein, 465 aa, Pseudomonas aeruginosa PAO1
MDFLPLFHSLQGRLALVVGGGEVALRKARLLADAGARLRVVAPQIHIELRHLVEQGGGELLERDYQDGDQPGCALIIAATDDEPLNAEVSRAANARGIPVNVVDAPALCSVIFPAIVDRSPLVVAVSSGGDAPVLARLIRAKLETWIPSTYGQLAGLASRFRHRVKELLPDLQQRRVFWENLFQGEIAERVLAGRPAEAERLLEEHLAGGLAHIATGEVYLVGAGPGDPDLLTFRALRLMQQADVVLYDRLVAPSILELCRRDAERLYVGKRRAEHAVPQDRINRLLVELASQGKRVLRLKGGDPFIFGRGGEEIDELAAHGIPFQVVPGITAASGCAAYAGIPLTHRDHAQSVRFVTGHLKDGTTDLPWQDLVAPGQTLVFYMGLVGLPVICEQLVAHGRSAQTPAALIQQGTTAQQRVFTGTLENLPQLVAEHEVHAPTLVIVGEVVQLRDKLAWFEGAREDA

SEQ ID NO: 2114 - protein, 279 aa, Pseudomonas aeruginosa PAO1
MNTTVIPPSLLDVDFPAGSVALVGAGPGDPGLLTLRAWALLQQAEVVVYDRLVARELIALLPESCQRIYVGKRCGHHSLPQEEINELLVRLARQQRRVVRLKGGDPFIFGRGAEELERLLEAGVDCQVVPGVTAASGCSTYAGIPLTHRDLAQSCTFVTGHLQNDGRLDLDWAGLARGKQTLVFYMGLGNLAEIAARLVEHGLASDTPAALVSQGTQAGQQVTRGALAELPALARRYQLKPPTLIVVGQVVALFAERAMAHPSYLGAGSPVSREAVACA

SEQ ID NO: 2115 - protein, 250 aa, Pseudomonas aeruginosa PAO1
MTVYFIGAGPGDPDLITVKGQRLIRQCPVILYAGSLVPQALLEGHQAGQVVNTAELDLEQIVELLAQAHRRGLDVARVHSGDPSLYGAIGEQIRHLRELGIPYEIVPGVTATAACAALLGCELTLPEVSQTLILTRYAARTKMPEGESLGDLARHRATLAIHLGVAHLAKIVEELLPHYGADCPVAVIHRASWPDQEQVRGTLGDILPKVAARNFRRTALILVGEVLAAEGFADSSLYRAEHRHLYRPGE

SEQ ID NO: 2116 - protein, 253 aa, Fusobacterium nucleatum subsp. vincentii ATCC 49256
MEKVYFIGAGPGDPELITIKGQRIVKEADVIIYAGSLVPKEVIDCHKEGAEIYNSASMSLDEVIDVTVKAIKENKKVARVHTGDPAIYGAHREQMDMLDEHGIEYEVIPGVSSFLASAAALKKEFTLPNVSQTVICTRIEGRTAVPERESLKSLAKHRASMAIFLSVQMIDKVVEALATSYPMTTPVAVVQKASWADQKIVLGTLETIEQKVKEAEINKTAQILVGDFLGNEYEKSKLYDKYFSHEYRKGIKK

SEQ ID NO: 2117 - protein, 276 aa, Shewanella oneidensis MR-1
MEILSLPGQSAKGKVWLVGAGPGDVELLTLKAWRILKSADAVLYDALVSQDILDLIPKDAEKIAVGKRAGKHSAAQDDINQLLVTKAYTRKNVVRLKGGDPFIFGRGGEELQTLVDAGVEFEVVPGITAASGTAAYTGIPLTHRDYAQGVTFITGHCQLESRPMDWQGYANPNNTLVVYMGILNAGVIRAGLINAGRSPQTPVAIVSKATTQSQQRFIGQLDSLEQLAADPKLQMPALMIIGEVVGLSETLNWFQPKAEGSQSLEALNAPKVAVKI

SEQ ID NO: 2118 - protein, 256 aa, Clostridium tetani E88
MSKIASKVYFIGAGPGDVDLITVKGRDILSVADVVIYAGSLVSKEHLDFCKEDVEKHNSASMTLEDVIEVMKKAKDEGKSVVRLHTGDPSMYGAIKEQMDELDKFNIEYEVVPGVSSCFAAAAAIKREFTLPNVTQTLILTRVEGRTPVPEGEDLEKLASVGASMAIFLSISMIEKVVEKLRKGYGKNVPIAVIERATWEDQRVIIGTLDDIAGKVKEANITKCAQILVGDFIDCEYDKSLLYDKSFSHMFRKAEK

SEQ ID NO: 2119 - protein, 470 aa, Yersinia pestis CO92
MDYFPIFCQLQHKACLLVGGGEIAERKARLLLDAGALVTVNACEFTPQFHHWADQGQLSLISGEFVPELLADKWLVIAATDQLSVNALVYQSANQQRIFCNVVDDPKRTSFIMPSIIDRSPIMIAVSSGGKAPVLARLLREKLEALLPQHLGQLAGNLRQRVKQHFTVMTERRRFWEKLLTHDRLAQSLANNDHVQADQHVEQLFSAPLTDRGEVVLVGAGPGDAGLLTLKGLQQIQQADVVVYDRLVSDEVMNLVRRDAERIFVGKQSGHHCVPQEQINQILLQQAQSGKRVVRLKGGDPFIFGRGGEELEELAGYGIPFSVVPGITAASGCSAYSGIPLTHRDHAQSVRLVTGHAKKEGQLDWANLAAEKQTLVFYMGLSQAGEIQQQLIQHGMPATTQVALVENGTSRHQRVVSGELSQLALLSQQVSSPSLIIVGSVVSLREKLNWFSSRHHDDQPKVTECVAHVG

SEQ ID NO: 2120 - protein, 472 aa, Yersinia pestis CO92
MDYLPLFADLKQRPVLIVGGGEVAARKIELLHRAGAQVWVVAQTLSSELEQQYQDGRIHWLAQDFLPEQLDNVFLVIAATNDTVLNAAVFAAADQRCILANVVDDQPLCSFIFPSIVDRSPLVVAISSSGQAPVLARILREKLEALLPTRLSDMAAIAGRWRGRVKQHMASMGERRRFWEHAFSGRFASLISRGQLTEAENELQLSLEGQHRALGEVALVGAGPGDAGLLTLRGLQVMQQADVVLYDHLVSPEVLDLVRRDAERICVGKRAGAHSVTQEATNQLLVTLAQQGKRVVRLKGGDPFIFGRGGEELQVVAQAGIPFQVVPGVTAAAGATAYAGIPLTHRDHAQSVTFITGHCRPDGDDLDWQTLARGRQTLAIYMGTVKAAAISQQLIAHGRSSTTPVAVIGRGTRVDQQVLIGTLAQLESLAQQAPTPALLVIGEVVNLHHQIAWFGQQPQTESAISPSVVNLA

SEQ ID NO: 2121 - protein, 252 aa, Vibrio vulnificus CMCP6
MTLTSLSSLQNQGFVSLVGAGPGDPDLLTVKGYRVIQQAEVVVYDRLVSPEILALANEKAEMIYVGKKLDFHCVPQEEINQILVRKALEGKRVVRLKGGDSFIFGRGGEELEELAEHDVRFEVVPGITAAAGATAYAGIPLTHRDHAQSVQFITGHIQKDGKEIEWPSLAQANNTLVFYMGLKQCRYIAEKLLENGLDASTSCAIIENGTRREQRVLTGTLTQLPELATQAISPALIVVGSVTSLHDKLKWF

SEQ ID NO: 2122 - protein, 291 aa, Vibrio vulnificus CMCP6
MSMADKDTATVFPFKRPSVVASNPTAGRYGHSQLKHGEVALVGAGPGDPELLTLKALNYLQQAEVVLYDYLVSDEIMALVPNDAILVCVGKRAGHHSVPQEKTNQLLVDFAKQGYKVVRIKGGDPFVFGRGGEELEVLADAGITFQVVPGITAAAGATAYAGIPLTHRDYAQSAMFITGHLKAESDQLDWSTLARGQQTLVIYMGLMKSNYIQEQLIKHGRRAQTPIAIIERGTQLSQKVFKGQLSELADLAKKAEAPALIVIGEVVQLSQKLDWFLSGTRINNSAIANSI

SEQ ID NO: 2123 - protein, 297 aa, Vibrio vulnificus CMCP6
MDTSISTQLRDRSYSEHAISYHSSRRLQAKNRPTSTGMAASGFVYLVGAGPGDPEMLTVKAVNALQQCDLLVYDRLVSKEILALVPEHVDKIYVGKRCGEPSLKQDEINQILVSFAQLGRKIVRLKGGDPFIFGRGGEEALALVEHNIHYCVVPGITAAIGCAASCAIPLTHREVARSVTLVTGTVVTGSLPAWSAIVEAGQTLVFYMGLESARAIEQGLLGQGVRADFPVAIVTQGSTPEQKTYVTTLATLEKTAVALKGVSPALIIMGEVVKLRERLKTTLAAVAPMANASFVNE

SEQ ID NO: 2124 - protein, 253 aa, Methanocaldococcus jannaschii
MPKNINISGEIMTGKVILVGAGPGDPELITIKGLKAIKEADVVVYDDLISKELLNYAKKDAELIYVGKRKGKHSFKQEEINKILVEKAKEGKLVVRLKGGDPFVFGRGGEEILELKKHNIPYEVIPGITSAIAVPEVAGIPVTHRKVATSFTVVTGHEAEDKKEKQVDLSKLNADTIVILMGITNLENLVKELLQNPKRSKETPVAIIMEGTTKNQRVIKGTLGDIVEKAKKENARPPGVIVVGEVVNVLDSQ

SEQ ID NO: 2125 - protein, 259 aa, Methanocaldococcus jannaschii
MDNNRKVIIVGAGPGDPELITIKGKKAIEEADVIIYAGSLVNEKLLEYNKKNAEIYNSANMNLEEIIDVMVKAVNQGKKVVRLHTGDPSIYGAIKEQIDELSKYGIDVEIIPGVSSLFAATASLKVELTLPEVSQTVIITRPEGRTPMPEKEKLRDLAKHQSTMAIFLGVSMIDKVVKELIEGGYREETPVAVVYHASWDDEKIVRGTLKDIAEKVKKEGIKKTALIIVGEVLNPKYYAYSKLYDKNFEHEYRKSHKKF

SEQ ID NO: 2126 - protein, 245 aa, Methanosarcina barkeri
MVRWKGKYILWERAHGNPKLITVLGREMLEKADLVMYAGSLVNPEVLNYTHGETVDSYGLTLEETTKIIADAVDAGKFVVRLHSGDPSLYGSVIEQMEELRKHDIEVERVAGVSSIFASAAALGTQLTLNGVSDTLIITRPAGKTLEKDLIPELSAYNTTMAIFLGTQKIREIMEKVRCPKDTPVAVVFHASWEDEEIITGTVEDIADKVKDAGIKRSAMIIIGGVVDPKNYRRSYLYGVAQEPL

SEQ ID NO: 2127 - protein, 464 aa, Pseudomonas syringae pv. tomato str. DC3000
MEFLPLFHNLRGSRVLVVGGGEIALRKSRLIADAGAVLRVVAPEIETQLRELVAHSGGELILRGYSESDLDGCVLIIAATDDEPLNAQVSRDARLRCVPVNVVDAPALCTVIFPAIVDRSPLVIAVSSGGDAPVLARLIRAKLETWIPSSYGQLAGLAARFRNQVKGLLPNVQQRRAFWEEVFQGAIADRQLAGQGAEAERLLIAKIAGEPPAQTGEVYLVGAGPGDPDLLTFRALRLMQQADVVLYDRLVAPTILDLCRRDAERVYVGKRRAEHAVPQEQINQQLVALAKQGKRVVRLKGGDPFIFGRGGEEIEELAAHGIPFQVVPGITAASGCAAYAGIPLTHRDHAQSVRFITGHLKNGTTDLPWSDLVAPAQTLVFYMGLIGLPVICAELIKHGRSADTPAALVQQGTTVNQRVFTGTLANLPQLVAEHEVHAPTLVIIGEVVKLREKLAWFEGAQATL

SEQ ID NO: 2128 - protein, 253 aa, Pseudomonas syringae pv. tomato str. DC3000
MSAKVWLVGAGPGDPELLTLKAVRALHEADVVLIDDLVNTAVLEHCPQARVIAVGKRGGCRSTPQEFIHRLMLRYVRQGKCVVRLKGGDPCIFGRGGEEAQWLQERGVAVELVNGITAGLAGATQCGISLTLRGISRGVTLVTAHTQDDSSLNWQALAQGGTTLVVYMGVAKLAEIRESLLAGGMIGDMPVAMIENASLPWQRECRSTLNAMQRDAAAFELKSPAILVIGAVAAFSNELLNQTLVEQAQLQAS

SEQ ID NO: 2129 - protein, 249 aa, Pseudomonas syringae pv. tomato str. DC3000
MTVYFIGAGPGDPELITVKGQRLIRTCPVIIYAGSLVPLAVLEGHQAVQVTNSAELHLEQIIDRIKTAHAQGQDVARVHSGDPSLYGAIGEQIRHLRELNIPFEIIPGVTATAACAALLGVELTLPDISQSVILTRYADKTSMPSGEELASLASHRATMAIHLGVNNLHRIVEELTPHYGTDCPIAVVHRASWPDQEWAIGTLADIEEKVRAKGFRRTALILVGRVLAADTFGESSLYRAGHAHLFRPK

SEQ ID NO: 2130 - protein, 304 aa, Vibrio parahaemolyticus RIMD 2210633
MPASQYQWTMSKHMATNDSVTPLPVQKPRLVSDNQVSGVTRFAKQSLKPGEVALVGAGPGDPELLTIKALNCLQQADVVLYDYLVSEEIMALIPSDTILVCVGKRAGHHSVPQEKTNQLLVDFAKQGYRVVRVKGGDPFVFGRGGEELEVLADAGIRFQVVPGITAAAGATAYAGIPLTHRDYAQSAIFVTGHLKEESDEMDWSTLARGNQTLVIYMGLMKSHYIQNQLIQHGRAASTPIAIIERGTQIQQKVFTGELSQLSDLSKEAQAPSLIVVGEVVRLSQKLDWFLSSTDFNKSAIANSI

SEQ ID NO: 2131 - protein, 252 aa, Vibrio parahaemolyticus RIMD 2210633
MTTANSSLNSGFVSLVGAGPGDPDLLTVKGLKAIQAAEVVVYDRLVSKEILELAQASAEMIYVGKKLDFHCVPQDQINQILVEKAQEGKRVVRLKGGDSFIFGRGGEELEELAEYGIQYEVVPGITAAAGATAYAGIPLTHRDHAQSVQFITGHVQKDGREIEWHSLAQSNNTLVFYMGLKQSGHIMDKLITHGLDPEMSCAIIENGTRPEQRVFQGKLNELSSMAEQAVSPALIVVGSVTQLHNKLAWFGK

SEQ ID NO: 2132 - protein, 301 aa, Vibrio parahaemolyticus RIMD 2210633
MEAPYQKSWFKKGQAYQSQKRSSRFSRHDQASKLNKLLEDQSVDLDANHKGFVSIVGAGPHDPDLLTVKAVKAIMSAEVLLYDRLVNKDILELASPQADWIYVGKRCGQPSIGQEEICGLMVSLAQQGKRVVRLKGGDPFVFGRGGEEALALVKHAIPYEVIPGITAAIGCSANSLIPLTHRGVARSVTFVTGQVVTGAFEAWSQLMQSGQTLVFYMGLEKSSQIQTGLISSGLRENFPVAVITHGCSPQQQVYVTQLNQLNELSITLKGVSPALIVMGEVVKLREQLIETVQSVTEYEGI

SEQ ID NO: 2133 - protein, 483 aa, Bacillus subtilis subsp. subtilis str. 168
MIMKNGIVYFVGAGPGDPGLLTIKGKQALKEADVILYDRLANPKLLEFASPDCQFIYCGKLPNRHFMKQKEINALLVEKALNGLTVVRLKGGDPSVFGRVGEEADALHEHGIRYEMVPGITSGIAAPLYAGIPVTHRDFASSFAMITAHDKSLKGTPNLDWEGLARSVQTLVFYMGVKNLSYICQQLISYGKSPSVPVIVIQWGTWGRQRSVKGTLENIQQKVQEHQITNPAIIVIGDIVNFQTHSWFESKPLIGRHLMVVTHGEDEDPLADKLRDSGADLIEWPKWRTENMPVNEEILRKIGTFEDVFFTSRRAVCEFFRALASQKIDIRQLTAKLSAASEQAKTELEKRGFLVTAIQPDSEKRLVVGSRHAVENMQKHESCSFYITHENVIDDRFTHMIQRTISESPLHMVICPNKLSVQQLINGGEQIGILPEPSASRPPIVCIGDDSAAGIYGFTAVQEQDELLAFIHNQHAEKKLLHT

SEQ ID NO: 2134 - protein, 257 aa, Bacillus subtilis subsp. subtilis str. 168
MGKVYIVGAGPGDPDLLTIKALKAIEKADVILYDRLVNKEILQYAKEQADLIYCGKLPDFHTMKQETINRFLVKYAQKGKMVVRLKGGDPFVFGRGGEEAECLSENGIPFEIIPGITSGIAAAAYAGIPVTHRDAGSNVAFVTGHYKKEEDFEEKWKALATGIDTLVIYMGIKNVQQIERKLLENGRDGSTPAAFIHWGTTDKQKSVFCTVDTLSETVIKENITNPSLIVIGNVVNYHYKLEWFESELKKQDLSEAL

SEQ ID NO: 2135 - protein, 244 aa, Aquifex aeolicus VF5
MGKVYLIGAGPGDPELLTLKAYRILRKADVVLYDALVNREILHFARQDSLKIYVGKRDGKHSLPQEEINELLHRFALSYKIVVRLKGGDPFVFGRGGEELLYLKSRGVEVEIVPGITSAISAPSSAFIPVTHRGIASSFAVVTGHPNREIKWEDLVNIDTLVVLMGVKNREKIARELIGAGRNPDEPVAFIEKATTPEQREVFSTLKEVAQNPPEVNPPAVMVVGKVVEIGAKVLCERIIGVTL

SEQ ID NO: 2136 - protein, 244 aa, Archaeoglobus fulgidus DSM 4304
MVGKVYIVGAGPGKKDLLTLRAYELIKRADVILHDELIGEVAELLKESRAEIVDVGKRSGRHKKRQEEINKLLVEYARQGKTVVRLKGGDPCVFGRGGEEAEFLAKHGIPFEFVPGVTSAIAVPEAVGIPVTHRRYDPALVFITGRESRERLNWKALAELNATIVILMGVSRIPEIAKNLLEHGKDPETEVAIIESGFSDRERVILTTLGKMAERAEKERVKPPAIIVIGKVVELYGVLSRWLG

SEQ ID NO: 2137 - protein, 243 aa, Archaeoglobus fulgidus DSM 4304
MGGKVYIVGAGPGNFELLTLKAYRLLQEADVILYDRLVGEEIESFLKTLGKEVVYVGKERGEKGEKRQKEINRLMKKYFEEGKKIVRLKGGDPGIFGRMAEEIEFLVENRIPFEVVPGVSSVNGAPVCSGIPLTEAENAFGFLVVSGSDSGRIRELHEKGTLVILMGGCTAKDVARNLIESGVDADRDVAVIERGSMKNQRVTITKLSELVERDFNFDSPALIVVGDVVRFARVCQNHEDRKI

SEQ ID NO: 2138 - protein, 234 aa, Archaeoglobus fulgidus DSM 4304
MKVYFVGFGPGNPELLTLKAYKLLKEADLVVYPGSIVPEKFFEEFKGEKVNSHGKTLEEIVDLIERYVKRGKRVVRVQSGDPSIFGAVWEQIRELRRRGIDCEVVPGVSSVFASAASLGIELTSPSTEGVAIVRPAGKTLEKDHLEELARLPLTLVILLGVDKIGEIAEKIARVRGWDEPCAVVFHASREDEIRIKGTLKDIAEKVREKGIRRTATIIVGKVVEGYDERSHLYS

SEQ ID NO: 2139 - protein, 260 aa, Bradyrhizobium japonicum USDA 110
MTVHFIGAGPGAPDLLTLRGRDLIAACPVCLYAGSLVPEGVLAHCPPGAHIVNTAPLSLDEIIAEIAAAHADGKDIARLHSGDLSIWSAMGEQLRRLRTLDIPFTVTPGVPSFSAAAAALEVELTLPGLAQTVVLTRTPGRASAMPEGEKLAAFAATGATLAIHLSIHLLDQVIAELLPHYGADCPVAIVWRASWPDQCIVRATLATLDAAVGAEMERTALILVGKTLGAADFDESRLYAADYDRRYRPVGAEPRFPEAS

SEQ ID NO: 2140 - protein, 292 aa, Brucella melitensis 16M
MSKADEAAACVIAKSKVALPVMEPGHVWLVGAGPGDPGLLTLHAVNALQQADVIVYDALVDDSCLSLKNATATLEYAGKRGGKPSPRQRDISLRLVELARQGKKVLRLKGGDPFVFGRGAEEALTLVEYHVPFRIVPGVTAGVGGLAYAGIAATHRDINQAVTFLTGHDATGAMPDGVDWAGIARSSPVIVMYMAMKHIGLIAGRLIEAGRSPDEPVAFVCNASLPDQTVLETTLGRAAIEVEAAGLQPPAIVVVGEVVRLRAGLDWIGAMAGKSLVSDPLGKRTQQGVQSA

SEQ ID NO: 2141 - protein, 475 aa, Brucella melitensis 16M
MSLSQTRLLADFPAFFRVSGEVVAVVGGGEEALNKARLVAQTAARLRIIAEKAEPHLAAFIESHGVEHIASPFAPELLDGAKLVFVATGDEAGDRAAAAAARARKIPVNVVDRPALCDFLTPAIVNRAPVTIAIGSQGTAPVLAQMVRARIDAAFSPRLGELAHFAESWRPLVERALPKGLARRGFWRTFFSGKVARAVESGDHEAAHRAAAELIGQGQDASGHVWLVGAGPGAEDLLTLRAQRVLMEADVIVHDALVPEGVIAMGRRDAERLPVGKRKGCHSKSQGEINRLLVKLGQEGKRVVRLKSGDPLVFGRAGEEMAALRAAGIGFEVVPGITSAFAAAADMELPLTLRGVASSLVFTTGHDMTGDVLPGWAKLAVSGATIAVYMGSTVAASVASRLIAAGLHEDTAVAVVENASRSNKRMFHGTLKDLPQLENRKELSGPVMVVIGDAVAGAAIGRAQALSLKPVPVAA

SEQ ID NO: 2142 - protein, 314 aa, Brucella melitensis 16M
MPWRGGGGCAGCRRPERPSGGWENRIGPVHRRPGDGSNVSVIIGTALSRRGLSASALQEGKIVTVHFIGAGPGAADLITVRGLRLIENCPVCIYAGSLVPKEVVAGAPKNARLIDSSSLTLDEIIAEMEVAHAQGLDVARVHSGDSSIYGAMAEQMRRLDALGIAYDVTPGVPAFAAAAAAMKQELTIPELNQTIILTRTSMKSSAMPEGEDLAALGKSGATLVIHLSIRNLAKIESDLTPLYGADCPVVVAYRVGWPDEQILRGTLCDIAGKIEASGLRRTAMIFVGRGLDPKNFRDSALYHEAHSHAARSKV

SEQ ID NO: 2143 - protein, 259 aa, Bacillus cereus ATCC 14579
MMGKVYIVGAGPGDPDLITVKGLKCIEKADVILYDRLVNKELLSYAKPDADLIYCGKLPNYHTMKQETINTFLIKYAKKGKVVTRLKGGDPFVFGRGGEEAEALAKQGVPFEIIPGISAGIAAPAYAGIPVTHRDASASFAIVTGHRKEGAEEEVKWESLAKGVETLAVYMGVSNLPYICEQLMKHGKDKSTPAAIIEQGTTSMQRTVVGTLGTIVDVAKKEQIQNPSMIVIGEVVRFREKIHWFEKQTENAYQVSGVL

SEQ ID NO: 2144 - protein, 474 aa, Bacillus cereus ATCC 14579
MNGYVYLVGAGPGDEGLITKKAIECLKRADIVLYDRLLNPFFLSYTKQTCELMYCGKMPKNHIMRQEIINAHLLQFAKEGKIVVRLKGGDPSIFGRVGEEAETLAAANIPYEIVPGITSSIAASSYAGIPLTHRDYSNSVTLLTGHAKGPLTDHGKYNSSHNSDTIAYYMGIKNLPTICENLLQAGKKEDTPVAVIEWGTTGKQRVVTGTLSTIVSIVKNENISNPSMTIVGDVVTLRNQISWKERKPLHGKKVLFAAATNKKSAIKQKLQESGAEIYQIPTFKKKEYTVTSEQINKIFNVDRLVFCSADSVDILMQSCSKYHKDIRSLQAELQYMNLSIQEKLMQYGLFSKPAQFSSNSTIYLGRNINRIAVIQEKIGAGSYMMTHEYTIDHRFDEIHSRILSEFSWDSIVFEGRASIDTFLAEIKRLGFINILTLPFSYTDVPTLHYANKVGFHNVDHQLQETLMKKDMVRQ

SEQ ID NO: 2145 - protein, 274 aa, Streptomyces avermitilis MA-4680
MADAPTGKVTFVGAGPGAADLLTFRAARAIAEADVVIWAASLVQAEVLDHARAGADILDSATMSLEDVVAVYRRAHAEGLKVARIHSGDPALWGGTQEQADRCAEIGIETEIVPGVSSFSAVAALAGRELTIPEVAQSVILTRLGGGKTPMPPGEEVREFARHGTTMALFLSAARSGQLVRELLEGGYPTSTPVVVAYQATWPEELIVTCTIETLEETVKEHKLWKHTLFLVGPALGAHGTRSHLYHPGHFHGFRKADPQARAELRAARKGSPS

SEQ ID NO: 2146 - protein, 262 aa, Sulfolobus solfataricus
MIGKVVFIGSGPGDPELITIKAKKYIETADVIVYAGSLVNPEILKWSRKDAEVYNSSSLTLNEIVEIMVKKASEGKLVARLKSGDSSIYGALFEEMWALEAAGIPFEVIPGITAAIAAASVIPIELTVPKLSQTVIITRASLRVPMQGSIKDFAKMVKIGATMVIYTGIHIIDRVVNDLKEGGLTDDTPVIVVYRATWPEQKIIKGTLADIVSKVREAKIYRDSVIIVGLSADPQQIKNMVRSSVYDPKHNHSYRPWKVEED

SEQ ID NO: 2147 - protein, 246 aa, Thermoplasma acidophilum
MKSRKYYIVGAGPGDPGLITVRAVKAIAESDLVLVDSLVPDEIIESVCAGKRVLRVGHRASGGHSGIIDRISAILDSTEFSVASHLKEGDPSVFSHLYEEIRMIMDRGIEYEVIPGVSSAIAVPEAAGIVLTGRGRSESFTVVSASDASGGFNEAEIRSALNASGSVVIMMGSRYLGRIRDLLIGIRYEWPIAIIENGTRTDQRVLVYRDAWHIGDQEIRMPAIIVVGRMIMVDGVIEKDEAGIRN

SEQ ID NO: 2148 - protein, 255 aa, Thermoplasma acidophilum
MYIIGAGPGDPDLLTVKARRLIESCDVIIYAGSLVNPEILKLARPGSEIHNSAELNINQIMDIIKDAYERGLDVARIHSGDPHIYGALKDQTSYLEALGIPYEVVPGVSVLTSAAASLGIELTMDGISQAVIIARGSLRIPVPDREQIRKLAEHGSTMVIFTGIHIIDSIVKDLIDGGYSPDTPVGVVYRSTWPDEIVIKGRLSNIATLVHERRIYRTALIIVGDVVDPKFVKHSKLYDPEYVHSFRGVKNGHDR

SEQ ID NO: 2149 - protein, 255 aa, Heliobacillus mobilis
MISFIGAGPGDPELITVKGQKRLAEADVVIYAGSLVNPEILSWCRPDAEIHNSASMSLEEVLAVMKRAVGEGKGVARVHTGDPSIYGAHREQMDALDEMGIAYEIVPGVSSFLAAAAAVKKEFTLPGVSQTVIITRLAGRTPVPEKESLASLAQHRASLCIFLSTHLLSEVSQELIQGGYEEDTPVAVVYKASWPDEKTVLGTLGDIAQKVSGARISRTAMIMVGRFLEGPYDRSLLYDPTFTHGYRQGKKGTEE

SEQ ID NO: 2150 - protein, 258 aa, Geobacter metallireducens
MTIVHFIGAGPGDAELITVKGARLLREADVVVYAGSLVDRELVRTYAPDAEVCDSAAMTLEETTAVLAQAVADGKRAVRLHTGDPSIYGAIQEQMAELDRLGIAYAVVPGVTSAFAAAATLRQELTLPEVSQTVVITRLAGRTPVPEREKLTEIARIGATLVIYLSISMVEQVVAELLQGAYTPATPVAVVSRASWPDEHVVEGTLADIAGKVRDAGIGKQAIILVGDVLKARREGLKSKSLLYDKGFSHEFRKGIVT

SEQ ID NO: 2151 - protein, 457 aa, Klebsiella aerogenes
MDHLPIFCQLRQRDCLLVGGGDVAERKARLLLDAGANVTVNALDFTPQFQVWADSQMLTLVQGEFIPSLLDNCWLAIAATDDETVNQQVSEAAEARRIFCNVVDAPRQASFIMPSIIDRSPLMVAVSSGGTSPVLARLLREKLESILPLHLGQLARYAGHLRARVKQQFATVGERRRFWEKLFVNDRLAQSLANDDRQAVADTTEQLLTEPLEHRGEVVLVGAGPGDAGLLTLKGLQQIQQADVVVYDRLVSDDIMNLVRRDADRVFVGKRSGYHCVPQEEINQILLREAQKGRRVVRLKGGDPFIFGRGGEELETLCEAGIPFSVVPGITAASGCSAYSGIPLTHRDFAQGVRLVTGHLKTGGELDWANLAVEKQTLVFYMGLNQAPAIREKLIAHGMAEDMPAAIVENGTAVTQKVVSGTLGQLDILAQQMASPALIIVGRVVGLRDKLNWFSNH

SEQ ID NO: 2152 - protein, 471 aa, Klebsiella aerogenes
MDYLPLFAELKQRPVLVIGGGEIAERKIKFLLRAQAQVQVVAETLSPALADLAARQALSWRATAFSDSLVDDVFLVIAATEDEALNQRVFAAANARYRLVNVVDNQALCSFVFPSIVDRSPLLVAISSSGKAPVLSRILREKIEALLPTNLGRLAESASYWRNHLKTRLTTTEARRRFWERVFTGRFASLMVAGNSAEAEKALQDELDKPERETGEIILVGAGPGDAGLLTLRGLQAIQQADVVFHDHLVTQPVLELVRRDAELICVGKRAGEHSVPQHETNQLLVEAAKAGKTVVRLKGGDPFIFGRGAEELQAAAEAGIPFQVVPGVTAAAGATAYAGIPLTHRDYAQSAVFVTGHYKPDSAPFDWSLLAKSQQTLAIYMGTMKAAEISAQLIAHGRDSDTPVAVISRGTRDDQQTITGTLQQLEHLAKDAPMPSLLVVGEVVQLHQQLAWFQHTSSAEGFNASVVNLA

SEQ ID NO: 2153 - protein, 271 aa, Ralstonia solanacearum
MKVYFIGAGPGAADLITLRGARILGSVPMVLYAGSLVPPEMLQHCRPDAELHDTATLSLDEQEACYRRAQAEGKDVARLHSGDPAIYGATAEQMRRLEALGIDYEIVPGVSSFTAAAAVLGAELTRPAVSQSIVLTRVSGRASAVPELESVARFAEHQATMCIFLSGQRLKQTVADLLLHYPADTPVALVRRATWPDQAIHRCTLGTLLLEVSQKDWLLTTLLLVGRALSREGGVESSLYAAGFTHIFRDGTDRKAPRRRPRKAPAGKETA

SEQ ID NO: 2154 - protein, 278 aa, Pseudomonas stutzeri
MDQPLTFPAALSAAFAPGEVALVGAGPGDPGLLTMRAWSLLQQADAVVYDRLVSDGLMALLPASCSRHYVGKTSGYHSLPQPEINQLLVDLALQNKRVVRLKGGDPFIFGRGAEELEFLLQRGIDCQVVPGITAAAGCSAYAGIPLTHRDLAHSCQFITGHLQTNGELHLPWDALAQGGQTLVFYMGLASLGEISRNLISAGLPVDTPAALIGNGTRENQQVVRCTLRQLPSMADEQHLTPPTLTVIGRVVSLFADRQVEHPARLHGDPAPKAEALCN

SEQ ID NO: 2155 - protein, 464 aa, Azotobacter vinelandii
MDYLPLFHNLKGRRVLLVGGGEIALRKARLLADAGAVLRVVAPQIEAALAEQVREGGGDCLPRGYAQGDLDGCVLAIAATDDPLLNARVSRDAHEHGVPVNVVDSPELCSVIFPAIVDRSPLLVAVSSGGDAPVLARLMRARIETWIPAGYGRLAGLARRFRAQVKRLLPDVRQRRVFWEEVFQGPIAERLLSGQETEAERLLEAKLAGAAPKALGEVYLVGAGPGDPDLLTFRALRLMQQADVVLYDRLVAPAIVELCRRDAERIYVGKRRAEHALPQEQINRLLVRLAGEGKRVLRLKGGDPFIFGRGGEEIEELAAHGIPFQVVPGITAASGCAAYAGIPLTHRDHAQSVRFVTGHLKDGSFDLPWADLVAPAQTLVVYMGLVGLPVICQRLIEHGRAAATPVALIQQGTTPQQRVIVSTLAELPARVEREQVSAPTLLIVGEVVRLRDKLAWFEGRQSAD

SEQ ID NO: 2156 - protein, 245 aa, Azotobacter vinelandii
MSAKVWLIGAGPGDPELLTLKAVRALGEAEVVLIDDLVNPAVLEHCPQARVIGVGKRGGCRSTPQDFIHRLMLRYARQGKCVARLKGGDPCIFGRGSEEADWLASHGIATEIVNGITAGLAGATQCGIPLTLRGVARGVTLVTAHTQDDSSLNWQALARSGTTLVVYMGVAKLAEIRDGLLAGGMRADMPVAMIENASLPQQRECRSSLGAMQWDAAAFSLRSPAILVIGEVAAVAQAQLMARTA

SEQ ID NO: 2157 - protein, 254 aa, Mesorhizobium loti
MTVHFIGAGPGAADLITLRGARLLASCPVCLHAGSIVAPELLQHCAPGTKLIDTAPMSLDEIEAAYVDAHKSGHDVARLHSGDLSVWSAVAEQIRRLEKHDIPYTLTPGVPSFAAAAAALRLELTIPEVAQSLVLTRVSGRASKMPPGETLAGFGRTGATLAIHLAIHAIDRVVAELTPHYGGDCPVAIVFRASWPDERVLTGTLETIEAQLAADPMERTAIIFVGRSLAAEGFGESSLYDAHYQRRFRGRDGL

SEQ ID NO: 2158 - protein, 279 aa, Sinorhizobium meliloti
MTDMFAGLPELEPGSVWLVGAGPGDPGLLTLHAANALRQADVIVHDALVNGDCLKLAKASAALEFAGKRGGKPSPKQRDISLRLVELAREGKRVLRLKGGDPFVFGRGGEEALTLVEHRIPFRIVPGITAGIGGLAYAGIPVTHREVNHAVTFLTGHDSSGVVPDRINWEGIAKGSPVIVMYMAMKHIGQISANLMAAGRSPDEPVAFVCNAATPEQVVLETTLSSAEADVTASGLEPPAIVVVGEVVRLRASLDWLGALDGRALAPDPFSSRILRNPA

SEQ ID NO: 2159 - protein, 485 aa, Sinorhizobium meliloti
MSQKLSVFPAFFRVAQKSVAVFGNGDEAFAKLRLLLNTEARIVAYADRPEPAFDAFLDANNIETVREPFGAHQVEGSVLVFAATGDAALDRVVVTAARERKIPANAVDQPDYCDFLTPALVNRAPVAVAIGTEGAGPVLAQMIRAQIDQLLSPSLGIVASLAANYRDAVERLVPRGVARRVFWRRFFSGPVADQVALGDLASARREASRLLDAAGGVAGHVWLVGAGPGAEDLLTLRAQRVMMEADAIVYDALVPQAIVDMGRRDAERLSVGKRKGCHTKSQDEINQLLVKLAGEGKRVVRLKSGDPLVYGRAGEEMAALREAGISYEVVPGITSAFAAAADFELPLTLRGVASSLVFTTGHDLTGSVLPDWARLAVSGATIAVYMGRTVAASVASRLMQAGLPQDTTVAVIENASRAERRLLHGTLRDLPDLEARTELDGPVMVIIGEAVAGANFERSEPLAAGRTKYSGASKVSAKRTEQIWN

SEQ ID NO: 2160 - protein, 360 aa, Sinorhizobium meliloti
MTALATLPLFWPLNGKQAVVAGGSDAAAWKAELLAACGAEVHVYAPRASLSDVFLDLLARGPAHEHGRLIHHDQAWHVGDFRDAAIAVADCDEQSDAEAFFLAGRSAGVPVNVIDKPAFCAFQFGSIVNRSPVVVAISTDGAAPILAQAIRRRIEALLPPALKHWATVAQAIRDRVNARLKPGSARRAFWERFVDRVFLDAPEEGVETRLMAEVDRLVTRPSAIGRVTIVGAGPGDAELLTLKAVRALQAADVILFDEWIPDDVLELARREARRVPVTPSAKGRSRDIAALVGEGKRVVRLRSGNPMALAGAVEEIAALEGLGVPVEIVPGVEAAPCRSDVIQVVFRRREVSQPGLRAAH

SEQ ID NO: 2161 - protein, 252 aa, Sinorhizobium meliloti
MTVHFIGAGPGAADLITVRGRDLIGRCPVCLYAGSIVSPELLQYCPPGARIIDTAPMSLDEIEAEYVRAAEAGEDVARLHSGDLSVWSAVAEQIRRLEKNGIAYTMTPGVPAFAAAAATLGRELTIPAVAQSLVLTRVSGRASPMPNSETLAAFGATGSTLAIHLAIHALGQVVEELTPLYGADCPVAIVVKASWPDERVVRGTLGDIAARVAAEPIERTALIFVGPGLEASDFRESSLYDPTYQRRFRGRD

SEQ ID NO: 2162 - protein, 251 aa, Sinorhizobium meliloti
MSGVESGRLIGVGTGPGDPELLTVKAVRALGEADVVAYFAKAGRNGNGRAVVEGLLKPGMTELPLYYPVTTEIDKDHDAYKRQITDFYDASAEAVAAHLLAGRTVAVLSEGDPLFYGSYMHLHVRLAGRFPAEVIPGITAMSGCWSLAGLPLVQGDDVLSVLPGTMGEGELRRRLADTQAAVIMKVGRNLPKIRRALAAAGRLEAAVYVERGTMRNAAMVPLGEKPDDEAPYFSLVLVPGWKDRPGSEGRA

SEQ ID NO: 2163 - protein, 95 aa, Glycine max
  unsure (1)..(95): unsure at all Xaa locations
IRRAAFFVFGRLVSNDVLDLVGPDARLLYVGKTAGYHSRTQEEIHGLLLSFAEAGATGVRLKGGDPLLFGRGWEKEVFLLQSGQRVAMVFILLQX

SEQ ID NO: 2164 - protein, 280 aa, Pseudomonas denitrificans
MIDDLFAGLPALEKGSVWLVGAGPGDPGLLTLHAANALRQADVIVHDALVNEDCLKLARPGAVLEFAGKRGGKPSPKQRDISLRLVELARAGNRVLRLKGGDPFVFGRGGEEALTLVEHQVPFRIVPGITAGIGGLAYAGIPVTHREVNHAVTFLTGHDSSGLVPDRINWQGIASGSPVIVMYMAMKHIGAITANLIAGGRSPDEPVAFVCNAATPQQAVLETTLARAEADVAAAGLEPPAIVVVGEVVRLRAALDWIGALDGRKLAADPFANRILRNPA

SEQ ID NO: 2165 - protein, 253 aa, Pseudomonas denitrificans
MTVHFIGAGPGAADLITVRGRDLIGRCPVCLYAGSIVSPELLRYCPPGARIVDTAPMSLDEIEAEYVKAEAEGLDVARLHSGDLSVWSAVAEQIRRLEKHGIAYTMTPGVPSFAAAASALGRELTIPAVAQSLVLTRVSGRASPMPNSETLSAFGATGSTLAIHLAIHALQQVVEELTPLYGADCPVAIVVKASWPDERVVRGTLGDIAAKVAEEPIERTALIFVGPGLEASDFRESSLYDPAYQRRFRGRGE

SEQ ID NO: 2166 - protein, 245 aa, Pseudomonas denitrificans
MSGVGVGRLIGVGTGPGDPELLTVKAVKALGQADVLAYFAKAGRSGNGRAVVEGLLKPDLVELPLYYPVTTEIDKDDGAYKTQITDFYNASAEAVAAHLAAGRTVAVLSEGDPLFYGSYMHLHVRLANRFPVEVIPGITAMSGCWSLAGLPLVQGDDVLSVLPGTMAEAELGRRLADTEAAVIMKVGRNLPKIRRALAASGRLDQAVYVERGTMKNAAMTALAEKADDEAPYFSLVLVPGWKDRP

SEQ ID NO: 2167 - protein, 101 aa, Oryza sativa
  unsure (1)..(101): unsure at all Xaa locations
ARLTLKALRAIQAEDLGLYNRLVSNDQVDLVIEGARLLYEGKTVGSHSRTQEEIDELLLNLEEAGANEPRMKGGHPLLLGRSAEEMDLLQQQRLRVDFMPX

SEQ ID NO: 2168 - protein, 197 aa, Zea mays
  unsure (1)..(197): unsure at all Xaa locations
XEIIPGITSASGIAAELGIPLTHRGVATRVAGRAGHSRNGGTDPLYVAGNAADPDTTLVVYMGLSTLASLAPKLMKHGLPPDTPAVAVERGTTPQQRMVFALLKDLVDEVKSADLVSPTLIIIGKVVSLSPFWVESSEHDALKIESSYASEAXDDNTFSXILVIGQYIRNAISQIXAHRFDLVYTTFQEAWILNDGX

SEQ ID NO: 2169 - protein, 475 aa, Neisseria meningitidis
MNYFPIFANLAGRPVLVVGGGAVAARKISLLLKAGAEVRVAAKHLNAELSALAAENKILWLAEEFRAEHIRTVFLIIAASSDQALNRRVFHLAESCQKPVNVVDDRDHCSFIFPSVIDRNPVQIAVSSSGSAPVLARLLRERLEALLPPSLGDMAEISGRWRDAVKGKLKSVTERRRFWEKQFNGRFAALVKNRQNTLAERELAGQLEQSRQNDQGGSVSLVGAGPGDAGLLTLKGLQEIQQADVVLYDALVSDGILSLVRRDAERIFVGKRARGERTPQEDTNALMVRLAREGRRVVRLKGGDPFVFGRGGEELETLARHQIPFSVVPGITAAVGATAYAGIPLTHRDYAQSAVFVTGHRKADAPDIEWQTLARSRQTLVIYMGALKAALIAERLQQHGRSPDTPAAVISQGTLPAQKTATGTLANLAELAETAPNPALIVIGEVVGLHEKLAWFGENGEGENRVGQTYPALGD

SEQ ID NO: 2170 - protein, 275 aa, Novosphingobium aromaticivorans
MRHCCQCQPSGNPDMTVHFIGAGPGAPDLLTLRGRDLIAGSPVCLYAGSLIPVAVLDHCPPGARIVNTAPLELDQIMAEIAAAHAAGHDVARLHSGDLSVWSAMGEQLRRLRALDIPFTITPGVPAFAAAAAALEAELTLPALAQSLVLTRTPGRASTMPPAESLANFAVTGATLAIHLSVHNLAQVVADLTPAYGADCPVAVVWRASWPDQRIVRATLDTIEQAIAGSMERTALILVGRVLAAQDFAESSLYAPGYDRRFRPQDATSRFGGAAE

SEQ ID NO: 2171 - protein, 251 aa, Thermoplasma volcanium
MYIVGAGPGDPELLTLKAYNILRKAGVVIYAGSLVNPEILKYANPSAEIYNSAEMDINKIMDISIILIAEGKDVVRLHSGDPHLYGALMEQLSLLREKGIDFEVIPGVSVLTSAAASLGIELTMDNISQSVIIARGSLRIPVPEKQSILALSSHQSTMVIFTAIHIIEKVVEDLLKGGYPKDTPVGVVYHSTWKDEKVIRGTLEDIVQKVKDNRIYRTAIIVVGKVVNPERVYSTKLYDPSYTHSFRRGSS

SEQ ID NO: 2172 - protein, 252 aa, Thermoplasma volcanium
MKKFYIVGAGPGEPDLITVMGLEAIRESQVVFKDALVSDDLIEKYCTNKVQVNVGHRQGTSSDVGLKIILNYIKENANNFDVAVHLKSGDPGIFSRLSEEIRAVSTLGFDVIVVPGITSAIGVPTFYGIPLSVKDVSRHIAIVTASISEGKFNASSLGDALKYADVVVVLMGSRFLKQIARLSQSILGHSDMLIVENGTLPSAKISLLKDAENLDEHYCSKPSIIILGRKLNEILSLGGGFDEYRVYAGYNK

SEQ ID NO: 2173 - protein, 457 aa, Escherichia coli
MDHLPIFCQLRDRDCLIVGGGDVAEPKARLLLDAGARLTVNALAFIPQFTAWADAGMLTLVEGPFDESLLDTCWLAIAATDDDALNQRVRQAAEARRIFCNVVDAPKAASFIMPSIIDRSPLMVAVSSGGTSPVLARLLREKLESLLPLHLGQVAKYAGQLRGRVKQQFATMGERRRFWEKLFVNDRLAQSLANNDQKAITETTEQLINEPLDHRGEVVLVGAGPGDAGLLTLKGLQQIQQADVVVYDRLVSDDIMNLVRRDADRVFVGKRAGYHCVPQEEINQILLREAQKGKRVVRLKGGDPFIFGRGGEELETLCNAGIPFSVVPGITAASGCSAYSGIPLTHRDYAQSVRLITGHLKTGGELDWENLAAEKQTLVFYMGLNQAATIQQKLIEHGMPGEMPVAIVENGTAVTQRVIDGTLTQLGELAQQMNSPSLIIIGRVVGLRDKLNWFSNH

SEQ ID NO: 2174 - protein, 457 aa, Escherichia coli
  unsure (1)..(457): unsure at all Xaa locations
MDHLPIFCQLRDRDCLIVGGGDVAERKARLLLDAGARLTVNALAFIPQFTAWADAGMLTLVEGPFDESLLDTCWLAIAATDDDALNQRVXXAAEARRIFCNVVDAPKAASFIMPSIIDRSPLMVAVSSGGTSPVLARLLREKLESLLPLHLGQVAKYAGQLRGRVKQQFATMGERRRFWEKLFVNDRLAQSLANNDQKAITETTEQLINEPLDHRGEVVLVGAGPGDAGLLTLKGLQQIQQADVVVYDRLVSDDIMNLVRRDADRVFVGKRAGYHCVPQEEINQILLREAQKGKRVVRLKGGDPFIFGRGGEELETLCNAGIPFSVVPGITAASGCSAYSGIPLTHRDYAQSVRLITGHLKTGGELDWENLAAEKQTLVFYMGLNQAATIQQKLIEHGMPGEMPVAIVENGTAVTQRVIDGTLTQLGELAQQMNSPSLIIIGRVVGLRDKLNWFSNH

SEQ ID NO: 2175 - protein, 251 aa, Prochlorococcus marinus subsp. pastoris str. CCMP1378
MVRKISFIGVGPGDPDLLTIKALKKIESADVIFWADSLIPEKIINFSLKGSEKIKTSTLTLEKITSIMIERFNEGKTVIRLHDGDPCLYGAVKEQLEILRQENIETEVIPGVSAFQVAAAYHQAELTIPDITQTIILTRAGGRTGMPEKESLKDLAKHKSSLCLYLSARHIKSSQKTLLEFYPPETKVIVGYRVSWDDGWTSLIELKDMEKFTLEKELIRTTIYIVSPAINTIANRSNLYNPSYKHLFRGK

SEQ ID NO: 2176 - protein, 259 aa, Nostoc punctiforme
MNRTEKQENEYLGKVYLVGAGPGDPGLLTLKAKGLLECADVVIYDALVSPAILAMINPQAEQINAGKRRGKHSLFQEETTQLLIDKAQDRAIVVRLKGGDPFIFGRGGEEMEELVNAGISTEVVPGITSGIAAAAYAGIPLTHRLYSSSVTFVTGHEAAGKYKPKVNWNAIAHGSETIVIYMGIHNLPYIVEQLSAAGLDVETPIALVRWGTRPEQEELIGTLKTIVEQVEQTGFGAPAIAVIGQVVNMHSILSSCRPV

SEQ ID NO: 2177 - protein, 529 aa, Nostoc punctiforme
MTKIEERGKVYLVGAGPGDVAYLTVKAYNLLAAAQVLVYDALVDAQLLQCVPPNCLKLDVGKRGGKPSTTQTEINKLLVKYCQQGKQVVRLKSGDPLIFGRCTSEIEALKASGCDFELIPGISSALAAPLFAGIPLTDPVLSRCFAVLTAHEPEVLDWEALSRLETLVILMGGQHLPEIVHQLVQHGRSHLTPIAIIRWAGTPRQKIWTAQLGNILEQTTGLSLSPAVIVVGEVVGLHKYLQPEKIDCQDSTTAQTPMLNNLSASPEPLTGKTILVTRSVGQSSTFSDRLTTLGATVIEMPTLEIGPPSSWEALDDAIAHLSQFDWLILTSSNGIDYFFERLIAQGKDTRALAGVKIAVVGEKTANSLKQYSLQPDFIPPNFVADSLIENFPEKLDGKKVLFPRVESGGREILVKELTLKGAKVIEVAAYQSCCPSSIPSGAELALQNHNVNVITFASSKTVQFFYQLTEKIFSQNSDVSQLLENVCIASIGPQTSKTCHDLFGRVDVEAQEYTLDGLTQALIIWATNY

SEQ ID NO: 2178 - protein, 274 aa, Nostoc punctiforme
MGSSKSEYTENLSYKKTLYAIEPSVYIVGAGPGDPDLLTVKAQKLLAVADVILFADSLIPEQILELCRKDAEIIRTANQTLEEILPIMIDRVRSQQKSLVRLHSGDPSLYSAIHEQMHLLAEANIPFEVIPGISAFQAAAAKLKVELTVPGLVQTIILTRISGRTEVPANEELASLAAHQASLCLYLSARHVENAQAKLLEHYPAETPIAICFRIGWPDEKIKVVPLNEMAECTHKEKLIRTTLYIISPALSTAKGRSRLYHPEHSHLFRSSHN

SEQ ID NO: 2179 - protein, 288 aa, Halobacterium sp. NRC-1
MPEDATPQDAIDAASQQRQRGRDARVYDHTAGDTQAGIPFIGAGPGDPGLLTVTGKELVEDADLVVHAGSLVNSELLDEYCADAETVSSVGKDLEALIPLMRDAHEDGDTVVRLHSGDPAIYGAALEQMDALEQEGVPTYIVPGVTSAFASAATLRTQLTLNGTANHVAFTRPQGKTLDAEDDHIAEFVEMGDVTTCIYLGTHAIPDVMERLLADGHDPETPVTVVYHASWPDEDVIEGTIETIGDRVEDAGYRASALAVIGDAGAGAGYERSYLYGDWANRGSDTDQ

SEQ ID NO: 2180 - protein, 299 aa, Vibrio cholerae
MPATDQLRIKIMAQDAVTPLRKTPRLAVVEGSGYVRAARSQLQAGEVALVGAGPGDPELLTVKALSYLQQADVVLYDYLVSDEIMALIPSETILVCVGKRAGHHSVPQEKTNQLLVDFARQGYRVVRIKGGDPFMFGRGGEELEVLFEAGVKFQVVPGITAAAGATAYAGIPLTHRDYAQSALFVTGHLKAQAEDLDWSTLARGKQTLVIYMGLSNAAAIAEQLQLHGRQASTPVAIIERGTQVNQQVLIGTLQTLPSLASQAQSPALIVVGEVVALAAKLHWFGEQGATQQLDAAQSA

SEQ ID NO: 2181 - protein, 251 aa, Prochlorococcus marinus str. MIT 9313
MSRISIVGAGPGATDLLTLRAAEHLKQAEVLVWTDSLVSPDIAALAPESCERIRTSSMTLEEVLPLLVNRAQAGKRVVRLHDGDPCLYGALSEQICGLADAGIEVEVVPGLSAYQATAAALNAELTIPGLVQTIVLSRAGGRTGVPERENLQHLASLGASLCLYLSARHVEEVQATLLQHYSAETPVAIGYRVSWPDQWLSVVPLKQMATTSREHELIRTTLYVVSPALAAGRQRSKLYSPSHKHLFRQKG

SEQ ID NO: 2182 - protein, 266 aa, Mycobacterium tuberculosis CDC1551
MAPTAAGHPVVGDQAMTVYFIGAGPGAADLITVRGQRLLQRCPVCLYAGSIMPDDLLAQCPPGATIVDTGPLTLEQIVRKLADADADGRDVARLHSGDPSLYSALAEQCRELDALGIGYEIVPGVPAFAAAAAALKRELTVPGVAQTVTLTRVATLSTPIPPGEDLAALARSRATLVLHLAAAQIDAIVPRLLDGGYRPETPVAVVAFASWPQQRTLRGTLADIAARMHDAKITRTAVIVVGDVLTAEGFTDSYLYSVARHGRYAQ

SEQ ID NO: 2183 - protein, 568 aa, Mycobacterium tuberculosis CDC1551
MTIMTRGRKPRPGRIVFVGSGPGDPGLLTTRAAAVLANAALVFTDPDVPEPVVALIGTDLPPVSGPAPAEPVAGNGDAAGGGSAQEHGRAASAVVSGGPDIRPALGDPADVAKTLTAEARSGVDVVRLVAGDPLTVDAVISEVNAVARTHLHIEIVPGLAASSAVPTYAGLPLGSSHTVADVRIDPENTDWDALAAAPGPLILQATASHLAESARSLIDHQLAESTPCVVTAHGTTCQQRSVETTLQGLTDPAVLGATDPACSANGRDSQAGPLIVTIGKTVTSRAKLNWWESRALYGWTVLVPRTKDQAGEMSERLTSYGALPVEVPTIAVEPPRSPAQMERAVKGLVDGRFQWIVFTSTNAVRAVWEKFGEFGLDARAFSGVKIACVGESTADRVRAFGISPELVPSGEQSSLGLLDDFPPYDSVFDPVNRVLLPRADIATETLAEGLRERGWEIEDVTAYRTVRAAPPPATTREMIKTGGFDAVCFTSSSTVRNLVGIAGKPHARTIIACIGPKTAETAAEFGLRVDVQPDTAAIGPLVDALAEHAARLRAEGALPPPRKKSRRR

SEQ ID NO: 2184 - protein, 251 aa, Mycobacterium tuberculosis H37Rv
MTVYFIGAGPGAADLITVRGQRLLQRCPVCLYAGSIMPDDLLAQCPPGATIVDTGPLTLEQIVRKLADADADGRDVARLHSGDPSLYSALAEQCRELDALGIGYEIVPGVPAFAAAAAALKRELTVPGVAQTVTLTRVATLSTPIPPGEDLAALARSRATLVLHLAAAQIDAIVPRLLDGGYRPETPVAVVAFASWPQQRTLRGTLADIAARMHDAKITRTAVIVVGDVLTAEGFTDSYLYSVARHGRYAQ

SEQ ID NO: 2185 - protein, 565 aa, Mycobacterium tuberculosis H37Rv
MTRGRKPRPGRIVFVGSGPGDPGLLTTRAAAVLANAALVFTDPDVPEPVVALIGTDLPPVSGPAPAEPVAGNGDAAGGGSAQEHGRAASAVVSGGPDIRPALGDPADVAKTLTAEARSGVDVVRLVAGDPLTVDAVISEVNAVARTHLHIEIVPGLAASSAVPTYAGLPLGSSHTVADVRIDPENTDWDALAAAPGPLILQATASHLAESARSLIDHQLAESTPCVVTAHGTTCQQRSVETTLQGLTDPAVLGATDPACSANGRDSQAGPLIVTIGKTVTSRAKLNWWESRALYGWTVLVPRTKDQAGEMSERLTSYGALPVEVPTIAVEPPRSPAQMERAVKGLVDGRFQWIVFTSTNAVRAVWEKFGEFGLDARAFSGVKIACVGESTADRVRAFGISPELVPSGEQSSLGLLDDFPPYDSVFDPVNRVLLPRADIATETLAEGLRERGWEIEDVTAYRTVRAAPPPATTREMIKTGGFDAVCFTSSSTVRNLVGIAGKPHARTIIACIGPKTAETAAEFGLRVDVQPDTAAIGPLVDALAEHAARLRAEGALPPPRKKSRRR

SEQ ID NO: 2186 - protein, 262 aa, SYNECHOCOCCUS SP. WH 8102
MTNAEQTGTVYLVGAGPGDPELLTLKAHRLLSQCDALVYDSLVPREVLDLVPASCERRFVGKRRGHHSVPQPSTNAVLVEMAQKHSTVVRLKGGDPFLFGRGGEEAAYLAERNIPVQVVPGVTAGIAAPAYAGIPVTHRRAGSSVTFVTGHEEIDKRRPSVDWRALATASDGLVIYMGLHNLPRIAEELMAGGLAATTPVAVIQQGTVAGQRCLKATLVDVADQCRAEAFKSPSIVVVGEVIDQQVEACRPSPAAVTMPILF

SEQ ID NO: 2187 - protein, 268 aa, SYNECHOCOCCUS SP. WH 8102
MVVEAATTTASSVNQPLTHPVCFVGGGPGAADLLTLRAAERIRQADVLIWTDSLVCPQITALAPDHCERIRTSTLTLEEVIPLLIDRQRQGAKVVRLHDGDTAFYSAINEQICALNDADIPVEVVPGVSAYQAAAAGLSSELTIPGVVQTIVLGRAGGRTGVPPSEELDRLAGLGASLCLYLSARHIDDVQATLQRHYPDDTPVAIAYRVSWPDEWMSVVPLAQMAAASKERQLIRTTLYIISPALNGGQQRSRLYSPDHDHLFRQRH

SEQ ID NO: 2188 - protein, 485 aa, Bacillus halodurans
MNKQGKVYLVGAGPGDLRLMTLKGKDCLQKADVVLYDRLVNPLFLEWTKPEAELIYCGKLPDRHLLRQEAINELLIEKGRQGKVVVRLKGGDPSVFGRVGEEADVLKEAGLPYEIVPGITAGIGASTYAGVPVTHRDYGASFTVVTGHDKSPSGQPLIDWHALANGIDTIAFYMGVSNLPYITEQLIAHGRDPETCVLLIQWGTIGKQRVVEGRLNTIVSRVKEEGITNPAITLVGNIGKLRTEKSWFESQRLFGHQVLIGRTTAEEGGLAKTLMEAGAEVFEFPRWHVTSKPWEVTPGEVQEADHLVFTSPHSVHFFFESLTEQRMDIRHIRGSFFAASKKSLKIIRSFACTAALLQELPAGGKTIIFGDEENEMKQKYPFEEASYVSTHQKTLVPQSLRTCRRLLDEGRIETLVFPSAASVNAVIDGLEKCGESVGTLSQVKTVITFGPESSNAAKEAGFQVDIQLEAPSAQLLIETLEAVRV

SEQ ID NO: 2189 - protein, 457 aa, Salmonella enterica subsp. enterica serovar Typhi
MDHLPIFCQLRDRDCLIVGGGDVAERKARLLLEAGARLTVNALTFIPQFTVWVNEGMLTLVEGPFDETLLDSCWLAIAATDDDTVNQRVSEAAESRRIFCNVVDAPKAASFIMPSIIDRSPLMVAVSSGGTSPVLARLLREKLESLLPQHLGQVARYAGQLRARVKKQFATMGERRRFWEKFFVNDRLAQSLANADEKAVNATTEHLFSEPLDHRGEVVLVGAGPGDAGLLTLKGLQQIQQADIVVYDRLVSDDIMNLVRRDADRVFVGKRAGYHCVPQEEINQILLREAQKGKRVVRLKGGDPFIFGRGGEELETLCHAGIPFSVVPGITAASGCSAYSGIPLTHRDYAQSVRLVTGHLKTGGELDWENLAAEKQTLVFYMGLNQAATIQEKLIAFGMEANMPVALVENGTSVKQRVVHGVLTQLGELAQQVESPALIIVGRVVALRDKLNWFSNH

SEQ ID NO: 2190 - protein, 257 aa, Salmonella enterica subsp. enterica serovar Typhi
MSETFDPRCVWFVGAGPGDRELITLKGYRLLQQAQVVIYAGSLINTELLDYCPAQAERYDSAELHLEQIIELMAAGVKAGKTVVRLQTGDVSLYGSVREQGEELTRRGIDWQVVPGVSAFLGAAAELGVEYTVPEVSQSLIITRLEGRTPVPAREQLEAFASHQTSMAIYLSVQRIHRVAERLIAGGYPATTPVAVIYKATWPESQTVRGTLADISDKVRDAGIRKTALILVGNFLGKEYHYSRLYAADFSHEYRKA

SEQ ID NO: 2191 - protein, 501 aa, Nitrosomonas europaea
MRSLHHSGNIFNGSNDSLLVKFRCLYMDYLPVFLNIKQRDCLVVGGGEIAVRKIRLLLRAHARIHVVSPAISEELSNLLLQSPVITHTAESFRPDHLQDRALAIAATNDHEVNRAVSAAARKAGIPVNVVDNPDLCTFIMPSILDRSPIIVAVSSGGTSPILARLLRSRLEALIPSAYGRLAEYAARFRDKVRQRFIHQENRRFFWERMLQGPFAEMVFAGRDQAAQDYLSEALENSTDQFPTGEVYLVGAGPGDPDLLTFRAMRLMQQADVVIYDRLVSPAILDMVRQDATRIYVGKVRNQHTLPQTSINELLVKLAQEGKHVLRLKGGDPFIFGRGGEEIETLSQHHIPFQVVPGITAASGVASYAGIPLTHRDHAQSCVFVTGHLKDNTIQLDWPALARPNQTIVVYMGLLGVTELCRQLIAHGLQATTPAAIVQQGTTPNQRVLTGTLETLPDIIQQNPLKPPTLIIVGNVVKLHQKLAWFNSTSEPMGTSSGPGYP

SEQ ID NO: 2192 - protein, 192 aa, Ferroplasma acidarmanus
MLVKKYYDEGLDITRLHSGDPSIYGAINDEIQFFNSNGMEYEIIPGISSVFAAAASMGMELTSPGTTQSVILTRVPRRTEHFENEELDILASHKTALAIFLSASNARAVTEKLIKGGYKGDDRAVIAYRVSWPDQKIIETTINGLEHSLFENRINRQALIMVGGNISYNSDKKSYLYNPDFTHLFRKSSKKS

SEQ ID NO: 2193 - protein, 457 aa, Salmonella typhimurium LT2
MDHLPIFCQLRDRDCLIVGGGDVAERKARLLLEAGARLTVNALTFIPQFTVWANEGMLTLVEGPFDETLLDSCWLAIAATDDDTVNQRVSDAAESRRIFCNVVDAPKAASFIMPSIIDRSPLMVAVSSGGTSPVLARLLREKLESLLPQHLGQVARYAGQLRARVKKQFATMGERRRFWEKFFVNDRLAQSLANADEKAVNATTERLFSEPLDHRGEVVLVGAGPGDAGLLTLKGLQQIQQADIVVYDRLVSDDIMNLVRRDADRVFVGKRAGYHCVPQEEINQILLREAQKGKRVVRLKGGDPFIFGRGGEELETLCHAGIPFSVVPGITAASGCSAYSGIPLTHRDYAQSVRLVTGHLKTGGELDWENLAAEKQTLVFYMGLNQAATIQEKLIAFGMQADMPVALVENGTSVKQRVVHGVLTQLGELAQQVESPALIIVGRVVALRDKLNWFSNH

SEQ ID NO: 2194 - protein, 540 aa, Bacillus megaterium
MKGKLLVIGFGPGSFEHITQRAREAIQESDMIIGYKTYVELIQGLLTNQQIISTGMTEEVSRAQEAVKQAEAGKTVAVISSGDAGVYGMAGLVYEVLIEKGWKKETGVELEVIPGISAINSCASLLGAPVMHDACTISLSDHLTPWELIEKRIEAAAQADFVVAFYNPKSGRRTRQIVEAQRILLKYRSPDTPVGLVKSAYRDREEVVMTNLKDMLNHEIGMLTTVVVGNSSTFFYDDLMITPRGYQRKYTLNQTEQPLRPHQRLRKEAEPWALDQEEAVKQSASAIEAVQNTREETAASRALAEEALQAILGESTSAVVHQPIESIFEVAVSPGLANKKFTPVQMTTLAEVVGEKGTMEYTPDHQIKLQIPTAHPDMIIEKLQAASFLLSPVGDVFTIKACDFCDGEKSDAIPHTEELQKRLGGMDMPKELKLGINGCGMACYGAVQEDIGIVYRKGAFDLFLGAKTVGRNAHSGQIVAEGIAPDDIVEIVENIIHEYKEKGHPNERFHKFFKRVKNVYGFDYQDITPKIKVEPAPCGD

SEQ ID NO: 2195 - protein, 423 aa, Magnetococcus sp. MC-1
MKAGKIYLVGLGPGAEAHMTARAREAIADADVVIGYTTYIRLVQPLLSHQQVVKKGMAEELDRCEEAIVFAKQGKKVALISSGDVGIYGMAGPTYEVLFKSGWSPDSGIAVEVVPGCTALSSCASLVGAPLGHDFCSISLSDLLTPWPVIAKRLNAAACSDFVIALYNPKSGRRTEQIVAAQKILLHHRSGKTPVAIVKSAYRPRQSVVMTTLKKMVDEEIGMLSTVLIGNGETFVKEGIMITPRGYADKYVDFTKEIKEGEQAGHSLSMGLTGWHEIVREHLRLHPKQSMQITSERFDVPMGEVLKAVSEAGDRPIPGRTVERIKRKALPGLLITMKQVRIRWVAGAAEGTITLQDATWAVSESEVQLVGPGTSVALPIDSIKGIWLSRSGSGKTLFMTDRFGAVLLRVQVTAQSALRVAGP

SEQ ID NO: 2196 - protein, 497 aa, Leptospira interrogans serovar lai str. 56601
MKKGRLNIVGIGPGNDEHITPAAFHAIQEADLVIGYVTYINLVKHQLVGKQVTQTGMTEEIDRAQEAVNTAKEGKIVTLVSSGDAGVYGMAGLVFEVLRKMGWKKEESPEIKIIPGITADSSCASLIGAPIIHDTARISLSDLLTPWSVIENRLKCAAQGDFVITLYNPASGRRQRQIVKASKIIKRHRSGDTPVALIKSAYRKQQNVFLSDLDNFLNYEIGMNTTVIVGSSNTFVYEGFMITPRGYTNKYSLEDASLKEGQKKGFSLRTIEDLKSNTNLEDTSLNLNVTKIRGAFIKKSTSIVSDQELSKSPASITNTDSSKIQSQDSSAIKAIKTLDLLSKIQKESSKKSHKQLEPGKKTLAYIGRLGGAILFKTLEKFYIIGKLKNSICFEEYGFQNPGENYNKYLELKIVDMEKVLNFPFEFSMFLPNQILPEEIYEKLVIHRNSSISERLLNYAYEKSERVFLNGQEYRDISWLGIIPLEVWNLVRGILLKC

SEQ ID NO: 2197 - protein, 609 aa, Thermosynechococcus elongatus BP-1
MLPLEPFQPIGAIATTAQGLAQLQRLGDAGIPLSIWVSPQLGSAHPQVPAYERPLAAHLQKHWCHYRAWIFALACGAVVRLISPLLTHKSQDPAVCVLAEDGQWIVSLLGGHGAGGDRLCQILSATIGATPILTGASGSQGYFAVDTWGTALGWQRGAGDWNAIASQQAQGKAVQVYQTCGSSLWRTGLSSDQPLEWVSTPPLENAVWITEKVLPASVTSGVAWHPRVLWLGIGCERGTSAALIQQAIDQTLAQGGLSPLAIAGLASIDRKADEVGLCQVAKAHDWPSRWFSAQELAPVTVPTPSAIVAAEMGTPSVAEAAAVLASGGGRLIVPKQIYRQEGERGAVTIAIAQSEREWIPRQGSLSLIGTGPGSLDQLTLAARSALLAADILVGYTLYLELLAPLRRPGQMVAAYAITQERQRAEAAIELAQWGLNVAVVSSGDCGIYGMAGLVLELLAAADITDLPVEVFPGVSAVNAAAARLGAPLMHDFCAISLSDRLTPWPVIKKRLQAAAEADFVTALYNPRSRDRQQQLVDAKAIFLEYRSPQTPVAIVRAAYRPEEHITLTTLGAFEPATVDMFSLVLIGNASTRRFQDWLITPRGYLGKEP

SEQ ID NO: 2198 - protein, 624 aa, Thermobifida fusca
MSAQRPSCSPTRHGVGDDALRGRGVAVDGPLGRRSHRDRQRPHRPIPPARADRLRRAPTSRDHRRARRVHRRGRIQRSPHVPPRRHPLPGGTWPPRRLGASRVRGQRSRAGGGMSSTPGRLYGVGLGPGDPEFITRKAARLIAEADVIAYYSGTHGRSIARSIAADVIPEGVIEEKLVYPVTTGTTDHPGGYEGAITEFYDASAQRLAAHLSQGRDVVVLCEGDPLFYGSYMYLHDRLASRFPTEIVPGVTSISAASAAAACPLVRRTDVLTILPGTLPPPELARRLADTDAAAVLKLGRRTFAGVREALAQAGRLEDAVYVERASMAEQRILPVGDVASDDVPYFSLILSSGDSTPRNRRPRGRVRAPQRTPAPHHPDSPAELLVVGLGPAGEQWLTPEAAQALANVDHVVGYGPYVDRVPVRPGQQRHSSGNTVELDRARFALDLALAGERVAVVSGGDAGVFGMASAVFEAAQDPRYADVPVRVLPGLTAVQAVAARAGAPIGGDFAVLSLSDRLKPWEVIEARLEAAARADLVLAIYNPASRSRRTQVARARDVLLRHRRDNTPVVVGRDVGREGESVEVTTLGKLDPEGIDMRCLLIVGSSSTSVTAAGAVWTPRFVAE

SEQ ID NO: 2199 - protein, 250 aa, Sulfolobus solfataricus
MKMGRLYIVGIGPGSKEQRTIKAQEVLEKSNVIIGYNTYLRLISDVLDGKKEVIGARMKEEIFRANTAIEKALESNNTVALVSSGDPQVYGMAGLVYDLIARRNLDLDVEVVPGVTAALAAAARLGSPLSLDFVVISLSDLLIPREEILHKVTKAAEADFVIVFYNLINENLLIEVMDIISKHRKPNTPVGLVKSAYRNNENIIITTLSSWKEYMNEISMSTTMIIGNSLTYRYKNYMITPRGYERKYEL

SEQ ID NO: 2200 - protein, 569 aa, Thermoplasma acidophilum
MLKMAMIDEIRRMLVVSISKRGSEVASRISTVMRSRGHIVDAFCRYHVDGCDILSDPVKVFLADNLRRYDAAVLVMSLPGFYRISADLMIEKNHDVPVVVVDDAGRFAVAASAGHAGGSDELAAYIAGIIDGQAVITDGIESGGRVSVEKIARSLLATIANPECIIPVNAAIANGEHVPVIFRSKKRSMLRRLFAESSDEKHGYAIVLADEPGEDANTCYLIPDDISIGIGFNSSADAELISACLERFLEEAGLAWEDIDYVSSIKDLPDVSIIRKGTRFVKFDPADIRDIDPEMLTHVSDKARDVFGVPGVAEPCAIRSLGPGSKIFLPFRSCGRSVTLAAARRRKLFSGHISFIGVGPSDPDLMTMKARRAIVASDIVAGYQMPLDIAKSMLWNKPKVVFHWKEQQRYVDEVIDLYEKGYRIAYLFTGDSCFTESELIRRFTSKCRNFDIIPGISSVQAASSITGMAIEMAGIISFHVTGDIEDRKADLLRTISERKRAIIIPRPYDFMPKDIAKFLTDRGFGDLPAVVIERATAADERRTASFLKDLIGSDFSDISIMVVGKPVIA

SEQ ID NO: 2201 - protein, 86 aa, Arabidopsis thaliana
MGFKTLPSLPQKLMDHGLPFDTPAAAVERGTTPLLNYVFAELKDFATEIQSAGLVSPTPIIIGKVVELSPLWPHCMKESSCLVETQ

SEQ ID NO: 2202 - protein, 256 aa, Mesorhizobium loti
MNALPNANSRGKLVGVGTGPGDPELLTLKAARALAEADVVAYFAKRGNNSNARAIVEARFRPDMLELPLLYPVTTEIDKDHDDYRSQITGFYEESAQKVAEHLEAGKMVAVLSEGDPLFYGSYMHLHVRLAHRFPTEVIPGITAMSGCWSQTGVPIVQGDDVLTVLPGTMSEFELTRRLADTDAAVIMKVGRNLPKIRRALEVTGKLTRAVYVERGTMAGSVSTKLADKRDDKAPYFAIILVAGWSGRPGALGAQS

SEQ ID NO: 2203 - protein, 120 aa, Glycine max
  unsure (1)..(120): unsure at all Xaa locations
MALALRAPLFQPLPASIPAPSTAFASTARPSSSAATATAICAAASPFTEATSSSRYRRDAWSYTAQDSSSSSSAAAAAAAAASGRRDDEIALQLPELRRLLEALRASRGKGLEGERGGGX

SEQ ID NO: 2204 - protein, 146 aa, Triticum aestivum
  unsure (1)..(146): unsure at all Xaa locations
MALALRAPRFQPLPASIPATSTAFASTARPSSSAATATAICATASPFTEATSSSRYRRDAWSYTAQDSSSSSSAAAAAAAAASGRRDDEIALQLPELRRLLEALRASRGKGLEGEGGGGGPXGRVALVGTGPGDPELLTLKAVRAX

SEQ ID NO: 2205 - protein, 168 aa, Thermoplasma volcanium
MYGALMEQLSLLREKGIDFEVIPGVSVLTSAAASLGIELTMDNISQSVIIARGSLRIPVPEKQSILALSSHQSTMVIFTAIHIIEKVVEDLLKGGYPKDTPVGVVYHSTWKDEKVIRGTLEDIVQKVKDNRIYRTAIIVVGKVVNPERVYSTKLYDPSYTHSFRRGSS

SEQ ID NO: 2206 - protein, 335 aa, Halobacterium sp. NRC-1
MSTDDTTTTDDSTSNCGASTTDTDDSTSSCGGSTTDTDDSASSCGGASGSSDSSGCGASSDTDSNEQTVSATVDDFDADPGSLVAVGLGPGRPEGMTDRATAALADAEHIVGYTTYVDLLPDEITDDAEEIYDTPMCGEVSRTEEAVDRALAGNHVAIIGSGDPNVYALAGLALEITESKGATPSMLDFEVVPGVPAAQSCGARLGAPLVNDSVSISLSDHLTPMPEIESRLHAVASEEFTISIYNPWSRKRRENFQKACEILLAHRDADTPVGIVHGAGREDEEVEITTLGELESYGETDLIDMTTTVVIGNAETYVFDDRMVTPRGYETKYDY

SEQ ID NO: 2207 - protein, 243 aa, SYNECHOCOCCUS SP. WH 8102
MPAGLTLVGVGPGDPELLTLAAVRAIEQADVVATPVAREGSASMAATIASHCISTKQRLLPLLFPMVSAARPRREAWHLAADALAAEVKAGQAVVLLCEGDASLFATGSYVLLALQQRHPDCPTRVIPGITAISAAAASAGWPLALQQDQLLVMPCPETPDALTGLLETAAQHPRVLALMKLGHRWAWVRPLLERQNMLSGALFAERVGWPDQIVRSAGDIEASERPYFSLLLVRQGWPDVLP

SEQ ID NO: 2208 - protein, 121 aa, Hordeum vulgare subsp. vulgare
TKSASETTEATKKMGSEAMGKVSETVQAGQDRAVEGKDQTASFLGEKTEAVKKTATETADAAKEKSTEAAQHVQDTAAEYTKDTPVAPKENVFQKAGGNIVGAATDAKDAVMNTLGMGGDK

SEQ ID NO: 2209 - protein, 298 aa, Deinococcus radiodurans
MFERDEHHFPVKRLLLLGALVGAGAYYLSREQNRKALDAKLAELGLKDAAQDVGSSVTKGWEKTKDAAQNAGSVIADKAQDVAGEVKSAVAGATAEIKDAGKEVADTAKDAGQNVGQNVKREAADLADQAKDKAQDVKADVSKAADQAKDKAQDVAQNVQAGAQQAAANVKDKVQDVKADASKAADQAKDKAQDVAQNVKQGAQQAASDAKDKVQDVKADASRAADQAKDKAQDVAQNVKQSAQDAKTDVDAKAKSWAFDLRTDAEAGKQGGQTGSTTNNAGTAGNTGMTGNTNTRKN

SEQ ID NO: 2210 - protein, 190 aa, Picea glauca
MAALSAKMPLLSISKGSTHHGVTAMRSATAAPRVFFRTIPRAGEYGRNAAEEARETADSTAEKSKRMAEEAKERAKGATYEAKEKAKGTTYEAKEKTKSAAEEAGNKAGEMKENAREKAEGLGQRAKETTSQATEKAQNIGDQPKQKVQEAWDMAKGTGQKVKETVVGKAEDTKETVEDKTESAKRKINE

SEQ ID NO: 2211 - protein, 164 aa, Pseudotsuga menziesii
MSDQYNYTKDSASDATERSKQYGQEKTGQAQGVAQSAQQKSAEAARVTQEKAAEASRAAREKASQATGTTKEKASQATGTTKEKASQATETTKGVGQSAAEKASQAAQAAKEKAQQGKEGTGSILQQAGEKVKGGTQTAMEALKHPLGGSDQGDQGDQGRDRNQ

SEQ ID NO: 2212 - protein, 164 aa, Pseudotsuga menziesii
MSDQYNYTKDSASDATERSKQYGQEKTGQAQGVAQSAQQKSAEAARVTQEKAAEASRAAREKASQATGTTKEKASQATGTTKEEASQATETTKGVGQSAAEKASQAAQAAKEKAQQGKEGTGSILQQAGEKVKGGTQTAMEALKHPLGGSDQGDQGDQGRDRNQ

SEQ ID NO: 2213 - protein, 153 aa, Pseudotsuga menziesii
MSDQYNYTKDSASDATERSKQYGQEKTGQAQGVAQSAQQKSAEAARVTQEKAAEASRAAREKASQATGTTKEKASQATETTKGVGQSAAEKASQAAQAAKEKAQQGKEGTGSILQQAGEKVKGATQTAMEALKHPLGGSDQGDQGDQGRDRNQ

SEQ ID NO: 2214 - protein, 153 aa, Pseudotsuga menziesii
MSDQYNYTKDSASDATERSKQYGQEKTGQAQGVAQSAQQKSAEAARVTQEKAAEASRAAREKASQATGTTKEKASQATETTKGVGQSAAEKASQAAQAAKEKAQQGKEGTGSILQQAGEKVKGGTQTAMEALKHPLGGSDQGDQGDQGRDRNQ

SEQ ID NO: 2215 - protein, 474 aa, Betula pendula
MASSREFKEKRAEAAAKLAASDLEDVKREREYEEQAKMEREELSLQQQQEDRPGVIGSVLKAVHETYEHAKEAVVGKTEETAESTRESGENAAEKARKTKDSAAEKTRETKKCAAEKAKEYKDYTAEKARETTEKARETKDSAAEKARETKDSAAEKAKEYKDYTAEKTRETRESAKEKAKEAAEKAKETKDSALGKAEEYKDYAAEKAKEAKDKTVGKASEYKDYAAEKAKETKDSALGKAEEYKDYTAEKEKEVKDKTVGKAGEYKDYAAEKAKETKDYTAEKTIEGKDTTLSKLGELKESAADAARRAMGFLSGKKDEVTQKTEETKEATKEKLSEAEEEARRKMEELKVRGEENKDDADRKDREDNKVNEADRGTAATANIFSSLPSVTEAIKRKLTQPSDVVDETRAAREHGSTGRKEAGKVVVDVEETRPGYIAAKLKESDQMAGQTFNDPGRRDDEGGIRLDRQGKM

SEQ ID NO: 2216 - protein, 136 aa, Gossypium hirsutum
MASHEQSYKAGRAEGRAHEKGEQMKESMKEKAEAAKQKTMETAEAAKQKTMETAEAAKQKTRGAAETTNDKTKQTAGAARGKAEETKETSGGILQQAGEKVRNAAQGATDAVKHTFGMADADEDEHNYPATVTRKD

SEQ ID NO: 2217 - protein, 225 aa, Arabidopsis thaliana
MASNQQSYKAGETRGKAQEKTGQAMGTMRDKAEEGRDKTSQTAQTAQQKAHETAQSAKDKTSQTAQAAQQKAHETAQSAKEKTSQTAQTAQQKAHETTQAAKEKTSQAGDKAREAKDKAGSYLSETGEAIKNKAQDAAQYTKETAQGAAQYTKETAEAGRDKTGGFLSQTGEHVKQMAMGAADAVKHTFGMATEEEDKEHYPGSTTTTTATTRTTDPTHQTYQRK

SEQ ID NO: 2218 - protein, 225 aa, Arabidopsis thaliana
MASNQQSYKAGETRGKAQEKTGQAMGTMRDKAEEGRDKTSQTAQTAQQKAHETAQSAKDKTSQTAQAAQQKAHETAQSAKEKTSQTAQTAQQKAHKTMQAAKEKTSQAGDNVREGKDKAGSYLSETGEAIKNKAQDAAQYTKETAQGAAQYTKEAAEAGRDKTGGFLSQTGEHVKQMAMGAADAVKHTFGMATEEEDKEHYPGSTTTTTATTRTTDPTHQTYQRK

SEQ ID NO: 2219 - protein, 169 aa, Arabidopsis thaliana
MASHQEQSYKAGETRGKAQEKTGEAMGTMGDKTQAAKDKTQETAQSAQQKAHETAQSAKDKTSQAAQTTQERAQESKDKTGSYMSETGEAIKNKAHDAAEYTKETAEAGKEKTSGILGQTGEQVKQMAMGATDAVKHTLGLRTDEGNKEHVSSAPSTTTTTTTRETQRK

SEQ ID NO: 2220 - protein, 226 aa, Brassica napus
MASNQQSYKAGETKRKTQEKTGQAMGAMRDKAEEGKDKTSQTAQKAQQKAQETAQAAKDKTSQAAQTTQQKAQETAQAAKDKTSQAAQTTQQKAHETTQSSKEKTSQAAQTAQEKARETKDKTGSYLSETGEAVKQKAQDAAQYTKETAQNAAQYTKETAEAGKDKTGGFLSQTGEHVKQMAMGAADAVKHTFGMATEEEDREHYPGTTTCTTQSTDPTRHTYERK

SEQ ID NO: 2221 - protein, 280 aa, Brassica napus
MASNQQSYKAGETRGKTQEKTGQAMGAMRDKAEEGKDKTSQTAQKAQQKAQETAQAAKDKTSQAAQTTQQKAQETAQAAKDKTSQAAQTTQQKAQETAQAAKDKTSQAAQTTQQKAHETTQSSKEKTSQAAQTAQEKARETKDKTGSYLSETGEAVKQKAQDAAQYTKETAQNAAQYTKETAEAGKDKTGGFLSQTGEHVKQMAMGAADAVKHTFGMATEEEDREHYPGTTTCTTQSTDPTRHTYEKEVRITGTIYEPSFFCFNNVMCLCFVISVVSLCL

SEQ ID NO: 2222 - protein, 226 aa, Brassica rapa
MASNQQSYKAGETKSKTQEKTGQTMGAMRDKAEEGKNKTSQTAQTALQKAHETTQAAKDKTSQAAQTTQQKSQETAQAAKDKTSQAAQTTQQKAHETTQSAKEKTSQTAQTAQEKARETKDKTGSLLSETGEAVKQKAQDAAQYTKETAQNAAQYTKENAEAGRDKTGGFLSQTGEHVKQMAMGAADAVKHTFGMATEEEDREHYPGTTTGTTRSTDQTRHTYERK

SEQ ID NO: 2223 - protein, 177 aa, Cicer arietinum
MASHDQSYKAGETMGRTEEKTNQMIGNIEDKAQAAKEKAQQAAQTAKDKTSQTAQAAKEKTQQTAQAAKEKTQQTAQAAKDETQQTAQAAKDKTQQTTEATKEKAQDTTGRAREKGSEMGQSTKETAQSGKDNSAGFLQQTGEKVKGMAQGATDAVKQTFGMANDDKDKDHFPTNRH

SEQ ID NO: 2224 - protein, 155 aa, Cicer arietinum
MTSHDQSYRAGEAKGRTEEKTNQMIGNIEDKAQAAKEKAQQAAQTAKDKTSQTAQAAKEKTQQTAQAAKDKTQQTTQATKEKAQDTTGRAKEKGSEMGQSTKETAQSGKDNSAGFLQQTGEKAKGMAQGATDAVKQTFGMTNDDQDKDHFPTNRH

SEQ ID NO: 2225 - protein, 112 aa, Glycine max
  unsure (1)..(112): unsure at all Xaa locations
MASNQNQASYHAGETKARNEEKTGQVMGATKDKAGQTTEATKQKAGETTEATKQKAAETTEAAKQKASETAEATKQKAAEAKDKTAQTAQAAXEKTYETAQSAQERAAQGKD

SEQ ID NO: 2226 - protein, 124 aa, Glycine max
  unsure (1)..(124): unsure at all Xaa locations
MASNQNQASYVAGETKARTEEKTGQMXXDKAGQATEATKQKAGETAEATKQKAGEAKDKTAQTAQAAKDRAAESKDQTGSFLGEKTEAAKQKAAEATEAAKQKTSETAQYAQERSSDAAQYTHS

SEQ ID NO: 2227 - protein, 140 aa, Glycine max
MASHRQSYEAGQTKGRTEEKTNQTMGNIGEKAQAAKEKTQEMAQAAKEKTQQTAQAAKDKTCDTSQAAKEKAQQNTGAAQQKTSEMGQSTKESAQSGKDNTQGFLQQTGEKVKGAAQGATEAVKQTLGLGEHDQDNRRNY

SEQ ID NO: 2228 - protein, 163 aa, Daucus carota
MASHQDQSYKAGEPKGHAQEKTGQMADTMKDKAQAAKDKASEMAGSARDRTVESKDQTGSYVSDKAGAVKDKTCETAQAAKEKTGGAMQATKEKASEMGESAKETAVAGKEKTGGLMSSAAEQVKGMAQGATEAVKNTFGMAGADEEEKTTTTRVTRSSARTE

SEQ ID NO: 2229 - protein, 159 aa, Daucus carota
MASHQDTSYKAGEAKGHAQEKTGQMADTIKDKAQAAKDKASELAGTARDRTAESKDQTGSYVSDKASAARDKSCETGQAAKEKTGGVVEATKEKASQMGESAKETAQAGKEKTGGVISSAAEQVKGMAQGATEAVKNTFGMGGGNEEKSTTTTRTTRSD

SEQ ID NO: 2230 - protein, 288 aa, Riccia fluitans
MASKQYEQSYDTTAQKTEEAKNAAAGTAEQTKQSAAETSDKTKQLGAEKTEQANRAASEAAGTVQEKAQVARDTGAEKAEQAKNYGAEKTEQAKSAASDMAGTLQEKAQATRDVGAEKTEQAKQYGAEKTEQAKGAASETAGTAQDKAQTVWEQAKQTAADATQYVQEKATQAWESTKQTTSDTTTTAGNKAVEAKDYAVDTAVQGKDFAVDKAVQGKDYAVDKALQGKDYTGEKAGQAGQYTTDRAVQGKDFTVAKTAEAVKGVVLGVKDAIVGETGANKPGPTSKH

SEQ ID NO: 2231 - protein, 213 aa, Hordeum vulgare
MASNQNQGSYHAGETKARTEEKTGQMMGATKQKAGQTTEATKQKAGETAEATKQKTGETAEAAKQKAAEAKDKTAQTAQAAKDKTYETAQAAKERAAQGKDQTGSALGEKTEAAKQKAAETTEAAKQKAAEATEAAKQKASDTAQYTKESAVAGKDKTGSVLQQAGETVVNAVVGAKDAVANTLGMGGDNTSATKDATTGATVKDTTTTTRNH

SEQ ID NO: 2232 - protein, 177 aa, Hordeum vulgare
MSSWLQEKSGEVVETTQVKAGEATKMASETGQSIQDRAVEAKDQTGSFLGEKSEAVTKSASETTEAAKKMGGEAMGKVSETVQAGQDRAVEGKDQTASFLGEKTEAVKKTATETADAAKEKSTEAAQHVQDTAAEYTKDTPVAPKENVFQKAGGNIVGAATDAKDAVMNTLGMGGDK

SEQ ID NO: 2233 - protein, 200 aa, Oryza sativa
MASHQDQASYRAGETKAHTEEKAGQVMGASKDKASEAKDRASEAAGHAAGKGQDTKEATKEKAQAAKERASETAQAAKDKTSSTSQAARDKAAESKDQTGGFLGEKTEQAKQKAAETAGAAKQKTAETAQYTKDSAIAGKDKTGSVLQQASEQVKSTVVGAKDAVMSTLGMTEDEAGTDDGANKDTSATAAATETTARDH

SEQ ID NO: 2234 - protein, 200 aa, Oryza sativa; identical to SEQ ID NO: 2233

SEQ ID NO: 2235 - protein, 200 aa, Oryza sativa
MASHQDQASYRAGETKAHTEEKAGQVMGASKDKASEAKDRASEAAGHAAGKGQDTKEATKDKAQAAKDRASETAQAAKDKTSSTSQAARDKAAESKDQTGGFLGEKTEQAKQKAAETAGAAKQKTPETAQYTKDSAIAGKDKTGSVLQQASEQVKSTVVGAKDAVMSTLGMTEDEAGTDDGANKDTSATAAATETTARDH

SEQ ID NO: 2236 - protein, 200 aa, Oryza sativa
MASHQDQASYRAGETKAHTEEKAVQVMGASKDKASEAKDRASEAAVHAAGKGQDTKEATKEKAQAAKERASETAQAAKDKTSGTAQAARDKAAESKDQTGGFLGEKTEQAKQKAAETAGAAKQKTAETAQYTKDSAIAGKDKTGSVLQQASEQVKSTVVGAKDAVMSTLGMTEDKAGTDDGANKDTSATAAATETTARDH

SEQ ID NO: 2237 - protein, 205 aa, Triticum aestivum
  unsure (1)..(205): unsure at all Xaa locations
XLASPGQASYQAGETKARTEEKTGQAMGATKDTAQHAKETTKQKASXXSDTGSYLGQKTEEAKHKAGQTTESTKQKAGQTTEAAKQKAAETTEATKQKAGETTEATKQKTAETTEATKQKAAEAMEATKQKAAEAGQYAKETVVSGKDKSAGVIQQATEQVKSAAAGAKDAVMNTLGMGGDNXXSKQSDTNTDSSKDSSTITRDH

SEQ ID NO: 2238 - protein, 230 aa, Triticum aestivum
  unsure (1)..(230): unsure at all Xaa locations
MASNQNQASYHAGETKARTEEKTGQVMGATKDKAGQTTDATKQKAGETTEAAKQKAGETAEATKQKAAEAKDKTAQTAQAAKEKTYETAQSAKERAAQGKDQTASTLGEKTEAAKQKAAETTEAARQKAAEATEAAKQKASETAQYTKESAVAGKDKTGSVLQQAGETVVNAVVGAKDAVANTLGMGGDNTNTAKDTTTEKITRDHXLICFLYSFGRSRAFYIIVGFPLV

SEQ ID NO: 2239 - protein, 219 aa, Triticum aestivum
  unsure (1)..(219): unsure at all Xaa locations
MASNQNQASYHAGETKARTEEKTGQMMGATKDKAGQTTEATKQKAGETAEATKQKTGQATEATKQKAGETADATKQKAAEAKDKTAQTAQAAKEKTYETAQSAKERAAQGKDQTASTLGEKTEAAKQKAAETTEAARQKAAEATEAAKQKASETAQYTKESAVAGKDKTGSVLQQAGETVVNAVVGAKDAVSNTLGMGGDNKSNTAKDTTXTKKITRDH

SEQ ID NO: 2240 - protein, 1167 aa, Neurospora crassa
MARSGKKSPAPPPAYAPAYAPPPAYEAVPTSAVVSKNKNNKNKSAKVKDDYASEGVQDNDPFLLPGSDFVLLTIITMLSAVVRLFRIYQPDSVVFDEVHFGGFASKYIKGKFFMDVHPPLAKLMITLFGWLAGFDGSFDFKEIGKDYVEPGVPYVAMRMFPAICGILLAPTMFLTLKAAGCRSTTAFMGACLIIFENGLLTQARLILLDSPLMIGTALTALGFTAFTNQQELGPGKAFTPSWWFWLVVTGLGLGITASIKWVGLFTIAWVGSLTLIQLWVVLGDHKHVSPRAFAKHFMARAFCLIVIPLTFYMAMFGIHFMCLTNPGDGDGFMSSEFQSTLNSKGMQDVPADVLMGSRVTIRHVNTQGGYLHSHPLMYPTGSKQQQITLYPHKDDNNIWLLENQTQPLGIDGQPINGTGAWDHLPETPYIKDGAILRLYHLPTHRRLHSHDVRPPVTEADWQNEVSAYGYEGFDGDANDFFRVEIVKKKSKSGVAQERLRTIDTKFKLVHIMTGCVLFSHKVKLPTWASEQQEVTCAKGGSLPNSLWYIEFNDHPQLGADAEKVNYRNPGFFGKFWELQKVMWKTNAGLVESHAWDSRPEAWPILRRGINFWGRQHRQVYLMGNPIIWWSATAAVVIYVLFKGIAILRWQRSCNDYANPIFKRFDYEVGTSVLGWALHYFPFYLMQRQLFLHHYFPALYFAIIAFCQVFDFVTARISLVKDKVIFNRLGAVLFLTLSMVVFWLFSPLAYGNPWTKAECNRVKLFSTWDFDCNTFLDSYDNYYGITPTSQTPSQTPVQGTLERPAVANAPPQAQKPIVNQEQQAAKQEPSANPVGQRVISRQEKIEYRDQDGNLLNAEQVEALKGKVEFKTKYETRTRVIDANGNEIQLGGSGMPKVVRAPKASQPVAPPHPDVQGVDQETPKIPAAEEVVPQAEMSVDGEKEAEEKVAKPASESNEATVSQDIEQSDDVRAAQEKIQKMVERIQKVANNVDNLKNNVAEKAGDKVDQVEEKAEQAVEKVQEVAEPVEEKAEQVVEKVQEVAEPAKEKAEQVVEKVQEVAEPAKEKAEQVVEKVQEVAEPAKEKAEEAAEKLAEKVEEATEQSKEKIESVADNVKEEVTEKAEQVQEKAQEAGEKAQEVVLEKIDQVKEMAEEVGEKAEAKTEAKDEL

SEQ ID NO: 2241 - protein, 273 aa, Neurospora crassa
MSAFTIATRRVATQIPRAAAVSTPRAAFSSSVTLQKSISETVKDTLNTVNRAVSDKALDGMDIGSNVASKLKETADTLTNASSPSDLASRVKDAASNAASDAADAIPKDVKGKASELAGEAKGKASELSGKAKGAANEATSGNVSELAGEAKGKASELAGEAKGKASELAGKAKGAANEATSGNLSGAASELTGEAKGKASELAGKAKGAANEAAGGDVQGKAQELKHEASGKASELAGKAKGAVSEGQGKAKGMAQETEKMAKEAGKQSEFS

SEQ ID NO: 2242 - protein, 130 aa, Sporobolus stapfianus
DTKETTKQKASETGSFLGQKTDQAKHKAGETTESTKQKAGETTEAAKQKTAETTEAAKQKTAETTEVAKQKTAEAIEVTKQKASEASEYAKDSAVSGMVKTGIVIQQVTEQVMSAVLIAKDAVVITLLDG

SEQ ID NO: 2243 - protein, 166 aa, Encephalitozoon cuniculi
MAEVSKKRCEHNSDSQCEGCKANDKACEARDKTKETAGSAKDKTKETAGSAKDKTKETAESAKDKTKETAGSAKDKTKETAESAKDKTKETAGSAKDKTKETAESAKDKTKETAGNVRDNVENKDKNEVYENIKEGGSKAWNKTKEVANSMKDGIKDLANKDEQKK

SEQ ID NO: 2244 - protein, 223 aa, Morus bombycis
MACKQRLRFGRFFYVSAVVMVIIAASFASTCGGSGVGHTTEEGRDFEEVKERAQQTQNKAAETAKEANEASETWTDWAKEKISEGLGFNKDADAKDAPKKASDTVSDTAKKSEEVAAETGEYSADKARSATERAAETVSGAKEKAYDTAKSAKEKAYETAQKAKEKVYDSTGTAKEVKDKEKADEGYDAAKHKGEETLESAKDKTQHLKDKVAGGGRGRDEEL

SEQ ID NO: 2245 - protein, 227 aa, Morus bombycis
MACKQRLRFGRFFYVSAVVMVIIAASFASTCGGSGVGHVPSTTEEGRDFEEVKERAQQTQNKAAETAKEANEASETWTDWAKEKISEGLGFNKDADAKDAPKKASDTVSDTAKKSEEVASETGEYSADKARSATERAAAETISGAKEKAYDTAKSAEEKAYETAQKAKEKVYDSTGTAKEVKDKEKADEGYDAAKHKGEETLESAKDKTQHLKDKVAGGGRGRDEEL

SEQ ID NO: 2246 - protein, 143 aa, Aphelenchus avenae
MSSQQNQNRQGEQQEQGYMEAAKEKVVNAWESTKETLSSTAQAAAEKTAEFRDSAGETIRDLTGQAQEKGQEFKERAGEKAEETKQRAGEKMDETKQRAGEMRENAGQKMEEYKQQGKGKAEELRDTAAEKLHQAGEKVKGRD

SEQ ID NO: 2247 - protein, 181 aa, Drosophila melanogaster
MDEGKKKAAEAAAAAKEAAASAAQAAKTKAAGAAGSAKEAAGAAASAAKDKAGAAAASAKEKAAGAAVAVQQSASSAAIAAREKAANAAEFTKEKATAAAAAATEAATSAASTVREKAAAAAVAVRAKASATAIAVRDSVTAVAVAAQGAAAAAKDKVATAAASAAAAAKSKVTRQSQDEV

SEQ ID NO: 2248 - protein, 1545 aa, Streptomyces coelicolor A3(2)
MRLRRPRRPSDGPPGRSGARRLRVASAPLIPLTVIGAVVAGLIGPEPPSDGPLPGTSAVADSYDGFDADAAEQLRQDQCLMAGALRLGGPEMGGIAQTALNQTPEQLHVAADQEYWNDTPLALAYVKDRELIDQESATLDPRVQAWQDTLSGLSTPGGFKSVTDFSWPPGSGGGADFFDQVGYSTWLGEQWWKEEARFYEDPSAKADEATVKAVTDLGTPLYGDAVYDPSMSSEEWALAVEQEHAFDELLTGDLFSGMREDDARMFLSVGGFPSSAPEPGSLAFRLAVEDLKTRFAACTWTNPVDPGKVLGQEVATASVEWQREVAEQAIPRNQIIDANRDATKALATGAKALGEMLGQSWTADHLARWQDYWSPGGAGWIGDSPMIVHIHAASDKCLEVAGNSKADGAVVQMYTCNGGANQKWRVDGDSLVNVNSGKCLDVNRDGTADGTRIQQWTCKQNGAQGWEFTPNRTTQLRNTGSGKCLDLHTYANSQDAWLWQCNGTDPQKFDIVASGHNGTDALDYPTSGQFTQATKGITNARAKAAEQLGVIRRQAQIAGMAAADSEESLNTAYGIADSMGAPRGRALLVGQQKDQVTKASSAALNAMIKAGETALSATKASAGDSASIAARAVTQAAGTQAAFRTAAARAAKEQAKAAADAAAVQASNAKAARDTAKAKLTETQNAEADAKAAAATAHAKRLAAEKEEATAKAEKETAAQKQAEAAEHKTKAQQRATEAKDAKERAETADTTATEKRKGAEAARDKAKALRDDAWDAEQKANAARAKADAKEAYAQASASEDNAQEARKAANDADAAADDAETAAVAARSEADKATKAAADADAAATRAEAAAKRSRADSDAAQAAKLTADAAVRTATSAAADAIKASKTAATAARTAVELADDAEQHAADAKKEADAAKAEAVTALAGANESTGYAYTTAQAAVDAGNSAAQVAAPANDAIQLGSPYVTTDSAAGLAVLTGQSSKTIAEQQQAVAEAHAQNAEESAAQAQSVANAASGDSKAAYTLAAEALGYAADARNSAKEALGYSAEAASYATQAAQSLTRTIAYDTQATKDAAAADSAAGRAEGHAEDARDSADAAALDAEAARSAADTAEQAAEDARDAADHAATEAAAAEEAAKDAQKYAESAQQAAEQAEKEANAEQIDKGTVVDQTGAPIGDVFYVVDHIEKIGEPEVVKQSDGCEGWIDELFYNGDCTLTTKLRYKEVFDLYLCTAEDLDASQYMCPSGATLYLGEYTSDELSTEVTHTITIAEYQKGVDPVDILFGSWIKCAQKIAPGGASGSWGGCAWAGVDVASLFAGKIIRPIADAVKAVDAAARTGIGFADAYKALRTLGLPTDAAFRIGVKGLDGFVKTCTRTRGKLTARASTAVGGCPVGLVAYNSEEMSHWAYRYRTESEYFEGDHNVAVAKVPGWNDPRTGDFIIANSKFSGHSETEILGKLEAKGFTPGQITALYTERQPCPACASVLTGSLKEGTPVTWSVPYHPDYAKESRSLLDSYVRQANGQQRARPTTTQRLTEGNEAHD

SEQ ID NO: 2249 - protein, 96 aa, Fusobacterium nucleatum subsp. nucleatum ATCC 25586
MGAFDDLTGKAEELVGAVTDKAKELKDETVAKAEELKDKTVEKAEELKNKVVDKAKELKEGAEGKASELKDKAAEKAEELKDKITDGADSLINKLK

SEQ ID NO: 2250 - protein, 179 aa, Haemophilus somnus 129PT
MKKALLTALVLGTSLTVTGCFDKDNNVSQQAESTKESVSTAIAETKEAMSKKVTEVKEMATEKVEVAKEAMSEQVTEVKEMATEKVEAAKEAMSEQVTEIKETAAEKVEAAKEAMSEQVTEIKETAAEKVEAAKEAMSEQVTEVKEMAAEKVEAAKEAMSEKVMEVKEMATEIKSAVEK

SEQ ID NO: 2251 - protein, 96 aa, Fusobacterium nucleatum subsp. vincentii ATCC 49256
MGTFDDLTGILDEVKDTVADKAKELKDEAVTKVGELKDKATEKAGELKDKVVDKAKELKEGAESKTSELKDKAAEKAEELKDKISEGADSLINKIK

SEQ ID NO: 2252 - protein, 195 aa, Enterococcus faecalis V583
MAKKGGFFLGAVIGGTAAAVAALLLAPKSGKELRDDLSNQTDDLKNKAQDYTDYAVQKGTELTEIAKQKAGVLSDQASDLAGSVKEKTKDSLDKAQGVSGDMLDNFKKQTGDLSDQFKKAADDAQDHAEDLGEIAEDAAEDIYIDVKDSAAAAKETVSAGVDEAKETTKDVPEKAAEAKEDVKDAAKDVKKEFKG

SEQ ID NO: 2253 - protein, 302 aa, Gossypium hirsutum
MASSWFFIVFLVLTVASVRCTTVDHMPSTDEDARDYSKLKTKTEEATDEHHSRTQQAKDELKSKADHAANEVKSNTQQAKDRASEVGKEAKEYTESWTEWAKEKISEGLGFKQDDDPKGSVEKAFDSVADTATKTKDKLQDMASGAGEYSAGKAKDMKDTAYKKTDDVKNAAKGKSSEMRQATTEKARELADSAKENANTAYIAAKEKVRDMADRTSEMTNEAQERGARKAEEAKEVVAEKAEGAAEETKKKNEERGESLKWAKEKAKQGYDAAKSKAEETIESAKDTIASGYESRSRNHKN

SEQ ID NO: 2254 - protein, 338 aa, Gossypium hirsutum
MASSWFFIVFLVLTVASVRCTTVDHMPSTDEDARDYSKLKTKTEEATDEHHSRTQQAKDELKSKADHAANEVKSNTQQAKDRASEVGKEAKEYTESWTEWAKEKISEGLGFKQDDDPKGSVEKAFDSVADTATKTKDKLQDMASGAGEYSAGKAKDMKDTAYKKTDDVKNAAKGKSSEMRQATTEKARELADSAKENANTAYIAAKEKVRDMADRTSEMTNEAQERAARKAEEAKEVAAEKAKDAAEETKKKNEETGESLKWAKEKAKQGYDATTEKAKETARQGYDAAKSKAGETVESAKDTIASGYESAKQKSQELKDNYVNGGGQGRGRERDEEL

SEQ ID NO: 2255 - protein, 301 aa, Gossypium hirsutum
MASSWFFIVFLVLTVASVRCTTVDHMPSTDEDARDYSKLKTKTEEATDEHHSRTQQAKDELKSKADHAANEVKSNTQQAKDRASEVGKEAKEYTESWTEWAKEKISEGLGFKQDDDPKGSVEKAFDSVADTATKTKDKLQDMASGAGEYSAGKAKDMKDTAYKTDDVKNAAKGKSSEMRQATTEKARELADSAKENANTAYIAAKEKVRDMADRTSEMTNEAQERGARKAEEAKEVVAEKAEGAAEETKKKNEERGESLKWAKEKAKQGYDAAKSKAEETIESAKDTIASGYESRSRNHKN

SEQ ID NO: 2256 - protein, 448 aa, Arabidopsis thaliana
MASDKQKAERAEVAARLAAEDLHDINKSGGADVTMYKVTERTTEHPPEQDRPGVIGSVFRAVQGTYEHARDAVVGKTHEAAESTKEGAQIASEKAVGAKDATVEKAKETADYTAEKVGEYKDYTVDKAKEAKDTTAEKAKETANYTADKAVEAKDKTAEKIGEYKDYAVDKAVEAKDKTAEKAKETSNYTADKAKEAKDKTAEKVGEYKDYTVDKAVEARDYTAEKAIEAKDKTAEKTGEYKDYTVEKATEGKDVTVSKLGELKDSAVETAKRAMGFLSGKTEEAKGKAVETKDTAKENMEKAGEVTRQKMEEMRLEGKELKEEAGAKAQEASQKTRESTESGAQKAEETKDSPAVRGNEAKGTIFGALGNVTEAIKSKLTMPSDIVEETRAAREHGGTGRTVVEVKVEDSKPGKVATSLKASDQMTGQTFNDVGRMDDDARKDKGKL

SEQ ID NO: 2257 - protein, 448 aa, Arabidopsis thaliana
MASDKQKAERAEVAARLAAEDLHDINKSGGADVTMYKVTERTTEHPPEQDRPGVIGSVFRAVQGTYEHARDAVVGKTHEAAESTKEGAQIASEKAVGAKDATVEKAKETADYTAEKVGEYKDYTVDKAKEAKDTTAEKAKETANYTADKAVEAKDKTAEKIGEYKDYAVDKAVEAKDKTAEKAKETANYTADKAKEAKDKTAEKVGEYKDYTVDKAVEARDYTAEKAIEAKDKTAEKTGEYKDYTVEKATEGKDVTVSKLGELKDSAVETAKRAMGFLSGKTEEAKGKAVETKDTAKENMEKAGEVTRQKMEEMRLEGKELKEEAGAKAQEASQKTRESTESGAQKAEETKDSAAVRGNEAKGTIFGALGNVTEAIKSKLTMPSDIVEETRAAREHGGTGRTVVEVKVEDSKPGKVATSLKASDQMTGQTFNDVGRMDDDARKDKGKL

SEQ ID NO: 2258 - protein, 479 aa, Arabidopsis thaliana
MASGQREAERSAKAERAEAAASLAAEDLKDINKGDVTYKLTERTTTTEPERPGLIGSVMKAVQGTKDAVIGKSHDTAESTREGADIASEKAAGMRDTTGEVRDSTAQKTKETADYTADKAREAKDKTADKTKETADYAAEKAREAKDRTADKTKETAEYTAEKAREAKDKTADKLGEYKDYTAEKAKEAKDTTAEKLGEYKDYTVDKAKEAKDKTAEKAKETAEYTSDKARETKDKTAEKVGEYKDYTAEKAKETADKAREAKDKTAEKVGEYRDYTAEKATETKDAGVSKIGELKDSAVDTAKRAMGFLSGKTEETKQKAVETKDTAKEKMDEAGEEARRKMEEMRLEGKKLDEDASRKTQQSTESAADKAHETKDSVAQRGEEGKGSIMGALGNMTGAIKSKLTGATTPSDEETRASAHGDESTGKTVVAVDVKDTRPGYVATVLKEADQMTGQTFNDVGEIDDEEKVRIVVGEKKL

SEQ ID NO: 2259 - protein, 318 aa, Phaseolus vulgaris
MASGQEFKGDRAEAAAKLAAKDIGDINRQNERDENFDLHSETNFRQARAEAAAKLAAKDLEDVNRMRDHTHSTTTFKEQRYDENRPGVIGSMFRAAKEAVVGKPHTVETSLSGNDSNRERVTKEQGNDSNRERVTKEQGGSKMGEYADYSTQKAKERKDERMQKAGEYTDFPTQKAKESKDYAERIKEAKDATLQKAAEYKDYTAEKAKEEKDSATGKLGELKDSAADAAKRAMGFFTGTRDETKVSGTAEDNKRRIEEVRVQDKDYGTGHGGEKLVIKMEESRPGAVADAMKAAERALGGVMEEEGTLRVERHREKM

SEQ ID NO: 2260 - protein, 551 aa, Pisum sativum
MASEQLSRRENITTERKIQNAEDSVPQRTTHFELRETHELGPNFQSLPRNENQAYLDRGARAPLSANVSESYLDRARVPLNANIPEHRVREKEDFGGVRDMGKFQMESKGGNKSLAEDRETLDTRSRMVTGTPHIKEASGKGQVVEERERARERAMEEEEKRLTMEEISKYRNQAQQSALEALSAAQEKYERAKQATNETLRNTTQAAQEKGEAAQAKDATFEKTQQGYEMTGDTVSNSARTASEKAAQAKNTTLGKTQQGYEATRDTVSNAARTAAEYATPAAEKARCVAVQAKDVTLETGKTAAEKAKCAAEIAAKVAVDLKEKATVAGWTASHYATQLTVDGTRAAANAVEGAVGYVAPKASELAAKSVETVKGLAASAGETAKEFTARKKEESWREYEAKRASQLQEGEEILPSTGGIGKVLPSGERTQAQGTNLQEKVQGKGSDILGAVTETVSDIGSSMIKPIDNANTKVKEHGGTTITPKGQDAGGVLDAIGETIAEIAHTTKVIVVGEDDEVEKSMQKNIGSDSHSLDRAKHEGYRAPKNNVS

SEQ ID NO: 2261 - protein, 400 aa, Oryza sativa (japonica cultivar-group)
MAIVSRSRRLAVTLLLLLFAVVAAAAVATKAEAGTEDAASKEDESWTGWAKEKITEGLGLKHHVADVDEEEDAARKAGHAAKSAQHTASEAGRQTSKKAGDAKEAAEATASGASSKAEQAKEKTKEAAKGAAGEATRRAEQAKHKTKEAAEAAGERGAEVHEQSKQGKAKVEETAKEKAGEGYDAAKDKAGKAQETLRQSTDAAKDKAGKAQETLRQSTDAARDKAGKAQETLRQSTDAAAEKAGAAKDSAWERTSSAKDAAAEKAGSAKDAAWEKTSSAKDAAAEKAGAAKDAAREKAEAAGEKARQSKEAAKGKAGAAKDAAWEKAEAAKDAAWETAEAAREKANEGYEKVKEKAKEKVEEVKERVTGADDAADHGKEKKHHHRHVDGKQKPRTVDEL

SEQ ID NO: 2262 - protein, 555 aa, Daucus carota
MASRKDERAAKEERAQAAAELAAKELRDVNQDRERGIKVVEHKEEVSGGPGVIGSILKSVQGTLGQAKEVVVGKAHDTAEVSRENTDYAYDKGREGGDVAAQKAEEAKEKAKMAKDTTMGKAGEYKDYTAQKAEEAKEKAAQKAEETKEKAGEYKNYTAQKAGEAKDTTLGKAGEYKDYAAQKAAEAKDTTAQKAAEAKEKTGEYKDYAAQKAAEAKVLAAQKAAEAKDTTGKDGEYKDYAAQKAAEAKDATMQKTGEYKDYAAQKTAETKDATMEKAKEYKEYAAQKAAEAKDATMQKTGEYKDYSAQKAAETKDATMEKTKEYKDYTAQKAAETKDATMEKAKEAKDTTVQKTGEYKDYAAEKAKEGKDVTVEKAKEGKDTTVGKMTELKDSAADAARKAMDMFLGKKEEVKGKAGETAEAAKEKYEDTEFAARKKMEELKLQEEGVKDEAKQRAEADRETAGDRGSAAKGTIFGAMGSVKDAIVGKLTMPSDVVKDKQQQEAVIKVDETRPGAVAEALKAADQMHGQAFNDVGKMGDEEVIVERKETRQGKM

SEQ ID NO: 2263 - protein, 201 aa, Craterostigma plantagineum
MEAMSFAARSTVLSISKSFPKNNSPTYLTLRPKFSRVRFTTVASQSQGRQQVSENAEDAKKKFSETTDSLKHKTSEATDSASHKANGAARETNDKAKETYNAASGKAGELKDKTQEGAENVREKAMDAGNDAMEKTRNAGERVADGVSNVGQNVKENVMGAGEKVKEFAEDVKDTVMGKSEEVKNQAEHETKKRSTSTNYF

SEQ ID NO: 2264 - protein, 296 aa, Dictyostelium discoideum
KRLNETEISNDAKKLKTDIADTSSHLAQNTKEATVHALNATAAAITGGMNMVSETLQPVIEKTKEMGTNAAHAVGEGIETLKAKTGEMMGTAKEVGDKCAHWTTEQTQAFCDKCTELAKNAKLMANDAKETTEKKVEEGKEKAGELTEDAKKKAAELNDEAKKKAEHLAEDTKKATAETKEKLDETAKKCEHWTAEQKENICNKCSELAKDANKTKDQLAANAEKTAENTKEKLDETAKKCEHWTAEQKENICSKCSELTKDTKEAADHASEAVKDAADNLNDKVQKKGRGRPKKH

SEQ ID NO: 2265 - protein, 347 aa, Oryza sativa
  unsure (1)..(347): unsure at all Xaa locations
MASRQDRREARAEADARRAAEEIARARDERVMQAEVDARXRPRTRSPAPAPTAAPPRWAPTPPTTPPAAXGILESVQEGAKSFVSAVGRTFGGARDTAAEKTSQTADATRDKLGEYKDYTADKARETNDSVARKTNETADASRDKLGEYKDYTADKTRETKDAVAQKASDASEATKNKLGEYKDALARKTRDAKDPTAQKATEFKDGVKATAQETRDATADTARKAKDAPKDTTQTAADKARETAATHDDATDKXARAGPARGAGERDGGDQGEXLTVSPAAPLGRRGGGEERAVKERAAXXKAASVYFEEKDRLTRERAAERVDKCVEKCVEGGAGIFIKPFRLPL

SEQ ID NO: 2266 - protein, 388 aa, Triticum aestivum
  unsure (1)..(388): unsure at all Xaa locations
XTCVLQHYNQHYSTSTSEQVPEKFNHSARPXSSRQDQREARAEADARRAADEIARARDXXRLMQAEMDARRAADEIARARADREHGALGGGAYAEHPSGGGGGILGSMQXGAKSLASADGRTFGGAKDTAADKTYQAADATGNKLGEYKDYTAEKAKETNDSVAHKTSETAEATRNKLGEAKDCTVEKATEAKDTVAQKTNETAEATKNKAGRAKDSTMQKAHQTKDAAAEKARQAKDVTQQKAGEYTDATKGTAQEARDRSMATSRPTMPIGVSKGPVCSGRXGNMTGAIKEKLTVGSGXAAARRRRDGLRLGSEGARGEGARGGEGGVRVLRGEGPAGQGARGGAGGQVRXEVRGRVRRPLLLCFTKKKKKKLIDTVDSRGGPVPX

SEQ ID NO: 2267 - protein, 233 aa, Zea mays
  unsure (1)..(233): unsure at all Xaa locations
GTLGSAGKTICETNTSAFARETETTESLTDRYGIEAEHAXGARDKTSQTAHTAGDKLGEYRDYTADKAREANDSVSRKTGETAEATRNKLGEYKDSAVEKARETKDAVAQKTSETAEATKNKLGEYKDAAAGKAREAADTTAGKAREAKDATMQKAQETRDATADKAREARDVTRQKAGEYTDASREAAQEARDRSRATAQTAADKARETASTHDTDREQGQDYHVCWGRWGT

SEQ ID NO: 2268 - protein, 733 aa, Caenorhabditis elegans
MSFMDKVKDTANSAYESVENTAVGAKDGVVGAFNTVGEKIGGAYDSTKQYASDKVSAAGDYASEAGKKVGDAEDSMIQGAYDAKDSAKESASNAGNKISNAFTSLKDSITGDNAHKTGEALNDNYESVKESASEAADRLKEPAQNTADNAKDLANQTGEEMSDAFESVKQLTSDTAENAKENAHDAADTAKSYKDKAGEKASGILDSFKAHASDAKDSVENKASDAYNSAKDKAGDAWDSTKDAAGDAKDKTKSFTEKVGDKISGAYDSVKEKASDVADSFKAHSTDSKDNVENKAADAYNTAKDKASDAWDKTKDKAGEAKDKMGDAWDTTKDKAGDAWDTTKDKAGDGKGKAGDAWDTTKDKASDAWDTTKDKAGEAKDKMGEAWDHTKDKAGEAKDKASDAADDAQGKSKSMTEKIGDSISGAWESTKDTAVSAKDKTAEAAGKVGDSISGAYDTVKEKASDIADSFKAHSTDSKDNVENKAADAYNSAKDKASDAWDKTKDKAGDAKDKAADAWDTTKDKAGDAWDSTKDHAADAKDKASDAAGDAKDKSKSLTEKAGDAISGAYDSVKEKASDIADSFKAHSTNSKDNVENKASDAYNSAKDKASDAWDKTKDKAGEAKDKAGDAWDNTKDKAGNAWDSTKDKASDAWDTTKDKASDAKESAGDAADSAKDKSKSITETIGDKISGAYDSVKEKASDVADSFKAHSSDAQDTVEVSHHKYFNVFSSFE

SEQ ID NO: 2269 - protein, 470 aa, Caenorhabditis elegans
MWDSAKHQTSDAGDSAEKHFDDAVDAAKDAYDSAKDKTSDTLDSVKKEGQEASDSTKSLTSDAGDAILGAYDAAKEKASDAWESTKEMVSEAYEQAEKHADDGADSAKDYVEDAKDKASDVWDSAKDKTSDVFDSLKEHGEDASDSAKDLANDAEDAIKDTYDSAKEKASDAFDSAKEHGEDAQESAKEYFEQAKEKASDALDSAQKHGDDAKESAQGYFEQAKDKSSEIWDSAKKHGEEASDSAKDYFEQAKDKASDAVESAKKQGEETSDAAKEHADHAKGKIADAWDATKDKADDVKDTAGETFENIHHSATTAVDEARENAAAAKDNASESAESTKYSIVDTAKGIAHSAEEKLEGAASVVGDAVQYVNDSATSAVSTVADSVSSAVHTVGEKLHDAEEAASNYMHGAHKSASEAAHDTKEAVTSKAAEVENLKTGTLPSPKSGNTDTLRSTRSEGTPNKRRCTIL

SEQ ID NO: 2270 - protein, 497 aa, Caenorhabditis elegans
MWDSAKHQTSDAGDSAEKHFDDAVDAAKDAYDSAKDKTSDTLDSVKKEGQEASDSTKSLTSDAGDAILGAYDAAKEKASDAWESTKEMVSEAYEQAEKHADDGADSAKDYVEDAKDKASDVWDSAKDKTSDVFDSLKEHGEDASDSAKDLANDAEDAIKDTYDSAKEKASDAFDSAKEHGEDAQESAKEYFEQAKEKASDALDSAQKHGDDAKESAQGYFEQAKDKSSEIWDSAKKHGEEASDSAKDYFEQAKDKASDAVESAKKQGEETSDAAKEHADHAKGKIADAWDATKDKADDVKDTAGETFENIHHSATTAVDEARENAAAAKDNASESAESTKYSIVDTAKGIAHSAEEKLEGAASVVGDAVQYVNDSATSAVSTVADSVSSAVHTVGEKLHDAEEAASNYMHGAHKSASEAAHDTKEAVTSKAAEVEKSAADAAKNTADEAKKTAEHVEQKVDENLKTGTLPSPKSGNTDTLRSTRSEGTPNKRRCTIL

SEQ ID NO: 2271 - protein, 229 aa, Pasteurella multocida
MKKSVLAALVLGASLSVTGCFDKESKAGQEVEKAKASVVETKEAVVNAANEVKNSAVEAAKEAKETVATKVEEVKETTAAKVEEVKAATAAKVEEMKETTAAKVEEMKEASAAKMEEVKAATATKMEEMKAAVADAKNDVAEKAAEVKDAAAAKAEEAKAAVAEKSAEMKDAAAAKVEDAKVASSEAKEMVTEKATEMKDAMKAEVNKAADAVSEKTEEVKEVIVPKAQ

SEQ ID NO: 2272 - protein, 468 aa, Prunus persica
MAHFGSTPEPTKTDEYGNPVHHTTTGTGRTDEFGNPVQHGVADTGYGTGAGYGTHTKPGVVEHHGRPAVLHSKDDQYSRDTQTTTGGYGGDGYTGGEHQEKKGLLGQLQDKLPGGNKDGQYSHDTQTTTGAYGGAGYTGGEHHEKKGIIGQVKDKLPGGQKDDQYCRDTHPTTGAYGGAGYTGGEDHEKKGIIGQVKDKLPGGQKDDQYCRDTHPTTGAYGGAGYTGGEHQEKKGIIGQVKDKLPGGQKDDQYSHDTHPTTGAYGGGGYTGDDTREKKGIIDQVKDKLPGGQKDDHYSHDTHPTTGAFGGAGYTRDDTREKKGIIDQVKDKLPGGRQDDHYSHETHPTTGAYGGAGYTGDDTREKKGVVEKVKEKLPGGQNVHPTTGPYGGGGAAGIGETRERKGVGEKVEEKLPGGHKDDQYLHDTHPTKPTSAARGGVGHTGGEPQLHEKKGLIEKIKDKLPGHNN

SEQ ID NO: 2273 - protein, 330 aa, Medicago sativa
MSQYQQGGDQTGRVDEYGNPLSQGQVDQYGNPISGGGMTGATGHGHHQQHHGVDTGYGAHTGSGGAHTGGVGGYGGTDIDGTGYGTGTGTGTTGYGATGGGTGHDNRGVVDKIKEKIPGTGTGHGTTGVGHQQHGDTYGTGTGTGYGTTGVGHQQHGDTYGTGTGNWNWNEVGHGTTGYGATDVGHGHQQHGENRGVVDKIKEKISGTGTGTGTGTGHGTTGYGAGGVGHGHQQHGEKGVVDKIKEKIPGTEQNTYGTGTGTGTGHGTTTGYGSTGQEYGREGHHGHDEQHLGEKKGIMEKIKGEAVLVLDHVLDMDKLNHNIYGCMHLI

SEQ ID NO: 2274 - protein, 232 aa, Pisum sativum
MSQYQNQYGAQTGMTDEYGNPVNQVDQYGNPISGGGGLTGEAGRQHYGTTGGATGQGHGHGQQHRGVDQTTGYGTHTGGVGGYGTKPEYGSTNTGSGYGTGTGYGGSGTNPDYGSTNTGSGYGTGTGYGGSGTTEYVREEHHGDKKGVMDKIKEKIPGTEQSRTNTDGTGYGSTGQGYVREQQHGTGYGSTGQGYVREQQDVHHGDEQHGEKKGIMEKIKEKLPGTGACTGH

SEQ ID NO: 2275 - protein, 232 aa, Pisum sativum
MSQYQNQYGAQTRKTDEYGNPMNQVDQYGNPISGGGGLTGEAGRQHYGTTGGATDHGHGQQHRGVDQTTGYGTHTGGVGGYGTKPEYGSTNTGSGYGTGTGYGGSGTTEYVREEHHGDKKGVMDKIKEKIPGTEQSRTHTDGTGYGSTGYGASGGGIGNTGQEYVREELTVHPGDKKHGSAGQEYVKEERRGIGNTGQEYVREEHRVDHGEKKGIMDKIKEKLPGTGGCTGH

SEQ ID NO: 2276 - protein, 255 aa, Pisum sativum
MSQYQNQYGAQTRKTDEYGNPVNQVDQYGNPISGGGGLTGEAGRQHYGTTGGATDHGHGHGQQHRGVDQTTGYGTHTGGVGGYGTKPEYGSTNTGSGYGTGTGYGGSGTTEYVREEHHGDKKGVMDKIKEKIPGTEQSRTNTDGTGYGSTGYGASGGGIGNTGQEYVREERHVHPGDKKHGSAGQEYVREEHHVHPGDKKHGSAGQEYVKEERRGIGNTGQEYVREEHRVDHGEKKGIMDKIKEKLPGTGGCTGH

SEQ ID NO: 2277 - protein, 197 aa, Pisum sativum
MSQYQNQYGAQTGMTDEYGNPVNQVDQYGNPISGGGFTGEAGRQHFGTTGGATDHGHGHGQQHRGVDQTTGYGTHTGGVGGYGTNPEYGNTNTGSGYGTGTGYGGSGTNEYVREDHHGDKKGVMDKIKEKIPGTEQSRTNTDGAGYGSTGYGASGGGIGNTGQEYVREEHRVDHGEKKGIMDKIKEKLPGTGGCTGH

SEQ ID NO: 2278 - protein, 198 aa, Pisum sativum
MSQYQNQYGAQTGMTDEYGNPVNQVDQYGNPVSGGGFTGEAGRQHFGTTGGVTGQGHGHGQQHRGVDQTTGYGTHTGGVGGYGTKPEYGSTNTGSGYGTGTGYGGSGSNEYVREEHHGDKKGVMDKIKEKIPGTEQSRTNTDGTGYGSTGQGYVREQQRVDHGDEQRVDHGDEQHGEKKGIMDKIKEKLPGTGACTGH

SEQ ID NO: 2279 - protein, 256 aa, Vigna unguiculata
MASYQKQYEDQGRKIDEYGNVVQETDEYGNPVHAASVTYITSTTGGLGDDSNKQHDTSNVYGADTRRQHGTIGDTGRQHGTTGGFTGDTGRQYGTTGGFTGDTGRQHGTTGGFTGDTGRQHGTTGGFTGDTGRQHGTTGGFTGDTGRQHGTTGGFTGGDTGLGGPYVGANTADTGTGPRSGTTGGSAYGSGGAGGGYGSGAGAGGAGYGMNTGGAHSDERYGREYREHDQSRGDHDKKGIVDKIKEKLPGGHSDNK

SEQ ID NO: 2280 - protein, 259 aa, Vigna unguiculata
MASYQKQYEDQGCKIDEYGNVVQETDEYGNPVHAASVTYITSTTGGLGDDTNKQHDTSNVYGADTRRQHGTIGDTGRQHGTTGGFTGDTGRQYGTTGGFTGDTGRQHGTTGGFTGDTGKQHGTTGGFTGDTGRQHGTTGGFTGDTGRQHGTTGDTGRQHGTTGGFTGGDTGLGGPYVGANTADTGTGPRSGTTGGSAYGSGGYGSGAGAGYGMNTGGAHSDERYGREYREHDQSRGDHDKKGIVDKIKEKLPGGHSDNK

SEQ ID NO: 2281 - protein, 240 aa, Helianthus tuberosus
ANYGGDKQYGRETRHTGDYENPIHSTGGQYDQDVRQTDEYGNPVRRTDEYGNPVHTATGGTMGDYGSTGLGQGTGGIGTGGYGTTGHQGLGTGVGHTTGTGTDYTPGGRSTGQTGYQGLGTESEFGGTTGTFQNQPSATPIGGTGLSSGTGAGFGGTGTGTGTGILHRSGSGSSSSSEDDGQGGRRKKKGVMQKIKEKLPGGHSQEEQYQSQTTTTTGYGETHEKKGMMEKIKEKLPGHH

SEQ ID NO: 2282 - protein, 240 aa, Helianthus petiolaris
ANYGGDKQYGRETRHTDEYGNPIHSTGGHQTDEYGNPVRRTDEYGNPVHSTTGGTMGDYGSTGLGQGTGGIGTGGYGTSGHQGLGTGVGHTTGGTGTDYASGGRSTGQTGYQGLGTESEFGGTTGTFQNQPSATPMGGTGLGGGTGAGFGGTGSGTGTGILHRSGSSSSSSSEDDGQGGRRKKKGVMQKIKEKLPGGHSQEGQYQSQTTTTTTAGGAGYGETHEKKGMMEKIKEKLPGHH

SEQ ID NO: 2283 - protein, 237 aa, Helianthus petiolaris
ANYGGDKQYGRETRHTDEYGNPIHSTGGHQTDEYGNPVRRTDEYGNPVHSTTGGTMGDYGSTGLGQGTGGIGTGGYGTSGYQGLGTGLGHTTGGTGTDYASGGRSTGQTGYQGLGTESEFGGTTGTFQNQPSATPMGGTGLGGGTGAGFGGTGTGTGTGTGILHRSGSSSSSSSEDDGQGGRRKKKGVMQKTKEKLPGGHSQEGQYQSQTTTTTTAGGTHEKKGMMEKIKEKLPGHH

SEQ ID NO: 2284 - protein, 99 aa, Zea mays
  unsure (1)..(99): unsure at all Xaa locations
XFRRGYDGDTNKQHDATGVYPGIDIGRDHGTTGVYGLNTDRHHGTSGVNPGIDTHNQQHGTTVGYAGYTGRQHGNTGGLYYGTDTADTGTGPXSGNTVA

SEQ ID NO: 2285 - protein, 195 aa, Cicer pinnatifidum
MSQYNQGQYVDQTRTVDEYGNPIVQVDQYGNPINQSGVGMTGEAGRTFENPGLTGHDNSKSHTTSYGTHTGSGGGTGDGYGTYNTRGGGDGGTYNTRGGSGMTGEVGKIFGTTDDTGNHHGVDQTTTDYGTHNTGSYGTHTGGYGNTNTGSGYGNTKVGQEFGREEPRHHGGEQQHGEKKGIMDKIKEKLPGTGH

SEQ ID NO: 2286 - protein, 220 aa, Helianthus ciliaris
QYGRETRHTGDYENPIHSTGGQYDQDVRQTDEYGNPVRITDEYGNPVHSATGGTMGDYGSTGLGQGTGGLGTGVGHTTGGTGTDYTSGGRSTGQTGYQGLGTESEFGGTTGTFQNQPSATPIGGTGLSSGTGAGFGGIGTGTGTGILHRSGSGSSSSSEDDGQGGRRKKKGVMQKIKEKLPGGHSQEEQYQSQTTTTGYGETHEKKGMMEKIKEKLPGHH

SEQ ID NO: 2287 - protein, 246 aa, Helianthus debilis
ANYGGDKQYGRETRQTGDYENPIHSTGGQYEQDVRQTDEYGNPVRRTDEYGNPVHSTTGGTMGDYGSTGLGRGTGGIGTGGYGTTGHQGLGTGVGHTTGGTGTDYTSGGRSTGQTGYQGLGTESEFGGTTGTFQNQPSATPIGGTGLGGGTGAGFGGTGTGTGTGILHRSGSSSSSSSEDDGQGGRRKKKGVMQKIKEKLPGGHSQEGQYQSQTTTTTTAGGAGYGETHEKKGMMEKIKEKLPGHH

SEQ ID NO: 2288 - protein, 244 aa, Helianthus debilis
ANYGGDKQYGRETRQTGDYENPIHSTGGQYEQDVRQTDEYGNPVRRTDEYGNPVHSTTGGTMGDYGSTGLGRGTGGIGTGGYGTTGHQGLGTGVGHTTGGTGTDYTSGGRSTGQTGYQGLGTESEFGGTTGTFQNQPSATPIGGTGLGGGTGAGFGGTGTGTGTGILHRSGSSSSSSSEDDGQGGRRKKKGVMQKIKEKLPGGHSQEGQYRSQTTTTAGGAGYGETHEKKGMMEKIKEKLPGHH

SEQ ID NO: 2289 - protein, 240 aa, Helianthus hirsutus
ANYGGDKQYGRETRHTGDYENPIHSTGGQYDQDVRQTDEYGNPVRRTDEYGNPVHTATGGTMGDYGSTGLGQGTGGIGTGGYGATGHQGLGTGVGHTTGTGTDYTSGGRSTGQTGYQGLGTESEFGGTTGTFQNQPSATPIGGTGLSSGTGAGLGGTGTGTGTGILHRSGSGSSSSSEDDGQGGRRKKKGVMQKIKEKLPGGHSQEEQYQSQTTTTTGYGETHEKKGMMEKIKEKLPGHH

SEQ ID NO: 2290 - protein, 228 aa, Helianthus maximiliani
ANYGGDKQYGRETRHTGDYENPIHSTGGQYEQDVRQTDEYGNPVRRTDEYGNPVHSATGGTMGDYGSTGLGQGTGGIGTGGYGTTGGTGTDYTSGGHSTGQTGYQGLGTESGFGGTTGTFQNQPSATPMGGTGLGSGTGAGFGGTGTGTGTGILHRSGSGSPSSSEDDRQGGRRKKKGVMQKIKEKLPGGRSQEEQYQSQTTTTTGYGETHEKKGMMEKIKEKLPGHH

SEQ ID NO: 2291 - protein, 241 aa, Helianthus mollis
ANYGGDKQYGRETRHTGDYENPIHSTGGQYEQDVRQTDEYGNPVRRTDEYGNPVHSATGGTMGDYGSTGLGQGTGGIGTGGYGTTGHQGLGTGVGHTTGGTGTDYTSGGHSTGQTGYQGLGTESGFGGTTGTFQNQPSATPMGGTGLGSGTGAGFGGTGTGTGTGILHRSGSGSSSSSEDDRQGGRRKKKGVMQKIKEKLPGGHSQEEQYQSQTTTTTGYGETHEKKGMMEKIKEKLPGHH

SEQ ID NO: 2292 - protein, 246 aa, Helianthus neglectus
ANYGGDKQYGRETRQTGDYENPIHSTGGQYEQDVRQTDEYGNSVRRTDEYGNPVHSTTGGTMGDYGSTGLGRGTGGIGTGGYGTTGHQGLGTGIGHTTGGTGTDYTSGGRSTGQTGYQGLGTESEFGGTTGTFQNQPSATPIGGTGLGGGTGAGFGGTGTGTRTGILHRSGSSSSSSSEDDGQGGRRKKKGVMQKIKEKLPGGHSQEGQYQSQTTTTTTAGGAGYGETHEKKGMMEKIKEKLPGHH

SEQ ID NO: 2293 - protein, 246 aa, Helianthus praecox
ANYGGDKQYGRETRQTGDYDNPIHSTGGQYEQDVRQTDEYGNPVRRTDEYGNPVHSTTGGTMGDYGSTGLGRGTAGIGTGGYGTTGHQGLGTGVGHTTGGIGTDYISGGRSTGQTGYQGLGTESEFGGTTGTFQNQPSATPIGGTGLGGGTGAGFGGTGTGTGTGILHRSGSSSSSSSEDDGQGGRRKKKGVMQKIKEKLPGGHSQEGQHQSQTTTTTTAGGAGYGETHEKKGMMEKIKEKLPGHH

SEQ ID NO: 2294 - protein, 246 aa, Helianthus praecox
ANYGGDKQYGRETRQTGDYENPIHSTGGQYEQDVRQTDEYGNPVRRTDEYGNPVHSTTGGTMGDYGSTGLGRGTGGIGTGGYGTTGHQGLGTGIGHTTGGTGTDYTSGGRSTGQTGYQGLGTESEFGGTTGTFQNQPSATPIGGTGLGGGTGAGFGGTGTGTGTGILHRSGSSSSSSSEDDGQGGRRKKKGVMQKIKEKLPGGHSQEGQYQSQTTTTTTAGGAGYGETHEKKGMMEKIKEKLPGHH

SEQ ID NO: 2295 - protein, 246 aa, Helianthus praecox
ANYGGDKQYGRETRQTGDYDNPIHSTGGQYEQDVRQTDEYGNPVRRTDEYANPVHSTTGGTMGDYGSTGLGRGTGGIGTGGYGTTGHQGLGTGVGHTTGGTETDYISGGRSTGQTGYQGLGTESEFGGTTGTFQNQPSATPIGGTGLGGGTGAGFGGTGTGTGTGILHRSGSSSSSSSEDDGQGGRRKKKGVMQKIKEKLPGGHSQEGQYQSQTTTTTTAGGAGYGETHEKKGMMEKIKEKLPGHH

SEQ ID NO: 2296 - protein, 133 aa, Boea crassifolia
MEPYGNHQIGDQLRKTDEYGNPVHHTPGGEYGGPHVGAEHHHGAPISIPPTTDVPHHRRSGSSSSSSSEDDGQGGRRKKGIKDKVKEKLPGGHKDNQPHHEAGYGGGYGAQPEPEKKGMMDKIKEKLPGGHRN

SEQ ID NO: 2297 - protein, 191 aa, Hordeum vulgare subsp. vulgare
MEYQGQQQHGQATNRVDEYGNPVAGHGVGTGMGEHGGVGTGMGAHGGVGTGAAAGGHFQPTRKEHKAGGILQRSGSSSSSSSEDDGMGGRRKKGIKDKIKEKLPGGHGDQQHAAGTYGQQGIGMAGTGGTYGQQGHTGMTGTGATGTMATGGTYGQPGHTGMTGTGTHGTDGTGEKKGIMDKIKEKLPGQH

SEQ ID NO: 2298 - protein, 181 aa, Hordeum vulgare subsp. vulgare
MEYQGQQQHGQATNRVDEYGNPVAGHGGGTGMGAHGGVGTGAAAGGHFQPTRKEHKAGGILQRSGSSSSSSSEDDGMGGRRKKGIKDKIKEKLPGGHGDQQHAAGTYGQQGIGMAGTGGTYGQQGHTGMTGTGATGTMATGGTYGQPGHTGMTGTGTHGTDGTGEKKGIMDKIKEKLPGQH

SEQ ID NO: 2299 - protein, 155 aa, Hordeum vulgare subsp. vulgare
MEHGHATNRVDEYGNPVAGHGVGTGMGTGAAAGGHFQPTREEHKAGGILQRSGSSSSSSSEDDGMGGRRKKGLKDKIKEKLPGGHGDQQQTGGTYGQHGHTGMTGTGEHGATATGGTYGQQGHTGMTGTGAHGTDGTGEKKGIMDKIKEKLPGQH

SEQ ID NO: 2300 - protein, 155 aa, Hordeum vulgare subsp. vulgare
MEHGHATNRVDEYGNPVAGHGVGTGMGTGAAAGGHFQPTREEHKAGGILQRSGSSSSSSSEDDGMGGRRKKGLKDKIKEKLPGGHGDQQQTGGTYGQHGHTGMTGTGEHGATATGGTYGQQGHTGMTGTGAHSTDGTGEKKGIMDKIKEKLPGQH

SEQ ID NO: 2301 - protein, 566 aa, Cornus sericea
MAQYGNPTEGLYKQPTDVYGNPISRTHESGNPVQRTADAQYGNPTEGVYKQPTDVYGNSISRTHESGNPVQKTADAQYGNPTEGVYKQPTDAHGNPISRTHESGNPVQKTADAQYGNPTEGVYKQPTDAHGNPVSRTHESGNPVQKTADAQYGNPTEGVDKHPADAHGNPAFRTRESGNPVQKTADAQYGNPTEGVYKHPTDAHGNPVSRTHDFGNPVQKTADAQYGNPTEGVDKHPADAHGNTAFRTRESGNPVQKTADAQYGNPTEGVDKHPTDAHKNSISRTHDFGNPVQKTVDAQYGNPTEGVYKHPTDAHRNSISRTHNSGNPIQKTADAEYGNPTEGVHKHPTDAHENPLSRTHESDNPIQKTAGAQNRNPTEGVHKHPTDAHRNPVSRTHESGNPIQKTADAQYRNPTEGVHKHPTDAHGNPVSRTHEYGNPIRKIADGQGVHPTGGTTEGYITTSGTSTGIGNGGAIGGQQHGGVLQRSGSGSSSSEDDGQGGRRKKKGLTDKKKEKLSGGRKPAQASHPTATTTTTTGHDIYKGGQQNQEKKGVMEKIKEKLPGQHN

SEQ ID NO: 2302 - protein, 440 aa, Cornus sericea
MAQYGDQYGNPVRPTEKVYRSPTDAYGNSFPPTDEYSNPIHQTDAYGNSNRKTDEYGNLVHPLEKVYGSPTDAYGNPLPPTDKYGNPLHQTDAYGKPIRKTGEYGDPTDAYGNPLPSTDKYGNPIHQSIRRTDEYGDPVHPIEKVYRSPTDAYGNPLPTTDKYGNPIRKTDEYGDPVHPIEKVYGSPTDAYGNPLCRTDKYGNPIHQTDTHGNPIRKTDKYGDPIHPIEKVYGSPTDAYMNPLPQTDKYGNSIHQTDAHGNPIRKTDKYGNPVHPTQEAYRSPTDAYGNPLPPTDEYGNPIHQTDAYGKPIRKTNEYGNPVHHTVPMGDYGISGATGAYGTGTGVTGVGGQHHGGILHHSDCFSSSSSEDDGYGGRRTKGLTDKIKDKLRGGKKTEQLHTTATSTTTGYGYEGEEHRYYKKKGVMEKIMDKLPGQESQHY

SEQ ID NO: 2303 - protein, 400 aa, Cornus sericea
MAQYGDQYGNPVRPTEEVYGSPTDAYGNSLPPTDKYGNRIHQTDAHGAHGKPIHKTDKYGNPIHPTEEVYRSPTDANGNPLTPSDKYGNPIHQTDAHRKPIRKTDKYGNPVHPTEEVYQSPTDANGNPLPPSDKYGNPIHQTDAHGKLIRKTDKYGNPVHPTEEVYGSPTDAYGNPLPPTDKYGNPNRKTDEYGNLVHPIEKVYGSQTDAYGNLLLPTDKYGNPIHQTNAHGNQNRKIDEYGNPVHPIEKVYGNPTDTYGNPLPPTDKYGNPIHHTDAHGNPIGKTDKYGNSVRPTEEVYRSPTDANGNPLPPIDEYGNPIHQTDVYGKPIRKTDEYGNPVHHSGILHRSGCFSSSSSEDDGYGGRRKKRLRDKIKEKLRGGKETEQLHTTATSTPTGYG

SEQ ID NO: 2304 - protein, 109 aa, Pinus sylvestris
GHGHEGQFAREEAEQQKHTGKLHRSNSSSSSSSSDEEEEGRKKKEGGRKKKGSKDKTKEKLPGDGKQYPGEHEKQYSRQHGGEEEKKAGMLDKIKAKLPGQHNKNDGEQ

SEQ ID NO: 2305 - protein, 135 aa, Gossypium hirsutum
MAHFQNQYSAPEVTQTDAYGNPTRRTDEYGNPIPTQETGRGILGIGGHHHGGHHGLHRTGSSSSSSSSSEDEGTGKKKKGLKQRLKEKIPGNKEHQSQATSTTTPGQGATYHQQHHEKKGVMDKIKEKLPGHHNP

SEQ ID NO: 2306 - protein, 145 aa, Gossypium hirsutum
MAHFQNQYSAPEVTQTDAYGNPTRRTDEYGNPIPTQETGRGILGIGGHHHGGHHGLHRTGSSSSSSSSSEDEGTGKKKKGLKERLKEKIPGNKEHQSQATSTTTPGQGPTYHQQHREERSDGQDQGEAPWSPQPLISCLWSAISY

SEQ ID NO: 2307 - protein, 145 aa, Gossypium hirsutum
MAHFQNQYSAPEVTQTDAYGNPTRRTDEYGNPIPTQETGRGILGIGGHHHGGHHGLHRTGSSSSSSSSSEDEGTGKKKKGLKERLKEKIPGNKEHQSQATSTTTPGQGPTYHQHHREERSDGQDQGEAPWSPQPLISCLWSAISY

SEQ ID NO: 2308 - protein, 186 aa, Arabidopsis thaliana
MASYQNRPGGQATDEYGNPIQQQYDEYGNPMGGGGYGTGGGGGATGGQGYGTGGQGYGSGGQGYGTGGQGYGTGTGTEGFGTGGGARHHGQEQLHKESGGGLGGMLHRSGSGSSSSSEDDGQGGRRKKGITQKIKEKLPGHHDQSGQAQAMGGMGSGYDAGGYGGEHHEKKGMMDKIKEKLPGGGR

SEQ ID NO: 2309 - protein, 186 aa, Arabidopsis thaliana
MASYQNRPGGQATDEYGNPIQQQYDEYGNPMGGGGYGTGGGGGATGGQGYGTGGQGYGSGGQGYGTGGQGYGTGTGTEGFGTGGGARHHGQEQLHKESGGGLGGMLHRSGSGSSSSSEDDGQGGRRKKGITQKIKEKLPGHHDQCGQAQAMGGMGSGYDAGGYGGEHHEKKGMMDKIKEKLPGGGR

SEQ ID NO: 2310 - protein, 128 aa, Arabidopsis thaliana
MESYQNQSGAQQTHQQLDQFGNPFPATTGAYGTAGGAPAVAEGGGLSGMLHRSGSSSSSSSEDDGLGGRRRKKKGITEKIKEKLPGHHDSNKTSSLGSTTTAYDTGTVHHEKKGMMEKIKEKLPGGHH

SEQ ID NO: 2311 - protein, 127 aa, Arabidopsis thaliana
MESYQNQSGAQQTHQQLDQFGNPFPATTGAYGTAGAPAVAEGGGLSGMLHRSGSSSSSSSEDDGLGGRRRKKKGITEKIKEKLPGHHDSNKTSSLGSTTTAYDTGTVHHEKKGMMEKIKEKLPGGHH

SEQ ID NO: 2312 - protein, 185 aa, Arabidopsis thaliana
MADLRDEKGNPIHLTDTQGNPIVDLTDEHGNPMYLTGVVSSTPQHKESTTSDIAEHPTSTVGETHPAAAPAGAGAATAATATGVSAGTGATTTGQQHHGSLEEHLRRSGSSSSSSSEDDGQGGRRKKSIKEKIKEKFGSGKHKDEQTPATATTTGPATTDQPHEKKGILEKIKDKLPGHHNHNHP

SEQ ID NO: 2313 - protein, 185 aa, Arabidopsis thaliana
MADLRDEKGNPIHLTDTQGNPIVDLTDEHGNPMYLTGVVSSTPQHKESTTSDIAEHPTSTVGETHPAAAPTGAGAATAATATGVSAGTGATTTGQQHHGSLEEHLRRSGSSSSSSSEDDGQGGRRKKSIKEKIKEKFSSGKHKDEQTPTTATTTGPATTDQPHEKKGILEKIKDKLPGHHNHNHP

SEQ ID NO: 2314 - protein, 127 aa, Arabidopsis thaliana
MESYQNQSGAQQTHQQLDQFGNPFPATTGAYGTAGGAPAVAEGGGLSGMLHRSGSSSSSSSDDGLGGRRRKKKGITEKIKEKLPGHHDSNKTSSLGSTTTAYDTGTVHHEKKGMMEKIKEKLPGGHH

SEQ ID NO: 2315 - protein, 184 aa, Raphanus sativus
MADLKDERGNPIHLTDAYGNPVQLSDEFGNPMHITGVASSAPQYKDSVTGNIAEYPTEAPPAGVAAGTGAAATTAAGVTTSETTTGQEHHGSLGEHLRRSGSSSSSSSEDDGQGGRRKKSIKDKIKDKLGGGKHKDEQTPTTATTTGPTTTTTTTGAAADQHHEKKGILEKIKEKLPGHHNHHP

SEQ ID NO: 2316 - protein, 202 aa, Prunus dulcis
  unsure (1)..(202): unsure at all Xaa locations
MASYEKQYGATPTDEYGNPIRRTDEYGNPLGHHTTTTGTTAATTGAGGYXPHDFAATTAAGQGQGVHGHDYDRKEHHGVTGAVLHRSGSSSSSSSEDDGLGGSRKKKGLKEKIKKKLPGGTKTDTTYGGTGTTGQHHQEKGTMDKIKEKLPGTGGHRADDPYPSQTHTTATTTPYGGTAYTEEHQEKKGIMDKIKEKLPGQH

SEQ ID NO: 2317 - protein, 457 aa, Prunus persica
KTDEYGNPVHHTTTGTGRTDEFGNPVQHGVADTGYGTGAGYGIHTKPGVVEHHGVPAVLHSKDDQYSRDTQTTTGGYGGDGYTGGEHQEKKGLLGQLQDKLPGGNKDGQYSHDTQTTTGAYGGAGYTGGEHHEKKGVIGQVKDKLPGGQKDDQYCRDTHPTTGAYGGAGYTGGEDHEKKGIIGQVKDKLPGGQKDDQYCRDTHPTTGAYGGAGYTGGEHQEKKGIIGQVKDKLPGGQKDDQYCHDTHPTTGAYGGAGYTGGDTREKKGIIGQVKDKLPGGQKDDHYSHDTHPTTGAYGGAGYTGDDTREKKGIIDQVKDKLPGGQKDDHYSHETHPTTGAYGGAGYTGDDTREKKGVVEKVKEKLPGGQNVHPTTGPYGGGGAAGIGETRERKGVGEKVKEKLPGGHKDDQYLHDTHPTKPTSAAHGGVGHTGGEPQLHEKKGLIEKIKDKLPGHNN

SEQ ID NO: 2318 - protein, 268 aa, Prunus persica
NSAREDDQYCRDTHPTTGAYGRAGYTGGEHQEKKGIIGQVKDKLPGGQKDDQYSHDTHKTTGAYGGAGYTGDDTREKKGIIDQVKDKLPGGQKDDHYSHDTHPTTGAFGGAGYTRDDTREKKGIIDQVKDKLPGGRQDDHYSHETHPTTGAYGGAGYTGDDTREKKGVVEKVKEKLPGGQNVHPTTGPYGGGGAAGIGETRERKGVGEKVEEKLPGGHKDDQYLHDTHPTKPTSAARGGVGHTGGEPQLHEKKGLIEKIKDKLPGRNN

SEQ ID NO: 2319 - protein, 150 aa, Glycine max
MEFQGQHDNPANRVDEYGNPFPLAGGVGGGHAAPGTGGQLQARRGEHKTGGILHRSGSSSSTSSSEDDGMGGRRKKGMKEKIKEKLPGGHKDNQQHMATGTGTGGAYGPGTGTGGAYGQQGHAGMAGAGTGTGEKKGIMDKIKEKLPGQH

SEQ ID NO: 2320 - protein, 127 aa, Betula pubescens
IRVDQYGNTVRTDEYGNPIRTDEYGNPIHHTAGTTAGYGAGGFDTTTPQGMRHDVTGTRGVSGKLHRSSEDDGHGGRRKKKGLAEKIKEKIPGVGNKDHRSNTSATTTQAYDEGELRQHEKKGVMEK

SEQ ID NO: 2321 - protein, 228 aa, Oryza sativa (japonica cultivar-group)
MAEHATGVYGHPYPRVDQYGNPVPPVDQYGNPVPDEPAPRDTAAGYVAPPDPAVSTGDYGLAGAEAPHPHESAVMSGAAAAAVAPGGEAYTRDGGGVVPPAGEKTFAYEGTVSAAGVTGASGQLQPTTREEGHTTLGETLRRSGKSSSSSSSSSEDDGQGGRRKKKSIKEKIKEKLPGSHKQEEQKQAGHTAPAAGTGTGTGTHAAGKHEKKGIVEKIKEKLPGHGHH

SEQ ID NO: 2322 - protein, 306 aa, Daucus carota
MADLRDEKGNPIQLTDQHGNPVQLTDEYGNPVHITGVATTGATTGHHDHGVGGASHGGVGSTGLGGVAGAAGLAGATAAAATHGGSHGGTGTHGVGPTGVGAAHGGTGTTTGLGTGTGTTGQTHGMGPTGIGGTHGVGSTGIGGAHGGTGVLGQTHGMGPTGTGAAHGGLGTGQSGLGSSYATHGGLGTGIGTGSAPASAGSHSHAPEKKTALGEQLHRSNSSSSSSEDDGQGGRRKKGFTTKIKEKLGGGKHKKDEHTTVATTKTTTAAHPGGAAVAVEHHEHEKKSMLDKIKDKLPGHHSPTSH

SEQ ID NO: 2323 - protein, 130 aa, Lycopersicon esculentum
MAQYGNQDQMRKTDEYGNHVQETGVYQGTGTGGMMGGTGTGGMMGGTGGEYGTQGMGTGTHHHEGQQQLRRSDSSSSSEDDGEGGRRKKGLKEKIMEKMPGQHEGEYGQTTGEEKKGMMDKIKDKIPGMH

SEQ ID NO: 2324 - protein, 157 aa, Solanum commersonii
MAHYENQYSAGQALQKDEYGNPVRQTDEYGNPIQQTGGTMGEYGTTGTGYGTQAGHTTGVLGGDQRQHGTLGGMLHRSGSSSSSSSSEDDGHGGRRKKKGIKDKVKEKLPGGHRDDLAHSTATTTTTGYGMDGTHEKKGIMEKIKEKLPGHHGPGHH

SEQ ID NO: 2325 - protein, 134 aa, Solanum commersonii
DEYGNPVRQTDEYGNPIQQTGGTMGEYGTTGTGYGTQAGHTTGVLGGDQRQHGTLGGMLHRSGSSSSSSSVSEDDRHGGRRKKKGIKDKVKEKLPGGHRDHLAHSTATTTTTGYGMDGTHEKKGIMEKIKEKLP

SEQ ID NO: 2326 - protein, 134 aa, Solanum tuberosum
DEYGNPVRQTDEYGNPIQQTGGTMGEYGTTGTGYGTQAGHTTGVLGGEQRQHGTLGGMLHRSGSSSSSSSVSEDDGHGGRRKKKGIKDKIKEKLPGGHRDDLAHSTATTTTTGYGMEGTHEKKGIMEKIKEKLP

SEQ ID NO: 2327 - protein, 120 aa, Solanum tuberosum
VRQTDEYGNPIQQTGGTMGEYGTTGTGYGTQAGHTTGVLGGEQRQHGTLGGMLHRSGSSSSSSSSEDDGHGGRRKKKGIKDKIKEKLPGGHRDDLAHSTATTTTTGYGMEGTHEKKGIME

SEQ ID NO: 2328 - protein, 155 aa, Craterostigma plantagineum
MAQFGGEKYGGRHTDEYGNPIQQGAGAHRGGGIMGGGQQAGQHGTTGVLGHGTAGQHGTTGGGLGHGTAGTGGALGGQHRRSGSSSSSSSSESDGEGGRRKKGMKDKMKEKLPGGHGTTTDQQQYGTAATHGQAQQHEKKGIMDKIKEKLPGGQH

SEQ ID NO: 2329 - protein, 117 aa, Craterostigma plantagineum
MAHSLGEQYDLGKPTEEHHESHPPAHQAPHAGGELGAGQKTSQLARSNSSSSSSSEDDGQGGRRKKPIKEKVKEKLPGGAGGKQTGECGTTTTTAAGGHEEKKGVMEKIKEKLPGQH

SEQ ID NO: 2330 - protein, 151 aa, Lemna gibba
MAEMRDEPTSSATPSAPRRWARASRPADTARGQARPRRIRCGAAGRRIRCGQQAGGYGAGQQAGGYGAGQQAGQQELRRSGSSSSSSSEDDGMGGRRKKKGIMEKIKDKMPGQKSEQHHHEPGYAHQRPTHVEPEKKGIMEKIKEKLPGHN

SEQ ID NO: 2331 - protein, 161 aa, Hordeum vulgare
MEHGHATNRVDEYGNPVAGHGVGTGMGAHGGVGTGAAAGGHFQPTREEHKAGGILQRSGSSSSSSSEDDGMGGRRKKGLKDKIKEKLPGGHGDQQQTGGTYGQHGHTGMTGTGEHGATATGGTYGQQGHTGMTGTGAHGTDGTGEKKGIMDKIKEKLPGQH

SEQ ID NO: 2332 - protein, 154 aa, Oryza sativa
MEHQGQHGHVTSRVDEYGNPVGTGAGHGQMGTAGMGTHGTTGTGGGQFQPMREEHKTGGVLQRSGSSSSSSSEDDGMGGRRKKGIKEKIKEKLPGGNKGEQQHAMGGTGGAYGQQGHGTGMTTGTTGAHGTTTTDTGEKKGIMDKIKEKLPGQH

SEQ ID NO: 2333 - protein, 275 aa, Oryza sativa
MEECTPHYLARGGVHVSHTLSAPTRADCTVERMTLVTTVMKHNDTVEESWWSTVASNHQNTEGRRSAAAMRTATRQRDAKREEDVGDHAGVGGGEGDVRPDADATSPGKVTRLISLLALVLMMEHQGQHGHVTSRVDEYGNPVGTGAGHGQMGTAGMGTHGTTGGGGQFQPMREEHKTGGVLQRSGSSSSSSSEDDGMGGRRKKGIKEKIKEKLPGGNKGEQQHAMGGTGGAYGQQGHGTGMTTGTTGAHGTTTTDTGEKKGIMDKIKEKLPGQH

SEQ ID NO: 2334 - protein, 163 aa, Oryza sativa
MEHQGQHGHVTSRVDEYGNPVGTGAGHAQMGTAGMGTHGTAGTGRQFQPMREEHKTGGVLQRSGSSSSSSSEDDGMGGRRKKGIKEKIKEKLPGGNKGEQQHAMGGTGTGTGTGTGTGGAYGQQGHGTGMTTGTTGAHGTTTTDTGEKKGIMDKIKEKLPGQH

SEQ ID NO: 2335 - protein, 163 aa, Oryza sativa; identical to SEQ ID NO: 2334

SEQ ID NO: 2336 - protein, 164 aa, Oryza sativa
MENYQGQHGYGADRVDVYGNPVGAGQYGGGATAPGGGHGAMGMGGHAGAGAGGQFQPAREDRKTGGILHRSGSSSSSSSSEDDGMGGRRKKGIKEKIKEKLPGGNKGNNQQQQQMMGNTGGAYGQQGHAGMTGAGTGVHGAEYGNAGEKKGFMDKIKEKLPGQH

SEQ ID NO: 2337 - protein, 164 aa, Oryza sativa
MENYQGQHGYGADRVDVYGNPVAGQYGGGATAPGGGHGVMGMGGHHAGAGGQFQPVKEEHKTGGILHRSGSSSSSSSSEDDGMGGRRKKGIKEKIKEKLPGGNKGNNQQQQQMMGNTGGAYGQQGHAGMTGAGTGTGVHGAEYGNTGEKKGFMDKIKEKLPGQH

SEQ ID NO: 2338 - protein, 164 aa, Oryza sativa
MENYQGQHGYGADRVDVYRNPVAGQYGGGATAPGGGHGVMGMGGHHAGAGGQFQPVKEEHKTGGILHRSGSSSSSSSSEDDGMGGRRKKGIKEKIKEKLPGGNKANNHQQQQMMGNTGGAYGQQGHAGMTGAGTGTGVHGAEYGNTGEKKGFMDKIKEKLPGQH

SEQ ID NO: 2339 - protein, 165 aa, Oryza sativa
MEHQGQHGHVTSRVDEYGNPVGTGAGHGQMGTAGMGTHGTAGTGGGQFQPMREEHKTGGVLQRSGSSSSSSSEDDGMGRTTKKRDLGEDLGETPRRATRANSSMPWGGTGTGTGTGTGTGGAYGQQGHGTGMTTGTTGAHGTTTTDTGEKKGIMDKIKEKLPGQH

SEQ ID NO: 2340 - protein, 165 aa, Oryza sativa; identical to SEQ ID NO: 2339

SEQ ID NO: 2341 - protein, 151 aa, Oryza sativa
MEYQGQHGGHASSRADEHGNPAVTTGNAPTGMGAGHIQEPAREDKKTDGVLRRSGSSSSSSSSEDDGMGGRRKKGIKEKIKEKLPGGNKGNNQQQQQEHTTTTTGGAYGPQGHDTKIATGARGGTAATTADAGGEKKGIVDKIKEKLPGQH

SEQ ID NO: 2342 - protein, 262 aa, Oryza sativa
MKSHTLLITRTSYYLSITSVVSHPFQRIRMLTVYVRGAALIDMHPLADHARSALFSFTPTWITMCRAVLVSDMIRLQYFIPRRSSINTQQNLAVIGIHSVPIRSSRLGIARMEYQGQHGGHASSRADEHGNPAVTTGNAPTGMGAGHIQEPAREDKKTDGVLRRSGSSSSSSSSEDDGMGGRRKKGIKEKIKEKLPGGNKGNNQQQQQEHTTTTTGGAYGPQGHDTKIATGAHGGTAATTADAGGEKKGIVDKIKEKLPGQH

SEQ ID NO: 2343 - protein, 106 aa, Sorghum bicolor
AGMGGGQFQPAREEHKTGGILHRSGSSSSSSSEDDGMGGRRKKGIKEKIKEKLPGGHKDNQHATATGGGAAYGQQEHTGAGTYGTEGTGEKKGIMDKIKEKLPGQH

SEQ ID NO: 2344 - protein, 154 aa, Sorghum bicolor
MEYGQQGQHGHGTTGLDQYGNPVAARNRGMRTGTGHGAMLGLSTACSLAWVEHGQFQPAREGAKDRMHLHRSGSSSSSSSETDGMGGRRKKGIGEKIKEKLPGAHKDNQHATAPAAAAYGQQGHTGVRTYGTEGTASEKKGIMDKIKEKLPGQH

SEQ ID NO: 2345 - protein, 152 aa, Triticum aestivum
MEYGQQGQHGHGTTGRVDQYGNPVGAGTGGMGTGTGGMGQLGEHGGAGMGGGQFQPAREEHKTGGILHRSGSSSSSSSEDDGMGGRRKKGIKEKIKEKLPGGHKDNQHATATGGGAAYGQQEHTGAGTYGTEGTGEKKGIMDKIKEKLPGQH

SEQ ID NO: 2346 - protein, 158 aa, Triticum aestivum
MEYQGQQQHGQAATNRVAEYGNPVAGHGAGTGMGAHGGVGTGAGAAARGHFQPTREEHKAGGILQRSGSSSSSSSSEDDGMGGRKKNGIKDKIKEKLPGGHGDQQQTAGTYGQQGHTGTAGTGGTYGQPGHTGMAGTDSTGEKKGIMDKIKEKLPGQH

SEQ ID NO: 2347 - protein, 162 aa, Triticum aestivum
MEHGQATNRVDEYGNPVAGHGVGTGMGAHGGVGTGAAAGGHFQPTREEHKAGGILQRSGSSSSSSSSEDDGMGGRRKKGIKDKIKEKLPGGHGDQQQTAGTYGQQGHTGMTGTGAHGTTATGGTYGQQGDTGMTGTGTHGTDGAGEKKGIMDKIKEKLPGQH

SEQ ID NO: 2348 - protein, 160 aa, Triticum aestivum
MEHGQATIRVDEYGNPVAGHGVGTGMGAHGGSGTGAATGGHFQPTREEHKAGGILQRSGSSSSSSSEDDGMGGRRKKGIKDKIKEKLPGGHGDQQHADGTYGQQGTGMAGTGAHGSAATGGTYGQPGHTGMTGTGTHVTDGAGEKKGIMDKIKEKLPGQH

SEQ ID NO: 2349 - protein, 152 aa, Triticum aestivum
MEYQGHQQHGQATNRVDEYGNPVAGHGVGTGAAAGGHFQPSGEEHKAGGILQRSGSSSSSSSSEDDGMGGRRKKGIKDKIKEKLPGGHGDQQQTTDNTYGQQGHTAGMAGTGGTYGQPGHTGMAGTGTHGTDGTGEKKGVMDKIKEKLPGQH

SEQ ID NO: 2350 - protein, 158 aa, Triticum turgidum subsp. durum
MEYQGQQQHGQAATNRFAEYGNLVAGHGAGTGMAAHGGVGTGAVAAAGGHFQPTREEHKAGGILQRSGSSSSSSSSEDDGMGGRKKKGIKDKIKEKLPGGHGDQQQTAGTYGQQGHTGTAGTGGTYGQPGHTGMAGTDSTGEKKGIMDKIKEKLPGQH

SEQ ID NO: 2351 - protein, 150 aa, Triticum turgidum subsp. durum
MEFQGQHDNPANRVDEYGNPFPLAGGVGGGHAAPGTGGQLQARRGEHKTGGILHRSGSSSSSSSSEDDGMGGRRKKGMKEKIKEKLPGGHKDNQQHMATGTGTGGAYGPGTGTGGAYGQQGHAGMAGAGTGTGEKKGIMDKIKEKLPGQH

SEQ ID NO: 2352 - protein, 93 aa, Triticum turgidum subsp. durum
MEHQGHGTGEKKGIMENIKEKLPGGQGDHQQTAGTHGQHGHTGMTGTEMHDTTATGGTHGQQGLTGTTGTGTHGTGEKKSLMDKVKEKLPGQH

SEQ ID NO: 2353 - protein, 156 aa, Thinopyrum elongatum
MEYQGQQQHDQATTNRVDEYGNPVAGHGVGTGMGAHGGVGTGAAAGGHFQPTREEHKAGGILQRSGSSSSSSSSEDDGMGGRRKKGIKDKIKEKLPGGHGDQQQTAGTYGQQGHTGMAGTGGNYGQPGHTGMAGTDGTGEKKGIMDKIKEKLPGQH

SEQ ID NO: 2354 - protein, 131 aa, Elaeis guineensis
MADPIRRTDEYGNPIPEHQGHGGAVTGGTYGTTTTPHEGVLHGEGGRQQQVHPGKEEHPGGRHHRSGSSSSSSSSEDDGQGGRRKKGLKEKIKEKLPGGGHKSEEHGQTDEGQHEKKGMMEKIKEKLPGHH

SEQ ID NO: 2355 - protein, 81 aa, Sporobolus stapfianus
MDRQGQYGHGTTGRVDEYGNPVAGHGTGTGGMGMGTHGTGGMGMGTHGTGTGMGGQFQPTREEHKYGGILHRSISSSSSSS

SEQ ID NO: 2356 - protein, 246 aa, Helianthus niveus
ANYGGDKQYGRETRQTGDYENPIHSTGGQYEQDVRQTDEYGNPVRRTDEYGNPVHSTTGGTMGDYGSTGLGQGTGGIGTGGYGTTGHQGLGTGVGHTTGGTGTDYTSGGRFTGQTGYQGLGTESEFGGTTGTFQNQPSATPMGGTGLGSGTGAGFGGTGTGTGTGILHRSGSSSSSSSEDDGQGGRRKKKGVMQKIKEKLPGGHSQEGQYQSQTTTTTTAGGAGYGETHEKKGMMEKIKEKLPGHH

SEQ ID NO: 2357 - protein, 155 aa, Aster tripolium
MGSGGGYEKGKHGGIQNPLRSTDHEMGNKGTNIHSTTGGHGIGSTGTTMGSGGGQGYEEGKHGATGGILHRSGSGSSSSSEDDGEGGRRKKKGVIGKIKEKLPGGQQGSDEQSRLQAPATHVGAGGGGHGYQGEEVPEMMGLMNKIKDKLPGGNH

SEQ ID NO: 2358 - protein, 130 aa, Vitis riparia
MAYQQDPCANPTRQTGKTGGQTDQYGNPVHQTEALGAYGAGTGTGMHGGEHQQQPHQQPGVLHRSGSSSSEDDGQGGRRKKGMKEKIKERIPGMGRKDEQKQTSATSTPGQGQQQKGMMEKIKEKLPGAH

SEQ ID NO: 2359 - protein, 252 aa, Boea crassifolia
MADYQHHELKSEEPYAPTPVKIEEIDQPVEASDRGLFDFIGKKKDEEEEKKCDEGKFASEFDDKVQICDEKKEEPKFEVYEDPKLEVSEEPKEEEKKHESLLEKLHRSNSSSSSSSDEEEVEEGGEKKKKKKGLKDKVKEKITGDKKEEAAETKCEETSVPVEKYDEIHTLEPEEKKGFLDKIKEKLPGGKKTEEVYAPPPPKEDVAEYSTAPEAEGKEKKGFLDKIKEKLPGYHPKAEEEKEKEKREEACH

SEQ ID NO: 2360 - protein, 225 aa, Populus euramericana
MAEGNKSHEYETKVGEESGAVETKDRGLFDFLGKKEEEKPQEEVIATDFEEKLQVSEPETKVEEEHKKKEEEEKKPTLFEKLHRSGSSSSSSSSDEEEGDDEEKKKKKKEKRSLKEKMKISGEKGEEKEHEDTSVPVEVVHTETPHEPEDKKGFLDKIKEKLPGHKKADEVPPPAPEHVSPEAAVSHEGDAKEKKGLLEKIKEKIPGYHPKTEEEKEKEKESASQ

SEQ ID NO: 2361 - protein, 245 aa, Picea glauca
MAEQAPEHQDRGMFGLFGKKKEEEGRQDDQISQTPATHTHNEAQTEAASYYPTSPHEVKHGPGHGHEGQLTPEEAEQQKHKGLVGKLHRTHSSSSSSSSDEEEEGGKKKEVGRKKKGAKDKTKEKLPSGGHHSSDHCGGEEKKKAGMVDKIKEKLPGHQEKLPAGGEHSSDQCGTKEEKKTGLLDKIKDKLPGHQEKLPGGGQHSSDQYGGKQEKKMGLLDKIKEKLPGHENKNDGEEEEKKHPH

SEQ ID NO: 2362 - protein, 222 aa, Pinus sylvestris
MRRLRMRLASYYPACSSAWSRTRPMVTRGNFTPEEAEEKKHTGLIGKLHRTHSSSSSSSSDEEEEGEKKKEKERKKKEAKDKTNKKLPGDGQHSSDQSGIEEEKKVSLVDKFKEKLPAQPNKGEGEEKVEVEKKAGVKEKLPVQPNKGEREEKAEVEKKVGLLDKIKEKLPGHSNQKGRGREKKKKKQKWRKRRVLIDKIKEKLPGHHTKKEGEEEEKKQNY

SEQ ID NO: 2363 - protein, 535 aa, Spinacia oleracea
MADERNTYGGPAPSMETTDRGMFDFMKKNNKGEDHKPSEADVIASGGIGKLPVSEPAHYDHDDKEHVGLLEKKHIGLVEQFHRSDHASDERHHDEEQNKGGVFGKIKEKLPGQHDSDTTTHTQQLYPASDHNYNTHHVHQDDEKKDNILDKIKDKLPGKHEDKKQDYHQHQEEEKKGGALDKIKDKLPGQGNAGHTQQLYPAPDHNYNTHHVHQDEENKDSVLDKIKDKLPGQHEDKKNDYHHHQEEEKKDSVLDKIKDKMSGQHEDKKNDYHHHQEEEKKGGVLDKIKDKLPGQHDADTARHTQQLYPAADHNYNTHHVHQDEENKDSVLDKIKDKLPGQHDDKAAYSQHDHHKHHQEEENKGGVLDKIKDKLPGVYMVVKHDGDIVEHTQQLYPAPDHNYNTHYVHEDEKKKDSVLDKIKDKLPGQHEEKAAAYSEPSYDSHPTPAKHHDYFPQEEEKKGGVMDKIKDKLSGQHKDKADEHELVAPLVTVEPHSEGDKEKKGFLEKIKDKIPGLHSKNDAEEKKTHEEKKEGY

SEQ ID NO: 2364 - protein, 265 aa, Arabidopsis thaliana
MAEEYKNNVKEHETPTVATEESPATTTEVTDRGLFDFLGKKEEEVKPQETTTLESEFDHKAQISEPELAAEHEEVKENKITLLEELQEKTEEDEENKPSVIEKLHRSNSSSSSSSDEEGEEKKEKKKKIVEGEEDKKGLVEKIKEKLPGHHDKTAEDDVPVSTTIPVPVSESVVEHDHPEEEKKGLVEKIKEKLPGHHDEKAEDSPAVTSTPLVVTEHPVEPTTELPVEHPEEKKGILEKIKEKLPGYHAKTTEEEVKKEKESDD

SEQ ID NO: 2365 - protein, 294 aa, Arabidopsis thaliana
NHLKATTQVLKFSHIFYLLYKLLIKSRLTMAEEYKNNVPEHETPTVATEESPATTTEVTDRGLFDFLGKKEEEVKPQETTTLESEFDHKAQISEPELAAEHEEVKENKITLLEELQEKTEEDEENKPSVIEKLHRSNSSSSSSSDEEGEEKKEKKKKIVEGEEDKKGLVEKIKEKLPGHHDKTAEDDVPVSTTIPVPVSESVVEHDHPEEEKKGLVEKIKEKLPGHHDEKAEDSPAVTSTPLVVTEHPVEPTTELPVEHPEEKKGILEKIKEKLPGYHAKTTEEEVKKEKESDD

SEQ ID NO: 2366 - protein, 265 aa, Arabidopsis thaliana
MAEEYKNNVPEHETPTVATEESPATTTEVTDRGLFDFLGKKEEEVKPQETTTLESEFDHKAQISEPELAAEHEEVKENKITLLEELQEKTEEDEENKPSVIEKLHRSNSSSSSSSDEEGEEKKEKKKKIVEGEEDKKGLVEKIKEKLPGHHDKTAEDDVPVSTTIPVPVSESVVEHDHPEEEKKGLVEKIKEKLPGHHDEKAEDSPAVTSTPLVVTEHPVEPTTELPVEHPEEKKGILEKIKEKLPGYHAKTTEEEVKKEKESDD

SEQ ID NO: 2367 - protein, 260 aa, Arabidopsis thaliana
MAEEYKNTVPEQETPKVATEESSAPEIKERGMFDFLKKKEEVKPQETTTLASEFEHKTQISEPESFVAKHEEEEHKPTLLEQLHQKHEEEEENKPSLLDKLHRSNSSSSSSSDEEGEDDEKKKKEKKKKIVEGDHVKTVEEENQGVMDRIKEKFPLGEKPGGDDVPVVTTMPAPHSVEDHKPEEEEKKGFMDKIKEKLPGHSKKPEDSQVVNTTPLVETATPIADIPEEKKGFMDKIKEKLPGYHAKTTGEEEKKEKVSG

SEQ ID NO: 2368 - protein, 260 aa, Arabidopsis thaliana
MAEEYKNTVPEQETPKVATEESSAPEIKERGMFDFLKKKEEVKPQETTTLASEFEHKTQISEPESFVAKHEEEEHKPTLLEQLHQKHEEEEENKPSLLDKLHRSNSSSSSSSDEEGEDGEKKKKEKKKKIVEGDHVKTVEEENQGVMDRIKEKFPLGEKPGGDDVPVVTTMPAPHSVEDHKPEEEEKKGFMDKIKEKLPGHSKKPEDSQVVNTTPLVETATPIADIPEEKKGFMDKIKEKLPGYHAKTTGEEEKKEKVSD

SEQ ID NO: 2369 - protein, 205 aa, Arabidopsis thaliana
GKTQISEPESFVAKHEEEEHKPTLLEQLHQKHEEEEENKPSLLDKLHRSNSSSSSSSDEEGEDGEKKKKEKKKKIVEGDHVKTVEEENEGVMDRIKEKFPLGEKPGGDDVPVVTTMPAPHSVEDHKPEEEEKKGFMDKIKEKLPGHSKKPEDSQVVNTTPLVETATPIADIPEEKKGFMDKIKEKLPGYHAKTTGEEEKKEKVSD

SEQ ID NO: 2370 - protein, 185 aa, Arabidopsis thaliana
MAEEIKNVPEQEVPKVATEESSAEVTDRGLFDFLGKKKDETKPEETPIASEFEQKVHISEPEPEVKHESLLEKLHRSDSSSSSSSEEEGSDGEKRKKKKEKKKPTTEVEVKEEEKKGFMEKLKEKLPGHKKPEDGSAVAAAPVVVPPPVEEAHPVEKKGILEKIKEKLPGYHPKTPVEEEKKDKE

SEQ ID NO: 2371 - protein, 185 aa, Arabidopsis thaliana [sequence omitted]

SEQ ID NO: 2372 - protein, 183 aa, Arabidopsis thaliana
MAEEYKNTVPEHETPKVATEESSAPEIKERGMFDFLKKKEEVKPQETTTLASEFEHKTQISEPESFVAKHEEEEHKPTLLEQLHQKHEEEEENKPSLLDKLHRSNSSSSSSSDEEGEDGEKKKKEKKKKIVEGDHVKTVEEENQGVMDRIKEKFPLGEKPGGDDVPVVTTMPAPHSVEDHKPE

SEQ ID NO: 2373 - protein, 199 aa, Brassica oleracea
MAEETKNVHEHEAPKVATEESSTATGEVTDRGLFDFLGKKKDETKPEETIDSEFEQKVHISEPVPEVKHEEEKEEKKHSLLEKLHRSDSSSSSSSEEEGEDGVKRKKKKDKKKVTATEGEVKTEEEKKGFMDKLKEKLPGHGKKPEEKPEDASPAPVVAPPVEEAHPAEKKGILEKIKEKLPGYHSKTVEEEKKDKDDH

SEQ ID NO: 2374 - protein, 234 aa, Citrus x paradisi
MAEEIKKQQKSHEYEPSVGTEGAVETKDRGMLDFLGKKEEEKPQHHDQEVIATEFEKVHVSEPQPKVEEHRKEEKEEEKKPGFLDKLHRSTSSSSSSSDEEEGDDEEKKKKKKEKKGLKEKLKEKISGEKEEDTTVPVEKLDDVHAPHHQEEAHPEEKKGFLNKIKEKLPGQQKKPGDHQVPSPPAAEHPTSVEAPEAEAKEKKGILEKLKEKLPGYHPKSEDEKDKDKETAAH

SEQ ID NO: 2375 - protein, 211 aa, Glycine max
MADETQNKYESSEVEVQDRGVFDFLGKKKDEEDKPHPQEEVIATEFQKVTVSDQGENKHSLLEKLHRSDSSSSSSSEEEGEDGEKRKKKKKEKKGLKEKIEEKIEGDHHHHKDEDTSVPVEKVEVVETAHAEEKKGLLDKIKEKLPGHKKTEEATATTPPPPPPVASLEHGEGAHHEGEAKEKKGILEKIKEKLPGYHSKTEEEKEKKKKR

SEQ ID NO: 2376 - protein, 110 aa, Glycine max
  unsure (1)..(110): unsure at all Xaa locations
MEDERSTQSYQGGEAAEQVEVTDRGLLGNLLGKKKAEEDKEKEEELVTGMEKVSVEEPEVKKEEHEDGEKKETLFSKLHRSSSSSSSSSDEEEEEVIDDNGEVIKKKKKX

SEQ ID NO: 2377 - protein, 214 aa, Glycine max
MADETQNKYESSEVEVQDRGVFDFLGKKKDEEDKPHPQEEVIATEFQKVTVSDQGENKHSLLEKLHRSDSSSSSSSEEEGEDGEKRKKKKKEKKGLKEKIEEKIEGDHHHHKDEDTSVPVEKVEVVETAHAEEKKGFLDKIKEKLPGHKKTEEATATTPPPPPPVASLEHGEGAHHEGEAKEKKGILEKIKEKLPGYHSKTEEEKEKEKESGAH

SEQ ID NO: 2378 - protein, 208 aa, Glycine max
MADETQNKYESSEVEVQDRGVFDFLGKKKDEEDKPHPQEEVIATEFQKVTVSDQGENKHSLLEKLHRSDSSSSSSSEEEGEDGEKRKKKKKDNKAQRKIEEKIEGDHHHHKDEDTSVPVEKVEVVETAHAEEKKGFLDKIKEKLPGHKKTEEATATTPPPPPPPVASSHHEGEAKEKKGILEKIKEKLPGYHSKTEEEKEKEKESGAH

SEQ ID NO: 2379 - protein, 193 aa, Glycine max
  unsure (1)..(193): unsure at all Xaa locations
MADETQNKYESSEVEVQDRGVFDFLGKKKDEEDKPHPQEEVIATEFQKVTVSDQGENKHSLLEKLHRSDSSSSSSSEEEXXKIEGDHHHHKDEDTSVPVEKVEVVETAHAEEKKGFLDKIKEKLPGPKKTEEAPATTPPPPPPVASLEHGEGAHHEGEAKEKKGLLEKIKKKLSGYPSKKKEEKEKEKESGAP

SEQ ID NO: 2380 - protein, 214 aa, Betula pubescens
LGKKQEEKPQEEVLVDEFEKVKVSDQSHPKVGKYYEEDYEVEELKKKDKHGLLEKLRRSGSSSSSSSDEEEGEGEEKKKKRKEKKEKKGTLKEKLAGEKEEEKYEKQHEEKYEKPYEEKYEKPYEEKYEKPYEEKYEKHEDTTVPVHVEKYEEAEATQFPAEPVHVEKYEEAEVAYIPEKPAGVPVHEAKYEEEVAHIPAEPAHPEEKKGFLEK

SEQ ID NO: 2381 - protein, 202 aa, Phaseolus vulgaris
MAEETQNKYETAESSEVEVQDRGVFDFLGKKKEEEKPQEEVIVTEFEKITVSEEKKEEEGEKKHSLLEKLHRSDSSSSSSSEEEGEDGEKKKKKKKEKKEKKKIEEKIEGYHKEDTSVPVEKVEVVESEEKKGFLEKIKEKLPGHKKSEEAAAPPPPPPAATSSEHEGEAKEKKGILEKIKEKLPGYHSKTEEEKEKESGGH

SEQ ID NO: 2382 - protein, 216 aa, Pisum sativum
MAEENQNKYEETTSATNSETEIKDRGVFDFLGGKKKDEEHKPAQDEAIAHEFGHKVTLYEAPSETKVEEEGEKKHTSLLEKLHRSDSSSSSSSEEEGEDGEKRKKKKEKKKKEDTSVPVEKVEVVEGTTGTEEEKGFLDKIKEKLPGGHKKTEEVTTPPPVVAAHVPTETTATTTIHEGEKKGILEKIKEKLPGYHAKTATDGEDKDHHKDETTSH

SEQ ID NO: 2383 - protein, 258 aa, Daucus carota
MASDDSVPQHSVEKTTEYESSDRGLFDFMKKEEKDETKVIATEFEEKVQVSEPEPKYEDCKVVEEEEEKAAKPSLLEKLHRSGSSSSSSSSDEEVEEGGEKKKKKEKKGLKEKIEEKIHHKEEDTSVPVEVVTEPEKKKGFMEKIKEKLPGGGKKVEEETVAPPPPPAAAPVDCAVEGDPAKKGILEKIKEKIPGYHPKTSTEEEKKDNDCASAKLIIRCLDRMFDYYYYASFSCGVGLILCFDPLLWGPLISFGTSG

SEQ ID NO: 2384 - protein, 209 aa, Solanum tuberosum
MADQYEQNKPSVEETVGANVEATDRGLFDFIGKKKEEKPSHAHEEEAISSEFCEKVKVSEEEHKEEEKKEEKKLHRSSSSSSSSSDEEEEIGEDGQIIKKKKKKGLKEKIKEKISGDHKEEVKTEDTSVPVEKYEETEEKKGFLDKIKEKLPGGGHKKTEEVAAPPPPPPAAVEHEAEGKEKKGFLDKIKEKLPGYHSKTEEEKEKEKN

SEQ ID NO: 2385 - protein, 290 aa, Oryza sativa
MEDERNTESHQGGEAAEQVEVKDRGLFDNLLGRKKDDQPEEKKHEEELVTGMEKVSVEEPKKEEHHAEGEKKESLLSKLHRSSSSSSSSSDEEEEVIDDNGEVVKRKKKKGLKEKIKEKLPGHKDHAGEHAPPPAATGFPAPAPPASVVTAAPTPAPAPVVTHGDHHHDTAVPVEKIEGDHAKTEATLPRAPEEEKKGFLDKIKEKLPGGHKKPEDATAVPPPAASPAAPATTPAPAHPPPATEEVSSPDGKEKKGILGKIMEKLPGYHKGSGEEDKTAAAATGEHKSSA

SEQ ID NO: 2386 - protein, 275 aa, Oryza sativa
MEDERNTESHQGGEAAEQVEVKDRGLFDNLLGRKKDDQPEEKKHEEELVTGMEKVSVEEPKKEEHHAEGEKKESLLSKLHRSSSSSSSQSSDEEEEVIDDNGEVVKRKKKKGLKEKIKEKLPGHKDHAGEHAPPPAATGFPAPAPPASVVTHHDTAVPVEKIEGDHAKTEATLPRAPEEEKKGFLDKIKEKLPGGHKKPEDATAVPPPAASPAAPATTPAPAHPPPATEEVSSPDGKEKKGILGKIMEKLPGYHKGSGEEDKTAAAVTGEHKSSA

SEQ ID NO: 2387 - protein, 154 aa, Oryza sativa
MEDERNTESHQGGEAASVVTAAPTPAPAPVVTHGDHHHDTAVPVEKIEGDHAKTEATLPRAPEEEKKGFLDKIKEKLPGGHKKPEDATAVPPPAASPAAPATTPAPAHPPPATEEVSSPDGKEKKGILGKIMEKLPGYHKGSGEEDKTAAAATG

SEQ ID NO: 2388 - protein, 137 aa, Oryza sativa
MATPAPVVTHGDHHHDTAVPVEKIEGDHAKTEATLPRAPEEEKKGFLDKIKEKLPGGHKKPEDATAVPPPAASPAAPATTPAPAHPPPATEEVSSPDGKEKKGILGKIMEKLPGYHKGSGEEDKTAAAATGEHKSSA

SEQ ID NO: 2389 - protein, 165 aa, Lavatera thuringiaca
MAEEHNKKIAECTVETQDRGTFDLSGNKKEDEKPQVQADVIANYVDKVKDEETKADKEHKEDEKSSSDKEEVESGEMKKEGDCEKKGVMEKIKEKLPGQHKKDEEVVTAPPPPAAVSSESIVVEHHEEESKEKKGIMEKIKEKLPGYHSKTEDEKEKETSTAANH

SEQ ID NO: 2390 - protein, 83 aa, Saccharomycetales
TRTNKWTEREGKANPKYFSHTGNYGQSPNHIKKQGSGKGNWGKPGDEIDDLIDSGEIPPVFKKDRRGSNLQSHEQKFENVQKE

SEQ ID NO: 2391 - protein, 1864 aa, Burkholderia fungorum
MAMGQKSGRLIRCARSEFRVRLRPVDRLRSAASGPPVARSGLYPDGRSAGRADRTAGNDHAAGHRTDAAARTARLQKRRRDAPESELSAAAGAARARTRDAGRSVGQARRQRLQADQDHRAARLRARLGSLAKRPVRGRSEKRRHRQLRRDPRLSVGRSRLARRSARQTVARGARRHARARRANRHSAGEGLVDHRRGQRRRAAQLLGRARAVFQGARRRARPRPRAHASGRARRRRAGPRTGLLRSCAGLVRHGFHRRPLSFRRSRTSRAELEKCMRLSALALSLRLALSLTAVCCVATVSPDALAQASKDPLNVLIDQGKYWQSHQRGDLAEQAWQKVLRIDPKQPDALFGMGMVLADRKDGAGAQQYLARLKAVAPNYPNLDELGRRLGESSLRDQSVNDARRLAQSGQSASAVQEYQRALTGKPATPELQLEYYQALSATPQGWDQARRGLEQLARDNPDDPRYALAYAQHLTYRDVTRRDGIARLQKLAGDSTVGASAKKSWRQALLWLDARPSDAALYQAYLQTATDDAAVKARFDSMVQQDSTARARAQENAAVDARGRAIADGFAALDRNDVATARAKFSSVLATSPNDTDALGGMGIAALKQERFAEARNDLERASRNGNPARWKTALDSATYWTYTSDAIGARSNGEFAKAKSLFERAIALNPSDVTAQVLLGEMLLANGDPVGAEQAYRMALRRQADNPDAVRGLVGALAAQGRGDEALQFANQLNAEQQSKAGGINRLRGEAQAAQARAAEARGDLGSARSLFEDALLNTPDDPWLRLDLARIYVRQGAVANARSMMDGLLAAHPDMTDALYASALLSAETQDWSTGLAQLDRIPLAQRTDAMTTLQHRLWVHQQADLATRMARSGQTQQALATLHAAEPVAGNSPELIGVIAAAYQQAGDPNRALGLVRAAMNAAPGNTDLLLQYAGILSATQQEAELGMVMRRLASMQLTPQQRTDFGNLNLGIVIKQCDAVRQRGDLAGAYDVIAPWLAAMPDNPDLQAALGRLYSTAGDDRNAVASYRVALQRKPDDLSLLQATISAAAGAKQFSYAESLATQALNAAPGDPGVLATVGRMYRAEGKLSLASTFLQRSLVAANTPLMANAPRNPASNVPRGWEVAMRRIGATPLPGTNPFEGKTATVTPTDADNAALAGGSYNAARASLPYSQSSLPTQTVPNYPPPTQPAPYVAPYTAPAQPYAPNRAPAALPYNAPRQGADSGGYGQEAYGSSQSGAPLQPYPGQGQPPMQPQAQMPPMQQAPQYNPAYPQQAPYPQAQAPYPQQAQYGAPDGYAATPWPMSPAAREAQTNAGSMQQQPYGAPGASTKRPAGRKQSASKNSRNAPAYAQAPYGQQQGYPQQQQAYYGQPAYAQQQQQGYPQQPYQPYQPYPPQQQGYENQGSYQGYYAQQQPYIPQPPTGYAQPYYPAQPGANGGGNTYAPSNVASAQTLGVAEELAQVNREQSSSISGGIVFRNRSGEDGLSNLTDIEAPIQGRIRAGNGHVVVTATPVTLDAGSAAGNVSTLARFGSGLSNSTSETAAIAGNNTYGSQTASGVGLSVGYEGRQLSGDIGVTPIGFRETNIVGGAQYNGGITDKVSYSLAIARRAVTDSLLSYAGARDAGSGLEWGGVTSNGGLGSLAWDDGTSGLYVNAAFQYFDGTNVPGNTAVKGGGGVYTRLLKDADQTLTVGVNTTLMRYDKNLSYFTYGQGGYFSPQQYVILNLPVEWTGRNGAFTYDVKGSIGVQHYRQDSSNYFPLNDGSNRQSSAAANAGFVGTGVDSGAVYPGQSKTGVSYSLSAVGEYQLAPQLAFGATASLGNAYEYREWLAAVYVRYSFSKQTGLQPFPPAPLTSPYLSLSN

SEQ ID NO: 2392 - protein, 98 aa, Arabidopsis thaliana
MSQYNQPPVGVPPPQGYPPEGYPKDAYPPQGYPPQGYPQQGYPPQGYPQQGYPQQGYPPPYAPQYPPPPQHQQQQSSPGFLEGCLAALCCCCLLDACF

SEQ ID NO: 2393 - protein, 101 aa, Arabidopsis thaliana
MSQQPPAVGVPPSHAYPAEGPPKDAYPPPGQPYPQQGYPPPQGYPQQGYPPQGYPPQGYPEQGYPQQGYPPQQQQQQKHSPGMLEGCIAALCCCCVLDACF

SEQ ID NO: 2394 - protein, 82 aa, Arabidopsis thaliana
MYHQEQHPVGAPPPQGYPPKDGYPPAGYPPAGYPPPGYAQGYPAQGYPPPQYSQAPQQKQNAGMLEGCLAALCCCCLLDACF

SEQ ID NO: 2395 - protein, 82 aa, Arabidopsis thaliana
MYHQEQHPVGAPPPQGYPPKDGYPPAGYPPAGYPPPGYAQGYPAQGYPPPQYSQAPQQKQNAGMLEGCLAALCCFCLLDACF

SEQ ID NO: 2396 - protein, 104 aa, Glycine max
TSRSTRVRTLLYVFLTMSQYNQPPVGVPPPQGYPPEGYPKDAYPPQGYPPQGYPPQGYPQQGYPPPYAPQYPPPQHQQQQKGSPGFLEGCLAALCCCCLLDACF

SEQ ID NO: 2397 - protein, 113 aa, Glycine max
NRKKKTPLPLPFTMSYYNQQQPPVGVPPPQGYPPEGYGKEGYPPPGYPPAGYPPPYPPQQGYPPPPYPAQGYPPPYAPQYAQPPPRQQNSTGPGCLGCLAALCCCCLLDACFK

SEQ ID NO: 2398 - protein, 130 aa, Glycine max
SEFRRRKVPFLYACACCSYTHRPIESESGSIILILNFFSWIGYPPEGYGKEGYPPPGYPPAGYPPAGYPPPGYPPQQGYPPPPYPAQGYPPPYAPQYAQPPPRQQNSTGPGCLEGCLAALCCCCLLDACF

SEQ ID NO: 2399 - protein, 140 aa, Glycine max
RARRLPPSLPVSFPASLSSSSPAAPAEAKHGDSTAAMSYYGQQQPPVGVPPQQGYPGKEEYPPAGYPPAGYPPPGQGQGYPPQGYPPQQGGYPPQQGGYPPQQGYPQQGYPQQGYPPQYAQQPPRQQQSSGPSFMEGCLA

SEQ ID NO: 2400 - protein, 150 aa, Triticum aestivum
TQTPASQTRPSRARPARREAPAGGRESPKPQRLKQSPAAPAPIAARNQRETPEPEEEEEMSYYNQQPPVGAPPPQGYGDKGGYPPPGYPPAGYPPPAQGYPPAGYPQQGYPPQYAQQPPPHQQQQQSSGPSFMEGCLAALCCCCLLDACF

SEQ ID NO: 2401 - protein, 203 aa, Ajellomyces capsulatus
MSGPYDNQNNPNYYGQGGYPPQQGYGQAPPDQYNQGQYPPQQGYGQPAYGQQHPPQQHGNEQQGYYGQHQQQQPYDPNQQGYPQQPHQQPQYDNQGVAQQHQQQAGAPGGAQDGERGLGGALTGGLAGGFMGHQANHGILGTIGGAILGSIAEDKLKDNKKHKHSNSGGHHSHGGSHHGGSQYGGGGSSNFLGSAAGSLFGKK

SEQ ID NO: 2402 - protein, 129 aa, Candida albicans
MSKDEYFGKPSGPPPNYNNQPQSQQPQQSYVPQSQPNYSQQTQDRGMFSGGGGGHGHYQQQQGYNAYGPPPPQGGYYQQQPGGGGGYYQQQQQQQPMYVQQQPRSGGNDSCLMGCLAALCVCCTLDMLF

SEQ ID NO: 2403 - protein, 86 aa, Sporobolus stapfianus
MSYYGQQPPVGVPPQQGYPGKDGYPPQGYPPAGYPPQQGYPPQGYPQQGYPPPYAQAAAQQQQSGPSFMEGCLAALCCCCLLDACF

SEQ ID NO: 2404 - protein, 108 aa, Saccharomyces pastorianus
MSDTGRKGFGDKASEALKPDSQKSYAEQGKEFITDKADKVAGKVESNDNKGVFQGVHDSAQQGKDNADSQGESFADQARDYMGAAKSKLNDAVEYVSGRAHEEDPTKK

SEQ ID NO: 2405 - protein, 112 aa, Glycine max
MSDALRQSTTDKAASSLKPDSQKSGLEQAGDSIKGAADNVAGSVQPSGEKSATQKASDTVSGSNENASKQGQSVLDSASETVGNAAQSAQDALEEVNASYHEDLTPLSHQPT

SEQ ID NO: 2406 - protein, 106 aa, Glycine max
  unsure (1)..(106): unsure at all Xaa locations
MSDSMRKGLGEQASEKITPDSQKSTTEKASESLTGAGDRIAGAVQPEGQKSTGQKLGDATRSGGDEGQGVMKQAQDALGNAGQSISDTLSGATGQKKXSTLFSFAW

SEQ ID NO: 2407 - protein, 116 aa, Glycine max
  unsure (1)..(116): unsure at all Xaa locations
MSDIGRQSLGDKAGAALKPDSQKTYLEQAGDAIKGKADSAASTGQPESQKSYTQQAGDALSGNQNENKGSLLDSAKDALGMNNNNRAXVDRYRSGAXVGXSEGRRKKTFSSLYYYE

SEQ ID NO: 2408 - protein, 81 aa, Glycine max
  unsure (1)..(81): unsure at all Xaa locations
MSDIGRQSLGDKAGAALKPDSEKSYVEQATDYVKGTLDSVASAVQPQQEKSTTQKVGDALTGDNKNKDIAXMSLGDTTRLD

SEQ ID NO: 2409 - protein, 111 aa, Glycine max
  unsure (1)..(111): unsure at all Xaa locations
MSDMGRQSLGDKAGAALKPDSQKTYLEQATDAVKGKADSAASTGQPDSQKSWTQSAGDAISGNQNENSGSILDSAKNALGXERQEGLIDRRPTNDDPHRSTMVACILVPTY

SEQ ID NO: 2410 - protein, 143 aa, Zea mays
  unsure (1)..(143): unsure at all Xaa locations
MSDLGRKGLGDQVQEKVTPDSQKSTLDQAKEGVTGAYDRAAGAVQPEQDKSATQKLGDSTRSGKDEASGQGQGILASAQETLGNAAQSVQDTLGGKKXTASLRHDXRLRPSYSRFSPSALHYEYPIRTSVEEVSVSLYPRTYQ

SEQ ID NO: 2411 - protein, 126 aa, Zea mays
  unsure (1)..(126): unsure at all Xaa locations
MSDSMRKGLGEQASEKITPDSQKSTTEKASESLTGAGDRIAGAVQPEGQKSTGQKLGDATRSGGDDASNQGQGVMKQAQDMASNAGQSISDTLSGATGQKKXSTPLLVRLVATMPSSSSLLYGMKT

SEQ ID NO: 2412 - protein, 114 aa, Zea mays
  unsure (1)..(114): unsure at all Xaa locations
MSDNLRKGLGEQASEKITPDSQKSTTSKIGENVSGAADKAASAVQPEGQKSTTQKVGDATRGGSDNAQNQGEGVLKQAQDGLSNAAAGVQNALXRWQAVDYFGSAVAVRLSLAA

SEQ ID NO: 2413 - protein, 116 aa, Zea mays
  unsure (1)..(116): unsure at all Xaa locations
MSDSMRKGLGEQASEKLQPDSTKSNTEKASETLSGAGDRIAGAVQPEGQKSAGQKLGDATRSGHDDASNKSEGVMKQAQDSLSNAGQAISDTLSGGQKKXTASLPRPRSSRHDPGE

SEQ ID NO: 2414 - protein, 110 aa, Zea mays
  unsure (1)..(110): unsure at all Xaa locations
MSDLGRKGLGEQAKEKVTPDSQKSTLDKAGESVSGLGDKAASAVQPEGQKSTTQKLGDSTRSGGDKAQNQGSGILDSAQQGLSNAGQAVTDTFNSATGNKKXTASFMTSL

SEQ ID NO: 2415 - protein, 115 aa, Zea mays
  unsure (1)..(115): unsure at all Xaa locations
MSDALRQSTTDKAASSLKPDSQKSGLEQAGDKVKGAADNLAGSAQPSGEKSATQKASDTVSGSNENASKQGQSVLDSASETVGNAAQSAQDALGLXARSKHFSHEDLTPLSHQPT

SEQ ID NO: 2416 - protein, 89 aa, Zea mays
MSDAGRKDFSTKAKEEITPDSSKSTQEKVKESFTDTTDRLARGVQSDDSKSSTQEAFDKTQRSYDNHAHGGATGSIGDKIKDTLGLGNN

SEQ ID NO: 2417 - protein, 532 aa, Adiantum capillus-veneris
MSEQGCYTDCWGAIWWIWESGIKAMAGLEGEIQTRRLRGREIPVLPPVTRSAAASAANVGYNENTRKTKVSTKRAAADDTSSRVASNVPVQHAKKRAALANLTNQSNSAITRNSSLPSKSHASAVNGKTRAAAGQVKEVQQVAQQVVEPLQEVGREPNTGRSSLANSSITFDNDENACPERATSSVGMKSRTLDVLQLVGNENKTVASLERKTQHSLYISKDTKPRARQGGLFEDCKDDNEEGGWSSKNYMDIDNHKDPQMCSAYAAEIYHHLRMAELKRRPSLNFMDTVQQDINASMRGILVDWLVEVAEEYKLVPDTLYLTISYIDRFLSGNLVTRQRLQLLGVASMLIASKYEEICAPQVDEFCYITDNTYNREEVLEMERSVLNHLHFELTGPTTKSFLRRFVRAAQAGQKSPTLQLEFLGNYLAELTLLEYGFLHFLPSMIAGAAVLVARVTLNPTWRPWNSTLQHYSGYKASELKECAKAILELQKNTKNCTLPAIREKYRQHKFKCVATLHPPASIPAEYFDDIE

SEQ ID NO: 2418 - protein, 478 aa, Aspergillus nidulans
MNENDENGPSTRLTRAKAAALTTDAPAANGALKKPLQTKKAATGANGTQRKRAALGDVSNVGKADNGETKDAKKATSKTGLTSKATMQSGGVQKLSRSNLSRTAVGAKDNNVKKPATEAKRPGSGSGMGSAMKRTSSQKSLQEKTIQQEEPPRKKVDIEKVVEKQAEAVSVKGDVKAGAQTEELEKPQDFVADLDTEDLDDPLMAAEYVVEIFDYLRELEMETLPNPDYIDHQPDLEWKMRGILVDWLIEVHTRFRLLPETLFLAVNIIDRFLSAEVVALDRLQLVGVAAMFIASKYEEVLSPHVANFSHVADETFSDKEILDAERHILATLEYNMSYPNPMNFLRRISKADNYDIQTRTLGKYLMEISLLDHRFLGYPQSQIGAAAMYLARLILDRGPWDATLAHYAGYTEEEIDEVFRLMVDYLHRPVCHEAFFKKYASKKFLKASIMTRQWAKKYHHLYIDSALTEPYNSIKDNE

SEQ ID NO: 2419 - protein, 360 aa, Physcomitrella patens
MSPSVDCLASLYCAEDVSGTAWNESEMCGAADRVFESQPAVFMDFPVEDDEAIATLLMKEAQFMPEADYLERYQSRKLSLEARLAAIEWILKVHSFYNYSPLTVALAVNYMDRFLSRYYFPEGKEWMLQLLSVACISLAAKMEESDVPILLDFQVEQEEHIFEAHTIQRMELLVLSTLEWRMSGVTPFSYVDYFFHKLGVSDLLLRALLSRVSEIILKSIRVTTSLQYLPSVVAAASIICALEEVTTIRTGDLLRTFNELLVNVESVKDCYIDMRQSEIGPYCVRMGLKRKILHASEPQSPVGVLEAADVSSPSGTVLGFSSRESSPDVTDSPPSTNSQRKRRKLCLHNESCLHVESASL

SEQ ID NO: 2420 - protein, 372 aa, Chenopodium rubrum
MAPSFDLLCAEDNSSIFDEVDDNYYGVVDDDVLQICNLQQQHGNLRNFDDFTLILLIIIKEHNFEALISGFFVANHECLASLFDNERQHFLGLDYLKRFRNGDLDLGARNLVIDWIHKVQSHYNFGPLCVYLSVNYLDRFLSAYELPGKAWMMQLLGVACLSLAAKVDETDVPLILDLQVSESKFVFEAKTIQRMELLVLSTLKWRMQSVTPFSFIDYFLYKLSGDKMPSKSLIFQAIQLILSTIKGIDLMEFRPSEIAAAVAISVTQQTQIVEFTDKAFSFLTDHVEKERLMKCVEIMHDLRMSSRSNGALASTSVPQSPIGVLDASACLSYKSDDTSTTPSGSCGNSAHSSPASAPPPKRRKLDRTSQIS

SEQ ID NO: 2421 - protein, 349 aa, Chenopodium rubrum
SKTHFKMTTLETEQEQQPFSQNSPLFLDCLYCEEKYWDYDYHDEDDFGSLNSSKLHDCSLICCEDDEEIQLNALVSKEEKINFDEGDLGGNQLVMETRREALEWMIRVNYHHNFSVITLVLGVNYFDRFMLSFGFQKEMPWMTHLAAVACLSLASKVEETHVPLLLDFQVEHEQIFEAKVVQRMELLVLQHSNGKMNAVTPLSYFGHLIRKLKLKPHFHCKILTRCENIIVSVILDPRFLCYVPSVLAAASMVQTLKEIGLWSILEHQNDIMNTLKLDKVKVEDCYNFIQEVSSNEKARKRKWYNNISSANRNPNNVLELVVSSESSNNDLPSETLPKKCRTMGPPCFG

SEQ ID NO: 2422 - protein, 352 aa, Lagenaria leucantha
MVPPYALDSLYCSEDHWENDDEEEERGFHEQPYSNLTTESSSPILAVAEQDLFWENDELISLFSREKPNELFKTIQIDPSLAAARRSAVGWMLKVNAHYSFSALTAVLAVDYLDRFLSCFHFQRDKPWMSQLAAVACISLAAKVEETQVPLLLDLQVEDSRYLFEAKTIKKMELLVLSTLQWRMNPVTPFSFVDYISRRLGFKEHICWEILWQCERTILSVILESDFMSFLPSVMATATMLHVFKAMEEPTLSVEYDSQLLNILGIDKGNVEECCKLISNASRRNGNQFKKRKIGSIPGSPNGVMDVSFSSDSSNDSWSVASSVSSSPEPLTKKNRANGSMSGDCETFRTLS

SEQ ID NO: 2423 - protein, 380 aa, Lagenaria leucantha
MKKMALHSNKHRTQRLHNSLFFFDFLHCTEQQHLQTEHPIFLNNGGTNDFPLFQQTTTHFLVYEDEELNHLLSKEKDQNLQTGAVLKTLVQTDNALSLARTEAIDWLLKVNAFYGFSSLTALLAINYLDRILSGPYFQRDKPWMLQLAAVTCISLAAKVEEIRVPLLLDLQVEDSKYIFEAKTIQRMELLVLTALQWKMHPVAPVSFLGIITKGLGMKNQYIQREFLRRCERILLSLVSDSRSVGILPSIMAVSAMVSVVEEMGNCNPLEEFQDQLLNALKINKGRVKECCKVIMEAKIKGSGKRKHVEEEAEAEAESESSEAETEGEAEAEAGSPNGVMEANFSCESSNDSWEMGTIVSEYTHFSSSSSSSSKRIRPTR

SEQ ID NO: 2424 - protein, 361 aa, Arabidopsis thaliana
MAENLACGETSESWIIDNDDDDINYGGGFTNEIDYNHQLFAKDDNFGGNGSIPMMGSSSSSLSEDRIKEMLVREIEFCPGTDYVKRLLSGDLDLSVRNQALDWILKVCAHYHFGHLCICLSMNYLDRFLTSYELPKDKDWAAQLLAVSCLSLASKMEETDVPHIVDLQVEDPKFVFEAKTIKRMELLVVTTLNWRLQALTPFSFIDYFVDKISGHVSENLIYRSSRFILNTTKAIEFLDFRPSEIAAAAAVSVSISGETECIDEEKALSSLIYVKQERVKRCLNLMRSLTGEENVRGTSLSQEQARVAVRAVPASPVGVLEATCLSYRSEERTVESCTNSSQSSPDNNNNNNNSNKRRRKQ

SEQ ID NO: 2425 - protein, 383 aa, Arabidopsis thaliana
MAENLACGETASHGSLTTTMMISTMAADFTNEIDYNHQLFAKDDNFGGNGSIPMMGSSSSSLSEDRIKEMLVREIEFCPGTDYVKRLLSGDLDLSVRNQALDWILKVCAHYHFGHLCICLSMNYLDRFLTSYELPKDKDWAAQLLAVSCLSLASKMEETDVPHIVDLQVEDPKFVFEAKTIKRMELLVVTTLNWRLQALTPFSFIDYFVDKISGHVSENLIYRSSRFILNTTKAIEFLDFRPSEIAAAAAVSVSISGETECIDEEKALSSLIYVKQERVKRCLNLMRSLTGEENVRGTSLSQEQARVAVRAVPASPVGVLEATCLSYRSEERTVESCTNSSQSSPDNNNNNNNSKQEEEKTMRENKRVIHCLLQPKTTSTHDI

SEQ ID NO: 2426 - protein, 308 aa, Arabidopsis thaliana
MAEENLELSLLCTESNVDDEGMIVDETPIEISIPQMGFSQSESEEIIMEMVEKEKQHLPSDDYIKRLRSGDLDLNVGRRDALNWIWKACEVHQFGPLCFCLAMNYLDRFLSVHDLPSGKGWILQLLAVACLSLAAKIEETEVPMLIDLQVGDPQFVFEAKSVQRMELLVLNRLKWRLRAITPCSYIRYFLRKMSKCDQEPSNTLISRSLQVIASTTKGIDFLEFRPSEVAAAVALSVSGELQRVHFDNSSFSPLFSLLQKERVKKIGEMIESDGSDLFSQTPNGVLEVSACCFSFKTHDSSSSYTHLS

SEQ ID NO: 2427 - protein, 308 aa, Arabidopsis thaliana
MAEENLELSLLCTESNVDDEGMIVDETPIEISIPQMGFSQSESEEIIMEMVEKEKQHLPSDDYIKRLRSGDLDLNVGRRDALNWIWKACEVHQFGPLCFCLAMNYLDRFLSVHDLPSGKGWILQLLAVACLSLAAKIEETEVPMLIDLQVGDPQFVFEAKSVQRMELLVLNKLKWRLRAITPCSYIRYFLRKMSKCDQEPSNTLISRSLQVIASTTKGIDFLEFRPSEVAAAVALSVSGELQRVHFDNSSFSPLFSLLQKERVKKIGEMIESDGSDLCSQTPNGVLEVSACCFSFKTHDSSSSYTHLS

SEQ ID NO: 2428 - protein, 308 aa, Arabidopsis thaliana
MAEENLELSLLCTESNVDDEGMIVDETPIEISIPQMGFSQSESEEIIMEMVEKEKQHLPSDDYIKRLRSGDLDLNVGRRDALNWIWKACEVHQFGPLCFCLAMNYLDRFLSVHDLPSGKGWILQLLAVACLSLAAKIEETEVPMLIDLQVGDPQFVFEAKSVQRMELLVLNKLKWRLRAITPCSYIRYFLRKMSKCDQEPSNTLISRSLQVIASTTKGIDFLEFRPSEAAAAVALSVSGELQRVHFDNSSFSPLFSLLQKERVKKIGEMIESDGSDLCSQTPNGVLEVSACCFSFKTHDSSSSYTHLS

SEQ ID NO: 2429 - protein, 260 aa, Arabidopsis thaliana
MAEFMEPNLVSNFDDEKSNSVDTRSIFQMGFPLESEEIVREMIEKERQHSPRDDYLKRLRNGDLDFNVRIQALGWIWKACEELQFGPLCICLAMNYLDRFLSVHDLPSGKAWTVQLLAVACLSLAAKIEETNVPELMQLQVGAPMFVFEAKSVQRMELLVLNVLRWRLRAVTPCSYVRYFLSKINGYDQEPHSRLVTRSLQVIASTTKGIDFLEFRASEIAAAVALSVSGEHFDKFSFSSSFSSLEKVREVTKSLLHLQK

SEQ ID NO: 2430 - protein, 425 aa, Brassica napus
MSKTTNQNRRPSFTSSTESSMRKRHGPSSSSSAVKPISNTAVMVAKKRAPLGNITNQRKDSRIFPNSSSADSAHCPNKSAKLKLAAPTQPVCVNACETKSTCEEEVVPIERKAFSNLCITPSSDTTTNVMSETENKEEKFMNIDNKDDADPQLYATFACDIYNHLRAAEAKKQPAVDYMETVQKDVNSTMRGILVDWLVEVSEEYRLVPETLYLTVNYIDRYLSGNVISRQKLQLLGVACMMIAAKYEEVCAPQVEEFCYITDNTYLKDEVLDMESAVLNYLKFEMSAPTVKCFLRRLFSGCPRVHEAPCMQLECMASYIAELSLLEYTMLSHPPSLVAASAIFLAKYTLDPTRRPWNSTLRHYTQYEAMELRGCVMDLQRLCSNAHVSTLPAVRDKYSQHKYKFVAKKFCPSIIPPDFFKNSLY

SEQ ID NO: 2431 - protein, 487 aa, Silene latifolia
MSTQAHRNRLLGTENGNGGGGVKVVNNPKLTKKRPPLSNLTNHPRPSLVPSAITKSTKAKRDSSTGVRSTSFPAENPSATLNSKPSAVVPLKTAFTRSNVLVSCKASLPNGKGEQSHITRHPASCTMDTTPTPEDAQSVSMDESMSTCDSLKSPEVEYMDENDVAALCSIERKTSKNLYISDDMETTGSFCKREIVSAMEIDKVVDVDDNHMDPQFCSTIACDIYKHLRESETQKRPSTDFMEQTQKDINASMRAILVDWLVEVAEEYRLVPDTLYLTVNYIDRYLSGNAMNRQRLQLLGVACMMIAAKYEEICAPQVEEFCYITDNTYFKEEVLQMESGVLNFLKFEMTAPTTKNFLRRFVRAAQVMNEVPAFQLECLANYVAELSLLEYSMLKYAPSLIAASSVFLAKYMLTSSRPWNATLRHYTLYEASDLEECVKALHQLCLNSHISSLPAIREKYSHHKYKSVAKKHCPSSIPAEYFQNSSC

SEQ ID NO: 2432 - protein, 359 aa, Glycine max
  unsure (1)..(359): unsure at all Xaa locations
MAHNSDSATSNLLLLCSENSSTCFDDDGLECDAADGSNSRISHHEGGGGSELLLACFVAQSEEAVRAMVEREKEHLPRDDYLMRLRSGGLDLDLLGVRKEALDWIWKAHSYLGFGPLSFCLAVNYLDRFLSVFELPRGVSWTVQLLAVACLSIAAKMEEIKVPQSVDLQVGELKFLFEARTIQKMELLVLSTLRWKMCAITPCSFIDYFLGKITCEQHPAKSSISISVHLILGIIRGIDFLEFWPSEIAAAVAASVLKESQVIEIDKAITDLLVVEKGRVLKCVELIRDLSLINVAASLGSKVPYLPQSPIGVLXXAGCLSYKSDELTVGSCPNSSHNISNPNPTKRSKHGPSNGTSNS

SEQ ID NO: 2433 - protein, 306 aa, Glycine max
  unsure (1)..(306): unsure at all Xaa locations
XSLSLSAFYPKNDESLVMMVEKECQHWSGLRYLNKFQTGDLDFGARMEAIDWIHKVRSHFGFGPLCGYLSINYLDRFLFAYELPKGRVWTMQLLAVACLSLAAKLDETEVPLSLDLQVGESKFLFEAKTIQRMELLVLSTLKWRMQAITPFTFLDYFLCKINDDQSPLRSSIMRSIQLISSTARGIDFLEFKPSEIAAAVAMYVMGETQTVDTGKAISVLIQHVEKERLLKCVQMIQELSCNSGSAKDSSASVTCLPQSPIGVLDAXXCFNYKSDDTNASSCVNSSHNSPVAKRRKLNKTCGAEQL

SEQ ID NO: 2434 - protein, 452 aa, Medicago sativa subsp. falcata
MKEVAPGTQDQKQPLRANSKRALSDVTYLPHKKRAILQDVTNNCGENTKRSCLNPTEIQAKKRKVAKPAQPNVSNEVPSAAELPPFIADSKPVSSMEMRLRSSEDFRCLDDLEDNAPFRMSSNQCGTNNNLLQSQTSRISARPSSSQKKASQIVAAKKANISELLDVSKHPDVADIDADFEDPQLCSHYAADIYDHLRVAELSRRPYPNFMETVQQDITPSMRAILVDWLVEVSEGYKLQANTLYLAVYLIDWFLSKNCIEKERLQLLGITCMLIASKYEEINAPRIEDFCFITDNTYTKEEVVKLESLVLKSSSYQLFAPTTKTFLRRFLRAAQASYKRPSIELEYLTNYLAELTLLNYGFLNFLPSMIAASAVFLARWTLDQSSHPWNPTLEHYASYKASDLKATVLALQDLQLNSNDDCPLTAIRKKYTQDKLNCVAALSSPKLLETLF

SEQ ID NO: 2435 - protein, 386 aa, Medicago sativa
MAIHHHHHNHQQLQQHTSSLFDALYCDEEEKWEDDDEGEVVDEGAQSDVTTTNYDILDSTSLLPLLLLEQNLFNEDEELNTLFSKEITQQETYYEDLKNVINFDSLSQPRREAVEWMLKVNAHYGFSALTATLAVNYLDRFLLSFHFQKEKPWMIQLVAVTCISLAAKVEETQVPLLLDLQVQDTKYVFEAKTIQRMELLILSTLKWKMHPVTTHSFLDHIIRRLGLKTNLHWEFLRRCENLLLSVLLDSRFVGCVPSVLATATMLHVIDQIEQSDDNGVDYKNQLLNVLKISKEKVDECYNAILHLTNANNYGHKRKYEEIPGSPSGVIDAVFSSDGSNDSWTVGASSYSTSEPVFKKTKNQGQNMNLSPINRVIVGILATATSP

SEQ ID NO: 2436 - protein, 378 aa, Medicago sativa
MAIHHHHQQHTCSLFDALYCDEEKWEDDEGEVVDEGEQSDVTTTNYDILDSTSLLPLLLLEQNLFNEDEELNTLFSKEKIQQETYYEDLKNVINFDSLSQPRREAVEWMLKVNAHYGFSALTATLAVNYLDRFLLSFHFQKEKPWMIQLVAVTCISLAAKVEETQVPLLLDLQVQDTKYVFEAKTIQRMELLILSTLKWKMHPVTTHSFLDHIIRRLGLKTNLHWEFLRRCENLLLSVLLDSRFVGCVPSVLATATMLHVIDQIEQSDDHGVDYKNQLLNVLKTSKEKVDECYNAILHLTNANNYGHKRKYEEIPGSPSGVIDAVFSSDGSNDSWTVGASSYSTSEPVFKKTKNQGQNMNLSPINRVIVGILATATSP

SEQ ID NO: 2437 - protein, 222 aa, Medicago sativa
MAIHHHHHNHQQLQQHTSSLFDALYCDEEEKWEDDEGEVVDEGEQSDVTTTNYDILDSTSLLPLLLLEQNLFNEDEELNTLFSKEITQQETYYEDLKNVINFDSLSQPRREAVEWMLKVNAHYGFSALTATLAVNYLDRFLLSFHFQKEKPWMIQLVAVTCISLAAKVEETQVPLLLDLQVQDTKYVFEAKTIQRMELLILSTLKWKMHPVTTHSFLDPGNS

SEQ ID NO: 2438 - protein, 384 aa, Pisum sativum
MAIHHHHHHHQQLHHNSLLDALYCDEEKLEEEQEDVSSQQSDVTTNNDNNILDSTSLFPLLLLEQNLFSQDEELTTLFSKEKTQQETYYEDLKNVVDFVSLSQPRREAVQWMLKVNAHYAFSPLTATLAVTYFDRFLLTFHFQKDKPWMIQLVAVTCISLAAKVEETQVPLLLDLQVQDTKYVFEAKTIQRMELLILSTLKWKMHPVTPHSFLDHIITRLGLKTNLHWEFLRRCENLLLSVLLDSRFVGCVPSVLATATMLHVIDQIEESDDNGVDYKNQLLSILKINKEKVDECYNAIVEVTNENNYGHKRKYEQIPGSPSGVIDAVFSSDGSNDSWKVGSSSYSTSEPVFKKTKTQGQNRNLSPLNRVIVGILATASATTSP

SEQ ID NO: 2439 - protein, 356 aa, Oryza sativa (japonica cultivar-group); identical to SEQ ID NO: 348

SEQ ID NO: 2440 - protein, 382 aa, Daucus carota
MRFTRVYTEVFNMTDHSLLCTETNNLCFDDLEARDDQDPRIDCENVVGNESEALICAVPLQRDEDFVFVFESKVNFCPEVIFSTDRSGELDLCVRKEALDWIYKAHAHYNFGALSVCLAVNYLDRFLSLYELPSGKKWTVQLLAVACLSLAAKMEEVNVPLTVDLQVADPKFVFEAKTIKRMELLVLSTLKWRMQACTPCSFIDYFLRKINNADALPSGSLIDRSIQFILKTMKGIDFLEFRPSEISAAVAICVTREAQTLDINKAMSNIIPVEKDRVFKCIEMIQDLTLVTETSNVASGRTRAQVPQSPVGVLDAACLSYKSDERTVGSCPNSSLHTETSPHTKRRKLIEIMKCGFYSITQFQIFSEWEFWCGCLCKRPPL

SEQ ID NO: 2441 - protein, 359 aa, Lycopersicon esculentum
MVFPLDSQLQNPISALLDGLYCEEDRFLDDDLGEWSSLDVGNENVKKTLPLLECDMFWEHDELATLLSKENEFHLGFQSLISDGSLMGARKEALDWMLRVIAYYGFTATTAVLAVNYFDRFVSGWCFQKDKPWMSQLAAVACLSIAAKVEETQVPLLLDLQVADSRFVFEAKTIQRMELLVLSTLKWKMNLVTPLSFIDHIMRRFGFMSNLHMDFLKKCERLILDIITDSRLLHYPPSVIATASMFYVINDIEPSNAMEYQNQLMSVLKVRKDIFEECHDLILELMDTACYKLCQSLKRKHHSVPGSPSGVIDAYFSSESSNESWSVASSISSSPEPQYKRNKTQDQRMTLAPLGSNLH

SEQ ID NO: 2442 - protein, 364 aa, Lycopersicon esculentum
MAIENNDQSFFLDVLYCEEEEEKWGDLLEDEEGVIINPLLLSSEGTTKTNSLLLLPLLLLEQDLFWEDEELLSLFVKEKETRCCFESFGSDPFLCSARVDVVEWILKVNAHYDFSALTAILAINYLDRFLSSLQFQKDKPWMTQLAAVTCLSLAAKVEETQVPLLLDFQVEDAKYVFEAKTIQRMELLVLSSLKWRMNPVTPLSFLDHIIRRLGLKNNVHWEFLRRCESLLLSVMIDCRFVRYMPSVLATAIMLHVIHQIEPCNAIDYQNQLLGVLKISKENVNNCYELISEVSSKPITSHKRKYDENPSSPSGVIDPIYTSESSNDSWDLDLPSFKKSKVQEQQMKMSSSLSRVFVEAVGSPH

SEQ ID NO: 2443 - protein, 336 aa, Lycopersicon esculentum
MSHHYQEQEQLEAQKIPFLLDSLYCEENNILTEVSIETESFSSHDLLWEEEELTSLFSKETEYEISYNVLEKNQSFISSRRESVEWILKTTAYYSFSAQTGFLAVNYFDRFLLFSFNQSLNHKPWMNQLVAVTCLSLAAKVEETDVPLLLDLQVEESGFLFESKTIQRMEMLILSTLKWKMNPVTPFSFLDFITRRLGLKHCLSLEFLRRCEKVLLYTITDDRFIGYLPSAMASATMLHVLDRLKPCIGEKYQDQLLGILGIVKEKVEGCYRLIQEVACNIDFGSNKRKFGTLPGSPTGVMDMSFSSDYSNDSWSVATSVTSSPEPLSKKIRESNE

SEQ ID NO: 2444 - protein, 354 aa, Nicotiana tabacum
MAADNIYDFVASNLLCTETKSLCFDDVDSLTISQQNIETKSKDLSFNNGIRSEPLIDLPSLSEECLSFMVQREMEFLPKDDYVERLRSGDLDLSVRKEALDWILKAHMHYGFGELSFCLSINYLDRFLSLYELPRSKTWTVQLLAVACLSLAAKMEEINVPLTVDLQVGDPKFVFEGKTIQRMELLVLSTLKWRMQAYTPYTFIDYFMRKMNGDQIPSRPLISGSMQLILSIIRSIDFLEFRSSEIAASVAMSVSGEIQAKDIDKAMPCFFIHLDKGRVQKCVELIQDLTTATITTAAAASLVPQSPIGVLEAAACLSYKSGDERTVGSCTTSSHTKRRKLDTSSLEHGTSEKL

SEQ ID NO: 2445 - protein, 308 aa, Helianthus annuus
MAILSRYSSSNTLFCIEEQVHEDEDELTHQDSSAIHPLDLQDLCWEHEELVSLFTKEEEQQKQTPWPSSCTLSFRKEAVDWILKVKGCHGFTPLTAILAINYLDRFLSSLHFQKANTPWMIHLVAVTCLSLAAKIQETHVPLLLDLQLEESKFLFEAKNIQKTELLVMSTLKWRMNLVTPISFLDHIVRRLGLSNHLHWDFFKKCEAMILYLVADSRFVCYKPSVLATATMLCVVEEIDPTNSIGYKSQLLDLLKTTKDHINECYKLVMDLSYDNHNKGKRDENERTIYPVSPAGFIGFMCHESSNDS

SEQ ID NO: 2446 - protein, 371 aa, Populus alba
MSFLQQQETHNQSPALALDGLYCEEDGFGEDYSCGLDDETSQVYDQNVKKEQNLSSVLLEQDLFWEDSELLSLISKEKETHVVFDSVGSRDGSLMVVRREAVEWFLRVKAHYGFSALTGVLAVNYFDRFISSSRFRRDKPWMGQLAAVACLSLAAKVEETQVPLLLDLQVEDAKYVFEAKTIKRMELWVLSTLHWRMNPVTSISFFDHIIRRLGLKTHMHWEFLWRCERLLLSVISDSRFMSYLPSILATATMLHVIKEVEPRNQLQYQTQLMAVLKTNEDEVNECYRLILEQPGSQNQRHKRKYLSTPSSPNGVIDASFSSENSNDSWAVASSISSSSSVPQFKRSRAQVQQMRLPSLNRMCVDVLSSPH

SEQ ID NO: 2447 - protein, 289 aa, Populus alba
EENWAEEVREDWFQDELEGESYCSNNSNKLNTFPILLEQDLSWEDEELSSLFAKEEQNQLCKDLETNPSLARARCEAVEWILKVNEHYSFTALTAVLAVNYLDRFLFSVHLQKEKPWMAQLAAVSCLSLAAKVEETQVPLLLDFQVEDSKYVFEAKTIQRMEILVLSTLKWKMNPVTPISFLDYITRRLGLEHYLCLEFLKRCERMVLSILADSRSMPYVPSVMAAATMLYVIDNIKPSLAAEYQSQLLSILGIDKDKVEDCSKFLMEFALREHFKLLSNKRKFCSLPG

SEQ ID NO: 2448 - protein, 379 aa, Oryza sativa
  unsure (1)..(379): unsure at all Xaa locations
LIWVFFASALPTSSSARRTAAACLAWAALAAAAARWRRSWGAAAVAALISLASVVVLCSPSTPGSHEFVALLVEKEMDHQPQRGYLEKLELGGLECSWRKDAIDWICKVHSYYNFGPLSLYLAVNYLDRFLSSFNLPHDAWMQQLLSVSCLSLATKMEETVVPLPMDLQVFDAEYVFEARHIKRMELIVMKTLKWRLQAVTPFSFIGYFLDKFNEGKPPSYTLASWCSDLTVGTLKDSRFLSFRPSEIAAAVVLAVLAENQFLVFNSALGESEIPVNKEMVMRCYELMVEKALVKKIRNSNASSSVPHSPITVLDAACFSFRSDDTTLGSSQSNSNNKDYNSQDSAPASKRRRLNTTPIXXLYIHNLALLCNCSFSEQL

SEQ ID NO: 2449 - protein, 174 aa, Triticum aestivum
  unsure (1)..(174): unsure at all Xaa locations
XGYVERLGHGGFESSWRKDAMDWICKVHSYYNFGPLTLCLSVNYMDRFLSSFDLPHDKSWMQQLMSVACLSLAVKMEETVAPLPVDLQVCDEYYAFEPRNIKRMELIVMETLKWRMHSVTPFSFLCYFLDKFNEGKPPSYMLVSRCAELIVATVKDYRFLSFRPSEIAAAVVLX

SEQ ID NO: 2450 - protein, 309 aa, Triticum aestivum
  unsure (1)..(309): unsure at all Xaa locations
FFGVQTFRDCWKCYTNSRSPPLDWIWKVIEHFNFAPLTAVLSVNYLDRFFSVYPLPEGKAWVTQLLAVACLSLASKMEETYVPLPVDLQVVEATSAFEGRTIKRMELLVLSTLKWRMQAVTACSFIDYFLRKFNDHDAPSMLAFSRSTDLILSTAKGADFLVFRPSEIAASVALAAFGERNTSVVERATTTCKYINKERVLRCYELIQDKIAMGTIVLKSAGSSMFSVPQSPIGVLDAAACLSQQSDDTAVGSPATCYQASSASKRRRIGRXPVSCRAVLQVCCSPFWPFCCFKHLNSVWSLENYSVVK

SEQ ID NO: 2451 - protein, 376 aa, Populus tremula x Populus tremuloides
MASMYNPETSAVQDQQQNPTLLYDALYCSEENWVEEVREDWFQDELEGESYCSNNSNKLNTFPILLEQDLSWEDEELSSLFAKEEQNQLCKDLETNPSLARARCEAVEWILKVNEHYSFTALTAVLAVNYLDRFLFSVHLQKEKPWMAQLAAVSCLSLAAKVEETQVPLLLDFQVEDSKYVFEAKTIQRMEILVLSTLKWKMNPVTPISFLDYITRRLGLEHYLCLEFLKRCERMVLSILADSRSMPYVPSVMAAATMLYVIDNIEPSLAAEYQSQLLSILGIDKDKVEDCSKFLMEFALRDHFKLLSNKRKFCSLPGSPSGVVDVSFSSDSSNDSWSVASSVSSSPKPLSKKSRALQSLNNATTSDFSQHSSPVP

SEQ ID NO: 2452 - protein, 380 aa, Saccharomyces cerevisiae
MNCIPSPISERKIQINNEDCIGKENAFHTIPRESSINLTPHSTNEKKVLSEVNSNKIDSLQLPRGKLQRDSTHLEKTRKRQLSNDSTDPIEPKTVKKIKCHQWKNLDSIEMDDPFMVAEYTDSIFSHLYEKEIQMLPTHNYLMDTQSPYHLKSSMRALLIDWLVEVHEKFHCLPETLFLAINLLDRFLSQNVVKLNKLQLLCITCLFIACKFEEVKLPKITNLAYVTDGAATVEGIRKAELFVLSSLGYNISLPNPLNFIRRISKADNYCIETRNMAKFIMEYSICCNKFIHLKPSYLAAMSMYIARKIKNENSKWDETFIHYSGGIDIESDPAFKDFISELVEDIAVPDTNLDSLRLKYKKPKHGMVYFKVFDWCKQKR

SEQ ID NO: 2453 - protein, 380 aa, Saccharomyces cerevisiae
MNCIPSPISERKIQINNEDCIGKENAFHTIPRESSINLTPHSTNEKKVLSEVNSNKIDSLQLPRGKLQRDSTHLEKSRKRQLSNDSTDPIESKTVKKIKCHQWKNLDSMEMDDPFMVAEYTDSIFSHLYEKEIQMLPTHNYLMDTQSPYHLKSSMRALLIDWLVEVHEKFHCLPETLFLAINLLDRFLSQNVVKLNKLQLLCITCLFIACKFEEVKLPKITNFAYVTDGAATVEGIRKAELFVLSSLGYNISLPNPLNFIRRISKADNYCIETRNMAKFIMEYSICCNKFIHLKPSYLAAMSMYIARKIKNENSKWDETFIHYSGGIDIESDPAFKDFISELVEDIAVPDTNLDSLRLKYKKPKHGMVYFKVFDWCKQKR

SEQ ID NO: 2454 - protein, 380 aa, Saccharomyces cerevisiae
MNCIPSPISERKIQINNEDCIGKENAFHTIPRESSINLTPHSTNEKKVLSEVNSNKIDSLQLPRGKLQRDSTHLEKTRKRQLSNDSTDPIEPKTVKKIKCHQWKNLDSIEMDDPFMVAEYTDSIFSHLYEKEIQMLPTHNYLMDTQSPYHLKSSMRALLIDWLVEVHEKFHCLPETLFLAINLLDRFLSQNVVKLNKLQLLCITCLFIACKFEEVKLPKITNFAYVTDGAATVEGIRKAELFVLSSLGYNISLPNPLNFIRRISKADNYCIETRNMAKFIMEYSICCNKFIHLKPSYLAAMSMYIARKIKNENSKWDETFIHYSGGIDIESDPAFKDFISELVEDIAVPDTNLDSLRLKYKKPKHGMVYFKVFDWCKQKR

SEQ ID NO: 2455 - protein, 376 aa, Helobdella robusta
GTRVTAANSRSFKSNNNASSISNSSSIGRSHYDIYDDDDDDDDNDIPSTFNDLDISFEGRRMSSTTIFEHHQQQQQKQHIPTEVAARQHRRSLINQQIALLDVYSLPEYRDDILTYGKEAEQRYMAKANYMERQSDINHSMRSILVDWLVEVADEYKLKRETFFLAVNYIDRFLSMMSVIRCRLQLLGAAAMFIAAKYEEIYPPDVAEFVYITDDTYTMKQVLQMEQAILKTLNFLVAAPTPNYFCCDLLDRLGAYKKGPNGVCDDGGRWNSLAMYMLETTTVFGDCFLKFSPSMISTSCVALSHYLINMTGCMSELSRITSYTVFSLSECLNSIFTTLHNSPNVPQQALRVKYNSEKYHFVASLELPETLPLDLL

SEQ ID NO: 2456 - protein, 491 aa, Drosophila melanogaster
MASFQIHQDMSNKENPGIKIPAGVKNTKQPLAVIGGKAEKNALAPRANFAVLNGNNNVPRPAGKVQVFRDVRNLNVDENVEYGAKKSNVVPVVEQFKTFSVYEDNNDTQVAPSGKSLASLVDKENHDVKFGAGQKELVDYDLDSTPMSVTDVQSPMSVDRSILGVIQSSDISVGTETGVSPTGRVKELPPRNDRQRFLEVVQYQMDILEYFRESEKKHRPKPRYMRRQKDISHNMRSILIDWLVEVSEEYKLDTETLYLSVFYLDRFLSQMAVVRSKLQLVGTAAMYIAAKYEEIYPPEVGEFVFLTDDSYTKAQVLRMEQVILKILSFDLCTPTAYVFINTYAVLCDMPEKLKYMTLYISELSLMEGETYLQYLPSLMSSASVALARHILGMEMWTPRLEEITTYKLEDLKTVVLHLCHTHKTAKELNTQAMREKYNRDTYKKVAMMESVEMSKDDFDQLCEAYNCKQKEDEHQQPDINTKSNVNLFYKF

SEQ ID NO: 2457 - protein, 302 aa, Strongylocentrotus purpuratus
MDNLLCFEQEYFDHAKSPMSYVDQVLLRDKNLDNLLAVEEQYVLSADYFGNHFQRELRPSMRKLVVDWMFEVCEEQQREEDVFPLSVNYLDRFLSIERISRDKFQLLGATCMFLASKLLETIPLTSEKLIIYTDNSITLEQLLKFEQLVLTKLKWDLMAITPNAFLEHIFHRLPVDKEQAALLRKHAQTFIVLCATDYNFAMQPPSLIAASGVAAAANGLRMHIPKVIDLLHRITKIETDYLILVRDRMENLLSKNLVPGSPTKTAGHTTVQKTRSMDESDKPCTPTGVDEVEIITMPSGLC

SEQ ID NO: 2458 - protein, 288 aa, Sus scrofa
MELLCCEVDPVRRAVPDANLLHDDRVLQNLLTIEERYLPQCSYFKCVQKDIQPYMRRMVATWMLEVCEEQKCEEEVFPLAINYLDRFLAGVPTPKTHLQLLGAVCMFLASKLKETIPLTAEKLCIYTDNSIKPQELLEWELVVLGKLKWNLAAVTPHDFIEHILRKLPQPNEKLSLIRKHAQTFIALCATDFKFAMYPPSMIATGSVGAAICGLQQDEDVSSLTGDALVDLLARITNTDVDCLKACQEQIEVVLLNSLQQYRQDQDGSKSEDELDQASTPTDVRDIDL

SEQ ID NO: 2459 - protein, 429 aa, Cricetulus longicaudatus
MALRVTRNTKLNTENKAKVSMTGAKRVPVAIAAASKPGLRPRTALGDIGNKVSEQAQARVPLKKELKTSVTGKVSAKIPPPKPQEKVPVSEPEVELAEPEPEPEPVMEEKLSPEPILVDNPSPSPMETSGCAPAEEYLCQAFSDVILAVSDVDADDGADPNLCSEYVKDIYAYLRQLEEEQSVRPRYLLGREVTGNMRAILIDWLIQVQMKFRLLQETMYMTVSIIDRFMQDNCVPKKMLQLVGVTAMFIASKYEEMYPPEIGDFAFVTNNTYTKHQIRQMEMKILRVLNFSLGRPLPLHFLRRASKIGEVDVEQHTLAKYLMELTMLDYDMVHFAPSQIAAGAFCLALKILDNGEWTPTLQHYLSYTEESLLPVMQHLAKNVVMVNRGLTKHMTIKNKYATSKHAKISTLAQLNCTLVQNLSKAVSKA

SEQ ID NO: 2460 - protein, 411 aa, Cricetulus longicaudatus
MPRERKERDAQDHGGIREEGGPDSSVRSRKRKANVAVFLQDPDEEIARVDKTVKSQDSSQPWDDNSACVDPCAFTPTPNKEEDDELEYPKTAFQPRKIRPPRASPLPVLNWGNREEVWRIMLNKEKIYLRDEHFLQRHPLLQARMRAVLLDWLMEVCEVYKLHRETFHLAQDFFDRYMASQQNILKTLLQLIGISALFIASKLEEIYPPKLHQFAYVTDGACSGDEILQMELMMMKALKWRLSPMTIVSWLNVYVQVAYVNDTSEVLLPQYPQQVFVQIAELLDLCVLDVGCLEFPYGVLAASALYHFSSMELMQKVSGYQWCDIEKCVKWMVPFAMAFREVGSSKLKHFRGVPMENAHNIQTHANSLDLLDKAQAKKAILSEQNRIPPPPSGVLTPPPSSKKQNSEEETE

SEQ ID NO: 2461 - protein, 397 aa, Mesocricetus auratus
MALLRRPTVSSDLKNIDTGVNPKAKSHVTIRRAVLEEIGNKVRSRAAPVAKKPQNTKIPVQPTKVTHVNKQPKPTASVKPVQMETLAPKDPPAPEDVSMKEENLCQAFSDALLCKIEDIDNEDWENPQLCSDYVKDIYQYLRQLEVLQSINPHFLDGRDINGRMRAILVDWLVQVHSKFRLLQETLYMCIAIMDRFLQAQPVCRKKLQLVGITALLLASKYEEMFSPNIEDFVYITDNAYTSSQIREMETLILKELKFELGRPLPLHFLRRASKAGEVDVEQHTLAKYLMELTLIDYDMVHYHPSQVAAAASCLSQKVLGQGKWNLKQQYYTGYMETEVLEVMQHMAKNVVKVNENLTKFIAVKNKYASSRLLKISTIPQLNSKTIKDLASPLMGRL

SEQ ID NO: 2462 - protein, 429 aa, Mesocricetus auratus
MALRVTRNTKLNTENKAKVSMAGAKAVPVTLAAASKPGLRPRTALGDIGNKVSEQAQARLPLKKELKTSVTGKVSAKIPPPKPLEKVPPVSEPEVELAETHEPEPVMDEKLSPEPILVDNPSPSPMETSGCAPAEEYLCQAFSDVILAVSDVDADDGADPNLCSEYVKDIYAYLRQLEEEQSVRPKYLLGREVTGNMRAILIDWLIQVQMKFRLLQETMYMTVSIIDRFMQDNCVPKKMLQLVGVTAMFIASKYEEMYPPEIGDFAFVTNNTYTKHQIRQMEMKILRVLNFSLGRPLPLHFLRRTSKIGEVDVEQHTLAKYLMELTLLDYDMVDFAPSQIAAGAFCLALKILDNGEWTPTLQHYLSYTEESLLPVMQHLAKNVVMVNHGLTKHMTIKNKYATSKHAKISTLAQLNCTLVQNLSKAVAKA

SEQ ID NO: 2463 - protein, 398 aa, Mus musculus
MALLRRPTVSSDLKNIDTEVIPKAKSHVTIRRAVLEEIGNKVRNRTTQVAKKPQNTKVPALPTKVTNVNKQPKPTASVKPVQMEALAPKDRPPAPEDVSMKEESLCQAFSDALLCKIEDIDNEDRENPQLCSDYVKDIYQYLRQLEVLQSINPHFLDGRDINGRMRAILVDWLVQVHSKFRLLQETLYMCIAIMDRFLQAQLVCRKKLQLVGITALLLASKYEEMFSPNIEDFVYITDNAYTSSQIREMETLILKELKFELGRPLPLHFLRRASKAGEVDVEQHTLAKYLMELTLVDYDMVHYHPSQVAAAASCLSQKVLGQGKWNLKQQYYTGYMESEVLEVMQHMAKNVVKVNDNRTKFIAVKNKYASSRLLKISTIPQLNSKIIKDLASPLLGSP

SEQ ID NO: 2464 - protein, 398 aa, Mus musculus
MALLRRPTVSSDLKNIDTEVIPKAKSHVTIRRAVLEEIGNKVRNRTTQVAKKPQNTKVPALSTKVTNVNKQPKPTASVKPVQMEALAPKDRPPAPEDVSMKEESLCQAFSDALLCKIEDIDNEDRENPQLCSDYVKDIYQYLRQLEVLQSINPHFLDGRDINGRMRAILVDWLVQVHSKFRLLQETLYMCIGIMDRFLQAQLVCRKKLQVVGITALLLASKYEEMFSPNIEDFVYITDNAYTSSQIREMETLILKELKFELGRPLPLHFLRRASKAGEVDVEQHTLAKYLMELTLVDYDMVHYHPSQVAAAASCLSQKVLGQGKWNLKQQYYTGYMESEVLEVMQHMAKNVVKVNDNRTKFIAVKNKYASSRLLKIKHDPQLNSKIIKDLVSPLLGSP

SEQ ID NO: 2465 - protein, 398 aa, Mus musculus
MALLRRPTVSSDLKNIDTEVIPKAKSHVTIRRAVLEEIGNKVRNRTTQVAKKPQNTKVPALPNKVTNVNKQPKPTASVKPVQMEALLPRIVLPPPEDVSMKEESLCQAFSDALLCKIEDIDNEDRENPQLCSDYVKDIYQYLRQLEVLQSINPHFLDGRDINGRMRAILVDWLVQVHSKFRLLQETLYMCIAIMDRFLQAQLVCRKKLQLVGITALLLAPKYEEMFSPNIEDFVYITDNAYTSSQIREMETLILKELKFELGRPLPLHFLRRASKAGEVDVEQHTLAKYLMELTLVDYDMVHYHPSQVAAAASCLSQKVLGQGKWNLKQQYYTGYMESEVLEVMQHMAKNVVKVNDNRTKFIAVKNKYASSRLLKISTIPQLNSKIIKDLASPLLGSP

SEQ ID NO: 2466 - protein, 430 aa, Mus musculus
MALRVTRNTKINAENKAKVSMAGAKRVPVTVTAASKPGLRPRTALGDIGNKVSEELQARVPLKREAKTLGTGKGTVKALPKPVEKVPVCEPEVELAEPEPEPELEHVREEKLSPEPILVDNPSPSPMETSGCAPAEEYLCQAFSDVILAVSDVDADDGADPNLCSEYVKDIYAYLRQLEEEQSVRPKYLQGREVTGNMRAILIDWLIQVQMKFRLLQETMYMTVSIIDRFMQNSCVPKKMLQLVGVTAMFIASKYEEMYPPEIGDFAFVTNNTYTKHQIRQMEMKILRVLNFSLGRPLPLHFLRRASKVGEVDVEQHTLAKYLMELSMLDYDMVHFAPSQIAAGAFCLALKILDNGEWTPTLQHYLSYSEDSLLPVMQHLAKNVVMVNCGLTKHMTVKNKYAASKHAKISTLAQLNCTLVQNLSKAVTKA

SEQ ID NO: 2467 - protein, 366 aa, Rattus norvegicus
MALLRRPTVSSDLKNIDTGVNPKAKSHVTVRRAVLEEIGNKVRARPAQVAKKPQNTKVPVQPTKAINASKQPKPTASVKPVQMETLAPKDPLPAPEDVSMKEESLCQAFSDALLCKIEDIDNEDGENPQLCSDYVKDIYQYLRQLEALQSINPHFLDGRDINGRMRAILVDWLVQVHSKFRLLQETLYMCIAIMDRFLQAQPVCRKKLQLVGITALLLASKYEEMFSPNIEDFVYITDNAYTSSQIREMETLILKELKFELGRPLPLHFLRRASKAGEVDVEQHTLAKYLMELTLVDYDMVHYHPSQVAAAASCLSQKVLGQGKWNLKQQYYTGYMESEILEVMQHMAKNVVKVNENLTKFIAVKN

SEQ ID NO: 2468 - protein, 423 aa, Rattus norvegicus
MALRVTRNTKINTENKAKVSMAGAKRVPVAVAASKPLLRSRTALGDIGNKVSEQSRIPLKKETKKLGSGTVTVKALPKPVDKVPVCEPEVELDEPEPEPVMEVKHSPEPILVDTPSPSPMETSGCAPAEEYLCQAFSDVILAVSDVDADDGGDPNLCSEYVKDIYAYLRQLEEEQSVRPKYLLGREVTGNMRAILIDWLIQVQMKFRLLQETMYMTVSIIDRFMQDSCVPKKMLQLVGVTAMFIASKYEEMYPPEIGDFAFVTNNTYTKHQIRQMEMKILRVLNFSLGRPLPLHFLRRASKIGEVDVEQHTLAKYLMELSMLDYDMVHFAPSQIAAGAFCLALKILDNGEWTPTLQHYLSHTEESLLPVMQHLAKNIVMVNRGLTKHMTIKNKYATSKHAKISTLAQLNCTLVQNLSKAVTKA

SEQ ID NO: 2469 - protein, 295 aa, Rattus rattus
MEHQLLCCEVETIRRAYPDTNLLNRPGLRAMLKTEETCAPSVSYFKCVQREIVPSMRKIVATWMLEVCEEQKCEEEVFPLAMNYLDRFLSLEPLKKSRLQLLGATCMFVASKMKETIPLTAEKLCIYTDNSIRPEELLQMELLLVNKLKWNLAAMTPHDFIEHFLSKMPEADENKQIIRKHAQTFVALCATDVKFISNPPSMVAAGSVVAAMQGLNLGSPNNFLSCYRTTHFLSRVIKCDPDCLRACQEQIEALLESSLRQAQQNIDPKATEEEGEVEEEAGLACTPTDVRDVDI

SEQ ID NO: 2470 - protein, 397 aa, Carassius auratus gibelio
MALRVSRNTRLASSENQSALPGKAAVANKPGLRPRAALGEIGNNPQTRQALRKKEVKVAPKVEVVAEKAPVVQQPKKESPKVQHDVPIVSEPSSPVPMETSGCASDDLCQAFSDVLLDIKDVDADDYDNPMLCSEYVKDIYLYLHQLEITQAVKPKYLEGKEITGNMRAILIDWLVQVQIKFRLLQETMYMTVAIIDRFLQDHPVPKKQLQLVGVTAMFIASKYEEMYPPEIADFAFVTDRAYTTGQIREMEMKILRVLDFSFGRPLPLQFLRRASKIGDVTAEHHTLAKYFLELTMVDYEMVHFPPSQVASAAYALTLKVFNCGDWTPTLQHYMGYTEDALVPVMQHIAKNVVRLNEGLSKHLAVKNKYSSQKQMRIASISQLKSSLIKDLAKQIS

SEQ ID NO: 2471 - protein, 60 aa, Blepharisma intermedium
MRAILIDWIIEVHLKFKLLPETLYLAVNLIDRYLEIVNISTSILQLIGVSALLIASKYEE

SEQ ID NO: 2472 - protein, 388 aa, Oryzias curvinotus
MSSVEVVAQQQQLLAAEHPRRMGKGAAADPRRAALGELTNLNAVAATNGKVGPSKKPSKASCVQKPKPPQLVAPMIQTGAAASAPVSAKPCVKEEQLCQAFSEVLLAVQDVDEQDADQPQLCSQYVKDIYKYLHVLEEQQPVRANYMQGYEVTERMRALLVDWLVQVHSRFQLLQETLYLTVAILDPFLQVHPVSRRKLQLVGVTAMLVACKYEKMYAPEVGDFSYITDNAFTKSQIVEMEQVILRSLSFQLGRPLPLHFLRRASKVAGADVEKHTLAKYLMELTLLDYHMVHYRPSEVAAAALCLSQLLLDGLPWSLTQQQYSTYEEQHLKPIMQHIAKNVVLVNEGRTKFLAVKKKYSSSKLMKISLIPQLNSSTVKALAESLLNP

SEQ ID NO: 2473 - protein, 401 aa, Oryzias curvinotus
MALRVTRNRLASTRAELGGKTCSVAGPTQKPRAALGEIGNVAVINKDVTKKNVKTEVAKKTKIPAKAEKIEQPKAAVVPVKPAPEVQVPVQADPASPTPMETSGCEPADLCQAFSDVILNTAIRDVDADDYDNPMLCSEYVKDIYKYLRQLEVEQSVKPNYLEGQEVTGNMRAILIDWLVQVSLKFRLLPETMYMTVGIIDRFLQDHPVPKKQLQLVGVTAMFLASKYEEMYPPEISDFAFVTDRAYTTAQIRDMEMTVLRVLKFQLGRPLPLQFLRRASKIYEVTADQHTLAKYLLELSMVDYDMAHFPPSMVASAALALTLKVLDAGEWDVTLQHYMGYTAETLTPVMAHIAKNVVKVNNGQTKHMAIKGKYSTSKQMRIATISQLKSSAVKDLATQIS

SEQ ID NO: 2474 - protein, 386 aa, Oryzias luzonensis
MSSVEVVAQQLLAAEHPRRMGKGAAADPRRAALGELTNLNAVAATNGKVGPSKKPSKASCAQKPKPTELVAPMIQTGAAASAPVSAKPCVKEEQLCQAFSEVLLAVQDVDEQDADQPQLCSQYVKDIYKYLHVLEEQQPVRANYMQGYEVTERMRALLVDWLVQVHSRFQLLQETLYLTVAILDRFLQVHPVSRRKLQLVGVTAMLVACKYEEMYTPEVADFSYITDNAFTKSQIVEMEQVILRSLSFQLGRPLPLHFLRRATKVAGADVEKHTLAKYLMELTLLDYHMVHYRPSEVAAAALCLSQLLLDGLPWSLTQQQYSTYEEQHLKPIMRHIAKNVVLVNEGRTKFLAVKKKYSSSKLMKISLIPQLNSSTVKAMAESLHNP

SEQ ID NO: 2475 - protein, 401 aa, Oryzias luzonensis
MALRVTRNRLASARAELGGKTCSVAGPTQKPRAALGEIGNVAVINKDVTKKNVKTEVAKKTKVPAKAEKIEQPKAAVVPVKPAPEVQVPAQPEPASPTPMETSGCEPADLCQAFSDVILNTAIRDVDADDYNNPLLCSEYVKDIYKYLRQLEVEQSVKPNYLEGQEVTGNMRALLIDWLVQVSLKFRLLQETMYMTVGIIDRFLQDHPVPKKQLQLVGVTAMFLASKYEEMYPPEISDFAYVTDKAYTTAQIRDMEMTILRVLKFQLGRPLPLQFLRRASKIYEVTAEQHTLAKYLLELSMVDYAMDHFPPSMVASAALALTLKVLDAGEWDVTLQHYMAYTADTLTPVMAHIAKNVVKVNNGQTKHMTIKGKYFTSKQMRIATIFQLKSSVVKDLATQIS

SEQ ID NO: 2476 - protein, 382 aa, Oryzias javanicus
MSSVEAVTQQQLLAAENPVRMGKGAADPRRAALGEITNRNAAAAANRKMGPSKKQPKPSCAQKPQPVVHTSAGDPAPISADMSMKVEQDLSQAFSEVLMLAVQDVDEQDADQPQLCSQYVKDIYKYLHTLEEQQAIRPNYMQGYSVTEHMRALLVDWLVQVHSRFQLLQETLYLTVAILDRFLQVHPVSRRKLQLVGVTAMLVACKYEEMYPPEVGDFAYITDDAFTKFQIVEMEQVILRSLGFQLGRPLPLHFLRRASKVADADVEKHTLAKYLLELTLLDYHMVHYRPSEAAAAALCLSQLLLDGLPWSLEQQHYSTYDEQHLKPIMQLMAKNVVQVTEGRTKFLAVKKKYSSSKLMKISLIPQLNSSTIKVMAEALQNP

SEQ ID NO: 2477 - protein, 401 aa, Oryzias javanicus
MALRVTRNRLASTRAEQGGKTCSVSGPTLKPRAALGEIGNVAANKDVTKKNVKMEAAKKTRITAKAEKIEQPKATVVPVKPEPKVQVPAQPEPASPTPMETSGCEPADLCQAFSDVILNTAIRDVDADDYDNPMLCSEYVKDIYKYLRQLEVEQSVKPNYLQGQEVTGNMRAILIDWLVQVNLKFRLLQETMYMTVGIIDRFLQDHPVPKKQLQLVGVTAMFLASKYEEMYPPEISDFAYVTDRAYTTAQIRDMEMTILRVLKFQLGRPLPLQFLRRASKIYEVTAEQHTLAKYLLELSIVDYDMAHFPPSTVASAALGLTLKVLDAGEWDVTLQHYMDYTAHTLTPVMAHIAKNVVKVNDGLTKHMAIKGKYSTSKQMRVATIAQLKSSLVKDLAKQLSQ

SEQ ID NO: 2478 - protein, 63 aa, Pleurochrysis carterae
MRGILVDWLVEVHLKFKLMIETLYLTVNLIDRYLEKEKITRNKLQLVGVTAMFLASKYEEIYP

SEQ ID NO: 2479 - protein, 63 aa, Strombidinopsis acuminata
MRGILADWLVEVHYKFKMVPETLYLTVNLIDRYLSLKTVRKDRLQLLGVTSMLIACKYEEIYP

SEQ ID NO: 2480 - protein, 63 aa, Strombidinopsis acuminata
MRGILADWLIKVHTKLKLLPETLFLTINLVDRYLERVQVDRDRLQLVGIAAILTATKYEEIYP

SEQ ID NO: 2481 - protein, 120 aa, Beta vulgaris
VSEEYKLVPDTLYLTVNLIDRFLSGNYLEKQKLQLLGVTCMLIASKYEEVSAPQVEDFCYITANTYAREEVLNMERKVLNFLCFQLSVPTIKTFLRRYVHAAQATEDSLVDLEFLAKYLV

SEQ ID NO: 2482 - protein, 130 aa, Sphoeroides annulatus
RFEDGLLVACKYEEMYAPEVGDFAYITDNAFTKSQILEMEQVVLRSLNFQLGRPLPLHFLRRASKVASSDVERHTLAKYLMELTLLDYHMVHYRPSEIAAASLCLSQLLLEGLPWSQTQQHYSTYDEAHL

SEQ ID NO: 2483 - protein, 517 aa, Anopheles gambiae str. PEST
NSCVYFCSAFLCRVVCATFTSLIVEETSLNLLKMSRIMRIDENQVAGNLHEGGMKKVVAARRPVLGELGNKVLRNASQDLLGKGVEKGAALKNANPTLKNIKPRVDTRWRKADTAAAAVVVPKKVVTRSDSQKVAVEPKPSANADAVKVHVQLNKGNEVKHVALKREDSQLSLRTLAKQNRKAQPKSAPSSGTSSSDEHEIVSISKKPEKVEAHSQKLLENIENIDANDGWNPMLVAEYVNDIYNYLNELESRPGYALCENFLDGHKEITHKMRTILIDWINEVHYQFKLDIDTYHMTVSLIDRYLQTMKTVPKKKLQLVGVTAMFIASKYEELFPPEIQDFVYITDDTYQKYQILEMEKEMVRTLDFNLGKPLPTHFLRRFSKAAKASDVNHVLAKYLIELASVDYSTAHYKPSEIAAAALYISLYLFPLTCNGGNGTSAIIWTKTLEHYTHYNVKYLAPIVQRLANVIKAVPKMMDKKVKYPWLKYSSSKFQCISTHPKLKGSEIEELLNNELRC

SEQ ID NO: 2484 - protein, 517 aa, Anopheles gambiae str. PEST
NSCVYFCSAFLCRVVCATFTSLIVEETSLNLLKMSRIMRIDENQVAGNLHEGGMKKVVAARRPVLGELGNKVLRNASQDLLGKGVEKGAALKNANPTLKNIKPRVDTRWRKADTAAAAVVVPKKVVTRSDSQKVAVEPKPSANADAVKVHVQLNKGNEVKHVALKREDSQLSLRTLAKQNRKAQPKSAPSSGTSSSDEHEIVSISKKPEKVEAHSQKLLENIENIDANDGWNPMLVAEYVNDIYNYLNELESRPGYALCENFLDGHKEITHKMRTILIDWINEVHYQFKLDIDTYHMTVSLIDRYLQTMKTVPKKKLQLVGVTAMFIASKYEELFPPEIQDFVYITDDTYQKYQILEMEKEMVRTLDFNLGKPLPTHFLRRFSKAAKASDVNHVLAKYLIELASVDYSTAHYKPSEIAAAALYISLYLFPLTSNGGNGTSAIIWTKTLEHYTHYNVKYLAPIVQRLANVIKAVPKMMEKKQKSCWLKYSSSKFLKISTHSKLKGTEMDTLAEGKLIF

SEQ ID NO: 2485 - protein, 565 aa, Anopheles gambiae str. PEST
MTRAAMRKQQAVDVNQKTQQDRPISVMKGKENVPSSSDTVSGNVAGVSVATGAEIATNDSASNGEQKKSQQAANACLAKHAEVVVKPKRGRMSSEFEASDNSLYVTAVDNFEDGSAASAGTGPDCVDPLGPDCVDPLGPEIAPRNEPAPPAAKPLAARADVKPKQRGRGSSEFEDSGTLYMTAVDNLDDGATISNKGKAVAAAGRVATTGASLAAPDKKTKARVEDENGPWKMLITENVALTRAATAEIGVPRKQPPASVEDYDLCYWNDIYQVSEYAQDIFDYLQEREPAYDIPDYMVRQKHLTKRMRALLVDWMIEIQETFELNHETLYLAVKILDTYLSRVTIGHEVLQLVGIAGMLIASKYDERLPPTVDDFVYFCDGAYDRNDLLKMERTVFRTIEFDLGFPLSYRFLRRYARVNRIPMMTLTLARYILETGLMDYNTVLVRDSKLACGALFIARRMLDQPGWNETLEYYSSYKVEQFTDAIVLLNNGMSSRQYSFDTVHKKYSHELFFEVAKRPVITSMEKLFATSSVMYKAAPTALPVAADATTKENVAPIPAAVSNK

SEQ ID NO: 2486 - protein, 501 aa, Anopheles gambiae str. PEST
STIFLLRKVKKQRIVSWLTVRKVFRIVLKMAAFRIHEDLEKENRVLAPVGGKKNAILASNNGAGGLPAGKNVILHSIGIQHQQQRTMFSVLSNVQSNVANMEKTVKEGKVKNLRPGGAVLLPKSGKVSDENAVEAKQNIQVKAVKKSSVPNEPFKGFEIYDESKENVKEMCVPKKDDAILEKRAPLQELKHAELLETPMSVGENFSPMSIDKSTSIIVEEGPIPRNDRERFFEVEEYQEDILLYLKEAEKRNRPKPGYMLKQTDITHSMRTILVDWLVEVSEEYKLQGETLALAVSYIDRFLSFMSVVRAKLQLVGTAAMFIAAKYEEIYPPDVSEFVYITDDTYTKTQVLRMEQLILKVLSFDLTVPTSLYLCELSLLEADPFLTYMPSKIAAGALALARRTLDLPMWSKMLENNTGYKLVDMRDIILDLNKTHVDAVTMQQQAIQEKYKSKTYHEVASLPATEITKESFDKICATLCNSSAATLLLSNTDSELLKEMGR

SEQ ID NO: 2487 - protein, 441 aa, Anopheles gambiae str. PEST
RVCPLPSLSWTDTHEMWDLMCRKDDLAWLAREPNMFDDHPGLQPRMRSILIDWLNEVCEVYKLHRETYFLAVDYIDRYLSLKKELKKNHLQLLGITALFIAAKAEEIYPPKIGEFAYVTDGACTDEDILREELLILSALDWKINPVTVIGWLGLYMQINVTSRDVDVPVRSLKRKSNSTAHNTASTPSPKKRKITDENADVNNIQQAAVTVGLQQQPLQQQQKVSSSSTSTANKTDDAFVYPQFSGMEFAHTAQLIDLCSLDVGFANFKYSVIAAAALSHTFDRKTATFVSGLPWEEIAPCAKWMEPFFLVICDENASCPLTFLESNDPIKHSHGLKHICPNLVSDSSHIIQTHTTSLDMLDLVSIKIEQMESCTRMGQLEASPAPIGIIESEDGILTPPASNRKSLETLGGVSGTAVSKVASEAIASIIADASSGTWSHS

SEQ ID NO: 2488 - protein, 204 aa, Anopheles gambiae str. PEST
RFADPDRHMITDDRVLPNLIRLERYTIPPCNYFVAVQQDIKPAMRKIVTTWMLEVCDEQKCEEQTFPLAVNFFDRFLCALAIDRYHLQLLGCCTLLLASKIRQCQPLTVDVLSAYTDHAVSPDQIRNWELLLISKLEWNINAVTAYDYVDHILERVKWGSDDARLREHAHTLIHVCNTETIFMQVEPSLLAVSCIASATRGLNV

SEQ ID NO: 2489 - protein, 341 aa, Giardia lamblia ATCC 50803
MPLDDESQSVHTFEQPVDNVEEMPQALINFRHANPDKETDILDIDLIDKDDIQACAEYVREIYEYLLQSEGKYMLGSDFLSNQIDFDAEDRTLLVDWISRCHTRFNLANESFFHCIAIFDSYLSRVVVPKASNRLVGICCLFIAAKYEQSYIPSLRHFVEALTQVDPEFLVNCKCEGNRSGPCYRCSREAIIDTEESILHTLDFQLAMPTILTFLRRYARISEMKNRDRYIAFYISELSCLTTSIFKFKPSEIAAGCIAMSRRLTRKPTWDETLEKYSGYTESDTKKVMAEISTIMKKYACNPKARYIRRKYSQEDRFYGVSLMIETVVTQALTLNTKEAK

SEQ ID NO: 2490 - protein, 58 aa, Skeletonema costatum
MRGILADWLVEVHLKFKLVPETLYLVVNLIDRYLAKKEVTRSKLQLVGVTALFIATKY

SEQ ID NO: 2491 - protein, 63 aa, Alexandrium tamarense
MRGILADWLVEVAEEYKLCADTLYLSVNYIDRFLSIHPVQRSNLQLVGIACMWIASKYEEIYP

SEQ ID NO: 2492 - protein, 281 aa, Euglena gracilis
MDLDYEGQAPTTSLLLLFPPHLVPEYIGTISNNLRSAEVNHRPSKTFLEEVQVDITRLMRAILVDWMNEVTEEFRLKMETLCLAVNYVDRYLSRVPVPRHQLQLVGVASLLIASKMEEIMHPQIDEFVYITDSTYNREQVLRMELSILNALRYDMTVVTPRDFVGIYLKVAQASPEVCMLADYLLELILQEYAFLHWEPSMIAASAVVLALFGFRLPCWSDDLRRITQYQPNELNACLKEMHRVFQNAPHNNLQAVREKYSHGRFMHISMVAQLPPSPPVF

SEQ ID NO: 2493 - protein, 163 aa, Dunaliella tertiolecta
ASAQQPLNQQAPPPPTSFASQLQHTLGQQQFCDPTLIDRGLQHADKRRRDWIDVDALNEDDTQACSAYAVPIFEHLREAELVRRPNALYPEAFQTDVNAKMRAILVDWLVEVAEEYKLCADTLYLSVNYIDRFLSIHPVQRSNLQLVGIACMWIASKYEEIYP

SEQ ID NO: 2494 - protein, 380 aa, Picea abies
NNVNPIKEVQDSPKEPNPITEQISVHADCKQTVEKPNENEIVVSANKAAVASLKQQSTLQSPRISRQPKTSLNQGNPVPLAKLHEDAGRSSSLDFVNIDSEYKDPQMCTAYVTDIYANMRVVELKRRPLPNFMETIQRDINANMRSVLIDWLVEVSEEYKLVPDTLYLTISYIDRFLSANVVNRQRLQLLGVSCMLVASKYEEICAPPVEEFCYITDNTYKKEEVLDMEINVLNRLQYDLTNTKPLRPFSGVSFEQLKHPVRFQACIWEFMGNYLAELTLVEYDFLKYLPSLIAAAAVFLARMTLDPMVHPWNSTLQHYTGYKVSDMRDCICAIHDLQLNRKGCTLAAIRDKYNQPKFKCVANLFPPPVISPQFFIDNEV

SEQ ID NO: 2495 - protein, 227 aa, Picea mariana
AILIDWLIEVHLKFELMPETLYLTVNIIDRYLSIEIVTRKNLQLVGITAMLLACKYEEIWAPEINDFVCISAKEYASEQLVAMEHTILNQLKFNLTVPTPYVFLVRFLKAAGSDKEMENLAFFLVDLSLLHYIMIKYSPSMLAAAAVYTAQCTLKKSSPWSKTLILHTGYSEADLKECAHFMVNFHLNAGGSKLRVVHKKYSDPFFGCVAFLSPANLPVDDSCSSSN

SEQ ID NO: 2496 - protein, 434 aa, Medicago sativa subsp. X varia
MVNTSEENNSNAVMPRKFQGGMNQVGHGGGRIVGQNRRALGGINQNFVHGRPYPCVVHKRVLSEKHEICEKKQADLGHRPITRRFAAKIAGSQQSYAEKTKNSNPLNLNEFGNSIAIDDELKSPEDQPEPMTLEHTEPMHSDPLEMEEVEMEDIEGEMILDIDSCDANNSLAVVEYIEDLHAYYRKIEYLGCVSPTYMDEQLDLNERMRAILVDWLIEVHDKFDLMQETLFLTVNLIDRFLAKQNVVRKKLQLVGLVAMLLACKYEEVSVPVVSDLIHIADRAYTRKDILEMEKLMLNTLQYNMSLPTAYVFMRRFLKAAQADKKLELVAFFLVDLSLVEYEMLKFPPSLVAAAAVYTAQCTVSGFKHWNKTCEWHTNYSEDQLLECSMLMVGFHQKAGAGKLTGVHRKYGSAKFSFTAKCEPACFLLENKNQP

SEQ ID NO: 2497 - protein, 428 aa, Medicago sativa subsp. X varia
MKFSEEKNVSNNPTNFEGGLDSRKVGQNRRALGVINQNLVVEGRPYPCVVNKRALSERNDVCEKKQADPVHRPITRRFAAKIASTKTSNAEGTTKRSNLAKSSSNGFGDFIFVDDEHKPVEDQPVPMALEQTEPMHSESDQMEEVEMEDIMEEPVMDIDTPDANDPLAVAEYIEDLYSYYRKVESTSCVSPNYMAQQFDINERMRAILVDWLIEVHDKFDLMHETLFLTVNLIDRFLEKQSVVRKKLQLVGLVAMLLACKYEEVSVPVVGDLILISDRAYTRKEVLEMEKVMVNALKFNISVPTAYVFMRRFLKAAQADRKLELLAFFLIELSLVEYAMLKFSPSQLAAAAVYTAQCTMYGVKQWSKTCEWHTNYSEDQLLECSSLMVDFHKKAGTGKLTGAHRKYCTSKFSYTAKCEPASFLLENEL

SEQ ID NO: 2498 - protein, 431 aa, Arabidopsis thaliana
MGGSDENRHGVIGPMNRQQGGLRGGKVIPTNGQTRRALSNINKNIIGAPVYPCAVKRPFTEKNGICNKKIPPVPVHRPVTRKFAAQLAENNLQIHKEETKKPDLISNEALDRIITDVEEGDFNEPMFVQHTEAMLEEIDKMEGIEMQDSNDIDAEVEESVMDIDSCDKNNPLSVVEYINDIYCFYKKNECRSCVPPNYMENQHDINERMRGILFDWLIEVHYKFELMEETLYLTINLIDRFLAVHQHIARKKLQLVGVTAMLLACKYEEVSVPVVDDLILISDKAYTRTEILDMEKLMANTLQFNFCLPTPYVFMRRFLKAAQSDKKLELLSFFMIELCLVEYEMLQYTPSQLAASAIYTAQSTLKGYEDWSKTSEFHSGYTEEALLECSRKMVGLHHKAGTGKLTGVHRKYNTSKFGYAARIEPAGFLLL

SEQ ID NO: 2499 - protein, 418 aa, Arabidopsis thaliana
MILPMLGGLRGGKVIPTNGQTRRALSNINKNIIGAPVYPCAVKRPFTEKNGICNKKIPPVPVHRPVTRKFAAQLAENNLQIHKEETKKPDLISNEALDRIITDVEEGDFNEPMFVQHTEAMLEEIDKMEGIEMQDSNDIDAEVEESVMDIDSCDKNNPLSVVEYINDIYCFYKKNECRSCVPPNYMENQHDINERMRGILFDWLIEVHYKFELMEETLYLTINLIDRFLAVHQHIARKKLQLVGVTAMLLACKYEEVSVPVVDDLILISDKAYTRTEILDMEKLMANTLQFNFCLPTPYVFMRRFLKAAQSDKKLELLSFFMIELCLVEYEMLQYTPSQLAASAIYTAQSTLKGYEDWSKTSEFHSGYTEEALLECSRKMVGLHHKAGTGKLTGVHRKYNTSKFGYAARIEPAGFLLL

SEQ ID NO: 2500 - protein, 429 aa, Arabidopsis thaliana
MVRSDENSLGLIGSMSLQGGGVVGKIKTTATTGPTRRALSTINKNITEAPSYPYAVNKRSVSERDGICNKPPVHRPVTRKFAAQLADHKPHIRDEETKKPDSVSSEEPETIIIDVDESDKEGGDSNEPMFVQHTEAMLEEIEQMEKEIEMEDADKEEEPVIDIDACDKNNPLAAVEYIHDMHTFYKNFEKLSCVPPNYMDNQQDLNERMRGILIDWLIEVHYKFELMEETLYLTINVIDRFLAVHQIVRKKLQLVGVTALLLACKYEEVSVPVVDDLILISDKAYSRREVLDMEKLMANTLQFNFSLPTPYVFMKRFLKAAQSDKKLEILSFFMIELCLVEYEMLEYLPSKLAASAIYTAQCTLKGFEEWSKTCEFHTGYNEKQLLACARKMVAFHHKAGTGKLTGVHRKYNTSKFCHAARTEPAGFLI

SEQ ID NO: 2501 - protein, 460 aa, Arabidopsis thaliana
MVRSDENSLGLIGSMSLQGTLNRSILLLKIKTFVLFDFSPKLILNLLDVGGGVVGKIKTTATTGPTRRALSTINKNITEAPSYPYAVNKRSVSERDGICNKPPVHRPVTRKFAAQLADHKPHIRDEETKKPDSVSSEEPETIIIDVDESDKEGGDSNEPMFVQHTEAMLEEIEQMEKEIEMEDADKEEEPVIDIDACDKNNPLAAVEYIHDMHTFYKNFEKLSCVPPNYMDNQQDLNERMRGILIDWLIEVHYKFELMEETLYLTINVIDRFLAVHQIVRKKLQLVGVTALLLACKYEEVSVPVVDDLILISDKAYSRREVLDMEKLMANTLQFNFSLPTPYVFMKRFLKAAQSDKKLEILSFFMIELCLVEYEMLEYLPSKLAASAIYTAQCTLKGFEEWSKTCEFHTGYNEKQLLACARKMVAFHHKAGTGKLTGVHRKYNTSKFCHAARTEPAGFLI

SEQ ID NO: 2502 - protein, 485 aa, Arabidopsis thaliana
MGGSDENRHGVIGPMNRQQGGLRGGKVIPTNGQTRRALSNINKNIIGAPVYPCAVKRPFTEKNGICNKKIPPVPVHRPVTRKFAAQLAENNLQIHKEETKKPDLISNEALDRIITDVEEGDFNEPMFVQHTEAMLEEIDKMEGIEMQDSNDIDAEVEESVMDIDSCDKNNPLSVVEYINDIYCFYKKNEVTFSVLFLYHYDHSSFKIETFSIILQCRSCVPPNYMENQHDINERMRGILFDWLIEVHYKFELMEETLYLTINLIDRFLAVHQHIARKKLQLVGVTAMLLACKYEEVSVPVVDDLILISDKAYTRTEILDMVKSFTKSCPDYNHGCSALYVDDHYCVLQEKLMANTLQFNFCLPTPYVFMRRFLKAAQSDKKLELLSFFMIELCLVEYEMLQYTPSQLAASAIYTAQSTLKGYEDWSKTSEFHSGYTEEALLECSRKMVGLHHKAGTGKLTGVHRKYNTSKFGYAARIEPAGFLLL

SEQ ID NO: 2503 - protein, 429 aa, Arabidopsis thaliana
MVNSCENKIFVKPTSTTILQDETRSRKFGQEMKREKRRVLRVINQNLAGARVYPCVVNKRGSLLSNKQEEEEGCQKKKFDSLRPSVTRSGVEEETNKKLKPSVPSANDFGDCIFIDEEEATLDLPMPMSLEKPYIEADPMEEVEMEDVTVEEPIVDIDVLDSKNSLAAVEYVQDLYAFYRTMERFSCVPVDYMMQQIDLNEKMRAILIDWLIEVHDKFDLINETLFLTVNLIDRFLSKQNVMRKKLQLVGLVALLLACKYEEVSVPVVEDLVLISDKAYTRNDVLEMEKTMLSTLQFNISLPTQYPFLKRFLKAAQADKKCEVLASFLIELALVEYEMLRFPPSLLAATSVYTAQCTLDGSRKWNSTCEFHCHYSEDQLMECSRKLVSLHQRAATGNLTGVYRKYSTSKFGYIAKCEAAHFLVSESHHS

SEQ ID NO: 2504 - protein, 429 aa, Arabidopsis thaliana
MVNSCENKIFVKPTSTTILQDETRSRKFGQEMKREKRRVLRVINQNLAGARVYPCVVNKKGSLLSNKQEEEEGCQKKKFDSLRPSVTRSGVEEETNKKLKPSVPSANDFGDCIFIDEEEATLDLPMPMSLEKPYIEADPMEEVEMEDVTVEEPIVDIDVLDSKNSLAAVEYVQDLYAFYRTMERFSCVPVDYMMQQIDLNEKMRAILIDWLIEVHDKFDLMNETLFLTVNLIDRFLSKQNVMRKKLQLVGLVALLLACKYEEVSVPVVEDLVLISDKAYTRNDVLEMEKTMLSTLQFNISLPTQYPFLKRFLKAAQADKKCEVLASFLIELALVEYEMLRFPPSLLAATSVYTAQCTLDGSRKWNSTCEFHCHYSEDQLMECSRKLVSLHQRAATGNLTGVYRKYSTSKFGYIAKCEAAHFLVSESHHS

SEQ ID NO: 2505 - protein, 429 aa, Arabidopsis thaliana
MVNPEENNRNLVVKPITEILQDDDKRSRKFGVEMKRQNRRALGVINHNLVGAKAYPCVVNKRRGLSQRKQESCDKKKLDSLHPSISRSQEETKKLKPSGNEFGDCIFIDEEEEKNEEVTLDQPMPMSLEEPYIEFDPMEEEVEMEDMEEEQEEPVLDIDEYDANNSLAAVEYVQDLYDFYRKTERFSCVPLDYMAQQFDISDKMRAILIDWLIEVHDKFELMNETLFLTVNLIDRFLSKQAVARKKLQLVGLVALLLACKYEEVSVPIVEDLVVISDKAYTRTDVLEMEKIMLSTLQFNMSLPTQYPFLKRFLKAAQSDKKLEILASFLIELALVDYEMVRYPPSLLAATAVYTAQCTIHGFSEWNSTCEFHCHYSENQLLECCRRMVRLHQKAGTDKLTGVHRKYSSSKFGYIATKYEAAHFLVSDSH

SEQ ID NO: 2506 - protein, 429 aa, Arabidopsis thaliana
MVNPEENNRNLVVKPITEILQDDDKRSRKFGVEMKRQNRRALGVINHNLVGAKAYPCVVNKRRGLSQRKQESCDKKKLDSLHPSISRSQEETKKLKPSGNEFGDCIFIDEEEEKNEEVTLDQPMPMSLEEPYIEFDPMEEEVEMEDMEEEQEEPVLDIDGYDANNSLAAVEYVQDLYDFYRKTERFSCVPLDYMAQQFDISDKMRAILIDWLIEVHDKFELMNETLFLTVNLIDRFLSKQAVARKKLQLVGLVALLLACKYEEVSVPIVEDLVVISDKAYTRTDVLEMEKIMLSTLQFNMSLPTQYPFLKRFLKAAQSDKKLEILASFLIELALVDYEMVRYPPSLLAATAVYTAQCTIHGFSEWNSTCEFHCHYSENQLLERCRRMVRLHQKAGTDKLTGVHRKYSSSKFGYIATKYEAAHFLVSDSH

SEQ ID NO: 2507 - protein, 64 aa, Isochrysis galbana
MRGILADWLIEVHHKFKLHIETLYGSVDLIDRYLSKCAPITRSKLQLVGVAAMFIASKYEEIYP

SEQ ID NO: 2508 - protein, 63 aa, Brassica rapa
MRGILVDWLVEVAEEYTLVPDTLYLTVYLIDWFLNGNYVERNRLQLLGVTCMLIASKYEEIYP

SEQ ID NO: 2509 - protein, 433 aa, Glycine max
MKISDENSSKPINPTSFQGGIECVGNRKMGQNRRALSVINQDLVAEGRPYPCVVNKRALAEKHNVCEKKQADPGHRPITRRFAAQIASTQKNRAEGTKKSNLGNSNSNGFGEHIFVDEEHKSTTDDQPVPMSLEKTEPMHSESDQMEEVEMEDIIEEETVLDIDTCDANNPLAVVDYIEDLYAHYRKLEGTSCVSSDYMAQQSDINERMRAILIDWLIEVHDKFDLLHETLFLTVNLIDRFLAKQTVARKKLQLVGLVAMLLACKYEEVSVPVVGDLILISDKAYTRKEVLEMEKLMVNTLQFNMSVPTAYVFMKRFLKAAQADRKLELLAFFLVELSLVEYEMLKFPPSLLAAAAVYTAQCTIYGFKQWSKTCEWHSNYSEDQLLECSTLMAAFHQKAGNGKLTGVHRKYCSSKFSYTAKCEPARFLLENPL

SEQ ID NO: 2510 - protein, 206 aa, Glycine max
  unsure (1)..(206): unsure at all Xaa locations
ERQAVIRKKLQLVGVTAMLIACKYEEVTVPTVEDFILITDKAYTRNEVLDMEKLMMNILQFKLSVPTPYMFMRRFLKAAHSDKKLELLSFFLVELCLVECKMLKFSPSLLAAAAIYTAQCSLYQFKQWTKTTEWYTDYSEEKLLECSRLMVTFHQKAGSGKLTGVYRKYNTWKYGCAAKIEPALFLLDNXGNASKLLVSNALLWLF

SEQ ID NO: 2511 - protein, 428 aa, Medicago sativa
MKFSEENNVSNNPTNFEGGLDSRKVGQNRRALGVINQNLVVEGRPYPCVVNKRALSERNDVCEKKQADPVHRPITRRFAAKIANTKTTNAEGTTKRSNLAKSSSNGFGDFIFVDDEHKPVEDQPVPMALEQTEPMHSESDRMEEVEMEDIMEEPVMDIDTPDANDPLAVAEYIEDLYSYYRKVESTSCVSPNYMAQQFDINERMRAILVDWLIEVHDKFDLMHETLFLTVNLIDRFLEKQSVVRKKLQLVGLVAMLLACKYEEVSVPVVGDLILISDRAYTRKEVLEMEKVMVNALKFNISVPTAYVFMRRFLKAAQADRKLELLAFFLIELSLVEYAMLKFSPSQLAAAAVYTAQCTMYGVKQWSKTCEWHTNYSEDQLLECSSLMVDFHKKAGTGKLTGAHRKYCTSKFSYTAKCEPASFLLENEL

SEQ ID NO: 2512 - protein, 328 aa, Medicago sativa
NSNEFGNFIAIDDELKLPEDQPEPMTLEHTEPMHSDPLEMEEVEMEDIEGEMILDIDSCDANNSLAVVEYIEDLHAYYRKIEYLGCVSPTYMDEQLDLNERMRAILVDWLIEVHDKFDLMQETLFLTVNLIDRFLAKQNVVRKKLQLVGLVAMLLACKYEEVSVPVVSDLIHIADRAYTRKDILEMEKLMLNTLQYNMSLPTAYVFMRRFLKAAQADKKLELVAFFLVDLSLVEYEMLKFPPSLVAAAAVYTAQCTVSGFKHWNKTCEWHTNYSEDQLLECSMLMVGFHQKAGAGKLTGVHRKYGSAKFSFTAKCEPACFLLENKNQP

SEQ ID NO: 2513 - protein, 257 aa, Pisum sativum
VSEYIDDIYHYYWVTEAHSQALSNYMSIQTEITPHMRGVLVNWLIEVHFKLDLMPETLYLTVTLLDQYLSQVTVKRSDMQLVGLTALLLASKYEDFWHPRVKDLISISAETYTRDQMLGMEKLILRKLKFRLNAPTPYVFMVRFIKAAQSNMKLEHMAFFLIDLCLVEYETLAFKPSLLCASTLYLARCTLQITPSWTPLLQKHARYDVSQIRDCADMMLKFHKAAGKGKLTVAYEKYSRKELSAVAGVKPLDRLPH

SEQ ID NO: 2514 - protein, 235 aa, Pisum sativum
SKMRAILIDWLVDVHTKFELSPEALYLTINIIDRFLAISLVSRRELQLVGISAMLMASKYEEIWPPEVNDFVCLSDRAYTHEQILIMEKTILGKLEWTLTVPTPFVFLVRFLKAASVSLPSSDLALENMAHFLSELGMMHYATLMYSPSMMAAAAVYAARCTLNKSPVWDETLTMHTGYSEEELMGCARLLVSFHSASGSGKLKGVYKKYADPQKGAVAVLPPAKNLVSSAAVGS

SEQ ID NO: 2515 - protein, 417 aa, Sphaerechinus granularis
MMAHTTRNSNMNSLGLKKLQSFDNENAGARLGAKSMAVQKPAQRAALGNISNMMRTTQVAGKKVVKKDVRTKTMVKSKATSSLQSVAKLPVSVDNVKPDICRSPLPQVVDKMEVDSVESAIEAFSQQLIDLQVEDIDKDDGDNPQLCSEYAKEIYLYMRSLEKQMQVPASYLDREGQLTGRMRHILVDWLVQVHLRFHLLQETLFLTVQLIDRFLVDHTVSKGKLQLVGVTAMFIASKYEEMYPPEINDFVYITDQAYTKTQIRQMEVVMLKGLGYSLGKPLCLHFLRRNSKAAMVDPQKHTLAKFLMEITLPEYNMVQYDPSEIAAAAIYMSMTLLGSEGDSWGAKMTHYSMYNEDHIKPIVKKMAKAVIRNDAMTEKYHAVKTKYRSSRFMNISALPELESDLIKSLAEESEERM

SEQ ID NO: 2516 - protein, 388 aa, Sphaerechinus granularis
MMAHTTRNSNMNSLGLKKLQSFDNENAGARLGAKSMAVQKPAQRAALGNISNMMRTTQVAGKKVVKKDVRTKTMVKSKATSSLQSVASLPVSVDNVKPDICRSPLPQVVDKMEVDSVESAIEAFSQQLIDLQVEDIDKDDGDNPQLCSEYAKEIYLYMRSLEKQMQVPASYLDREGQLTGRMRHILVDWLVQVHLRFHLLQETLFLTVQLIDRFLVDHTVSKGKLQLVGVTAMFIASKYEEMYPPEINDFVYITDQAYTKTQIRQMEVVMLKGLGYSLGKPLCLHFLRRNSKAAMVDPQKHTLAKFLMEITLPEYNMVQYDPSEIAAAAIYMSMTLLGSEGDSWGAKMTHYSMYNEDHIKPIVKKMAKAVIRNDAMTEKYHVSLHTMK

SEQ ID NO: 2517 - protein, 462 aa, Sphaerechinus granularis
MAFSIGSSNAGNDMTNMAQGVQQFGGRKTKRDDIASRNGPQACKRAALGTITNTSSTRVQPARAAKQFRVSGENPFPVFQDENAHSRIPQGKPFGIPSAAAAPAFSIHVDPTSTYVQPQTASTSIKSTDKENEHILLDTALSLPVPPQAQRIPLRSSGPDVEDNNVSLNEESLTSSEYSPMLLDTSLDAKCISPQTVVAERDLSLGEPEYSEEIYQYLKTAELKHRPKHGYMRKQPDITNNMRCILIDWLVEVSEEYRLHNETLYLAAAFIDRFLSQMSVLRAKLQLVGTASMFVASKYEEIYPPDVKEFIYITDDTYSIKQVLRMEHLILKVLSFDLAAPTINCFLPRFLKAAQANSKTEHLTQYLAELTLQKYDFIKYVPSMIAASRVCLANHTLNNEGWTPTMAHYTDYQLADIYVCTDLHQLFIKAPTMDQQAVREKYKSQKYSGASSTPVPTSLPTL

SEQ ID NO: 2518 - protein, 63 aa, Prorocentrum minimum
MRGILVDWLVEVAEEYKLCADTLYLSVNYIDRFLSIHPVQRSNLQLVGIACMWIASKYEEIYP

SEQ ID NO: 2519 - protein, 63 aa, Prorocentrum minimum
MRGILTDWLVEVAEEYKLCADTLYLSVNYIDRFLSIHPVQRSNLQLVGIACMWIASKYEEIYP

SEQ ID NO: 2520 - protein, 470 aa, Oryza sativa (japonica cultivar-group); identical to SEQ ID NO: 378

SEQ ID NO: 2521 - protein, 432 aa, Daucus carota
MASKAVITQRHKEAEGKQKNVQAERRNRRVLGDIGNVVKAVDAGKPKNPIKTNRPMTRSLCAQLVAKGLPVVGGKDPKDIQLIDGVVGRKDASVLEAAAVKKKDTDQRTTVTLSCEEEIKPKSSGRKSRPDYSEKTEKAFTSILSARSKAACGLINKPQNEIIANIDASDVDDELAAVEYVDDIYKYYKLTEGDGQVHDYMPSQTDINSKMRSILIDWLVEVHRKFELMPESLYLTINIVDRYLSMKIVPRRELQLVGVGSMLIACKYEEIWAPEVNDFIAISDNAYNREQVLLMEKSILAKLEWYLTVPTPYVFLVRYIKSSVPSDPEMENMTFFLAELGLTHYTTVMTYCPSVIAASAVYAARCTLKKSPFWTETLKHYTGYSEDQLRDCAKLLVSYHAALSESKLKAVYKKFARPEKGVVALVPPLKLI

SEQ ID NO: 2522 - protein, 434 aa, Lycopersicon esculentum
MAITDENKHPLIKESSVRVKDRAEMATRKVVGVETRSNRRVLGAINQNLVGGQGYPCVVNKRGLSDGNGFCDKNLPVHGHRPITRKYAAQIASSQKHSSEENKKPKIAAESFSVWEDDMEAANDKPVPMSLEQTEKVSKGKDQMTYIQEVEMEDIFEEAVIDIDGDDAKNHLAAVEYVGDLFANYRTMEVNSCASPYYMAQQADINERMRSILIDWLIEVHHKFELREETLFLTVNLIDRFLEKQGIVRKKLQLVGLVAMLLACKYEEVCAPLVEDLVLISDKAYTRKEVLEMESMMLNTLQFNMSVPTAYVFMRRYLKAAQCDRKLELLSFMLVELCLVEYEMLKFPPSFIAAAAIYTAQTTLYGVQQWSKTCEVHTTYSEDQLLECSRSIVGYHQKAATGKLTGVHRKYSISKFGYAAKCEPAHFLVQQTQE

SEQ ID NO: 2523 - protein, 60 aa, Colpoda sp.
MRAILIDCIISVHFKFHLQPETLFLTVNLIDRYLERSQIAKENLPLVGVTALFIASKYEE

SEQ ID NO: 2524 - protein, 191 aa, Populus alba
RLVPDTVYLTVNYIDRYPSGNVMNRQRLQLLGVACMMIAAKYEEICAPQVEEFCYITDNTYFRDEVLEMESTVLNYLKFEMTAPTAKCFLRRFVRAAQGIIEAPSMQLECLANYIAELPLLEYSMLCYAPSLVAASAIFLAKYILLPSKRPWNSTLQHYTLYEPVDLSDCVKDPHRLCCGDHNSTLPAIRE

SEQ ID NO: 2525 - protein, 211 aa, Populus alba
AQAAAALENKKQVCVNVEKVPAAGVDGVDAVGRKVAVKKPAQKKVTVKPKPEEVVVISPDSEEVVKQEKPVKKKKEGEGSKKNKPTLTSVLTARSKAACGIANKLKEQIIDIDAADVNNDLAGVEYVEDIYKFYKLVENESRPNNYMDMQPEINEKMRAILVDWLVDVHQKFQLSPETFYLTINIIDRFLSVKTVPRRELQLVGIGATLMA

SEQ ID NO: 2526 - protein, 63 aa, Aureococcus anophagefferens
MRGILVDWLVEVHLKFKMLQPTIYLTVQIIDRYLSAKQIDRNQLQLLGVAALFIASKYEEIYP

SEQ ID NO: 2527 - protein, 296 aa, Leishmania mexicana mexicana
RILLSNQTNLVREPYQKPAAQPPTPLTNESRFVSEYGSEILTYFLEVERVVYSERMYMSRQSEVTDRMRKILIDWLIDVVTEFKLHPETFFLAVDIIDRFLFFYSIPRTKLQLVGVTAILVAAKHEEIWPPTVNDCVAVTANTYTSREVIDMEFDVVTTLRFKFTVPTTYPITCRLLESCHMAPAVRHATFLFLESAAHCYPLLQFLPSRIAAGAVLLGAFLIRYNRSKGVISLQGLWEIEVSPFAQGIGFEELQPVTEQLLPFTQRLCSGSSRLQAVRRKYSSSEYDCVASLEFP

SEQ ID NO: 2528 - protein, 436 aa, Dictyostelium discoideum
MSTINNPLNIKTRSHSSMGGGMIMDENKVPKSSIGMDKKIGGTTGLKSHRGALSDLTNNTHQTTGMATKTVQLSNNNIIMPQPTNTRNNIITRSKSIIDNGASLRNSALISGVLPNANGPVNKVQKRDIQSMEMMNNIPQQPVMIDDVDNDTNMIQEEQMVIDITEVPENIDIYDSHDPQCVGEYVNEIFAYYREKEQIDKIDKDYIKNQYHINERMRAILVDWMMAVHVRFKLLSETFFLSVNIVDRYLAKVMIPVTKLQLVGITAILLACKYEEIYSPQIKDFVHTSDDACTHAEVIDMERQILSTLQFHMSVATPLHFLRRFSKAAGSDSRTHSLSKYLSELSMVEYRMVQFVPSMIAAASIYVARRMTMKSGPYWNVTLEYYTCYKESEILQCAQELKEVRKRADTSNLKATRKKYLSSKLMEVAAIPVVEF

SEQ ID NO: 2529 - protein, 385 aa, Triticum aestivum
MENMRSENHRGAAMEGVKLASEAAANTNRRALRDIKNILGAPHQPQAVSKRGLQEKPAAAGANGHRPVTRKFAAILQQTQPANAPLAPIGSERQKRNADTAFNAPSDMECSKASDDDLDEMMTNELKEIDMEDTEEEVPDIDSCDVGNSLAVVEYVDEIYSFYRRTEELSCVSPTYMAHQSDINEKMRGILVDWLIEVHYKLELLGETLFLTVNIIDRYLARENVARKKLQLVGVTAMLLASKYEEVSVPVVEDLILICDRAYSREDILDMERTIVDRLEFNMSVPTPYCFMRRFLKAAGSDKKLELLSLFLIELSLVDYKMLKFQPSMLAAAAIYTAQCTLNGCVSWSKCCELHTKYSEEQLMDCTTMMVELHRGAARGKLTGV

SEQ ID NO: 2530 - protein, 471 aa, Triticum aestivum
IPIRPSLSYAPPARLAPLLPRRRELLPRQPGTGGRRRLPLPPPPPPAPAPQRGVPLPSPLQCRTSENHRGAAMEGVKLASEAAANTNRRALRDIKNILGAPHQPHAVSKRGLQEKPAAAGANGHRPVTRKFAAILQQTQPANAPLAPIGSERQKRNADTAFNAPSDMECSKASDDDLDEMMTNELKEIDMEDTEEEVPDIDSCDVGNSLAVVEYVDEIYSFYRRTEELSCVSPTYMAHQSDINEKMRGILVDWLIEVHYKLELLGETLFLTVNIIDRYLARENVARKKLQLVGVTAMLLAAGFQVGGGPRAGRRGPVPHRPPPRQDILDMERKIVDRLEFNMSVPTPYCFMRRFLKAAGSDKKLELLSFFLIELSLVDYKMLKFQPSMLAAAAIFTAQCTLNGCMSWNKCCELHTKYSEEQLMDCSTMIVELHQGAARGKLTGVHRKYSTFKYGCAAKSEPAAFLLDARKA

SEQ ID NO: 2531 - protein, 424 aa, Zea mays
MENLRSQNCHQGVAMEGVKFAPEKANTNRRALSDIKNIIGGPHQHLAVSKRALSEKPAAAAAANAKDQAGFVGHRPVTRKFAATLATQPTVALLDPIGSERLKRNADTAFHTPADMESTKMTDDSPLPMVSEMDEMMSPELKEIEMEDIEEAAPDIDSGDAGNSLAVADYVDEIYRFYRKTEGASCVPTNYMSSQTDINEKMRGILIDWLIEVHYKLELLEETLFLTVNIIDRFLARENVVRKKLQLAGVTAMLLACKYEEVSVPVVEDLILICDRAYTRADILEMERRIVNTLNFNMSVPTPYCFMRRFLKAAQSEKKLELLSFFMIELSLVEYEMLQFCPSMLAAAAIYTAQCTINGFKSWNKCCELHTRYSEEHLMVCSRMMVELHQRAAHGKLTGVHRKYNTSRYSYAAKSEPATFLLDA

SEQ ID NO: 2532 - protein, 424 aa, Zea mays; identical to SEQ ID NO: 2531

SEQ ID NO: 2533 - protein, 424 aa, Zea mays; identical to SEQ ID NO: 2531

SEQ ID NO: 2534 - protein, 434 aa, Dreissena polymorpha
MNTRAASANLAGRMALQQINSDNIDQIPGKAQLLQRPQTSHLMQRNTLSDIGNQVSAITISDASKKGPIKKEIVQVNPRQQKALTKTKATTSLKALAEKKETKKEHDEFHFVEPSFPSRIPVPTATVHPLPSAHVPMDTSDAGKDAFSKALLNVQGIDANGRGNPQLVSEYVNDIYEYMRILEKKYPIADSYLEKQEISGKMRAILIDWLCQVHHRFHLLQETLYLTVGIIDRFLQESPVTKNKLQLVGVTSMLIASKYEEMYAPEVADFVYITDNAYTKKEILEMEQTILRTLNFSFGKPLCLHFLRRNSKAGQVDASKHTLAKYLMELTIVEYDMVQYLPSQIAAAALCLSMKLLGDCKWTETLAHYSSYTEEELVPTMRKLASLVMKQEDSKLKLTAIRTKYSSSKFMKISTIPALKSPLVQELAGASDCS

SEQ ID NO: 2535 - protein, 459 aa, Pneumocystis carinii
MNAARRVTRQTATFNLNDENKLHGQISRVKQVSTQGLEGVNKPWTAATRKRAALGDVSNVHNKENQTAKTKTQPLSTKARVVTKTGVQSHQSKESVHTVPTGELRGEETTRKRRTSKVLTEQKVIIEVEQTQASKKVRTDGLLNGSVQEHPASQDWDDLDADDAHDPLMVSEYVEEIMGYMRELEVLTLPLPDYMDRQKELQWKMRGILVDWLIEVHAKFRLLPETLFLSVNIIDRFLSLRVCSLPKLQLVGITALFIAAKYEEVMCPSIQNFMYMADGGYTNEEILKAEQYVLQVLGYDMSYPNPINFLRRVSKADNYDIQTRTVAKYLMEISLLDHRFLPFVPSNIAASGIYLARIMVTGGNWNANLIHYSGYKESDLVPCSKMMLDYLSRSVIKHEAFFKKYASKKFMKASLFVRDWVKKHYDLEANVRLNTISFDYDNHESNEIHQDLEEEEGSL

SEQ ID NO: 2536 - protein, 459 aa, Pneumocystis carinii
MNAARRVTRQTATFNLNDENKLHGQISRVKQVSTQGLEGVNKPWTAATRKRAALGDVSNVHNKENQTAKTKTQPLSTKARVVTKTGVQSHQSKESVHTVPTGELRGEETTRKRRTSKVLTEQEVIIEVEQTQASKKVRTDGLLNGSVQEHPASQDWDDLDADDAHDPLMVSEYVEEIMGYMRELEVLTLPLPDYMDRQKELQWKMRGILVDWLIEVHAKFRLLPETLFLSVNIIDRFLSLRVCSLPKLQLVGITALFIAAKYEEVMCPSIQNFMYMADGGYTNEEILKAEQYVLQVLGYDMSYPNPINFLRRVSKADNYDIQTRTVAKYLMEISLLDHRFLPFVPSNIAASGIYLARIMVTGGNWNANLIHYSGYKESDLVPCSKMMLDYLSRSVIKHEAFFKKYASKKFMKASLFVRDWVKKHYDLEANVRLNTISFDYDNHESNEIHQDLEEEEGSL

SEQ ID NO: 2537 - protein, 482 aa, Schizosaccharomyces pombe
MTTRRLTRQHLLANTLGNNDENHPSNHIARAKSSLHSSENSLVNGKKATVSSTNVPKKRHALDDVSNFHNKEGVPLASKNTNVRHTTASVSTRRALEEKSIIPATDDEPASKKRRQPSVFNSSVPSLPQHLSTKSHSVSTHGVDAFHKDQATIPKKLKKDVDERVVSKDIPKLHRDSVESPESQDWDDLDAEDWADPLMVSEYVVDIFEYLNELEIETMPSPTYMDRQKELAWKMRGILTDWLIEVHSRFRLLPETLFLAVNIIDRFLSLRVCSLNKLQLVGIAALFIASKYEEVMCPSVQNFVYMADGGYDEEEILQAERYILRVLEFNLAYPNPMNFLRRISKADFYDIQTRTVAKYLVEIGLLDHKLLPYPPSQQCAAAMYLAREMLGRGPWNRNLVHYSGYEEYQLISVVKKMINYLQKPVQHEAFFKKYASKKFMKASLFVRDWIKKNSIPLGDDADEDYTFHKQKRIQHDMKHEEW

SEQ ID NO: 2538 - protein, 482 aa, Schizosaccharomyces pombe
MTTRRLTRQHLLANTLGNNDENHPSNHIARAKSSLHSSENSLVNGKKATVSSTNVPKKRHALDDVSNFHNKEGVPLASKNTNVRHTTASVSTRRALEEKSIIPATDDEPASKKRRQPSVFNSSVPSLPQHLSTKSHSVSTHGVDAFHKDQATIPKKLKKDVDERVVSKDIPKLHRDSVESPESQDWDDLDAEDWADPLMVSEYVVDIFEYLNELEIETMPSPTYMDRQKELAWKMRGILTDWLIEVHSRFRLLPETLFLAVNIIDRFLSLRVCSLNKLQLVGIAALFIASKYEEVMCPSVQNFVYMADGGYDEEEILQAERYILRVLEFNLAYPNPMNFLRRISKADFYDIQTRTVAKYLVEIGLLDHKLLPYPPSQQCAAAMYLAREMLGRGPWNRNLVHYSGYEEYQLISVVKKMINYLQKPVQHEAFFKKYASKKFMKASLFVRDWIKKNSIPLGDDADEDYTFHKQKRIQHDMKDEEW

SEQ ID NO: 2539 - protein, 411 aa, Schizosaccharomyces pombe
MALYSISKPVGSKINKHSYQDENTLVGKQALSKGTEKTKLSTNFEINLPRRTVLSDVSNVGKNNADEKDTKKAKRSFDESNLSTNEEADKPVESKFVKKLKVYSKNADPSVETLQKDRVSNVDDHLSSNPLMAEEYAPEIFEYIRKLDLKCLPNPKYMDQQKELTWKMREILNEWLVEIHSNFLLMPETLYLAVNIIDRFLSRRSCSLSKFQLTGITALLIASKYEEVMVPSIQNFVYMTDGAFTVEDVCVAERYMLNVLNFDLSYPSPLNFLRKISQAEGYDAQTRTLGKYLTEIYLFDHDLLRYPMSKIAAAAMYLSRRLLRRGPWTPKLVESSGGYEEHELKEIAYIMLHYHNKPLEHKAFFQKYSLKRFLKASIFVHQLVRNDTSVNRTDDDDLQSEPSSSLTNDGH

SEQ ID NO: 2540 - protein, 411 aa, Schizosaccharomyces pombe
MALYSISKPVGSKINKHSYQDENTLVGKQALSKGTEKTKLSTNFEINLPRRTVLSDVSNVGKNNADEKDTKKAKRSFDESNLSTNEEADKPVESKFVKKLKVYSKNADPSVETLQKDRVSNVDDHLSSNPLMAEEYAPEIFEYIRKLDLKCLPNPKYMDQQKELTWKMREILNEWLVEIHSNFCLMPETLYLAVNIIDRFLSRRSCSLSKFQLTGITALLIASKYEEVMCPSIQNFVYMTDGAFTVEDVCVAERYMLNVLNFDLSYPSPLNFLRKISQAEGYDAQTRTLGKYLTEIYLFDHDLLRYPMSKIAAAAMYLSRRLLRRGPWTPKLVESSGGYEEHELKEIAYIMLHYHNKPLEHKAFFQKYSSKRFLKASIFVHQLVRQRYSVNRTDDDDLQSEPSSSLTNDGH

SEQ ID NO: 2541 - protein, 394 aa, Schizosaccharomyces pombe
MKTHLLANKLYQKGLRRQNYLQICKLICHARTVLSDVSNVGKNNADEKDTKKAKRSFDESNLSTNEEADKPVESKFVKKLKVYSKNADPSVETLQKDRALMLMNHLSSNPLMAEEYAPEIFEYIRKLDLKCLPNPKYMDQQKELTWKMREILNEWLVEIHSNFCLMPETLYLAVNIIDRFLSRRSCSLSKFQLTGITALLIASKYEEVMCPSIQNFVYMTDGAFTVEDVCVAERYMLNVLNFDLSYPSPLNFLRKISQAEGYDAQTRTLGKYLTEIYLFDHDLLRYPMSKIAAAMYLSRRLLRRGPWTAKLVESSGGYEEHELKEIAYIMLHYHNKPLEHKAFFQKYSSKRFLKASIFVHQLVRQRYSVNRTDDDDLQSEPSSSLTNDGQRTLL

SEQ ID NO: 2542 - protein, 415 aa, Schizosaccharomyces pombe
MDVSTQTRHATYFQDENQLQKDHIYVKKKSHIKLNTGVRAPFKAVDNINQQDEPTLIEGNNESSISSSTGDTFEEDFAYQDKVEIEERSIRSTPKSIGDDDLENREGSFDAPEGILTHGKHRLPTIPEWTKEDLAALSEAAARLQANPSPEDIETDPSMVPDYDPEIFHYMQSLERKLAPPPNYMSVQQEIDWVTRHMLVDWIVQVQIHFRLLPETLFLAVNLIDRFLSIKVVSLQKVQLVGLSALLIACKYEEIHPPSIYNFAHVVQGIFTVDEIIRAERYMLMLLDFDISWPGPMSFLRRISRADSYDHDIRMLAKYLQEVTLMDEIFIGAHISFIAATAYYLSMQMLGHLDWTPCHVYYSGYTARQLKPCAIIIMECLVDAPNHHNAIYRKYSENRMKRVSAFAHNWVLSVI

SEQ ID NO: 2543 - protein, 427 aa, Saccharomyces cerevisiae
MHHNSQSLSSGHIRSPEDENVAPIGNLKHRTGSLSHISSAHPRVALSDVTNIVATNSSNNSISKPKVAPIKERLDSAAIIEEERLDANSVAQRKEADHNDLLTDREQEEPVEDDGESEEDEEEDQEPLLLQHYASDTLVWEHAFRTYYRTTLDPNDDDVYDVVMVAELSNEIFEYMRKLEDLYKPNPYYMDKQPELRWSFRSTLIDWIVQVHEKFQLLPETLYLCINIIDRYLCKEVVPVNKFQLVGAASLFIAAKYEEINCPTIKDFVYMSENCYSRNDLLDAERTILNGLEFELGWPGPMSFLRRISKADDYEHDTRTLAKYLLESTIMDHRLVSAQPSWLAAGAYFLSKIILGQNQWSLAHVYYSNYTQEQILPLATIILENCRYASKRHNAIWRKYSSRRYLHSSQIVAKWIALAEHRVERSN

SEQ ID NO: 2544 - protein, 427 aa, Saccharomyces cerevisiae
MHHNSQSLSSGHIRSPEDENVAPIGNLKHRTGSLSHISSAHPRVALSRVTNIVATNSSNNSISKPKVAPIKERLDSAAIIEEERLDANSVAQRKEADHNDLLTDREQEEPVEDDGESEEDEEEDQEPLLLQHYASDTLVWEHAFRTYYRTTLDPNDDDVYDVVMVAELSNEIFEYMRKLEDLYKPNPYYMDKQPELRWSFRSTLIDWIVQVHEKFQLLPETLYLCINIIDRYLCKEVVPVNKFQLVGAASLFIAAKYEEINCPTIKDFVYMSENCYSRNDLLDAERTILNGLEFELGWPGPMSFLRRISKADDYEHDTRTLAKYLLESTIMDHRLVSAQPSWLAAGAYFLSKIILGQNQWSLAHVYYSNYTQEQILPLATIILENCRYASKRHNAIWRKYSSRRYLHSSQIVAKWIALAEHRVERSN

SEQ ID NO: 2545 - protein, 460 aa, Saccharomyces cerevisiae
MMLEGYTVQPPQSTLIGDIEIQDENANQEVKNVLYQGVQKGIKRLEKRQRRVALGDVTSQKANKIHNAIHNKFHQTKNNFEIENIRSSALVKEQQRDVRHEDSDYFLIDSSEGSSTDDEQVNEDAIDDLLSRRVNDQQIQADEVYEDFDGEMQDVIEEDVDSQIEPLSPINNDEIQTELDRAFEKYFRSVPNPLDDDTHDVVMVVEYASDIFYYLRELEVKYRPNPYYMQNQVELTWPFRRTMIDWLVQLHFRFQLLPETLYLTINIVDRFLSKKTVTLNRFQLVGVSALFIAAKFEEINCPTLDDLVYMLENTYTRDDIIRAEQYMIDTLEFEIGWPGPMPFLRRISKADDYDFEPRTLAKYLLETTIVEPKLVAAAPSWLAAGAYFLSRTILGSNDWSLKHVFYSGYTSSQIIPLASLILENCKNASRRHHSIWKKYFDQKHYRCSQIVEEWIVSTEA

SEQ ID NO: 2546 - protein, 491 aa, Saccharomyces cerevisiae
MSNPIENTENSQNTSSSRFLRNVQRLALNNVTNTTFQKSNANNPALTNFKSTLNSVKKEGSRIPQFTRESVSRSTAAQEEKRTLKENGIQLPKNNLLDDKENQDPSSQQFGALTSIKEGRAELPANISLQESSSAKEIIQHDPLKGVGSSTEVVHNSVENEKLHPARSQLQVRNTESETDSGKKRPISTIVEQELPKKFKVCDENGKEEYEWEDLDAEDVNDPFMVSEYVNDIFEYLHQLEVITLPKKEDLYQHRNIHQNRDILVNWLVKIHNKFGLLPETLYLAINIMDRFLGKELVQLDKLQLVGTSCLFIASKYEEVYSPSIKHFASETDGACTEDEIKEGEKFILKTLKFNLNYPNPMNFLRRISKADDYDIQSRTLAKFLLEISLVDFRFIGILPSLCAAAAMFMSRKMLGKGKWDGNLIHYSGGYTKEELAPVCHMIMDYLVSPIVHDEFHRKYQSRRFMKASIISVQWALKVRKNGYDIMTLHE

SEQ ID NO: 2547 - protein, 435 aa, Saccharomyces cerevisiae
MGENHDHEQSIKRNSMIYNENERQLCNSNLKILQNKRALSKNDSSSKQQVQDSKPRRALTDVPVNNNPLSQNKRIVAGSKAAKVRREENIRPIVSAVQKRQIYNDRTAAEQEEEEEEEGEDDDAASIVNKKRRIDAEGVSEIVGWQDLDYVEKDDTAMVAEYSAEIFAFLYRRELETLPSHNYLLDKTSKYYLRPSMRTILVDWLVEVHEKFQCYPETLFLSINLMDRFLAKNKVTMNKLQLLAVTSLFIAAKFEEVNLPKLAEYAYITDGAASKNDIKNAEMFMLTSLEFNIGWPNPLNFLRRISKADDYDPVNRNIGKFILEYAYCCHQFIHLPPSTVSAMAMYIARRMTNRNKNELWNGTLQHYSGGIDPIHDEAFQSLCIDLVKDIASSKTHLDSLILKYKKPRYGSVYFQTFKWCTSEMHSNFQNLFNLK

SEQ ID NO: 2548 - protein, 471 aa, Saccharomyces cerevisiae
MSRSLLVENSRTINSNEEKGVNESQYILQKRNVPRTILGNVTNNANILQEISMNRKIGMKNFSKLNNFFPLKDDVSRADDFTSSFNDSRQGVKQEVLNNKENIPEYGYSEQEKQQCSNDDSFHTNSTALSCNRLIYSENKSISTQMEWQKKIMREDSKKKRPISTLVEQDDQKKFKLHELTTEEEVLEEYEWDDLDEEDCDDPLMVSEEVNDIFDYLHHLEIITLPNKANLYKHKNIKQNRDILVNWIIKIHNKFGLLPETLYLAINIMDRFLCEEVVQLNRLQLVGTSCLFIASKYEEIYSPSIKHFAYETDGACSVEDIKEGERFILEKLDFQISFANPMNFLRRISKADDYDIQSRTLAKFLMEISIVDFKFIGILPSLCASAAMFLSRKMLGKGTWDGNLIHYSGGYTKAKLYPVCQLLMDYLVGSTIHDEFLKKYQSRRFLKASIISIEWALKVRKNGYDIMTLHE

SEQ ID NO: 2549 - protein, 515 aa, Neurospora crassa
MPNLRTRNPRSLANENDENSTATTTRMTRAKAATLHVDELSMPAKTMQTKKTTISTTTAATAARTVGKRNALGDVSNVTKVEVAGTKKAIAKPGLVSKAAQPSGIQKKTTTATSRTATTARRALSNKEPNKTVGPSAGAGTIPAKRKPPPSTSKLAPIKESAPVENEPARKKIHVEEPEKKKVSRTEAKENDAPSKAVKPMAEPPAPVVRDVVPVQSVYPPGVKDLDTEDLEDPLMVAEYATEIFEYLRDLECKSVPNPQYMSHQDDLEWKTRGILIDWLIEVHTRFHLLPETLFLAVNIIDRFLSEKVVQLDRLQLVGITAMFVASKYEEVLSPHIANFRHVADDGFTEAEILSAERFILSTLNYDLSYPNPMNFLRRISKADNYDIQSRTLGKYLMEISLLDHRFMPYRPSHVAAAAMYLARLILGRGEWDKTIAYYAGYTEEEIEPVFHLMVDYLARPVIHEAFFKKYGSKKFLKASILTRQWAKKNAVLYGVVDAEIPLDKLKDRPVDQLP

SEQ ID NO: 2550 - protein, 507 aa, Candida albicans
MRSYKSSITDENELTKQRLRAKSIANLSSNHATAGQTSTSSQHREALTDLTSQENKNHPRVKLTQTNTNHHRNSSSSSNKIQIYQQIEQKKTDIHQFKKPRLEKVLLNDDDDETDDEFDDEEDKENRYHDLELNDDDSKHQLISEAFETIDDRGISEGENDTAQEARERLEEETQSHTQDMRSIYGVHVPMQPMWNNAIINELKYVIQKYSRNTLDENDEDTYDTTMVAEYSPEIFNYLHELENKFTPDPNYMDFQDDLKWEMRAVLIDWVVQVHARFNLFSETLYLTVNYIDRFLSKRRVSLSRFQLVGAVALFIAAKYEEINCPTVQEIAYMADNAYSIDEFLKAERFMIDVLEFDLGWPGPMSFLRRISKADDYDYETRTLAKYFLEITIMDSKFVASPPSWLAAGAHYISRILLGRGEWTELHVFYSGYTEKQLQPLADVLLENCRHAEINHKAIFEKYKERRYRKSSLFVQEYFRHIMSRVDLKTSFQQCGTLHFIQSSQNH

SEQ ID NO: 2551 - protein, 492 aa, Candida albicans
MPQVTKTNNENEFRLTRSKVQHQESISTIKNTTISNSQHKQQTQQQISSPPQVSVTSSEGVSHVNTRQYLGDVSNQYITNAKPTNKRKPLGGDNAPLQKQQHRPSRPIPIASDNNNNGSTSSSSNSSNNNNNDANRLASLAVPSRLPQKRQATESSTNLVEKLRVPQPEVGERSQSYHKKSRLIDYEWQDLDEEDNDDQLMVSEYVNEIFSYYYELETRMLPDPQYLFKQTLLKPRMRSILVDWLVEMHLKFKLLPESLFLAVNVMDRFMSVEVVQIDKLQLLATAALFTAAKNEEVFSPLVKNYAYFTDGSYTPEEVVQAEKYMLTILNFDLNYPNPMNFLRRISKADDYDVQSRTLGKYLLEITIVDYKFIGMRPSLCCALAMYLARLILGKLPVWNGNLIHYSGGYRISDMRECIELMFQYLIAPIEHDEFFKKYAMRKFMRASTLCRNWAKKFQASGRDLFDERLSTHRLTLEDDDEEEEIVVAEAEE

SEQ ID NO: 2552 - protein, 492 aa, Candida albicans
MPQVTKTNNENEFRLTRSKVQHQESISTIKNTTISNSQHKQQTQQQISSPPQVSVTSSEGVSHVNTRQYLGDVSNQYITNAKPTNKRKPLGGDNAPLQKQQHRPSRPIPIASDNNNNGSTSSSSNSSNNNNNDANRLASLAVPSRLPQKRQATESSTNLVEKLRVPQPEVGERSQSYHKKSRLIDYEWQDLDEEDNDDQLMVSEYVNEIFSYYYELETRMLPDPQYLFKQTLLKPRMRSILVDWLVEMHLKFKLLPESLFLAVNVMDRFMSVEVVQIDKLQLLATAALFTAAKNEEVFSPSVKNYAYFTDGSYTPEEVVQAEKYMLTILNFDLNYPNPMNFLRRISKADDYDVQSRTLGKYLLEITIVDYKFIGMRPSLCCASAMYLARLILGKLPVWNGNLIHYSGGYRISDMRECIELMFQYLIAPIEHDEFFKKYAMRKFMRASTLCRNWAKKFQASGRDLFDERLSTHRLTLEDDDEEEEIVVAEAEE

SEQ ID NO: 2553 - protein, 698 aa, Candida albicans
MTSLQQQQQQQRVKYGPPHHIKRRPYHPILESLEFQTNQHLIQEYSLDIVNTLSQLESLTLVNPAMIDLQPEIQWFMRPFLLDFLIELHSSFKLQPTTLFLCLNIIDRYCAKRIVFKRHYQLVGCTALWIASKYEDKKLRVPTLKELTIMCRNAYDEEMFVQMEMHILSTLDWSIGHPTLEDCLQLAIDLNNLSNNTTNDIENKSVRPNRKSSISSAVTAVARFLCELSLYDKYFLSVPPSLIAITANLLSCSMLQIPHASITLKNLIEQEIINPQQKKQKKAFSSNSSRTTTASYTHQNQLDVRHSSFDEDIDLDSGDEGDDDEDYIDEFYETNNYDDTNATTFDESINKSTTINDENQPPQIHTPFLSGLDEDSILSIKKICLMLIIQLSKVTEVLSKKYENLGVIQVINNFHSNYKFIIQSIYENQELLLNTINDSTNNNEIDYKLIQSSEILLQFPKFDEYLTEDEDENVSTDDEANSQPQGYDGSGSDGNNQLFTPKSPNAFSSNSSLTLNNHPQSMVPVTPPSATSQYSLFSNKNNRTHESTSGLNSTCNTPTHISISSFAPPQPPPGSILKPKLTSINSTNSLKIKKLTSNSNSSNINIHHGHHNTKQEKRYSHISIGSNSSSKYDGFSPIKSISTNGSLITNNGSFTNIVNNTNSSSPLMNQQQQYYHQQQHQQQVTQSSLYQHHHQYHQ

SEQ ID NO: 2554 - protein, 698 aa, Candida albicans
MTSLQQQQQQQRVKYGPPHHIKRRPYHPILESLEFQTNQHLIQEYSLDIVNTLSQLESLTLVNPAMIDLQPEIQWFMRPFLLDFLIELHSSFKLQPTTLFLCLNIIDRYCAKRIVFKRHYQLVGCTALWIASKYEDKKSRVPTLKELTIMCRNAYDEEMFVQMEMHILSTLDWSIGHPTLEDCLQLAIDSNNLSNNTTNDIENKSVRPNRKSSISSAVTAVARFLCELSLYDKYFLSVPPSLIAITANLLSCSMLQIPHASITLKNLIEQEIINPQQKKQKKAFSSNSSRTTTASYTHQNQSDVRHSSFDEDIDLDSGDEGDDDEDYIDEFYETNNYDDTNATTFDESINKSTTINDENQPPQIHTPFLSGLDEDSILSIKKICLMLIIQLSKVTEVLSKKYENLGVIQVINNFHSNYKFIIQSIYENQELLLNTINDSTNNNEIDYKLIQSSEILLQFPKFDEYLTEDEDENVSTDDEANSQPQGYDGSGSDGNNQLFTPKSPNAFSSNSSLTLNNHPQSMVPVTPPSATSQYSLFSNKNNRTHESTSGLNSTCNTPTHISISSFAPPQPPPGSILKPKLTSINSTNSLKIKKLTSNSNSSNINIHHGHHNTKQEKRYSHISIGSNSSSKYDGFSPIKSISTNGSLITNNGSFTNIVNNTNSSSPLMNQQQQYYHQQQHQQQVTQSSLYQHHHQYHQ

SEQ ID NO: 2555 - protein, 646 aa, Candida albicans
MTSLQQQQQQQRVKYGPPHHIKRRPYHPILESLEFQTNQHLIQEYSLDIVNTLSQLESLTLVNPAMIDLQPEIQWFMRPFLLDFLIELHSSFKLQPTTLFLCLNIIDRYCAKRIVFKRHYQLVGCTALWIASKYEDKKSRVPTLKELTIMCRNAYDEEMFVQMEMHILSTLDWSIGHPTLEDCLQLAIDSNNLSNNTTNDIENKSVRPNRKSSISSAVTAVARFLCELSLYDKYFLSVPPSLIAITANLLSCSMLQIPHASITLKNLIEQEIINPQQKKQKKAFSSNSSRTTTASYTHQNQSDVRHSSFDEDIDLDSGDEGDDDEDYIDEFYETNNYDDTNATTFDESINKSTTINDENQPPQIHTPFLSGLDEDSILSIKKICLMLIIQLSKVTEVLSKKYENLGVIQVINNFHSNYKFIIQSIYENQELLLNTINDSTNNNEIDYKLIQSSEILLQFPKFDEYLTEDEDENVSTDDEANSQPQGYDGSGSDGNNQLFTPKSPNAFSSNSSLTLNNHPQSMVPVTPPSATSQYSLFSNKNNRTHESTSGLNSTCNTPTHISISSFAPPQPPPGSILKPKLTSINSTNSLKIKKLTSNSNSSNINIHHGHHNTKQEKRYSHISIGSNSSSKYDGFSPIKSISTNGS

SEQ ID NO: 2556 - protein, 465 aa, Candida albicans
MFPNSPDAFHQVRMMQSLIKASNFKLQSMEFRCHSNNVCEYQMEMLHHLLSVEAKTLPSLSLIEQQPEIKLGMRPLLLDFLMEVITILNLSRSTFPLTVNLIDRYCSTRIVKKQHYQLLGLTSLWISCKNLDSKFKVPTLNDLRKICVDSYYKELFVEMEKHILKSLEWVVNAPTFDAFIDLYSNLLISNSSNFEVANIIKKSSHKIKLFSNYIGELFQFYPNIYYDYTSSQIALIAILITVLTLKIPVDLISLLNFYNGLVKTEMFKSNVEQGAEDQFEEILSVDSFKSLFNKSFFKNLIKIIDNPPSSLKIKYFAENGKYSVLMKQLVTTASNTLKCILDPVPTTPKANSFVKHQQQQHHYHPRPPMSINTSMIPLTPVSNSTSPNRFSPDQIFSENESTPGIAFGTMTPDSQSTSPGEKRSYECIDELEIGTSTIAGYTLKNHDTLKRSKSANYGTLFYLQQ

SEQ ID NO: 2557 - protein, 465 aa, Candida albicans
MFPNSPDAFHQVRMMQSSIKASNFKLQSMEFRCHSNNVCEYQMEMLHHLLSVEAKTLPSLSLIEQQPEIKLGMRPLLLDFLMEVITILNLSRSTFPLTVNLIDRYCSTRIVKKQHYQLLGLTSLWISCKNLDSKFKVPTLNDLRKICVDSYYKELFVEMEKHILKSLEWVVNAPTFDAFIDLYSNLLISNSSNFEVANIIKKSSHKIKLFSNYIGELFQFYPNIYYDYTSSQIALIAILITVLTLKIPVDLISLLNFYNGLVKTEMFKSNVEQGAEDQFEEILSVDSFKSLFNKSFFKNLIKIIDNPPSSLKIKYFAENGKYSVLMKQLVTTASNTLKCILDPVPTTPKANSFVKHQQQQHHYHPRPPMSINTSMIPLTPVSNSTSPNRFSPDQIFSENESTPGIAFGTMTPDSQSTSPGEKRSYECIDELEIGTSTIAGYTLKNHDTLKRSKSANYGTLFYLQQ

SEQ ID NO: 2558 - protein, 347 aa, Guillardia theta
MKLLLYDDLKTLFNYKIKKKNNTIVHFLYLLYENVHESLNINNTRNFLWCFMIKFSVEIKKRIKFDYKSCHINFYSFFDNLLEAGNVLNFEKLILNILFNFRKIQFLYIPFTNVMKVQTEINKNMRKILIDWIIDVHHKFKLLSKTLFLTINIIDRFLCLKKIGKQKLQLLGITSMFIASKYEEIYAPEIRDFIYICDNAYSKEDIIKMEQLICFVLRFKFNLPSPQSFLSLWMKILCLKLDSIFFSNKCLELCLIEINTLRYNFEIISLSCIFLSLKFSGNISLKILMNIFRIDSKKNFSLVKSCGLIGSLLLLYQSSYCGQNHLHFKYSSNKHKEFMSRRFHIYF

SEQ ID NO: 2559 - protein, 309 aa, Leishmania donovani
MAVPPRMRIPLSNQTNLVREPYQKPAAQPPTPLTNESRFVSEYGSEILTYFLEVERVVYSERMYMSRQSEVTDRMRKILIDWLIDVVTEFKLHPETFFLAVDIIDRFLFFYSIPRTKLQLVGVTAILVAAKHEEIWPPTVNDCVAVTANTYTSREVIDMEFDVVTTLRFKFTVPTTYPITCRLLESCHMAPAVRHATFLFLESAAHCYPLLQFLPSRIAAGAVLLGAFLIHYNRSKGVISLQGLWEIEVSPFAQGIGFEELQPVTEQLLPFTQRLCSGSSRLQAVRRKYSSSEYDCVASLEFPFISASA

SEQ ID NO: 2560 - protein, 426 aa, Trypanosoma brucei
MNPTALREVSNLSTGSGDVKQRLAQRRSANLESCRYPYSSSAVRHGSDSLLSLRSSLYSPVGTAGKESSVSPHADRLRENNPVYCSDVIKDITTMYMESEKEAIYGQVLPSPRYLTYQPEINEKMRMILVDWLIDVHLKFKLHPETLYLTVSIVDRYLSSVNTRRTTGRYIPRSKLQLVGITAILLAAKYEEIWPPEVKECVYICANTYTRDEVIRMEREMCTELSFRFTVPTPFPFIVRLLDVVEGLERQQQTQQLSHQLQQIQSQSQSQSQQTQMQASQSQPQSLSRSRSQSRSQPRSDEECTAYVVQLRHTAFFFLDHGMLDYKCLQFSPSQQAKAALFLALVTLHMKEQGSSYVLNNDIIWTRQLQYYSKAQVRDFKACARTMLDFVSYVSTTRYQSVRRKYSSSKYGEVAKLTMPSEVPDF

SEQ ID NO: 2561 - protein, 426 aa, Trypanosoma brucei
MNPTALREVSNLSTGSGDVKQRLAQRRSANLESCRYPYSSSAVRHGSGSLLSLRSSLYSPVGTAGKESSVSPHADRLRENNPVYCSDVIKDITTMYMESEKEAIYGQVLPSPRYLTYQPEINEKMRMILVDWLIDVHLKFKLHPETLYLTVSIVDRYLSSVNTRRTTGRYIPRSKLQLVGITAILLAAKYEEIWPPEVKECVYICANTYTRDEVIRMEREMCTELSFRFTVPTPFPFIVRLLDVVEGLERQQQTQQLSHQLQQIQSQSQSQSQQTQMQASQSQPQSLSRSRSQSRSQPRSDEECTAYVVQLRHTAFFFLDHGMLDYKCLQFSPSQQAKAALFLALVTLHMKEQGSSYVLNNDIIWTRQLQYYSKAQVRDFKACARTMLDFVSYVSTTRYQSVRRKYSSSKYGEVAKLTMPSEVPDF

SEQ ID NO: 2562 - protein, 436 aa, Trypanosoma brucei
MNPTALREVSNLSTGSGDVKQRLAQRRSANLESCRYPYSSSAVRHGSGSLLSLRSSLYSPVGTAGKESSVSPHADRLRENNPVYCSDVIKDITTMYMESEKEAIYGQVLPSPRYLTYQPEINEKMRMILVDWLIDVHLKFKLHPETLYLTVSIVDRYLSSVNTRRTTGRYIPRSKLQLVGITAILLAAKYEEIWPPEVKECVYICANTYTRDEVIRMEREMCTELSFRFTVPTPFPFIVRLLDVVEGLERQQQTQQLSHQLQQIQSQSQSQSQQTQMQASQSQPQSLSRSRSQSRSQPRSDEECTAYVLQLRHTAFFFLDHGMLDYKCLQFSPSQQAKAALFLALVTLHMKEQGSSYVLNNDIIWTRQLQYYSKAQVRDFKACARTMLDFVSYVSTTRYQSVRRKYSSSKYGEVAKLTMPSKYLTFDWFTSLHSAV

SEQ ID NO: 2563 - protein, 328 aa, Trypanosoma brucei
MLCRGFEFALQDLKDWLRLALLLRETDTLHFLRECTKKLGPYARQRVEDALILHGSDIDSVCQVVMDIPVPTDETTTFGGPYYNLTLNDLIAMGDEDTHSVHVVNAQHTMPSHVREGLVEWMLLVNVELNLQLETFFLAVSILDRYLLRATIQPDREYLTAYAILLLASKVEEKCLFPLRDSVRLCGKTYKVGVLIATTNRIFEVLDCNVVYATLSNVGFGFLWQQEPAACEKQYSFLTYILTTLAIRTQYRQYRLSALAAAAVYVSRLRFNIPTGRPCDEVVVLLPVIKDAISCNISARSGGVYDLFKRSCFHEASRFPLPDLLYGL

SEQ ID NO: 2564 - protein, 469 aa, Trypanosoma brucei
MSYNTSSSSDSLLCEIDVNIQQQLDNSNFFLPVPKHLWNVQSKKDKHRCQGGGTSPKNTAQSNQPSTEMTCVMLQKSMRNALCNLELMYTNDTERLKQRLSEEFHRLRESAAERTRQLIDLSTKAQPLSYRVLFVLNLRRWMLCRGFEFALQDLKDWLRLALLLRETDTLHFLRECTKKLGPYARQRVEDALILHGSDIDSVCQVVMDIPVPTDETTTFGGPYYNLTLNDLIAMGDEDTHSVHVVNAQHTMPSHVREGLVEWMLLVNVELNLQLETFFLAVSILDRYLLRATIQPDREYLTAYAILLLASKVEEKCLFPLRDSVRLCGKTYKVGVLIATTNRIFEVLDCNVVYATLSNVGFGFLWQQEPAACEKQYSFLTYILTTLAIRTQYRQYRLSALAAAAVYVSRLRFNIPTGRPCDEVVVLLPVIKDAISCNISARSGGVYDLFKRSCFHEASRFPLPDLLYGL

SEQ ID NO: 2565 - protein, 190 aa, Stizostedion vitreum
WMLEVCEEQKCGEEVFPLAMNYLDRFLAVVPTKKCNLQLLGAVCMFLASKLKETRPLTAEKLCIYTDNSIRPQELLEWELVVLGKLKWNLAAVTPNDFIEHIVRRLPLPEDKLALIRKHVQTFIALCATDFRFAMYPPSMIATGSVGAAICGLQLDSADQSQWGDSLTDLLAKITNTEVDVLKECQEQIE

SEQ ID NO: 2566 - protein, 336 aa, Paramecium tetraurelia
MIHEQYRFFGKELVNSSGEFQKENTDRNKPKHLTVLPRYLKLNLWQEEKENKMEVENNTQQLCSFDQQMIKDPQYTSLYNKEIYTYLLTQEEKYLVSNNYMNEQQQPDLNARMRAILLDWLIDVHLKFKLRDETLYVTTYLIDRFLNFKTTTRQQLQLVGVASLFIACKYEEIYPPDLKDFVYITDNAYTKQDVLEMEGQILQTLDFSITQPSSYCFLQRFGRIAGLDTKNLSLAQYLLELSIVDIKFMNYKPSFLSAAAIYLVHKIRKTPQSWSEEMQKMTGYNEQELRYCAKEMCLVLQSSDKSNLQAVRKKFAQPKYQEVSRIRVERQIKQQK

SEQ ID NO: 2567 - protein, 324 aa, Paramecium tetraurelia
MIIENQRCFGKEIANSSVHQSKEIGMIVEKHKEPFSIIPKVFTTSLDDKENKLFRRESEKIPIEIEIDKSKEHLNPQKVELYSDEILQHLLMEENKYTINQYMTPEQQPDINLKMRAILVDWLVDVHAKFKLKDETLYITISLIDRYLSLAQVTRMKLQLVGVAALFIACKYEEIYPPALKDFVYITDNAYVKSDVLEMEGLMLQALNFNICNPTAYQFLQKYSTDLDPKNKALAQYILELALVEYKFIIYKPSLIAQSVIFLVNKIRTPTHKTQNENQLKPCAKELCTLLQTADLNSLQAVRKKFNATKFFEVSRIKVEKTNN

SEQ ID NO: 2568 - protein, 324 aa, Paramecium tetraurelia
MIIENQRCFGKEIANSTLHQSKEIGIIVEKHKKPFSIIPKVFAMSLDDKENKLFRRESEKFQIEIETEKSKDVKNPQNVELYSNEILQHLLIEENKYTINQYMTPEQQPDINIKMRAILVDWLIDVHAKFELKDETLYITISLIDRYLALAQVTRMRLQLVGVAALFIACKYEEIYPPALKDFVYITDNAYVKSDVLEMEGLMLQALNFNICNPTAYQFLQKYSTNLDPKDKALAQYILELALVEYKFIIYKPSQIVQSVIFLVNKIRTPTYKTPNENQLKPCAKELCTLLQTADLSSLQAVRKKFNASKFFEVSRIKVEKTNK

SEQ ID NO: 2569 - protein, 231 aa, Paramecium tetraurelia
AAAYTINQYMTPEQQPDINIKMRAILVDWLIDVHAKFELKDETLYITISLIDRYLALAQVTRMRLQLVGVAALFIACKYEEIYPPALKDFVYITDNAYVKSDVLEMEGLMLQALNFNICNPTAYQFLQKYSTNLDPKDKALAQYILELALVEYKFIIYKPSQIVQSVIFLVNKIRTPTYKTPNENQLKPCAKELCTLLQTADLSSLQAVRKKFNASKFFEVSRIKVEKTNK

SEQ ID NO: 2570 - protein, 60 aa, Tetrahymena thermophila
MRAILIDWIVEIHRKCKLLPETLFITVNLIDRFLDRATCTRDNLQLVGVTALFIASKYEE

SEQ ID NO: 2571 - protein, 444 aa, Stylonychia lemnae
MSFGSQKSLISSSLDLYQLAQYFIARLEPILHNTLLIGIINPRLRRIRDHCSKGRRLKNSRSSKRFFEPTSPVDIPDAKDPQKCAEYACDIFDFLIQTETENIANPGYMEKQEDINEKMRAILIDWLVEVHLKFKLVPESLYLTVNLIDRYLEKIASKQTETLISRSYSYAIARNQRDISHVDRSIRYTKEEILSMEREMLQALDFNIQITSSYRFLERFSKVAKTDPLIFNLSRYLLELALVNYKLLKYSPSNLASSALFLSLKMTKHPSAMDSLRLRVLLVIMLQIVTVATAASCVHVAEANAGAILVDYCVEIVIEMMKDVVMVATATTLGSSLILDTSLNLGKANFFFTATVSLTIVLIVFRRVLFDVPDCLFLVVCVFYHTSVHGGGVVNTVQGNISQYGTTAPIILAAAAIKPLPAVTNRDGGRFECQCSRLITFNFE

SEQ ID NO: 2572 - protein, 300 aa, Encephalitozoon cuniculi
MVVSFRKSEPLKNVTNKIGRRAEKTVLPLTKMEEIVYKQQRVGEASQIVMVDKYSDDVFEYFSTIDKPFVYINDGVSWKMRSLLVDWIIDIHDKLGLCHDTLFLAINFIDRFLSMRSIPSSKLQLVGISALMIACKYEEVVCPALQTLVLLTEKTLTGEDVRKAEKYMLHTLNYDLQYVSPLNFLRKCSKANNYEICSRTVGKYLLELMTLYEEFLRFKGSVRAAAAMYLARKITSQDQCKNLFIMYSGHTKDDIKECFNALVHTISESIPFENIQNKYNTPKFLHAASFVKEYAEKNFK

SEQ ID NO: 2573 - protein, 392 aa, Chlorohydra viridissima
MAGVQRRILISRNEENLLNKGIGTKNVLGGKTTSTRTALSNISNIQRRPQLGGKVKKEDVGALEEKAPTNKSLGRMISQTNLLNEVQMKKNIQNLEDMAEVDLPINSMIDSFTDLEVDDIDLEDLGNPTLCAEYVKDIYKYMNKLEQRLVPGDYMPNQTEINFKMRSILVDWLIQVQSRFNLLQETLYLTIYILDRFLNKQNVKRAELQLVGVTAMLLASKYEEMYAPEIGDFVYITDNAYSKEKIRQMEQKMLKACEYDFSNPLCLHFLRRNSKAGAVDAQKHTLAKYLMELTLVEYEFITKLPSEVAAAALYLSMKLIDDSNWTPTLVHYSGYTEDAILPTVSKLSVLTLSMDNSKYQAVKNKYAASKFLRISRIPQLKGHVLNKFAERI

SEQ ID NO: 2574 - protein, 420 aa, Chlorohydra viridissima
LFFQKKYFLDKQLNQNAIQIYQDNLTNQNNNIGKKAKLEDEKHAHNKSITSKYKRVPLASISNVQGSRIQPTRAAKEKLKPPQNISDSQLVNDSLKSSNSIQAHNTKNDLHKENLYNESALDTFKESPMVFSPFLSDSSCKKYSSLNGIQDIDSKLHEVFELPEYAQDIHNYLKKSEAKYRPKSNYMRKQTDINSSMRAILIDWLVEVSEEYKLIPQTLYLSVSYIDRFLSHMSVLRGKLQLVGAACMLVAAKFEEIYPPEVAEFVYITDDTYTAKQVLRMEHLILKTLAFDLSVPTCRDFLSRYLFAANAKPESQLKYLAEYLSELTLINCDISVKYAPSMIAASSICVANHMLNSIPWTPTLEFYSGYNIQDLRSCLNEIHLLHLAASTNPQQAIQQKYKSPKFGCVSSLVPLEMPCF

SEQ ID NO: 2575 - protein, 361 aa, Hydra vulgaris
SSRTVLSNISNIQRRPQVVGKIKKEDGVALEEKAPLNKGLGRMVSQSNLISDVQLKTTKIIPAYQDIADVEVPINAMINSFTELEVDDIDLEDLGNPTLCAEYLKDIYKYMNKLERRLEPSDYMAHQAEINFKMRSILVDWLIQVQSRFNLLQETLYLTIYIIDRYLSKQNVKRAELQLEGVTAMLIASKYEEMYAPEIGDFVYITDNAYSKEKIRQMEQKMLKTCEYDFSNPLCLHFLRRNSKAGAVDAQKHTLAKYLMELTLVEYEFITKLPSEIAAAALYLALKLIDDSNWTPTLAHYSGYTEDEILSTVSKLSILTLSMDNSKYQAVKNKYSASKFLRISLIPQLKGHILSKFAERN

SEQ ID NO: 2576 - protein, 518 aa, Caenorhabditis briggsae
MAGRKSSRTTGEPVKKAERKSAILSPHDELRERLLETSLDVKENIPERSSSTRNESVGSQRSDCSESRKRRSTEKGPVAKRPSTEKKGNGSRDDSFSSVFSEDRETESSVGSTSSRTRGQPLPAMPEEEESLDGSSDHNAESEESRETPQSDEHDGFEEDGDVEDDVSSDVNDEEDEYDEYEEDEETEDEFDLPLQNDDFAVTKRLMNDRHMIDAPSLLSYGKCEGIGSPTKVWSLMVKRDDIPRATRQLLRNHPDMTINMRRVLVDWMMECCDVEKLHRETFHLAVDYADRFLESTREEVISENFQLVGTAALFIAAKYEEIYPPKCADLAALTDGAFSCDDICRMESIVAKDLKWSFGPITSVQWLSTYLQLLGTGKKNNDHFEEGNMYIPELLRSEYLRMVRILDYLLSDIDSFNFSYRTIAAAVLFVNYDPRSAVEKATGFIYEQLRNVIDYVTPICRAYDRFTQEHVPKDIIPDYAPAEDAHNIQVHIKHYEVDPYVEKERERRHRRGPNRRL

SEQ ID NO: 2577 - protein, 385 aa, Caenorhabditis elegans
MMLRSQAKNVDLTSQADSRHQQKRKQAEQLDALKNPSEPAAKKQHSKGLTELRAHISGFKIDSAKRDPLGKSRTSRRDVENLPPQKSRYVDPCPHYDYDLEEAGNPDSISDYAQGIFDYYRHREVHFRVRKYLHKHPEVDVKTRAILIDWMVEIQETFELNHETLYNAVKLTDMYLCKTKNVDKNTIQKLACVAIFIAAKYDERSPPLVDDLIYLSGDRFSRDELLAMERELFATVGYDLGSPLSYRYLRRFGRVCRVDMKTLTMGRFILETSLMVYEYAMVSQSRLAAAAFVLAMRMLDKNNEYEWNPVLEKYSGFTGEEVMPLVEHMNHILHFSKDKWAQLTSVRQKYSHEVFFHVASIPMLPDTLKVVDSHTYAPVPMLSYP

SEQ ID NO: 2578 - protein, 383 aa, Caenorhabditis elegans
MLRSQAKNVDLTSQDSRHQQKRKQAEQLDALKNPSEPAAKKQHSKGLTELRAHISGFKIDSAKRDPLGKSRTSRRDVENLPPQKSRYVDPCPHYDYDLEEAGNPDSISDYAQGIFDYYRHREVHFRVRKYLHKHPEVDVKTRAILIDWMVEIQETFELNHETLYNAVKLTDMYLCKTKNVDKNTIQKLACVAIFIAAKYDERSPPLVDDLIYLSGDRFSRDELLAMERELFATVGYDLGSPLSYRYLRRFGRVCRVDMKTLTMGRFILETSLMVYEYAMVSQSRLAAAAFVLAMRMLDKNNEYEWNPVLEKYSGFTGEEVMPLVEHMNHILHFSKDKWAQLTSVRQKYSHEVFFHVASIPMLPDTLKVVDSHTYAPVPMLSYP

SEQ ID NO: 2579 - protein, 384 aa, Caenorhabditis elegans
MLRSQAKNVDLTSQADSRHQQKRKQAEQLDALKNPSEPAAKKQHSKGLTELRAHISGFKIDSAKRDPLGKSRTSRRDVENLPPQKSRYVDPCPHYDYDLEEAGNPDSISDYAQGIFDYYRHREVHFRVRKYLHKHPEVDVKTRAILIDWMVEIQETFELNHETLYNAVKLTDMYLCKTKNVDKNTIQKLACVAIFIAAKYDERSPPLVDDLIYLSGDRFSRDELLAMERELFATVGYDLGSPLSYRYLRRFGRVCRVDMKTLTMGRFILETSLMVYEYAMVSQSRLAAAAFVLAMRMLDKNNEYEWNPVLEKYSGFTGEEVMPLVEHMNHILHFSKDKWAQLTSVRQKYSHEVFFHVASIPMLPDTLKVVDSHTYAPVPMLSYP

SEQ ID NO: 2580 - protein, 485 aa, Caenorhabditis elegans
MRSALSLKPSNGNAAKSQAVNNKNVIKNAPLGGKLTRQIGTSNLLQQALPSKKIDESPIIKIDAKDSFKVFEDQEPEKENSSENVDATEKDSNVIPAEDNNMIHELERKMEEKSRAEKLKFKFMQTRDNSDITSRFSEPPSEFSVLCDDDDCDKVSVASSTFTTSVRATFSSFHFDENQRKKEFGKEEAVKKIQKKAAKEARDDSMFSSEEFFPDIIKYMLHRQTKNRASHECFDIQSQVNEEMRTILIDWFSDVVKEYNFQKETFHLAVSLVDRALSMFNIDKMRFQLVGTTSMMIAVKYEEIFPPEIEDFALITDNTYRVPDILLMERFLLGKFDFVVAMPTSSWFGTCFAKRMNFTKKMRNTVHYLLELSLIDVHFLRYRPSDIAAAACCFANLQADVESWPQKMVDDTGISTEDFVDVLRDLHRMYLNASTADFKSIFYNYSETAQMEVALLPAPTDKLRSMFPSIFVTAPKSSNDSSSPQ

SEQ ID NO: 2581 - protein, 409 aa, Caenorhabditis elegans
MRSALSLKPSNGNAAKSQAVNNKNVIKNAPLGGKLTRQIGTSNLLQQALPSKKIDESPIIKIDAKDSFKVFEDQEPEKENSSENVDATEKDSNVIPAEDNNMIHELERKMEEKSRAEKLKFKFMQTRDNSDITSRFSEPPSEFSVLCDDDDCDKVSVASSTFTTSVRATFSSFHFDENQRKKEFGKEEAVKKIQKKAAKEARDDSMFSSEEFFPDIIKYMLHRQTKNRASHECFDIQSQVNEEMRTILIDWFSDVVKEYNFQKETFHLAVSLVDRALSMFNIDKMRFQLVGTTSMMIAVKYEEIFPPEIEDFALITDNTYRVPDILLMERFLLGKFDFVVAMPTSSWFGTCFAKRMNFTKKMRNTVHYLLELSLIDVHFLRYRPSDIAAAACCFANLQADVESWPQKNG

SEQ ID NO: 2582 - protein, 317 aa, Caenorhabditis elegans
MLRVTTSIRKTTKNAVGPRTNLEEVLNCIAMAEDIYNYLVHHEKKYVLDDSFINGGNVNSKMRRILVDWLIQVHLRFHLTPETLHLTIFVLDRIIVKNIVSKAEFQLLGVAALFVASKFEDIYLPDILEYEMITDNTFSKKQIMAMEQTILNALNFDLSCPSSLVFLRCISKTLTENDVNPIDKEAFYYVHNISKCLGELALLDSVMSTVPRSHVASASMIITLNVITVDGINPKTAASMIRKQLGASKQDIYDAIALLAQVAYKNFRHQKLCAIREKYQSSKFGRVSYLMTDEILEKIHRMGRNVEASEAETSEME

SEQ ID NO: 2583 - protein, 339 aa, Caenorhabditis elegans
MLRATTSIRKITKNLEKRSSVKNQHENGSSTPVNTEGLAVGPRTKLEEEFNCMAEDIYNYLVHHEKKYVLDDSFINGGNVNSKMRRILVDWLVQVHLRFHLTPETLHLTIFVLDRIIVKNIVSKAEFQLLGVAALFVASKFEDIYLPDILEYELITENTFSKKQILAMEQTILNALNFDLSCPSSLVFLRYISKTLTENDVNPIDKETFYYVHNISKCLGELALLDSVMSTVPRSHVASASMIITLNIISVDGINPKTAASMIRKQFGASKQDIYDAISLLAQVAYKNFRHQKLCAIREKYQSSKFGRVSYLMTDEILEKIHRMGRNLEASEAETSEME

SEQ ID NO: 2584 - protein, 361 aa, Caenorhabditis elegans
MLRATNNRRTSNNVEKDSLQMAKHGNGPLKPVNAQGLQTKREAREILALKPSNPAPVETAQKSQRINLQDAETKCLAMADDIYKYLVHHEKKYLLEECFMEGGEPTPKMRRILVDWLVQVHVRFHLTPETLHLTVFILDRMLQKKVTSKADLQLLGISAMFVASKFEEVYLPDIHDYEFITENTYSKKQILAMEQTILNSLNFDLSCPSSLVFLRCLSRILSENDASPIDNQAFCYTYNISKCLGELALLDSVMASTPRSHIASASMIIALEVHPVDGIEAENAVSVICKQLGASKKVIEDAVALLAEVSYKNFKQGKLVAIKNKYQSSKLAQVSNLMTDDVLEKINRMGQNAKVDASEME

SEQ ID NO: 2585 - protein, 331 aa, Caenorhabditis elegans
MLRVTTSIRKTTKNAVGPRTNLEEVLNCIAMAEDIYNYLVHHEKKYVLDDSFINGGNVNSKMRRILVDWLIQVHLRFHLTPETLHLTIFVLDRIIVKNIVSKAEFQLLGVAALFVASKFEDIYLPDILEYEMITDNTFSKKQIMAMEQTILNALNFDLSCPSSLVFLRCISKTLTENDVNPIDKEAFYYVHNISKCLGELALLDSVMSTVPRSHVASASMIITLNVITVDGINPKTAASMIRKQLGASKQDIYDAIALLAQVAYKNFRHQKLCAIRVIYFYKMFTQFCFQEKYQSSKFGRVSYLMTDEILEKIHRMGRNVEASEAETSEME

SEQ ID NO: 2586 - protein, 524 aa, Caenorhabditis elegans
MAGRKSSRTAERVPTTQKPERKSAILSPHDELRERLLETAIDMKENIPQRNTRNSSVGSQKSDCSETRKRRSTKEGPAAKRHSGEKHRNGSREDSLEYISEYSDDREVGSSSSQSSRTRGQPLPAMPEEEEVFDKSSSSDNLAESEESHEMVRLEERQDIEEEIEDDFDDEEEDVVNDKEEYEEIESEDEDDYPVQNEGFAVTKRLMNDEHMVTAPTFLSTAKCDGIGSPTKVWSLMVKRDEIPRATRFLLGNHPDMDDEKRRILIDWMMEVCESEKLHRETFHLAVDYVDRYLESSNVECSTDNFQLVGTAALFIAAKYEEIYPPKCIDFAHLTDSAFTCDNIRTMEVLIVKYIGWSLGPITSIQWLSTYLQLLGTGKKNKSDHYEEQNMYVPELLRSEYLEMCKILDFLLFEIDSFTFSYRTIAAAVLFVNYEPTCAVEKATGFMQAQLEKVIEYVEPVCRAFAKQRQLLDDVIPKHESIKSDDSHNIQVYVKRSSMEPIVKSERERIQHLKARRLHPQRLF

SEQ ID NO: 2587 - protein, 570 aa, Caenorhabditis elegans
MAGRKSSRTAERVPTTQKPERKSAILSPHDELRERLLETAIDMKENIPQRNTRNSSVGSQKSDCSETRKRRSTKNTVLCPLCMSNTCLPSESHCSSGGIAQWQSIRLQIERSLVQLREGPAAKRHSGEKHRNGSREDSLEYISEYSDDREVGSSSSQSSRTRGQPLPAMPEEEEVFDKSSSSDNLAESEESHEMVRLEERQDIEEEIEDDFDDEEEDVVNDKEEYEEIESEDEDDYPVQNEGFAVTKRLMNDEHMVTAPTFLSTAKCDGIGSPTKVWSLMVKRDEIPRATRFLLGNHPDMDDEKRRILIDWMMEVCESEKLHRETFHLAVDYVDRYLESSNVECSTDNFQLVGTAALFIAAKYEEIYPPKCIDFAHLTDSAFTCDNIRTMEVLIVKYIGWSLGPITSIQWLSTYLQLLGTGKKNKSDHYEEQNMYVPELLRSEYLEMCKILDFLLFEIDSFTFSYRTIAAAVLFVNYEPTCAVEKATGFMQAQLEKVIEYVEPVCRAFAKQRQLLDDVIPKHESIKSDDSHNIQVYVKRSSMEPIVVEKRTREDSAFKSSPSSSATTFLK

SEQ ID NO: 2588 - protein, 521 aa, Caenorhabditis elegans
MAGRKSSRTAERVPTTQKPERKSAILSPHDELRERLLETAIDMKENIPQRNTRNSSVGSQKSDCSETRKRRSTKEGPAAKRHSGEKHRNGSREDSLEYISDDREVGSSSSQSSRTRGQPLPAMPEEEEVFDKSSSSDNLAESEESHEMVRLEERQDIEEEIEDDFDDEEEDVVNDKEEYEEIESEDEDDYPVQNEGFAVTKRLMNDEHMVTAPTFLSTAKCDGIGSPTKVWSLMVKRDEIPRATRFLLGNHPDMDDEKRRILIDWMMEVCESEKLHRETFHLAVDYVDRYLESSNVECSTDNFQLVGTAALFIAAKYEEIYPPKCIDFAHLTDSAFTCDNIRTMEVLIVKYIGWSLGPITSIQWLSTYLQLLGTGKKNKSDHYEEQNMYVPELLRSEYLEMCKILDFLLFEIDSFTFSYRTIAAAVLFVNYEPTCAVEKATGFMQAQLEKVIEYVEPVCRAFAKQRQLLDDVIPKHESIKSDDSHNIQVYVKRSSMEPIVKSERERIQHLKARRLHPQRLF

SEQ ID NO: 2589 - protein, 89 aa, Ascaris lumbricoides
YMSKQSDINAEMRHILIDWLADVVVEYDLQLETLHLTVSLIDRTLSVVDCPRLKLQLIGAAAVMVAAKYEEIYPPPLKEYVYITDDTYS

SEQ ID NO: 2590 - protein, 65 aa, Platynereis dumerilii
MRAILVDWLIEVCEVYRLHRETFYLAVDFVDRYLSQTKNIQKQVLQLIGISALFIAAKYEEIYPP

SEQ ID NO: 2591 - protein, 510 aa, Helobdella triserialis
MEMANKKKRLALEDVSNEYDTQKNIGGNKRAKCPSIVQPSLKLPNKLVKPIKTTTTTTTVAVRPKKREAVILGTKKPAVEKQQSATKRRKSCNVDNLVNPIERLTVNLGYKVDESNVAAGVAVATAAAGVAVATAATRRKATAARKTSTTSTAATKTAASNQQQQQQQHPSTKPFNEPIHAEIDSLISSSSPLADHNNDEGDVEIVCVQSSAQLQDIQEQQQHQQQQHQQQQQQQQAWVDVDVGTSIYYLPNYVNDIFDYYRDREVKFRIPDYMFQQTDLTPSMRAILVDWLVEVQQSFELNHETLYMAVKLIDIFSSKVTIKRNKLQLIGAVALNLACKFEERCPPMLDDFVYVCTCLPPTEFLKMEDLVFQAVGFDIGLPLSYTFLRRFATCVGANLKTLTLSRFLLESSLMDYQFVVCLDSILACACLFIAMCMNQDGSWDDTIYHYTQYRPVDFEEVVYKLNDMICNPPEPSLTTILSKYSHPVFLEVAKIDKLTNEQLRAVVHSL

SEQ ID NO: 2592 - protein, 408 aa, Patella vulgata
MTTVTRSSSANLGASQKLAVKKGDAMMSSKGISNRSNRSALGDIGNKVSNMTIDPTKKALGLPVIKKEIIQKSKFTRSKTTVSESDILLQEKESACCSRAYTIFKDAIEPIVSTVDLMDISEDKPDAFSKVLLTVEDIDANDKDNPQLVSDYVNDIYHYMRHLEETFAVKANFLEGQEVTGKMRSILIDWLCQVHHRFHLLQETLYLTVSIIDRFLQVHPISRNKLQLVGVTSMLLASKYEEMYAPEVADFVYITDNAYTKADIRTMEQTILKTLDFSFGKPLCLHFLRRNSKAGQVDATKHTLAKYLMELTIIEYDMVHCNPSIIAAAALCLSMKVLDDSQWSETLAHYSNYSEKEIYPVMQKLAQLVVKAETSKLTAVKIKYSSSRFMKISSIPELKSNAITDLVL

SEQ ID NO: 2593 - protein, 428 aa, Spisula solidissima
MTTRAASANLANARMMHNMEEAGHMANLKGRPHTSHASQRNTLGDIGNQVSAITISDVPRKDPIIKKEIVHLSSHQHKILTKSKATTSLKSLAEESHIPKKQEAFTFLEPVAAMPKPTTVPTATVLPQPTVPVPMDISENVPESFSRVLLNVQNIDANDKENPQLVSEYVNDIYDYMRDLEGKYPIRHNYLENQEITGKMRAILIDWLCQVHHRFHLLQETLYLTVAIIDRLLQESPVPRNKLQLVGVTSMLIASKYEEMYAPEVADFVYITDNAYTKKEILEMEQHILKKLNFSFGRPLCLHFLRRDSKAGQVDANKHTLAKYLMELTITEYDMVQYLPSKIAAAALCLSMKLLDSTHWTETLTHYSSYCEKDLVSTMQKLASLVIKAENSKLTAVHTKYSSSKFMKISKLAALKSPLVKELAAASV

SEQ ID NO: 2594 - protein, 525 aa, Bombyx mori
MEIQLRRHRSAQIQDQENLYAGVRGKGNGAVPTKRLGLTVRGALGDLNTNVQVQREALGKVAVTTAEFEKKATLNRGVVRSNYSHVTSKVDTGLAVKNVIQPSSRPPLRREESTAGLTARAVTRTRVALKDNQNKPNEIKESINIYIQTKKCQDTKKTKLPMLKENKELRTSKSHLKDGTDSLRKTKLALKDPIESLGKLKLAETYPEKGMGLIDKAKVEKQAEFFETVFDITPPLPEDIEDIDAGDNNSPLLMSMYIKDIYKYLTELEEKYSIEPDHLKKQTVITGKMRATLIDWLVEVQRQFSLVLETFHLTVGIIDRYLQVVPNVQRNQLQLVGVTAMFIASKYEEIYAPDVGDFVYVTDNAYTKSDVFRCERDIMCKLGFCLARPIPLSFLRRFVKAARGTSRNHHLAKYFVDLCLVEYTMAHYRPSELAAAAICLSLHLLSSKTLSEVWTSTLSYYSGYDLDHIDPIIRKIAKIVINIENSKYKAVYNKYLDTTLAKVSSLPQLKSEAIYELAKISSPSP

SEQ ID NO: 2595 - protein, 63 aa, Pfiesteria piscicida
MRGILVDWLVEVHLKYKLKAETLYLTVNLIDRYLEVQQVVHGELQLVGVTAMLIASKYEEIYP

SEQ ID NO: 2596 - protein, 394 aa, Rana dybowskii
MATRRAAISREVDNAVGAMRSKAQLNSRRAALGEIGNKVTVRAVKQPAKTSNATSKTTRPVAKVSNVSVKPKAVAVTVIEAPSQAKEASPVPMDVSMKEEEELCQAFSEVLNHVVDIDAEDGGNPQLCSEYVVDIYNYLREREVQQSIKQRYLDGMEINERMRAILVDWLIQVNSRFQFLQETLYMGIAIMDRFLQVQPISRGKLQLVGVTSLLLASKYEEMYSPEVADFAYITDNAYTTSQIREMEMIILRELKFDLGRPLPLHFLRRASKACSADAEQHTLAKYLMELTLVDYEMVHFHPSEIAAAALCLAQKVLGVGSWGSTQHHYTGYTEEDLTPIIKHIAKNVTKVNQNRTKHVAVRNKYASSKLMKISTHPQLMSLVITELAASLTSQ

SEQ ID NO: 2597 - protein, 399 aa, Rana dybowskii
MSLRITRNMLSNAENNVKSGVVGKIAAKPVLRSRAALGDIGNKAETKMPLKKELKPAVKLVKKVKPAEKVPEPKKVKEEAVCIKPQPVPIEVPSSPSPMETSGCHPDELCQAFSDVLIQVKDVDIDDDGNPMLCSEYVKDIYCYLRSLEEALAVRPHYLQGQEVTGNMRAILVDWLVQVQMKFRLLQETMFMTVGIIDRFLQDNPVPKNQLQLVGVSAMFLAAKYEEMYPPEIGDFTFVTDHTYTKAQIREMEMKILRALNFSMGRPLPLHFLRRASKIGEVTAEQHSLAKYLIELVMVDYEMVHYPPSQIAAAASCLSMKVLNSGDWTPTLQHYTLYAEDSLLPIMQHMAKNVVKVNKGLTKQLTVKNKYGSSKQMKISTIPQLRSEVLASLARAVMP

SEQ ID NO: 2598 - protein, 530 aa, Drosophila melanogaster
MVGTTLKMRGDENASENFKQVQLKKLTVPSMEATTKRAALGDLQNRGISRPIAAKDAAQKDSKDLKLTDALRNAKARVDSHWKKQPLGSTNGNGNGAVPPKVNEGGVSAFLRSNSVRNRVPTKTTVEPTKVTVKSSSSENVNEPTLKREDSNLSKKSLTKLRAALAKPVMGVSGIRREPVAVSRKEAETKKELPETKKDSLEVKKDATRMPLIRGNSAVTTTTSTMPTTMSLSSKRLAGIEDIDANDKENLVLVSEYVNDIYDYLYQVELEQPIHKDHLAGQKEVSHKMRAVLIDWINEVHLQFHLAAETFQLAVAIIDRYLQVVKDTKRTYLQLVGVTALFIATKYEELFPPAIGDFVFITDDTYTARQIRQMELQIFKAINCNLSRPLPIHFLRRYSKAAGAEDEHHTMSKYFIELASVDYEMATYRPSEIAAASLFLSLHLLNGNHRAGTGFNDRHWTPTLTFYSRYSAAHLRPITRLIAKLARDAPQAKLKAIYNKYQGSKFQKIALRTEPTGALMDSIVGQSQRK

SEQ ID NO: 2599 - protein, 500 aa, Drosophila melanogaster
MEATTKRAALGDLQNRGISRPIAAKDAAQKDSKDLKLTDALRNAKARVDSHWKKQPLGSTNGNGNGAVPPKVNEGGVSAFLRSNSVRNRVPTKTTVEPTKVTVKSSSSENVNEPTLKREDSNLSKKSLTKLRAALAKPVMGVSGIRREPVAVSRKEAETKKELPETKKDSLEVKKDATRMPLIRGNSAVTTTTSTMPTTMSLSSKRLAGIEDIDANDKENLVLVSEYVNDIYDYLYQVELEQPIHKDHLAGQKEVSHKMRAVLIDWINEVHLQFHLAAETFQLAVAIIDRYLQVVKDTKRTYLQLVGVTALFIATKYEELFPPAIGDFVFITDDTYTARQIRQMELQIFKAIDCNLSRPLPIHFLRRYSKAAGAEDEHHTMSKYFIELASVDYEMATYRPSEIAAASLFLSLHLLNGNHRAGTGFNDRHWTPTLTFYSRYSAAHLRPITRLIAKLARDAPQAKLKAIYNKYQGSKFQKIALRTELTGALMDSIVGQSQRK

SEQ ID NO: 2600 - protein, 530 aa, Drosophila melanogaster
MVGTTLKMRGDENASENFKQVQLKKLTVPSMEATTKRAALGDLQNRGISRPIAAKDAAQKDSKDLKLTDALRNAKARVDSHWKKQPLGSTNGNGNGAVPPKVNEGGVSAFLRSNSVRNRVPTKTTVEPTKVTVKSSSSENVNEPTLKREDSNLSKKSLTKLRAALAKPVMGVSGIRREPVAVSRKEAETKKELPETKKDSLEVKKDATRMPLIRGNSAVTTTTSTMPTTMSLSSKRLAGIEDIDANDKENLVLVSEYVNDIYDYLYQVELEQPIHKDHLAGQKEVSHKMRAVLIDWINEVHLQFHLAAETFQLAVAIIDRYLQVVKDTKRTYLQLVGVTALFIATKYEELFPPAIGDFVFITDDTYTARQIRQMELQIFKAIDCNLSRPLPIHFLRRYSKAAGAEDEHHTMSKYFIELASVDYEMATYRPSEIAAASLFLSLHLLNGNHRAGTGFNDRHWTPTLTFYSRYSAAHLRPITRLIAKLARDAPQAKLKAIYNKYQGSKFQKIALRTELTGALMDSIVGQSQRK

SEQ ID NO: 2601 - protein, 524 aa, Drosophila melanogaster
MAALEKNASENFKQVQLKKLTVPSMEATTKRAALGDLQNRGISRPIAAKDAAQKDSKDLKLTDALRNAKARVDSHWKKQPLGSTNGNGNGAVPPKVNEGGVSAFLRSNSVRNRVPTKTTVEPTKVTVKSSSSENVNEPTLKREDSNLSKKSLTKLRAALAKPVMGVSGIRREPVAVSRKEAETKKELPETKKDSLEVKKDATRMPLIRGNSAVTTTTSTMPTTMSLSSKRLAGIEDIDANDKENLVLVSEYVNDIYDYLYQVELEQPIHKDHLAGQKEVSHKMRAVLIDWINEVHLQFHLAAETFQLAVAIIDRYLQVVKDTKRTYLQLVGVTALFIATKYEELFPPAIGDFVFITDDTYTARQIRQMELQIFKAIDCNLSRPLPIHFLRRYSKAAGAEDEHHTMSKYFIELASVDYEMATYRPSEIAAASLFLSLHLLNGNHRAGTGFNDRHWTPTLTFYSRYSAAHLRPITRLIAKLARDAPQAKLKAIYNKYQGSKFQKIALRTELTGALMDSIVGQSQRK

SEQ ID NO: 2602 - protein, 530 aa, Drosophila melanogaster
MVGTTLKMRGDENASENFKQVQLKKLTVPSMEATTKRAALGDLQNRGISRPIAAKDAAQKDSKDLKLTDALRNAKARVDSHWKKQPLGSTNGNGNGAVPPKVNEGGVSAFLRSNSVRNRVPTKTTVEPTKVTVKSSSSENVNEPTLKREDSNLSKKSLTKLGAALAKPVMGVSGIRREPVAVSRKEAETKKELPETKKDSLEVKKDATRMPLIRGNSAVTTTTSTMPTTMSLSSKRLAGIEDIDANDKENLVLVSEYVNDIYDYLYQVELEQPIHKDHLAGQKEVSHKMRAVLIDWINEVHLQFHLAAETFQLAVAIIDRYLQVVKDTKRTYLQLVGVTALFIATKYEELFPPAIGDFVFITDDTYTARQIRQMELQIFKAIDCNLSRPLPIHFLRRYSKAAGAEDEHHTMSKYFIELASVDYEMATYRPSEIAAASLFLSLHLLNGNHRAGTGFNDRHWTPTLTFYSRYSAAHLRPITRLIAKLARDAPQAKLKAIYNKYQGSKFQKIALRTELTGALMDSIVGQSQRK

SEQ ID NO: 2603 - protein, 491 aa, Drosophila melanogaster
MASFQIHQDMSNKENPGIKIPAGVKNTKQPLAVIGGKAEKNALAPRANFAVLNGNNNVPRPAGKVQVFRDVRNLNVDENVEYGAKKSNVVPVVEQFKTFSVYEDNNDTQVAPSGKSLASLVDKENHDVKFGAGQKELVDYDLDSTPMSVTDVQSPMSVDRSILGVIQSSDISVGTETGASPTGRVKELPPRNDRQRFLEVVQYQMDILEYFRESEKKHRPKPLYMRRQKDISHNMRSILIDWLVEVSEEYKLDTETLYLSVFYLDRFLSQMAVVRSKLQLVGTAAMYIAAKYEEIYPPEVGEFVFLTDDSYTKAQVLRMEQVILKILSFDLCTPTAYVFINTYAVLCDMPEKLKYMTLYISELSLMEGETYLQYLPSLMSSASVALARHILGMEMWTPRLEEITTYKLEDLKTVVLHLCHTHKTAKELNTQAMREKYNRDTYKKVAMMESVEMSKDDFDQLCEAYNCKQKEDEHQQPDINTKSNVNLFYKF

SEQ ID NO: 2604 - protein, 491 aa, Drosophila melanogaster
MASFQIHQDMSNKENPGIKIPAGVKNTKQPLAVIGGKAEKNALAPRANFAVLNGNNNVPRPAGKVQVFRDVRNLNVDENVEYGAKKSNVVPVVEQFKTFSVYEDNNDTQVAPSGKSLASLVDKENHDVKFGAGQKELVDYDLDSTPISVTDVQSPMSVDRSILGVIQSSDISVGTETGASPTGRVKELPPRNDRQRFLEMVQYQMDILEYFRESEKKHRPKPLYMRRQKDISHNMRSILIDWLVEVSEEYKLDTETLYLSVFYLDRFLSQMAVVRSKLQLVGTAAMYIAAKYEEIYPPEVGEFVFLTDDSYTKAQVLRMEQVILKILSFDLCTPTAYVFINTYAVLCDMPEKLKYMTLYISELSLMEGETYLQYLPSLMSSASVALARHILGMEMWTPRLEEITTYKLEDLKTVVLHLCHTHKTAKELNTQAMREKYNRDTYKKVAMMESVEMSKDDFDQLCEAYNCKQKEDEQQQPDINTKSNVNLFYKF

SEQ ID NO: 2605 - protein, 491 aa, Drosophila melanogaster
MASFQIHQDMSNKENPGIKIPAGVKNTKQPLAVIGGKAEKNALAPRANFAVLNGNNNVPRPAGKVQVFRDVRNLNVDENVEYGAKKSNVVPVVEQFKTFSVYEDNNDTQVAPSGKSLASLVDKENHDVKFGAGQKELVDYDLDSTPMSVTDVQSPMSVDRSILGVIQSSDISVGTETGVSPTGRVKELPPRNDRQRFLEVVQYQMDILEYFRESEKKHRPKPLYMRRQKDISHNMRSILIDWLVEVSEEYKLDTETLYLSVFYLDRFLSQMAVVRSKLQLVGTAAMYIAAKYEEIYPPEVGEFVFLTDDSYTKAQVLRMEQVILKILSFDLCTPTAYVFINTYAVLCDMPEKLKYMTLYISELSLMEGETYLQYLPSLMSSASVALARHILGMEMWTPRLEEITTYKLEDLKTVVLHLCHTHKTAKELNTQAMREKYNRDTYKKVAMMESVEMSKDDFDQLCEAYNCKQKEDEHQQPDINTKSNVNLFYKF

SEQ ID NO: 2606 - protein, 345 aa, Drosophila melanogaster
MSVTDVQSPMSVDRSILGVIQSSDISVGTETGVSPTGRVKELPPRNDRQRFLEVVQYQMDILEYFRESEKKHRAKPLYMRRQKDISHNMRSILIDWLVEVSEEYKLDTETLYLSVFYLDRFLSQMAVVRSKLQLVGTAAMYIAAKYEEIYPPEVGEFVFLTDDSYTKAQVLRMEQVILKILSFDLCTPTAYVFINTYAVLCDMPEKLKYMTLYISELSLMEGETYLQYLPSLMSSASVALARHILGMEMWTPRLEEITTYKLEDLKTVVLHLCHTHKTAKELNTQAMREKYNRDTYKKVAMMESVEMSKDDFDQLCEAYNCKQKEDEHQQPDINTKSNVNLFYKF

SEQ ID NO: 2607 - protein, 345 aa, Drosophila melanogaster
MSVTDVQSPMSVDRSILGVIQSSDISVGTETGVSPTGRVKELPPRNDRQRFLEVVQYQMDILEYFRESEKKHRPKPLYMRRQKDISHNMRSILIDWLVEVSEEYKLDTETLYLSVFYLDRFLSQMAVVRSKLQLVGTAAMYIAAKYEEIYPPEVGEFVFLTDDSYTKAQVLRMEQVILKILSFDLCTPTAYVFINTYAVLCDMPEKLKYMTLYISELSLMEGETYLQYLPSLMSSASVALARHILGMEMWTPRLEEITTYKLEDLKTVVLHLCHTHKTAKELNTQAMREKYNRDTYKKVAMMESVEMSKDDFDQLCEAYNCKQKEDEHQQPDINTKSNVNLFYKF

SEQ ID NO: 2608 - protein, 575 aa, Drosophila melanogaster
MAPTKATTRAAITSGHHQLQQAVNPILGALGAATRKGLTRRAAATGNIDPNVENMQTRAKRKADHSPIKNDKIKRSALGNLTNNVKIMTLHPAQDEEQSGVGKKPTAQQLQALMDAKKQENLSVNVFGASKMTTRASSKVEDSVENCHKVLDKLEEALARPKPRPKAVPAAKKTVLGEVQLPAMPNPMQIPVLLPPTHNLAAPQVAAVKPVRRISNDFNKTEDSLYMSALEDVSSCDSMRLPGNFEAARRRSAKLQQKTEQQPQPLLLTLPETAPSQVVPIPPVPEEVEDFDRKNWDDPFQVSHYAMDIFNYLKVREAEFPIADYMPRQIHLTTWMRTLLVDWMVEVQETFELNHETLYLAVKIVDLYLCREVINKEKLQLLGAAAFFIACKYDERQPPLIEDFLYICDGAYNHDELVRMERETLRVIKYDLGIPLSYRFLRRYARCAKVPMPTLTLARYILELSLMDYANISFSDSQMASAALFMALRMHGGPGQLDKQTWTSTLIYYTGYQLADFAEIVTALNAGLHRKPRATIKTIRNKYSHKIFHEVAKVPLLTNQELFQGNLDLNESNLS

SEQ ID NO: 2609 - protein, 575 aa, Drosophila melanogaster
MAPTKATTRAAITSGHHQLQQAVNPILGALGAATRKGLTRRAAATGNIDPNVENMQTRAKRKADHSPIKNDKIKRSALGNLTNNVKIMTLHPAQDEEQSGVGKKPTAQQLQALMDAKKQENLSVNVFGASKMTTRASSKVEDSVENCHKVLDKLEEALARPKPRPKAVPAAKKTVLGEVQLPAMPNPMQIPVLLPPTHNLAAPQVAAVKPVRRISNDFNKTEDSLYMSALEDVSSCDSMRLSGNFEAARRRSAKLQQKTEQQPQPLLLTLPETAPSQVVPIPPVPEEVEDFDRKNWDDPFQVSHYAMDIFNYLKVREAEFPIADYMPRQIHLTTWMRTLLVDWMVEVQETFELNHETLYLAVKIVDLYLCREVINKEKLQLLGAAAFFIACKYDERQPPLIEDFLYICDGAYNHDELVRMERETLRVIKYDLGIPLSYRFLRRYARCAKVPMPTLTLARYILELSLMDYANISFSDSQMASAALFMALRMHGGPGQLDKQTWTSTLIYYTGYQLADFAEIVTALNAGLHRKPRATIKTIRNKYSHKIFHEVAKVPLLTNQELFQSNLDLNESNLS

SEQ ID NO: 2610 - protein, 575 aa, Drosophila melanogaster
MAPTKATTRAAITSGHHQLQQAVNPILGALGAATRKGLTRRAAATGNIDPNVENMQTRAKRKADHSPIKNDKIKRSALGNLTNNVKIMTLHPAQDEEQSGVGKKPTAQQLQALMDAKKQENLSVNVFGASKMTTRASSKVEDSVENCHKVLDKLEEALARPKPRPKAVPAAKKTVLGEVQLPAMPNPMQIPVLLPPTHNLAAPQVAAVKPVRRISNDFNKTEDSLYMSALEDVSSCDSMRLSGNFEAARRRSAKLQQKTEQQPQPLLLTLPETAPSQVVPIPPVPEEVEDFDRKNWDDPFQVSHYAMDIFNYLKVREAEFPIADYMPRQIHLTTWMRTLLVDWMVEVQETFELNHETLYLAVKIVDLYLCREVINKEKLQLLGAAAFFIACKYDERQPPLIEDFLYICDGAYNHDELVRMERETLRVIKYDLGIPLSYRFLRRYARCAKVPMPTLTLARYILELSLMDYANISFSDSQMASAALFMALRMHGGPGQLDKQTWTSTLIYYTGYQLADFAEIVTALNAGLHRKPRATIKTIRNKYSHKIFHEVAKVPLLTNQELFQGNLDLNESNLS

SEQ ID NO: 2611 - protein, 601 aa, Drosophila melanogaster
MKLEQKRKFIEMDPELGFEPPSAKRQQRLPALYGSEQGNLSSVASSVYTSPVVSVDGQSTQELLSIRSSPAEDLSEAPHSPLPDSPDSPPSPDRGSKQTPVVVRYAAEQVVTSTVVTQKTEDDDLLDDSCEDYSYDEDDEDDVEEEDDDVEIYSSTISPASSGCSQQQAVNGERTPGLPKHQEQIHHPVSDLMINMRTPMSPAVENGLRQCPLPALAWANAADVWRLMCHRDEQDSRLRSISMLEQHPGLQPRMRAILLDWLIEVCEVYKLHRETFYLAVDYLDRYLHVAHKVQKTHLQLIGITCLFVAAKVEEIYPPKIGEFAYVTDGACTERDILNHEKILLQALDWDISPITITGWLGVYMQLNVNNRTPASFSQIGRQKSAEADDAFIYPQFSGFEFVQTSQLLDLCTLDVGMANYSYSVLAAAAISHTFSREMALRCSGLDWQVIQPCARWMEPFFRVISQKAPYLQLNEQNEQVSNKFGLGLICPNIVTDDSHIIQTHTTTMDMYDEVLMAQDAAHAMRSRIQASPATALPPESLLTPPASSHKPDEYLGDEGDETGARSGISSTTTCCNTAASNKVGKSSSNNSVTSCSSRSNP

SEQ ID NO: 2612 - protein, 410 aa, Drosophila melanogaster
MINMRTPMSPAVENGLRQCPLPALAWANAADVWRLMCHRDEQDSRLRSISMLEQHPGLQPRMRAILLDWLIEVCEVYKLHRETFYLAVDYLDRYLHVAHKVQKTHLQLIGITCLFVAAKVEEIYPPKIGEFAYVTDGACTERDILNHEKILLQALDWDISPITITGWLGVYMQLNVNNRTPASFSQIGRQKSAEADDAFIYPQFSGFEFVQTSQLLDLCTLDVGMANYSYSVLAAAAISHTFSREMALRCSGLDWQVIQPCARWMEPFFRVISQKAPYLQLNEQNEQVSNKFGLGLICPNIVTDDSHIIQTHTTTMDMYDEVLMAQDAAHAMRARIQASPATALRAPESLLTPPASSHKPDEYLGDEGDETGARSGISSTTTCCNTAASNKGGKSSSNNSVTSCSSRSNP

SEQ ID NO: 2613 - protein, 709 aa, Drosophila melanogaster
MGLNAKSVCSTSSTEPNGSIVTTAPSNGEVSSSIVVVVSSSSISSSSDSPIAILPHPDPIPSTSFSSASQRSEEELPGTSAASRTDEMCSCDSQNLAASTAATSNGNKRKRRLSSDSNEDPELGFEPPSAKRQQRLPALYGSEQGNLSSVASSVYTSPVVSVDGQSTQELLSIRSSPAEDLSEAPHSPLPDSPDSPPSPDRGSKQTPVVVRYAAEQVVTSTVVTQKTEDDDLLDDSCEDYSYDEDDEDDVEEEDDDVEIYSSTISPASSGCSQQQAVNGERTPGLPKHQEQIHHPVSDLMINMRTPMSPAVENGLRQCPLPALAWANAADVWRLMCHRDEQDSRLRSISMLEQHPGLQPRMRAILLDWLIEVCEVYKLHRETFYLAVDYLDRYLHVAHKVQKTHLQLIGITCLFVAAKVEEIYPPKIGEFAYVTDGACTERDILNHEKILLQALDWDISPITITGWLGVYMQLNVNNRTPASFSQIGRQKSAEADDAFIYPQFSGFEFVQTSQLLDLCTLDVGMANYSYSVLAAAAISHTFSREMALRCSGLDWQVIQPCARWMEPFFRVISQKAPYLQLNEQNEQVSNKFGLGLICPNIVTDDSHIIQTHTTTMDMYDEVLMAQDAAHAMRARIQASPATALRAPESLLTPPASSHKPDEYLGDEGDETGARSGISSTTTCCNTAASNKGGKSSSNNSVTSCSSRSNP

SEQ ID NO: 2614 - protein, 602 aa, Drosophila melanogaster
MKLEQKRKFIEMDPELGFEPPSAKRQQRLPALYGSEQGNLSSVASSVYTSPVVSVDGQSTQELLSIRSSPAEDLSEAPHSPLPDSPDSPPSPDRGSKQTPVVVRYAAEQVVTSTVVTQKTEDDDLLDDSCEDYSYDEDDEDDVEEEDDDVEIYSSTISPASSGCSQQQAVNGERTPGLPKHQEQIHHPVSDLMINMRTPMSPAVENGLRQCPLPALAWANAADVWRLMCHRDEQDSRLRSISMLEQHPGLQPRMRAILLDWLIEVCEVYKLHRETFYLAVDYLDRYLHVAHKVQKTHLQLIGITCLFVAAKVEEIYPPKIGEFAYVTDGACTERDILNHEKILLQALDWDISPITITGWLGVYMQLNVNNRTPASFSQIGRQKSAEADDAFIYPQFSGFEFVQTSQLLDLCTLDVGMANYSYSVLAAAAISHTFSREMALRCSGLDWQVIQPCARWMEPFFRVISQKAPYLQLNEQNEQVSNKFGLGLICPNIVTDDSHIIQTHTTTMDMYDEVLMAQDAAHAMRARIQASPATALRAPESLLTPPASSHKPDEYLGDEGDETGARSGISSTTTCCNTAASNKGGKSSSNNSVTSCSSRSNP

SEQ ID NO: 2615 - protein, 481 aa, Drosophila melanogaster
MADIMDLLCSEIIVYESDPSLYRLNKRQQQMSSPAIIRDQSSICSSLGDAESDSHPDAQNNAVVCNMKELVYIYASVDSAAKNPEQLEPPPPPPPPPPPPPTATQSIQSYPRYISQEPPTSHCQRLDERLTTTADPPATDNVNTAIGDPTLYSDRCLENFLKVEEKHHKIPDTYFSIQKDITPPMRKIVAEWMMEVCAEENCQEEVVLLALNYMDRFLSSKSVRKTQLQILAAACLLLASKLREPSCRALSVDLLVVYTDNSIYKDDLIKWELYVLSRLGWDLSSVTPLDFLELLMMRLPIGSKNFPDINIGKVRGHAQAFISLAAKEHKFAKFSASTIAASSIAASMNGLKWHLRSGHNLHFLLSLMTDLTSVEQAQVRDCMLHMEDIFKEHSRNLEPFLVNIDPKEMSTLYYKRRFQIHQSQHLSQISIRPLPLPKAPAECVEQHQQQHNFGSAAPHRTHTCKMQAQAQAQNEIQDVTF

SEQ ID NO: 2616 - protein, 481 aa, Drosophila melanogaster
MADIMDLLCSEIIVYDSDPSLYRLNKRQQQMSSPAIIRDQSSICSSLGDAESDSHPDAQNNAVVCNMKELVYIYASVDSAAKNPEQLEPPPPPPPPPPPPPTATQSIQSYPRYISQEPPTSHCQRLDERLTTTADPPATDNVNTAIGDPTLYSDRCLENFLKVEEKHHKIPDTYFSIQKDITPPMRKIVAEWMMEVCAEENCQEEVVLLALNYMDRFLSSKSVRKTQLQILAAACLLLASKLREPSCRALSVDLLVVYTDNSIYKDDLIKWELYVLSRLGWDLSSVTPLDFLELLMMRLPIGSKNFPDINIGKVRGHAQAFISLAAKEHKFAKFSASTIAASSIAASMNGLKWHLRSGHNLHFLLSLMTDLTSVEQAQVRDCMLHMEDIFKEHSRNLEPFLVNIDPKEMSTLYYKRRFQIHQSQHLSQISIRPLPLPKAPAECVEQHQQQHNFGSAAPHRTHTCKMQAQAQAQNEIQDVTF

SEQ ID NO: 2617 - protein, 452 aa, Drosophila melanogaster
QMSSPAIIRDQSSICSSLGDAESDSHPDAQNNAVVCNMKELVYIYASVDSAAKNPEQLEPPPPPPPPPPPPPTATQSIQSYPRYISQEPPTSHCQRLDERLTTTADPPATDNVNTAIGDPTLYSDRCLENFLKVEEKHHKIPDTYFSIQKDITPPMRKIVAEWMMEVCAEENCQEEVVLLALNYMDRFLSSKSVRKTQLQILAAACLLLASKLREPSCRALSVDLLVVYTDNSIYKDDLIKWELYVLSRLGWDLSSVTPLDFLELLMMRLPIGSKNFPDINIGKVRGHAQAFISLAAKEHKFAKFSASTIAASSIAASMNGLKWHLRSGHNLHFFLSLMTDLTSVEQAQVRDCMLHMEDIFKEHSRNLEPFLVNIDPKEMSTLYYKRRFQIHQSQHLSQISIRPLPLPKAPAECVEQHQQQHNFGSAAPHRTHTCKMQAQAQAQNEIQDVTF

SEQ ID NO: 2618 - protein, 388 aa, Marthasterias glacialis
MLNGENVDSRIMGKVATRASSKGVKSTLGTRGALENISNVARNNLQAGAKKELVKAKRGMTKSKATSSLQSVMGLNVEPMEKAKPQSPEPMDMSEINSALEAFSQNLLEGVEDIDKNDFDNPQLCSEFVNDIYQYMRKLEREFKVRTDYMTIQEITERMRSILIDWLVQVHLRFHLLQETLFLTIQILDRYLEVQPVSKNKLQLVGVTSMLIAAKYEEMYPPEIGDFVYITDNAYTKAQIRSMECNILRRLDFSLGKPLCIHFLRRNSKAGGVDGQKHTMAKYLMELTLPEYAFVPYDPSEIAAAALCLSSKILEPDMEWGTTLVHYSAYSEDHLMPIVQKMALVLKNAPTAKFQAVRKKYSSAKFMNVSTISALTSSTVMDLADQMC

SEQ ID NO: 2619 - protein, 383 aa, Marthasterias glacialis
MLNGENVDSRIMGKVATRASSKGVKSTLGTRGALENISNVARNNLQAGAKKELVKAKRGMTESKATSSLQSVMGLNVEPMEKAKPQSPEPMDMSEINSALEAFSQNLLVGVEDIDKNDFDNPQLCSEFVNDIYQYMRKLEREFKVRTDYMTIQEITERMRSILIDWLVQVHLRFHLLQETLFLTIQILDRYLEVQPVSKNKLQLVGVTSMLIAAKYEEMYPPEIGDFVYITDNAYTKAQIRSMECNILRRLDFSLGKPLCIHFLRRNSKAGGVDGQKHTMAKYLMELTLPEYAFVPYDPSEIPAAALCLSSKILEPDMEWGTTLVHYSAYSEDHLMPIVQKMALVLKNAPTAKFQVLEILCGLLLCCLDCLVASYPQLKKKIV

SEQ ID NO: 2620 - protein, 458 aa, Hemicentrotus pulcherrimus
MAFSIGNSNASDIMANMAQGGQQFGKKTKRDDNTSRNGPQACKRAALGTITNVSSTRVQPSRAAKHFRVSGENSFPVFQDENAHSRIPQGKPFGIPSAGAAPAFSIHVDTTSSYVQSSTSTSIKSTDKENEHILLDNALSLPVPQAQRIPLRTFPDVEDNNVSLNEESLTSSEFSPMLLDTSLDAKCISPRTVDIRDLSLGEPEYAEEIYQYLKTAESKHRPKHGYMRKQPDITNSMRCILVDWLVEVSEEYRLHNETLYLAAAFIDRFLSQMSVLRAKLQLVGTASMFVASKYEEIYPPDVKEFVYITDDTYSIKQVLRMEHLILKVLSFDLAAPTINSFLPRFIKAAQANSKTEHLTQYLAELTLQEYDFIKYAPSMIAASAVCLANHTLNNEEWTPTMAHYTDYQLGDIYPCVQDLHQLFIKAPTMEQQAVREKYKSQKYSGASMTPVPTTLPTQ

SEQ ID NO: 2621 - protein, 424 aa, Hemicentrotus pulcherrimus
MSRRSGRLQSRQDNQPLTECISDENNLPMCTRKRKTREQDTTGVSKAEEVQRRRQQFTIENRWVPISESSSIETSLLVPMQTKEPSTPSEELMDTANWVTFRNLFPAHVSDRASPIPLLHWDDLPEVWTIMTRKEALCPRKHDCLKSHPSLGERMRAILLDWLIEVCEVYRLHRESFYLAADFVDRYLAAKENVPKTKLQLIGITSLFVAAKLEEIYPPKLHEFAYVTDGACTDDQILDQELIMLMTLNWDLTPITVNTWLNAFMQICNAEEIANRKTNFHFPSYSSTEFVQVAQLLDVCTLDIGSMDFDYSILAASALYHVTNEEVTLSVTGLKWDDIAACVQWMSTFAMTIREVGVAQLKNFKNIYAGDAHNIQTHCSSLELLDKSHEKQRLLREASCCSPVQVPGVLTPPQSDKKSKKGVL

SEQ ID NO: 2622 - protein, 415 aa, Lytechinus variegatus
MMAHTARNSNMNTLGFKKLQNLDNENAGARLGAKSMAVQKPAQRAALGNISNTMRTTQVAGKKVVKKDARTKTMVKSKATSSLQSVASLPVPVDKPDICRSPLPQVVDKMEVDSVESAIEAFSQQLIDLQVEDIDKDDSDNPQLCSEYVKEIYLYMRSLEKRMAVPAAYLDREGQLTGRMRHILVDWLVQVHLRFHLLQETLFLTVQLIDRFLVDHTVSKGKLQLVGVTAMFIASKYEEMYPPEINDFVYITDQAYTKSQIRQMEIVMLKGLGYNLGKPLCLHFLRRNSKAAMVDPQKHTLAKFLMEITLPEYNMVQYDPSEIAAAALYMSMRLLGSEEDGWGAKMTHYSMYNEDHIRPIVRKMAQAVIRNDAMTEKYHAVKTKYRSSRFMNISTLPELESDLIKSLAEDGEERM

SEQ ID NO: 2623 - protein, 457 aa, Strongylocentrotus purpuratus
MAFSIGNPNASDIMANMAQGGQQFGRKTKRDDITSRNGPQACKRAALGTITNVSSTRVQPSRAAKQFRVSGENSFPVFQDENAHSRIPQGKPFGIPSAGAAPAFSIHVDTTSYVQSSTSTSIKSTDKENEHILLDTALSLPIPQAQRIPLRTFPDVEDNNVSLNEESLTSSEFSPMLLDTSLDAKCISPRTVDIRDLSLGEPEYAEEIYQYLKTAESKHRPKHGYMRKQPDITNSMRCILVDWLVEVSEEYRLHNETLYLAAAFIDRFLSQMSVLRAKLQLVGTASMFVASKYEEIYPPDVKEFVYITDDTYSIKQVLRMEHLILKVLSFDLAAPTINSFLPRFIKAAKANSKTEHLTQYLAELTLQEYDFIKYAPSMIAASAVCLANHTLNNEEWTPTMAHYTDYQLGDIYPCVQDLHQLFIKAPTMEQQAVREKYKSQKYSGASMTPVPTTLPTQ

SEQ ID NO: 2624 - protein, 386 aa, Danio rerio
MEMHALRNASNPIYVGAKGGPVSGAVRRPVFGELSNLSHKPVQTKKVVPMQSVKPTGRSAVVHPKSAQVQHEAPKPAATVPPAQADVSMKEEELCQAFSNSLFPVDDIDEGDADMPQLCSEYVKDIYSYLRRLEGQQSVRPRYMEGYDINGRMRALLVDWLIQVHSRFQLLQETLYMTVAILDRFLQVQPVTRRKLQLVGVTAMLIACKYEEMYVPMVGDFAYIADDAFTKAQIREMEMLMLSGLNFKLGRPLPLHFLRRASKAGNADAEKHTLAKYFLELTLLDYDMVHYNPSETAAAALCLSQLVLDGQKWSSTQQHYSTYDEAHLKPIMQLIAKNVVMVNEGLSKHLTVRKKYASSRLMKISLLPQLKSSLVKDLAAPLMPSS

SEQ ID NO: 2625 - protein, 398 aa, Danio rerio
MMALRVTRNTRLASSENQNALPGKAVVANKPGLRPRAALGEIGNNPQTRQALKKKEVKVAPAAEVVVEKAPVVQQPKKDSPKVQHGVKVVSEPSSPVPMETSGCASDDLCQAFSDVLLNIKDVDADDYDNPMLCSEYVKDIYLYLRQLETEQAVRPKYLAGKEVTGNMRAILIDWLVQVQIKFRLLQETMYMTVAIIDRFLQDHPVPKKQLQLVGVTAMFIASKYEEMYPPEIADFAFVTDRAYTTSQIREMEMKVLRVLNFGFGRPLPLQFLRRASKIGDVTAEHHTLAKYFLELTMVDYDMVHYPPSQMASAAYALTLKVFNCGDWTPTLQHYMGYTEDELVPVMQHIAKNVVRVNEGLSKHLAVKNKYSSQKQMRIATISQLKSSLIKDLAKQIS

SEQ ID NO: 2626 - protein, 397 aa, Danio rerio
MALRVTRNTRLASSENQNALPGKAVVANKPGLRPRAALGEIGNNPQTRQALKKKEVKVAPAAEVVVEKAPVVQQPKKDSPKVQHGVKVVSEPSSPVPMETSGCASDDLCQAFSDVLLNIKDVDADDYDNPMLCSEYVKDIYLYLRQLETEQAVRPKYLAGKEVTGNMRAILIDWLVQVQIKFRLLQETMYMTVAIIDRFLQDHPVPKKQLQLVGVTAMFIASKYEEMYPPEIADFAFVTDRAYTTSQIREMEMKVLRVLNFGFGRPLPLQFLRRASKIGDVTAEHHTLAKYFLELTMVDYDMVHYPPSQMASAAYALTLKVFNCGDWTPTLQHYMGYTEDELVPVMQHIAKNVVRVNEGLSKHLAVKNKYSSQKQMRIATISQLKSSLIKDLAKQIS

SEQ ID NO: 2627 - protein, 397 aa, Carassius auratus
MALRVSRNTRLASSENQSALPGKAAVANKPGLRPRAALGEIGNNPQTRQALRKKEVKVAPKVEVVAEKAPVVQQPKKESPKVQHDVPIVSEPSSPVPMETSGCASDDLCQAFSDVLLDIKDVDADDYDNPMLCSEYVKDIYLYLHQLEITQAVKPKYLEGKEITGNMRAILIDWLVQVQIKFRLLQETMYMTVAVIDRFLQDHPVPKKQLQLVGVTAMFIASKYEEMYPPEIADFAFVTDRAYTTGQIRDMEMKILRVLDFSFGKPLPLQFLRRASKIGDVTAEHHTLAKYFLELTMVDYDMVHFPPSQVASAAYALTLKVFNCGDWTPTLQHYMGYTEDSLVPVMQHIARNVVRVNEGLSKHLAVKNKYSSQKQMRIASISQLKSSLIKDLAKQIS

SEQ ID NO: 2628 - protein, 397 aa, Carassius auratus
MALRVTRNTRLASSENQGALPGKAAVANKPGLRPRAALGEIGNNPQTRQALRKKEVKVAPKVEAVAEKAPVVQQPKKESPKVQHDVQILSEPSSPVPMETSGCASDDLCQAFSDVMLNIKDVDADDYDNPMLCSEYVKDIYLYLRQLEIEQAVRPKYLEGSEVTGNMRAILIDWLVQVQIKFKLLQETMYMTVAVIDRFLQDHPVPKKQLQLVGVTAMFIASKYEEMYPPEIADFAFVTDRAYTTGQIRDMEMKILRVLDFSFGKPLPLQFLRRASKIGDVTAEHHTLAKYFLELTMVDYDMVHFPPSQVASARYALTLKVFNCGDWTPTLQHYMGYTEDSLVPVMQHIARNVVRVNEGLSKHLAVKNKYSSQKQMRIASISQLKSSLIKDLAKQIS

SEQ ID NO: 2629 - protein, 63 aa, Cryptoperidiniopsoid sp. brodyi
MRGILADWLVEVHLKFKLVPETLYLTVNIIDRFLQIHKVSRPKLQLVGVTSLLIASKYEEIYP

SEQ ID NO: 2630 - protein, 245 aa, Oncorhynchus mykiss
DIDQAVKPNYLAGQEITGNMRAILIDWLVQVQIKFRLLQETMFMTVGIIDRFLQDNPVPKKQLQLVGVTAMFIASKYEEMYPPEIVDFAFVTDQAYTTAQIRDMEMKILRVLKFSFGCPLPLQFLRRASKIGEVTAEHHTLAKYFVELTMVDYEMVHFPPSQVASAAFALTLKVFNCGEWSSTLQHYMNYTEDSLVHAMQHIAKNVLKVNEGQTKHMTVKNKYSSQKQMRIATISQLKSSLIKDL

SEQ ID NO: 2631 - protein, 359 aa, Oryzias latipes
MSSVEIVAQQLLAAEHPRRMGKGAAADPRRAALGELTNLNAAAATNGTGAAASAPVLAKPSVKEEQELCQAFSEVLLAVQDVDEQDADQPQLCSQYVKDIYKYLHILEEQQPVRANYMQGYEVTERMRALLVDWLVQVHSRFQLLQETLYLTVAILDRFLQVHPVSRRKLQLVGVTAMLVACKYEEMYAPEVGDFAYITDNAFTKSQIVEMEQVILRSLSFQLGRPLPLHFLRRATKVAGADVEKHTLAKYLMELTLLDYHMVHYRPSEVAAAALCLSQLLLDGLPWSLTQQQYSTYEEQHLKPIMQHMAKNVVLVNEGRTKFLAVKKKYSSSKLMKISLIPQLNSSTVKTMADALHDP

SEQ ID NO: 2632 - protein, 387 aa, Oryzias latipes
MSSVEIVAQQLLAAEHPRRMGKGAAADPRRAALGELTNLNAAAATNGKVGPAKKPLKASCAQKPKLTQLVASMIQTGAAASAPVLAKPSVKEEQELCQAFSEVLLAVQDVDEQDADQPQLCSQYVKDIYKYLHILEEQQPVRANYMQGYEVTERMRALLVDWLVQVHSRFQLLQETLYLTVAILDRFLQVHPVSRRKLQLVGVTAMLVACKYEEMYAPEVGDFAYITDNAFTKSQIVEMEQVILRSLSFQLGRPLPLHFLRRATKVAGADVEKHTLAKYLMELTLLDYHMVHYRPSEVAAAALCLSQLLLDGLPWSLTQQQYSTYEEQHLKPIMQHMAKNVVLVNEGRTKFLAVKKKYSSSKLMKISLIPQLNSSTVKTMADALHDH

SEQ ID NO: 2633 - protein, 404 aa, Oryzias latipes
MALRVTRNRLASTRAELGGKTCSVAGPTQKPRAALGEIGNVAVINKDVTKKTIKTEVAKKTKIPAKAEKIELPKAAVVPVKPAPEVQVTEVPDQAEPASPTPMETSGCESADLCQAFSDVILNTAIRDVDADDYDNPMLCSEYVKDIYKYLRQLEMEQSVKPNYLEGQEITGNMRAILIDWLVQVGLKFRLLQETMYMTVGIIDRFLQDHPVPKKQLQLVGVTAMFLASKYEEMYPPEISDFAYVTDRAYTTAQIRDMEMTILRVLKFQLGRPLPLQFLRRASKIYEVTAEQHTLAKYLLELSMVDYDMAHFSPSLVASAALALTLKVLDAGEWDVTLQHYMEYTAETLTPVMAHIAKNVVKVNNGQTKHMAIKGKYSTSKQMRIATISQLKSSVVKDLATQIS

SEQ ID NO: 2634 - protein, 306 aa, Oryzias latipes
MALRVTRNRLASTRAELGGKTCSVAGPTQKPRAALGEIGNVAVINKDVTKKTIKTEVAKKTKIPAKAEKIELPKAAVVPVKPAPEVQVTEVPDQAEPASPTPMETSGCESADLCQAFSDVILNTAIRDVDADDYDNPMLCSEYVKDIYKYLRQLEMEHSVKPNYLEGQEITGNMRAILIDWLVQVGLKFRLLQETMYMTVGIIDRFLQDHPVPKKQLQLVGVTAMFLASKYEEMYPPEISDFAYVTDRAYTTAQIRDMEMTILRVLKFQLGRPLPLQFLRRASKIYEVWRGVGAANCSLPPLHVLR

SEQ ID NO: 2635 - protein, 249 aa, Cynops pyrrhogaster
LIEVKDVDAGDAENPMLCSAYVKDIYNYLRNLEEEQSVRPRYLDGQEVTGNMRAILVDWPVQVQMKFRLLQETMFMTVGIIDRFLQANPVPKKMLQLVGVTAMFVACKYEEMYPPEIGDFAFVTDHTYTKAQIREMEMKILRVLDFGLGRPLPLHFLRRASKIGEVSSEQHTLAKYLMELVMVDYDMVHFPPSQVAAAAFCLALKVLDGGEWTPTLEHYMCYSEGSLTPVMQHMAKNILKVNRGLTKHL

SEQ ID NO: 2636 - protein, 390 aa, Xenopus laevis
MATWAAMRTGQMDNAVVGGVVAAKVKVHGHRPPLEEISNRTAILGRKPAAMNCKVPVKVVRQVTSRANLPLRVKQAFGPKSEEPPPIPMDVADNEEVLCQAFSEALNSVEDIDAEDSSNPQLCADYVKDIYSYLRQLEVQQAVRPRHLQGMEINDRMRAILVDWLIQVHLKFQLLQETLYMAIAIMDRFLQGQPISRSKLQLVGVTSLFIASKYEEMYYPEISDFVYITDNTYSKTQIREMEMMILKEINFDLGRPLPLNFLRRASKCCSADAGQHTLAKYFMELTLLDYDMVHFHPSAIAAAALCLTQKVLNMGTWDAALQFYTGYSQDDLSLPMKHMAKNIVQVNQNLSKFLSVKNKYSSSKLLKISTIPQLNSRVLTGLAAAVTPGS

SEQ ID NO: 2637 - protein, 392 aa, Xenopus laevis
MATRRAAIPREADNILGGAMRSKVQMNSRRAALGEIGNKVTVRGKPPAVKQSSNAVAKPSKMAATKVANVKTKHVPVKPVVAEAAPKVPSPVPMDVSLKEEELCQAFSDALTSVEDIDADDGGNPQLCSDYVMDIYNYLKQLEVQQSVHPCYLEGKEINERMRAILVDWLVQVHSRFQLLQETLYMGVAIMDRFLQVQPVSRSKLQLVGVTSLLIASKYEEMYTPEVADFVYITDNAYTASQIREMEMIILRLLNFDLGRPLPLHFLRRASKSCSADAEQHTLAKYLMELTLIDYEMVHIKPSEIAAAALCLSQKILGQGTWGTTQHYYTGYTEGDLQLIMKHMAKNITKVNQNLTKHVAVRNKYASSKLMKISTLPQLMAPLITELAASLS

SEQ ID NO: 2638 - protein, 393 aa, Xenopus laevis
MALIMTRSMRLNAENVAQGMAGKKAAVSKPVPKPRNALGDIGNQIGKAKVPLKKTTKALRKPTVQKSEKLAVLEENVPKEAEKAAPDSPSPMETSVCVIEEMQPEPAFSSALIPVTDVDAEDSDNPMLCSDYVKDIYCYLRNLEAEQAIGPHYLDGQEINGNMRAILVDWLVQVQLRFKLLQETMSMTVSILDRFLQENPVPKKLLQLAGVSAMFIACKYEEIYCPSIGDFVFVTDNTYTKSQIRNMEMQILRVLNFDIGRPLPLHFLRRASKIGEVDSVHHTLAKYLIELVMTDYDMVHIPPSQLAAAAFCLAMKILNSGEWTPTLEHYMAYKESSLTPVMQHIAKNIVKVNGGHTKFMSVKNKYTSSRQMKISCLPHLKSELVENLAKAAS

SEQ ID NO: 2639 - protein, 397 aa, Xenopus laevis
MSLRITRNMMANTENNVKTTLAGKRVVATKPGLRPRTALGDIGNKAELKVPAKKELKPAVKAVKKTKPIDKVLEPLKVSEENVCPKPTPVEPSSPSPMETSGCLPDELCQAFSDVLIQVKDVDADDDGNPMLCSEYVKDIYGYLRSLEDAQAVRPNYLHGREVTGNMRAILIDWLVQVQMKFRLLQETMFMTVGIIDRFLQEHPVPKNQLQLVGVTAMFLAAKYEEMYPPEIGDFTFVTDHTYTKAQIRDMEMKILRVLKFAIGRPLPLHFLRRASKIGEVTAEQHSLAKYLMELVMVDYDMVHYAPSQIAASASRLSLKILNAGDWTPTLHHYMAYSEEDLVPVMQHMAKNIIKVNKGLTKHLTVKNKYASSKQMKISMIPQLKSDVVVAMARPLV

SEQ ID NO: 2640 - protein, 416 aa, Xenopus laevis
MMPSLRPSRPVASKLPKLGKPVTAENNRLDKVEISQTKRSPSSPQGGAKKRAAFGDITNAHKNPQLIQKKKEGQKVAIKKTKSAPTSDITKNNELNIKKTQKKATVTEEHLPEVKEEKINTEQKTSVPTKEIPEEKVLPPGVEDIDQDSLDDPFSNSEYATDIFSYMRDREEKFLLPNYLEMQTDISKDMRAILVDWMVEVQENFELNHETLYLAVKMVDHYLAVSVVMKEKLQLIGSTAVLIASKFEERCPPCVDDFMYICDDAYKRDEVIAMEMEILQKLYFDINIPVPYRFLRRFAKCAHATMETLTLARYICELTLQEYDFVQERASKMAASCLLLALQMKGLGRWTATLHYYSGYQTNDLLPLVKRLNFLLTYPPNKKLKAVRSKYSHRVFFEVAKLPPMDMLTLTEALQS

SEQ ID NO: 2641 - protein, 182 aa, Silurana tropicalis
MSAILVDWLIQVHLKFQLLQETLYMAIAIMDRFLQGQPISRSKLQLVGVTSLFIASKYEEMYYPEISDFVYITDNTYSKAQIREMEMMILKELNFDLGRPLPLNFLRRASKCCSADAGQHTLAKYFMELTLLDYDMVHFHPSAIAAAALCLTQKVLNIGTWDATLQFYTGYSQDDLILPMKH

SEQ ID NO: 2642 - protein, 166 aa, Silurana tropicalis
MRAILVDWIVQVHSRFQLLQETLYMGIAIMDRFLQVQPVSRSKLQLVGVTSLLVASKYEEMYTPEVADFVYITDNAYTASQIREMEMIILRVLNFDLGRPLPLHFLRRASKSCSADAEQHTLAKYLMELTLIDYEMVHFNPSEIAAAALCLSQKILAQGSWGATQH

SEQ ID NO: 2643 - protein, 166 aa, Silurana tropicalis
MRAILVDWLVQVHLRFKLLQETMSMTIAILDRFLQENPVPKKLLQLAGVSAMFIACKYEEIYCPTIGDFAFVTDHTYTKSQIRNMEMQILRVLKFDIGRPLPLHFLRRASKIGEVDSVHHTLAKYLIELVMTDYDMVHVPPSQLAAAAFCLAMKILNSGEWTPVLE

SEQ ID NO: 2644 - protein, 172 aa, Silurana tropicalis
MRAILVDWLVQVQMKFRLLQETMFMTVGIIDRFLQDHPVPKNQLQLVGVTAMFLAAKYEEMYPPEIGDFTFVTDHTYTKAQIRDMEMKVLRVLKFAIGRPLPLHFLRRASKIGEVTAEQHSLAKYLMELVMVDYDMVHYSPSQIAAAASCLSLKILNTGEWTPTMHHYMAYS

SEQ ID NO: 2645 - protein, 249 aa, Bufo japonicus
LLDIKDVDADDYDNPMLCSEYVKDIYLYLHQLEITQAVKPKYLEGKEITGNMRAILIDWLVQVQIKFRLLQETMYMTVAIIDRFLQDHPVPKKQLQLVGVTAMFIASKYEEMYPPEIADFAFVTDRAYTTGQIREMEMKIRRVLDFSFGRPLPLQFLRRASKIGDVTAEHHTLAKYFLELTMVDYEMVHFPPSQVRSAAYALTLKVFNCGDWTPTLQHYMGYTEDALVPVMQHIAKNVVRLNEGLSKHL

SEQ ID NO: 2646 - protein, 392 aa, Rana japonica
MATRRAAIAREVDNAVGAMRSKAQLNGRRAALGEIGNKVTVRAVKQPAKNSNTTSKTTRPVAKVSNVSVKPKAVTVTEAPSQVKEASPVPMDVSMKEEEELCQAFSEVLNHVVDIDAEDGGNPQLCSEYVVDIYNYLREREVQQSIKQRYLDGMEINERMRAILVDWLIQVNSRFQFLQETLYMGIAIMDRFLQVQPISRGKLQLVGVTSLLLASKYEEMYSPEVADFAYITDNAYTTSQIREMEMIILRELKFDLGRPLPLHFLRRASKACSADAEQHTLAKYLMELTLVDYEMVHFHPSEIAAAALCLAQKVLGVGSWGSTQHHYTGYTEEDLTPIIKHIAKNVTKVNQNRTKHVAVRNKYASSKLMKISTHPQLMSLVITELAASLTSQ

SEQ ID NO: 2647 - protein, 369 aa, Rana japonica
MQTTKWRLRPAKKVGLLKPQHRNALGDIGNNLNRAKAALKKGSKALRTDVEKVAKPAPVEEEKPVPLSPMDTSGSSPMEAESEAFSDALLQVKDVDEDDADNPMLCSDYVKDIYCYLRDLEAERAVRPDYLKGQEITGNMRAILVDWLVQVHLRFKLLQETMFMTVSILDRFLQVNPVPKKSLQLAGVSAMFIASKYEEIYCPTIGDFSFVTDHTFTKSQIRNMEMQILTILNFDIGKPLPLHFLRRASKIGEVDAVLHTLAKYLIELSMVDYEMVHFPPSQVAAAAFCLSQKVLDGGEWTPTLQHYMGYSESSLIPSMRHLAKNVLKVNGGLTKFMSVRDKYAKSQQMRISCLPQLNSDFMVKLAKNV

SEQ ID NO: 2648 - protein, 399 aa, Gallus gallus
MALTRRAAVMRGVENAVTGHNTKAKVQVTGKRAVLEEIGNKVARGSNVPKKTDCIKPPVKATKGPGKMTNTVVPPKPPAAVNQAVKDTTTASKVLSPVPMDVSMQEEDLCQAFSDVLLHNIEDIDADDSGNPQLCSDYVKDIYLYLRQLELQQSVRPHYLDGKTINGRMRAILVDWLVQVHSRFQLLQETLYMCVAVMDRFLQSHPVPRKRLQLVGVTALLLASKYEEMYSPDIADFVYITDNAYNSAEVREMEITILKELNFDLGRPLPLHFLRRASKAGEADAEQHTLAKYLMELTLIDYDMVHYHPSEIAAAALCLSQKVLGHDKWGTKQQYYTGYAEDSLAMTMKHMAKNVVKVNENLTKYTAVRNKYASSKLLRISTISQLNSKTIKDLAASLL

SEQ ID NO: 2649 - protein, 403 aa, Gallus gallus
MPVARSSKAQSSKQPRASKAPSVTENVPPEKEEGCQAKRSPSSPQGGPKKRSAFGDITNAHKNQVVTGKKEGVKAPTRKATRAPPAPIVAKNNEINLKKSLRKTPPADVPVEPEKDSVPEEPVQQVPVVEDIDKEQLGDPYANAEYAKEIFDYMREREEKFLLPDYMEKQSDISRDMRAILVDWMVEVQENFELNHETLYLAVKLVDHYLVEVVSMRDKLQLIGSTAVLIASKFEERCPPCVDDFLYICDDAYKREELIAMETSILRTLNFDINIPIPYRFLRRFAKCARASMETLTLARFVCEMTLQEYDYARERPSKLAASSLLLALTMKNLGGWTPTLEYYSGYCAQDLHPLVKRLNFLLTYQPCDKLKAVRTKYSHRVFFEVAKTTPMDMMKLEEKLKS

SEQ ID NO: 2650 - protein, 60 aa, Sterkiella histriomuscorum
MRAILVDWLIEVHLKFRLQRETLYITVKIIDLYLEKQMVTKSRLQLVGVTSLLIASKYEE

SEQ ID NO: 2651 - protein, 398 aa, Homo sapiens
MALLRRPTVSSDLENIDTGVNSKVKSHVTIRRTVLEEIGNRVTTRAAQVAKKAQNTKVPVQPTKTTNVNKQLKPTASVKPVQMEKLAPKGPSPTPEDVSMKEENLCQAFSDALLCKIEDIDNEDWENPQLCSDYVKDIYQYLRQLEVLQSINPHFLDGRDINGRMRAILVDWLVQVHSKFRLLQETLYMCVGIMDRFLQVQPVSRKKLQLVGITALLLASKYEEMFSPNIEDFVYITDNAYTSSQIREMETLILKELKFELGRPLPLHFLRRASKAGEVDVEQHTLAKYLMELTLIDYDMVHYHPSKVAAAASCLSQKVLGQGKWNLKQQYYTGYTENEVLEVMQHMAKNVVKVNENLTKFIAIKNKYASSKLLKISMIPQLNSKAVKDLASPLIGRS

SEQ ID NO: 2652 - protein, 246 aa, Mustela vison
HEDIHTYLREMEVKCKPKVGYMKKEPDITNSMRAILVDWLVEVGEEYKLQNETLHLAVNYIDRFLSSMSVLRGKLQLVGTAAMLLASKFEEIYPPEVAEFVYVTDDTYTKKQVLRMEHLVLKVLAFDLAAPTVNQFLTQYFLHHDSANCKVESLAMFLGELSLIDADPYLKYLPSVIAAAAFHLALYTVTGQSWPESLVQKTGYTLESLKPCLMDLHQTYLRAPQHAQHAIRENIKVQSIMVIAVS

SEQ ID NO: 2653 - protein, 170 aa, Sus scrofa
GCAPAEEYLCQAFSDVILAVNDVDAEDGGDPNLCSEYVKDIYDYLRQLEEEQAVRPKYLLGREVTGNMRAILIDWLVQVQMKFRLLQETMYMTVSIIDRFMQDNCVPKKMLQLVGVTAMFIASKYEEMYPPEIGDFAFVTDNTYTKYQIRQMEMKILRALNFCLGRPLPL

SEQ ID NO: 2654 - protein, 398 aa, Bos taurus
MALLRRPTVSTDLENNDTGVNSKPKSHVTIRRAVLEEIGNRVTTRAIQVAKKAQNTKVPVPPTKTTNVNKHPKPTASVKPVQMDVLAPKGPSPTPQDISMKEENLCQAFSDALLCKIEDIDTEDWENPQLCSDYVKDIYQYLRQLEVLQSINPHFLDGRDINGRMRAILVDWLVQVHSKFKLLQETLYMCVAVMDRYLQVQPVSRKKLQAVGITALVLASKYEEMFSPNIEDFVYITDNAYTSSQIREMETLILKELKFELGRPLPLHFLRRASKAGEVDVEQHTLAKYLMELTLVDYDMVHYHPSKVAAAASCLSQKVLGQGKWNLKQQYYTGYTESEVLEVMRHMAKNVVRVNENMTKFTAIKNKYASSKLLKISTIPQLNSKAIQELASPLLGRS

SEQ ID NO: 2655 - protein, 282 aa, Mus musculus
MAGNFWQSSHYLQWILDKQDLLKERQKDLKFLSEEEYWKLQIFFTNVIQALGEHLKLRQQVIATATVYFKRFYARYSLKSIDPVLMAPTCVFLASKVEEFGVVSNTRLIAATTSVLKTRFSYAFPKEFPYRMNHILECEFYLLELMDCCLIVYHPYRPLLQYVQDMGQEDVLLPLAWRIVNDTYRTDLCLLYPPFMIALACLHVACVVQQKDARQWFAELSVDMEKILEIIRVILKLYEQWKNFDERKEMATILSKMPKPKPPPNRSSLSDSPLMAGPEAAR

SEQ ID NO: 2656 - protein, 283 aa, Mus musculus
MAGNFWQSSHYLQWILDKQDLLKERQKDLKFLSEEEYWKLQIFFTNVIQALGEHLKLRQQVIATATVYFKRFDARYSLKSIDPVLMAPTCVFLASKVEEFGVVSNTRLIAATTSVLKTRFSYAFPKEFPYRMNHILECEFYLLELMDCCLIVYHPYRPLLQYVQDMGQEDVLLPLAWRIVNDTYRTDLCLLYPPFMIALACLHVACVVQQKDARQWFAELSVDMEKILEIIRVILKLYEQWKNFDERKEMATILSKMPKPKPPPNSEGEQGPNGSQNSSYSQS

SEQ ID NO: 2657 - protein, 304 aa, Mus musculus
MVAPRPLCWLVHLYQGKQYYSMAGNFWQSSHYLQWILDKQDLLKERQKDLKFLSEEEYWKLQIFFTNVIQALGEHLKLRQQVIATATVYFKRFDARYSLKSIDPVLMAPTCVFLASKVEEFGVVSNTRLIAATTSVLKTRFSYAFPKEFPYRMNHILECEFYLLELMDCCLIVYHPYRPLLQYVQDMGQEDVLLPLAWRIVNDTYRTDLCLLYPPFMIALACLHVACVVQQKDARQWFAELSVDMEKILEIIRVILKLYEQWKNFDERKEMATILSKMPKPKPPPNSEGEQGPNGSQNSSYSQS

SEQ ID NO: 2658 - protein, 145 aa, Mus musculus
MAGNFWQSSHYLQWILDKQDLLKERQKDLKFLSEEEYWKLQIFFTNVIQALGEHLKLRQQVIATATVYFKRFYARYSLKSIDPVLMAPTCVFLASKVEEFGVVSNTRLIAATTSVCKCKKFSALRIKFKESSEMYRFVLFLMNHV

SEQ ID NO: 2659 - protein, 298 aa, Rattus norvegicus
MVAPRPLCRLVLLYQAKQYSMAGNFWQSSHYLQWILDKERQKDLKFLSEEEYWKLQIFFTNVIQALGEHLKLRQQVIATATVYFKRFYARYSLKSIDPVLMAPTCVFLASKVEEFGVVSNTSLIAATTSVLKTRFSYASPKEFPYRMNHILECEFYLLELMDCCLIVYHPYRPLLQYVQDMGQEDVLLPLAWRIVNDTYRTDLCLLYPPFMIALACLHVACVVQQKDARQWFAELSVDMEKILEIIRVILKLYEQWKNFDERKEMATILSKMPKPKPPPNSEGEQGPNGSQNSSYSQS

SEQ ID NO: 2660 - protein, 197 aa, Rattus norvegicus
MAPTCVFLASKVEEFGVVSNTRLIAATTSVLKTRFSYAFPKEFPYRMNHILECEFYLLELMDCCLIVYHPYRPLLQYVQDMGQEDVLLPLAWRIVNDTYRTDLCLLYPPFMIALACLHVACVVQQKDARQWFAELSVDMEKILEIIRVILKLYEQWKNFDERKEMATILSKMPKPKPPPNRSSLSDSPLMAGPEAAR

SEQ ID NO: 2661 - protein, 724 aa, Tupaia belangeri chinensis
MEGERKNNNKRWYFTREQLENSPSRRFGVDPDKELSYRQQAANLLQDMGQRLNVSQLTINTAIVYMHRFYMIQSFTQFHRTSVAPAALFLAAKVEEQPKKLEHVIKVAHTCLHPQESLPDTRSEAYLQQVQDLVILESIILQTLGFELTIDHPHTHVVKCTQLVRASKDLAQTSYFMATNSLHLTTFSLQYTPPVVACVCIHLACKWSNWEIPVSTDGKHWWEYVDATVTLELLDELTHEFLQILEKTPNRLKRIRNWRACLAARKTKADDRGADENTSEQTILNMISQSSSDTTIAGLMSMSTSSTSAVPSLPVAEESSSNLSSVEMLQGERWLSSQPPFKLEPTQGHRTSENLALIGVDHSLQQDGSNTFISQKQSSKSVPSAKVSLKEYRAKHAEELAAQKRQLENMEANVKSQYAYAAQNLLSHHDSHSSVILKMPMEGSENPERNFLEKGDKTALKMRIPVAGGDKAASSKPEEIRMRIKVHTAADKHNSVEDSVTKSREHKEKHKTHPSNHHHHNHHSHKHSHSQLPAGTGNKRPGDPKHSSQTSTVAHKTYSLSSSFSSSSSTRKRPPPEETGGAVFDHPAKIAKSTKSSINFPFPPLPTMAQLPGHSSDTSGLPFSQPSCKTRVPHGKLDKGPTGANGHNTTQTIDYQDTVNMLHSLLSAQGVQPTQPPAFEFVHSYGEYLNPRAGGISSRSGNTDKPRPPPLPSEPPPPLPPLPK

SEQ ID NO: 2662 - protein, 279 aa, Anopheles gambiae str. PEST
IFCYSVQLQHSTKMAGNFWQSSHHQQWILDKQDLIRERQHDLKTLSEEEYQKLFMFFANIIQVLGEQLKLRQQVIATATVYFKRFYARNSLKCIDPLLLAPTCILLSSKVEEFGVISNSRLITTCQTVIKNKFSYAYQQEFPYRTNHILECEFYLLENLDCCLIVYQPYRPLLQLMQDIGQEEQLLTLTWRLINDSLRTDVSLLYPPYQIAIGCLQIACVILQKELKSWFAELNVDMDKVQEIARAIVNLFELWKGYDEKKEIQALLEKMPKPKPHPQR

SEQ ID NO: 2663 - protein, 253 aa, Arabidopsis thaliana
MASNFWTSTHYKELKDPEEVNVVHPLDAQRGISVEDFRLIKLHMSNYISKLAQHIKIRQRVVATAVTYMRRVYTRKSLTEYEPRLVAPTCLYLACKAEESVVHAKLLVFYMKKLYADEKFRYEIKDILEMEMKVLEALNFYLVVFHPYRSLPEFLQDSGINDTSMTHLTWGLVNDTYRMDLILIHPPFLITLACIYIASVHKEKDIKTWFEELSVDMNIVKNIAMEILDFYENHRLFTEERVHAAFNKLATNP

SEQ ID NO: 2664 - protein, 259 aa, Arabidopsis thaliana
MAANFWNSSHYKQLLDPEEVDVVHDLDKERGISIDDFKLIKFHMSNHIMKLAQHIKVRQRVVATAITYMRRVYIRKSMVEFEPRLVALTCLYLASKAEESIVQARNLVFYIKRLCNIFFFYPDEYNKYELKDILGMEMKVLEALDYYLVVFHPYRSLSEFLQDAALNDVNMNQITWGIVNDTYKMDLILVHPPYRIALACIYIASVHREKDITAWFEDLHEDMNLVKNIAMEILDFYENYRTITEEKVNSAFSKLALKL

SEQ ID NO: 2665 - protein, 253 aa, Glycine max
MAANFWTSSHYKHLLDQEDVDVVNTLDKEKGITLEDFKLIKMHMANYILKLAQQVKVRQRVVATAVTYMRRVYTRKSMAEYDPRLVAPTCLYLASKAEESTVQARLLVFYIKKLYSDDKYRYEIKDILEMEMKILEALNYYLVVYHPYRSLSPLLQDAGLNDLNMTQLTWGLVNDTYKMDLILVHPPHLIALACIYIASVLREKDTTAWFEELRVDMNVVKNISMEILDFYESNRMFTDERINAALQKLSLRP

SEQ ID NO: 2666 - protein, 164 aa, Glycine max
  unsure (1)..(164): unsure at all Xaa locations
XTAITYFRRVYTRKSMSEYDPRLVAPACLYLASKVEESTVQARLLVFYIKKMCAGSDDKYRFEIKDILEMEMKLLEALDYYLVVYHPYRPLLHLLQDAGVTDLTQFAWGLXVNDTYKMDLILVQPPYMIALACIYIASVLKDKDTTSWFEELHVDXNIVKXXSM

SEQ ID NO: 2667 - protein, 126 aa, Glycine max
  unsure (1)..(126): unsure at all Xaa locations
ARLLVXYIXRLYSDDKYRYEIKDILEMXMXVXXLXXXYXVVYHXYRSLSPLLQDAGLNDLNMTQLTWGLXDXTYKMDLILVHPPXIDCLACIYIASVLREXDTXXWLKTXXXVEXXKXAWSMIXXX

SEQ ID NO: 2668 - protein, 101 aa, Glycine max
  unsure (1)..(101): unsure at all Xaa locations
XYASDSXIIDDDSLFLTWGLVNDTYKMDLILVHPPHLIALACIYIASVLREKDTTAWVEELRVDMNVVKNISMEILDFYESNRMFTDERINAALQKLSLRP

SEQ ID NO: 2669 - protein, 72 aa, Glycine max
MAANFWTSSHYKHLLDQEDVDMVNPLDKEKGITLEDFKLIKMHMANYILKLAQQVKVRQRVVATAITYMRRV

SEQ ID NO: 2670 - protein, 258 aa, Triticum aestivum
  unsure (1)..(258): unsure at all Xaa locations
MAANFWASSHSKQLLDPEDVDLVPAADRERGITTEEFRLVKIHMSSHIWRLAQQVKVRQRVIATAITYFRRVYTRKSMSEYDPRLVAPACLYLASKVEESTVQARLLVFYIKKMCGSDDKYRFEIKDILEMEMKLLEALDYYXLVVYHPYRPLLHLLQDAGVTDLTQFAWGLVNDTYKMDLILVQPPYMIALACIYIASVLKDKDTTSWFEELHVDMNIVKNISMEMLDFYETYKVDPQRGLSDEKISPIMNKLPAKA

SEQ ID NO: 2671 - protein, 200 aa, Triticum aestivum
  unsure (1)..(200): unsure at all Xaa locations
MAANFWTSSHCKQLLDPEDVDLVPAADRERGITPEEFRLIKIHMSFHIWRLAQQVKVRQRVIATAVTYFRRVYTRKSMSDYDPRLVAPTCLYLASKVEESTVQARLLVFYIKKMCGSDDKYRFEIKDILEMEMKLLEALDYYLVVFHPYRPLLQLLQDAGITDLTQFAWGLVNDTYKMDLILIYPPYMIALACIYIASVX

SEQ ID NO: 2672 - protein, 134 aa, Triticum aestivum
  unsure (1)..(134): unsure at all Xaa locations
MAANFWTSSHSKQLLDPEEVDVVPAQDRERGVTPVEFRLVKIHMSFHIWRLAQQVKVRQRVIATAITYFRCVYTRKSMTEYDPRLVAPACLYLASKVEESTVQAXLLVFYIKKMCGSDDKYRFEIKDILEMEMK

SEQ ID NO: 2673 - protein, 101 aa, Triticum aestivum
  unsure (1)..(101): unsure at all Xaa locations
XAGITDLTQFAXWGLVNDTYKMDLILIYPPYMIALACIYIASVXKDKDXTSWFEELRVDMNIVKNXSMEXLDFYDTYKIDPQRGLQEDKIIPVMNKLPSKA

SEQ ID NO: 2674 - protein, 95 aa, Triticum aestivum
  unsure (1)..(95): unsure at all Xaa locations
MAANFWTSSHSKQLLDPEEVDVVPAADRERGVTPVEFRLVKIHMSFHIWRLAQQVKVRQRVIATAITYFRRVYTRKSMTEYDPRLVAPACLYLAX

SEQ ID NO: 2675 - protein, 253 aa, Triticum aestivum
  unsure (1)..(253): unsure at all Xaa locations
MSASYWQSTQCRFWTFTKEQLATMRQKLEEDNAELVRMFPLPQQRHLNIYFNQQLIRLAKRLTIRQQSMATAQVYMKRFYSKVEIRRTNPYLVIATAIYLACKIEESPQHIRLIVTEARQMWGDLVAIDTSKLGECEFFMISEMRSQLIVYQPYRTVVALRSELGLQEDEVQLARSVINDHFMTDLPLLYPPHVIAMVAMLXLALVLRPNNSGPGQNPSGAAAAAGLAAAQXALMRAQGQQTFRGRATDAATX

SEQ ID NO: 2676 - protein, 72 aa, Triticum aestivum
  unsure (1)..(72): unsure at all Xaa locations
MAANFWTSWHSKHLLDPEEVYVVPAQDRERCVTPVEFRLVKIHMFFHIWRVGPQVKXVRQRVXLTVFTYLEX

SEQ ID NO: 2677 - protein, 257 aa, Zea mays
MAANFWTSSHCKQLLDPEDVDLVPAADRERGITPEEFRLIKIHMSFHIWRLAQQVKVRQRVVATAIAYFRRVYTRKSMSDYDPRLVAPTCLYLASKVEESTVQARLLVFYIKKMCGSDDKYRFEIKDILEMEMKLLEALDYYLVVFHPYRPLLQLLQDAGITDLTQFAWGLVNDTYKMDLILIYPPYMIALACIYIASVLKDKDTTAWFEELRVDMNIVKNISMEILDFYDTYKIDPQRGIPEDKISPVMNKLPAKA

SEQ ID NO: 2678 - protein, 257 aa, Zea mays
MAANFWTSSHSKQLLDPEEVDVVPAQDRERGVTPVEFRLVKIHMSFHIWRLAQQVKVRQRVIATAITYFRCVYTRKSMTEYDPRLVAPACLYLASKVEESTVQARLLVFYIKKMCGSDDKYRFEIKDILEMEMKLLEALDYYLVLLHPARPPPRVRQDAGITDLTQFAWGLVNDTYKMDLILIYPPYMIALACIYIASVLKDKDTTAWFEELRVDMNIVKNISMEILDFYDTYKIDPQRGIPEDKISPVMNKLPAKA

SEQ ID NO: 2679 - protein, 258 aa, Zea mays
  unsure (1)..(258): unsure at all Xaa locations
PVDPAFLSSHCKQLRGGGGGDLVPAGGRERGITPEEFRLIKIHMSFHIWGLAQLVXVRLRVVATAMAXAFRRVYTRKSMSDYGPRLVAPTGVYLASKVEESTVQARLLVFYIKKMCGSDDKYRFEIKDILEMEMKLLEALDYYLVLPHPARPPPRVRQDAGITDLTQFAWGLVNDTYKMDLILIYPPYMIALACIYIASVLKDKDTTAWFEELRVDMNIVKNISMEILDFYDTYKIDPQRGIPEDKISPVMNKLPAKA

SEQ ID NO: 2680 - protein, 237 aa, Zea mays
  unsure (1)..(237): unsure at all Xaa locations
PIPPAGLLSGKRRSRXWRPTSGRRRTDIWRLAQQVKVRQRVIATAITYFRCVYTRKSMTEYDPRLVAPACLYLASKVEESTVQARLLVFYIKKMCGSDDKYRFEIKDILEMEMKLLEALDYYLVVYHPYRPLLQLLQDAGITDLTQFAWGLVNDTYKMDLILIYPPYMIALACIYIASVLKDKDTTSWFEELRVDMNIVKNISMEILDFYDTYKIDPQRGIPEDKISPVMNKLPAKA

SEQ ID NO: 2681 - protein, 153 aa, Zea mays
  unsure (1)..(153): unsure at all Xaa locations
HACYILSLACLPRCDLCDLKLLLFQRTRERVVATAIAYFRRVYTRKSMSDYDPRLVAPTCLYLASKXSDDKYRFEIKDILEMEMKLLEALDYYLVVFHPYRPLLQLLQDAGITDLTQFAWGLVNDTYKMDLILIYPPYMIALACIYIAXVLKD

SEQ ID NO: 2682 - protein, 208 aa, Dreissena polymorpha
SSHYQQWLLDKQDLARERQADLKVMSEDEYEKCMIFFANFIQALGEQSKVRQQVIATATVYFKRFYARNSLKCIDPWLMAPTCIFLASKVEEFGLISNSRLITTCQTVVKNKFSHAYPQEYPYRSNNVLECEFYLLEMMDCCLVVFHPYRPLVQYVSDISSTDDSILPLAWRIVNDSLRTDVCLLYPPYLIALSALHIACVIQQKDLK

SEQ ID NO: 2683 - protein, 228 aa, Schizosaccharomyces pombe
MAANYWASSQLTQLFLSTDLESLEPTCLSKDTIYQWKVVQTFGDRLRLRQRVLATAIVLLRRYMLKKNEEKGFSLEALVATCIYLSCKVEECPVHIRTICNEANDLWSLKVKLSRSNISEIEFEIISVLDAFLIVHHPYTSLEQAFHDGIINQKQLEFAWSIVNDSYASSLCLMAHPHQLAYAALLISCCNDENTIPKLLDLIKSTDAFKVILCVQRIISIYYFEDIE

SEQ ID NO: 2684 - protein, 323 aa, Saccharomyces cerevisiae
MSGSFWTSTQRHHWQYTKASLAKERQKLWLLECQLFPQGLNIVMDSKQNGIEQSITKNIPITHRDLHYDKDYNLRIYCYFLIMKLGRRLNIRQYALATAHIYLSRFLIKASVREINLYMLVTTCVYLACKVEECPQYIRTLVSEARTLWPEFIPPDPTKVTEFEFYLLEELESYLIVHHPYQSLKQIVQVLKQPPFQITLSSDDLQNCWSLINDSYINDVHLLYPPHIIAVACLFITISIHGKPTKGSSLASAASEAIRDPKNSSSPVQIAFNRFMAESLVDLEEVMDTIQEQITLYDHWDKYHEQWIKFLLHTLYLRPASAI

SEQ ID NO: 2685 - protein, 355 aa, Neurospora crassa
MAANYWESTQRKHWLFTKDELAAMRAKLEAEEPNLVASFPLPQLRHLNIYFNQQSPTYFCFTLEINRLGKRMGLRQQALATAQVYIKRFYTKVEIRRTNPHHVLVTALYLACKMEECPQHIRLMANEARGFWPTDFQSQTEVARIGECEFYLISEMSSHLIVHSPYRTLTSLQGELGLAQEDVNLAWSVINDHYMTDLPLLHPPHVIALTAILLALVLRQDPSGRLPGTAASASGLVAASAALAQAQAQAQARAAMMAGGGQTVPGLTPQSSSGLQAMLPPQSPAGEGPAEGNKNPRMAKVHRFAAWLSDSNIDIEAMVDCTQELISFYECHEQYNDKNTREQINRFVKARGLDK

SEQ ID NO: 2686 - protein, 327 aa, Caenorhabditis elegans
MALNFWKSSHCQQWIFDKTEIWKQRAEDMKIYNEEEYNRLNIFWANFITAVATEGAHSQANVGCKLRQQVIATAIIYFKRFYLRQSFRDMCPFLVASTALFLACKVEEHTTLSVSSFLKNTAIVLPKRWGVTFETTSTKNGVVYDSEFILVEILDCCLVVHHASRPMCPPPPPREIFDKNWNSGIFLIFFLNFLVKKMENCGIFSEKLENFEFFNLEAIEAQCQKVANDSLRCDVSLIFPPHVIGLSSIMVAMELMGRGEELEAWLVEVDTDFEKVTDCVEQIYKMYTLWKSFDEKEEVKKLMAKLPKPNQQPPPQQQHQHQQGYHL

SEQ ID NO: 2687 - protein, 267 aa, Drosophila melanogaster
MAGNFWQSSHSQQWILDKPDLLRERQHDLLALNEDEYQKVFIFFANVIQVLGEQLKLRQQVIATATVYFKRFYARNSLKNIDPLLLAPTCILLASKVEEFGVISNSRLISICQSAIKTKFSYAYAQEFPYRTNHILECEFYLLENLDCCLIVYQPYRPLLQLVQDMGQEDQLLTLSWRIVNDSLRTDVCLLYPPYQIAIACLQIACVILQKDATKQWFAELNVDLDKVQEIVRAIVNLYELWKDWKEKDEIQMLLSKIPKPKPPPQR

SEQ ID NO: 2688 - protein, 498 aa, Danio rerio
MSLGMLSPHLNTPPPNNQGILIGDKVYSEVFLAIDNSIIPEDRLSTTPSMLDGLDHETETDLRILGCERIQSAGILLRLPQVAMATGQVIFQRFFFSKSFVKHNFEIVAMACVNLASKIEESPRRVRDVINVFHHLKQGKGKKSTPLILDQNYINTKNQVIKAERRILKELGFCVHVKHPHKIIVMYLQVLECEKNQMLVQTAWNYMNDALRTSAFVRFEPETIACACIYLAARVLQIPLPSKPHWFLLFGATKEDIKEICINTMKLYSREKPHSEQLERQVEKRKIFLEEARLKARGQNPNGTPALASINGFSPASKPSSPRDVKMDDKSPNSKLKEPENRQLFAKSPLNGSIKKEDGKVFQNGKNHSRSRSRSTSRSPHRHRRSHSGTYSSHSSHSPSPRQKARRPSPISQLRTDRDRPSETSRHSNKRRRSRSRSRSNSRERVRDRDHIKHKQERSGSGHHWDHRDRERDRSRDHGRNKRQSRSHSGHSHSRHRR

SEQ ID NO: 2689 - protein, 630 aa, Danio rerio
MAACRGSSSKWFFTREQLETTPSRRCGVEPDRELSYRQQAANLIQDMGQRLNVSQLTINTAIVYMHRFYMYHSFTKFHRNIISPTTLFLAAKVEEQPRKLEHVIKVAHACLNPQEPPLDTKSNAYLQQAQELVILETIVLQTLGFEITIEHPHTDVVKCSQLVRASKDLAQTSYFMATNSLHLTTFCLQHKPTVIACVCIHLACKWSNWEIPVSTDGKHWWEYVDNSVTLELLDELTHEFLQILEKTPSRLKRIRNWRATQAAKKPKSDNQGSDSSSLAGSSLTQDPSLMDTLPGVSTSTAFSKGSTSFPVCLSGNSSSSLSLDSIANMQGTSYTYTAPSDWPQDQLRSDPYSVKQLPSHSSMHPQRPDKSADLNPTKHEHKVSGGTKHQATTYPPHAAPTQKMSLDKYREKHAAELAVQKRKQEQQNVETEVYGATTQTDHRKHLPHLSHGQQGAGVTTASPLKIKLPGQDKIQDKCEKGSSLKLRLPVPSQSEKGGSSKEELKMKIKVSSERHSSSDEGAAKSKHSSPLVSKEKHRDHSAHRHHHKHGHSHTHTHSGNGRSSLEVPTTGSVADGPSSASSSSRKRVNPEASHNHHSKKNKSSKSGAGGLRTSQHPSETGQETSGESWP

SEQ ID NO: 2690 - protein, 569 aa, Danio rerio
MMAAVQRGSSKWLFTREQFENTPSRRCGVEPDRELSYRQQAANLIQDMGQRLNVSQLTINTAIVYMHRFYMLNSFTKFHRNIISPTTLFLAAKVEEQPRKLEHVIKVAHACLNPHDPPLDSKSSAYLQQAQELVLLETIVLQTLGFEITIEHPHTDVVRCTQLVRASKDLAQTSYFMATNSLHLTTFCLQHKPTVVACVCIHLACKWSNWEIPVSSDGKHWWEYVDRAVTLQLLDDLTHEFLQILEKTPSRLKRIRNWRATQAAKKPKLDNQSLDGSFQSLNQDTSLMSSMCDLGAGMYSDPSTSFPLDGSSLSLNGLSNLQSSAFGFPAPISQTADAFLALQAAPTSKHGHSSATLAPQKLTLEKYREKQTELEQRRRHEEEDGDQHRKHGHLTSEPSTSIRLKYNQQQVLERPSKSGSLKRRHPSSSENGSASQEELKMKIKVSSDSSGSSKSRHSPLSSREKHREHSSHKTARHDSSHSHGSHHHHHHHHHHSSKSHRSSKSHSSSASISVNQAIGQPQLAKIDRRMGEGHGSEPNAALINNGPHMDYEDTFNMLDSLLNAQNFQI

SEQ ID NO: 2691 - protein, 679 aa, Danio rerio
LSFSVMAASFPSPSQNNNKWYFTREQIENSPSRRAGLDPDKELLYRQQAANLLQDMGQRLNVSQLTINTAIVYMHRFYMVQSFTRFHRNVIAPAALFLAAKVEEQPRKLEHVIKVTHACLNPQDPSPDTRSDTYLQQAQDLVILESIILQTLGFEITIDHPHTHVVKCTQLVRASKDLAQTSYFMATNSLHLTTFCLQYSPPIVACVCIHLACKWSNWEIPVSTDGKHWWQYVDPTVTLELLDELTHEFLQILEKTPSRLKRTRNWKAAGQTAKKSKVQDGDQSEAIMNMISMSSSDSTLAGLTSLSAPPTGSSMDSCADEHSAAASAQHWQPPSKEQPTANELHAPAKVSLSEYRAKHADELAAQKRELKNMEASVKQGYATAAQALMNQQRKDKHHHHQQTSSSDTNNPSPIVLKIPLDERSERSSIKMRLPVPGQSGGGHSHSSGSSSRGSDQDIKVRIRVPDRRGGSGEDGKSREKHRERSNHHHHHHHHHHHSSSSSAGSLSASSSSSSAQKHSAGSSGSSKKLSGDSVRTSSSSMSRKRTHMPDPSSSSTHSSSKVSKSSRNSFQLPTLPGLPSHVMPDILPSLHHQGNYSHSKTDKADTNGHNAAGQSNEYQDTFDMLNSLLSAQGVQPAQPQIFDYRSQYGEFRYSSGARGGAQPPPLPSEPPPPLPPLPK

SEQ ID NO: 2692 - protein, 105 aa, Gallus gallus
MAGNFWQSSHYLQWILDKQDLLKERQKDLKFLSEEEYWKLQIFFTNVIQALGEHLKLRQQVIATATVYFKRFYARYSLKSIDPVLMAPTCVFLASKVEDKTSAPY

SEQ ID NO: 2693 - protein, 94 aa, Gallus gallus
LQWILDKQDLLKERQKDLKFLSEEEYWKLQIFFTNVIQALGEHLKLRQQVIATATVYFKRFYARYSLKSIDPVLMAPTCVFLASKVEDKTSAPY

SEQ ID NO: 2694 - protein, 725 aa, Pan troglodytes
MEGERKNNKRWYFTREQLENSPSRRFGVDPDKELSYRQQAANLLQDMGQRLNVSQLTINTAIVYMHRFYMIQSFTQFPGNSVAPAALFLAAKVEEQPKKLEHVIKVAHTCLHPQESLPDTRSEAYLQQVQDLVILESIILQTLGFELTIDHPHTHVVKCTQLVRASKDLAQTSYFMATNSLHLTTFSLQYTPPVVACVCIHLACKWSNWEIPVSTDGKHWWEYVDATVTLELLDELTHEFLQILEKTPNRLKRIWNWRACEAAKKTKADDRGTDEKTSEQTILNMISQSSSDTTIAGLMSMSTSTTSAVPSLPVSEESSSNLTSVEMLPGKRWLSSQPSFKLEPTQGHRTSENLALTGVDHSLPQDGSNAFISQKQNSKSVPSAKVSLKEYRAKHAEELAAQKRQLENMEANVKSQYAYAAQNLLSHHDSHSSVILKMPIEGSENPERPFLEKADKTALKMRIPVAGGDKAASSKPEEIKMRIKVHAAADKHNSVEDSVTKSREHKEKHKTHPSNHHHHHNHHSHKHSHSQLPVGTGNKRPGDPKHSSQTSNLAHKTYSLSSSFSSSSSTRKRGPSEETGGAVFDHPAKIAKSTKSSSLNFSFPSLPTMAQMPGHSSDTSGLSFSQPSCKTRVPHSKLDKGPTGANGHNTTQTIDYQDTVNMLHSLLSAQGVQPTQPTAFEFVRPYSDYLNPRAGGISSRSGNTDKPRPPPLPSEPPPPLPPLPK

SEQ ID NO: 2695 - protein, 283 aa, Homo sapiens
MAGNFWQSSHYLQWILDKQDLLKERQKDLKFLSEEEYWKLQIFFTNVIQALGEHLKLRQQVIATATVYFKRFYARYSLKSIDPVLMAPTCVFLASKVEEFGVVSNTRLIAAATSVLKTRFSYAFPKEFPYRMNHILECEFYLLELMDCCLIVYHPYRPLLQYVQDMGQEDMLLPLAWRIVNDTYRTDLCLLYPPFMIALACLHVACVVQQKDARQWFAELSVDMEKILEIIRVILKLYEQWKNFDERKEMATILSKMPKPKPPPNSEGEQGPNGSQNSSYSQS

SEQ ID NO: 2696 - protein, 303 aa, Homo sapiens
MVAPRPLRRVVLFYQGKLCSMAGNFWQSSHYLQWILDKQDLLKERQKDLKFLSEEEYWKLQIFFTNVIQALGEHLKLRQQVIATATVYFKRFYARYSLKSIDPVLMAPTCVFLASKVEEFGVVSNTRLIAAATSVLKTRFSYAFPKEFPYRMNHILECEFYLLELMDCCLIVYHPYRPLLQYVQDMGQEDMLLPLAWRIVNDTYRTDLCLLYPPFMIALACLHVACVVQQKDARQWFAELSVDMEKILEIIRVILKLYEQWKNFDERKEMATILSKMPKPKPPPNSEGEQGPNGSQNSSYSQS

SEQ ID NO: 2697 - protein, 727 aa, Equus caballus
MEGERKNNNKRWYFTREQLENSPSRRFGLDPDKELSYRQQAANLLQDMGQRLNVSQLTINTAIVYMHRFYMIQSFTQFHRNSVAPAALFLAAKVEEQPKKLEHVIKVAHACLHPQESLPDTRSEAYLQQVQDLVILESIILQTLGFELTIDHPHTHVVKCTQLVRASKDLAQTSYFMATNSLHLTTFSLQYTPPVVACVCIHLACKWSNWEIPVSTDGKHWWEYVDATVTLELLDELTHEFLQILEKTPNRLKRIRNWRACQAAKKTKADDRGTDENTSEQTILNMISQSSSDTTIAGLMSMSTSSTTSTVPSLPTTEESSSNLSGVEMLQGERWLSSQPPFKLEPAQGHRTSENLALIGVDHSLQQDGSNAFISQKQNSSKSVPSAKVSLKEYRAKHAEELAAQKRQLENMEANVKSQYAYAAQNLLSHHDSHSSVILKMPIEGSENPERPFLEKPDKTALKMRIPVASGDKAASSKPEEIKMRIKVHAAPDKHNSIDDSVTKSREHKEKHKTHPSNHHHHHNHHSHKHSHSQLPAGTGNKRPGDPKHSSQTSTLAHKTYSLSSSFSSSSSSRKRGPPEETGGALFDHPAKIAKSTKSSSINFFPPLPTMAQLPGHSSDTSGLPFSQPSCKTRVPHMKLDKGPTGANGHNTTQTIDYQDTVNMLHSLLHAQGVQPTQPPALEFVHSYGEYLNPRAGGMPSRSGNTDKPRLPPLPSEPPPPLPPLPK

SEQ ID NO: 2698 - protein, 727 aa, Equus caballus
MEGERKNNNKRWYFTREQLENSPSRRFGLDPDKELSYRQQAANLLQDMGQRLNVSQLTINTAIVYMHRFYMIQSFTQFHRNSVAPAALFLAAKVEGQPKKLEHVIKVAHACLHPQESLPDTRSEAYLQQVQDLVILESIILQTLGFELTIDHPHTHVVKCTQLVRASKDLAQTSYFMATNSLHLTTFSLQYTPPVVACVCIHLACKWSNWEIPVSTDGKHWWEYVDATVTLELLDELTHEFLQILEKTPNRLKRIWNWRACEAAKKTKADDRGTDEKTSEQTILNMISQSSSDTTIAGLMSMSTSSTTSTVPSLPTTEESSSNLSGVEMLQGERWLSSQPPFKLEPAQGHRTSENLALTGVDHSLQQDGSNAFISQKQNSSKSVPSAKVSLKEYRAKHAEELAAQKRQLENMEANVKSQYAYAAQNLLSHHDSHSSVILKMPIEGSENPERPFLEKPDKTALKMRIPVASGDKAASSKPEEIKMRIKVHAAPDKHNSIDDSVTKSREHKEKHKTHPSNHHHHHNHHSHKHSHSQLPVGTGNKRPGDPKHSSQTSTLAHKTYSLSSSFSSSSSSRKRGPPEETGGALFDHPAKIAKSTKSSSINFFPPLPTMAQLPGHSSDTSGLPFSQPSCKTRVPHMKLDKGPTGANGHNTTQTIDYQDTVNMLHSLLHAQGVQPTQPPTLEFVHPYGEYLNPRAGGIPSRSGNTDKPRPPPLPSEPPPPLPPLPK

SEQ ID NO: 2699 - protein, 726 aa, Capra hircus
MEGERKNNNKRWYFTREQLENSPSRRFGLDPDKELSNRQQAANLLQDMGQRLNVSQLTINTAIVYMHRFYMIQSFTQFHRNSVAPAALFLAAKVEEQPKKLEHVIKVAHTCLHPQESLPDTRSEAYLQQVQDLVILESIILQTLGFELTIDHPHTHVVKCTQLVRASKDLAQTSYFMATNSLHLTTFSLQYTPPVVACVCIHLACKWSNWEIPVSTDGKHWWEYVDATVTLELLDELTHEFLQILEKTPNRLKRIWNWRAWQADRKTKADDRGADENSSEQTILNMISQSSSDTTIAGLMSMSASSATSAVPSLPATEDSKSNLSNEEMLSSERWLPSHPPFKVEPAQGYRKSENLALGADHSLQQDGSNAFVSQKQNSKSVPSAKVSLKEYRAKHAEELAAQKRQLENMEANVKSQYAYAAQNLLSHHDSHSSVILKMPIEGSENPERPFLEKTDKTALKMRIPMTGGDKAASTKPEEIKMRIKVHTAADKHTSVDDSVTKNREHKEKHKTHPSNHHHHHNHHSHKHSHSQLPAGTGNKRLGDPKYSSQTSTLAHKPYSLSGSFSSSSSSRKRPLPEETGGAVYDHSTKTGKSAKSSSIDFSFPPLPTMAQLPGHSSDTSGLHFSQPSCKTRVPHMKLDKSSTGANSHNTPQTTDYQDTVNMLNSLLNAQGVQPTQPPAFEYVHSYGEYMNPRAGGMSSRSGNTDKPRPPPLPSEPPPPLPPLPK

SEQ ID NO: 2700 - protein, 726 aa, Capra hircus
MEGERKNNNKRWYFTREQLENSPSRRFGLDPDKELSNRQQAANLLQDMGQRLNVSQLTINTAIVYMHRFYMIQSFTQFHRNSVAPAALFLAAKVEEQPKKLEHVIKVAHTCLHPQESLPDTRSEAYLQQVQDLVILESIILQTLGFELTIDHPHTHVVKCTQLVRASKDLAQTSYFMATNSLHFTTFSLQYTPPVVACVCIHLACKWSNWEIPVSTDGKHWWEYVDATVTLELLDELTHEFLQILEKTPNRLKRIWNWRAWQADRKTKADDRGADENSSEQTILNMISQSSSDTTIAGLMSMSASSATSAVPSLPATEDSKSNLSNEEMLSSERWLPSHPPFKVEPAQGYRKSENLALGADHSLQQDGSNAFVSQKQNSKSVPSAKVSLKEYRAKHAEELAAQKRQLENMEANVKSQYAYAAQNLLSHHDSHSSVILKMPIEGSENPERPFLEKTDKTALKMRIPMTGGDKAASTKPEEIKMRIKVHTAADKHTSVDDSVTKNREHKEKHKTHPSNHHHHHNHHSHKHSHSQLPAGTGNKRLGDPKYSSQTSTLAHKPYSLSGSFSSSSSSRKRPLPEETGGAVYDHSTKTGKSAKSSSIDFSFPPLPTMAQLPGHSSDTSGLHFSQPSCKTRVPHMKLDKSSTGANSHNTPQTTDYQDTVNMLNSLLNAQGVQPTQPPAFEYVHSYGEYMNPRAGGMSSRSGNTDKPRPPPLPSEPPPPLPPLPK

SEQ ID NO: 2701 - protein, 430 aa, Mus musculus
MALRVTRNTKINAENKAKVSMAGAMRVPVTVTAASKPGLRPRTALGDIGNKVSEELQARVPLKREAKTLGTGKGTVKALPKPVEKVPVCEPEVELAEPEPEPELEHVREEKLSPEPILVDNPSPSPMETSGCAPAEEYLCQAFSDVILAVSDVDADDGADPNLCSEYVKDIYAYLRQLEEEQSVRPKYLQGREVTGNMRAILIDWLIQVQMKFRLLQETMYMTVSIIDRFMQNSCVPKKMLQLVGVTAMFIASKYEEMYPPEIGDFAFVTNNTYTKHQIRQMEMKILRVLNFSLGRPLPLHFLRRASKVGEVDVEQHTLAKYLMELSMLDCDMVHFAPSQIAAGAFCLALKILDNGEWTPTLQHYLSYSEDSLLPVMQHLAKNVVMVNCGLTKHMTVKNKYAASKHAKISTLAQLNCTLVQNLSKAVTKA

SEQ ID NO: 2702 - protein, 386 aa, Mus musculus
MALRVTRNTKINTENKAEVSMAGAKRVPVTVTAASKPGPRPRTALGDIGNKVSEELQARVPLKREAKTLGTGKGTVKALPKPVEKVPVCEPGVELAEPEPEPELEHVREEKLSPEPILVDNPSPSPMETSGCAPAEEYLCQAFSDVILAVSDVDADDGADPNLCSEYVKDIYAYLRQLEEEQSVRPKYLQGREVTGNMRDILIDWLIQVQMKFRLLQETMYMTVSIIDRFMQNSCVPKKMLQLVGVTAMFIASKYEEMYPPEIGDFAFVTNNTYTKHQIRQMEMKILRVLNFSLGRPLPLHFLRRASKVGEVDVEQHTLAKYLMELSMLDYDMVHFVPSQIAAGAFCLALESLDNGEWTQLCSTTYPTRKTPCFLLCSTWLRIESW

SEQ ID NO: 2703 - protein, 430 aa, Mus musculus
MALRVTRNTKINAENKAKVSMAGAKRVPVTVTAASKPGLRPRTALGDIGNKVSEELQATVPLKREAKTLGTGKGTVKALPKPVEKVPVCEPEVELAEPEPEPELEHVREEKLSPEPILVDNPSPSPMETCGCAPAEEYPCQAFSDVILAVSDVDADSGADPNLCSEYVKDIYAYLRQLEEEQSVRPKYLQGREVTGNMRAILIDWLIQVQMKFRLLQETMYMTVSIIDRFMQNSCVPKKMIQLVGVTAMFIASKYEDMYPPEIGDFAFVTNNTYTKHQIRQMEMKILRVLNFSLGRPLPLHFLRRASKVGEVDVRQHTLAKYLMELSMLDYDMVHFAPSRAFSGAFCLALEILDNGEWTPTLQHYLSYSEDSLLPVMQHLAKNVVMVNCGLTKHMTVKNKYAASKHAKISTLAQLNCTHVQNLSKAVTKA

SEQ ID NO: 2704 - protein, 328 aa, Mus musculus
MAGAKRVPVTVTAASKPGLRPRTALGDIGNKVSEELQARVPLKREAKNVRYWKSPMETSGCAPAGEYLCQAFSDVILAVSDIEAEDGADPNLCSEYANDIYAYFRQLEEEQSVRPKYLQGGEVTGNMRAILFDWLIQVQMKFRLLQETMYMTVSMIDRFMQNSCVPKKVLQLVGVTAMFIASKYEEMYPPETGDFAFVINNMYTKHQIRQMEMKILRVLNFSLGRPLPLHFLRRASKIGEVDAEQHTLAKYLMDYDMVHFAPSQIAAGAFCLALESLDNGEWTPTLQHYLSYTEDFLLPVMQHLAKNVVMVNRGLTKHMTVKNQVCSI

SEQ ID NO: 2705 - protein, 192 aa, Glycine max
  unsure (1)..(192): unsure at all Xaa locations
XVSYVGPPPVPVVEDLVLISDRAYTKGQILEMEKLILNTLQFNMSVPTPYVFMKRFLKAADADKQLELASFFMLELCLVEYQMLDYRPSHLAAAAVYTAQCAINRCQHWTKVCESHSRYTSDQLLECSRMMVDFHQKAGTSKLTGVHRKYSTYKFGCVAKILPAQFLLESGGTXASFRCKLVESTYSTGWIF

SEQ ID NO: 2706 - protein, 449 aa, Oryza sativa (japonica cultivar-group)
MATRSQNVAAAPQPPQNRGNVAALGKQKAVVAGRPDAKNRRALGEIGNVMNVRLPEGKPLQQAPAGRTANFGAQLLKNAQANAAANKQNAVAPAAVARPAQRQARKAPVKPAPPPPEHVIEISSDSDQSMRQQSEGSASSVRKCSRKKVINTLTSVLTARSKVACGITDKPREVIEDIDKLDGDNELAVVDYIEDIYKFYKVAENECRPCDYIDTQVEINSKMRAILADWIIEVHHKFELMPETLYLSMYVIDRYLSMQQVQRRELQLVGVSAMLIACKYEEIWAPEVNDFILISDSAYTREQILAMEKGILNKLQWNLTVPTAYVFIMRYLKAGASADNKSDKEMEHMAFFFAELALMQYGLVASLPSKVAASAVYAARLTLKKSPLWTDTLKHHTGFTESQLLDSAKLLVTSHSTAPESKLRVVYKKYSSEQLGGVALRSPAVELCK

SEQ ID NO: 2707 - protein, 443 aa, Zea mays
MAARAADENRRPAAGKPAPGVRDMASRRALTDIKNLVGAAPYPCAVAKKPMLQKSKRDEKQPALASSRPMTRKFAASLASKGQPECQPIVADPAEVCQQKESVGDGTVDIDVELCDSDIDMGATENKDIMNEDELLMDIDSADSGNPLAATEYVKELYTFYRENEAKSCVNPDYMSSQQDINSKMRAILIDWLIEVHYKFELMDETLFLTVNVIDRFLEKEVVPRKKLQLVGITALLLACKYEEVSVPVVEDLVLISDRAYTKGQILEMEKLILNTLQFNMSVPTPYVFMKRFLKAADADKQLELASFFMLELCLVEYQMLNYRPSHLAAAAVYTAQCAINRCQHWTKVCESHSRYTGDQLLECSRMMVDFHQKAGTGKLTGVHRKYSTYKFGCAAKILPAQFMLESGGTGCNLIESPCFNWVGFFFKVFSILPVNKMQKTSC

SEQ ID NO: 2708 - protein, 429 aa, Zea mays
MAARAADENRRPGVGRPAPCVRDMGSRRALTDIKNLVGVAPNPCAVAKKPVLQKSRKDEKKTALPSSRPMTRKFVASLASKEQPKCQPTGADPEPGVDQRKEPIVDGTVDIDVELGEPVDDSDVDMGDETDQDESLMDIDSADSGNPLAATEYVEELYKFYRENEAKSCVNPDYMSSQQDINAKMRAILIDWLIEVHYKFELMDETLFLTVNVIDRFLEKEVVPRKKLQLVGITALLLACKYEEVSVPVVEDLVLISDRAYTKGQILEMEKLILNTLQFNMSVPTPYVFMKRFLKAADADKQFELVSFFMLELCLVEYQMLNYRPSHLAAAAVYTAQCAINRCQQWTKVCESHSRYTGDQLLECSRMMVDFHQKAGTGKLTGVHRKYSTYKFGCAAKILPAQFMLESGGTGCNLIESPCFNWVGFFLRF

SEQ ID NO: 2709 - protein, 424 aa, Zea mays
MAARAADENRRPAAGKPAPGVRDMASRRALTDIKNLVGAAPYPYAVAKKPMLQKSKRDEKQPALASSRPMTRKFAASLASKGQPECQPIVADPEPEVCQQKESVGDGTVDIDVELYELVDGSDSDIDMGATENKDIMNEDELLMDIDSADSGNPLAATEYVKELYTFYRENEAKSCVRPDYMSSQQDINSKMRAILIDWLIEVHYKFELMDETLFLMVNIIDRFLEKEVVPRKKLQLVGVTAMLLACKYEEVSVPVVEDLVLISDRAYTKGQILEMEKLILNTLQFNMSVPTPYVFMKRFLKAADADKQLELASFFMLELCLVEYQMLNYRPSHLAAAAVYTAQCAINRCQHWTKVCESHSRYTSDQLLECSRMMVDFHQKAGTSKLTGVHRKYSTYKFGCVAKILPAQFLLESGGTPPPSGAN

SEQ ID NO: 2710 - protein, 421 aa, Zea mays
  unsure (1)..(421): unsure at all Xaa locations
MAARAADENRRPGVGRPAPCVRDMGSRRALTDIKNLVGVAPNPCAVAKKPVLQKSRRDEKKTALPSSRPMTRKFVASLASKEQPECQPTRADQRKEAIGDGTVDIDVELDEPVEDSDSDIDMGDETENNMNQDESLMDIDSADSGNPLAATEYVEELYKFYRENEAKSCVNPDYMSSQQDINSKMRAILIDWLIEVHYKFELMDETLFLTVNVIDRFLEKEVVPRKKLQLVGXATALLLXACXYHEVSVPVVEDLVLISDRAYTKGQILEMEKLILNTLQFNMSVPTPYVFMKRFLKAADADKQLELASFFMLELCLVEYQMLNYRPSHLAAAAVYTAQCAINRCQHWTKVCESHSRYTSDQLLECSRMMVDFHQKAGTSKLTGVHRKYSTYKFGCVAKILPAQFLLESGXGHRLLQVQTS

SEQ ID NO: 2711 - protein, 216 aa, Encephalitozoon cuniculi
MEKKRPEMLMKRVFQDITNVNRKNIKLTIHKSSHRRKLVQWLYEVTDDFGYSQVTFSTAVFILDRYTEARGLDLEKYQLVGISALFLSAKIEEKWCKAVDDYVHVTDGACSGKEILDKEIEMLEVFDFNMMLRLPHSFLQERYLEKASDKYTMKQRQEIFFCAFSYVIEKNICGSSMYWIYLEGVKEAEKVLSGCEIDTGLRFYLENNRKIKSIFM

SEQ ID NO: 2712 - protein, 404 aa, Asterina pectinifera
MSLRVRGTTNILGTAKLGMLNSENADARMNGKMVTRATTKTIKSTLGTRGALENISNVAKNNVQAAAKKEIKQKRGMTKSKATSSLQSVIGLHVEPVEKVQSPEPMDMSEVSNALEAFSQNILEMGVDDIDKDDHENPQLCSEYVNDIYHYMRHLEREFKVRTDYMAMQEITERMRTILIDWLVQVHLRFHLLQETLFLTIQILDRYLEVQAVSKTKLQLVGVTSMLIAAKYEEMYPPEIGDFVYITDNAYSKAQIRAMECNILRKLDFNLGKPLCIHFLRRCSKAGGVDGHKHTLSKYIMELTLPEYSFVKYDPSEIAAAALCLSTKILDEDMEWNKTLVHYSAYSEGHLAPIVQKMAVLLNNAPKSKFQAVRKKYASSKFMSISSSQELKSTVITDLADENC

SEQ ID NO: 2713 - protein, 409 aa, Arbacia punctulata
MALGTRNMNMNLHGESKHTFNNENVSARLGGKSIAVQKPAQRAALGNISNVVRTAQAGSKKVVKKDTRQKAMTKTKATSSLHAVVGLPVEDLPTEMRSTSPDVLDAMEVDQAIEAFSQQLIALQVEDIDKDDGDNPQLCSEYAKDIYLYLRRLEVEMMVPANYLDRQETQITGRMRLILVDWLVQVHLRFHLLQETLFLTVQLIDRFLAEHSVSKGKLQLVGVTAMFIASKYEEMYPPEINDFVYITDNAYTKAQIRQMEIAMLKGLKYKLGKPLCLHFLRRNSKAAGVDAQKHTLAKYLMEITLPEYSMVQYSPSEIAAAAIYLSMTLLDPETHSSWCPKMTHYSMYSEDHLRPIVQKIVQILLRDDSASQKYSAVKTKYGSSKFMKISGIAQLDSSLLKQIAQGSNE

SEQ ID NO: 2714 - protein, 264 aa, Danio rerio
LCQAFSDVLLNIKDVDADDYDNPMLCSEYVKDIYLYLRQLETEQAVRPKYLAGKEVTGNMRAILIDWLVQVQIKFRLLQETMYMTVAIIDRFLQDHPVPKKQLQLVGVTAMFIASKYEEMYPPEIADFAFVTDRAYTTSQIREMEMKVLRVLNFGFGRPLPLQFLRRASKIGDVTAEHHTLAKYFLELTMVDYDMVHYPPSQMASAAYALTLKVFNCGDWTPTLQHYMGYTEDELVPVMQHIAKNVVRVNEGLSKHLAVKNKYS

SEQ ID NO: 2715 - protein, 397 aa, Xenopus laevis
MSLRVTRNMLANAENNVKTTLAGKRVVATKPGLRPRTALGDIGNKAEVKVPTKKELKPAVKAAKKAKPVDKLLEPLKVIEENVCPKPAQVEPSSPSPMETSGCLPDELCQAFSDVLIHVKDVDADDDGNPMLCSEYVKDIYAYLRSLEDAQAVRQNYLHGQEVTGNMRAILIDWLVQVQMKFRLLQETMFMTVGIIDRFLQEHPVPKNQLQLVGVTAMFLAAKYEEMYPPEIGDFTFVTDHTYTKAQIRDMEMKILRVLKFAIGRPLPLHFLRRASKIGEVTAEQHSLAKYLMELVMVDYDMVHFTPSQIAAASSCLSLKILNAGDWTPTLHHYMAYSEEDLVPVMQHMAKNIIKVNKGLTKHLTVKNKYASSKQMKISTIPQLRSDVVVEMARPLM

SEQ ID NO: 2716 - protein, 433 aa, Homo sapiens
MALRVTRNSKINAENKAKINMAGAKRVPTAPAATSKPGLRPRTALGDIGNKVSEQLQAKMPMKKEAKPSATGKVIDKKLPKPLEKVPMLVPVPVSEPVPEPEPEPEPEPVKEEKLSPEPILVDTASPSPMETSGCAPAEEDLCQAFSDVILAVNDVDAEDGADPNLCSEYVKDIYAYLRQLEEEQAVRPKYLLGREVTGNMRAILIDWLVQVQMKFRLLQETMYMTVSIIDRFMQNNCVPKKMLQLVGVTAMFIASKYEEMYPPEIGDFAFVTDNTYTKHQIRQMEMKILRALNFGLGRPLPLHFLRRASKIGEVDVEQHTLAKYLMELTMLDYDMVHFPPSQIAAGAFCLALKILDNGEWTPTLQHYLSYTEESLLPVMQHLAKNVVMVNQGLTKHMTVKNKYATSKHAKISTLPQLNSALVQDLAKAVAKV

SEQ ID NO: 2717 - protein, 421 aa, Mesocricetus auratus
MPGSSRQSGREAGSALLSLQQEDQENVNPEKAAPDQRARAALKTGNARGNAPQQRLKARRVAPLKDLSINDEHVASGPSWKAASKQPAFTIHVDEEEDTQKIPPEHKEMRCEDALAFNAAVSLPGARKPLVPLDYPMDGSFESPHAMDMSIVLEEEKPVSVNEVPDYHEDIHTYLREMEIKCKPKVGYMKKQPDITNSMRAILVDWLVEVGEEYKLQNETLHLAVNYIDRFLSSMSVLRGKLQLVGTAAMLLASKFEEIYPPEVAEFVYITDDTYSKKQVLRMEHLVLKVLAFDLAAPTVNQFLNQYFLHQQPANCKVESLAMFLGELSLIDADPYLKYLPSLIAGAAFHLALYTVTGQSWPESLVQKTGYTLESLKPCLMDLHQTYLRAAQHTQQSIREKYKHSKYHGVSLLNPPETLNV

SEQ ID NO: 2718 - protein, 421 aa, Mus musculus
MHRQSSKSGVALPPVGQGPDACQMLSRAQLGQDPPQRTVLGVLTENEQYRRTCGQEITAIRCFSGSENVFPAAGKKVLSDHGVNEPAKRGFDIYMDDPEQGDRDTCSGKEGIIFEDVYEVDTSMLKSDLHFLLDFNTVSPMLVDPTTHAQSEEATDFGSDVINVTEYAEEIHRYLREAEVRHRPKAHYMRKQPDITEGMRAILVDWLVEVGEEYKLRTETLYLAVNFLDRFLSCMSVLRGKLQLVGTAAILLASKYEEIYPPDVDEFVYITDDTYTKRQLLRMEHLLLKVLAFDLTVPTTNQFLLQYLRRQGVCIRTENLAKYVAELSLLEADPFLKYLPSLVAAAAYCLANYIVNRHFWPETLAAFTGYSLNEIVPCLSELHKACLSIPHRPQQAIREKYKASKYLHVSLMEPPVVLPLQ

SEQ ID NO: 2719 - protein, 421 aa, Mus musculus
MHRQSSKSGVALPPVGQGPDACQMLSRAQLGQDPPQRTVLGVLTENEQYRRTCGQEITAIRCFSGSENVFPAAGKKVLSDHGVNEPAKRGFDIYMDDPEQGDRDTCSGKEGIIFEDVYEVDTSMLKSDLHFLLDFNTVSPMLVDPTTHAQSEEATDFGSDVINVTEYAEEIHRYLPEAEVRHRPKAHYMRKQPDITEGMRAILVDWLVEVGEEYKLRTETLYLAVNFLDRFLSCMSVLRGKLQLVGTAAILLASKYEEIYPPDVDEFVYITDDTYTKRQLLRMEHLLLKVLAFDLTVPTTNQFLLQYLRRQGVCIRTENLAKYVAELSLLEADPFLKYLPSLVAAAAYCLANYIVNRHFWPETLAAFTGYSLNEIVPCLSELHKACLSIPHRPQQAIREKYKASKYLHVSLMEPPVVLPLQ

SEQ ID NO: 2720 - protein, 422 aa, Mus musculus
MPGTSRHSGRDAGSALLSLHQEDQENVNPEKLAPAQQPRAQAVLKAGNVRGPAPQQKLKTRRVAPLKDLPINDEHVTAGPSWKAVSKQPAFTIHVDEAEETQKRPAELKETECEDALAFNAAVSLPAARKPLTPLDYPMDGSFESPHAMDMSIVLEDKPVNVNEVPDYQEDIHTYLREMEVKCKPKVGYMKRQPDITNSMRAILVDWLVEVGEEYKLQNETLHLAVNYIDRFLSSMSVLRGKLQLVGTAAMLLASKFEEIYPPEVAEFVYITDDTYSKKQVLRMEHLVLKVLAFDLAAPTVNQFLTQYFLHLQPANCKVESLAMFLGELSLIDADPYLKYLPSLIAGAAFHLALYTVTGQSWPESLAQQTGYTLESLKPCLVDLHQTYLKAPQHAQQSIREKYKHSKYHSVSLLNPPETLSV

SEQ ID NO: 2721 - protein, 422 aa, Mus musculus
MPGTSRHSGRDAGSALLSLHQEDQENVNPEKLAPAQQPRAQAVLKAGNVRGPAPQQKLKTRRVAPLKDLPINDEHVTAGPSWKAVSKQPAFTIHVDEAEETQKRPAELKETECEDALAFNAAVSLPGARKPLTPLDYPMDGSFESPHAMDMSIVLEDKPVNVNEVPDYQEDIHTYLREMEVKCKPKVGYMKRQPDITNSMRAILVDWLVEVGEEYKLQNETLHLAVNYIDRFLSSMSVLRGKLQLVGTAAMLLASKFEEIYPPEVAEFVYITDDTYSKKQVLRMEHLVLKVLAFDLAAPTVNQFLTQYFLHLQPANCKVESLAMFLGELSLIDADPYLKYLPSLIAGAAFHLALYTVTGQSWPESLAQQTGYTLESLKPCLVDLHQTYLKAPQHAQQSIREKYKHSKYHSVSLLNPPETLSV

SEQ ID NO: 2722 - protein, 422 aa, Mus musculus
MPGTSRHSGRDAGSALLSLHQEDQENVNPEKLAPAQQPRAQAVLKAGNVRGPAPQQKLKTRRVAPLKDLPINDEHVTAGPSWKAVSKQPAFTIHVDEAEETQKRPAELKETECEDALAFNAAVSLPAARKPLTPLDYPMDGSFESPHAMDMSIVLEDKPVNVNEVPDYQEDIHTYLREMEVKCKPKVGYMKRQPDITNSMRAILVDWLVEVGEEYKLQNETLHLAVNYIDRFLSSMSVLRGKLQLVGTAAMLLASKFEEIYPPEVAEFVYITDDTYSKKQVLRMEHLVLKVLAFDLAAPTVNQFLTQYFLHLQPANCKVESLAMFLGELSLIDADPYLKYLPSLIAGAAFHLALYTVTGQSWPESLAQQTGYTLESLKPCLVDLHQTYLKPPQHAQQSIREKYKHSKYHSVSLLNPPETLSV

SEQ ID NO: 2723 - protein, 1020 aa, Rattus norvegicus
MDLTLSRADYLQVNRSAGALTGGRGPGEATVPPGRVSSEGTGHLFTITVSVDSESPYVFQVVIGDQDGVVMCFGMKKGEAVSVFKTLPGQKVSRLELGGALNTPQEKIFIAAGSEIRGFTKRGKQFLSFETNLTESIKAMYISGSDLFLSASYIYNHYCDCKDQNYYLSGDKINDVICLPVERLSRVTPVLACQDRVLRVLQGSDVTYEIEVPGPPTVLALHNGDGGDSGEGLLFGTSDGRLGLIQITASKPIHKWEIRNDKKRGGILCLDSFDIMGDGVKDLLVGRDDGMVEVYSFENANEPVLRFDQMLSESVTSVQGGCVGKDGYDEIVLATYSGWVTGLTTEPTHKESGPGEELKLNQEMQNKIASLRTELEHLQLKVLQERENYQQSSQSSQAKSTVPSFSINDKFTLNKDDASYSLVLEVRTAIDNVLIQSDVPIDLLDVDKNSAVVSFSSCDTESNDNFLLATYRCQANTTRLELKIRSIEGQYGTLQAYVTPRIQPKTCQVRQYHIKPLSLHQRTHFIDHDRPMNTLTLTGQFSFAEVHSWAVLCLPEVPEKPPAGECATFYFQNTFLDTQLECAYSACSVRRPPGSRAARERRAPCTLCRRRIRTGAAMPGNSRQAGSALLSQQEDQENVNPEKVAPAQQPRAQAVLKAGKVRGPAPQQRLKTRRVAPLKDLPINDEHVPTVPSWKAVSKQPAFTIHVDEAEETQKRPAEQKETQCEDALAFSAAVSLPGARKPLVPLDYPMDGSFESPHAMDISIVLEDEKPVNVNEVPDYHEDIHTYLREMEVKCKPKVSYMKRQPDITNSMRAILVDWLVEVGEEYKLQNETLHLAVNYIDRFLSSMSVLRGKLQLVGTAAMLLASKFEEIYPPEVAEFVYITDDTYSKKQVLRMEHLVLKVLAFDLAAPTVNQFLTQYFLHLQPANCKVESLAMFLGELSLIDADPYLKYLPSLIAGAAFHLALYTVTGQSWPESLVQKTGYTLESLKPCLMDLHQTYLKAPQHAQQSIREKYKHSK

SEQ ID NO: 2724 - protein, 1378 aa, Rattus norvegicus
MEALILYLPLLVEMVGSAAVFFAPFPAGGSYQKIGKSNHTASASSQGTIKKRSAFEDVTNASYVQCVQPKEDNTELKSHISKRTRKGVGEITQKKIKSSKLGHVTSLSNVEKEFILDIPNKPKTLTTEEPPVFPKTLVLNEQHATEETSLMRKTLKSCAFYQETFLMEKPQTLLEKTKDYKEFDSELMTSRRKDKPEEATIIEEMTDLKEPDLGKVTLTSSPLYLKNKHAVQEEKHAIQGKSSFKKKSLAMKVVTTKENSPVKKPHFRKKKPTTELKSLLQEQSSLQEKYNTQGDASILKKPRVLQKNINNKVDTLTEPVTLKRKHSTNEAIHTKKLSSSKNNHDTQGKGTNLRPLGVQPVTHENEPLSSKKSTTKKKDSHFHGPSVLPDKHSPQMKVSTAKNSLALQNPTTEEMMLHFPVAPVLKMGQNMEEAPCLKKPSPLRKQQQLPKRSRSFSKCAVQETVTSKSLSFKKSNTKKDPSFQGPFALQKKRNSPGKLSKQKKRYVPPKHCMEKDSHFQLDSAFKKQHIREEPASTHKPLILEMQQTTKGTEFRLRNPLVLPTVTSGTKSLTKEPPSFKKENTPLLKRKCATHTITLQQAQLELEETTGEDRNLFSTRPELHKKEPTPGLLQDPLPQNENCLIPQQLSFSMPLDSQKITSQERAHSKESVTSNDDNNFFSQDLFSPFSSTDEDTLKFHKSLDFQEKVDRKNDSPTKMSDSQDSVSEEESFLRKLFCKGRHSSSEESSQERPVALEQEFLLKKVLNENTSSDVEGPLSHQSPHIQNHSGTTKEALEALDALEALDALEALEASETLEALEALEASGALEEPLNIQEELSSEDIVAIMKSLITEDESIKEAFIRSYTTATEAPAEKSLSLEETSINEVATLKEPLSSQEKHRAELVTVLKELLVLVKNPRLERLALAFQENPPSNVETLLREVLALVEKSTGEESTLNEPLALQEKLSTKAELSPKELLALEDNPSFKKASPQGSLTFDHKPDIEKDEITRMSFSFEEFSIDSLYEKVLALSEGFTTTEQLSFTDLQNFDESKIVDEEDIFKSFFVFENENNPNLSSNGFESRKDNSSAPMPSLEAFNSVMNSEPCVSATKSSQSSLGGKETEEKFIVTKYMDEQMELTSDMRAILVDWMVEVQANFRMSHETLYLAVKLMDRYLMKAQCEKNHLQLLGSTAYMIAAKFEESYPPSLTEFLYICEDLYPKSEMVSLERNILKTLNFDINIPIAYHFLRRYASCIHASMKTLTLSRFICEMTLQEYDYIDERPSKLAAASFILALYMRNLKDCVNGWGGLVPSLEYSTGYQLAELHILVRKLNHLLNFRSRTVLKNVFEKYSEETYFEVAKIPPLSMKDLEDLLNCALFS

SEQ ID NO: 2725 - protein, 295 aa, Rattus norvegicus
MEHQLLCCEVETIRRAYPDTNLLNDRVLRAMLKTEETCAPSVSYFKCVQREIVPSMRKIVATWMLEVCEEQKCEEEVFPLAMNYLDRFLSLEPLKKSRLQLLGATCMFVASKMKETIPLTAEKLCIYTDNSIRPEELLQMELLLVNKLKWNLAAMTPHDFIEHFLSKMPEADENKQIIRKHAQTFVALCATDVKFISNPPSMVAAGSVVAAMQGLNLGSPNNFLSCYRTTHFLSRVIKCDPDCLRACQEQIEALLESSLRQAQQNIDPKATEEEGEVEEEAGLACTPTDVRDVDI

SEQ ID NO: 2726 - protein, 747 aa, Rattus norvegicus
MGSGGVIHCRCAKCFCYPTKRRIKRRPRNLTILSLPEDVLFHILKWLSVGDILAVRAVHSHLKYLVDNHASVWASASFQELWPSPQNLKLFERAAEKGNFEAAVKLGIAYLYNEGLSVSDEACAEVNGLKASRFFSMAERLNTGSDPFIWLFIRPPWSVSGSCCKAVVHDSLRAECQLQRSHKASILHCLGRVLNLFEDEEKRKQAHNLFEESAHQGCLASSYLLWESDRKVDMSDPGRCLHSFRKLRDYAAKGCWEAQLALAKACAGGSQLGLEGKACSESVCQLFQASQAVNKQQIFSVQKGLSDTMRYILIDWLVEVATMKDFTSLCLHLTVECVDRYLRRRLVPRYKLQLLGIACMVICTRFISKEILTIREAVWLTDNTYKYEDLVRVMGEIISALEGKIRIPTVVDYKEVLLTLVPVAPRTQHLCSFLCELTLLHTSLSVYAPARLASAALLLARLMHGHTQPWTTQLWDLTGFSYSDLTPCVLSLHKKCFHDDAPKDYRQVSLTAVKQRFEDKCYEEISQEEVLSYAELCSALGVKQESPEPPSFPSSGEIHTFLSSPSGRRSKRKRENSLQEDRGSFVTTPTAELSNQEETLLGSLLDWSLDCCSGYEGDQESEGEKEGDVTAPSGLLDVTVVYLNPEEHCCQESSDEEVWPEDKSHPTPGTQAPPASAPWPLPCNRGDPGKDVTTSGYSSVSSSSPISSLDGGMVGSPRSTSVLSVGSHSSTKPCYHQAKKSCLQCRP

SEQ ID NO: 2727 - protein, 288 aa, Rattus norvegicus
MELLCCEVDPVRRAVPDRNLLEDRVLQNLLTIEERYLPQCSYFKCVQKDIQPYMRRMVATWMLEVCEEQKCEEEVFPLAMNYLDRFLAGVPTPKTHLQLLGAVCMFLASKLKETIPLTAEKLCIYTDNSVKPQELLEWELVVLGKLKWNLAAVTPHDFIEHILRKLPQQKEKLSLIRKHAQTFIALCATDFKFAMYPPSMIATGSVGAAICGLQQDEEVNALTCDALTELLTKITHTDVDCLKACQEQIEAVLLNSLQQFRQEQHNGSKSVEDPDQATTPTDVRDVDL

SEQ ID NO: 2728 - protein, 288 aa, Rattus norvegicus
MELLCCEVDPVRRAVPDRNLLEDRVLQNLLTIEERYLPQCSYFKCVQKDIQPYMRRMVATWMLEVCEEQKCEEEVFPLAMNYLDRFLAGVPTPKTHLQLLGAVCMFLASKLKETIPLTAEKLCIYTDNSVKPQELLEWELVVLGKLKWNLAAVTPHDFIEHILRKLPQQKEKLSLIRKHAQTFIALCATDFKFAMYPPSMIATGSVGAAICGLQQDEEVNALTCDALTELLAKITHTDVDCLKACQEQIEAVLLNSLQQFRQEQHNGSKSVEDPDQATTPTDVRDVDL

SEQ ID NO: 2729 - protein, 293 aa, Rattus norvegicus
MELLCCEGTRLAPRAGPDPRLLGDQRVLQSLLRLEERYVPRGSYFQCVQKEIKPHMRKMLAYWMLEVCEEQRCEEDVFPLAMNYLDRYLSCVPTRKAQLQLLGTVCLLLASKLRETTPLTIEKLCIYTDQAMAPWQLREWEVLVLGKLKWDLAAVIAHDFLALILHRLSLPSDRQALVKKHAQTFLALCATDYTFAMYPPSMIATGSIGAAVLGLGACSMSADELTELLAGITGTEVDCLRACQEQQIEAALRESLREAAQTAPSPVPKAPGGSSSQGPSQTSTPTDVTAIHL

SEQ ID NO: 2730 - protein, 396 aa, Rattus norvegicus
MKEEGGSDLSVRSRKRKPNVPVFLQDPDEEIAKIDKTVKSQDSSQPWDDDSACVDPCSFIPTPNKEEDNELEYPKTAFQPRKIRPPRASPLPVLNWANREEVWRIMLNKEKTYLRDEHFLQRHPLLQARMRAVLLDWLMEVCEVYKLHRETFYLAQDFFDRYMASQQNIIKTLLQLIGISALFIASKLEEIYPPKLHQFAYVTDGACSGDEILTMELMMMKALKWRLSPLTIVSWLNVYVQVAYVNDTGEVLMPQYPQQVFVQIAELLDLCVLDVGCLEFPYGVLAASALYHFSSLELMQKVSGYQWCDIEKCVKWMVPFAMVIREMGSSKLKHFRGVPMEDSHNIQTHTNSLDLLDKAQAKKAILSEQNRISPPPSGVLTPPHSSKKQSSEQETE

SEQ ID NO: 2731 - protein, 288 aa, Rattus norvegicus
MELLCCEVDPVRRAVPDRNLLEDRVLQNLLTIEERYLPQCSYFKCVQKDIQPYMRRMVATWMLEVCEGQKCEEEVFPLAMNYLDRFLAGVPTPKTHLQLLGAVVMFLASKLKETIPLTAEKLCIYTDNSVKPQELLEWELVVLGKLKWNLAAVTPHDFIEHILRKLPQQKEKLSLIRKHAQTFIALCATDFKFAMYPPSMIATGSVGAAICGLQQDEEVNALTCDALTELLAKITHTDVDCLKACQEQIEAVLLNSLQQFRQEQHNGSKSVEDPDQATTPTDVRDVDL

SEQ ID NO: 2732 - protein, 191 aa, Rattus norvegicus
MEHQLLCCEVETIRRAYPDTNLLNDRVLRAMLKTEETCAPSVSYFKCVQREIVPSMRKIVATWMLEVCEEQKCEEEVFPLAMNYLDRFLSLEPLKKSRLQLLGATCMFVASKMKETIPLTAEKLCIYTDNSIRPEELLQMELLLVNKLKWNLAAMTPHDFIEHFLSKMPEADENKQIIRKHAQTFVALCAT

SEQ ID NO: 2733 - protein, 265 aa, Rattus norvegicus
MPGIARQAGSALLSQQEDQENVNPEKVAPAQQPRAQAVLKAGKVRGPAPQQRLKTRRVAPLKDLPINDEHVPTVPSWKAVSKQPAFTIHVDEAEETQKRPAERKETQCEDALAFSAAVSLPGARKPLVPLDYPMDGSFESPHAMDISIVLEDEKPVNVNEVPDYHEDIHTYLGEMEVKCKPKVSYMKRQPDITNSMRAILVDWLVEVGEEYKLQNETLHLAVNYIDRFLFSMSALRGKLQLVGTAAMLLASKFEEIYPPEVAEFV

SEQ ID NO: 2734 - protein, 174 aa, Rattus norvegicus
MFSPNIEDFVYITDNAYTSSQIREMETLILKELKFELGRPLPLHFLRRASKAGEVDVEQHTLAKYLMELTLVDYDMVHYHPSQVAAAASCLSQKVLGQGKWNLKQQYYTGYMESEILEVMQHMAKNVVKVNENLTKFIAVKNKYASSRLLKISTIPQLNSRTIKDLASPLMGRP

SEQ ID NO: 2735 - protein, 71 aa, Rattus sp.
WLMEVCEVYKLHRETFYLAQDFFDRYMASQQNIIKTLLQLIGISALFIASKLEEIYPPKLHQFAYVTDGTC

SEQ ID NO: 2736 - protein, 391 aa, Carassius auratus gibelio
MASRGFAPLSGRQENLMVLGRADGLHALKPGQRVVLGVLTENDQHNRVFGQVSSKYVPAFRDASTLDVSTSSATLGVHVVEPVIAQATKPTSFLLPSELLLVDDVVQDLGSGSCMDSSMQSLPEEAAYEDILCVPEYAEDIHRYLRECEVKYRPKPGYMRKQPDITNCMRVILVDWLVEVGEEYKLCSETLFLAVNYLDRFLSCMSVLRGKLQLVGTAAVLLAAKYEEVYPPEVDEFVYITDDTYTKKQLLRMEQHLLRVLAFDMTAPTVHQFLMQYTLEGHICARTVNLALYLSELSLLEVDPFVQYLPSKTAAAAYCLANYTLNGVLWPENLYAFTGYSLAVIIPCLMELHKLHLGAAGRPQQAIQEKYKGSKYCGVSLLEPVECLPLP

SEQ ID NO: 2737 - protein, 428 aa, Carassius auratus gibelio
MSSVGQTQRIAVQDPGADIHNQENMLSRLRCAAKNRIENRENVNPKPGNRTVLGALENNQRRPPVLRAAKQVSGPQITACKSEEHGNFGEKSSIRPPAFQIHVDEPDGACSKKPCTQRATMACSPLKLNPTVTRLRQPIATIDLPVEASFDSPMDMSIIDGEERPTNGNEVSDYAAEIHAHLREMEIKSKPRAGYMKKLPDITNSMRAILVDWLVVVGEKYKLQNETLYLAVNYIDRFLSSMSVHREKLQLVGTAAMLLASKFEEIYPPEVAEFVYITDDTYTKKQVLRMEHLVLTVLSFDLAAPTINQFLTQYFLHQPVSSKVESFSMFLGELSLIDCDPFLKYLPSQTAAAAFILANRTIAGGSWSKAFVEMTGYTLEDLMPCIQDLHQTYLGAAQHTQQAVREKYKGSKYHEVSLIELPEKLMLN

SEQ ID NO: 2738 - protein, 254 aa, Squirrel monkey herpesvirus 1
MADSPNRLNRAKIDSTTMKDPRVLNNLKLRELLLPKFTSLWEIQTEVTVDNRTILLTWMHLLCESFELDKSVFPLSVSILDRYLCKKQGTKKTLQKIGAACVLIGSKIRTVKPMTVSKLTYLSCDVFTNLELINQEKDILEALKWDTEAVLATDFLIPLCNALKIPEDLWPQLYEAASTTICKALIQPNIALLSPGLICAGGLLTTIETDNTNCRPWTCYLEDLSSILNFSTNTVRTVKDQVSEAFSLYDLEIL

SEQ ID NO: 2739 - protein, 254 aa, Saimiriine herpesvirus 2
MADSPNRLNRAKIDSTTMKDPRVLNNLKLRELLLPKFTSLWEIQTEVTVDNRTILLTWMHLLCESFELDKSVFPLSVSILDRYLCKKQGTKKTLQKIGAACVLIGSKIRTVKPMTVSKLTYLSCDCFTNLELINQEKDILEALKWDTEAVLATDFLIPLCNALKIPEDLWPQLYEAASTTICKALIQPNIALLSPGLICAGGLLTTIETDNTNCRPWTCYLEDLSSILNFSTNTVRTVKDQVSEAFSLYDLEIL

SEQ ID NO: 2740 - protein, 229 aa, Saimiriine herpesvirus 2
RVLNNLKLRELLLPKFTSLWEIQTEVTVDNRTILLTWMHLLCESFELDKSVFPLSVSILDRYLCKKQGTKKTLQKIGAACVLIGSKIRTVKPMTVSKLTYLSCDCFTNLELINQEKDILEALKWDTEAVLATDFLIPLCNALKIPEDLWPQLYEAASTTICKALIQPNIALLSPGLICAGGLLTTIETDNTNCRPWTCYLEDLSSILNFSTNTVRTVKDQVSEAFSLYD

SEQ ID NO: 2741 - protein, 254 aa, Macaca mulatta rhadinovirus
MASVGPVPTGTIDPVLYQDRALSNLLAHEASFVTSTACYGTIQTEVTVGMRVILGTWMRSVARAHQADASVFPLAVSILDRYLECRSIPRRRFQRLGAACLFLAGKIRDLNPFKAAFLCFCAAEDFSVADLLKQEKSILKALRWKLEAVLPTDAIGPTLFKSGFTKEQLFALHSQVVESVHKAIVNPATGGLPPSLVAAACALFSLGAAAPPPARLAEAVGVSAATLAAAAESVATTLREFDEDHILSNARGSS

SEQ ID NO: 2742 - protein, 254 aa, Macaca mulatta rhadinovirus 26-95
MASVGPVPTGTIDPVLYQDRALSNLLAHEASFVTSTACYGTIQTEVTVGMRVILGTWMRSVARAHQADASVFPLAVSILDRYLECRSIPRRRFQRLGAACLFLAGKIRDLNPFKAAFLCFCAAEDFSVADLLKQEKSILKALRWKLEAVLPTDAIGPTLFKSGFTKEQLFALHSQVVESVHKAIVNPATGGLPPSLVAAACALFSLGAAAPPPARLAEAVGVSAATLAAAAESVATTLREFDEDRILSNARGSS

SEQ ID NO: 2743 - protein, 305 aa, Anopheles gambiae str. PEST
MDRWNTFFNAPYCTEYDEDILETLKECESRRMNVHFISPQLEHRRSSVQLILNVCKQQSYRRATVHLAIYLLDVFMSNHTIAVGRLKLVALTCLYLACKIEENDSSVPSPTRLNGFLANVYRPADFIALEVAILCFFDWHITIPTASTFLDIFAMHSFVQQDWDAVSPPWNGCDSMALLMQHINETSSTILEATLQHLKLSIVKPSLLAAGCIAAARCLTPRVSVWSDRLTSATGYEYSQIHEVCQMLLFEAMPQSPRSSRSSLSSSTPKRSTSDAGYLSEWWESENEDENGTIGSCVSSNSSSS

SEQ ID NO: 2744 - protein, 446 aa, Chenopodium rubrum
MAARAVLQEQPRGGVQQKNGQGGERRNRTALGDIGNVVTARGGAIGAANGIAKPQAINRPLTRSFCAQLVANAQAAAEKKKKQGVKAVDVNVGGARKAGVGVAVAPAAAAQKKVQEKKKTEVVVAETKTPSGHGKVEQKPASKKKKTPTFTSFLTARSKEACGLSKKPQELIVNIDEGSVEDELAVVEYVEDIYSFYKIAEDESRVRDYMDSQPDINEKMRSILVDWLIEVHYKFELRQETLYLTINIIDRFLSMKIVPRKELQLVGIASMLIACKYEEIWAPEVNDFVQISDKAYVREQVLCMEKTILGNLEWYLTVPTPYMFLTRYVKASVTLDSEMENMSYFFSELGMMNYSTTIKYPPSLLAASSVYTARCTLNNSPSWTETLKHYTGYSENQLLECARLLVSFHMAAPEGRLRAVYKKFSKPDNGAVALRPPAKSLLASTS

SEQ ID NO: 2745 - protein, 460 aa, Arabidopsis thaliana
MSNILQNRRSSFSSSTKSSLAKRQAPSSSENSVKLMPAMTKKRAPLSNITNQKIASRLQNSDSVHCSNKSAKLKIAPSVCVNASFSSNLQQSIVPHKVASSPSKSDDGSVSMDETRSSSDSYKSPQVEYIENDDVSAVVSIERKALSNLFITPNSETIDNYCSRDVLSDMKKMDKNQIVNIDSNNGDPQLCATFACDIYKHLRASEAKKRPDVDYMERVQKDVNSSMRGILVDWLIEVSEEYRLVPETLYLTVNYIDRYLSGNVISRQKLQLLGVACMMIAAKYEEICAPQVEEFCYITDNTYLKDEVLDMESDVLNYLKFEMTAPTTKCFLRRFVRAAHGVHEAPLMQLECMANYIAELSLLEYTMLSHSPSLVAASAIFLAKYILDPTRRPWNSTLQHYTQYKAMELRGCVKDLQRLCSTAHGSTLPAVREKYSQHKYKFVAKKFCPSVIPQEFFNNS

SEQ ID NO: 2746 - protein, 442 aa, Arabidopsis thaliana
MSSSSRNLSQENPIPRPNLAKTRTSLRDVGNRRAPLGDITNQKNGSRNPSPSSTLVNCSNKIGQSKKAPKPALSRNWNLGILDSGLPPKPNAKSNIIVPYEDTELLQSDDSLLCSSPALSLDASPTQSDPSISTHDSLTNHVVDYMVESTTDDGNDDDDDEIVNIDSDLMDPQLCASFACDIYEHLRVSEVNKRPALDYMERTQSSINASMRSILIDWLVEVAEEYRLSPETLYLAVNYVDRYLTGNAINKQNLQLLGVTCMMIAAKYEEVCVPQVEDFCYITDNTYLRNELLEMESSVLNYLKFELTTPTAKCFLRRFLRAAQGRKEVPSLLSECLACYLTELSLLDYAMLRYAPSLVAASAVFLAQYTLHPSRKPWNATLEHYTSYRAKHMEACVKNLLQLCNEKLSSDVVAIRKKYSQHKYKFAAKKLCPTSLPQELFL

SEQ ID NO: 2747 - protein, 454 aa, Arabidopsis thaliana
MSSSSRNLSQENPIPRPNLAKTRTSLRDVGNRRAPLGDITNQKNGSRNPSPSSTLVNCSNKIGQSKKAPKPALSRNWNLGILDSGLPPKPNAKSNIIVPYEDTELLQSDDSLLCSSPALSLDASPTQSDPSISTHDSLTNHVVDYMVESTTDDGNDDDDDEIVNIDSDLMDPQLCASFACDIYEHLRVSEVNKRPALDYMERTQSSINASMRSILIDWLVEVAEEYRLSPETLYLAVNYVDRYLTGNAINKQNLQLLGVTCMMIAAKYEEVCVPQVEDFCYITDNTYLRNELLEMESSVLNYLKFELTTPTAKCFLRRFLRAAQGRKEVPSLLSECLACYLTELSLLDYAMLRYAPSLVAASAVFLAQYTLHPSRKPWNATLEHYTSYRAKHMEACVKNLLQLCNEKLSSDVVAIRKNTSLQQRSFVPRHYRKSFSSDSVSGYVFFTLVYCTYC

SEQ ID NO: 2748 - protein, 257 aa, Kaposi's sarcoma-associated herpesvirus
MATANNPPSGLLDPTLCEDRIFYNILEIEPRFLTSDSVFGTFQQSLTSHMRKLLGTWMFSVCQEYNLEPNVVALALNLLDRLLLIKQVSKEHFQKTGSACLLVASKLRSLTPISTSSLCYAAADSFSRQELIDQEKELLEKLAWRTEAVLATDVTSFLLLKLVGGSQHLDFWHHEVNTLITKALVDPKTGSLPASIISAAGCALLVPANVIPQDTHSGGVVPQLASILGCDVSVLQAAVEQILTSVSDFDLRILDSY

SEQ ID NO: 2749 - protein, 257 aa, Kaposi's sarcoma-associated herpesvirus
MATANNPPSGLLDPTLCEDRIFYNILEIEPRFLTSDSVFGTFQQSLTSHMRKLLGTWMFSVCQEYNLEPNVVALALNLLDRLLLIKQVSKEHFQKTGSACLLVASKLRSLTPISTSSLCYAAADSFSRQELIDQEKELLEKLAWRTEAVLATDVTSFLLLKLVGGSQHLDFWHHEVNTLITKALVDPLTGSLPASIISAAGCALLVPANVIPQDTHSGGVVPQLASILGCDVSVLQAAVEQILTSVSDFDLRILDSY

SEQ ID NO: 2750 - protein, 257 aa, Kaposi's sarcoma-associated herpesvirus
MATANNPPSGLLDPTLCEDRIFYNILEIEPRFLTSDSVFGTFQQSLTSHMRKLLGTWMFSVCQEYNLEPNVVALALNLLDRLLLIKQVSKEHFQKTGSACLLVASKLRSLTPISTSSLCYAAADSFSRQELIDQEKELLEKLAWRTEAVLATDVTSFLLLKLLGGSQHLDFWHHEVNTLITKALVDPKTGSLPASIISAAGCALLVPANVIPQDTHSGGVVPQLASILGCDVSVLQAAVEQILTSVSDFDLRILDSY

SEQ ID NO: 2751 - protein, 257 aa, Kaposi's sarcoma-associated herpesvirus
MATANNPPSGLLDPTLCEDRIFYNILEIEPRFLTSDSVFGSFQQSLTSHMRKLLGTWMFSVCQEYNLEPNVVALALNLLDRLLLIKQVSKEHFQKTGSACLLVASKLRSLTPISTSSLCYAAADSFSRQELIDQEKELLEKLAWRTEAVLATDVTSFLLLKLLGGSQHLDFWHHEVNTLITKALVDPKTGSLPASIISAAGCALLVPANVIPQDTHSGGVVPQLASILGCDVSVLQAAVEQILTSVSDFDLRILDSY

SEQ ID NO: 2752 - protein, 257 aa, Kaposi's sarcoma-associated herpesvirus
MATANNPPSGLLDPTLCEDRIFYNILEIEPRFLTSDSVFGSFQQSLTSHMRKLLGTWMFSVCQEYNLEPNVVALALNLLDRLLLIKQVSKEHFQKTGSACLLVASKLRSLTPISTSSLCYAAADSFSRQELIDQEKELLEKLAWRTEAVLATDVTSFLLLKLLGGSQHLDFWHHEVDTLITKALVDPKTGSLPASIISAAGCALLVPANVIPQDTHSGGVVPQLASILGCDVSVLQAAVEQILTSVSDFDLRILDSY

SEQ ID NO: 2753 - protein, 505 aa, Cicer arietinum
MGSRNIVQQQNRAEAAVPGAMKQKNIAGEKKNRRALGDIGNLVTVRGVDGKAKAIPQVSRPVTRSFCAQLLANAQTAAADNNKINAKGAIVVDGVLPDRRVAAARVPAQKKAAVVKPRPEEIIVISPDSVAEKKEKPIEKEKAAEKSAKKKASTLTSTLTARSKVASGVKTKTKEQIVDIDAADVTNDLAVVEYVEDMYKFYKSVENESRPHDYMGSQPEINEKMRAILIDWLVQVHHKFELSPETLYLTINIVDRYLASETTIRRELQLVGIGAMLIASKYEEIWAPEVHELVCISDNTYSDKQILVMEKKILGALEWYLTVPTPYVFLVRFIKASMTDSDVENMVYFLAELGMMNYATLIYCPSMIAAASHQVYAARCTLNKAPFWNETLQLHTGFSEPQLMDCAKLLVAFHKMAGDQKLKSIYRKYSNLERGAVALLSPAKSLFVFLIELLMNAIEKMQCSLFFTSEIWCRFLTCFGRNISPGCSLVLLQRNFLIPLILYAL

SEQ ID NO: 2754 - protein, 484 aa, Glycine max
MSTQNRRSSFSSSTTSSLAKRHASASTTSSLAAAPTNMAKKRPPLSNLTNTVAHRNSSSSVPCAAKFAKTKKDVVPACSGNKRPTLANVKPASAVIFPKANSFPVKNEAPPTPPPPVATVTVPAPVVDVSPSKSDTMSVSTDESMSSCDSFKSPDIEYVDNSDVAAVDSIERKTFSHLNISDSTEGNICSREILVELEKGDKFVNVDNNYADPQLCATFACDIYKHLRASEAKKRPSTDFMEKIQKEINSSMRAILIDWLVEVAEEYRLVPDTLYLTVNYIDRYLSGNVMNRQRLQLLGVASMMIASKYEEICAPQVEEFCYITDNTYFKEEVLQMESAVLNFLKFEMTAPTVKCFLRRFVRAAQGVDEVPSLQLECLTNYIAELSLMEYSMLGYAPSLVAASAIFLAKFILFPSKKPWNSTLQHYTLYQPSDLCVCVKDLHRLCCNSPNSNLPAIREKYSQHKYKYVAKKYCPPSIPPEFFQN

SEQ ID NO: 2755 - protein, 484 aa, Glycine max; identical to SEQ ID NO: 2754

SEQ ID NO: 2756 - protein, 480 aa, Glycine max
MSTQNRRSSFSSSTTSSLAKRHVSASTTSSSLAAPANMAKKRPPLSNLTNTVAHRNSSSLVPCAAKFAKTKKEVVPACSGNKRPTLANVKPTSAAIFPKANSFPVRDEAPPPVATVTVPAPVVDVSPSKSDAMSVSMDESMSSCDSFKSPDIEYVDNIDVAAVDSIERKTFSNLNISDSTEGNICSRDILVELEKGENFVNVDNNYADPQLCATFACDIYKHLRASEAKKRPSTDFMERIQKEINPSMRAILIDWLVEVAEEYRLVPDTLYLTVNYIDRYLSGNVMNRQRLQLLGVASMMIASKYEEICAPQVEEFCYITDNTYFKEEVLQMESAVLNFLKFEMTAPTVKCFLRRFVRAAQGVDEVPSLQLECLTNYIAELSLMEYSMLGYAPSLIAASAIFLAKFILFPSKKPWTSTLQHYTLYKPSDLCVCVRDLHRLCCNSPNSNLPAIREKYSQHKYKYVAKKYCPPSIPPEFFQN

SEQ ID NO: 2757 - protein, 485 aa, Glycine max
MSTQNRRSSFSSSTTSSLAKRHASASTTSSSAAAPANMAKKRPPLSNLTNTVAHRNSSSSVPCAAKFAKTKKDVVPACSGNKRPTLANVKPASAAIFPKANSFPVRDEAPPTPPPPVATVTVPAPVVDVSPSKSDAMSVSTDESMSSCDSFKSPDIEYVDNSDVAAVDSIERKTFSHLNISDSTEGNICSREILVELEKGDKFVNVDNNYADPQLCATFACDIYKHLRASEAKKRPSTDFMEKIQKEINSSMRAILIDWLVEVAEEYRLVPDTLYLTVNYIEDRYLSGNVMNRQRLQLLGVASMMIASKYEEICAPQVEEFCYITDNTYFKEEVLQMESAVLNFLKFEMTAPTVKCFLRRFVRAAQGVDEVPSLQLECLTNYIAELSLMEYSMLGYAPSLIAASAIFLAKFILFPSKKPWTSTLQHYTLYKPSDLCVCVRDLHRLCCNSPNSNLPAIREKYSQHKYKYVAKKYCPPSIPPEFFQN

SEQ ID NO: 2758 - protein, 487 aa, Glycine max
  unsure (1)..(487): unsure at all Xaa locations
MSSTTQNRRSSFTPSTASSLAKAKRHPSSVSSSSSATQNLAVKRAPLANLTNQRNAPYSSSSSSCSNKVAKTKKDSKSTISGNKSSQLKSVXXSSSVVIPKANSLSQKKDAAPTVATFAVPVRSVDVSPSKSDGRFVSMDETTSSCDSIKSPDEVEYLDNRDVSDVDSIQKKIISNLNISDTTEPEGNVCSREIIVELEERVDKIVNIDNIYSDTQLCATYVCDIYKHLRESEEKKRPSTDFMDTIQKDINVSMRAILVDWLVEVAEEYRLVPETLYLTVNYLDRYLSGNAMNRQRLQLLGVSCMMIASKYEEICAPQVEEFCYITDNTYLKEEVLQMESAVLNYLKFEMTAPTVKCFLRRFVRAAAHDVQEIPSLQLEYLTNFIAELSLLEYSMLSYPPSLIAASVIFLARFILFPSKKPWNSTLQHYTLYRPSDLCACVKDLHRLCCSSHDSNLPAIRDKYSQHKYKCVAKKHIPPSIPQEVFQS

SEQ ID NO: 2759 - protein, 489 aa, Glycine max
  unsure (1)..(489): unsure at all Xaa locations
MSSTTQNRRSSFTPSTASSLAKAKRHPSSVSSSSSATQNLAVKRAPLANLTNQRNAPYSSSSSSCSNKVAKTKKDSKSTISGNKSSQLKSVXXSSSVVIPKANSLSQKKDAAPTVATFAVPVRSVDVSPSKSDGRVXVSMDETTSSCDSIKSPDEVEYLDNRDVSDVDSIQKKIISNLNISDTTEPEGNVCSREIIVELEERVDKIVNIDNIYSDTQLCATYVCDIYKHLRESEEKKRPSTDFMDTIQKDINVSMRAILVDWLVEVAEEYRLVPETLYLTVNYLDRYLSGNAMNRQRLQLLGVSCMMIASKYEEICAPQVEEFCYITDNTYLKEEVLQMESAVLNYLKFEMTAPTVKCFLRRFVRAAAHDVQEIPSLQLEYLTNFIAELSLLEYSMLSYPPSLIAASVIFLARFILFPSKKPWNSTLQHYTLYRPSDLCACVKDLHRLCCSSHDSNLPAIRDKYSQHKYKCVAKKHIPPSIPREVFQIN

SEQ ID NO: 2760 - protein, 459 aa, Lupinus luteus
MASRPVVPIHQQQVRGEGVIGGGKQKKNVAADGKNRRALGDIGNLDRVKGVEVKPNRPITRSFCAQLLANAQVAAAVENNKKLAIPNVGGAKPNVVEGAVAKRVAPKPAEKKVVEKPKPREAVEISPHEEVQKNKSVVKKKEGGENKKKPQTLSSVLTARSKAACGLTKKPQEQIIDIDANDSGNELAALEYIEDIYKFYKLEESESRPHQYLDSQPEINERMRAILVDWLIDVNNKFDLSLETLYLTINIVDRFLAVKVVPRRELQLLGISAMLLASKYEEIWPPEVNDFVCLSDRAYTHEQILVMEKIILGKLEWTLTVPTPYVFLVRFIKASVPDQELENMSHFLSELGMMHYSTLMYCPSMVAASAVFAARCTLNKTPFWNETLKLHTSYSEEQLMDCAKLLVSFHSTIGGGKLKVVHRKYSDPQKGAVAVLPPAKYLMPESSSSGTRVSKGLDK

SEQ ID NO: 2761 - protein, 431 aa, Lupinus luteus
MPSIAHSHVAAEPQHPKGENKQKNEGRNRRVLKDIGNLVVKQADPVANVPKRTTRNFGCQLLANAQAAAEKNKKPNTDVGNLAVVTKVEQTKKETEHEVIIISSDDEEEEKEKQVVKGGRKAREKVAGRGKNDKAFSAVLSARSKAACGLTHKPKDLVLVDDIDVADIANELEAVEYLDDIYKFYKLTEDDGRVHDYMPSQPDINIKMRSILFDWLIEVHRKFELMQETLYLTLNIVDRFLSMKAVPRRELQLVGISSMLIACKYEEIWAPEVHDFVCISDNAYVRENILIMEKTILSKLEWYLTVPTTYVFLVRYIKASTPYDKKIEDMIFFLAELSLMDYPLVISYCPSMIAASAVYAARCILGRVPYWTETLKHYTGYYEEQLRDCAKLMVNFHSVAPESKLRAVYKKFSSLERGAVALVAPTKNLLA

SEQ ID NO: 2762 - protein, 454 aa, Lupinus luteus
MASRPIVPLQPQQAKGEGVIGGRRKQENKNGAANGKNRVVLGDIGNLDRVKGANINLNRPITRSLCAQLLAKAEAGENDKNLAIPNVTGPKPQVADGVVAKRRVAPKPAEKKVTAKPKPVEIVEISSGKEVQKDKSANKNKEQGDALSKKKSQTLTSVLTARSKAACGLTEKPKDQIIDIDAGDSRNELAAVEYIEDMYKFYKLAENENRPHQYMDSQPEINERMRAILVDWLIDVQTKFDLSLETLYLTINIVDRFLAVKTVLRRELQLVGVSAMLMASKYEEIWPPEVNDFVCLTDRAYTHEQILVMEKIILGKLEWTLTVPTTFVFLTRFIKASVPDQELENMGHFLSELGMMHYATLVYCPSMVAASAVFAARCTLNKTPIWNETLQLHTGYSEEQLMDCARLLVSFHSTLANGKLKVLYRKYSDPQRGAVSMHPPAKNLMPESSCGSRV

SEQ ID NO: 2763 - protein, 452 aa, Lupinus luteus
MASRPTVRLQQQARDEEVVGGGKQQKNGAGDGKNRKALGDIGNLDHVKPNRPVTRSFCAQLLANAQAAAAAENKKKLAIPNVADPKPNVADGVVAKRVAPKPAEKKVTAKPKAQEVIEINPAEEAQKNKSVNKKKEGGENKKKSRTLTSVLTARSKAACGLTNKPKEKIIDIDAGDSGNELAAVEYIEDIYKFYKLAENENRPHQYMDSQPDINEKMRAILVDWLINVHTKFDLSLETLYLTINIIDRFLALKTVPRKELQLVGISAMLMASKYEEIWPPEVDEFVCLSDRAFIHEEVLAMEKIILGKLEWTLTVPTPYVFLVRFIKASVPDQELENMAHFLSELGMMHYGTLMYCPSMIAASAVFAARCTLNKTPIWNETLKLHTGYSKEQLMDCAKLLVSFHSSIRGEKLKVLYRKYSDPERGAVAVLSPAKNLMSEGGGIDLSVVENNI

SEQ ID NO: 2764 - protein, 484 aa, Medicago sativa
MRKSVTLKAGEVPSRLTRARAVALSTSGQLPPMKEVAPGTQNQKQPLRANSKRAVSDVTYLPHEMRAILQDVTNNCGENTNRSCLNPTEIQAKKRKVAKPAQPDVSNEVPSAAERPPFIADSKPVSSMEMRLRSSEDFRCLDDLEDNAPFRMSSNQSGTNNNLLQNQTSRISARLLSSQKKASQIVAAKKGNISELLDVSKHPDVADIDADFEDPQLCSHYAADIYDHLRVAELSRRPYPNFMETVQQDITPSMRAILVDWLVEVSEGYKLQANTLFLTVYLIDWFLSKNCIERERLQLLGITCMLIATKYEEINAPRIEDFCFITDNTYVKEEVVKLESLVLKSSSYQLFAPTTKTFLRRFLRAAQASYKRPSIELEYLANYLAELTLMNYGFLNFLPSMVAASSVFLARWTLDQSSHPWNPTLEQYASYKASDLKATVLALQDLQLNSNDDCPLTAIRKKYTQDKLNCVAALSSPKLLETLF

SEQ ID NO: 2765 - protein, 452 aa, Medicago sativa
MKEVAPGTQDQKQPLRANSKRALSDVTYLPHKKRAILQDVTNNCGVNTKRSCLNPTEIQAKKRKVAKPAQPHVSNEVPSAAELPPFIADSKPVSSMEMRLRSSEDFRCLDDLEDNAPFRMSSNQCGTNNNLLQSQTSRISARPLSSQKKASQIVAAKKGNISELLDVSKHPDVADIDADFEDPQLCSHYAADIYDHLRVAELSRRPYPNFMETVQQDITPSMRAILVDWLVEVSEGYKLQANTLSLTVYLIDWFLSKNCIERERLQLLGITCMLIATKYEEINAPRIKDFCFIQDNTYTKEEVVKLESLVLKSSSYQLFAPTTKTFLRRFLRAAQASYKRPSIELEYLANYLAELTLMNYGFLNFLPSMVAASSVFLARWTLDQSSHPWNPTLEHYASYKASDLKATVLALQDLQLNSNDDCPLTTIRKKYTQDKLNCVAALSSPKLLETLF

SEQ ID NO: 2766 - protein, 480 aa, Medicago sativa
MRKSVTLKAGEVPSRLTRARAVALSTSGQLPPMKEVAPGTQNQKQPLRANSKRAVSDVTYLPHEMRAILQDVTNNCGENTNRSCLNPTEIQAKKRKVAKPAQPDVSNEVPSAAERPPFIADSKRVSSMEMRLRSSEDFRCLDDLEDNAPFRMSSNQSGTNNNLLQNQTSRISARLLSSQKKASQIVAAKKGNISELLDVSKHPDVADIDADFEDPQLCSHYAADIYDHLRVAELSRRPYPNFMETVQQDITPSMRAILVDWLVEVSEGYKLQANTLFLTVYLIDWFLSKNCIERERLQLLGITCMLIATKYEEINAPRIEDFCFITDNTYVVKLESLVLKSSSYQLFAPTTKTFLRRFLRAAQASYKRPSIELEYLANYLAELTLMNYGFLNFLPSMVAASSVFLARWTLDQSSHPWNPTLEQYASYKASDLKATVLALQDLQLNSNDDCPLTAIRKKYTQDKLNCVAALSSPKLLETLF

SEQ ID NO: 2767 - protein, 445 aa, Sesbania rostrata
MASRPIVPQQPRGDAALGAGKQQKKNGAADGRNRKALGDIGNLVTVRGVEVKPNRPITRSFCAQLLANAQAAAAAENNKKQACPNVAGPPPVVEGVAVAKRVAPKPGQKKVTTKPKPEEVIEISPDEEVHKDNNKKKEGDANTKKKSHTYSSVLTARSKAACGLTNKPKEIIDIDAADTANELAAVEYIEDIYKFYKMVENESRPHDYMDSQPEINERMRAILVDWLIDVHSKFDLSLETLYLTINIVDRFLAVKTVPRRELQLVGISAMLMASKYEEIWPPEVNDFVCLSDRAYTHEQILFMEKIILGKLEWTLTVPTPFVFLVRFIKASVPDEALENMAHFLSELGMMHYATLMYCSSMVAASAVYAARCTLNKSPVWNETLKQHTGYSEEQLMDCARLLVSLHSTVGNGKLKVVYRKYSDPERGSVAVLPPAKNLLSEGKSL

SEQ ID NO: 2768 - protein, 341 aa, Daucus carota
APSMTTPEPASKRRVVLGEISNNSSAVSGNEDLLCREFEVPKCVAQKKRKRGVKEDVGVDFGEKFDDPQMCSAYVSDVYEYLKQMEMETKRRPMMNYIEQVQKDVTSNMRGVLVDWLVEVSLEYKLLPETLYLAISYVDRYLSVNVLNRQKLQLLGVSSFLIASKYEEIKPKNVADFVDITDNTYSQQEVVKMEADLLKTLKFEMGSPTVKTFLGFIRAVQENPDVPKLKFEFLANYLAELSLLDYGCLEFVPSLIAASVTFLARFTIRPNVNPWSIALQKCSGYKSKDLKECVLLLHDLQMGRRGGSLSAVRDKYKKHKFKCVSTLSPAPEIPESIFNDV

SEQ ID NO: 2769 - protein, 443 aa, Petroselinum crispum
MASIPVVQQNRVEAAGGGAVKQKNMAAVEGRNRRALGDIGNLVTGHGIEGKQQQIPQVSRPVTRGFCAQLLANAQAGVVENNKKQRAIVGDGVVAVRQKKVSVKPKPEDIIVISPDTEEADRVNKHLNRKKATEGSLKKKGQTFTSTLTARSKAAAFGLTRKPKEQIVDIDAADANNELAAVEYVEDMYKFYKLAEHESRVFDYIDFQPEINQKMRAILVDWLIEVHNKFELMPETLYLAINILDRYLSTESVARKELQLVGISSMLTASKYEEIWPPEVNDLTKISDNAYTNQQVLIMEKKILGQLEWNLTVPTPYVFLVRFIKASIPNEPAVENMACFLTELGMMNYATVTYCPSMVAASAVYGARCTLDKAPFWNETLKSHTGFSEEQLMECGRTLVRFHSCATENKLRVIYRKYSLDERGCVAMLPPAKALLTVAKPQT

SEQ ID NO: 2770 - protein, 490 aa, Lycopersicon esculentum
MMTTQNRRSSAVAKRQAMAANSSGLEHNQTGKLNAKKRPALSNISNNTTVSARNSVSHSSKLAPCTSKIVNIKKNTSACNSNAVSSGTAVLPASSSVRPSSKPVSIQRSDAVVPKITVIPVPATCSMDISPSHSDGSLVSMDESMSNSDTVRSPEVEYIDDHELAAVDSIEKKACSTLYISEHVKAAAADICKRDVLVDLESGDKIMNIDNNLVDPQLCATMACDIYKHLRASEAKKRPSTDFMAKVQKDINPSMRAILIDWLVEVAEEYRLVPDTLHLTINYIDRYLSGNLMDRQRLQLLGVACMMIASKYEEICAPQVEEFCYITDNTYFKEEVLQMESAVLNYLKFEMTAPTAKCFLRRFVRAAQGLNEVLSLQLEHLASYIAELSLLEYNMLCYAPSLIAASAIFLAKYILLPSVKPWNSTLRHYTLYQPSDLRDCVLALHSLCCNNNNSSLPAVREKYSQHKYKFVAKKYCPPTVPVEFFQNISS

SEQ ID NO: 2771 - protein, 482 aa, Nicotiana tabacum
MATTQNRRNSVSSAVAKRQAMAENNHGKLPAGGAKKRPALTNISNHTTASARNSLSHSSKLAPCTSKVVSIKKNNSNAASSVLPTSSSFVKPISKTVSLPRSDAAVPKITAIPPLPSTCSMDISPSHSDGSLVSMDETMSTSNSLRSPDVEYIDDNQTAAFDSIEKKAFSTLYISEDVKAADICKRDVLVDMESGDKIANIDNNLVDPQLCATMACDIYKHLRATEVKKRPSTDFMEKVQKDINASMRAILIDWLVEVAEEYRLVPDTLYLTVNYIDRYLSGNLMDRQRLQLLGVACMMIASKYEEICAPQVEEFCYITDNTYFKEEVLQMESTVLNYLKFEMTAPTAKCFLRRFVRAAQGLNEVLSLQLEHLASYIAELSLLEYNMLCYAPSVIAASAIFLAKYILLPSKKPWNSTLRHYTLYQPSDLRDCVMALHSLCCNNNNSSLPAIREKYSQHKYKFVAKKYCPPTIPVEFFQNISC

SEQ ID NO: 2772 - protein, 483 aa, Nicotiana tabacum
MATTQNRRSSVSSATAKRQAMTANSSLENNNHGKLVAKKRPALTNISNHTTASARNSLSHSSKLAPCTSKAVSIKKSNSNAASSVLPTSSFVKPISKTVSIPRSDAAIPKITAIPLPATCSMDISPSHSDGSLVSMDETMSTSDSLRSPDVEYIDDNQTAAFDSIEKKAFSTLYISEDVKAADICKRDVLVDIESGDKIANIDNNFVDPQLCATMACDIYKHLRATEVKKRPSTDFMEKVQKDINASMRAILIDWLVEVAEEYRLVPDTLYLTVNYIDRYLSGNLMDRQRLQLLGVACMMIASKYEEICAPQVEEFCYITDNTYFKEEVLQMESTVLNYLKFEMTAPTAKCFLRRFVRAAQGLNEVLSLQLEHLASYIAELSLLEYNMLCYAPSVIAASAIFLAKYILLPSKKPWNSTLRHYTLYQPSDLRDCVVALHSLCCNNNNSSLPAIREKYSQHKYKFVAKKYCPPTIPVEFFQNISC

SEQ ID NO: 2773 - protein, 483 aa, Nicotiana tabacum
MATTQNRRSSVSSATTKRQAMTSNSSLENNNHGKLVAKKRPALTNISNHTTASARNSLSHSSKLAPCTSKAVSIKKSNSNAASSVLPTSSFVKPISKTVSIPRSDAAIPKITAIPLPATCSMDISPSHSDGSLVSMDETMSTSDSLRSPDVEYIDDNQTAAFDSIEKKAFSTLYISEDVKAADICKRDVLVDIESGDKIANIDNNFVDPQLCATMACDIYKHLRATEVKKRPSTDFMEKVQKDINASMRAILIDWLVEVAEEYRLVPDTLYLTVNYIDRYLSGNLMDRQRLQLLGVACMMIASKYEEICAPQVEEFCYITDNTYFKEEVLQMESTVLNYLKFEMTAPTAKCFLRRFVRAAQGLNEVLSLQLEHLASYIAELSLLEYNMLCYAPSVIAASAIFLAKYILLPSKKPWNSTLRHYTLYQPSDLRDCVVALHSLCCNNNNSSLPAIREKYSQHKYKFVAKKYCPPTIPVEFFQNISC

SEQ ID NO: 2774 - protein, 437 aa, Petunia x hybrida
MNTNRAVLVPHRGEVGGKQKNGQADGRNNRRVLGDIGNLVTGAPVIEGKPKAQISRPATRSFCAQLLANAQAEKNKVKPLAEVVNKVPAKKKASDKPAVQEAVIVISPDEEVKKKTIEKSPLSKRKAKKTGKTLTSTLTARSKAACGLSNRPKNEIDDIDAADAANHLAVVEYVEDIYNFYKLTEDESRVNNYMEFQPELNHKMRAILVDWLIEVHRKFELMPESLYLTINILDRFLSMKTVPRKELQLVGISAMLIACKYEEIWAPEVNDFMHISDNVYTRDHILQMEKAILGKLEWYLTVPTPYVFLVRYIKAAMPSDDQEIQNMAFFFAELGLMNYTTTISYCPSMLAASAVYAARGTLNKGPLWTPTLQHHTGYSEEQLMECTKQLVSYHKGAAESKLKAIYRKFSSPDRGAVALFPPARNLLPTTTTTTTSS

SEQ ID NO: 2775 - protein, 441 aa, Antirrhinum majus
MGSRHQVVQQQNRGDVVPGAIKQKSMAVEKKNRRALGDIGNVVTVRGVEGKALPQVSRPITRGFCAQLIANAEAAAAENNKNSLAVNAKGADGALPIKRAVARVPVQKKTVKSKPQEIIEISPDTEKKKAPVLEKEITGEKSLKKKAPTLTSTLTARSKAASVVRTKPKEQIVDIDAADVNNDLAVVEYVEDMYKFYKSAENDSRPHDYMDSQPEINEKMRAILIDWLVQVHYKFELSPETLYLTINIVDRYLASKTTSRRELQLLGMSSMLIASKYEEIWAPEVNDLVCISDGSYSNEQVLRMEKKILGALEWYLTVPTPYVFLVRFIKASLPDSDVEKNMVYFLAELGMMNYATIIMYCPSMIAAAAVYAARCTLNKMPIWNETLRMHTGFSEVQLMDCAKLLIDFHGGSTDQKLQGIYRKYSRLEKGAVALLPQPLLA

SEQ ID NO: 2776 - protein, 473 aa, Antirrhinum majus
MGSRNIVQQQNRAEAAVPGAMKQKNIAGEKKNRRALGDIGNLVTVRGVDGKAKAIPQVSRPVTRSFCAQLLANAQTAAADNNKINAKGAIVVDGVLPDRRVAAARVPAQKKAAVVKPRPEEIIVISPDSVAEKKEKPIEKEKAAEKSAKKKAPTLTSTLTARSKAASGVKTKTKEQIVDIDAADVNNDLAVVEYVEDMYKFYKSVENESRPHDYMGSQPEINEKMRAILIDWLVQVHHKFELSPETLYLTINIVDRYLASETTIRRELQLVGIGAMLIASKYEEIWAPEVHELVCISDNTYSDKQILVMEKKILGALEWYLTVPTPYVFLVRFIKASMTDSDVENMVYFLAELGMMNYATLIYCPSMIAAASVYAARCTLNKAPFWNETLQLHTGFSEPQLMDCAKLLVAFPKMAGDQKLKSIYRKYSNLERGAVALLSPAKSVFVFLIELLMNAIEKIQCSLFFTSEIWCRF

SEQ ID NO: 2777 - protein, 256 aa, Triticum aestivum
  unsure (1)..(256): unsure at all Xaa locations
XRKRPSTDFLETIQKDVNPSMRAILIDWLVEVAEEYRLVPDTLYLTVNYIDRYLSGNEINRQRLQLLGVACMLIAAKYEEICAPQVEEFCYITDNTYFKDEVLDMEASVLNYLKFEMTAPTAKCFLRRFVRAAQVCDEDPPLHLEFLANYVAELSLLEYSLLAYPPSLVAASAIFLSKFILQPAKHPWNSTLAHYTQYKPSELCDCVKALHRLFSVGPGSNLPAIREKYSQHKYKFVGKKQCPTSVPAEFFRDAAC

SEQ ID NO: 2778 - protein, 502 aa, Zea mays
MSTHAASRRSSSSSAVAKRPAIAEGATKAAGPGPTAAQAKKRTALVNITNVAAPGARVAAVGKVAPPVTGAKLNPATSGAPLKKPSLANARTIRGSAAKSASIKPAPPVSRHDSSSEQKHNVPVPTTVHVPSRAPALVPYSSFVSPGRSGDSVSTDETMSTCDSMKSPDFEYIDNGGCSMLASLQRRADEHLRTSEDRDVEENKWKKNGPAPMEIDSICEVDSNFEDPQLCAALASDIYMHLREAEMKKRPSTDFMETIQKDVNPSMRAILIDWLVEVAEEYRLAPDTLYLTVNYIDRYLSGNEINRQRLQLLGVACMLIAAKYEEICAPQVEEFCYITDNTYFRDEVLEMEASVLNYLKFEMTAPTAKCFLRRFARSAQACDEDPALHLEFLANYIAELSLLEYSLLSYPPSLIAASAIFLARFVLQPTKYPWNSTLAHYTQYKPSELSECVKALHRLSSVGPGSNLPAIREKYSQHKYKFVAKKQSPPQIPAEFFRDAAC

SEQ ID NO: 2779 - protein, 502 aa, Zea mays; identical to SEQ ID NO: 2778

SEQ ID NO: 2780 - protein, 512 aa, Zea mays
MSTIAASRRSSSSSSSATAKRPAIADGPGGPKATAAQAKKRVALGNITNVAARGGRASVGGSLGNVMAPTSSAKLNPTVPLKKPSLATSARSVSSSIRGSADKPASIKPAPPVARHGSATQRHNNVPPPKVPTIADVPSRAPALVSCTGLVSPGRSGDSVSSDETMSTCDSMKSPDFEYVDNQDTSMLASLQRRTSEHLRISEDRDVEENKRKKNAVAPMEIDRICDVDSEYEDPQLCATLASDIYMHLREAETKKRPSTDFMETIQKDVNPSMRAILIDWLVEVAEEYRLVPDTLYLTVNYIDRYLSGNEISRQRLQLLGVACMLIAAKYEEICAPQVEEFCYITDNTYFRDEVLDMEASVLNYLKFEMTAPTAKCFLRRFARAAQACDEDPALHLEFLANYIAELSLLEYSLLSYPPSLIAASAIFLARFILQPTKYPWNSTLAHYTQYKPSKLSECVKALHRLCSVGSGSNLPAIREKYSQHKYKFVAKKQCPPQIPSLEFFRDATCLD

SEQ ID NO: 2781 - protein, 456 aa, Zea mays
RASVGSLGNVTAPTSSAKLNPTVPLKKPSLATSARSVSSSIRGSADKPASIKPAPPVARHGSATQRHNNVPPPKVPTIADVPSRAPALVSCTGLVSPGRSGDSVSSDETMSTCDSMKSPDFEYVDNQDTSMLASLQRRTSEHLRISEDRDVEENKRKKNAVAPMEIDRICDVDSEYEDPQLCATLASDIYMHLREAETKKRPSTDFMEMIQKDVNPSMRAILIDWLVEVAEEYRLVPDTLYLTVNYIDRYLSGNEIRRKRLQLLGVACMLIAAKYEEICAPQVEEFCYITDNTYFRDEVLDMEASVLNYLKFEMTAPTAKCFLRRFARAAQACDEDPALHLEFLANYIAELSLLEYSLLSYPPSLIAASAIFLARFILQPTKYPWNSTLAHYTQYKPSKLSECVKALHRLCSVGSGSNLPAIREKYSQHKYKFVAKKQCPPQIPSLEFFRDATCLD

SEQ ID NO: 2782 - protein, 484 aa, Zea mays
  unsure (1)..(484): unsure at all Xaa locations
NSPLPHRLSRNVLLGSRAPLIGVGHGGXNAGARGAKEAVVTSGKRVALGNISNVFRGSWGSGAANSASDAKLSSTKPDDVKKGSYACLRNVNTERGSSRRLASEQFDQAVSLLQKNTSLPSVPDVVSTGCSSPXXPVSGXXSVSMEDAMSTCNSTESSDVEYLNNNDDPSMTSSSHWWASDRPHFSDSMDVAEFNWRKHSPNHXXTYKDPRLSTTLACEIYESLREAETRKMPPTNFLETTQTDMSKTMRAILIDWLVEVTEEYRLVPETLYLTVNYIDRYLSVKEISRHRLQLVGVACLLIAAKYEEICPPLVEELCYITDYSYTKEEVLQMEASVLNNLKFEMTVPTAKCFLRRFVRVAQVPDKGSSLHLEFLVNYICELSLLEYSLLCYLPSMVAASSVFLAKFILMPIKNPWNSSLSYYTRYTPSELRGCVRVLHRLFRLGPGSNLPAIREKYSQHKYKFVAKKYCPQSIPTKFFQDLTS

SEQ ID NO: 2783 - protein, 483 aa, Zea mays
  unsure (1)..(483): unsure at all Xaa locations
NSHFRTDSPEMSCWAAGGRKFASAMAENAGARGAKEAVVTSGKRVALGNISNVFRGSWGSGAANSASDAKLSSTKPDDVKKGSYACLRNVNTERGSSRRLASEQFDQAVSLLQKNTSLPSVPDVVSTGCSSPXXPVSGXXSVSMEDAMSTCNSTESSDVEYLNNNDDPSMTSSSHWWASDRPHFSDSMDVAEFNWRKHSPNHXXTYKDPRLSTTLACEIYESLREAETRKMPPSNFLXETTQTDMSKTMRAILIDWLVEVTEEYRLVPETLYLTVNYIDRYLSVKEISRHRLQLVGVACLLIAXYEEICPPLVEELCYITDYSYTKEEVLQMEASVLNNLKFEMTVTTAKCFLRRFVRVAQVPDKGSSLHLEFLVNYICELSLLEYSLLCYLPSMVAASSVFLAKFILMPIKNPWNSSLSYYTRYTPSELRGCVRVLHRLFRLGPGSNLPAIREKYSQHKYKFVAKKYCPQSIPTKFFQDLTS

SEQ ID NO: 2784 - protein, 419 aa, Dreissena polymorpha
MSQFAIHQDVENQVPRRGKAANTRTVTQGQKRAVLGVITNQANQPNRVQPSRAAKPKVPETVQDENAFAKENWKILGQTGQFSVFVDEQTKPVSKAPKSTELPSVLTAVPHTRLPLDQVPCSPEIICLDDSVESPMVLDIQEDEKKPFDREAVILTAPEYEEDIYSYLREAEAKNRAKPGYMKRQQDITSSMRSILVDWLVEVAEEYKLHRETLFLAVNYIDRFLSKISVLRGKLQLVGAASMFLAAKYEEIYPPDVTEFAYITDDTYDKKQILRMEHLILKVLAFDVAIPTTNWFCESFLKSIDAEEKLKSLTMFLSELTLIEMDSYLKYVPSITASACICLARYSLGLEPWPQSLVKKTGYEVGHFVDCLKELHKTYQAAESHPQQAVQEKYKQDKFQQVSDFTKNPVPHSLTLLAV

SEQ ID NO: 2785 - protein, 415 aa, Schizosaccharomyces pombe
MDVSTQTRHATYFQDENQLQKDHIYVKKKSHIKLNTGVPAPFKAVDNINQQDEPTLIEGNNESSISSSTGDTFEEDFAYQDKVEIEERSIRSTPKSIGDDDLENREGSFDAPEGILTHGKHRLPTIPEWTKEDLAALSEAAARLQANPSPEDIETDPSMVPDYDPEIFHYMQSLERKLAPPPNYMSVQQEIDWVTRHMLVDWIVQVQIHFRLLPETLFLAVNLIDRFLSIKVVSLQKVQLVGLSALLIACKYEEIHPPSIYNFAHVVQGIFTVDEIIRAERYMLMLLDFDISWPGPMSFLRRISRAHSYDHDIRMLAKYLQEVTLMDEIFIGAHISFIAATAYYLSMQMLGHLDWTPCHVYYSGYTARQLKPCANIIWECLVDAPNHHNAIYRKYSENRMKRVSAFAHNWVLSVI

SEQ ID NO: 2786 - protein, 310 aa, Schizosaccharomyces pombe
MDVSTQTRHATYFQDENQLQKDHIYVKKKSHIKLNTGVRAPFKAVDNINQQDEPTLIEGNNESSISSSTGDTFEEDFAYQDKVEIEERSIRSTPKSIGDDDLENREGSFDAPEGILTHGKHRLPTIPEWTKEDLAALSEAAARLQANPSPEDIETDPSMVPDYDPEIFHYMQSLERKLAPPPNYMSVQQEIDWVTRHMLVDWIVQVQIHFRLLPETLFLAVNLIDRFLSIKVVSLQKVQLVGLSALLIACKYEEIHPPSIYNFAHVVQGIFTVDEIIRAERYMLMLLDFDISWPGPMSFLRRISRADSYD

SEQ ID NO: 2787 - protein, 402 aa, Schizosaccharomyces pombe
MNSNNKRVALQEISNYVSKSLNVKGWVNAQVREISLQNGCSPSDKHFPSQSWHGISSIEESQIQKDYDSFLASPLEEEIVFTEKQLLVDLDVCSISNVQSPNCSVSEFGIAIEESNDNCAEEDEEEELQMRYSADESVSVEYAKEILSHMEKLEIRFMPDYRHMSAQPYYVTEMRASVINWIVGVHTCINLLPESLFLSINVLDRFLSLQNVPASKMKLCGATALFIACKYEEIHPPTVKDLEIVLEGEWIGEDICGMEKYMLMVLQYQLGWPGPVSFLRLLTIVNKWESQLRIMIKYFLEVSLVEQRFSSLRASQLVATCAYTGQSILQEENWSNTLPQITGYDYMSLVSYVHLLLKCLENPFDHHYAIYSKYATPYFHGISRQVHDWIATNTNLMAMDGS

SEQ ID NO: 2788 - protein, 359 aa, Schizosaccharomyces pombe
MLVSSNEEQLTAHTPTSSSSIEPKILAACSYSLSVGPCSLAVSPKGVNSKSPSLKNETAFVVDSVSTLSAESSALLYNTQSSLLTGLSMNGYLGEYQEDIIHHLITREKNFLLNVHLSNQQPELRWSMRPALVNFIVEIHNGFDLSIDTLPLSISLMDSYVSRRVVYCKHIQLVACVCLWIASKFHETEDRVPLFEELKLACKNIYAEDLFIRMERHILDTLDWDISIPTPASYIPVLDPIFFLVLDASMFVPNLFKFPASKIACSVMNIVNEHVGSFLLTHPSMESYRKDDNFLWPEDLDTVTSYMENMSKRYANEECTDLLFSSLGRISSILAKKYPEQCAMAAWCNMTEKDTERTL

SEQ ID NO: 2789 - protein, 359 aa, Schizosaccharomyces pombe
MLVSSNEEQLTAHTPTSSSSIEPKILAACSYSLSVGPCSLAVSPKGVNSKSPSLKNETAFVVDSVSTLSAESSALLYNTQSSLLTGLSMNGYLGEYQEDIIHHLITREKNFLLNVHLSNQQPELRWSMRPALVNFIVEIHNGFDLSIDTLPLSISLMDSYVSRRVVYCKHIQLVACVCLWIASKFHETEDRVPLLQELKLACKNIYAEDLFIRMERHILDTLDWDISIPTPASYIPVLDPIFFLVLDASMFVPNLFKFPASKIACSVMNIVNEHVGSFLLTHPSMESYRKDDNFLWPEDLDTVTSYMENMSKRYANEECTDLLFSSLGRISSILAKKYPEQCAMAAWCNMTEKDTERTL

SEQ ID NO: 2790 - protein, 277 aa, Schizosaccharomyces pombe
MLVSSNEEQLTAHTPTSSSSIEPKILAACSYSLSVGPCSLAVSPKGVNSKSPSLKNETAFVVDSVSTLSAESSALLYNTQSSLLTGLSMNGYLGEYQEDIIHHLITREKNFLLNVHLSNQQPELRWSMRPALVNFIVEIHNGFDLSIDTLPLSISLMDSYVSRRVVYCKHIQLVACVCLWIASKFHETEDRVPLLQELKLACKNIYAEDLFIRMERHILDTLDWDISIPTPASYIPVLDPIFFLVLDASMFVPNLFKFPASKIACSVMNIVNEHVGS

SEQ ID NO: 2791 - protein, 645 aa, Neurospora crassa
MWAPPVRYGDENIPPADPTHQSKRSDSKIKAMMAVNGTLNAPPKRAACFDKSNTSKPLADGGNKDMLKNRVKPMVTTSSTRDLRSDGRENNRSAAEEHYMRPTATSKAASHGHQKYSSTAPLSSHAASGAYGGIRSHNAIAKLSAPVKKTTNVYRDNKVKEESTSHAPTSSSVDDLVAMVDKHIKDPRHYKSQPQLKSDQQHTLHRNQSKYVPNYENLNDVDDPDDSNADYAESYEDAVEQLSRDLDIPANTDPAAIVHANHMSIAQASYDSMPQGAPLAPSKPVRALPLPPNVSDPEEYSEDDDDQDLYDDQGYTTAHSYRSHCDNTTGGPPTLVAPKFTADIQKELDIAKAWVLEHQTEEEVEEENWDVSMVAEYGDEIFEYLRELEERMLPNPHYMDIQTEIRWSMRSVLMDWLVQVHHRFSLLPETLFLTVNYIDRFLSVKVVSLGKLQLVGATAIFVAAKYEEINCPSIQELVYMVDQGYSVEEILKAEKFMLTMLNFELGWPGPMSFLRRISKADDYDLETRTLAKYLLEVTIMDERFVGCPASYLAAGAHCLSRFFLQRGPWTHAHVHFSGYTLAQLRPLIISILDCCQEPRKHHGAVYDKYSHQRFKSASTFVEGKIANGFVLPIRTNASISDSAQS

SEQ ID NO: 2792 - protein, 653 aa, Neurospora crassa
MDAKPQRPLWAPPVRYGDENIPPADPTHQSKRSDSKIKAMMAVNGTLNAPPKRAACFDKSNTSKPLADGGNKDMLKNRVKPMVTTSSTRDLRSDGRENNRSAAEEHYMRPTATSKAASHGHQKYSSTAPLSSHAASGAYGGIRSHNAIAKLSAPVKKTTNVYRDNKVKEESTSHAPTSSSVDDLVAMVDKHIKDPRHYKSQPQLKSDQQHTLHRNQSKYVPNYENLNDVDDPDDSNADYAESYEDAVEQLSRDLDIPANTDPAAIVHANHMSIAQASYDSMPQGAPLAPSKPVRALPLPPNVSDPEEYSEDDDDQDLYDDQGYTTAHSYRSHCDNTTGGPPTLVAPKFTADIQKELDIAKAWVLEHQTEEEVEEENWDVSMVAEYGDEIFEYLRELEERMLPNPHYMDIQTEIRWSMRSVLMDWLVQVHHRFSLLPETLFLTVNYIDRFLSVKVVSLGKLQLVGATAIFVAAKYEEINCPSIQELVYMVDQGYSVEEILKAEKFMLTMLNFELGWPGPMSFLRRISKADDYDLETRTLAKYLLEVTIMDERFVGCPASYLAAGAHCLSRFFLQRGPWTHAHVHFSGYTLAQLRPLIISILDCCQEPRKHHGAVYDKYSHQRFKSASTFVEGKIANGFVLPIRTNASISDSAQS

SEQ ID NO: 2793 - protein, 416 aa, Neurospora crassa
MVTSRHNDETFFVESDDQPAPRVNVRDAAKLIARNKQEMIANNLSRLACDEYLEDIMQHIRHMEDETLPDANLIDMQREIQWFMRPYLIDFLIEAHAAFSLLPETLFLTVNLLDRYCSKRVVYKQHYQLVGCAALLIAAKYGDKKDRVPQINELNNMCCGLYDAGMFTQMEMHVLNTLDWNIGHPTVDFFTQLIVAEERDSRDVEHMAAYICEIALYHRDFVSTKPSIMARVSLVLARAILGKPEVNDGEWDQVENATLLALSQHLHQPSVTLSRKYSSAYLSKVSGKLADFLAQQAAINRRGGAPPSSPGELTPNSSKASNVYSTPHKGLGAVPGAADGYMTPPITPDAASFAQNGTMMKEYPAPRCPVTPTPQPNSHSQSYPPAAQHQTSASSTSSSTKAPSYFETAPSSQVTY

SEQ ID NO: 2794 - protein, 427 aa, Caenorhabditis briggsae
MDFASSSSAGPSGSSSSFDYFPEPSTSRTSTLNRNVALPKWRMPAHLAAIVNDSEHSEKTRYFIYNRTDPNIQCDMRAFYNCMEYEEMLKPNYEYFTAVQNELTPYHREQAIDWIYDVAKEENCDGDVFLLAVALIDRFLSLQCILKHDIQMVAGVALFMASKLKAPHPLTAFKISYYSDNSLSIPMILQWELVMITALDWETESPTAFSFFDFLASSYPQIHGMRSEFQYVVHKCQKMHRLATLFPSMQCAIVLYYVSHIRHHLPLAEDIKALMVNMFQLEINLLDPYIPLVKRCLAPAPIYAVEPEQQVPAPIAPIAPIAMQEEDIDGDDEQEDDEEEEMEMVVSPKEKAPEGTLTPPNGEEEPHQVQVFAQVPECDQSPITPLNDSGFSSDFSSPSNSAEKKRRRSSDWFEDEDYTPPKIFKFK

SEQ ID NO: 2795 - protein, 405 aa, Caenorhabditis elegans
MDFESSSAGPSTSYAEEPCTLSMLPQVSAVLSETSITESNVSCQLHPSRSAALNDNVRTLIYNRTDPHIQLDMRAFYNCMEYEEALQPNYHYFTGVQENITPFHREQAIDWIYDVAKEENCDGDVFLLAVSLIDRFMSVQNILKHDIQMIAGVALFIASKLKAPHPMTASKIAYYSDNSCPIDMILQWELLIVTTLQWETESPTAFSFFDFLASRIPQIHNMRGDFQTVVQKCQKMHKLATLFPSMQCAIGLYYVSNLPTQNKELAVKIKDLLANMFQLEVNLLDSYIPMVQRCMSTTPIYTSEDAEKTEPTPSAPASTQEPEAFQELKELKEEPLPTPPPEEPAFQKLVLLEPIPLSEQTPSTPLNDSGFSSDVSSPASSEKKRRRSTDWFEEDSTPPKIFKTL

SEQ ID NO: 2796 - protein, 405 aa, Caenorhabditis elegans
MDFESSSAGPSTSYAEEPCTLSMLPQVSAVLSETSITESNVSCQLHPSRSAALNDNVRTLIYNRTDPHIQLDMRAFYNCMEYEEALQPNYHYFTGVQENITPFHREQAIDWIYDVAKEENCDGDVFLLAVSLIDRFMSVQNILKHDIQMIAGVALFIASKLKAPHPMTASKIAYYSDNSCPIDMILQWELLIVTTLQWETESPTAFSFFNFLASRIPQIHNTRGDFQTVVQKCQKMHKLATLFPSMQCAIGLYYVSNLPTQNKELAVKIKDLLANMFQLEVNLLDSYIPMVQRCMSTTPIYTSEDAEKTEPTPSAPASTQEPEAFQELKELKEEPLPTPPPEEPAFQKLVLLEPIPLSEQTPSTPLNDSGFSSDVSSPASSEKKRRRSTDWFEEDSTPPKIFKTL

SEQ ID NO: 2797 - protein, 426 aa, Patella vulgata
MSMVHGSSFQIAQDGENENQGVQRVKKAGLTARGNVAVAKRSALGTITNQNIRVQPSRAAKSGNADCQDENVFAKQKSFGSSNNENKGFKIHVDEPTVQVLTTATLKTTRQSEDEDIKLNDQVTSLPSLQALEDIQVDNENGSPMVLDVTIEDAEKKPIDREAIILSVPEYAEDIYKHLREAESRHRSKPGYMKKQPDITNSMRSILVDWMVEVSEEYKLHRETLFLAINYIDRFLSQMSVLRGKLQLVGAASMFIASKYEEIYPPEVSEFVYITDDTYEQKQVLRMEHLILKVLSFDVAQPTINWFTDTYAKMADTDETTKSLSMYLSELTLVDADPYLKYLPSTIAAASLCLANITLGSEPWPSSLAKESKYEISEFSECLQEMYQTYLNAPNHPQQAIREKYKSSKYQQVSSISPPSSLSFTM

SEQ ID NO: 2798 - protein, 422 aa, Spisula solidissima
MSQPFALHHDGENQMQRRGKMNTRSNGLSGQKRAALGVITNQVNQQVRIQPSRAAKPKSSEFNIQDENAFTKKNAKTFGQQPSQFSVFVDPTPAAPVQKAPTSHVTDIPAALTTLQRVPLTEVPGSPDIISLEDSMESPMILDLPEEEKPLDREAVILTVPEYEEDIYNYLRQAEMKNRAKPGYMKRQTDITTSMRCILVDWLVEVSEEDKLHRETLFLGVNYIDRFLSKISVLRGKLQLVGAASMFLAAKYEEIYPPDVKEFAYITDDTYTSQQVLRMEHLILKVLTFDVAVPTTNWFCEDFLKSCDADDKLKSLTMFLTELTLIDMDAYLKYLPSITAAAALCLARYSLGIEPWPQNLVKKTGYEIGHFVDCLKDLHKTSLGAESHQQQAVQEKYKQDKYHQVSDFSKNPVPHNLALLAL

SEQ ID NO: 2799 - protein, 445 aa, Asterina pectinifera
MSFAFSENPLTYDVENSQNAGPQTRKTKREDAGRGNGPQACKRAALGTLSTNVTRKQPSRAAKQSGFADGFYNYQDENAFARPAAGKSTGSCGFALPPTASQPSFSIHIDPVEPAPSRARFLKEQKPTELPLDPIGYFVTRSRKTALRTVFTLDESASPMVLDTSLSEENTAQATIEDIDNSDGVFGVPEYAEDIYEYLREAELRNRPKPGYMRKQPDITSGMRSILVDWLIEVGEEYRLHNETLYLAVSYIDRFLSQMSVLRSKLQLVGAASMFLAAKFEEIYPPEVNEFVYITDDTYTVKQVLRMEHLILKVLSFDVAVPTANAFLSRYLKAAKADSRNGTSSQYLAELTLPDCEYIKYIPSTIAAAAVCLANYTLSGTAWTPMLEKHSGYNLEDIAPCVRDLLKTFTNAPSQSQQAAQEKYKSQRYNSVSMIAAPTTLPSWL

SEQ ID NO: 2800 - protein, 410 aa, Danio rerio
MLSRLRGAAAKNRVENRENVNPNPKAANNRTVLGELENSQRRQLGLRGAKQGSGPQIIACKPEENARSFGERPSNRQPAAFQIHVDEPDGACSKKAPLQRSTMDCSPLTLNPTVTRLRQPLATIDLPLEASFDSPMDMSVIDCEERPTNVNEVSDYAAEIHTHLREMEVKSKPKAGYMRKQPDITNSMRAILVDWLVEVGEEYKLQNETLYLAVNYIDRFLSSMSVLRGKLQLVGTAAMLLASKFEEIYPPEVAEFVYITDDTYTKKQVLRMEHLVLTVLSFDLAAPTINQFLTQYFLHQPVSSKVESLSMFLGELSLIDCDPFLKYLPSQMAAAAFILANHTLASGSWSKSLVDLTGYSLEDLLPCVQDLHQTYLAASQHAQQAVREKYKGSKYHEVSLIEPPEKLMLN

SEQ ID NO: 2801 - protein, 428 aa, Danio rerio
MSTQGSAVHDSDIHNQENMLSRLRGAAAKNRVENRENVNPNPKAANNRTVLGELENSQRRQLGLRGAKQGSGPQIIACKPEENARSFGERPSNRQPAAFQIHVDEPDGACSKKAPLQRSTMDCSPLTLNPTVTRLRQPLATIDLPLEASFDSPMDMSVIDCEERPTNVNEVSDYAAEIHTHLREMEVKSKPKAGYMRKQPDITNSMRAILVDWLVEVGEEYKLQNETLYLAVNYIDRFLSSMSVLRGKLQLVGTAAMLLASKFEEIYPPEVAEFVYITDDTYTKKQVLRMEHLVLTVLSFDLAAPTINQFLTQYFLHQPVSSKVESLSMFLGELSLIDCDPFLKYLPSQMAAAAFILANHTLASGSWSKSLVDLTGYSLEDLLPCVQDLHQTYLAASQHAQQAVREKYKGSKYHEVSLIEPPEKLMLN

SEQ ID NO: 2802 - protein, 428 aa, Carassius auratus
MSSVGQTQRSAVQDPGADIHNQENMLSRLRGAAKNRIENRENVNPKPGNRTVLGALENNQRRPPVLRAAKQVSGPQITACKSEEHGSFGEKPSTRPPAFQIHVDEPDGACSKKQCTQRATMACSPLTLNPTVTRLRQPLATIDLPVEASFDSPMDMSIIDSEERPTNVNEVSDYAAEIHAHLREMEIKSKPKAGYMKKQPDITNSMRAILVDWLVEVGEEYKLQNETLYLAVNYIDRFLSSMSVLRGKLQLVGTAAMLLASKFEEIYPPEVAEFVYITDDTYTKKQVLRMEHLVLTVLSFDLAAPTINQFLTQYFLHQPVSSKVESLSMFLGELSLIDCDPFLKYLPSQTAAAAFILANHTIAGGSWSKAFVEMTGYTLEDLMPCIQDLHQTYLGAAQHTQQAVREKYKGSKYHEVSLIEPPEKLMLN

SEQ ID NO: 2803 - protein, 391 aa, Carassius auratus
MASRGFAPLSGRQENIMVLGRADGLHALKPGQRVVLGVLTENDQHNRVFGQVSSKYVPALRDASTLDVSTSSATLGVHVVEPVIAQATKPTSFLLPSELLLVDDVVQDLGSGSCMDSSMQSLPEEAAYEDILCVPEYAEDIHRYLRECEVKYRPKPGYMRKQPDITNCMRVILVDWLVEVGEEYKLCSETLFLAVNYLDRFLSCMSVLRGKLQLVGTAAVLLAAKYEEVYPPEVDEFVYITDDTYTKKQLLRMEQHLLRVLAFDMTAPTVHQFLMQYTLEGHICARTVNLALYLSELSLLEVDPFVQYLPSKTAAAAYCLANYTLNGVLWPENLYAFTGYSLAVIIPCLMELHKLHLGAAGRPQQAIQEKYKGSKYCGVSLLEPVESLPLP

SEQ ID NO: 2804 - protein, 391 aa, Carassius auratus
MASRGFAPLSGREENIMVLGRADGLHALKPGQRVVLGVLTENDQHNRVFGQVSSKYVPALRDASTLDVSTSSATLGVHVVEPVIAQATKPTSFLLPSELLLVDDVVQDLGSGSCMDSSMQSLPEEAAYEDILCVPEYAEDIHRYLRECEVKYRPKPGYMRKQPDITNCMRVILVDWLVEVGEEYKLCSETLFLAVNYLDRFLSCMSVLRGKLQLVGTAAVLLAAKYEEVYPPEVDEFVYITDDTYTKKQLLRMEQHLLRVLAFDMTAPTVHQFLMQYTLEGHICARTVNLALYLSELSLLEVDPFVQYLPSKTAAAAYCLANYTLNGVLWPENLYAFTGYSLAVIIPCLMELHKLHLGAAGRPQQAIQEKYKGSKYCGVSLLEPVESLPFP

SEQ ID NO: 2805 - protein, 418 aa, Xenopus laevis
MRRSMASNGHILTASSVVGASSAFQNPCLAKVEVQPNLPQRTVLGVIGDNEQRRRSVSRGGVPAKSLPGIENVLAFPGKILSANPAPVAPKPSFTVYVDEPTETYSVEIDCPSLGDEDSNIVKQNIHLLLDISEASPMVVDTSPQTSPEDDSVTDPDAVAVSEYIHEIHQYLREAELKHRPKAYYMRKQPDITSAMRTILVDWLVEVGEEYKLHTETLYLAMNYLDRFLSCMSVLRGKLQLVGTAAILLASKYEEIYPPDVDEFVYITDDTYSKKQLLRMEHVLLKVLAFDLTVPTVNQFLLQYLQRHAVSVKMEHLAMYMAELTLLEVEPFLKYVPSLTAAAAYCLANYALNKVFWPDTLEAFTGYALSDIAPCLSDLHQFCLGAPYQAQQAIREKYKTTKYMQVSLLEMPSILPLN

SEQ ID NO: 2806 - protein, 415 aa, Xenopus laevis
MSDHLLRDEHQENVQPRKLLVPVGGRTVLGVLQENHRGPKALKVSKPALQQTQVLSVNHLGVNDENYGKIPARKAASKQPAFTIHVDEPDCATNKRKAVHKKTVQDENLQQLNSVLGSIGTRKPLHPIQIAMETSFGSPMDVSIVDEEQKVVGCNNVADYAKEIHTYLREMEVKCKPKAGYMQKQPDITGNMRAILVDWLVEVGEEYKLQNETLYLAVNYIDRFLSSMSVLRGKLQLVGTAAMLLASKFEEIYPPEVAEFVYITDDTYTKKQVLKMEHLVLKVLSFDLAAPTILQYLNQYFQIHPVSPKVESLSMFLGELSLVDADPFLRYLPSVVAAAAFVIANCTINERTWSDPLVEYTSYTLETLKPCILDLYQTYLSAASHQQQAVREKYKAPKNHAVSLIIPPESMSTFL

SEQ ID NO: 2807 - protein, 262 aa, Ateline herpesvirus 3
MNGLFLAKMSGSKNKLNKAKIDPATMKDPRVLNNLKLRELLLPKWTSLWENQQEITISNRTTLLTWLYILCEEFDLDPSVFPLTVSILDRYLCKEQGTKTTLQKIGAACVLIASKIRTVKPMSVAHLTYLSCECFTHSELRDQEKSILEALEWDVEAVLSTDFLIPVCHALKIPEEFWPQLFELTSITICKALVQPNIALLPPCLICAGGLLTTIETENTNYQTWTHYLEDLGCILNFSTNTIRTAKDQVAEALATYNPEAI

SEQ ID NO: 2808 - protein, 395 aa, Gallus gallus
MLAEQENQENVPPAAKAPPPAAGTRVALGLLRGGPARPGPAAQAARNGEGRGAAAGQQQQPFSVYVDEPDEERRRPQRKKERDEEAADAPGLRAALGTVGERRPLAPLGNAMELSLDSPSIMDISITSEAEERPNVNNVPDYVSDIHTYLREMEVKCKPKIGYMKKQPDITNNMRAILVDWLVEVGEEYKLQNETLHLAVNYIDRFLSSMSVLRGKLQLVGTAAMLLASKFEEIYPPEVAEFVYITDDTYNKKQVLRMEHLILKVLSFDLAAPTINQFLTQYFLHQQTNAKVESLSMYLGELTLIDADPYLKYLPSVIAAAAFHLASYTITGQTWPESLCKVTGYTLEHIKPCLMDLHRTYLKAAQHTQQSIREKYKSTKYHAVSLIDAPETLDL

SEQ ID NO: 2809 - protein, 465 aa, Homo sapiens
METGFPAIMYPGSFIGGWGEEYLSWEGPGLPDFVFQQQPVESEAMHCSNPKSGVVLATVARGPDACQILTRAPLGQDPPQRTVLGLLTANGQYRRTCGQGITRIRCYSGSENAFPPAGKKALPDCGVQEPPKQGFDIYMDELEQGDRDSCSVREGMAFEDVYEVDTGTLKSDLHFLLDFNTVSPMLVDSSLLSQSEDISSLGTDVINVTEYAEEIYQYLREAEIRHRPKAHYMKKQPDITEGMRTILVDWLVEVGEEYKLRAETLYLAVNFLDRFLSCMSVLRGKLQLVGTAAMLLASKYEEIYPPEVDEFVYITDDTYTKRQLLKMEHLLLKVLAFDLTVPTTNQFLLQYLRRQGVCVRTENLAKYVAELSLLEADPFLKYLPSLIAAAAFCLANYTVNKHFWPETLAAFTGYSLSEIVPCLSELHKAYLDIPHRPQQAIREKYKASKYLCVSLMEPPAVLLLQ

SEQ ID NO: 2810 - protein, 464 aa, Homo sapiens
METGFPAIMYPGSFIGGWGEEYLSWEGPGLPDFVFQQPVESEAMHCSNPKSGVVLATVARGPDACQILTRAPLGQDPPQRTVLGLLTANGQYRRTCGQGITRIRCYSGSENAFPPAGKKALPDCGVQEPPKQGFDIYMDELEQGDRDSCSVREGMAFEDVYEVDTGTLKSDLHFLLDFNTVSPMLVDSSLLSQSEDISSLGTDVINVTEYAEEIYQYLREAEIRHRPKAHYMKKQPDITEGMRTILVDWLVEVGEEYKLRAETLYLAVNFLDRFLSCMSVLRGKLQLVGTAAMLLASKYEEIYPPEVDEFVYITDDTYTKRQLLKMEHLLLKVLAFDLTVPTTNQFLLQYLRRQGVCVRTENLAKYVAELSLLEADPFLKYLPSLIAAAAFCLANYTVNKHFWPETLAAFTGYSLSEIVPCLSELHKAYLDIPHRPQQAIREKYKASKYLCVSLMEPPAVLLLQ

SEQ ID NO: 2811 - protein, 411 aa, Homo sapiens
VLATVARGPDACQILTRAPLGQDPPQRTVLGLLTANGQYRRTCGQGITRIRCYSGSENAFPPAGKKALPDCGVQEPPKQGFDIYMDELEQGDRDSCSVREGMAFEDVYEVDTGTLKSDLHFLLDFNTVSPMLVDSSLLSQSEDISSLGTDVINVTEYAEEIYQYLREAEIRHRPKAHYMKKQPDITEGMRTILVDWLVEVGEEYKLRAETLYLAVNFLDRFLSCMSVLRGKLQLVGTAAMLLASKYEEIYPPEVDEFVYITDDTYTKRQLLKMEHLLLKVLAFDLTVPTTNQFLLQYLRRQGVCVRTENLAKYVAELSLLEADPFLKYLPSLIAAAAFCLANYTVNKHFWPETLAAFTGYSLSEIVPCLSELHKAYLDIPHRPQQAIREKYKASKYLCVSLMEPPAVLLLQ

SEQ ID NO: 2812 - protein, 432 aa, Homo sapiens
MLGNSAPGPATREAGSALLALQQTALQEDQENINPEKAAPVQQPRTRAALAVLKSGNPRGLAQQQRPKTRRVAPLKDLPVNDEHVTVPPWKANSKQPAFTIHVDEAEKEAQKKPAESQKIEREDALAFNSAISLPGPRKPLVPLDYPMDGSFESPHTMDMSIVLEDEKPVSVNEVPDYHEDIHTYLREMEVKCKPKVGYMKKQPDITNSMRAILVDWLVEVGEEYKLQNETLHLAVNYIDRFLSSMSVLRGKLQLVGTAAMLLASKFEEIYPPEVAEFVYITDDTYTKKQVLRMEHLVLKVLTFDLAAPTVNQFLTQYFLHQQPANCKVESLAMFLGELSLIDADPYLKYLPSVIAGAAFHLALYTVTGQSWPESLIRKTGYTLESLKPCLMDLHQTYLKAPQHAQQSIREKYKNSKYHGVSLLNPPETLNL

SEQ ID NO: 2813 - protein, 260 aa, Homo sapiens
NEVPDYHEDIHTYLREMEVKCKPKVGYMKKQPDITNSMRAILVDWLVEVGEEYKLQNETLHLAVNYIDRFLSSMSVLRGKLQLVGTAAMLLASKFEEIYPPEVAEFVYITDDTYTKKQVLRMEHLVLKVLTFDLAAPTVNQFLTQYFLHQQPANCKVESLAMFLGELSLIDADPYLKYLPSVIAGAAFHLALYTVTGQSWPESLIRKTGYTLESLKPCLMDLHQTYLKAPQHAQQSIREKYKNSKYHGVSLLNPPETLNL

SEQ ID NO: 2814 - protein, 261 aa, Homo sapiens
VPDYHEDIHTYLREMEVKCKPKVGYMKKQPDITNSMRAILVDWLVEVGEEYKLQNETLHLAVNYIDRFLSSMSVLRGKLQLVGTAAMLLASKFEEIYPPEVAEFVYITDDTYTKKQVLRMEHLVLKVLTFDLAAPTVNQFLTQYFLHQQPANCKVESLAMFLGELSLIDADPYLKYLPSVIAGAAFHLALYTVTGQSWPESLIRKTGYTLESLKPCLMDLHQTYLKAPQHAQQSIREKYKNSKYHGVSLLNPPETLNLLNL

SEQ ID NO: 2815 - protein, 258 aa, Homo sapiens
VPDYHEDIHTYLREMEVKCKPKVGYMKKQPDITNSMRAILVDWLVEVGEEYKLQNETLHLAVNYIDRFLSSMSVLRGKLQLVGTAAMLLASKFEEIYPPEVAEFVYITDDTYTKKQVLRMEHLVLKVLTFDLAAPTVNQFLTQYFLHQQPANCKVESLAMFLGELSLIDADPYLKYLPSVIAGAAFHLALYTVTGQSWPESLIRKTGYTLESLKPCLMDLHQTYLKAPQHAQQSIREKYKNSKYHGVSLLNPPETLNL

SEQ ID NO: 2816 - protein, 259 aa, Homo sapiens
EVPDYHEDIHTYLREMEVKCKPKVGYMKKQPDITNSMRAILVDWLVEVGEEYKLQNETLHLAVNYIDRFLSSMSVLRGKLQLVGTAAMLLASKFEEIYPPEVAEFVYITDDTYTKKQVLRMEHLVLKVLTFDLAAPTVNQFLTQYFLHQQPANCKVESLAMFLGELSLIDADPYLKYLPSVIAGAAFHLALYTVTGQSWPESLIRKTGYTLESLKPCLMDLHQTYLKAPQHAQQSIREKYKNSKYHGVSLLNPPETLNL

SEQ ID NO: 2817 - protein, 406 aa, Bos taurus
EFQEDQENVNPEKAAPAQQPRTRAGLAVLRAGNSRGPAPQRPKTRRVAPLKDLPINDEYVPVPPWKANNKQPAFTIHVDEAEEIQKRPTESKKSESEDVLAFNSAVTLPGPRKPLAPLDYPMDGSFESPHTMEMSVVLEDEKPVSVNEVPDYHEDIHTYLREMEVKCKPKVGYMKKQPDITNSMRAILVDWLVEVGEEYKLQNETLHLAVNYIDRFLSSMSVLRGKLQLVGTAAMLLASKFEEIYPPEVAEFVYITDDTYTKKQVLRMEHLVLKVLAFDLAAPTINQFLTQYFLHQQPANCKVESLAMFLGELSLIDADPYLKYLPSVIAAAAFHLALYTVTGQSWPESLVQKTGYTLETLKPCLLDLHQTYLRAPQHAQQSIREKYKNSKYHGVSLLNPPETLNV

SEQ ID NO: 2818 - protein, 268 aa, Bos taurus
GVNEVPDYHEDIHTYLREMEVKCKPKVGYMKKQPDITNSMRAILVDWLVEVGEEYKLQNETLHLAVNYIDRFLSSMSVLRGKLQLVGTAAMLLASKFEEIYPPEVAEFVYITDDTYTKKQVLRMEHLVLKVLAFDLAAPTINQFLTQYFLHQQPANCKVESLAMFLGELSLIDADPYLKYLPSVIAAAAFHLALYTVTGQSWPESLVQKTGYTLETLKPCLLDLHQTYLRAPQHAQQSIREKYKNSKYHGVSLLNPPETLNLHHHHHH

SEQ ID NO: 2819 - protein, 445 aa, Arabidopsis thaliana
MATRANVPEQVRGAPLVDGLKIQNKNGAVKSRRALGDIGNLVSVPGVQGGKAQPPINRPITRSFRAQLLANAQLERKPINGDNKVPALGPKRQPLAARNPEAQRAVQKKNLVVKQQTKPVEVIETKKEVTKKEVAMSPKNKKVTYSSVLSARSKAACGIVNKPKIIDIDESDKDNHLAAVEYVDDMYSFYKEVEKESQPKMYMHIQTEMNEKMRAILIDWLLEVHIKFELNLETLYLTVNIIDRFLSVKAVPKRELQLVGISALLIASKYEEIWPPQVNDLVYVTDNAYSSRQILVMEKAILGNLEWYLTVPTQYVFLVRFIKASMSDPEMENMVHFLAELGMMHYDTLTFCPSMLAASAVYTARCSLNKSPAWTDTLQFHTGYTESEIMDCSKLLAFLHSRCGESRLRAVYKKYSKAENGGVAMVSPAKSLLSAAADWKKPVSS

SEQ ID NO: 2820 - protein, 445 aa, Arabidopsis thaliana
MATRANVPEQVRGAPLVDGLKIQNKNGAVKSRRALGDIGNLVSVPGVQGGKAQPPINRPITRSFRAQLLANAQLERKPINGDNKVPALGPKRQPLAARNPEAQRAVQKKNLVVKQQTKPVEVIETKKEVTKKEVAMSPKNKKVTYSSVLSARSKAACGIVNKPKIIDIDESDKDNHLAAVEYVDDMYSFYKEVEKESQPRMYMHIQTEMNEKMRAILIDWLLEVHIKFELNLETLYLTVNIIDRFLSVKAVPKRELQLVGISALLIASKYEEIWPPQVNDLVYVTDNAYSSRQILVMEKAILGNLEWYLTVPTQYVFLVRFIKASMSDPEMENMVHFLAELGMMHYDTLTFCPSMQAASAVYTARCSLNKSPAWTDTLQFHTGYTESEIMDCSKLLAFLHSRCGESRLRAVYKKYSKAENGGVAMVSPAKSLLSAAADWKKPVSS

SEQ ID NO: 2821 - protein, 428 aa, Arabidopsis thaliana
MMTSRSIVPQQSTDDVVVVDGKNVAKGRNRQVLGDIGNVVRGNYPKNNEPEKINHRPRTRSQNPTLLVEDNLKKPVVKRNAVPKPKKVAGKPKVVDVIEISSDSDEELGLVAAREKKATKKKATTYTSVLTARSKAACGLEKKQKEKIVDIDSADVENDLAAVEYVEDIYSFYKSVESEWRPRDYMASQPDINEKMRLILVEWLIDVHVRFELNPETFYLTVNILDRFLSVKPVPRKELQLVGLSALLMSAKYEEIWPPQVEDLVDIADHAYSHKQILVMEKTILSTLEWYLTVPTHYVFLARFIKASIADEKMENMVHYLAELGVMHYDTMIMFSPSMVAASAIYAARSSLRQVPIWTSTLKHHTGYSETQLMDCAKLLAYQQWKQQEEGSESSTKGALRKKYSKDERFAVALIPPAKALLTGTESA

SEQ ID NO: 2822 - protein, 414 aa, Arabidopsis thaliana
MATGPVVHPQPVRGDPIDLKNAAAKNRRALGDIGNVDSLIGVEGGKLNRPITRNFRAQLLENAQVAAAANKKAPILDGVTKKQEVVRAVQKKARGDKREPSKPIEVIVISPDTNEVAKAKENKKKVTYSSVLDARSKAASKTLDIDYVDKENDLAAVEYVEDMYIFYKEVVNESKPQMYMHTQPEIDEKMRSILIDWLVEVHVKFDLSPETLYLTVNIIDRFLSLKTVPRRELQLVGVSALLIASKYEEIWPPQVNDLVYVTDNSYNSRQILVMEKTILGNLEWYLTVPTQYVFLVRFIKASGSDQKLENLVHFLAELGLMHHDSLMFCPSMLAASAVYTARCCLNKTPTWTDTLKFHTGYSESQLMDCSKLLAFIHSKAGESKLRGVLKKYSKLGRGAVALISPAKSLMSSAP

SEQ ID NO: 2823 - protein, 428 aa, Arabidopsis thaliana
MMTSRSIVPQQSTDDVVVVDGKNVAKGRNRQVLGDIGNVVRGNYPKNNEPEKINHRPRTRSQNPTLLVEDNLKKPVVKRNAVPKPKKVAGNPKVVDVIEISSDSDEELGLVAAREKKATKKKATTYTSVLTARSKAACGLEKKQKEKIVDIDSADVENDLAAVEYVEDIYSFYKSVESEWRPRDYMASQPDINEKMRLILVEWLIDVHVRFELNPETFYLTVNILDRFLSVKPVPRKELQLVGLSALLMSAKYEEIWPPQVEDLVDIADHAYSHKQILVMEKTILSTLEWYLTVPTHYVFLARFIKASIADEKMENMVHYLAELGVMHYDTMIMFSPSMVAASAIYAARSSLRQVPIWTSTLKHHTGYSETQLMDCAKLLAYQQWKQQEEGSESSTKGALRKKYSKDERFAVALIPPAKALLTGTESA

SEQ ID NO: 2824 - protein, 427 aa, Arabidopsis thaliana
MATGPVVHPQPVRGDPIDLKNAAAKNRRALGDIGNVDSLIGVEGGKLNRPITRNFRAQLLENAQVAAAANKKAPILDGVTKKQEVVRAVQKKARGDKREPSKPIEVIVISPDTNEVAKAKENKKKVTYSSVLDARSKVDSLFNIESIMCKAASKTLDIDYVDKENDLAAVEYVEDMYIFYKEVVNESKPQMYMHTQPEIDEKMRSILIDWLVEVHVKFDLSPETLYLTVNIIDRFLSLKTVPRRELQLVGVSALLIASKYEEIWPPQVNDLVYVTDNSYNSRQILVMEKTILGNLEWYLTVPTQYVFLVRFIKASGSDQKLENLVHFLAELGLMHHDSLMFCPSMLAASAVYTARCCLNKTPTWTDTLKFHTGYSESQLMDCSKLLAFIHSKAGESKLRGVLKKYSKLGRGAVALISPAKSLMSSAP

SEQ ID NO: 2825 - protein, 387 aa, Arabidopsis thaliana
MASSRVSDLPHQRGIAGEIKPKNVAGHGRQNRKVLGDIGNLVTGRDVATGKDVAKKAKQPQQQTKAEVIVISPDENEKCKPHFSRRTHIRGTKTFTATLRARSKAASGLKDAVIDIDAVDANNELAAVEYVEDIFKFYRTVEEEGGIKDYIGSQPEINEKMRSILIDWLVDVHRKFELMPETLYLTINLVDRFLSLTMVHRRELQLLGLGAMLIACKYEEIWAPEVNDFVCISDNAYNRKQVLAMEKSILGQVEWYITVPTPYVFLARYVKAAVPCDAEMEKLVFYLAELGLMQYPIVVLNRPSMLAASAVYAARQILKKTPFWTETLKHHTGYSEDEIMEHAKMLMKLRDSASESKLIAVFKKYSVSENAEVALLPSLDDFSVSCA

SEQ ID NO: 2826 - protein, 454 aa, Glycine max
MASRIVQQQQARGEAVVGGGKQQKKNGVADGRNRKALGDIGNLANVRGVVDAKPNRPITRSFGAQLLANAQAAAAADNSKRQACANVAGPPAVANEGVAVAKRAAPKPVSKKVIVKPKPSEKVTDIDASPDKKEVLKDKKKEGDANPKKKSQHTLTSVLTARSKAACGITNKPKEQIIDIDASDVDNELAAVEYIDDIYKFYKLVENESRPHDYIGSQPEINERMRAILVDWLIDVHTKFELSLETLYLTINIIDRFLAVKTVPRRELQLVGISAMLMASKYEEIWPPEVNDFVCLSDRAYTHEHILTMEKTILNKLEWTLTVPTPLVFLVRFIKASVPDQELDNMAHFLSELGMMNYATLMYCPSMVAASAVLAARCTLNKAPFWNETLKLHTGYSQEQLMDCARLLVGFYSTLENGKLRVVYRKYSDPQKGAVAVLPPAKFLLPEGSASQHS

SEQ ID NO: 2827 - protein, 462 aa, Glycine max
MASRAIVQQQQARGEAVVGGGKQQKKNGVADGRNRKALGDIGNLANIRSAVEVKPNRPITRSFGAQLLANAQAAAAAGNNKKQACANVAGPPAVANGGVAVAKRVAPKPGSKKVTVTVKPKPSEEVTDIDASPDKKEVLKDKKKEGDANPKKKSQHTLTSVLTARSKAACGITNKPKEQIIDIDASDVDNELAAVELAAVEYIDDIYKFYKLVENESRPHDYIGSQPEINERMRAILVDWLIDVHTKFELSLETLYLTINIIDRFLAVKTVPRRELQLVGISAMLMASKYEEIWPPEVNDFVCLSDRAYTHEHILTMEKTILNKLEWTLTVPTPLVFLVRFIKASVPDQELDNMAHFLSELGMMNYATLMYCPSMVAASAVLAARCTLNKAPFWNETLKLHTGYSQEQLMDCARLLVGFHSTLENGKLRVVYRKYSDPQKGAVAVLPPAKFLLPEGSASQHS

SEQ ID NO: 2828 - protein, 439 aa, Glycine max
  unsure (1)..(439): unsure at all Xaa locations
MASRLEQQQQPTNVGGENKQKNMGGEGRNRRVLQDIGNLVGKQGHGNGINVSKPVTRNFRAQLLANAQAATEKNKKSSTEVNNGAVVATDGVGVGNFVPARKVGAAKKPKEEPEVIVISSDDESSXKQAVEGKKAREKSAMKNAKGFCSVCSAMCKAACGLPSNFVMNIDATDMDNELAAAEYIDDIYKFYKETEEDGCVHDYMGSQPDINAKMRSILVDWLIEVHRKFELMPETLYLTLNIVDRFLSVKAVPRRELQLVGISSMLIASKYEEIWAPEVNDFVCISDNAYVSEQVLMMEKTILRKLEWYLTVPTPYHFLVRYTKASTPSDKEMENMVFFLAELGLMHYPTVILYRPSLIAASAVFAARCTLGRSPFWTNTLMHYTGYSEEQLRDCAKIMANLHAAAPGSKLRAVYKKFSNSDLSAVALLSPAKDLSALS

SEQ ID NO: 2829 - protein, 373 aa, Glycine max
MWLVLAVANEGVAVAKRAAPKPVSKKVIVKPKPSEKVTDIDASPDKKRVLKDKKKEGDANPKKKSQHTLTSVLTARSKAACGITNKPKEQIIDIDASDVDNELAAVELAAVEYIDDIYKFYKLVENESRPHDYIGSQPEINERMRAILVDWLIDVHTKFELSLETLYLTINIIDRFLAVKTVPRRELQLVGISAMLMASKYEEIWPPEVNDFVCLSDRAYTHEHILTMEKTILNKLEWTLTVPTPLVFLVRFIKASVPDQELDNMAHFLSELGMMNYATLMYCPSMVAASAVLAARCTLNKAPFWNETLKLHTGYSQEQLMDCARLLVGFHSTLENGKLRVVYRKYSDPQKGAVAVLPPAKFLLPEGSASQHS

SEQ ID NO: 2830 - protein, 440 aa, Glycine max
MASRLEQQQQPTNVGGENKQKNMGGEGRNRRVLQDIGNLVGKQGHGNGINVSKPVTRNFRAQLLANAQAATEKNKKSSTEVNNGAVVATDGVGVGNFVPARKVGAAKKPKEEPEVIVIISDDESDEKQAVKGKKAREKSAMKNAKAFSSVLSARSKAACGLPRDFVMNIDATDMDNELAAAEYIDDIYKFYKETEEDGCVHDYMGSQPDINAKMRSILVDWLIEVHRKFELMPETLYLTLNIVDRFLSVKAVPRRELQLVGISSMLIASKYEEIWAPEVNDFVCISDNGYVSEQVLMMEKQILRKLEWTLTVPTPYHFLVRDTKASTPSDKEMENMVFFLAELGLMHYPTVILYRPSLIAASAVFAARCTLGRSPFWTNTLMHYTGYSEEQLRDCAKIMANLHAAAAPGSKLRAVYKKFSNSDLSAVALLSPAKDLSALS

SEQ ID NO: 2831 - protein, 440 aa, Glycine max; identical to SEQ ID NO: 2830

SEQ ID NO: 2832 - protein, 275 aa, Glycine max
SGFPRRPTRPLAAVEYIDDIYKFYKLVENESHPHDYIDSQPEINERMRAILVDWLIDVHTKFELSLETLYLTINIIDRFLAVKTVPRRELQLVGISAMLMASKYEEIWPPEVNDFVCLSDRAYTHEQILAMEKTILNKLEWTLTVPTPFVFLVRFIKAAVPDQELENMAHFMSELGMMNYATLMYCPSMVAASAVFAARCTLNKAPLWNETLKLHTGYSQEQLMDCARLLVGFHSTLGNGKLRVVYRKYSDPQKGAVAVLPPAKLLSEGSASQHS

SEQ ID NO: 2833 - protein, 293 aa, Glycine max
  unsure (1)..(293): unsure at all Xaa locations
LGFFFFFFFFFFFFFFVGELGIDATDMDNELAAAEYLDDIYKFYKXTEKKGWVGXTGVRISFFNAKMRSILGDWLIEVHRKFELMPETLYLTLNIVDRFLSVKAVPRRELQLVGISSMLIASKYEEIWAPEVNDFECISDNAYVSQQVLMMEKTILRKLEWYLTVPTPYHFLGRYIKASTPSDKEMENMVFFLAELGLMHYPTAILYRPSLIAAAAVFAARCTLGRSPFWTSTLKHYTGYSEEQLRDCAKIMVNLHAAAPGSKLRAVYKKFCNSDLSAVALLSPAKENCLEQA

SEQ ID NO: 2834 - protein, 257 aa, Glycine max
DIYKFYKLVENESHPHDYIDSQPEINERMRAILVDWLIDVHTKFELSLETLYLTINIIDRFLAVKTVPRRELQLVGISAMLMASKYEEIWPPEVNDFVCLSDRAYTHEQILAMEKTILNKLEWTLTVPTPFVFLVRFIKAAVPDQELENMAHFMSELGMMNYATLMYCPSMVAASAVFAARCTLNKAPLWNETLKLHTGYSQEQLMDCARLLVGFHSTLGNGKLRVVYRKYSDPQKGAVAVLPPAKLLSEGSASQHS

SEQ ID NO: 2835 - protein, 436 aa, Catharanthus roseus
MATRNVVQVPQQNRDAAPAGMKQKNMAGEGKIRRALGDIGNLVTVRGVEGKPLPQVSRPITRSFCAQLLANAQAAAVAENNKKCKAVNVDGAADGGIIPKGARKPAQKKAATIKPKPEAVIEISSDSEQVKKEKKPSKKDAPTLTSTLTARSKAACGLSKKPKDQIIDIDAADADNELAVVEYVEDIYKFYKIAENESRVHNYMDSQPEINDKMRAILIDWLIEVHHKFELNPETLYLTINIVDRYLAVQTTLRKELQLVGMSAMLIASKYEEIWAPEVNDFVCISDRAYSHQQVLVMEKRILGGLEWNLTVPTPYVFLVRFIKASVPDSNMENMVYFFAELGMMNYSVAMMYCSSMIAASAVYAARCTFNKTPSWDDTLKLHTGFSEYQLIDCAKVLVNLHAMAADNKLKVIFRKYSSLERGSVALLPPAKSLLA

SEQ ID NO: 2836 - protein, 375 aa, Lycopersicon esculentum
TRLIAKGQEPVQKNKTKPLVTKGVAARKVGVPAKAEAIKKDYVKAKAGTISGICPEEDVKTIEKIPLKERKVRKSGKTLTSILTARSKAACGLSNKPRSQIVDIDAADIDNHLAGVEYVEDIYKFYKLTEDENRPCDYMDSQPEINDRVRAILVDWLIEAHKRFELRPESLYLTVNIMDRFLSEEPVPRRELQLLCISSMLIASKYEEIWAPEVNDFLTITDNAYVRDQILLMEKVILGKLEWYLTVPTPYVFLVRYIKAAVPSDQEMENMTFFLAELGLMNYTTVISYCPSKIAASAGYAARSTLNRSPRWTDTLKHHTGYTEDQLRECAKQLVSFHFGAAENKLKAVYRKFSSPDRCAVALLPPARDVHIGSS

SEQ ID NO: 2837 - protein, 473 aa, Nicotiana tabacum
MASRIVLQQQNRGEAVPGAVKQKKNMAPEGRNRKALGDIGNVATGRGLEGKKPLPQKPVAVKVKGANVAKVPAARKPAQKKATVKPNPEDIIEISPDTQEKLKEKMQRKKADKDSLKQKATLTSTLTARSKAACGLSKKPKEQVVDIDAADVNNELAVVEYVEDIYSFYKLAENETRVHDYMDSQPEINDRMRAVLIDWLVEVHQKFELNPETLYLTINIVDRYLAVKTTSRRELQLLGISAMLIASKYEEIWAPEVNDFVCISDKSYTHDQVLAMEKEILGQLEWYLTVPTPYVFLARFIKASLPDSEIENMVYFLAELGLMNYATIIYCPSMIAASAVYAARHTLNRTPFWNETLKLHTGFSESQLIECARLLVSYQSAAATHKLKVIYKKYSSPERGVVSLLTPAKSLLAASSSSVLSEQADLRKSTEAAATSSSKMVVVGCQRCHMYVMVTEADPRCPQCKSTTTRKMT

SEQ ID NO: 2838 - protein, 449 aa, Nicotiana tabacum
MDNNSVGVPHNLPRGEMGGKQKNAQADGRNRRALGDIGNLVPAPAAEGKPKAAQISRPVTRSFCAQLLANAQEEKNKKPLAEVVNKDVPAKKKASDKEMKTVGGSPLSKRKAKKSGKTLTSTLTARSKAACGLSNRPKYEIEDIDVADADNHLAAVEYVEDIYNFYKLTEGESRVDDDYMNFQPDLNHKMRAILVDWLIEVHRKFELMPESLYLTITILDRFLSLKTVPRKELQLVGISSMLIACKYEEIWAPEVNDFIHISDNAYAREQILQMEKAILGKLEWYLTVPTPYVFLVRYIKAATPSDNQEMENMTFFFAELGLMNYKITISYRPSMLAASSVYAARSTLNKTPLWTQTLQHHTGYSEDQLMECAKILVSYHLDAAESKLKAIYRKFSSPDRGAVAFFPPARNLLPTTTTDAASLVLEEFYFLVWEAFLGSFYCCDLSSLD

SEQ ID NO: 2839 - protein, 425 aa, Nicotiana tabacum
MDNNSVGVPHNLPRGEMGGKQKNAQADGRNRRALGDIGNLVPAPAAEGKPKAAQISRPVTRSFCAQLLANAQEEKNKKPLAEVVNKDVPAKKKASDKEMKTVGGSPLSKRKAKKSGKTLTSTLTARSKAACGLSNRPKYEIEDIDVADADNHLAAVEYVEDIYNFYKLTEGESRVDDDYMNFQPDLNHKMRAILVDWLIEVHRKFELMPESLYLTITILDRFLSLKTVPRKELQLVGISSMLIACKYEEIWAPEVNDFIHISDNAYAREQILQMEKAILGKLEWYLTVPTPYVFLVRYIKAATPSDNQEMENMTFFFAELGLMNYKITISYRPSMLAASSVYAARSTLNKTPLWTQTLQHHTGYSEDQLMECAKILVSYHLDAAESKLKAIYRKFSSPDRGAVAFFPPARNLLPTTTTDAASSSS

SEQ ID NO: 2840 - protein, 446 aa, Nicotiana tabacum
MASRNVLQQQNIGEAVPGALKQKNMAAAAQGRNRKALGDIGNNMVTVRGVEGKPLPQRPITRGFCAQLLANAQAAAENQKKSMVVNGDAPIVAKGVLPVKGAAKKPVQKKAAVKPKPDVIEISPDTEEQVKENKQKKKAGDDSSVKKATLTSTLTARSKAACGLSHKPKVQIVDIDAADVNNELAVVEYVEDIYNFYKIAENESRIHDYMDSQPEITARMRAILIDWLIEVHHKFELSQETLYLTINIVDRYLAVTTTSRRELQLVGMSAMLIASKYEEIWAPEVNDFVCISDKAYSHEQVLGMEKRILGQLEWYLTVPTPYVFLVRYIKAAVSNAQMENMVYFLAELGLMNYATNIYCPSMIAASAVYVAQHTLNCTPFWNDTLKLHTGFSESQLLGCAKLLVSYHMEAPEHKLKVIYKKYSKPERGAVALQPPAKSLLAASSYE

SEQ ID NO: 2841 - protein, 230 aa, Triticum aestivum
  unsure (1)..(230): unsure at all Xaa locations
XVHHRLMLMPETLYLTVYIIDQYLSLENVLRKELQLVGVSAMLISCKYEEIWAPLVKELLVLSDNAFSREQVLSTEKSILNKLQWNLTVPTVYVFLLRYAKAAMGDKELENMAFFYAELALVDYSMLVYSPSVTAAAAVYTARCTLNMSPGWSDILEHHTGLGESQLMQCARRLASLHSTAAGSSKQKVVYNKYANPKLGAVSLYSPAKRLXPSERLFARIISSTLPFDG

SEQ ID NO: 2842 - protein, 411 aa, Triticum aestivum
  unsure (1)..(411): unsure at all Xaa locations
MAARAHNNVAAAQQQNRALGGGPAGGKQQKAAMAGRPDPKNTRRALGDIGNVVNARAAEGKPQPHEPVNRPVTRNFGAQLLKNAQEIAMEXXVARPAVRRAHHVKPAPPPPEHVIEISSDSDVTKSEAGSVSSVRKYSRKKVVTTLSHVLSARSKFAAGITEEPAIQDIDKLDGDNQLAVVDYIEDIYKFYKVAENECRARDYMDSQVEINAKMRGILIDWILEVHQKFDLMPESLYLTVYIIDMYLSLQSVLRRELQLVGVSALLIACKYEEIWAPEVNDFILISDSAYTREQILKMEKAILNRLEWNLTVPTPYVFLVRFAKAACSSDHKNDKEMENTVFFFAELALLQYGLVQSKPSMVAAAAVYAARLTLKKTPLWTDTLKHHTGFTEAQLMDAAKILVASHSTGPX

SEQ ID NO: 2843 - protein, 418 aa, Triticum aestivum
  unsure (1)..(418): unsure at all Xaa locations
MAARAHNNVAAAQQQNRALGGGGGGGVPAMGKQQKAAMAGRPDPKNTRRALGDIGNVVDVRAAEGKPQPHEPVNRPVTRNFGAQLLKNAAGDCYRTXVARPAVRRAHHVKPAPPPPEHVIEISSDSDVTKSEAGSVSSVRKYSRKKVVTTLSHVLSARSKFAAGITEEPAIQDIDKLDGDNQLAVVDYIEDIYKFYKVAENECRAKDYMDSQVEINAKMRGILIDWILEVHQKFDLMPESLYLTVYIIDMYLSLQTVLRRELQLVGVSALLIACKYEEIWAPEVNDFILISDSAYTREQILKMEKAILNRLEWXNLTVPTPYVFLVRFAKAASSSDQKNDKXEMENTVFFFAELALLQYGLVQSKPSMVAAAAVYAARLTLKKTPLWTDTLKHHTGFTEAQLMDAAKILVASHSTGPX

SEQ ID NO: 2844 - protein, 479 aa, Zea mays; identical to SEQ ID NO: 386

SEQ ID NO: 2845 - protein, 479 aa, Zea mays
MECARELRVRSTFTAAAMASKKQVGPGGAVPAQEQMNGGDAARLVRKPMDTFPQPAAARGRRALVDVGNLMNGRPSLVNHQKQAVAAAATSHKPLNVGNKKPLVPQAAARGLRPLADVTNLMINDRAAPANRQKPLDAVFNRNGKAVKLKECKVKPEVIVSIPDSEKEKKSKFPGGQKVCRRVPTLFDNLTKCSRASDGITTPKKKNPYDIDAPDSCNELAVVEYVEDIYRFYKSTEGTCLPLSSYMSSQAEISERMRAILIDWIIEVQYRLTLMPETLYLTVYIIDQYLSMESVPRKELQLVGISAMLIASKYEEIWAPLVKDLMCLCDNAFTRDQILTKEKAILDMLHWNLTVPTMYMFIVRYLKAAMCDAELENMAFFYSELALVQYAMLVYPPSVTAAAAVYAARSTLGMNPPWTDILEHHTGLAEPQLLDCARRLISFHALAPESKQKAVYRKYSKPKLGSVALQSPDKKLLSG

SEQ ID NO: 2846 - protein, 479 aa, Zea mays; identical to SEQ ID NO: 2845

SEQ ID NO: 2847 - protein, 458 aa, Zea mays
MECARELRVRSTFTAAAMASKKQVGPGGAVPAQEQMNGGDAARLVRKPMDTFPQPAAARGRRALVDVGNLMNGRPSLVNHQKQAVAAAATSHKPLNVGNKKPLVPQAAARGLRPLADVTNLMINDRAAPANRQKPLDAVFNRNGKAVKLKECKVKPEVIVSIPDSEKEKKSKFPGGQKVCRRVPTLFDNLTKCSRASDGITTPKKKNPYDIDAPDSCNELAVVEYVEDIYRFYKSTEGTCLPLSSYMSSQAEISERMRAILIDWIIEYLSMESVPRKELQLVGISAMLIASKYEEIWAPLVKDLMCLCDNAFTRDQILTKEKAILDMLHWNLTVPTMYMFIVRYLKAAMCDAELENMAFFYSELALVQYAMLVYPPSVTAAAAVYAARSTLGMNPPWTDILEHHTGLAEPQLLDCARRLISFHALAPESKQKAVYRKYSKPKLGSVALQSPVKKLLSG

SEQ ID NO: 2848 - protein, 458 aa, Zea mays
MECARELRVRSTFTAAAMASKKQVGPGGAVPAQEQMNGGDAARLVRKPMDTFPQPAAARGRRALVDVGNLMNGRPSLVNHQKQAVAAAATSHKPLNVGNKKPLVPQAAARGLRPLADVTNLMINDRAAPANRQKPLDAVFNRNGKAVKLKECKVKPEVIVSIPDSEKEKKSKFPGGQKVCRRVPTLFDNLTKCSRASDGITTPKKKNPYDIDAPDSCNELAVVEYVEDIYRFYKSTEGTCLPLSSYMSSQAEISERMRAILIDWIIEYLSMESVPRKELQLVGISAMLIASKYEEIWAPLVKDLMCLCDNAFTRDQILTKEKAILDMLHWNLTVPTMYMFIVRYLKAAMCDAELENMAFFYSELALVQYAMLVYPPSVTAAAAVYAARSTLGMNPPWTDILEHHTGLAEPQLLDCARRLISFHALAPESKQKAVYRKYSKPKLGSVALQSPDKKLLSG

SEQ ID NO: 2849 - protein, 369 aa, Arabidopsis thaliana
MAENQNCARMTRAAAKRKASSMALDENPVSKKRVVLGELPNMSNVVAVPNQERETLKAKTSVNTSKRQMKKALMIPEASVLIESRSVDPQMCEPFASDICAYLREMEGKPKHRPLPDYIEKVQSDLTPHMRAVLVDWLVEVAEEYKLVSDTLYLTISYVDRFLSVKPINRQKLQLVGVSAMLIASKYEEIGPPKVEDFCYITDNTFTKQEVVSMEADILLALQFELGSPTIKTFLRRFTRVAQEDFKDSQLQIEFLCCYLSELSMLDYTCVKYLPSLLSASAVFLARFIIRPKQHPWNQMLEEYTKYKAADLQVCVGIIHDLYLSRRGNTLEAVRNKYKQHKYKCVATMPVSPELPLAFFEDITIRGMA

SEQ ID NO: 2850 - protein, 355 aa, Arabidopsis thaliana
MADEKENCVRMTRAATKRKASMEAAIDKERINKKRVVLGELPNLSNIKKSRKATTKQKKKSVSIPTIETLNSDIDTRSDDPQMCGPYVTSIFEYLRQLEVKSRPLVDYIEKIQKDVTSNMRGVLVDWLVEVAEEYKLLSDTLYLAVSYIDRFLSLKTVNKQRLQLLGVTSMLIASKYEEITPPNVDDFCYITDNTYTKQEIVKMEADILLALQFELGNPTSNTFLRRFTRVAQEDFEMSHLQMEFLCSYLSELSMLDYQSVKFLPSTVAASAVFLARFIIRPKQHPWNVMLEEYTRYKAGDLKECVAMIHDLYLSRKCGALEAIREKYKQHKFKCVATMPVSPELPLTVFEDVNI

SEQ ID NO: 2851 - protein, 372 aa, Arabidopsis thaliana
MTEQEICVRVTRAAAKRKASTAMGIDGDRVNKKRVVLGELLNVSNVNLLANLNQKKETQKPKRNLKPPPAKQIKSAPVAIIDLESKSDIDSRSDDPQMCGPYVADIYEYLRQLEVKPKQRPLPDYIEKVQKDVTPSMRGVLVDWLVEVAEEYKLGSETLYLTVSHIDRFLSLKTVNKQKLQLVGVSAMLIASKYEEISPPKVDDFCYITDNTFSKQDVVKMEADILLALQFELGRPTINTFMRRFTRVAQDDFKVPHLQLEPLCCYLSELSILDYKTVKFVPSLLAASAVFLARFIIRPKQHPWNQMLEEYTKYKAADLQVCVGIIHDLYLSRRGGALQAVREKYKHHKFQCVATMPVSPELPVTFWEDVTI

SEQ ID NO: 2852 - protein, 327 aa, Arabidopsis thaliana
MVSKKDKQIHSDHNPQDASPVEWAEIRHKLLAFQENIQSGSDIDARSDDPQMCGLYVSDIYEYLRELEVKPKLRPLHDYIEKIQEDITPSKRGVLVDWLVEVAEEFELVSETLYLTVSYIDRFLSLKMVNEHWLQLVGVSAMFIASKYEEKRRPKVEDFCYITANTYTKQDVLKMEEDILLALEFELGRPTTNTFLRRFIRVAQEDFKVPNLQLEPLCCYLSELSMLDYSCVKFVPSLLAASAVFLARFIILPNQHPWSQMLEECTKYKAADLQVCVEIMLDLYLSRSEGASKAVREKYKQHKFQYVAAIPVYQELPVTFWEDVVTI

SEQ ID NO: 2853 - protein, 360 aa, Glycine max
  unsure (1)..(360): unsure at all Xaa locations
MATSENNSSARPQREAKKRAAAAICNAAKKKRVVLGDVTNVSSSDVAVSVSKKPVQTHKNVKLEKPAAPVATPEKVEERHDPQLCGPYVSDIYEYLRGMEVDPSKRPLMDYVQKIQRDVNANMRGVLVDWLVEVAEEYKLVSDTLYFSVAYIDRFLSLNILSRQRLQLLGVASMLIASKYEEIKPPEVEDFCYITDNTYSKEEVVNMEAEILKALKFELGGPTVKTFLRRFSRVGQEGVDTSDLQFEFLSCYLAELSLLDYNCIKFLPSLVAASVVFLARFMFSTKTHPWNSALHQLTRYKPADLKECVLNLHDLYLSRRGASLQAVREKYKQHKFKCVATTPSPPEIPLSFFEFXGADS

SEQ ID NO: 2854 - protein, 358 aa, Glycine max
  unsure (1)..(358): unsure at all Xaa locations
MATSENNNARPQRVAKKRAAAAICELHRNAAKRKRVVLGDLTNDYVAVTEKEIQKQKKVKREQPARPVSTPEKVEERHDPQLCGPYVSDIYEYLRGMEVDPSKRPLMDYVQKIQRDVNANMRGVLVDWLVEVAEEYKLVSDTLYFSVAYIDRFLSLNILSRQRLQLLGVASMLIASKYEEIKPPEVEDFCYITDNTYSKEEVVNMEAEILKALKFELGGPTVKTFLRRFSRVGQEGVDTSDLQFEFLSCYLAELSLLDYNCIKFLPSLVAASVVFLARFMFSTKTHPWNSALHQLTRYKPADLKECVLNLHDLYLSRRGASLQAVREKYKQHKFKCVATTPSPPEIPLSFFEFXGADS

SEQ ID NO: 2855 - protein, 348 aa, Glycine max
METRAAAKRKANAAIVVVVEKQHPKRQRVVLGELPNLQNLIVSKIQNPRKEKLQCRKNPNANKPSPTNNTLSSPQLDGSYVSDIHEYLREMEMQKKRRPMVNYIEKFQKIVTPTMRGILVDWLVEVAEEYKLLSDTLHLSVSYIDRFLSVNPVTKSRLQLLGVSSMLIAAKYEETDPPSVDEFCSITDNTYDKAEVVKMEADILKSLKFEMGNPTVSTFLRRYANVASDVQKTPNSQIEHLGSYIGELSLLDYDCLRFLPSIVAASVIFLAKFIIWPEVHPWTSSLCECSGYKPAELKECVLILHDLYLSRKAASFKAVREKYKHQKFKCVANLPTPPYVPSCYFEDQ

SEQ ID NO: 2856 - protein, 348 aa, Glycine max; identical to SEQ ID NO: 2855

SEQ ID NO: 2857 - protein, 355 aa, Pisum sativum
MADQDNSTRRPQREAKKRAVAALCEQRKRKRVALGDITNDVVSETEKLVSDSHSHTQKKKKRNIAKSPVPEKLEDPQLCEPYVSDIHDYLRNLEVDPSKRPLPDYIQKVQRDINANMRGVLVDWLVEVAEEYKLVADTLYFSVSYIDRFLSLNDLSRQKLQLLGVSSMLIASKYEEIKPPEVEDFCYITDNTYSKEEVLSMEAEILKTLKFELGGPTIKTFLRRFITKVGQEGVDASELQFEFLCCYLAELSLLDYNCVKFLPSMVAASVVFLARFMLNPKSRPWNSAICQFTSYKPADLKECVLNMHDLYLGRKGATLQAVRDKYKQHKFKCVATTPSPPEISLSFFEFRGADP

SEQ ID NO: 2858 - protein, 372 aa, Catharanthus roseus
MADKENCIRVTRLAKKRAVEAMAASEQQRPSKKRVVLGELKNLSSNISSIQTYDFSSGPQKQQKNKNKRKAKESLGFEVKEKKVEEAGIDVFSQSDDPQMCGAYVSDIYEYLHKMEMETKRRPLPDYLDKVQKDVTANMRGVLIDWLVEVAEEYKLLPDTLYLTVSYIDRFLSMNALSRQKLQLLGVSSMLIASKYEEISPPHVEDFCYITDNTYKKEEVVKMEADVLKFLKFEMGNPTIKTFLRRLTRVVQDGDKNPNLQFEFLGYYLAELSLLDYGCVKFLPSLIASSVIFLSRFTLQPKVHPWNSLLQHNSGYKPADLKECVLIIHDLQLSKRGSSLVAVRDKYKQHKFKCVSTLTAPPSIPDEFFEDI

SEQ ID NO: 2859 - protein, 306 aa, Catharanthus roseus
MADKENCIRVTRLAKKRAVEAMAASEQQRPSKKRVVLGELKNLSSNISSIQTYDFSSGPQKQQKNKNKRKAKESLGFEVKEKKVEEAGIDVFSQSDDPQMCGAYVSDIYEYLHKMEMETKRRPLPDYLDKVQKDVTANMRGVLIDWLVEVAEEYKLLPDTLYLTVSYIDRFLSMNALSRQKLQLLGVSSMLIASKYEEISPPHVEDFCYITDNTYKKEEVVKMEADVLKFLKFEMGNPTIKTFLRRLTRVVQDGDKNPNLQFEFLGYYLAELSLLDYGCVKFLPSLIASSVIFLSRFTLQPKVHPW

SEQ ID NO: 2860 - protein, 378 aa, Lycopersicon esculentum
MVDEENKVPATAAASRGSNKRAFDSIAITNENDPLQISERPYPANKKRVVLGELNNLGNVIVSTQNSDLTETHESKRKIKLRKTRNVVKETVELKTSANSSPKDNLQKCSYGPLIYQHLHSLEVEERRRPLSNYMEKVQNNVIPSMRTVLVDWLVEVTEEYKLVSDTLYLAVSYIDRFLSSHVLAMEKLQLLGVSCMLVASKYEEISPPHVEDFCYITDNTYTREEVVNMERDLLSFLNFEISSPTTITFLRIFLKAAQDNLSFLTLQFEFLSCYLAELSLLDYSCVRFLPSMTAASAIFLSRFTVLPEVCPWTLALQQCTGYKPSELKDCVLVIHELQSSLMEATGRALREKYMNHKYKCVAALHPPDIPSCFFDDA

SEQ ID NO: 2861 - protein, 384 aa, Nicotiana tabacum
MKKQEKEAIMADLENCGRVTRLAKKRAAEAMASHQQQHPSKKRVVLGEIQNFSNLGVSQIKGLNTEPKKQPKSKQQQSKRKLKRAVTSKIDKEELNVDNVDANYDDPQMCSAYVSDIYDYLRKMEIEEKRRPLPDYLEKVQKDLSPNMRGVLVDWLVEVAEEYKLLSDTLYLAVSYIDRFLSTNVITRQKLQLLGVSSMLISAKYEEISPPHVEDFCYITDNTYTKEEVVKMEADVLKTLNFEMGNPTVKTFLRRFTGVAQEDYKTPNLQLEFLGYYLAELSILDYSCVKYVPSLLAAAVVFLSRFTLQPNTHPWSLALQQYSGYKAADLKECILILHDLQLSRRGGSLAAVRDKYKQHKFKCVSSLTSPVEIPASFFEDMRQL

SEQ ID NO: 2862 - protein, 371 aa, Nicotiana tabacum
MANEENKAAPTNTSRASNKRAFDDTLAAASSNGNDPLLKRVVLGELTNLEYVVGSTKTNTHNSKHKIKLKKTAPTKRKKIAIQSFKSDAATNFSPNDDLQKCAYAPLIYQHLHSLEVEARRRPLSNYMEKVQNDVTPTMRMILVDWLVEVADEYKLVSDTLYLTVTFVDRFLSSHVMARNSLQLLGVSCMLVASKYEEISPPHVEDFCYITDNTYTGEEVVNMERDLLNFLNFEISNPTTKTFLRIFTKVSQDNVDFLTLHFEFLGCYLAELSLLDYSCVRFLPSAVAASAIFLSRFTLLPKVHPWNLALQHCTGYKPSELKDCVLVIHELQSGRRAASVQAVRKKYMDHKYKCVAALHPPDIPACFFDDA

SEQ ID NO: 2863 - protein, 371 aa, Nicotiana tabacum
MANEENKASPTNTSRASNNRAFDDTLAAASSNGNDPLLKRVVLGELTNLEYVVGSTKTNTHNSKRKIKLKKTAPTKRKKVAKQSFKSDAATNFSPNDDLQKCAYAPLIYQHLHSLEVEERRRPLSNYMEKIQNDVTPTMRMILVDWLVEVADEYKLVSDTLYLTVTFIDRFLSSHVLARNSLQLLGVSCMLAASKYEEISPPHVEDFCYITDNTYTGEEVVNMERELLNFLDFEISNPTTKTFLRIFTKAAQDNVDFLTLHFEFLGCYLTELSLLDYSCVQFLPSVVAASAIFLSRFTILPKVHPWNLALQQCTGYKPSELKDCVLVIHELQSGRRAASVQAVRKKYMDHKYKCVAALHPPDIPACFFDDA

SEQ ID NO: 2864 - protein, 314 aa, Nicotiana tabacum
MADQENCVRVTRLAKKRAAEAMVQHLQQPNKKRVVLGEIRNLSNQIQMFDSEPLKPKCNKQTTKRKVKRSVSVKEREFREEDVDSKLDDDPQMCSAYVSDIYEYLHQMEIEKKRRPLSDYLEKVQKDVTANMRGVLVDWLVEVAEEYKLLSDTLYLAVAYIDRYLSIKVIPRQRLQLLGVSSMLIASKYEEIKPPRVEDFCYITDNTYTKKDVVKMEADVLQSLKFEMGNPTTKTFLRRFTRVAQEDCKNSNLKLEFLGCYLAELSLLDYNCVKFLPSLVAAAVIFLSRFTLQPKLHPWSVGLEQNSGYRACLL

SEQ ID NO: 2865 - protein, 388 aa, Oryza sativa
  unsure (1)..(388): unsure at all Xaa locations
MADKENSTPASAARLTRSSAAAGAQAKRSAAAGVADGGAPPAKRKRVALSDLPTLSNAVVVAPRQPHHPVVIKPSSKQPEPAXRRRRRPAAAAAAPPCHSAFDVDGXRPSSGWDPQYASDIYTYLRSMEVEARRQSAADYIEAVQVDVTANMRAILVDWLVEVADEYKLVADTLYLAVSYLDRYLSAHPLRRNRLQLLGVGAMLIAAKYEEISPPHVEDFCYITDNTYTRQEVVKMESDILKLLEFEMGNPTIKTFLRRFTRSCQEDKKRSSLLLEFMGSYLAELSLLDYGCLRFLPSVVAASVVFVAKLNIDPYTNPWSKKMQKLTGYKVSELKDCILAIHDLQLRKKCSNLTAIRDKYKQHKFKCVSTLLPPVDIPASYLQDLTEX

SEQ ID NO: 2866 - protein, 317 aa, Oryza sativa
  unsure (1)..(317): unsure at all Xaa locations
ARGRSMEVQPKRRPAADYIETGRVDVTANMRAILVDWLVEVAEEYKLVSDTLYLTVSYIDRFLSAKAINRQRLQLLGVSAMLIASKYEEISPPNVEDFCYITDNTYMKQEVVKMERDILNVLKFEMGNPTTKTFLRMFIRSSQEDDKYPSLPLEFMCSYLAELSLLEYGCVRLLPSVVAASVVFVARLTLDSDTNPWSKKLQEVTGYRASELKDCITCIHDLQLNRKGSSLMAIRDKYKQHRFKGVSTLLPPVEIPASYFEDLNEXMLLDDDVVRLRLSFPQDRSMVTEVERGLVSTLSTRDVLPWMLDCQSLARSS

SEQ ID NO: 2867 - protein, 357 aa, Helianthus tuberosus
MAILSPYSSSFLDTLFCNEQQDHEYHEYEYEDEFTQTTLTDSSDLHLPPLDQLDLSWEHEELVSLFTKEQEQQKQTPCTLSFGKTSPSVFAARKEAVDWILKVKSCYGFTPLTAILAINYLDRFLSSLHFQEDKPWMIQLVAVSCLSLAAKVEETQVPLLLDLQVEDTKYLFEAKNIQKMELLVMSTLKWRMNPVTPISFLDHIVRRLGLTDHVHWDFFKKCEAMILCLVSDSRFVCYKPSVLATATMLHVVDEIDPPNCIDYKSQLLDLLKTTKDDINECYELIVELAYDHHNKRKHDANETTTNPVSPAGVIDFTCDESSNESWELNAHHFREPSFKKTRMDSTIRVRVWFTYKL

SEQ ID NO: 2868 - protein, 420 aa, Oryza sativa
MDRASENRRLAAVGKPVPGIGEMGNRRPLRDINNLVGAPSHPSAIAKKPMLEKSGKEEQKPALVVSHRPMLRNFAASLTRKEQLDHQVSVADAAVVCTDPQKNPIPDGTVDDDVESCESNDYIAVDECNDTDEDESMMDIDSADSGNPLAATEYVEELYKFYRENEEMSCVQPDYMSSQGDINEKMRAILIDWLIEVHHKFELMDETLFLTVNIVDRFLEKQVVPRKKLQLVGVTAMLLACKYEEVAVPVVEDLVLISDRAYTKGQILEMEKLILNTLQFNMSVPTPYVFMRRFLKAAQSDKQLQLLSFFILELSLVEYQMLKYRPSLLSAAAVYTAQCALTRCQQWTKTCELHSRYTGEQLLECSRMMVDFHQKAGAGKLTGVHRKYSTFKFGCAAKTEPALFLLESGAGGYNLKKQPC

SEQ ID NO: 2869 - protein, 420 aa, Oryza sativa; identical to SEQ ID NO: 376

SEQ ID NO: 2870 - protein, 434 aa, Brassica napus
MGKENVVSRPLTRAFASALRASTTENQQRANTKRPASEDVNVTAPPNKKKKRAVLGDISNASFSAAKLEARDIKQVKKSQGLASASCVTSEVTDLQSGTEAKAEVVSVTAGNTNDTADNCIEKHKLPPRPLGRSSASIVEKSGVIRSSTALDLPKFTDIDSDDKDPLLCCLYAPEIYYNLRVSELKRRPVPNFMERIQKDVTQSMRGILVDWLVEVSEEYTLVPDTLYQTVYLIDWFLHGNYLERQRLQLLGITCMLIASKYEEINAPRIEEFCFITDNTYTRDQVLEMENQVLAHFSFQIYTPTPKTFLRRFLRAAQASYLIPRRELECLASYLTEVTLIDYHFLKFLPSVIAASAVFLAKWTLDQSNHPWNPTLEHYTTYKASDLKASVHALQDLQLNTKGCPLSAIRMKYKQEKFKSVAVLMSPKLLDTLF

SEQ ID NO: 2871 - protein, 62 aa, Brassica napus
MRGILVDWLLEVHVKFELNLETLYLTVNIIDRFLSVKAVPKRELQLVGISALLIASKYEEIY

SEQ ID NO: 2872 - protein, 62 aa, Brassica napus
MRGILVDWLVEVAEEYTLVPDTLYLTVYLIDWFLNGNYVERNRLQLLGVTCMLIASKYEEIY

SEQ ID NO: 2873 - protein, 63 aa, Brassica napus
MRGILADWLVEVSEEYTLVPDTLYLTVYLIDWFLHGNHIERQNLQLLGITCMLIASKYEEIYP

SEQ ID NO: 2874 - protein, 62 aa, Brassica napus
MRGILADWLVEVSEEYTLVPDTLYLTVYLIDWFLHGNHIERQNLQLLGITCMLIASKYEEIY

SEQ ID NO: 2875 - protein, 63 aa, Brassica napus
MRGILVDWLVEVSEEYTLVPDCVYLTVYLIDWFLHGKYLERQRLQLLGITCMLIASKYEEIYP

SEQ ID NO: 2876 - protein, 62 aa, Brassica napus
MRGILVDWLVEVSEEYTLVPDCVYLTVYLIDWFLHGKYLERQRLQLLGITCMLIASKYEEIY

SEQ ID NO: 2877 - protein, 56 aa, Brassica napus
DWLVEVSEEYKLASDTLYLAVNLIDRFLSNNYIEKRRLQLLGVTCMLIASKYEEIY

SEQ ID NO: 2878 - protein, 57 aa, Brassica napus
DWLVEVSEEYKLASDTLYLAVNLIDRFLSNNYIEKRRLQLLGVTCMLIASKYEEIYP

SEQ ID NO: 2879 - protein, 470 aa, Oryza sativa; identical to SEQ ID NO: 378

SEQ ID NO: 2880 - protein, 580 aa, Saccharomyces cerevisiae
MAILKDTIIRYANARYATASGTSTATAASVSAASCPNLPLLLQKRRAIASAKSKNPNLVKRELQAHHSAISEYNNDQLDHYFRLSHTERPLYNLTNFNSQPQVNPKMRFLIFDFIMYCHTRLNLSTSTLFLTFTILDKYSSRFIIKSYNYQLLSLTALWISSKFWDSKNRMATLKVLQNLCCNQYSIKQFTTMEMHLFKSLDWSICQSATFDSYIDIFLFQSTSPLSPGVVLSAPLEAFIQQKLALLNNAAGTAINKSSSSQGPSLNINEIKLGAIMLCELASFNLELSFKYDRSLIALGAINLIKLSLNYYNSNLWENINLALEENCQDLDIKLSEISNTLLDIAMDQNSFPSSFKSKYLNSNKTSLAKSLLDALQNYCIQLKLEEFYRSQELETMYNTIFAQSFDSDSLTCVYSNATTPKSATVSSAATDYFSDHTHLRRLTKDSISPPFAFTPTSSSSSPSPFNSPYKTSSSMTTPDSASHHSHSGSFSSTQNSFKRSLSIPQNSSIFWPSPLTPTTPSLMSNRKLLQNLSVRSKRLFPVRPMATAHPCSAPTQLKKRSTSSVDCDFNDSSNLKKTR

SEQ ID NO: 2881 - protein, 397 aa, Saccharomyces cerevisiae
MAILKDTIIRYANARYATASGTSTATAASVSAASCPNLPLLLQKRRAIASAKSKNPNLVKRELQAHHSAISEYNNDQLDHYFRLSHTERPLYNLTNFNSQPQVNPKMRFLIFDFIMYCHTRLNLSTSTLFLTFTILDKYSSRFIIKSYNYQLLSLTALWISSKFWDSKNRMATLKVLQNLCCNQYSIKQFTTMEMHLFKSLDWSICQSATFDSYIDIFLFQSTSPLSPGVVLSAPLEAFIQQKLALLNNAAGTAINKSSSSQGPSLNINEIKLGAIMLCELASFNLELSFKYDRSLIALGAINLIKLSLNYYNSNLWENINLALEENCQDLDIKLSEISNTLLDIAMDQNSFPSSFKSKYLNSNKTSLAKSLLDALQNYCIQLKLEEFYRSQELETM

SEQ ID NO: 2882 - protein, 414 aa, Trypanosoma brucei
MNIRTTVTLNSIPGPFGDPSSIDYKSHPGEGDTVSHVAIFEMMKKKEMTPLDDIKKLKKSVYSYRNRKIITNWLRDVCVALNLKGTTLCLAIQLTDAFISGSLQTLPIEKCQLAAATCLWDAAKFEEMDNSLPSLKKIVRVCDDAYSSEQILEMEETILCFFKWRLPHTTVINHLYLQLHMLGSEDLVSCGSVVKREPGEIVILNILVVEEDVHKWKRLEATEDCIITSIVPQLCAIAGIPASNNIEVFQVFGENVLVTRRTPLDTPLRSLYVDSKRESRLCLSNGGVNFVFVERGTLVVPRNINKRFLNQCQVLVQEVVLHVEFIQLPSHVTALGVLMLSMCILATNMVEGKSAINYIQGKLGISSSRCLAAARLLCVKYKETIEEYRKSVKLPQLPEDIMERLDMCLATRNS

SEQ ID NO: 2883 - protein, 1396 aa, Mus musculus
MPPPLLPKRSKLETEKAQSNKITPREEQQSEKIGKSNHAASSSSSSTQGAVKRRSVFEDVTNASHSQCVQSKEDNIELKSHVSKRTKKGVGEVTQKKIKSSKMGHVTSLSNMEKEFILDIPNKPKTLTTEEPSVFQKTLVLNEEPATKETCLMRKTLKSCAFHQETLLMEKPLTLLVETEDYNEFDTELMTSKKKDKPEDPTIIEEMTDLKKSVIRKVTLTSSPLWLKNKHVVQEEKPVIQEKSSFKRISLVSNVVTTKEKPPVKKPHFRKKKPTTEMKSLLQEPSLEEKYNTQEDASILKKPQVLQENTNNKDATLTEPVTFKGKHSANEATHTKKPSSSKNNPDPQGKGTNLRPLRVHPVTYENEPMSSKKSTTKKKDSHFHGPSVLPDKHSPQMEVSTVKKSLALPNPTTEEKMLHFPVATVLEKQHNMGEAPCLKKPSPLRKQQQLPKRRRFFSNSAVQETVIRKPLFFKMSTTEKDPPSQWPSALPKKHISPGELSKQKKQHVSPKHNMEEDSQCWLDSAFKKQLSREEPASTHTPLKLEMQQAITKETGFHLRNPLVLPTVTSEAKSLTKEPPSFREQNTSLLKRKSTTHTITLQQAQSEWQEMTDEDRNLFSIKPGSHRKEPIPEFLQNPLPPNENCLISQKLSHSMPFASQKTTSQERAHRKESVASNDDKNFFSQDLFSPFSSADEDTLKFHKSLDFQEQVDRKNDSHKKMFDSQDSVSEEESFLRKLFCKDRCSSTEELSQERTVALEQEFLLIKILNENTSSDVDEPLSHQSPHIQNHSDTTKEALEASEALEAPEALETLEALVASEDLEEPLNILEELSTENMVALMKMLVTEDESTKDSFSGNYTAAREAHAEKSLSLEETSINEAATLKESLSSQEKHRAELVTVLKELLVLMKNPSLKRVALAFQENPSNNVETLLREVLALVENSTADESTLQEKPSTKTDVTPKELLALEENSSNKKANPMDSLSFDHKPDTEMGEIARMVLTDEEYNIDTLYERVLALSQGLIAADQLSFTDLQNFEETKIVDEEEFFKSFLVFENKNSPNMSSNAFESRTDNSSAIMPSSKAFNPVENSNPYVSSSKSFKSTLGAKETEITIQDDSDSLERIEKEGQDPLLNTIYAKDVFNYLKEREEKFLVQKYMDGQMELTSDMRAILVDWLVEIQGSFQMTHETLYLAVKIMDLYLMKAQCKKNHLQLLGSTTYMIAAKFEESYPPSLSEFLFICEDMYEKSDMVSLESSILQTLNFDINIPTAYNFLRRYASCIHASMKTLTLSRFICEMTLQEYEYIEERPSKLAAASFILALYMRNLSNCVPTLEYFTGYKMAELHILVRKLNHLLNFRSHSILKNVFEKYSEETYFEVAKIPPLSKQDLENLLNCALFH

SEQ ID NO: 2884 - protein, 493 aa, Mus musculus
MPPPLLPKRPKLETEKAQSNKITPREEQQSEKIGKSNHAASSSSSSTQGAVKRRSVFEDVTNASHSQCVQSKEDNIELKSHVSKRTKKGVGEVTQKKIKSSKMGHVTSLSNMEKEFILDIPNKPKTLTTEEPSVFQKTLVLNEEPATKETCLMRKTLKSCAFHQETLLMEKPLTLLVETEDYNEFDTELMTSKKKDKPEDPTIIEEITIQDDSDSLERIEKEGQDPLLNTIYAKDVFNYLKEREEKFLVQKYMDGQMELTSDMRAILVDWLVEIQGSFQMTHETLYLAVKIMGLYLMKAQCKKNHLQLLGSTTYMIAAKFEESYPPSLSEFLFICEDMYEKSDMVSLESSILQTLNFDINIPTAYNFLRRYASCIHASMKTLTLSRFICEMTLQEYEYIEERPSKLAAASFILALYMRNLSNCVPTLEYFTGYKMAELHILVRKLNHLLNFRSHSILKNVFEKYSEETYFEVAKIPPLSKQDLENLLNWALFH

SEQ ID NO: 2885 - protein, 238 aa, Mus musculus
QMELTSDMRAILVDWLVEIQGSFQMTHETLYLAVKIMDLYLMKAQCKKNHLQLLGSTTYMIAAKFEESYPPSLSEFLFICEDMYEKSDMVSLESSILQTLNFDINIPTAYNFLRRYASCIHASMKTLTLSRFICEMTLQEYEYIEERPSKLAAASFILALYMRNLSNCVPTLEYFTGYKMAELHILVRKLNHLLNFRSHSILKNVFEKYSEETYFEVAKIPPLSKQDLENLLNCALFH

SEQ ID NO: 2886 - protein, 237 aa, Mus musculus
MELTSDMRAILVDWLVEIQGSFQMTHETLYLAVKIMDLYLMKAQCKKNHLQLLGSTTYMIAAKFEESYPPSLSEFLFICEDMYEKSDMVSLESSILQTLNFDINIPTAYNFLRRYASCIHASMKTLTLSRFICEMTLQEYEYIEERPSKLAAASFILALYMRNLSNCVPTLEYFTGYKMAELHILVRKLNHLLNFRSHSILKNVFEKYSEETYFEVAKIPPLSKQDLENLLNCALFH

SEQ ID NO: 2887 - protein, 352 aa, Mus musculus
MVTPCPASPGSPAAGAGRRDSHQNLRAPVKKSRRPCLRRKKPLRPLNACSLPGDSGVCDLFESPSSSSDGADSPAVSAARDCSSLLNPAQPLTALDLQTFREYGQSCYDFRKAQENLFHPRESLARQPQVTAESRCKLLSWLLQVHRQFGLSFESLCLTVNTLDRFLLTTPVAADCFQLLGVTCLLIACKQVEVHPPRLKQLLALCGGAFSRQQLCNLECIVLHKLHFSLGAPTINFFLEHFTQWRMEAGQAEVTEALEAQTLARGVAELSLTDYAFTTYTPSLMAICCLALADGLLQHQHEMDLRLGEHPEATLQDCLGKLQTLVSINSSSLPRILPPQIWERCSLPQSWQ

SEQ ID NO: 2888 - protein, 263 aa, Mus musculus
MALRVTRNTKINAENKAKVSMAGAKRVPVTVTAASKPGLRPRTALGDIGNKVSEELQARVPLKREAKTLGTGKGTVKALPKPVEKVPVCEPEVELAEPEPEPELEHVREEKLSPEPILVDNPSPSPMETSGCAPAEEYLCQAFSDVILAVSDVDADDGADPNLCSEYVKDIYAYLRQLEEEQSVRPKYLQGREVTGNMRAILIDWLIQVQMKFRLLQETMYMTVSIIDRFMQNSCVPKKMLQLVGVTAMFIASKYEEMYPPQK

SEQ ID NO: 2889 - protein, 404 aa, Mus musculus
MSRRSSRLQAKQHAQPNQPDSPQETQIIQAKKRKTAQDVKKRKEEITKKHQYEIRNCWPPVLSGGISPCIIIETPHKEIGTSDFSRFTNYRFKNLFINPSPLPDLSWACSQEVWQNMLQKENRYVHDKHFQVLHSDLEPQMRSILLDWLLEVCEVYTLHRETFYLAQDFFDRFMLTQKDVNKNMLQLIGITSLFIASKLEEIYAPKLQEFAYVTDGACSEVDILKMELNILKALKWELCPVTVISWLNLFLQVDAVKDVPKVLLPQYSQETFIQIAQLLDLCILAIDSLEFQYRILAAAALCHFTSIEVVKKASGLEWDDISECVDWMVPFVSVVKSVSPVKLKTFKKIPMEDRHNIQTHTNYLALLNEVNYVNIYRKGGQLSPVCNGGIMTPPKSTEKPPGKH

SEQ ID NO: 2890 - protein, 491 aa, Mus musculus
MPRERDSTDHSNMKEEGGSDLSVRSRKRKANVAVFLQDPDEEIAKIDKTVKSEDSSQPWDDNSACVDPCSFIPTPNKEEDNELEYPRTAFQPRKIRPPRASPLPVLNWGNREEVWRIMLNKEKTYLRDEHFLQRHPLLQARMRAVLLDWLMEVCEVYKLHRETFYLAQDFFDRYMASQQNIIKTLLQLIGISALFIASKLEEIYPPKLHQFAYVTDGACSGDEILTMELMMMKALKWRLSPLTIVSWLNVYVQVAYVNDTGEVLMPQYPQQVFVQIAELLDLCVLDVGCFRFPYGVLAASALYHFSSLELMQKVSGYQWCDIEKCVKWMVPFAMVIREMGSSKLKHFRGVPMEDSHNIQTHTNSLDLLDKAQAKKAILSEQNRISPPPSVVLTPPPSSKKAEQRAGDRMTKPAIASKDSGVEAAAWSSLCCLGGQEPLQMLCSMERCISSGAAGVCKMPWMEVLLLNARCFNYRVKYTSHLQNTTECSRSC

SEQ ID NO: 2891 - protein, 300 aa, Mus musculus
LSWACSQEVWQNMLQKENRYVHDKHFQVLHSDLEPQMRSILLDWLLEVCEVYTLHRETFYLAQDFFDRFMLTQKDVNKNMLQLIGITSLFIASKLEEIYAPKLQEFAYVTDGACSEVDILKMELNILKALKWELCPVTVISWLNLFLQVDAVKDVPKVLLPQYSQETFIQIAQLLDLCILAIDSLEFQNRILAAAALCHFTSIEVVKKASGLEWDDISECVDWMVPFVSVVKSVSPVKLKTFKKIPMEDRHNIQTHTNYLALLNEVNYVNIYRKGGQLSPVCNGGIMTPPKSTEKPPGKH

SEQ ID NO: 2892 - protein, 403 aa, Mus musculus
MSRRSRLQAKQHAQPNQPDSPQETQIIQAKKRKTAQDVKKRKEEITKKHQYEIRNCWPPVLSGGISPCIIIETPHKEIGTSDFSRFTNYRFKNLFINPSPLPDLSWACSQEVWQNMLQKENRYVHDKHFQVLHSDLEPQMRSILLDWLLEVCEVYTLHRETFYLAQDFFDRFMLTQKDVNKNMLQLIGITSLFIASKLEEIYAPKLQEFAYVTDGACSEVDILKMELNILKALKWELCPVTVISWLNLFLQVDAVKDVPKVLLPQYSQETFIQIAQLLDLCILAIDSLEFQYRILAAAALCHFTSIEVVKKASGLEWDDISECVDWMVPFVSVVKSVSPVKLKTFKKIPMEDRHNIQTHTNYLALLNEVNYVNIYRKGGQLSPVCNGGIMTPPKSTEKPPGKH

SEQ ID NO: 2893 - protein, 295 aa, Mus musculus
MEHQLLCCEVETIRRAYPDTNLLNDRVLRAMLKTEETCAPSVSYFKCVQKEIVPSMRKIVATWMLEVCEEQKCEEEVFPLAMNYLDRFLSLEPLKKSRLQLLGATCMFVASKMKETIPLTAEKLCIYTDNSIRPEELLQMELLLVNKLKWNLAAMTPHDFIEHFLSKMPEADENKQTIRKHAQTFVALCATDVKFISNPPSMVAAGSVVAAMQGLNLGSPNNFLSCYRTTHFLSRVIKCDPDCLRACQEQIEALLESSLRQAQQNVDPKATEEEGEVEEEAGLACTPTDVRDVDI

SEQ ID NO: 2894 - protein, 480 aa, Mus musculus
MTVSCIAYQLHKPVDHFLLKLGNSGKMCGVGGDDLVEAMPRQKTTDCKWCYFSQQLENDLETTVVNINRVSAKPTLSASNRGAMALRGTRNTKVNTENKARISMAGAKRVPVAIAAASKPRLRWRTALGDIGTKVQARVPLKKEAKTLGTVKVLPKPVEKVPEVKLAEPGPELELDLNLNLFWLIIPPSQAQWKHLNVHLQKNICVRLFSDVILAVSDVDADDDDGADPNLCSEYVNDIYAYLRQLEEEQSVRPKYLQGREVTGNMRAILIDWLIQVQMKFRLLQETMYMTLSMTDRFVQNSCVPKKMLQLVGVTAMFIASNYEEMHPPEIASKIGEVDAEQHTLAKYLMALSLLDMAHFAPPQIAAGAFCLALESLDNGEWTPTLQHYLSYTEKSLLPLMQHLAKNRVMVNRGLTKHMTVKNKYAASKHDAVPSKISTLAQLNSSTAVMDAGENSSSLGSGYVISLALPLPQRLVLKQM

SEQ ID NO: 2895 - protein, 379 aa, Mus musculus
MELEGQWWRGQLAADIHQALRYKELKLPSYKGQSPQLNLRRYFADLIAIVSNRFTLCPPARHLAVYLLDLFMDRYDISIQQLHLVALSCLLLASKFEEKEDSVPKLEQLNSLGCMTNMNLVLTKQTLLHMELLLLETFQWNLCLPTAAHFIEYYLSEAVHETDLHDGWPMVCLEKTKLYMAKYADYFLEVSLQDYAFLNYAPSLVAAACVASSRIILRLSPTWPTRLHRLTAYSWDFLVQCIERLLLAHDNDVKEANKQRGQSAPQSTQLTVFQTAQPSRPVHFQQPQYLHQSSLQYRHPVSEQPSRQQIVSTTHTSSYTLQTCPAGFQTSVQGLGHMQTGVGMSLAIPVEVKPCLSVSYNRSYQINEHFPCITPCFER

SEQ ID NO: 2896 - protein, 776 aa, Mus musculus
MGSGGVIHCRCAKCFCYPTKRRIKRRPRNLTILSLPEDVLFHILKWLSVGDILAVRAVHSHLKYLVDNHASVWASASFQELWPSPQNLKLFQRAAEKGNFEAAVKLGIAYLYNEGLSVSDEACAEVNGLKATRFFSMAERLNTGSEPFIWLFIRPPWSVSGSCCKAVVHDSLRAECQLQRSHKASILHCLGRVLNLFEDEEKRKQARSLLEESSRQGCLISSYLLWESDRKVDMSDPGRCLHSFRKLRDYAAKGCWEAQLALAKACAGGSQLGLEGKACSESVCQLFQASQAVNKQQIFSGQKGLSDTMRYILIDWLVEVATMKDFTSLCLHLTVECVDRYLRRRLVPRYKLQLLGIACMVICTRFISKEILTIREAVWLTDNTYKYEDLVRVMGEIISALEGKIRIPTVVDYKEVLLTLVPVAPRTQHLCSFLCELTLLHTSLSIYAPARLAAAALLLARLMHGQTQPWTTHLWDLTGFSYSDLVPCVLSLHKKCFHDDAPKDYRQISLTAVKQRFEDKCYEEISQEEVLSYADLCSAIGVKQESPEPPSFPSSGEIHTFLSSPSGESKRKRENSLQEDRGSFVTTPTAELSNQEETLLGSLLDWSLECCSGYEGDQESEGEKEGDVTAPSRLLDVTVVYLNPEEHCCQESSDEEAWPEDKIHPAPGTQAPPASAPRPLLCNRGDRAKDITTSGYSSVSSSSPISSLDGGMGGSPQSTSVLSVGSHSSTKPCHHQAKKSCLQCRPPNSPESGVHQQPVKRQNLSVHSDKDTHLAS

SEQ ID NO: 2897 - protein, 777 aa, Mus musculus
MGSGGVIHCRCAKCFCYPTKRRIKRRPRNLTILSLPEDVLFHILKWLSVGDILAVRAVHSHLKYLVDNHASVWASASFQELWPSPQNLKLFERAAEKGNFEAAVKLGIAYLYNEGLSVSDEACAEVNGLKASRFFSMAERLNTGSEPFIWLFIRPPWSVSGSCCKAVVHDSLRAECQLQRSHKASILHCLGRVLNLFEDEEKRKQARSLLEESSRQGCLISSYLLWESDRKVDMSDPGRCLHSFRKHRDYAAKGCWEAQLALAKACAGGSQLGLEGKACSESVCQLFQASQAVNKQQIFSVQKGLSDTMRYILIDWLVEVATMKDFTSLCLHLTVECVDRYLRRRLVPRYKLQLLGIACMVICTRFISKEILTIREAVWLTDNTYKYEDLVRVMGEIISALEGKIRIPTVVDYKEVLLTLVPVAPRTQHLCSFLCELTLLHTSLSIYAPARLASAALLLARLMHGQTQPWTTHLWDLTGFSYSDLVPCVLSLHKKCFHDDAPKDYRQVSLTAVKQRFEDKCYEEISREEVLSYADLCSTIGVKQESPEPPSFPSSGEIHTFLSSPSGRRSKRKRENSLQEDRGSFVTTPTAELSNQEETLLGSLLDWSLECCSGYEGDQESEGEKEGDVTAPSRLLDVTVVYLNPEEHCCQESSDEEAWPEDKIHPAPGTQAPPASAPRPLLCNRGDRAKDITTSGYSSVSSSSPISSLDGGMGGSPQSTSVLSVGSHSSTKPCHHQAKKSCLQCRPPNSPESGVHQQPVKRQNLSVHSDKDMHLAS

SEQ ID NO: 2898 - protein, 777 aa, Mus musculus
MGSGGVIHCRCAKCFCYPTKRRIKRRPRNLTILSLPEDVLFHILKWLSVGDILAVRAVHSHLKYLVDNHASVWASASFQELWPSPQNLKLFERAAEKGNFEAAVKLGIAYLYNEGLSVSDEACAEVNGLKASRFFSMAERLNTGSEPFIWLFIRPPWSVSGSCCKAVVHDSLRAECQLQRSHKASILHCLGRVLNLFEDEEKRKQARSLLEESSRQGCLISSYLLWESDRKVDMSDPGRCLHSFRKLRDYAAKGCWEAQLALAKACAGGSQLGLEGKACSESVCQLFQASQAVNKQQIFSVQKGLSDTMRYILIDWLVEVATMKDFTSLCLHLTVECVDRYLRRRLVPRYKLQLLGIACMVICTRFISKEILTIREAVWLTDNTYKYEDLVRVMGEIISALEGKIRIPTVVDYKEVLLTLVPVAPRTQHLCSFLCELTLLHTSLSIYAPARLASAALLLARLMHGQTQPWTTHLWDLTGFSYSDLVPCVLSLHKKCFHDDAPKDYRQVSLTAVKQRFEDKCYEEISREEVLSYADLCSTIGVKQESPEPPSFPSSGEIHTFLSSPSGRRSKRKRENSLQEDRGSFVTTPTAELSNQEETLLGSLLDWSLECCSGYEGDQESEGEKEGDVTAPSRLLDVTVVYLNPEEHCCQESSDEEAWPEDKIHPAPGTQAPPASAPRPLLCNRGDRAKDITTSGYSSVSSSSPISSLDGGMGGSPQSTSVLSVGSHSSTKPCHHQAKKSCLQCRPPNSPESGVHQQPVKRQNLSVHSDKDMHLAS

SEQ ID NO: 2899 - protein, 816 aa, Mus musculus
MGSGGGECWRDGVGDRSYGTEAGGAWTRAPVTRECASHPPKHGVVIHCRCAKCFCYPTKRRIKRRPRNLTILSLPEDVLFHILKWLSVGDILAVRAVHSHLKYLVDNHASVWASASFQEPWPSPQNLKLFERAAEKGNFEAAVKLGIAYLYNEGLSVSDEACAEVNGLKASRFFSMAERLNTGSEPFIWLFIRPPWSVSGSCCKAVVHDSLRAECQLQRSHKASILHCLGRVLNLFEDEEKRKQARSLLEESSRQGCLISSYLLWESDRKVDMSDPGRCLHSFRKLRDYAAKGCWEAQLALTKACAGGSQLGLEGKACSESVCQLFQATQAVNKQQIFSVQKGLSDTMRYILIDWLVEVATMKDFTSLCLHLTVECVDRYLRRRLVPRYKLQLLGIACMVICSRFISKEILTIREAVWLTDNTYKYEDLVRVMGEIISALEGKIRIPTVVDYKEVLLTLVPVAPRTQHLCSFLCELTLLHTSLSIYAPARLASAALLLARLMRGQTQPWTTHLWDLTGFSYSDLVPCVLSLHKKCFHDDAPKDYRQISLTAVKQRFEDKCYEEISREEVLSYADLCSAIGVKQESPEPPSFPSSGEIHTFLSSPSERRSKRKRENSLQEDRGSFVTTPTAELSNQEETLLGGLLDWSLECCSGYEGDQESEGRKEGDVTAPSRLLDVTVVYLNPEEHCCQESSDEEAWPEDKIHPAPGTQAPPASAPRPLLCNRGDRAKDITTSGYSSVSSSSPISSLDGGMGGSPQSTSVLSVGSHSSTKPCHHQAKKSCLQCRPPNSPESGVHQQPVKRQNLSVHSDKDTHLAS

SEQ ID NO: 2900 - protein, 777 aa, Mus musculus
MGSGGVIHCRCAKCFCYPTKRRIKRRPRNLTILSLPEDVLFHILKWLSVGDILAVRAVHSHLKYLVDNHASVWASASFQEPWPSPQNLKLFERAAEKGNFEAAVKLGIAYLYNEGLSVSDEACAEVNGLKASRFFSMAERLNTGSEPFIWLFIRPPWSVSGSCCKAVVHDSLRAECQLQRSHKASILHCLGRVLNLFEDEEKRKQARSLLEESSRQGCLISSYLLWESDRKVDMSDPGRCLHSFRKLRDYAAKGCWEAQLALTKACAGGSQLGLEGKACSESVCQLFQATQAVNKQQIFSVQKGLSDTMRYILIDWLVEVATMKDFTSLCLHLTVECVDRYLRRRLVPRYKLQLLGIACMVICSRFISKEILTIREAVWLTDNTYKYEDLVRVMGEIISALEGKIRIPTVVDYKEVLLTLVPVAPRTQHLCSFLCELTLLHTSLSIYAPARLASAALLLARLMRGQTQPWTTHLWDLTGFSYSDLVPCVLSLHKKCFHDDAPKDYRQISLTAVKQRFEDKCYEEISREEVLSYADLCSAIGVKQESPEPPSFPSSGEIHTFLSSPSERRSKRKRENSLQEDRGSFVTTPTAELSNQEETLLGGLLDWSLECCSGYEGDQESEGRKEGDVTAPSRLLDVTVVYLNPEEHCCQESSDEEAWPEDKIHPAPGTQAPPASAPRPLLCNRGDRAKDITTSGYSSVSSSSPISSLDGGMGGSPQSTSVLSVGSHSSTKPCHHQAKKSCLQCRPPNSPESGVHQQPVKRQNLSVHSDKDTHLAS

SEQ ID NO: 2901 - protein, 775 aa, Mus musculus
MGSGGVIHCRCAKCFCYPTKRRIKRRPRNLTILSLPEDVLFHILKWLSVGDILAVRAVHSHLKYLVDNHASVWASASFQELWPSPQNLKLFERAAEKGNFEAAVKLGIAYLYNEGLSVSDEACAEVNGLKASRFFSMAERLNTGSEPFIWLFIRPPWSVSGSCCKAVVHDSLRAECQLQRSHKASILHCLGRVLNLFEDEEKRKQARSLLEESSRQGCLISSYLLWESDRKMSDPGRCLHSFRKLRDYAAKGCWEAQLALAKACAGGSQLGLEGKACSESVCQLFQASQAVNKQQIFSVQKGLSDTMRYILIDWLVEVATMKDFTSLCLHLTVECVDRYLRRRLVPRYKLQLLGIACMVICTRFISKEILTIREAVWLTDNTYKYEDLVRVMGEIISALEGKIRIPTVVDYKEVLLTLVPVAPRTQHLCSFLCELTLLHTSLSIYAPARLASAALLLARLMHGQTQPWTTHLWDLTGFSYSDLVPCVLSLHKKCFHDDAPKDYRQISLTAVKQRFEDKCYEEISREEVLSYADLCSAIGVKQESPEPPSFPSSGEIHTFLSSPSGRRSKRKRENSLQEDRGSFVTTPTAELSNQEETLLGSLLDWSLECCSGYEGDQESEGEKEGDVTAPSRLLDVTVVYLNPEEHCCQESSDEEAWPEDKIHPAPGTQAPPASAPRPLLCNRGDRAKDITTSGYSSVSSSSPISSLDGGMGGSPQSTSVLSVGSHSSTKPCHHQAKKSCLQCRPPNSPESGVHQQPVKRQNLSVHSDKDTHLAS

SEQ ID NO: 2902 - protein, 292 aa, Mus musculus
MELLCCEGTRHAPRAGPDPRLLGDQRVLQSLLRLEERYVPRASYFQCVQKEIKPHMRKMLAYWMLEVCEEQRCEEDVFPLAMNYLDRYLSCVPTRKAQLQLLGTVCLLLASKLRETTPLTIEKLCIYTDQAVAPWQLREWEVLVLGKLKWDLAAVIAHDFLALILHRLSLPSDRQALVKKHAQTFLALCATDYTFAMYPPSMIATGSIGAAVLGLGACSMSADELTELLAGITGTEVDYLRACQEQIEAALRESLREAAQTAPSPVPKAPRGSSSQGPSQTSTPTDVTAIHL

SEQ ID NO: 2903 - protein, 292 aa, Mus musculus
MELLCCEGTRHAPRAGPDPRLLGDQRVLQSLLRLEERYVPRASYFQCVQKEIKPHMRKMLAYWMLEVCEEQRCEEDVFPLAMNYLDRYLSCVPTRKAQLQLLGTVCLLLASKLRETTPLTIEKLCIYTDQAVAPWQLREWEVLVLGKLKWDLAAVIAHDFLALILHRLSLPSDRQALVKKHAQTFLALCATDYTFAMYPPSMIATGSIGAAVLGLGACSMSADELTELLAGITGTEVDCLRACQEQIEAALRESLREAAQTAPSPVPKAPRGSSSQGPSQTSTPTDVTAIHL

SEQ ID NO: 2904 - protein, 237 aa, Mus musculus
MRKMLAYWMLEVCEEQRCEEDVFPLAMNYLDRYLSCVPTRKAQLQLLGTVCLLLASKLRETTPLTIEKLCIYTDQAVAPWQLREWEVLVLGKLKWDLAAVIAHDFLALILHRLSLPSDRQALVKKHAQTFLALCATDYTFAMYPPSMIATGSIGAAVLGLGACSMSADELTELLAGITGTEVDCLRACQEQIEAALRESLREAAQTAPSPVPKAPRGSSSQGPSQTSTPTDVTAIHL

SEQ ID NO: 2905 - protein, 289 aa, Mus musculus
MELLCCEVDPVRRAVPDRNLLEDRVLQNLLTIEERYLPQCSYFKCVQKDIQPYMRRMVATWMLEVCEEQKCEEEVFPLAMNYLDRFLAGVPTPKTHLQLLGAVCMFLASKLKETIPLTAEKLCIYTDNSVKPQELLEWELVVLGKLKWNLAAVTPHDFIEHILRKLPQQKEKLSLIRKHAQTFIALCATDFKFAMYPPSMIATGSVGAAICGLQQDDEVNTLTCDALTELLAKITHTDVDCLKACQEQIEALLLNSLQQFRQEQHNAGSKSVEDPDQATTPTDVRDVDL

SEQ ID NO: 2906 - protein, 468 aa, Oryza sativa
  unsure (1)..(468): unsure at all Xaa locations
MATRSQNVAAAPQPPQNRGNVAALGKQKAVVAGRPDAKNRRALGEIGNVMNVRLPEGXSLCSRRRPVDXHFGXQLLKNAQANAAAQGAPADVARPAQRQARKAPVKPAPPPPEHVIEISSDSDQSMRQQSEGSASSVRKCSRKKVINTLTSVLTARSKVACGITDKPREVIEDIDKLDGDNELAVVDYIEDIYKFYKVAENECRPCDYIDTQVEINSKMRAILADWIIEVHHKFELMPETLYLSMYVIDRYLSMQQVQRRELQLVGVSAMLIACKYEEIWAPEVNDFILISDSAYTREQILAMEKGILNKLQWNLTVPTAYVFIMRYLKAGASADNKSDKEMEHMAFFFAELALMQYGLVASLPSKVAASAVYAARLTLKKSPLWTDTLKHHTGFTESQLLDSAKLLVTSHSTAPESKLRVVYKKYSSEQLGGVALRSPAVELCKXMEISFVSYFVCLFGLECNGRRV

SEQ ID NO: 2907 - protein, 858 aa, Oryza sativa
  unsure (1)..(858): unsure at all Xaa locations
MEALAGGRPLSGRARQVGRSREEELLGLLSDFSGDSGEFGRELSFSDLVVVEDTANNPSPRGGDGGGDRAAPTAAAAENGQARPSSSSEQEEAAEAASRRQQQQQAAAAARERRLRRRRSDSRGSCGGSGDGVLLNFYVPGLLTRSMTTPRPAARGTLPGAAAAAAAPATAAAGKARMDAPLAVGCWPALWGGGGRRDRRKPAKPAAGRRDTRVVTTVTLGGSVRVDKKKKSFNKIVRKQKQLFSRVQCVMLSCENRKPNAAHRIGMGHGPPVPGAPRRALGRDFHRARFAVESTPRHPGRRSSRPLEASPSAPDKARAPHRAAPPTPTHLRVSPLRSKQIKQEQEILERELEERREKRRRRGRPPASVREGVRRSSWRSWSPEEEEEEQQEAVRMATRHQRAAAAPQPANRGAAVAAGKQKAAATAAAGRPGARNRQALGDIGNVLNAHVVDGKIXSCRRGSIXPITRSFGAQLLKKAQENAVAANKIVVQNPARKEPAPKXRQRRSYPVRRTPPRPAPAPASTRTRSRRSRRAPAAAAAVQPSSXSRKKVVNTLTSVLTXARSKHACGITEKPKEVVEDIDKLDGDNQLAVVEYIEDIYNFYRTAQLERRPTDYMSSQVEVNPKMRAILADWIIDVHYKFELMPETLYLTMYVIDRYLSLQPVLRRELQLVGVAAMLIASKYEEMWAPEVQDLMHVCDTAYSRQHILAMEKNILNRLQWNITVPTPYVFLLRFIKAAGXXDKELENMVFFFSEMALKEYGMASLCPSLVAASAVYAAQCTLKRSPLWTSTLKHHTGFTESQLRECAKVLVNAHAAAPESKLKTAYRKYASEQLGRVSLRPPAVCLAXDXSTVLDSV

SEQ ID NO: 2908 - protein, 410 aa, Carassius auratus
MPSKKVLRTEQFNTTDEAPKTMSVRPRKRKADVAIHLQDPDEEISEMTRKKPCASQACWNPDTGYTSPCRRIPTPDEVEEPVAVGSVGFAQYASENIFVTPTRSTPLPALCWASRDDVWNNLLRKDKLYLRDTHVMERHPHLQPKMRAILLDWLIEVCEVYKLHRETFYLGQDYFDRFMATQENVLKTTLQLIGISCLFIAAKMEEIYPPKVHQFAYVTDGACTEDDILSMEIIIMKELDWSLSPLTPVAWLNIYMQMAYLKETAQVLVAQYPQATFVQIAELLDLCILDARSLEFSYSLLAASALFHFSSLELVMKVSGLKWCDLEECVRWMVPFAMSIREAGSSSLKTFKGIAADDLHNIQTHVPYMEWLGRVNSYQPVDIESSQTSPVPSGVLTPPPSSEKPESEVS

SEQ ID NO: 2909 - protein, 373 aa, Gallus gallus
FLQDPDEEIAKIEMSRKKQYENQLSWNNINKDPHMLIPTPDKDDDPVGVDYSHFIHLNVASTRSSPLPILGDWANRDDVWKNMINKEETYVRDKLYMQRHPLLQPKMRTILLDWLMEVCEVYKLYRETFYLAQDFFDRFMATQQNVVKTLLQLIGISSLFIAAKLEEIYPPKLHQFAYVTDGACTEDEILSMELIIMKALNWNLNPLTVVSWLNIYMQVAYLNELYEVLLPQYPQQIFVQIAELLDLCVLDIGCLEYTYGVLAASALYHFSSSELMQKVSGYEWCEIEECVKWMVPFAMAIREVGSSKSKHFRGIAPEDLHNIQTHINSLDLLDKAQAKQAILAEQNRTSPFPTGVLTPPQSSKKQPAGLKPI

SEQ ID NO: 2910 - protein, 407 aa, Gallus gallus
MRRESDCAEEKAPAKGEGGAEGTVRARKRKADVATFLQDPDEEIAKIEMSRKKQYENQLSWNNINKDPHMLIPTPDKDDDPVGVDYSHFIHLNVASTRSSPLPILGWANRDDVWKNMINKEETYVRDKLYMQRHPLLQPKMRTILLDWLMEVCEVYKLYRETFYLAQDFFDRFMATQQNVVKTLLQLIGISSLFIAAKLEEIYPPKLHQFAYVTDGACTEDEILSMELIIMKALNWNLNPLTVVSWLNIYMQVAYLNELYEVLLPQYPQQIFVQIAELLDLCVLDIGCLEYTYGVLAASALYHFSSSELMQKVSGYEWCEIEECVKWMVPFAMAIREVGSSKLKHFRGIAPEDLHNIQTHINSLDLLDKAQAKQAILAEQNRTSPFPTGVLTPPQSSKKQPAGLKPI

SEQ ID NO: 2911 - protein, 292 aa, Gallus gallus
MEHQLQCCEVETIRRAYLDANLLNDRVLQTMLKAEETCSPSVSYFKCVQKEILPYMRKIVATWMLEVCEEQKCEEEVFPLAMNYLDRFLSFEPLKKSRLQLLGATCMFVASKMKETIPLTAEKLCIYTDNSIRPDELLQMELLLVNKLKWNLAAMTPHDFIEHFLTKMPLAEDTKQIIRKHAQTFVALCATDVKFISNPPSMIAAGSVVAAVQGLHLGNTNTFLSYQCLTHFLSQVIKCDPDCLRACQEQIESLLESSLRQAQQHNVSSETKTVEDEADLSCTPTDVRDVNI

SEQ ID NO: 2912 - protein, 291 aa, Gallus gallus
MELLCCEVDPMRRALPDPNLLYDDRVLHNLLTIEERYLPQCSYFKCVQKDIQPFMRRMVATWMLEVCEEQKCEEEVFPLAMNYLDRFLAVVPTRKCHLQLLGAVCMFLASKLKETIPLTAEKLCIYTDNSIKPQELLEWELVVLGKLKWNLAAVTPHDFIEHILRKLPLPKDKLVLIRKHAQTFIALCATDFNFAMYPPSMIATGSVGAAICGLQLDDGDRSLSGDSLTDFLAKITSTDVDCLKACQEQIESVLVSNLRQVRQQQQQSNPSKTIEELDQASTPTDVRDINL

SEQ ID NO: 2913 - protein, 1395 aa, Homo sapiens
MLLPLPPQSSKPVPKKSQSSKIVPSHHDPSEKTGENCQTKISPSSLQESPSSLQGALKKRSAFEDLTNASQCQPVQPKKEANKEFVKVVSKKINRNTHALGLAKKNKRNLKWHKLEVTPVVASTTVVPNIMEKPLILDISTTSKTPNTEEASLFRKPLVLKEEPTIEDETLINKSLSLKKCSNHEEVSLLEKLQPLQEESDSDDAFVIEPMTFKKTHKTEEAAITKKTLSLKKKMCASQRKQSCQEESLAVQDVNMEEDSFFMESMSFKKKPKTEESIPTHKLSSLKKKCTIYGRICHFRKPPVLQTTICGAMSSIKKPTTEKETLFQELSVLQEKHTTEHEMSILKKSLALQKTNFKEDSLVKESLAFKKKPSTEEAIMMPVILKEQCMTEGKRPRLKPLVLQEITSGEKSLIMKPLSIKEKPSTEKESFSQEPSALQKKHTTQEEVSILKEPSSLLKSPTEESPFDEALAFTKKCTIEEAPPTKKPLILKKKHATQGTMSHLKKPLILQTTSGEKSLIKEPLPFKEEKVSLKKKCTTQEMMSICPELLDFQDMIGEDKNSFFMEPMSFRKSPTTEETVLTKTSLSLQEKKITQGEMSHLKKPLVLQKITSEEESFYKKLLPFKMKSTTEEKFLSQEPSALKEKHTTLQEVSLSKESLAIQEKATTEEEFSQELFSLHVKHTNKSGSLFQEALVLQEKTDAEEDSLKNLLALQEKSTMEEESLINKLLALKEELSAEAATNIQTQLSLKKKSTSHGKVFFLKKQLALNETINEEEFLNKQPLALEGYPSIAEGETLFKKLLAMQEEPSIEKEAVLKEPTIDTEAHFKEPLALQEEPSTEKEAVLKEPSVDTEAHFKETLALQEKPSIEQEALFKRHSALWEKPSTEKETIFKESLDLQEKPSIKKETLLKKPLALKMSTINEAVLFEDMIALNEKPTTGKELSFKEPLALQESPTYKEDTFLKTLLVPQVGTSPNVSSTAPESITSKSSIATMTSVGKSGTINEAFLFEDMITLNEKPTTGKELSFKEPLALQESPTCKEDTFLETFLIPQIGTSPYVFSTTPESITEKSSIATMTSVGKSRTTTESSACESASDKPVSPQAKGTPKEITPREDIDEDSSDPSFNPMYAKEIFSYMKEREEQFILTDYMNRQIEITSDMRAILVDWLVEVQVSFEMTHETLYLAVKLVDLYLMKAVCKKDKLQLLGATAFMIAAKFEEHNSPRVDDFVYICDDNYQRSEVLSMEINILNVLKCDINIPIAYHFLRRYARCIHTNMKTLTLSRYICEMTLQEYHYVQEKASKLAAASLLLALYMKKLGYWVPFLEHYSGYSISELHPLVRQLNKLLTFSSYDSLKAVYYKYSHPVFFEVAKIPALDMLKLEEILNCDCEAQGLVL

SEQ ID NO: 2914 - protein, 1395 aa, Homo sapiens [sequence omitted]

SEQ ID NO: 2915 - protein, 291 aa, Homo sapiens
MLLPLPPQSSKPVPKKSQSSKIVPSHHDPSEKTGENCQTKISPSSLQESPSSLQGALKKRSAFEDLTNVSFEMTHETLYLAVKLVDLYLMKAVCKKDKLQLLGATAFMIAAKFEEHNSPRVDDFVYICDDNYQRSEVLSMEINILNVLKCDINIPIAYHFLRRYARCIHTNMKTLTLSRYICEMTLQEYHYVQEKASKLAAASLLLALYMKKLGYWVPFLEHYSGYSISELHPLVRQLNKLLTFSSYDSLKAVYYKYSHPVFFEVAKIPALDMLKLEEILNCDCEAQGLVL

SEQ ID NO: 2916 - protein, 190 aa, Oryza sativa
ALVLATLLKMAFATLFDSLYCPEEHLDLFHDTAADDDLHLDLHLHQPPPPPPLLDDDLPALFHALRGKEDPLRPAADDDGYGGVSAREAAVGWALRAVARLGFSALTAALAVAYLDRCFLGGALRLGDRPWMARLAAVACVALAAKVEETRVPVLLDLQLCDEAYVFEDKTVRRMELLVLSALGWRMHPV

SEQ ID NO: 2917 - protein, 339 aa, Arabidopsis thaliana
MRSYRFSDYLHMSVSFSNDMDLFCGEDSGVFSGESTVDFSSSEVDSWPGDSIACFIEDERHFVPGHDYLSRFQTRSLDASAREDSVAWILKVQAYYNFQPLTAYLAVNYMDRFLYARRLPETSGWPMQLLAVACLSLAAKMEEILVPSLFDFQVAGVKYLFEAKTIKRMELLVLSVLDWRLRSVTPFDFISFFAYKIDPSGTFLGFFISHATEIILSNIKEASFLEYWPSSIAAAAILCVANELPSLSSVVNPHESPETWCDGLSKEKIVRCYRLMKAMAIENNRLNTPKVIAKLRVSVRASSTLTRPSDESSFSSSSPCKRRKLSGYSWVGDETSTSN

SEQ ID NO: 2918 - protein, 335 aa, Arabidopsis thaliana
MRSYRFSDYLHMSVSFSNDMDLFCGEDSGVFSGESTVDFSSSEVDSWPGDSIACFIEDERHFVPGHDYLSRFQTRSLDASAREDSVAWILKVQAYYNFQPLTAYLAVNYMDRFLYARRLPETSGWPMQLLAVACLSLAAKMEEILVPSLFDFQVAGVKYLFEAKTIKRMELLVLSVLDWRLRSVTPFDFISFFAYKIDPSGTFLGFFISHATEIILSNIKEASFLEYWPSSIAAAAILCVANELPSLSSVVNPHESPETWCDGLSKEKIVRCYRLMKAMAIENNRLNTPKVIAKLRVSVRASSTLTRPSDESSSPCKRRKLSGYSWVGDETSTSN

SEQ ID NO: 2919 - protein, 334 aa, Arabidopsis thaliana
MRSYRFSDYLHMSVSFSNDMDLFCGEDSGVFSGESTVDFSSSEVDSWPGDSIACFIEDERTFVPGHDYLSRFQTRSLDASAREDSVAWILKVQAYYNFQPLSAYLAVNYMDRFLYARRLPETSGWPMQLLAVACLSLAAKMEEILVPSLFDFQVAGVKYLFEAKTIKRMELLVLSVLDWRLRSVTPFDFISFFAYKIDLRVPFSGSLSPMLQSILSNIKEASFLEYWPSSIAAAAILCVANELPSLSSVVNPHESPETWCDGLSKEKIVRCYRLMKAMAIENNRLNTPKVIAKLRVSVRASSTLTRPSDESSSPCKRRKLSGYSWVGDETSTSN

SEQ ID NO: 2920 - protein, 350 aa, Glycine max
  unsure (1)..(350): unsure at all Xaa locations
SSTATLSFSTVTHTSGDFSDDSFLLCGEDSSGIIDSSPECSSDLDSPPPSEAEAESIAGFIEDERNFVPGFEYLNRFQSRSLDASAREESVAWILKVQAYYAFQPLTAYLSVNYLDRFLNSRQLPQTNGWPLQLLSVACLSLAAKMEEPLVPSLLDLQVEGAKYVFEPKTIRRMELLVLGVLDWRLRSVTPFSFLDFFACKLDSSGTFTGFLISRATQIILSNIQEASFLAYWPSCIAAASILHAANEIPNWSFVRPEHXXESWCEGLRKEKVIGCYQLMQELVINNNRRKPPKVLAQLRVTTRTRMRSSTVSSFSSTSSSSSSTSFSLSCKRRKLNNRLWVDDEKGNSE

SEQ ID NO: 2921 - protein, 350 aa, Glycine max
  unsure (1)..(350): unsure at all Xaa locations
MRNHRRXLLMSVSCLSDYDLLCGEDSSGILSGESPECSFSDIDSSPPPSIASFIEHERNFVPGFEYLSRFQSRSLDANAREESVGWILKVHAYYGFQPLTAYLAVNYMDRFLDSRRLPETNGWPLQLVSVACLSLAAKMEEPLVPSLLDLQIEGAKYIFEPRTIRRMELLVLGVLDWRLRSVTPLCFLAFFACKVDSTGTFIRFLISRATEIIVSNIQEASFLAYWPSCIAAAAILTAANEIPNXXSVVKPENAESWCEGLRKEKVIGCYQLMQELVINNNQRKLPTKVLPQLRVTTRTRMRSSTVSSFSSTSSSSSSTSFSLSCKRRKLNNRLWVDDKGNSEXRENEQQ

SEQ ID NO: 2922 - protein, 380 aa, Glycine max
  unsure (1)..(380): unsure at all Xaa locations
PASAAHSLFLHSSPQLTLPAKPPRKPWPENESPPIAMSVSCSNCFPDDDHSFLLCGEDSSGIMDSSPECSSDLDSSPPSEAESIAGFMEDERNFVPGFEYLNRFQSRSLDASAREESVAWILKVQAYYAFQPVTAYLSVNYLDRFLNSRPLPQTNGWPLQLLSVACLSLAAKMEESLVPSLLDLQVEGAKYVFEPRTIRRMELLVLGXVLDWRLXRSVTPLCFLVFFACKADSTGTFTRFLISRATEIIVSNIQEASFLAYRPSCIAAAAILTAANEIPNXXSVVKPEQAESWCQGIRKEKVIGCYQLMQELVINNNQRKLPTKVLPQLRVTTRTRMRSSTVSSFSSTSSSSSSTSFSLSCKRRKLNNRLWVDDEKGNSE

SEQ ID NO: 2923 - protein, 322 aa, Oryza sativa (japonica cultivar-group)
MGAPATAASGGGDDDDRDVVFEYLLCTEEDAASAGSFFQQLQGPAPAVSSSPSTTTATAPAAAGSCDDGGEEEEEEVWTVDVVAELIGGEAERSHSPRADYPGRLRSGRPADLAARADSVAWILKVRELYGMLPVTAYLAVSYMDRFLSLHRLPMEDARYIFEHRTIFRMELLVLDALDWRLRSITPFTFMYLFADKVDPNGKHIRELIHQATQVTLATIHDTEFLDHCPSSIAAAAVLCASSEIMQLVSIDHGTLVSWRIIGLDEEAIIRCYRLMQQLISSNNVGRESTEITMATTTTTATTAVSSEEVVSSSPPSKRRKM

SEQ ID NO: 2924 - protein, 330 aa, Antirrhinum majus
MSLSCSDCFSDLLCGEDSNIIFSGGGDDLPEYTSDVESIPTDVDESIAGLLEDERDLAGVNSSSSNQSVDSSTRTESTAWILKVQRYYGFQPLTAYLAVSYFDRFLNAHHLPKLNGWPMQLLSVACLSLAAKMEESLVPSLLDLQVEGANFIFEPRNIQRMELLVLRVLDWRLRSISPFCYLSFFALKIDPTGTYTGFLTSRAKEIILSTVQETSLIEYRPSCIAAATMLSSANDLPKFSFITAQHAEAWCDGLHKDNIASCIKLIQGVESNNRPKKQPKVLPQLRVMTRASLASSESSSSTSSSPSYKRRKLNNSSRADDDKESSDYGV

SEQ ID NO: 2925 - protein, 315 aa, Helianthus tuberosus
MSISCSDCFSDLLCCEDSGILSGDDRPECSYDFEYSGDFDDSIAEFIEQERKFVPGIDYVERFQSQVLDASAREESVAWILKVQRFYGFQPLTAYLSVNYLDRFIYCRGFPVANGWPLQLLSVACLSLAAKMEETLIPSILDLQVEGAKYIFEPKTIRRMEFLVLSVLDWRLRSVTPFSFIGFFSHKIDPSGMYTGFLISRATQIILSNIQEASLLEYWPSCIAAATILCAASDLSKFSLINADHAESWCDGLSKEKITKCYRLVQSPKILPVHVRVMTARVSTESGDSSSSSSSPSPYKKRKLNNYSWIEEDKR

SEQ ID NO: 2926 - protein, 240 aa, Triticum aestivum
  unsure (1)..(240): unsure at all Xaa locations
PLPSSSSSASTPHPLQARGGARGPSRRWSEPRLSHLRRVSSYHLLPGRKRPMAPNYEMAASILLCAEDSSSIFGFGDGEEAAAGARAEGSPYCGGDDEFAAGFPLPSEECVARWVATEAEHMPREDYAERLRAGGXXDLRVRMDAVDWIWKVHTYYGFGPVTACXLAVNYMDRFLSLYQIPEGKAWMTLLLSCACLSLAMEMDDAPQPQAIEVPGGDARFVEAKTTIXKMELLVLSTLKX

SEQ ID NO: 2927 - protein, 140 aa, Triticum aestivum
TLVERGYSSVATISAPLPHRIASAPPPPPPPRRPLDGNGRCSVTAPTGPAMPEDDASFLLCAEDAFFFVDAATASTCTTAEQIGGWCSGAEEESAAASFVAELIGGEADYSPRSDYSDRLRSRSVDPAARADSVATLKVQ

SEQ ID NO: 2928 - protein, 323 aa, Arabidopsis thaliana
MGEPKDSLALFLCHESESSLNEDDDETIERSDKQEPHFTTTIDDEDYVADLVLKENLRFETLPSKTTSSSDRLIAIDWILTTRTRFGFQHQTAYIAISYFDLFLHKRFIGLQKDETWAMRLLSVACLSLAAKMEERIVPGLSQYPQDHDFVFKPDVIRKTELLILSTLDWKMNLITPFHYFNYFLAKISQDNHSVSKDLVLLRSSDSLLALTKEISFTEYRQFVVAAVTTLLASSSTSSDIRLTREEIANKFGSISWWTSNENENVYLCYQRTLEIEERKHMTPPPEIAVSREPPASGSGAKRRLSFDDSDQSSPPAKRMRRL

SEQ ID NO: 2929 - protein, 265 aa, Glycine max
  unsure (1)..(265): unsure at all Xaa locations
XEIVLGFXXRDESMVFGDWVKRARVEAINWILKTRATLGFRFETAYLSVTYFDRFLSRRSIDSEKSWAIRLLSIACLSLAAKMEECNVPGLSEFKLDDYSFEGKVIQRVELLVLSTLEWEMGIITPFDFLSYFITKFCKESHFLQDHATHLHHNESIXLSPCAEVNLMDHKPSVIAVAATLVAMDQQLTRDAVELKMSSIPQHRLLESKDVFEYYNLIQRLYEENTKSDTHTPIEMTESSRVTSSAAMTKRRRLTFSDDEGSSHG

SEQ ID NO: 2930 - protein, 348 aa, Oryza sativa
  unsure (1)..(348): unsure at all Xaa locations
MGDASASTSAPATPTSTLICREDGNDLFSADPADDDGGGGSGGDWELSIADDDHVLLMDRDDEYLALMLSKERCAGGGGGGERGDEEEEEMVEEWMKMGDASANARAWCVGWIVKTNAGFRFSLKTAYVAVTYLDRFLARRDKEWALQLLSVACLSLAAKVEERRPPRLPEFKLDXXYDCASLMRMELLVLTTLKWQMITETPFSYLNCFTAKFRHDERKAIVLRAIECIFASIKVISSVGYQPSTIALAAILIARNKETAPIDELKSVVGSLWQQLDTGHVYSCYNKMMIQEDRSMQSTTEVASSGVSVAHIGGSEDSAMGGANNATTLEATPDKKRKRLHSPQRQX

SEQ ID NO: 2931 - protein, 420 aa, Oryza sativa
  unsure (1)..(420): unsure at all Xaa locations
MGDASASTSAPATPTSTLICREDGNDLFSADPADDDGGGGSGGDWELSIADDDHVLLMDRDDEYLALMLSKERCAGGGGGGERGDEEEEEMVEEWMKMGDANARAWCVGWIVKTNAGFRFSLKTAYVAVTYLDRFLARRCVDRDKEWALQLLSVACLSLAAKVEERRPPRLPEFKLXXMYDCASLMRMELLVLTTLKWQMITETPFSYLNCFTAKXSGTTSGXAIVLRAIECIFASIKGRSFLGYQPSTIALAAILIARNKETAPNLDELKSVVGSLWQQLDTGHVYSCYNKMMIQEDRSMQSTTEVASSGVSVAHRSEDSAMGGANNATTLEATPDKKRKSNGFAVLCLLGEGLKFSPNLVPPTKHHAKKQLPMNDLNLIQMAVDDQPLHWIPLAPGDSSWAVATGIAVKTQKRCTSMT

SEQ ID NO: 2932 - protein, 238 aa, Oryza sativa
  unsure (1)..(238): unsure at all Xaa locations
PRAAGMRHEALSLSLSLSLFQSSPESCVGWIXLQTNAGFRFSLKTAYVAVTYLDRFLARRCVDRDKEWALQLLSVACLSLAAKVEERRPPRLPEFKLXXMYDCASLMRMELLVLTTLKWQMITETPFSYLNCFTAKXSGTTSGXAIVLRAIECIFASIKVISSVGYQPSTIALAAILIARNKETAPNLDELKSVVGSLWQQLDTGHVYSCYXXKMMIPEDRSMQSTTEVASSGVSVAX

SEQ ID NO: 2933 - protein, 138 aa, Triticum aestivum
MGDASTSAAPATPTSTLICLEDGNDLFLDDDSPDGGLADSRLAADDGLLLLDRDDEYVALMLSKEGAGGGGTWGEELDEWTKAARAVCVDWIVKTNARFLFSGKTAYVAVTYLDRFLAQRRVDRGKEWALQLLSVACL

SEQ ID NO: 2934 - protein, 171 aa, Triticum aestivum
  unsure (1)..(171): unsure at all Xaa locations
FPVDPASAAQWQXIAGTPFPYLSCFAARFRHDERKAIVLRAVKCIFASIKAMRSVEYQSSTMALVPILVARGGSEGTTGPNLEEELKAILGSSWQQLQTGHVCSCYSVMIQEEDRSVQSSREVASSDVSAAAPAGSPGTSVAMAVAANDNKAIATTSADNKRRRLHFPQRQ

SEQ ID NO: 2935 - protein, 133 aa, Triticum aestivum
  unsure (1)..(133): unsure at all Xaa locations
LSLQSVSLKMIAGTPFPYLSCFVARFRHDERKAIVLRAVKCIFASIKAMSSVEYQPSTMALASILVARGGREGTGTAPNLEEELKAILGSSWQQLHTGHVYSCYSVMIQEEDRSTQSGREVASSGVSXAAPPE

SEQ ID NO: 2936 - protein, 289 aa, Homo sapiens
MELLCHEVDPVRRAVRDRNLLRDDRVLQNLLTIEERYLPQCSYFKCVQKDIQPYMRRMVATWMLEVCEEQKCEEEVFPLAMNYLDRFLAGVPTPKSHLQLLGAVCMFLASKLKETSPLTAEKLCIYTDNSIKPQELLEWELVVLGKLKWNLAAVTPHDFIEHILRKLPQQREKLSLIRKHAQTFIALCATDFKFAMYPPSMIATGSVGAAICGLQQDEEVSSLTCDALTELLAKITNTDVDCLKACQEQIEAVLLNSLQQYRQDQRDGSKSEDELDQASTPTDVRDIDL

SEQ ID NO: 2937 - protein, 240 aa, Homo sapiens
MELLCHEVDPVRRAVRDRNLLRDDRVLQNLLTIEERYLPQCSYFKCVQKDIQPYMRRMVATWMLEVCEEQKCEEEVFPLAMNYLDRFLAGVPTPKSHLQLLGAVCMFLASKLKETSPLTAEKLCIYTDNSIKPQELLEWELVVLGKLKWNLAAVTPHDFIEHILRNVPQQREKLSLIRKHAQTFIALCATDFKFAMYPPSMIATGSVGAAICGLQQDEEVSSLHCDALTELLAKITNTDV

SEQ ID NO: 2938 - protein, 374 aa, Homo sapiens
MSRRSSRLQAKQQPQPSQTESPQEAQIIQAKKRKTTQDVKKRREEVTKKHQYEIRNCWPPVLSGGISPCIIIETPHKEIGTSDFSRFTNYRFKNLFINPSPLPDLSWGCSKEVWLNMLKKESRYVHDKHFEVLHSDLEPQMRSILLDWLLEVCEVYTLHRETFYLAQDFFDRFMLTQKDINKNMLQLIGITSLFIASKLEEIYAPKLQEFAYVTDGACSEEDILRMELIILKALKWELCPVTIISWLNLFLQVDALKDAPKVLLPQYSQETFIQIAQLLDLCILAIDSLEFQYRILTAAALCHFTSIEVVKKASGLEWDSISECVDWMVPFVNVVKSTSPVKLKTFKKIPMEDRHNIQTHTNYLAMLCMISSHV

SEQ ID NO: 2939 - protein, 404 aa, Homo sapiens
MSRRSSRLQAKQQPQPSQTESPQEAQIIQAKKRKTTQDVKKRREEVTKKHQYEIRNCWPPVLSGGISPCIIIETPHKEIGTSDFSRFTNYRFKNLFINPSPLPDLSWGCSKEVWLNMLKKESRYVHDKHFEVLHSDLEPQMRSILLDWLLEVCEVYTLHRETFYLAQDFFDRFMLTQKDINKNMLQLIGITSLFIASKLEEIYAPKLQEFAYVTDGACSEEDILRMELIILKALKWELCPVTIISWLNLFLQVDALKDAPKVLLPQYSQETFIQIAQLLDLCILAIDSLEFQYRILTAAALCHFTSIEVVKKASGLEWDSISECVDWMVPFVNVVKSTSPVKLKTFKKIPMEDRHNIQTHTNYLAMLEEVNYINTFRKGGQLSPVCNGGIMTPPKSTEKPPGKH

SEQ ID NO: 2940 - protein, 473 aa, Oryza sativa
  unsure (1)..(473): unsure at all Xaa locations
MALPFPVPRGAHWAVTSTAHVLVGFTGEMARVEQPRAPAPYNAAFLRKNPEEEEEEQQEAVRMATRHQRAAAAPQPANRGAAVAAGKQKAAATGNRQALGDIGNVLNDVVDGKIQLPEGINRPITRSFGAQLLKKAQENAVAANKIVVQNPARKEPAPKPAKKVVPRPENAAKASTGAGVNENKKPSAEGAGSSSGGSALKYSRKKVVNTLTSVLTARSKHACGITEKPKEVVEDIDKLDGDNQLAVVEYIEDIYNFYRTAQLERRPTDYMSSQVEVNPKMRAILADWIIDVHYKFELMPETLYLTMYVIDRYLSLQPVLRRELQLVGVAAMLIASKYEEMWAPEVQDLIHVCDNAYSRQHILAMEKNILNRLQWNITVPTPYVFLLRFIKAAGGDKELENMVFFFSEMALKEYGMASLCPSLVAASAVECAKVLVNAQPLLRASXRRHTGSTHPSSLGVSLCALRQFXXSLX

SEQ ID NO: 2941 - protein, 197 aa, Triticum aestivum
  unsure (1)..(197): unsure at all Xaa locations
XYMGSQTEINPKMRAILTDWLVEVTHKFELMPESMYLTIYVIDRFLSLQAVPRRELQLVGIAAMLIACKYEEIWAPEVNDFISIADNSYSRQQILSMEKNILNSMAWNLTVPTPYVFLVRFAKAAGSDKELEHMIFFFAELALMEYGLVTVRPSLGXQASGRVPLPRCTAXXKEAPFWTGTFKHXQTGIRLKPQASG

SEQ ID NO: 2942 - protein, 356 aa, Oryza sativa (japonica cultivar-group)
MAALTSYEMAASILLCAEDSSSVLGFGGEEEEEEEDVVAGKRARCAGPPPPPCVDVAGVDFAVPSEECVARLVETEADHMPREDYAERLRAGGGDGDLDLRVRMDAIDWIWKVHSYYSFAPLTACLAVNYLDRFLSLYQLPDGKDWMTQLLAVACLSLAAKMEETDVPQSLDLQVGEERYVFEAKTIQRMELLVLSTLKWRMQAVTPFSYVDYFLRELNGGDPPSGRSALLSSELILCIARGTECLGFRPSEIAAAVAAAVVGEEHAAFSHVNKERMSHCQEVIQAMELIHPKPSSPSRVFVSSSIPRSPTGVLDAAGCLSYRSDDSAVASHYAASSWGYEHDSSPVSSKRRKISR

SEQ ID NO: 2943 - protein, 287 aa, Oryza sativa
  unsure (1)..(287): unsure at all Xaa locations
MEAEDEYSAGCSFSLMCQEDSTDALARRATVKWILETRGCFGFCHRTAYLAIAYFDRFCLRRCIDRSVMPWAARLLAVACVSLAAKMEEYRAPALSEFRAGVGDDGYEFSCVCIRRMELLVLSTLDWRMAAVTPFDYLPCLSSRLRXXHVGGGGGAGASAALIFSAAEAASVLDHRPSTVAAAAVLAATHGALTREALXSPRXAASPHLSXLDKEDVFACYSAMLSQPTSPASKSTTTTTGKRSSSSSCSESTDAASSYDATAASFPAAARAARGXGWSCREASSDX

SEQ ID NO: 2944 - protein, 327 aa, Oryza sativa
  unsure (1)..(327): unsure at all Xaa locations
LLLLLFFLPLRRRRRRRLXDYRRRRRRRGLVPAXARLAAVKWILETRGYFGFGHRTAYLAIAYFDRFCLRRRVDREAMPWAARLLSIACVSVAAKMEEYQSPALSEFDAGGGRVFCSDSIRRMELLVLSTLGWRMGAVTPFDFLPCFSSRLHRHGAAAAARVAHAVGFIFATAEAGSVLDYRPSTVAAAAILAASYGAPLTKEALESKMSNLSPSCLIDKENVHACYSMMVGDMNNNRRSSKRPLQCSDSNEITTTSTYDSVLVDDVTDTAAXSLRRRXISGSGQSRRESVEEASTTRDTQFLVRCLGGAWFGSSPFPLLFFSLFLT

SEQ ID NO: 2945 - protein, 175 aa, Oryza sativa
  unsure (1)..(175): unsure at all Xaa locations
PSPPXRSRAPLSSFSGRRRHRRRPWAARLLSIACVSVAAKIEEYQSPALSEFDAGGGRVFCSDSIRRMELLVLSTLGWRMGAVTPFDFLPCFSSRLHRHHHAAAAARVALNAVGFIFATAEAGSVLDYRPSTVAAAAILAASYGAPLTKEALESKMSNLSPSCLIDKENVHACYX

SEQ ID NO: 2946 - protein, 268 aa, Triticum aestivum
  unsure (1)..(268): unsure at all Xaa locations
MPGMEEAEDYASCAFSLTCPEDGAELGDGVVDDGDLFLFYVGGGAAADDEDGDDEYVEQLVSKEASFCSSSDSGDNGCSFSTRGPALLQARRTPPTYGRRAGRTDTRLATPRRGCTEEEVEDDVVVCVQXVRPRVRAAMPWAARLLSVACVSVAAKMEEYCAPALSELDAGGGYEFCFASVRRMELLVLSTLGWRMAAVTPFDYLPCFSSRLDRHDGRGGGGLDPAGVALKSIGSICATAEAGSVLDYMPSTAAAAAILVAIGSSEXX

SEQ ID NO: 2947 - protein, 172 aa, Triticum aestivum
  unsure (1)..(172): unsure at all Xaa locations
MPGMEEAEDYASCAFSLTCPEDGAELGDGVVDDGDLFLFYAGGGAAADDEDGDDEYVEQLVSKEASFCSSSDSGDADCSSAASEDWFLQARLAAVKWILETRGCFGFGHRTAYLAIAYFDRFFLRRRVDRAAMPWAARLLSVACVSVAAKMEEYCAPALSELDAGGGYEFCX

SEQ ID NO: 2948 - protein, 508 aa, Oryza sativa; identical to SEQ ID NO: 377

SEQ ID NO: 2949 - protein, 508 aa, Oryza sativa; identical to SEQ ID NO: 377

SEQ ID NO: 2950 - protein, 497 aa, Oryza sativa
MSSSLASRRSSSSSAAKRPAAGEGGGKAAAGAAAAKKRVALGNITNVAAAANNAVREGSLKFNSATWAAPVKKGSLASGRNVGTNRVSAVKSASTKPASAISRHESAPQKESVLPPKVLRIVPTAAPAPVTVPCSSFVSPMHSGDSVSVDETMSTCDSMKSPDFEYIDNGDSSSVLGSLQRRANENLRISEDRDVEETKWKKDAPSPMEIDQICDVDNNYEDPQLCATLASDIYMHLREAETRKHPSTDFMETLQKDVNPSMRAILIDWLVEVAEEYRLVPDTLYLTVNYIDRYLSGNEINRQRLQLLGVACMLIAAKYKEICAPQVEEFCYITDNTYFRDEVLEMEASVLNYLKFEMTAPTAKCFLRRFVRVAQVSDEDPALHLEFLANYVAELSLLEYNLLSYPPSLVAASAIFLAKFILQPAKHPWNSTLAHYTQYKSSELSDCVKALHRLFCVGPGSNLPAIREKYTQHKYKFVAKKPCPPSIPTEFFRDSTC

SEQ ID NO: 2951 - protein, 506 aa, Oryza sativa
  unsure (1)..(506): unsure at all Xaa locations
RHEGRPRVGKSTQTLASALANPXAPGRGGGGLQGRIEASGEAARGRRGGGEGGRGGGGGQAPGKAGNAKLNLAAXAAPVKKGSLASGRSVGXTNRASAVKSASTKPAPAISRHESAAQKESVLPPKVPSIVPTAALAPVTVPCSSFVSPMHSGDSVSVDETMSTCDSMKSPEFEYIDNGDSSSVLGSLQRRANENLRISEDRDVEETKWKKDAPSPMEIDQICDVDNNYEDPQLCATLASDIYMHLREAETRKRPSTDFMETIQKDVNPSMRAILIDWLVEVAEEYRLVPDTLYLTVNYIDRYLSGNEINRQRLQLLGVACMLIAAKYEEICAPQVEEFCYITDNTYFRDEVLEMEASVLNYLKFEMTAPTAKCFLRRFVRVAQVSDEDPALHLEFLANYVAELSLLEYNLLSYPPSLVAASAIFLAKFILQPTKHPWNSTLAHYTQYKSSELSDCVKALHRLFSVGPGSNLPAIREKYTQHKYKFVAKKPCPPSIPTEFFRDATC

SEQ ID NO: 2952 - protein, 450 aa, Oryza sativa
  unsure (1)..(450): unsure at all Xaa locations
MAAKRPAAGEGGGKAAAGAAAAKKRVALVNITNVAAAANNAKFNSATWAAPVKKGSLASGRNVCTNRVSAVKSASAKPAPAISRHESAPQKXXSFVSPMHSGDSVSVDETMSMCDSMKSPDFEYIDNGDSSSVLGSLQRRANENLRISEDRDVEETKWKKDAPSPMEIDQICDVDNNYEDPQLCATLASDIYMHLREAETRKHPSTDFMETLQKDVNPSMRAILIDWLVEVAEEYRLVPDTLYLTVNYIDRYLSGNEINRQRLQLLGVACMLIAAKYKEICAPQVEEFCYITDNTYFRDEVLEMEASVLNYLKFEMTAPTAKCFLRFYSLLFIVQDPALHLEFLANYVAELSLLEYNLLSYPPSLVAASAIFLAKFILQPAKHPWNSTLAHYTQYKSSELSDCVKALHRLFCVGPGSNLPAIREKYTQHKYKFVAKKPCPPSIPTEFFRD

SEQ ID NO: 2953 - protein, 394 aa, Oryza sativa
  unsure (1)..(394): unsure at all Xaa locations
EGEVSKNIEIRAEXSSTSRLPTIVPWHHDCSPGLSDNSMSKEDAMSTGDSTESLDIDCLDDGDSEVVSSLQHLADDKLHISDNRDVAGVASKWTKHGCNSVEIDYIVDIDNNHEDPQLCATLAFDIYKHLRVAETKKRPSTDFVETIQKNIDTSMRAVLIDWLVEVTEEYRLVPETLYLTVNYIDRYLSSKVINRRKMQLLGVACLLIASKYEEICPPQVEELCYISDNTYTKDEVLKMEASVLKYLKFEMTAPTTKCFLRRFLRAAQVCHEAPVLHLEFLANYIAELSLLEYSLICYVPSLIAASSXFLAKFILKPTENPWNSTLSFYTQYKPSDLCNCAKGLHRLXLVGPGGNLRAVREKYSQHKYKFVAKKYSPPSIPAEFFEDPSSYKPD

SEQ ID NO: 2954 - protein, 411 aa, Oryza sativa
  unsure (1)..(411): unsure at all Xaa locations
MSSNLAASRRSSSSSSVAAAAAAKRPAVGEGGGGGGGKAAAGAAAAKKRVALSNISNVAAGGGAPGKAGNAKLNLAASAAPVKKGSLASGRNVGTNRASAVKSASAKPAPAISRHESATQKESVLPPKVPSIVPTAALAPVTVPCSSFVSPMHSGDSVSVDETMSTCDSMKSPEFEYIDNGDSSSVLGSLQRRANENLRISEDRDVEETKWKKDAPSPMEIDQICDVDNNYEDPQLCATLASDIYMHLREAEVAEEYRLVPDTLYLTVNYIDRYLSGNEINRQRLQLLGVACMLIAAKYEEICAPQVEEFCYITDNTYFRDELFIVQDPALHLEFLANYVAELSLLEYNLLSYPPSLVAASAIFLAKFILQPTKHPWXGLAECRXIDASAVCDICSXCDRLKHDDSARFLX

SEQ ID NO: 2955 - protein, 510 aa, Oryza sativa
  unsure (1)..(510): unsure at all Xaa locations
MCPLFERLLRKLRSISPIIWSRSLSPGARLDSFLFLFFCVKALRKDITGGRIKGLCYAHTPEDPRVDFIGCLVIQVWQVKGLGQNGPRKCWAVSGRHGYCCMDRWPTHLQENVIRVKLQSQVFYSREGSKPSPCSASDPRRPPPPSQPSQQQQEEEGSGGGCRRPMSSSLASRRSSSSSAAKRPAAGEGGGKAAAGAAAAKKRVALGNITNVAAAANNAKFNSATWAAPVKKGSLASGRNVGTNRVSAVKSASTKPASAISRHESAPQKEASVSVDETMSTCDSMKSPDFEYIDNGDSSSVLGSLQRRANENLRISEDRDVEETKWKKDAPSPMEIDQICDVDNNYEDPQLCATLASDIYMHLREAEVAEEYRLVPDTLYLTVNYIDRYLSGNEINRQRLQLLGVACMLIAAKYKEICAPQVEEFCYITDNTYFRDELFIVQDPALHLEFLANYVAELSLLEYNLLSYPPSLVAASAIFLAKFILQPAKHPWIYAADVIDLNMMIQRDSX

SEQ ID NO: 2956 - protein, 314 aa, Oryza sativa
EDAMSTGDSTESLDIDCLDDGDSEVVSSLQHLADDKLHISDNRDVAGVASKWTKHGCNSVEIDYIVDIDNNHEDPQLCATLAFDIYKHLRVAETKKRPSTDFVETIQKNIDTSMRAVLIDWLVEVTEEYRLVPETLYLTVNYIDRYLSSKVINRRKMQLLGVACLLIASKYEEICPPQVEELCYISDNTYTKDEAPVLHLEFLANYIAELSLLEYSLICYVPSLIAASSIFLAKFILKPTENPWNSTLSFYTQYKPSDLCNCAKGLHRLFLVGPGGNLRAVREKYSQHKAQLPRAKKHTDLLPLSNLKSGDCGI

SEQ ID NO: 2957 - protein, 419 aa, Oryza sativa; identical to SEQ ID NO: 374

SEQ ID NO: 2958 - protein, 419 aa, Oryza sativa; identical to SEQ ID NO: 374

SEQ ID NO: 2959 - protein, 291 aa, Oryza sativa
APIGSERQKRTADSAFHGPADMECTKITSDDLPLPMMSEMDEVMGSELKEIEMEDIEEAAPDIDSCDANNSLAVVEYVDEIYSFYRRSEVHYKLELLDETLFLTVNIIDRFLARENVVRKKLQLVGVTAMLLACKYEEVSVPVVEDLILICDRAYTRTDILEMERMIVNTLQFDMSVPTPYCFMRRFLKAAQSDKKCLLKQLELMSFFIIELSLVEYEMLKFQPSMLAAAAIYTAQCTINGFKECSKMMVELHQKAGHGKLTGVHRKYSTFRYGCAAKSEPAVFLLKSVAL

SEQ ID NO: 2960 - protein, 361 aa, Arabidopsis thaliana
MALEEEEESQNAPFCVLDGLFCEEESEFHEQVDLCDESVEKFPFLNLGLSDHDMLWDDDELSTLISKQEPCLYDEILDDEFLVLCREKALDWIFKVKSHYGFNSLTALLAVNYFDRFITSRKFQTDKPWMSQLTALACLSLAAKVEEIRVPFLLDFQVEEARYVFEAKTIQRMELLVLSTLDWRMHPVTPISFFDHIIRRYSFKSHHQLEFLSRCESLLLSIIPDSRFLSFSPSVLATAIMVSVIRDLKMCDEAVYQSQLMTLLKVDSEKVNKCYELVLDHSPSKKRMMNWMQQPASPIGVFDASFSSDSSNESWVVSASASVSSSPSSEPLLKRRRVQEQQMRLSSINRMFFDVLSSSPR

SEQ ID NO: 2961 - protein, 317 aa, Arabidopsis thaliana
MAEFMEPNLVSNFDDEKSNSVDTRSIFQMGFPLESEEIVREMIEKERQHSPRDDYLKRLRNGDLDFNVRIQALGWIWKACEELQFGPLCICLAMNYLDRFLSVHDLPSGKAWTVQLLAVACLSLAAKIEETNVPELMQLQVGAPMFVFEAKSVQRMELLVLNVLRWRLRAVTPCSYVRYFLSKINGYDQEPHSRLVTRSLQVIASTTKGDRLGLFFFKGVLIVDVWAGIDFLEFRASEIAAAVALSVSGEHFDKFSFSSSFSSLEKERVKKIGEMIERDGSSSSSQTPNNTVLQFKSRRYSHSLSTASVSSSLTSLS

SEQ ID NO: 2962 - protein, 367 aa, Arabidopsis thaliana
MALEKEEEASQNGAFCVLDGLYCEEETGFVEDDLDDDGDLDFLEKSDESVVKFQFLPLLDMFLWDDDEILSLISKENETNPCFGEQILDGFLVSCRKEALDWVLRVKSHYGFTSLTAILAVNYFDRFMTSIKLQTDKPWMSQLVAVASLSLAAKVEEIQVPLLLDLQVEEARYLFEAKTIQRMELLILSTLQWRMHPVTPISFFDHIIRRFGSKWHQQLDFCRKCERLLISVIADTRFMRYFPSVLATAIMILVFEELKPCDEVEYQSQITTLLKVNQEKVNECYELLLEHNPSKKRMMNLVDQDSPSGVLDFDDSSNSSWNVSTTASVSSSSSSPEPLLKRRRVQEQQMRLPSINRMFLDVLSSPR

SEQ ID NO: 2963 - protein, 376 aa, Arabidopsis thaliana
MAIRKEEESREEQSNSFLLDALYCEEEKWDDEGEEVEENSSLSSSSSPFVVLQQDLFWEDEDLVTLFSKEEEQGLSCLDDVYLSTDRKEAVGWILRVNAHYGFSTLAAVLAITYLDKFICSYSLQRDKPWMLQLVSVACLSLAAKVEETQVPLLLDFQVEETKYVFEAKTIQRMELLILSTLEWKMHLITPISFVDHIIRRLGLKNNAHWDFLNKCHRLLLSVISDSRFVGYLPSVVAAATMMRIIEQVDPFDPLSYQTNLLGVLNLTKEKVKTCYDLILQLPVDRIGLQIQIQSSKKRKSHDSSSSLNSPSCVIDANPFNSDESSNDSWSASSCNPPTSSSSPQQQPPLKKMRGAEENEKKKPILHLPWAIVATP

SEQ ID NO: 2964 - protein, 376 aa, Arabidopsis thaliana
MAIRKEEESREEQSNSFLLDALYCEEEKWDDEGEEVEENSSLSSSSSPFVVLQQDLFWEDEDLVTLFSKEEEQGLSCLDDVYLSTDRKEAVGWILRVNAHYGFSTLAAVLAITYLDKFICSYSLQRDKPWMLQLVSVACLSLAAKVEETQVPLLLDFQVEETKYVFEAKTIQRMELLILSTLEWKMHLITPISFVDHIIRRLGLKNNAHWDFLNKCHRLLLSVISDSRFVGYLPSVVAAATMMRIIEQVDPFDPLSYQTNLLGVLNLTKEKVKTCYDLILQLPVDRICLQIQIQSSKKRKSHDSSSSLNSPSCVIDANPFNSDESSNDSWSASSCNPPTSSSSPQQQPPLKKMRGAEENEKKKPILHLPWAIVATP

SEQ ID NO: 2965 - protein, 402 aa, Glycine max
  unsure (1)..(402): unsure at all Xaa locations
XSYLGPRGPEQTDKKENLGDRKQRHQCPPHQQCLSRRTLPSSAPXEAAIAGLLDAEPHHMPEKDYLRRCRDRSVDVTARLDAVNWILKVHAYYEFSPVTAFLSVNYFDRFLSRCSLPQQSGGWAFQLLSVACLSLAAKMEESHVPFLLDLQLFEPKFVFEPKTIQRMELWVMSNLKWRLRSVTPFDYLHYFISKLPSSSSSQSLNHFFSTSSNLILSTTRVINFLGFAPSTVAAAAVLCSANGQLPLSFHDRVNDEMVRCCHQLMEEYVVDTCPASVKARITEPAPPSSPVGVLDAATCGSYTPSDRNFAGPPNKRLRSSASDAPPVDNTGTSLHSRHHISYNSHIHYYNHNIIYKCLLFLFIFCQGERGFLLWFLNFIYQLPILYLYLLLGYIKRPRSKIW

SEQ ID NO: 2966 - protein, 243 aa, Glycine max
  unsure (1)..(243): unsure at all Xaa locations
KNFIFSFIAQMAPSFDCVSSLLCVEDNSIFDENDYGGSVEVLEDAWQDPRYRRNLSQSENLDVPNGWFQLQSDECLRLMVEKEWDHLPNGDYRNKLRSGDLDFEARKEAIDWIQKVQEHFGFGPVCAYLSINYLDRFLSAYELPKHRTWTMQLLAVGCLSLAAKMEETDAPMSLDLQVGESKYIFEAKTIQRMELLVLSTLRWRMQAITPXFSFIDHFLYKINDDQSPIGASIXQSIQLILST

SEQ ID NO: 2967 - protein, 414 aa, Glycine max
  unsure (1)..(414): unsure at all Xaa locations
MAIQHHNDQHVSSVLDALYCDEGKWEEEEEEKEEEEDEGXXNESEVTTNTATCLFPLLLLEQDLFWEDEELNSIFSKEKVQHEEAYDTSNNNVHLDSCLSQPRREAVEWMLKVNAHYGFSALTATLAVTYLDRFLLSFHFQREKPWMIQLVAVTCISLAAKVEETQVPLLLDLQVQDTKYLFEAKTIQRMELLVLSTLKWKMHPVTPLSFLDHIIRRLGLRTHLHWEFLRRCEHLLLSVLLDSRFVGCLPSVLATATMLHVIDQIQHSGGIEYKTQLLSVLKISKEKVDECYNAILQLSKANKYGHNNINNTSKRKYEQIPSSPSGVIDAAFCSDGSNDSWAVGSSLLYSPPEPLFKKSRTQGQQMNLSPLKRFIIGIVGTSPXLINTLSQTKKKKSKYLFTVVINLSMHAAEL

SEQ ID NO: 2968 - protein, 232 aa, Glycine max
HAVRYINVVPFPTLFFHPPLHVSLNPLRVYIIDFFIFVCIKFSSFNPSVEELVLQDESLSWDHKHLNLNNQCRSEHFWDFSVQSDETVMGLVGRESEHLPHVGYLKRLLSGDLDLSVRKEALDWIWKAHAYFDFGPCSLCLSVNYLDRFLSVYELPRGKSWSMQLLAVACLSIAAKMEEIKVPPCVDLQFAFEAKDIQAMELLVLSTLRWKMQASTPFSFLDYFLRKITCDQ

SEQ ID NO: 2969 - protein, 259 aa, Glycine max
  unsure (1)..(259): unsure at all Xaa locations
ENLPQDGYLKRLLSGDLDLSVRKEALDWIWKRGKSWSMQLLAVACLSIAAKMEEIKVPPCVDLQVGEPKFAFEAKDIQRMELLVLSTLRWKMQASTPFSFLDYFLRKITCDQVIVKSSILRSVGPILNIIKCINFLEFRPSEIAAAVAISVSREMQAEEIDKTLTCFFIVGKERILKCLELIKDLSLIQDSANLGTNLASFVPQSPIGVLXXAACLSSISDELTVGSYTDSSHSKRRRKSDXTLLMGHSSHEILIYFLH

SEQ ID NO: 2970 - protein, 385 aa, Glycine max
KWLCLPSLRCNEETFVFLLRRRKMALGDDAQHHSPSFLDALLCEERETFEEDFDENGYERETSQSLPLVLHDNDLFWEDEELVSLIAKEGETHLCFHGVVANGALEGPRVEAVNWISKVCGHYGFSALTTVLAVNYFDRFITSLKFQNDKPWMTQLTAVACLSLAVKTEETHVPLLLDLQVEESRFVFEAKTIQRMELLVLSTLKWRMHPVTPISFFEHIVRRLGLKSRLHWEFLWRCERVLLNVIADSRVMSYLPSTLAAATMIRVIKEIESFNATEYIDQLLGLLKISEEQVNQCYKIIQKLLGCYEGIYSLHQKRKRLSEPGSPGAVTDASFSCDSSNDSWTVSSSVSLSLEPLLKRRKSQDQQMRLPSVNCVSIDVLNSPR

SEQ ID NO: 2971 - protein, 268 aa, Glycine max
  unsure (1)..(268): unsure at all Xaa locations
XLEPNRLEENLPQDGYPKRLLSGDLDLSVRKEALDWIWKRGKSWSMQLLAVACLSIAAKMEEIKVPPCVDLQVGEPKFAFEAKDIQRMELLVLSTLRWKMQASTPFSFLDYFLRKITCDQVIVKSSILRSVGPILNIIKCINFLEFRPSEIAAAVAISVSREMQAEEIDKTLTCFFIFILQERILKCLELIKDLSLIQDSANLGTNLASFVPQSPIGVLXXAACLSSISDELTVGSYTDSSHSKRRRKSDXTLLMGHSSHEILIYFLH

SEQ ID NO: 2972 - protein, 368 aa, Glycine max
  unsure (1)..(368): unsure at all Xaa locations
MALGDDAQHHSHSPSFLDSLLCEERETXSRKTLTRTVTSARPKTTTXSVIKSQPLPLVLYDNDLFWEDDELVSLIAKEGETHXXRSFSDGALEGPRVEAVNWVSKVSGHYGFSALTTVLAVNYFDRFITSLKFQRDKPWMTQLAAVACLSLAAKTEETHVPLLLDLQVEESRFVFEAKTIQRMELLVLSTLKWRMLPVTPISFFEHIVRRLGLKSRLHWEFLWRCERVLLNIIADSRVMSYLPSTLAAATMIHVIKEIESFNATEYIDQLLGLLKISEEQVNKCYRIIQKLCIYGLPQKCKRLSELGSPSAVTDASFSCDSSNDSWAVSSSVSLSLEPQLKRRRSQDQQMRLXXSVSRVSIDVLNSPH

SEQ ID NO: 2973 - protein, 381 aa, Glycine max
  unsure (1)..(381): unsure at all Xaa locations
MKKRFFFLLRRRKMALGDDAQHHSHSPSFLDSLLCEERETXSRKTLTRTVTSARPKTTTXSVIKSQPLPLVLYDNDLFWEDDELVSLIAKEGETHXXRSFSDGALEGPRVEAVNWVSKVSGHYGFSALTTVLAVNYFDRFITSLKFQRDKPWMTQLAAVACLSLAAKTEETHVPLLLDLQVEESRFVFEAKTIQRMELLVLSTLKWRMLPVTPISFFEHIVRRLGLKSRLHWEFLWRCERVLLNIIADSRVMSYLPSTLAAATMIHVIKEIESFNATEYIDQLLGLLKISEEQVNKCYRIIQKLCIYGLPQKCKRLSELGSPSAVTDASFSCDSSNDSWAVSSSVSLSLEPQLKRRRSQDQQMRLXXSVSRVSIDVLNSPH

SEQ ID NO: 2974 - protein, 379 aa, Glycine max
  unsure (1)..(379): unsure at all Xaa locations
XDTLCCTLDCTIGDEEEQHLHYDENSNTTSTNTLFSNVGWVEHDLFWDHEELPSLLAKEHQNQLSNTLLQNNLVLALSPEEAVEWILKVNARYSFSTLTAVLDVNYLERLLFIFRFQNDNNDNNNNNNPWLTQLSAVACLSLAAKFEETHVPLFIDLQVEESKYLFEAKTVKRMEILVLSTLGWRMNPVTPLSFLDYITRKLGLKGYLCWEFLRRCETVLLSVFADSRFMGYLPSVLATATVMRVVNTVEPRLGVEYQDQLLGILGIDKEKVEECYNLMMEVVSGYDEEGKRSKLKKRKLESIIPCSSQNGVMEGSFSCDSSSNESWELGASSVSSSNKKTSTQDQLLXXTIQTHQILXAFLASYXFQFSLSLPLSSLN

SEQ ID NO: 2975 - protein, 384 aa, Glycine max
  unsure (1)..(384): unsure at all Xaa locations
MPLDHHLFLEEIKMAHRYPKPLLDTLYCLKDHNWEEEQVEDDEYSSSTTTTITNTNTDTSHIVFLEHDLFWDREELSSLLWDHQELPSSNTLQKNHQLANTRQENNEWILKVNARYSFSTLTAVLAVNYLDRFLFTFRFQNDNNDNNNNNNPWLTQLSAVACLSLAAKFEETHVPLFIDLQVEESKYLFEAKTVKRMEILVLSTLGWKMNPVTPLSFLDYITRKLGLKGYLCWEFLRRCETVLLSVFADSRFMGYLPSVLATATVMRVVNTVEPRLGVEYQDQLLGILGIDKEKVEECYNLMMEVVSGYDEEGKRSKLKKRKLESISSSQNGVMEGSFSCDSSXXNESWELGASSVSSSSKKTRTQDQLLLNHSNSSDFISIPR

SEQ ID NO: 2976 - protein, 372 aa, Glycine max
  unsure (1)..(372): unsure at all Xaa locations
MAYHHHDHTNRKSLLDTLYCSEXXEEDYGHFLNNSSPASPPFLLQSDMFSDEQELTSLLGKEHHNPLSTCLQTNPALDFARREAVEWMLKVNSHYSFSALTAVLSVNYFDRFLFSFRFQNDKPWMVQLAAVACLSIAAKVEETHVPFLIDLQQVEESRYLFEAKTIKKMEILILSTLGWKMNPPTSLSFLDYFTRRLGLKDHLFWEFLTKSEGVLLSLIGDSRFMSYLPSVLATATMMQVLKSVEPSLEAEYKSQLFGILRIDKEKVNSCCKLMLELWSEFEGKQCMKRKFGIGWIPGSPNGVMDVSFSCDSSSNDSWVSSSPEPLSKKSRSEXNSSCFYQTLPTQFFSVAFNLISTTLPFLWKTYIVFSPL

SEQ ID NO: 2977 - protein, 409 aa, Glycine max
  unsure (1)..(409): unsure at all Xaa locations
PRVRTLQXSPTSKMAYHHHDHTNRKSLLDTRSEAEEDYGHLTTPPLRPLLSXLQSDMFSDEQELTSLLGKEHHNPLSTCLQTNPALDFARREAVEWMLKVNSHYSFSALTAVLSVNYFDRFLFSFRFQNDKPWMVQLAAVACLSIAAKVEETHVPFLIDLQQVDESRYLFEAKTIKKMEIXVLSTLGWKMNPPTPLSFLDYFTRRXLDXKDHLCWEELSKSQGVLLCVLGDSRFMSYLPSVLATATMMHVVKSVEPGLEAEYKSQLFGILRIDKEKPEKVNSCCKLLLEVWSGYEEEEQEQGKQCMKRKFGIGSIPGSPNGVMDVSFSCDSSSNDSSVSSSPEPLSKKSRSEGSFFYQTQTIPTQIFSIAFNVNSFMENIYRLSPVLITLYLSFVSLFDEQVKLPTISA

SEQ ID NO: 2978 - protein, 326 aa, Glycine max
  unsure (1)..(326): unsure at all Xaa locations
XRAARAAPDVNGFLSIINQLSLPSSSFFSFTSTAMPRPHSPSFLLCQEHYSFTFQQHSQTLSNTQPSPLTFPDNLQHDLLLSSPRHHVVRLISKLSNFHGFSPLTTVLAVNYFDRFVATLRFQSELKPWMTQLTAVACVSLAAKVEETRVPLLSDFQVEESKFLFEAKTIQRMELLVLSTLEWKMNPVTPISFFQHFLTSLGLKRHLHSESLRRCQRLLLSVIADSRVMSYLPSTLAAAIMIHIIKEIEPLNATEYQNQLPGLLKTSEEQVNECYKLILDVCSNGIHNLRRKRLSEPSSSPDGVIDASFSCDSSNDSWTVASPSVX

SEQ ID NO: 2979 - protein, 384 aa, Glycine max
  unsure (1)..(384): unsure at all Xaa locations
MAYHHQKSLLDTLYCSEEHWIGDDQAEEEYGNSNSNSSSTLVNNSPESSPHLLLESDMFWDEQELASLLEKEQHNPLSSCLQSNPALEGARIEAVEWILKVNAHYSFSALTAVLAVNYFDRFLFSFRFQNDIKPWMTRLAAVACLSLAAKVDETHVPFLIDLQQVXEGSRYLFEAKTIKKMEILILSTLGWKMNPPTSLSFLDYFTRRLGLKDHLFWEFLTKSEGVLLSLIGDSRFMSYLPSVLATATMMQVLKSVEPSLEAEYKSQLFGILRIDKEKVNSCCKLMLELWSEFEGKQCMKRKFGIGWIPGSPNGVMDVSFSCDSSSNDSWVSSSPEPLSKKSRSEXNSSCFYQTLPTQFFSVAFNLISTTLPFLWKTYIVFSPL

SEQ ID NO: 2980 - protein, 373 aa, Nicotiana tabacum
MAIEHNEQQELSQSFLLDALYCEEEEEKWGDLVDDETIITPLSSEVTTTTTTTTKPNSLLPLLLLEQDLFWEDEELLSLFSKEKETHCWFNSFQDDSLLCSARVDSVEWILKVNGYYGFSALTAVLAINYFDRFLTSLHYQKDKPWMIQLAAVTCLSLAAKVEETQVPLLLDFQVEDAKYVFEAKTIQRMELLVLSSLKWRMNPVTPLSFLDHIIRRLGLRNNIHWEFLRRCENLLLSIMADCRFVRYMPSVLATAIMLHVIHQVEPCNSVDYQNQLLGVLKINKEKVNNCFELISEVCSKPISHKRKYENPSHSPSGVIDPIYSSESSNDSWDLESTSSYFPVFKKSRVQEQQMKLASSISRVFVEAVGSPH

SEQ ID NO: 2981 - protein, 368 aa, Nicotiana tabacum
MGIQHNEHNQDQTQSFLLDALYCEEERWEETIEDEILEKEATLPLPLPLLEQDLFWEDEELLSLFTKEKETISNFETIKTDPLLCLSRKEAVKWILKVNAHYGFSTFTAILAINYFDRFLSSLHFQKDKPWMIQLVAVTCLSLAAKVEETQVPLLLDFQVEDAKYVFEAKTIQRMELLVLSSLKWRMNPVTPLSFVDHIIRRLGLKSHIHWEFLKQCERILLLVIADCRFLSYMPSVLATATMLHVIHQVEPCNAADYQNQLLEVLNISKEKVNDCYELITEVSYNSISHKRKYESPINSPSAVIDTFYSSENSNESWDLQTSSSIPSTYSPRDQFLPLFKKSRVQEQQMRLTSLSRVFVDYAVGSPR

SEQ ID NO: 2982 - protein, 367 aa, Nicotiana tabacum
MVFPLDTQLLNPIFDVLYCEEDRFLDDDDLGEWSSTLEQVGNNVKKTLPLLECDMFWEDDQLVTLLTKEKESHLGFDCLISDGDGFLVEVRKEALDWMLRVIAHYGFTAMTAVLAVNYFDRFVSGLCFQKDKPWMSQLAAVACLSIAAKVEETQVPLLLDLQVADSRFVFEAKTIQRMELLVLSTLKWKMNPVTPLSFIDHIMRRFGFMTNLHLDFLRRCERLILGIITDSRLLHYPPSVIATAVVYFVINEIEPCNAMEYQNQLMTVLKVKQDSFEECHDLILELMGTSGYNICQSLKRKHQSVPGSPSGVIDAYFSCDSSNDSWSVASSISSSPEPQYKRIKTQDQTMTLAPLSSVSVVVGSSPR

SEQ ID NO: 2983 - protein, 343 aa, Antirrhinum majus
MYQQNSPSLCFDALYCEEEQNWDNGEIINDCFIEEQEPFSDLLKHDLLCGVDDDDDDKEELSSLLCKEQEYELYRVLEDNPSLAKARDEAVEWMFKVIGYYSFSALTAVLAVNYLDRFLCTFQFQQDKPWMYQLAAVACLSLAAKVEETQVPLLLDLQVEESKYVFESKTIQRMELLVLSTLKWKMNPVTPISFLEYIARRLALKSHLCKEFLNRCECLLLSLITDCRFMCHLPSALATATMLYVISSLEPCIGVEYQDQLINILGINKDKVEECCKLIQEVATSVHFQSGNKRKFGSLPYSPKGVVDISFSCDDSWPLDSTASVSSSPEHLSKKIKTQNPDH

SEQ ID NO: 2984 - protein, 361 aa, Antirrhinum majus
MLFSHSQQTHLQNPIFDALLCNEEHFDEDLDLGSGLKDPGFINQIHHNQKKEEPFTTFLFEHDLLWEDDELVNLLSKEKEQEQQAHLGYDDVMDSDGFLKRVRNEGIKWMLKVIGHYGFNAMTAVLAVNYYDRFITNVGFQKDKPWMSQLAAVACLSVKVEETQVPLLLDFQVEESKYVFEAKTIQRMELLVLTTLKWKMNPVTPISFFDHIVRRFELMNNVQCEFMKRCESVILSIITDYRFVRYLPSVVAAATMIYVIKELYPCDALEYQNEFVTVLRTSKEKTDDCHMLITEVINNQSYILCHKRKYGSIPSSPNGVIDAYFSSDGSNDSWSAVSSVSSSPEPVFKRIRAIGGANPPH

SEQ ID NO: 2985 - protein, 344 aa, Zea mays
  unsure (1)..(344): unsure at all Xaa locations
MGILCLGASSTLLCGEDRNNVLGLGXRQRAGGGGGGHDGLDSVVGAVFPVDTDEAVRALLEKETDHKPQDGYAERLERGGLEYSWRRDAMDWICKVHSYYRFGPLSLYLAVNYLDRFLSSYDLPHDKPWMRQLLSVACLALAVKMEETVLPLPVDLQVCDVKFEFEARTIGRMELLVLATLKWRMQAVTPFTFISYFLDKFNGGKPPSMALASRCTEIIIGTLKGSTFLSFRPSEIAAASALAAVSENQVVGSSSALSASEVPINKEMIARCYELLQEQALVRKTGHINGSPSVPQSPIGVLDATCFSFRSEDVRLGSSQSNNISSSSNDNQVSKRRRLSISPI

SEQ ID NO: 2986 - protein, 252 aa, Zea mays
LQVHSYYRFGPLSLYLAVNYLDRFLSSYDLPHDKPWMRQLLSVACLALAVKMEETVLPLPVDLQVCDVKFEFEARTIGRMELLVLATLKWRMQAVTPFTFISYFLDKFNGGKPPSLALASRCTDIIIGTLKGSTFLSFRPSEIAAASALAAVSENQVVGSSSALSASEVPINKVMIARCYELLQEQALVRKTGHVNGSPSVPQSPIGVLDATCFSFRSEDARLVSSQSNNISSSSSNDNQVSKRRRLSISPI

SEQ ID NO: 2987 - protein, 252 aa, Zea mays
  unsure (1)..(252): unsure at all Xaa locations
LQVHSYYRFGPLSLYLAVNYLDRFLSSYDLPDKPWMRQLLSVACLALAVKMEETVLPLPVDLQVCDVKFEFEARTIGRMELLVLATLKWRMQAVTPFTFISYFLDKFNGGKPPSLALASRCTDIIIGTLKGSTFLSFRPSEIAAASALAAVSENQAVGSSSALSASEVPINKVMIARCYELLQEQALVRKTGHVNGSPSVPQSPIGVLDATCFSFRSEDARLVSSQXXNNISSSSSNDNQVSTRRRLSISTI

SEQ ID NO: 2988 - protein, 326 aa, Arabidopsis thaliana
MSAVLTAGGGLTAGDRSIITAINTGASSLSFVGSAFIVLCYCLFKELRKFSFKLVFYLALSDMLCSFFLIVGDPSKGFICYAQGYTTHFFCVASFLWTTTIAFTLHRTVVKHKTDVEDLEAMFHLYVWGTSLVVTVIRSFGNNHSHLGPWCWTQTGLKGKAVHFLTFYAPLWGAILYNGFTYFQVIRMLRNARRMAVGMSDRVDQFDNRAELKVLNRWGYYPLILIGSWAFGTINRIHDFIEPGHKIFWLSVLDVGTAALMGLFNSIAYGFNSSVRRAIHERLELFLPERLYRWLPSNFRPKNHLILHQQQQQRSEMVSLKTEDQQ

SEQ ID NO: 2989 - protein, 326 aa, Arabidopsis thaliana
MSAVLTAGGGLTAGDRSIITAINTGASSLSFVGSAFIVLCYCLFKELRKFSFKLVFYLALSDMLCSFFLIVGDPSKGFICYAQGYTTHFFCVASFFWTTTIAFTLHRTVVKHKTDVEDLEAMFHLYVWGTSLVVTVIRSFGNNHSHLGPWCWTQTGLKGKAVHFLTFYAPLWGAILYNGFTYFQVIRMLRNARRMAVGMSDRVDQFDNRAELKVLNRWGYYPLILIGSWAFGTINRIHDFIEPGHKIFWLSVLDVGTAALMGLFNSIAYGFNSSVRRAIHERLELFLPERLYRWLPSNFRPKNHLILHQQQQQRSEMVSLKTEDQQ

SEQ ID NO: 2990 - protein, 326 aa, Arabidopsis thaliana
MSAVLTAGGGLTAGDRSIITAINTGASSLSFVGSAFIVLCYCLFKELRKFSFKLVFYLALSDVLCSFFLIVGDPSKGFICYAQGYTTHFFCVASFLWTTTIAFTLHRTVVKHKTDVEDLEAMFHLYVWGTSLVVTVIRSFGNNHSHLGPWCWTQTGLKGKAVHFLTFYAPLWGAILYNGFTYFQVIRMLRNARRMAVGMSDRVDQFDNRAELKVLNRWGYYPLILIGSWAFGTINRIHDFIEPGHKIFWLSVLDVGTAALMGLFNSIAYGFNSSVRRAIHERLELFLPERLYRWLPSNFRPKNHLILHQQQQQRSEMVSLKTEDQQ

SEQ ID NO: 2991 - protein, 159 aa, Brassica napus
YTTHFFCVASFLWTTTIAFTLHRTVVKHKTDVEDLEAMFHLYVWGTSLVVTVIRSFGNNHSHLGPWCWTQTGLKGKAVHFLTFYAPLWGAILYNGFTYFQVIRMLRNARRMAVGMSDRVDQFDNRAELKVLNRWGYYPLILIGSWAFGTINRIHDFIEP

SEQ ID NO: 2992 - protein, 306 aa, Glycine max
  unsure (1)..(306): unsure at all Xaa locations
MATSVAVAGALTAHDRRILTAVNVGASSLSLAGSSFIVVCYLLFKELRKFSFKLVFYLALSDMLCSFFGIIGDPSKGFFCYAQGYSTHFFCVASFLWTTTIAFTLHRTVVKHKTDVEDLEAMFHLYVWGTSLVMTVMRSFGNDQEHFGAWWGTQTGRTGKAVHFVTFYMPLWGAILYNGFTYLQVIRMLNNATRMAVGMSGQTFVSDTRDNMRALNRWGYYPLILIGSWTFGTINRIHDFLEPNHKIFWLTFLDVGTAALMGLXNSIAYGLNSSVRRAICERLDKFWPERLNRWLPNKLKYKNLQX

SEQ ID NO: 2993 - protein, 316 aa, Glycine max
  unsure (1)..(316): unsure at all Xaa locations
MATSVAVAGALTAHDRRILTAVNVGASSLSLAGSSFIVVCYLLFKELRKFSFKLVFYLALSDMLCSFFGIIGDPSKGFFCYAQGYSTHFFCVASFLWTTTIAFTLHRTVVKHKTDVEDLQSEDMQHVVAKWXXSILLRGTCNAKQFSPLLKXXINAVHFVTFYMPLWGAILYNGFTYFQVIRMLNNATRMAVGMSGQTFVSDTRDNMRALNRWGYYPLILIGSWAFGTINHIHDFFEPNHKIFWLTFLDVGTAALMGLFNSIAYGLNSSVRRAICERLDKFWPERLNRWLPNSLKYKNXXQQESELVLFKTEDQXQ

SEQ ID NO: 2994 - protein, 121 aa, Glycine max
  unsure (1)..(121): unsure at all Xaa locations
MANLVAIAGALXTAHDRRILTAVNVGASSLSLAGSSFIVVCYLLFKELRKFSFKLVFYLALSDMLCSFFGIIGDPSKGFFCYAQGYSTHFFCVASFLWTTTIAFTLHRTVVKHKTDVEDLX

SEQ ID NO: 2995 - protein, 114 aa, Glycine max
  unsure (1)..(114): unsure at all Xaa locations
MATSVAVAGALTAHDRRVLTAVNAGASSLSLAGSSFIVVCYLLFKELRKFSFKLVFYLALSXXCFFFLSFRVPLLQIXNLRFYFLTFLRIDSFVSLVTLIXVITIGRNDTXKRA

SEQ ID NO: 2996 - protein, 81 aa, Glycine max
  unsure (1)..(81): unsure at all Xaa locations
AVHFVTFYMPLWGAILYNGFTYFQVIRMLNNATRVXVSNFTDSFSNKNKLLVXALFETLLFLFLGEFQMAVGMSGQTFVSD

SEQ ID NO: 2997 - protein, 369 aa, Dictyostelium discoideum
MIQILLSTFISFIIIIVSSNDIRSGENDNFNNNKMINNFLTTITTNDTIIIKETESPNDYDFSKEQIESLDKIVYFSSTMGIVGALFIIVSFFLFKAARTFATKMIFFLSLSDLFAAIFYLPYYRDSDIMCNLQGMGLVFFLSSSYLWTMCISISLFMVFFTTIFELNHWFKYFHFICWGIPLFTAIISLIFHAYGKTGSWCFISDPTSIFRLLYYLPLIVVFFINLVVFIAIRWKISQHSNSLVSRVNIIVSFYLIAFSLSQLPTIINSIQNFSDPDNPQFSLFAFQLLLQPLQGFLNCVVYGINEGFINHYVEFLEKNIFRCRCKKSRELKKIESDKTSLLVDYENRDDEKGFDGMDKLIIEDYNRV

SEQ ID NO: 2998 - protein, 490 aa, Dictyostelium discoideum
MENLNTTSTAALTGMTKQENDASYAVLLIADFTSIIGCTLVLLGFWRLKLLRNHITKIITFFCSTSLAKDLISTILTLIEKKQSNGSFQCYLYATVITYGSLACWLWTLCLSFSIYNLIVKREPEPEKFEKYYHVFCWVVPFIMSVIMLSKGVIEVTGNWCWIGNTYVGYRFGLFYGPFLAIWFLAAVLVGLTSRYTYKVIRSSVSDNKDRHMTYQFKLINYIIVFLLCWVFAVINRIVNGLNMFPAWVSILHTYLSVSHGFYASVTFIYNNPLMWRYLASIILIPFTKFGYFVETQQRLEKNKNNNNHSPVGLSNNAQNNNHHHNHNNNHNNNHNNHNNNNNNNNSDFVNNDSSNYYTASMIESFSVQNENSKSINGADNFKQNGASQQDDKDSPNSNNNNNNNNNNNNNNNNNNNNNNNNNNYNNKDIEPIDNCNTNSIPMDNIATRIEIPPQHPTLTPQQSLQEINLNDDDNKINTHQSNKKKDSNV

SEQ ID NO: 2999 - protein, 339 aa, Triticum aestivum
  unsure (1)..(339): unsure at all Xaa locations
MAASALAASAAASQSMKNREILDAVGTTAAALSLAGSSFIVLCYLLFRELRKFSFKLVYFLAGADMLCSLFTIMGGPAGAFYCFAHDYSAHFFCVASFLWTTTIAFTLHRTVVKHKTDVEEFGFIFHLYVWGTSLVTTDVRGIGGDYGRPGTWCWIQQGSTGKILHLITFYLPLWGAILYNGFTYYQVNRMLNNATRMAVGMSDRSSQSDVRADKKAFNRWGYYPLILIGSWAFATINRLHDFANPGHKIFWLSILDIGFAGLMGLFNSIAYGLNSSVRRAIAERIDMYLPERIKREPPNXLSRLRSQQENELTSLIVESNNSITETTMRVTPRSSLAG

SEQ ID NO: 3000 - protein, 137 aa, Triticum aestivum
  unsure (1)..(137): unsure at all Xaa locations
XSKRFRSCGWISSLKPHCLFPETKVLNRWGYYPLILIGSWAFGTINRIHDFIEPGHKIFWLSVLDVGTAALMGLFNSIAYGFNSSVRRAIHERLELFLPERLYRWLPSNFRPKNHLILHQQQQQRSEMVSLKTEDQQ

SEQ ID NO: 3001 - protein, 116 aa, Triticum aestivum
  unsure (1)..(116): unsure at all Xaa locations
XRSCGWISSLKPYCSFAETKALNSWGHYPLIPIXSWAFGTINRIHDFIEPGLKIFWLSLLDFGTVELMGLDQLISYGFXTSTRLAIHERLEPATPTELFGWLYSNYRXKAXLFXNX

SEQ ID NO: 3002 - protein, 371 aa, Zea mays
  unsure (1)..(371): unsure at all Xaa locations
MAPAVSAAASAAMRQALRDRQILDAVGTGAAALSLAGSSFIVICYLLFRELRKFSFKLVFYLAVSDMFCSLFTILGGPSNAFYCFAHDYSAHFFCVASFLWTTTISFTLHRTVVKHKTDVEEFGSIFHLYVWGTSLSTTVLRSIGSDYGRPGTWCWIQQGSMAKVLHLITFYLPLWGAILYNGFTYYEVNRMLNNATQMAAGISDRSNQSDIRADRKAFNRWGYYPLILIGSWAFATINRLYDFANPGHRIVWLSFLDVGFAGLMGLFNSIAYGLNSSVRRAISERIDTFLPERIKRSLPALSRLRSXXRKMNSLLLSLRVTDMXWIFHAHEAFFFCLSVRSSISNKGMQHHCRSSGLVTRRIGSKKKKKK

SEQ ID NO: 3003 - protein, 356 aa, Zea mays
  unsure (1)..(356): unsure at all Xaa locations
MAPAVAAAASAAMRQALRDRQILDAVGTGAAALSLAGSSFIVICYLLFRELRKFSFKLVFYLAVSDMFCSLFTILGGPSNAFYCFAHDYSAHFFCVASFLWTTTISFTLHRTVVKHKTDVEEFGSIFHLYVWGTSLSTTVLRSIGSDYGRPGTWCWIQQGSMAKVLHLITFYLPLWGAILYNGFTYYEVNRMLNNATQMAAGISDQSNQSDIRAGRKAFNRWGYYPLILIGSWAFATINRLYDFANPGHRIVWLSFLDVGFAGLMGLFNSIAYGLNSSVRRAISERIDTFLPERIKRSLPALSRLRSXXKKMNSLLLSLRVTDMXWIFHAHEAFFVYLFVLQSPTRECNITVGAVG

SEQ ID NO: 3004 - protein, 287 aa, Zea mays
  unsure (1)..(287): unsure at all Xaa locations
MRQLHNLHLSTQSGYNNQQFSRPFSLEIPRPINRRLMDPVAASEETRGDEVVLRKRHILYDVSTGAAELSLVGSSFMVMCYLLFREVRKVSFKLVFYLSVSDMICSLFTILLGTSNAFFCSALGSSAHFRWGASPLWTTTISGTLHRAAGKHRTAVEEFGPICHLXVVRGTSLSTTVLRAIGRDYGRPGTXWRWRSAGKHGXKVLHLIPFELPLWXGPVMYNGVTSYEGNRMLNNATXQMAAGISDQSNQADTRAGRKAXVNRWGYYPLNLIXSWAFATINRLYDFA

SEQ ID NO: 3005 - protein, 201 aa, Zea mays
  unsure (1)..(201): unsure at all Xaa locations
LAGNRRINFYVRPQVEEFGSIFHLYVWGTSLSTTVLRSIGSDYGRPGTWCWIQQGSMAKVLHLITFYLPLWGAILYNGFTYYEVNRMLNNATQMAAGISDQSNQSDIRAXXQEGHRIVWLSFLDVGFAGLMGLFNSIAYGLNSSVRRAISERIDTFLPERIKRSXPALSRLRSXXKKMNSLFLSLRGTDMKWIFHAPRTFF

SEQ ID NO: 3006 - protein, 364 aa, Hordeum vulgare subsp. vulgare
MEEIGHHFGLGATAHGQHHSQLPWGSSPLSAVISPPPQQQQQHQQQSAGYLAHSPLSLNTAPPGVSHGGGSGCSNPVLQLANGSLLEACAKAAKEPSSSSYAADVEAIKAKIISHPHHSSLLAAYLDCQKVGAPPEVSARLTAVAQDLELRQRTALGGLGTATEPELDQFMEAYHEMLVKYREELTRPLQEAMEFLRRVETQLNSLSISVRSLRNILSTGSSEEDQEGSGGETELPEIDAHGVDQELKHHLLKKYSGYLSSLKQELSKKKKKGKLPKEARQQLLSWWEMHYKWPYPSESQKVALAESTGLDLKQINNWFINQRKRHWKPTDEMQFVMMDAYHPPNAAFYMDGHFVNDSGLYRFG

SEQ ID NO: 3007 - protein, 488 aa, Physcomitrella patens
MNRDMVGIVSSASARLEENPRLESYIASTGELAGWVEKSASVEATRSSLQLSQSQAFFEQYSTQYPQSDISSSSQADISAHDYLNIFKGTHAQAKADMKPRITQFMIPVQNQLEAGSYLLPHMAHDDSNNFSTSSNIGRATQSLCTMHQDMETLRQVPKSNDLLIAITASAAAAVNQERGSGSETGQHDRDDDEKNKATDRGKLPENEEEQLLRDAIVDHPLYPELVVAHISIFKIGAPKGLLIKLDEMEKKFQRFQYGESSWNVLHVTKFGQDPSLDFFMRSYIDLLTKFREDLENPYNKFAQYKDKVTKDLEDLCGHYIETTPDEEDNFGSDIGTKDMSQDLNDLEILGEENLMYTADIDESIVIDPDAADEELKKMLRLKYGKHIAGLKAEFNRVRKKGKLPTNARQILKDWFSRHSYWPYPSEMEKAYLQRLCGLNLKQINNWFINERKRHWSCKGKCMYPNTKFYPRDGHVDPNNHGEGYLEQ

SEQ ID NO: 3008 - protein, 456 aa, Venturia canescens
MQEGSTAVALAMVTPGYDQDPASGVADYTTHQDQAQFEADKRAVYKHPLFPLLALLFERCELATQSSDNSMSESFNMDIQAFVQHQERDRKPFLINDPEIDGLMIKAIQVLRIHLLELEKVQELCKDFCNRYIGCLKGKMQSENLLRSDYSHHGHDMGPSSGSNGSSPLQVLSSTGNDVEPGANGLGVSRGDALSDNGSVDLPIAQDEDPLDLERSSTRSSSVNAHRSVRSDSHDQDDPLSPSTIHGSTPLSQIGAHSCAPVNDIYLGQDITVTGSPSPGPSEDDDDGSGGAPATHSGGHGSIRKGRQKRGVLPKQATSIMRAWLFHHLVHPYPTEDEKRQIASQTNLTLLQVNNWFINARRRILQPMLDGAGAEALPRTGKRHKVAKQSSQNQQPNQQLQDQQLSQHQSHSQQAIGAAGGDWQSEDSGSESGSSDGDGGAEKFKDGNESDEDDLH

SEQ ID NO: 3009 - protein, 434 aa, Picea abies
MEHLNAAAAQASSSLYGVSMAEYGDVGVSSMMALMTQHEPHERDSILTTSMPSSFSSFHGHAECLLSAAMFQASQGDHKLKRQPEMDQLVSEQAVMSDSSMPSVKTEGCSSLRNQFEIRREQTGNCYTDQSSNAPVSPLVTSLVPQAGGEARMITSLEADSSHFSGGKEAEAIKAKILAHPQYPSLLGAYIDCQKIGAPPEVVARLDALTHEYENQQHRTTVSIGMDPELDQFMEAYCEMLTKYHEELTKPFKEAMSFLKKIEAQLNSLSKGTIRISPSAENDEKTEGGASSEEVEDGSGGETDFQEVDHHAVEDRELKDHLLRKYSGYLSSLKQEFMKKKKKGKLPKDARQKLLDWWTVHYKWPYPSETEKIALAECTGLDQKQINNWFINQRKRHWKPSEDMQLMAMDGQSPHGATLYVERHLMTEGYHLDC

SEQ ID NO: 3010 - protein, 383 aa, Picea abies
SRPCQGANKFEPANAHIGGGGAGHFVMEQFIPEQAVISDSSISSVKTEVCSGSGGTGVPGQFELIRRKEEGRCARAYAEPSFVVTPLVTSLPPQQQEARMVTSLAVDMDSSCSCKPIEADAMKAKIIAHVHYPRLVAAYIDCQKVGAPPDVVSELDELSQKCHAQQCVATISIGADPELDQFMEAYCEMFIKYQEELTKPFKEAMAFLKKIENQLGALTKGTIRTSSLDQGDERGDGAASSEEEDGSGGEVEFHEVDPHAEDRELKDQLLRKYSGYLSSLKQEFLKKKKKGKLPKEARQKLLDWWTRNYKWPYPSESQKIALAESTGLDQKQINNWFINQRKRHWKPSEEMQFVVMDSPNPHNAAFFLEGHLRTDGTAFSMDC

SEQ ID NO: 3011 - protein, 433 aa, Picea abies
MEHLNTAAAQASSSLYGVGMAEYGDAGVSSMMALITQHEPHDSESIMSTRMPSSFSSFHGHADCLLSAAMFQASQGDHKLKRQPGMDQLVSEQAGMSDSSMPSVKTEVGSGLRNQLEFHREQTGNGYTDQSSNTPVNPLVTSLASQARGEAQMIPSWDANSPHFNVDNEEYAIKSKILAHPQYPSLLGAYIDCQKIGAPPEAVARLDALTREYQNQQRRTVSIGMDPELDQFMEAYCEILTKYHEELAKPFKEAMTFLMKIEAQFNSLGKGTIRISPPAENDKKTEGGGSSEEVEDGSGGETDFQEVDHHAVEDRELKDHLLRRYSGYLSSLKQEFMKKKKKGKLPKDARQKLLDWWSLHDKWSYPSETEKIALAECTGLDQKQINNWFINQRKRHWKPSEDMHFMVMNSHSPHSAALYVERHLMTEGYHLDC

SEQ ID NO: 3012 - protein, 442 aa, Picea mariana
MKKLFHSDMEHLNAAAAQASSSLYGVSMAEYGDVGVSSMMALMTQHEPHERDSILTTSMPSSFSSFHGHAECLLSAAMFQASQGDHKLKRQPEMDQLVSEQAVMSDSSMPSVKTEGCSSLRNQFEIRREQTGNCYTDQSSNAPVSPLVTSLVPQAGGEARMITSLEADSSHFSGGNEAEAIKAKILAHPQYPSLLGAYIDCQKIGAPPEVVARLDALTHEYENQQHRTTVSIGMDPELDQFMEAYCEMLTKYHEELTKPFKEAMSFLKKIEAQLNSLSKGTIRISPSAENDEKTEGGASSEEVEDGSGGETDFQEVDHHAVEDRELKDHLLRKYSGYLSSLKQEFMKKKKKGKLPKDARQKLLDWWTVHYKWPYPSETEKIALAECTGLDQKQINNWFINQRKRHWKPSEDMQLMAMDGQSPHGATLYVERHLMTEGYHLDC

SEQ ID NO: 3013 - protein, 433 aa, Picea mariana
MEHLNTAAAQASSSLYGVGMAEYGDAGVSSMMALITQHEPHDSESIMSTRMPSSFSSFHGHADCLLSAAMFQASQGDHKLKRQPGMDQLVSEQAVMSDSSMPSVKTEVCSGLRNQFEFHREQTGNCYTDQSPNTPVNPLVTSLASQARGEAQMIPSLDANSPHFNVDNEEYAIKSKILAHPQYPSLLGAYIDCQKIGAPPEAVARLDALTHEYQNQQRRTVSIGMDPELDQFMEAYCEILTKYHEELAKPFKEAMTFLMKIEAQFNSLGKGTIRISPPAENDEKTEGGGSSEEVEDGSGGETDFQEVDHHAVEDRELKDHLLRRYSGYLSSLKQEFMKKKKKGKLPKDARQKLLDWWSLHDKWPYPSETEKIALAECTGLDQKQINNWFINQRKRHWKPSEDMHFMVMNSHSPHSAALYVERHLMTEGYHLDC

SEQ ID NO: 3014 - protein, 382 aa, Acetabularia acetabulum
MNDMDFAALFNQHEGNNPDNLQPNAPPYMLSPQQNAAATMPKSHCSGDNTLMLSDMGEQVIMHPLYPDLVKAIMDCRKVGGMDESRHHIQIRTEQVLEDLHRKREQYQITGRMPALDPELDQFLRQYIQVLDELHAELLNINREADNILHMFTTQIAEVINMPMDPRSMHARNAFNAQSNIDMTWFEIRNEQEQRVLLKQKYRQELLALKEEFSKRKKRGKLPTHSIEVLKSWWKEHIAWPYPTDSAKRSLASQTNLTSIQINNWFINQRKRHWHKLFPEGVPNSQEEALRSLKARGMLGMDSSGPMRLMSMDIESQETQEVEQETEDIQTPNEFQFQSAFLNEHEQMMDEAGFTSRPNVQLPDAISQFQSQLGQIRKDSDE

SEQ ID NO: 3015 - protein, 58 aa, Santalum album
KKKGKLPENAKTTLLDWWSTHYRWPYPTEEEKMKLSEITGLDPRQINNWFINQRKGSR

SEQ ID NO: 3016 - protein, 97 aa, Populus deltoides
LMAHPHYHRLLAAYANCQKVGAPPEVVARLEEACASAASMGPANTDGIGEDPALDQFMEAYCEMLTKYEQELSKPLKEAMVFLQRVECQFRALTLSS

SEQ ID NO: 3017 - protein, 383 aa, Brassica oleracea
MESGSNSTSCPMAFAGDNSDGPMCPMMMMMMPVITSHQQHHGHDQQHQHQQQHDGYAYQSHHQHSSLLFLQSLTPPSQEAKNKVRSSCSPSSGAPAYSFMEINHQNELLAGGLQSPVLSSLLVKAKIMAHPHYHRLLLAYVNCQKVGAPPEVQARLEETCSSAAAAAASMGPTGSLGEDPGLDQFMEAYCEMLVKYEQELSKPFKEAMVFLQHVECQFKSLSLSSPSSLGYGEAAIERNNNGSSEEEVDMNNEFVDPQAEDRELKGQLLRKYSGYLGSLKQEFMKKRKKGKLPKEARQQLLDWWSRHYKWPYPSEQQKLALAESTGLDQKQINNWFINQRKRHWKPSEDMQFVVMDATHPLHYFMGNVLGNPFPIDHISGTML

SEQ ID NO: 3018 - protein, 380 aa, Brassica oleracea
MESGSNSTSCPMAFAGDNSDGPMCPMMMMMMPVITSHQQHHGHDQQHQHQQQHDGYAYQSHHQHSSLLFLQSLTPPSQEAKNKVRSSCSPSSGAPAYSFMEINHQNELLAGGLNPCSSASVKAKIMGHPHYHRLLLAYVNCQKVGAPPEVQARLEETCSSAAAAAASMGPTGSLGEDPGLDQFMEAYCEMLVKYEQELSKPFKEAMVFLQHVECQFKSLSLSSPSPFSGYGEAAIERNNNGSSEEEVDMNNEFVDPQAEDRELKGQLLRKYSGYLGSLKQEFMKKRKKGKLPKEARQQLLDWWSRHYKWPYPSQKLALAESTGLDQKQINNWFINQRKRHWKPSEDMQFVVMDATHPHHYFMDNVMGNPFPIDHISSTML

SEQ ID NO: 3019 - protein, 381 aa, Medicago truncatula
MEGSSNGSCSYVMGAFGENSGGLCPPMMMMPLVTSSHHNAHHPINSNNNNNNNNNNTNANNTTGLFLPIPNSTNNNNNHYTNCNNNTSSIMLQNNHQNTPGLGYYFMDNINNHGSSSSSSSSSVKSKIMAHPHYHRLLEAYINCQKVGAPSEVVARLEEACATAVRMGGDAVGSGCLGEDPALDQFMEAYCEMLIKYEQELSKPLKEAMLFLQRIEVQFKNLTVSSSSDNIACSEGGDRNGSSEEDHVDLYNNMIDPQAEDRELKGQLLRKYSGYLGSLKQEFMKKRKKGKLPKEARQQLLEWWSRHYKWPYPSESQKLALAESTGLDQKQINNWFINQRKRHWKPSEDMQFVVMDPSHPHYYMDNVLTNSYPMDLSNTML

SEQ ID NO: 3020 - protein, 371 aa, Pisum sativum
MEGSSNGSSSYVMAAFGENSGGLCPPMMMMPLVTSSHHHPINSNNNNANNTSCLFLPIPNSTNNNNHYTNNNNSNNTMLQNNHHTTQNTPGLGYYFMDNHNNNGASSSSSSSAVKAKIMAHPHYHRLLEAYINCQKVGAPSEVVTRLEEACASAVRMGGDAVGSGCIGEDPALDQFMEAYCEMLIKYEQELSKPLKEAMLFLQRIEVQFKNLTVSSSSDNIACNEGGDRNGSSEEDQVDLYNNMIDPQAEDRELKGQLLRKYSGYLGSLKQEFMKKRKKGKLPKEARQQLLEWWSRHYKWPYPSESQKLALAESTGLDQKQINNWFINQRKRHWKPSEDMQFVVMDPTHPHYYMDNVLTNSFPMDLSNTML

SEQ ID NO: 3021 - protein, 251 aa, Pisum sativum
MEEYTNNPNQNQNQSSRPNFLYNQIPMKQHLSSSIKRIRKLFSFRNKLHHHQHQHHHHQQQSAVENWNLIVTSQLHTPIFHYPNLMRTNIIPQTIMNHHQQGGGGSPSSSNEAESIKAKIIAHPQYSSLLQAYMDCQKIGAPPEAVARMVEARQEFEARQRSSVNSRESSKDPELDQFMEAYYDMLVKYREELTRPIQEAMDFMRRIETQLNMLCNGPLRIFPDDKNEGVGSSEEEQENSGGETDQVQEID

SEQ ID NO: 3022 - protein, 365 aa, Oryza sativa (indica cultivar-group)
MEELEGHRGEGRLPPPPPLLPFPKVSVQVYTVPSSSTAASAAAAGGARQAVAPATRDGGDGGGRAAGVLDDPVKARIVSHPRYHRLLAAFLDCHKVGCPAEAAEEIAAAARVREARQRAAAAASRMPPAPEDPELDQFMEDYCKLLVECKEELSRPLQEAEEFLRTVESELNSINSGPPLTALISESKAGLDSSDDDEHEDGSGMEMMEAAEDEDLGIIDPRSDDKALKRHLLRKYSGYLGGLRKELSKKRKKGKLPKEARQKLLTWWELHYRWPYPSEMEKIALAESTGLEQKQINNWFINQRKRHWKPTEEMQFAVMEAYHHQSTDAAAAFYVDVDARLVGATAAAPASAVYTARPDHGVWRA

SEQ ID NO: 3023 - protein, 138 aa, Oryza sativa (indica cultivar-group)
SDDKALKRHLLRKYSGYLGGLRKELSKKRKKGKLPKEARQKLLTWWELHYRWPYPSEMEKIALAESTGLEQKQINNWFINQRKRHWKPTEEMQFAVMEAYHHQSTDAAAAFYVDVDARLVGATAAAPASAVYTARPDH

SEQ ID NO: 3024 - protein, 204 aa, Oryza sativa (indica cultivar-group)
MDQSFGNLGGGGAGGSGKAAASSFLQLPLSTAAAATAYYGTPLALHQAAAAAGPSQYHGHGHPHHGGGHHHSKHGGAGGGEISAAEAESIKAKIMAHPQYSALLAAYLDCQKVGAPPEVLERLTATAAKLDARPPGRHDARDPELDQFMEAYCNMLAKYREELTRPIDEAMEFLKRVESQLDTIAGGGHGGSGGGAGSARLLLA

SEQ ID NO: 3025 - protein, 161 aa, Oryza glumipatula
MEELEGHRGAGRLPPPPPLLPFPKVSVQVYTVPSSSTSASAAAAGGARQAVAPATRDGGGRAAGVLDDPVKARIVSHPRYHRLLAAFLDCHKVGCPAEAAEEIAAAARVREARQRAAAAASRMPPAPEDPELDQFMEDYCKLLVECKEELSRPLQEAEEFL

SEQ ID NO: 3026 - protein, 136 aa, Oryza meridionalis
SDDKALKRHLLRKYSGYLGGLRKELSKKRKKGKLPKEARQKLLTWWELHYRWPYPSEMEKIALAESTGLEQKQINNWFINQRKRHWKPTEEMQFAVMEAYHHQSADAAAAFYVDARLVGATAAAPAAAVYTTRPDH

SEQ ID NO: 3027 - protein, 159 aa, Oryza meridionalis
MEELEGHRGAGRLPPPPPLLPFPKVSVQVYTVPSSSTAAAGGARQAVAPATRDGGGGGRAAGVLDDPVKARIVSHPRYHRLLAAFLDCHKVGCPAEAAEEIAAAARVREARQRAAAAASHMPPAPDDPELDQFMEDYCKLLVECKEELSRPLQEAEEFL

SEQ ID NO: 3028 - protein, 58 aa, Avena vaviloviana
KGKLPKEARLKLLHWWELHSKWPYPSETEKIALAETTGLDQKQINNWFINQRKRHWKP

SEQ ID NO: 3029 - protein, 347 aa, Petunia x hybrida
MEGGGNSSGNNTSSLMAYGDHENNNNAICPPMMMMMMPPPPLSITNTSNNGESSSNNNNNILFLPFMENNSNTIHEDGNSCSSNIKAKIMAHPHYPRLLAAYINCQKIGAPPEVVARLEEVCATSAHMGRNGGGGGGGGNNVIGEDPALDQFMEAYCEMLTKYEQELSKPFKEAMVFLSRIECQFKALTLASTSESVAAFGEAMDRNGSSEEEVDVNNSLVDPQAEDRELKGQLLRKYSGYLGSLKQEFMKKRKKGKLPKEARQQLLDWWTRHYKWPYPSESQKLALAESTGLDQKQINNWFINQRKRHWKPSEDMQFVVMDAAHPHYYIDNVLGNPFPMDMTPTLL

SEQ ID NO: 3030 - protein, 345 aa, Solanum tuberosum
MDDEMYGFHSTRDDYADKALMSPENLMMQTEYNNFHNYTNSSILTSNPMMFGSDDIQLSSEQTNSFSTMTLQNNDNIYQIRSGNCGGGSGSGGSSKDHNDNNNNNEDYDEDGSNVIKAKIVSHPYYPKLLNAYIDCQKVGAPAGIVNLLEEIRQQTDFRKPNATSICIGADPELDEFMETYCDILLKYKSDLSRPFDEATTFLNKIEMQLGNLCKDDGGVSSDEELSCGEADASMRSEDNELKDRLLRKFGSHLSSLKLEFSKKKKKGKLPKEARQMLLAWWDDHFRWPYPTEADKNSLAESTGLDPKQINNWFINQRKRHWKPSENMQLAVMDNLSSQFFSSDD

SEQ ID NO: 3031 - protein, 353 aa, Antirrhinum majus
MEGSGGGGMMAFGENNNNNSNNGFCPSNMMMPQLASNCEGGYSTTPFVPLVPFTNHHHHHQEMNRQRSTVVGGSSMVYEEGHQNNSNAITSTGYYFMDSTNCDESSLKAKIMAHPHYHRLLAAYVNCHKIGAPPEVVSRLEEAAAAMARHGTISVGEDPGLDQLMEAYSEMLSKYEQELSKPFKEAMLFLSRIESQFKALTVSAARGEAMFRNGSSEEEIDVNNSFIDPQAEDIELKGQLLRKYSGYLGSLKQEFMKKRKKGKLPKEARQQLLEWWSRHYKWPYPSESQKLALAESTGLDQKQINNWFINQRKRHWKPSEDMQFVVMDAANPQYYMENILGNPFPMDISPALL

SEQ ID NO: 3032 - protein, 351 aa, Antirrhinum majus
MEGGGGSSSNSCMIGFGENTSSNNGFCPMTMMMMPPPSMASSHPNGNTLFFPLPSTNNSHQGLNHRTSASTMLEDQHNNNTITSTGYYFMDGNDNDSVKAKIMAHPYYHKLLAAYINCQKIGAPPEVAVKLEEACASAATMGRNSVSRIGEDPALDQFMEAYCEMLSKYEQELSKPFREAMLFLSRIECQFKALTLSSSDSACGEAMDRHGSSEEEIDVDNSLIDPQAEDRELKGQLLRKYSGYLGSLKQEFMKKRKKGKLPKEARQQLLDWWSRHYKWPYPSESQKLALAEQTGLDQKQINNWFINQRKRHWKPSEDMQFVVMDAAHPGHYYMDNVLGNPFAMDILPTLL

SEQ ID NO: 3033 - protein, 41 aa, Aegilops longissima
KGKLPKDARLALVDWWNTHYRWPYPTINNWFVNQRKRHWKP

SEQ ID NO: 3034 - protein, 364 aa, Hordeum vulgare
MEEIGHHFGLGATAHGQHHSQLPWGSSPLSAVISPPPQQQQQHQQQSAGYLAHSPLSLNTAPPGVSHGGGSGCSNPVLQLANGSLLEACAKAAKEPSSSSYAADVEAIKAKIISHPHYSSLLAAYLDCQKVGAPPEVSARLTAVAQDLELRQRTALGGLGTATEPELDQFMEAYHEMLVKYREELTRPLQEAMEFLRRVETQLNSLSISGRSLRNILSTGSSEEDQEGSGGETELPEIDAHGVDQELKHHLLKKYSGYLSSLKQELSKKKKKGKLPKEARQQLLSWWEMHYKWPYPSESQKVALAESTGLDLKQINNWFINQRKRHWKPTDEMQFVMMDAYHPPNAAFYMDGHFVNDSGLYRFG

SEQ ID NO: 3035 - protein, 58 aa, Hordeum marinum
KGKLPKEARQKLLHWWELHSKSPYPSETEKMALGESTGLDQKQINNWFINQRKRHCKP

SEQ ID NO: 3036 - protein, 138 aa, Oryza rufipogon
SDDKALKRHLLRKYSGYLGGLRKELSKKRKKGKLPKEARQKLLTWWELHYRWPYPSEMEKIALAESTGLEQKQINNWFINQRKRHWKPTEETQFAVMEAYHHQSTDAAAAFYVDVDARLVGATAVAPASAVYTARPDH

SEQ ID NO: 3037 - protein, 164 aa, Oryza rufipogon
MEELEGHRGEGRLPPPPPLLPFPKVSVQVYTVPSSSTAASAAAAGGARQAVAPATRDGGDGGGRAAGVLDDPVKARIVSHPRYHRLLAAFLDCHKVGCPAEAAEEIAAAARVREARQRAAAAASRMPPTPEDPELDQFMEDYCKLLVECKEELSRPLQEAEEFL

SEQ ID NO: 3038 - protein, 164 aa, Oryza rufipogon
MEELEGHRGEGRLPPPPPLLPFPKVSVQVYTVPSSSTAASAAAAGGARQAVAPATRDGGDGGGRAAGVLDDPVKARIVSHPRYHRLLAVFLDCHKVGCPAEAAEEIAAAARVREARQRAAAAASRMPPAPEDPELDQFMEDYCKLLVECKEELSRPLQEAEEFL

SEQ ID NO: 3039 - protein, 163 aa, Oryza rufipogon
MEELEGHRGAGRLPPPPLLPFPKVSVQVYTVPSSSTAASAAAAGGARQAVAPATRDGGDGGGRAAGVLDDPVKARIVSHPRYHRLLAAFLDCHKVGCPAEAAEEIAAAARVREARQRAAAAASRMPPAPEDPELDQFMEDYCKLLVECKEELSRPLQEAEEFL

SEQ ID NO: 3040 - protein, 361 aa, Oryza sativa
MEEISHHFGVVGASGVHGGHQHQHHHHPWGSSLSAIVAPPPPPQLQQQQTQAGGMAHTPLTLNTAAAAVGNPVLQLANGSLLDACGKAKEASASASYAADVEAIKAKIISHPHYSSLLAAYLDCQKVGAPPEVAARLTAVAQDLELRQRTALGVLGAATEPELDQFMEAYHEMLVKYREELTRPLQEAMEFLRRVETQLNTLSISGRSLRNILSSGSSEEDQEGSGGETELPEIDAHGVDQELKHHLLKKYSGYLSSLKQELSKKKKKGKLPKDARQQLLNWWELHYKWPYPSESQKVALAESTGLDLKQINNWFINQRKRHWKPSDEMQFVMMDGYHPTNAAAFYMDGHFINDGGLYRLG

SEQ ID NO: 3041 - protein, 361 aa, Oryza sativa
MEEISHHFGVVGASGVHGGHQHQHHHHPWGSSLSAIVAPPPPPQLQQQQTQAGGMAHTPLTLNTAAAAVGNPVLQLANGSLLDACGKAKEASASASYAPDVEAIKAKIISHPHYSSLLAAYLDCQKVGAPPEVAARLTAVAQDLELRQRTALGVLGAATEPELDQFMEAYHEMLVKYREELTRPLQEAMEFLRRVETQLNTLSISGRSLRNILSSGSSEEDQEGSGGETELPEIDAHGVDQELKHHLLKKYSGYLSSLKQELSKKKKKGKLPKDARQQLLNWWELHYKWPYPSESQKVALAESTGLDLKQINNWFINQRKRHWKPSDEMQFVMMDGYHPTNAAAFYMDGHFINDGGLYRLG

SEQ ID NO: 3042 - protein, 361 aa, Oryza sativa; identical to SEQ ID NO: 3041

SEQ ID NO: 3043 - protein, 58 aa, Oryza officinalis
KGKLPKDARQQLLNWWELHYKWPYPSESQKVALAESTGLDLKQINNWFINQRKRHWKP

SEQ ID NO: 3044 - protein, 138 aa, Oryza glaberrima
SDDKALKRHLLRKYSGYLGGLRKELSKKRKKGKLPKEARQKLLTWWELHYRWPYPSEMEKIALAESTGLEQKQINNWFINQRKRHWKPTEEMQFAVMEAYHHQSTDAAAAFYVDVDARLVGATAAAPAAAVYTARPDH

SEQ ID NO: 3045 - protein, 138 aa, Oryza glaberrima
SDDKALKRHLLRKYTGYLGGLRKELSKKRKKGKLPKEARQKLLTWWELHYRWPYPSEMEKIALAESTGLEQKQINNWFINQRKRHWKPTEEMQFAVMEAYHHQSTDAAAAFYVDVDARLVGATAAAPAAAVYTARPDH

SEQ ID NO: 3046 - protein, 161 aa, Oryza glaberrima
MEELEGHRGAGRLPPPPPLLPFPKVSVQVYTVPSSSTAASAAAAGGARQAVAPATRDGGGRAAGVLDDPVKARIVSHPRYHRLLAAFLDCHKVGCPAEAAEEIAAAARVREARQRAAAAASRMPPAPEDPELDQFMEDYCKLLVECKEELSRPLQEAEEFL

SEQ ID NO: 3047 - protein, 57 aa, Pennisetum glaucum
KGKLPKDARLSLMNWWNTHYSWPYPTEEDKRRGRHDGLDQRQINNWFVNQRKRHWKP

SEQ ID NO: 3048 - protein, 363 aa, Triticum aestivum
MEEIGHHFGLGATAHGQHHSQLPWGSSPLSAVIAPPPQQQQQQQQSAGYLAHSPLSLNTAPPSGSHGGGSGCSNPVLQLANGSLLEACAKAAKEPSSSSYAADVEAIKAKIISHPHYSSLLAAYLDCQKVGAPPEVLARLTAVAQDLELRQRTALGSLGTATEPELDQFMEAYHEMLVKYREELTRPLQEAMEFLRRVETQLNSLSISGRSLRNILSSGSSEEDQEGSGGETELPEIDAHGVDQELKHHLLKKYSGYLSSLKQELSKKKKKGKLPKDARQQLLSWWEMHYKWPYPSESQKVALAESTGLDLKQINNWFINQRKRHWKPSDEMQFVMMDAYHPPNAAFYMDGHFVNDSGLYRFG

SEQ ID NO: 3049 - protein, 363 aa, Triticum aestivum; identical to SEQ ID NO: 3048

SEQ ID NO: 3050 - protein, 363 aa, Triticum aestivum; identical to SEQ ID NO: 3048

SEQ ID NO: 3051 - protein, 362 aa, Triticum aestivum
MEEIGHHFGLGATAHGQHHSQLPWGSSPLSAVIAPPPQQQQQQQSAGYLAHSPLSLNTAPPSGSHGGGTGCSNPVLQLANGSLLEACAKAAKEPSSSSYAADVEAIKAKIISHPHYSSLLAAYLDCQKVGAPPEVLARLTAVAQDLELRQRTALGSFGTATEPELDQFMEAYHEMLVKYREELTRPLQEAMEFLRRVETQLNSLSISGRSLRNILSSGSSEEDQEGSGGETELPEIDAHGVDQELKHHLLKKYSGYLSSLKQELSKKKKKGKLPKDARQQLLSWWEMHYKWPYPSESQKVALAESTGLDLKQINNWFINQRKRHWKPSDEMQFVMMDAYHPPNAAFYMDGHFVNDSGLYRFG

SEQ ID NO: 3052 - protein, 362 aa, Triticum aestivum; identical to SEQ ID NO: 3051

SEQ ID NO: 3053 - protein, 512 aa, Ceratopteris richardii
MDYDGHMRASMSSNICNVMNYAEGQVGSMVALMTTDHGTEGEQNRNHNPQHTSQHEQPQNQSSHSRNDRRQQLRSLNQTTMSSSLPTSSLTYYNAAMVEPYLQSALLQSTHTFNQSNNVETHPHIISALDQLETSVVVSAEEEKPHIGIRPKPVQSAQFPSSIDCNYVLSSSGQSVLVSPGANSTTHESQAAVASVSRDMENAHASADRSDVIRSKIMSHPTYPRLVMAYVNCHKIGAPPEVATSLEEISKKYQSFRSSSPAPTGADPELDNFMETYCNVLQKYHDELMQPYKEAMTFFRKIELQLNALSKGTVRLCHTGDDKADANCNSGQHGLISGGSSGEEDAEEGDVSCGEVDFHEEMIDPLADDQKVKEQLLRKYSGYIYKLKQEFLKKKKKGKLPKNAREKLLDWWNQHYKWPYPSEAEKAALAETTGLDQKQINNWFINQRKRHWKPSEDMQYVMVDSPTAHHHHHVLHGHAHLTPHPLAPYAVMETMDAAAAAAAAVTMLPSLQ

SEQ ID NO: 3054 - protein, 430 aa, Ceratopteris richardii
MATNAVSSTHSASSLSYYSTRIVEPYLQSELLQGTQGFHRPHTSHCQRQVTSSVESLELSAVAGERGKADTAIAIDRSQGFEILSPTCNYVVSSNGETVLANPSLDSTGHANHEEGPSLPSRSMADRDDLIRTKIVSHPSYPRLVMAYVNCYKIGAPEDAALILEEVSRKYQEIRSSSSEVIGADPELDNFMELYCNVLQRYHEELTHPYKEAMAFFKKIELQLDAISKGSLSLSQSGETKTEANSDSAWHGQTGAAPSIEDEPEEGDMSSGEVDFHDEMIDPLAEDQKLKEQLLRKYSGYIFKLKQEFLKKKKKGKLPREARQMLLDWWTQHYKWPYPSEAEKTALAESTGLDQKQINNWFINQRKRHWKPSEDMQYVMMDSPAGQTQHTFLRPHSHIASQHLSPYTVLQTMEVAAGAAPSATMMSSLH

SEQ ID NO: 3055 - protein, 240 aa, Ceratopteris richardii
MQETYCNVLQKYHDELMQPYKEAMTFFRKIELQLNALSKGTVRLCHTGDDKADANCNSGQHGLISGGSSGEEDAEEGDVSCGEVDFHEEMIDPLADDQKVKEQLLRKYSGYIYKLKQEFLKKKKKGKLPKNAREKLLDWWNQHYKWPYPSEAEKAALAETTGLDQKQINNWFINQRKRHWKPSEDMQYVMVDSPTAHHHHHVLHGHAHLTPHPLAPYAVMETMDAAAAAAAAVTMLPSLQ

SEQ ID NO: 3056 - protein, 458 aa, Drosophila melanogaster
MDSGAAAAAMYDPHAGHRPPGLQGLPSHHSPHMTHAAAAAATVGMHGYHSGAGGHGTPSHVSPVGNHLMGAIPEVHKRDKDAIYEHPLFPLLALIFEKCELATCTPREPGVQGGDVCSSESFNEDIAMFSKQIRSQKPYYTADPEVDSLMVQAIQVLRFHLLELEKVHELCDNFCHRYISCLKGKMPIDLVIDERDTTKPPELGSANGEGRSNADSTSHTDGASTPDVRPPSSSLSYGGAMNDDARSPGAGSTPGPLSQQPPALDTSDPDGRWCRREWSSPADARNADASRRLYSSVFLGSPDNFGTSASGDASNASIGSGEGTGEEDDDASGKKNQKKRGIFPKVATNILRAWLFQHLTHPYPSEDQKKQLAQDTGLTILQVNNWFINARRRIVQPMIDQSNRAVYTPHPGPSGYGHDAMGYMMDSQAHMMHRPPGDPGFHQGYPHYPPAEYYGQHL

SEQ ID NO: 3057 - protein, 457 aa, Drosophila melanogaster
MDSGAAAAAMYDPHAGHRPPGLQGLPSHHSPHMTHAAAAAATVGMHGYHSGAGGHGTPSHVSPVGNHLMGAIPEVHKRDKDAIYEHPLFPLLALIFEKCELATCTPREPGVQGGDVCSSESFNEDIAMFSKQIRSQKPYYTADPEVDSLMVQAIQVLRFHLLELEKVHELCDNFCHRYISCLKGKMPIDLVIDERDTTKPPELGSANGEGRSNADSTSHTDGASTPDVRPPSSSLSYGGAMNDDARSPGAGSTPGPLSQQPPALDTSDPGRWCRREWSSPADARNADASRRLYSSVFLGSPDNFGTSASGDASNASIGSGEGTGEEDDDASGKKNQKKRGIFPKVATNILRAWLFQHLTHPYPSEDQKKQLAQDTGLTILQVNNWFINARRRIVQPMIDQSNRAVYTPHPGPSGYGHDAMGYMMDSQAHMMHRPPGDPGFHQGYPHYPPAEYYGQHL

SEQ ID NO: 3058 - protein, 472 aa, Drosophila melanogaster
MAQPRYDDGLHGYGMDSGAAAAAMYDPHAGHRPPGLQGLPSHHSPHMTHAAAAAATVGMHGYHSGAGGHGTPSHVSPVGNHLMGAIPEVHKRDKDAIYEHPLFPLLALIFEKCELATCTPREPGVQGGDVCSSESFNEDIAMFSKQIRSQKPYYTADPEVDSLMVQAIQVLRFHLLELEKVHELCDNFCHRYISCLKGKMPIDLVIDERDTTKPPELGSANGEGRSNADSTSHTDGASTPDVRPPSSSLSYGGAMNDDARSPGAGSTPGPLSQQPPALDTSDPDGRWCRREWSSPADARNADASRRLYSSVFLGSPDNFGTSASGDASNASIGSGEGTGEEDDDASGKKNQKKRGIFPKVATNILRAWLFQHLTHPYPSEDQKKQLAQDTGLTILQVNNWFINARRRIVQPMIDQSNRAVYTPHPGPSGYGHDAMGYMMDSQAHMMHRPPGDPGFHQGYPHYPPAEYYGQHL

SEQ ID NO: 3059 - protein, 487 aa, Drosophila melanogaster
MAQPRYDDGLHGYGMDSGAAAAAMYDPHAGHRPPGLQGLPSHHSPHMTHAAAAAATVGMHGYHSGAGGHGTPSHVSPVGNHLMGAIPEVHKRDKDAIYEHPLFPLLALIFEKCELATCTPREPGVQGGDVCSSESFNEDIAMFSKQIRSQKPYYTADPEVDSLMVQAIQVLRFHLLELEKVHELCDNFCHRYISCLKGKMPIDLVIDERDTTKPPELGSANGEGRSNADSTSHTDGASTPDVRPPSSSLSYGGAMNDDARSPGAGSTPGPLSQQPPALDTSDPDGKFLSSLNPSELTYDGRWCRREWSSPADARNADASRRLYSSVFLGSPDNFGTSASGDASNASIGSGEGTGEEDDDASGKKNQKKRGIFPKVATNILRAWLFQHLTHPYPSEDQKKQLAQDTGLTILQVNNWFINARRRIVQPMIDQSNRAVYTPHPGPSGYGHDAMGYMMDSQAHMMHRPPGDPGFHQGYPHYPPAEYYGQHL

SEQ ID NO: 3060 - protein, 471 aa, Drosophila melanogaster
MAQPRYDDGLHGYGMDSGAAAAAMYDPHAGHRPPGLQGLPSHHSPHMTHAAAAAATVGMHGYHSGAGGHGTPSHVSPVGNHLMGAIPEVHKRDKDAIYEHPLFPLLALIFEKCELATCTPREPGVQGGDVCSSESFNEDIAMFSKQIRSQKPYYTADPEVDSLMVQAIQVLRFHLLELEKVHELCDNFCHRYISCLKGKMPIDLVIDERDTTKPPELGSANGEGRSNADSTSHTDGASTPDVRPPSSSLSYGGAMNDDARSPGAGSTPGPLSQQPPALDTSDPGRWCRREWSSPADARNADASRRLYSSVFLGSPDNFGTSASGDASNASIGSGEGTGEEDDDASGKKNQKKRGIFPKVATNILRAWLFQHLTHPYPSEDQKKQLAQDTGLTILQVNNWFINARRRIVQPMIDQSNRAVYTPHPGPSGYGHDAMGYMMDSQAHMMHRPPGDPGFHQGYPHYPPAEYYGQHL

SEQ ID NO: 3061 - protein, 380 aa, Danio rerio
MAQRYEDLVHYGMDAVGIPSPMYGDPHAARAMQAVHVSHGPPLHPYPHPATAPGVPPPVNDALKRDKDAIYGHPLFPLLALVFEKCELATCTPRESGVTGDVCSSESFDEDITVFSKQIRAEKPFFSCNPDLDNLMIQAIQVLRFHLLELEKVHELCDNFCHRYISCLKGKMPIDLVVDDKNGGSRSDGEEFTRTPGGSEQVFWREDDTASVHSTDTPAACVRRSSSHYGDTIIEHGDFLDQSVPSPSTGEEEDPDKERKNNKKRGIFPKVASTIMIPWVFQHLTHPYPSEEQKRQLSQDTGLTILQVNNWFINARRRIVQPMIDQSNRAVGHSGPYTPDAQPMGGFVMDGQSHMGIRPPAALGGLGGVNMGLESQWHYM

SEQ ID NO: 3062 - protein, 388 aa, Danio rerio
MAQRYEDIPHYGMDGVGIPSTMYGDPHAARSMQAVHLNHGPQLHSHQYPHTAHTNAMPPSMGSSVNDALKRDKDSIYGHPLFPLLALIFEKCELATCTPREPGVAGGDVCSSESFNEDIAVFAKQIRAEKPLFSSNPELDNLMIQAIQVLRFHLLELEKVHELCDNFCHRYISCLKGKMPIDLVIDDREGGSKSDSEEITRSSGPLDQTSWNRDHDDTASTRSGGTPGPSSGGHTSHSGDNSSEQGDGLDNSVASPSTGDDDDPDKEKKRNKKRGIFPKVATNIMRAWLFQHLTHPYPSEEQKKQLAQDTGLTILQVNNWFINARRRIVQPMIDQSNRAVSQGAPYNPDGQPMGGFVMDGQQHMGIRPPGPMSGMGMNMGMEGQWHYM

SEQ ID NO: 3063 - protein, 451 aa, Xenopus laevis
MAQRYDEMVHYPGLDGMSLAGFADAHTGRALQHHSLSQSTPYGSTGAAHRVPMPPGMGSNDGLKREKDEIYGHPLFPLLALVFEKCELATCSPRDNSGSFPGGDVCSSDSFNEDIAVFAKQVRTEKPLFSSNPELDNLMIQAIQVLRFHLLELEKVHDLCDNFCHRYITCLKGKMPIDLVIDDRDGSSKSDLEDFTGSCTSLSDQNNTWIRDHDETGSTHSGTPGPSSGGLASQSGDNSSEQGDCMDNSVASPSTGDDDDLDRDKKRNKKRGIFPKVATNIMRAWLFQHLSHPYPSEEQKKQLAQDTGLTILQVNNWFINARRRIVQPMIDQSNRTGQGGAPYSPGGQNMGGYVMDGQQHMGIRPPGFQGIPGDYTAAPSTMPMGFPPAGYTPAIPPHSAGLRHGPSLHSYLPGHPHSMILPAGASPHHLVSAQSPADALLNGQNIDIHAH

SEQ ID NO: 3064 - protein, 137 aa, Xenopus laevis
EVASPSTGDDDDPDKDKKRHKKRGIFPKVATNIMRAWLFQHLTHPYPSEEQKKQLAQDTGLTILQVNNWFINARRRIVQPMIDQSNRAVSQGTPYNADGQPMGGFVMDGQQHMGIRAPGPMSGMGMNMGMEGQWHYM

SEQ ID NO: 3065 - protein, 390 aa, Xenopus laevis
MAQRYDDLPHYGGMDGVGLPSSMYGDPHAARSMKSVHHLNHGPPLHPHQYPHSAHTNAMPPSMGSSVNDALKRDKDSIYGHPLFPLLALIFEKCELATCTPREPGVAGGDVCSSESFNEDIAVFSKQIRAEKPLFSSNPELDNLMIQAIQVLRFHLLELEKVHELCDNFCHRYISCLEGKMPIDLVIDDRDGGSKSDSEDLTRSAPLTDQPSWSRDHDDAASIRSGGTPGPSSGGHTSHSGDNSSEQGDGLDNSIASPSTGDDDDPDKEKKRNKGRGIFPKVATNIMRAWLFQHLTHPYPSEEQKKQLAQDTGLTILQVNNWFINARRRIVQPMIDQSNRAVSQGTPYNPDGQPIGGFVMDGQQHMGIRAPGPMSGMGMNMGMEGQWHYM

SEQ ID NO: 3066 - protein, 390 aa, Gallus gallus
YDELPHYGGMDGVGVPASMYGDPHAPRPIPPVHHLNHGPPLHAGQHYGAHAPHPNVMPASMGSAVNDALKRDKDAIYGHPLFPLLALVFEKCELATCTPREPGVAGGDVCSSDSFNEDIAVFAKQVRAEKPLFSSNPELDNLMIQAIQVLRFHLLELEKVHELCDNFCHRYISCLKGKMPIDLVIDERDGSSKSDHEELSGSSTNLADHNPSSWRDHDDATSTHSAGTPGPSSGGHASQSGDNSSEQGDGLDNSVASPGTGDDDDPDKDKKRQKKRGIFPKVATNIMRAWLFQHLTHPYPSEEQKKQLAQDTGLTILQVNNWFINARRRIVQPMIDQSNRAVSQGAAYSPEGQPMGSFVLDGQQHMGIRPAGPMSGMGMNMGMDGQWHYM

SEQ ID NO: 3067 - protein, 267 aa, Homo sapiens
GTPPGGDVCSSDSFNEDIAAFAKQVRSERPLFSSNPELDNLMIQAIQVLRFHLLELEKGKMPIDLVIEDRDGGCREDFEDYPASCPSLPDQNNMWIRDHEDSGSVHLGTPGPSSGGLASQSGDNSSDQGNGLDTSVASPSSGGEDEDLDQERRRNKKRGIFPKVATNIMRAWLVQHLSHPYPSEEQKKQLAQDTGLTILQVNNWFINARRRIVQPMIDQSNRTGQGAAFSPEGQPIGGYTETQPHVAVRPPGSVGMSLNLEGEWHYL

SEQ ID NO: 3068 - protein, 385 aa, Rhodopseudomonas palustris
MLIQALVVDDSRSALDYLKRTIEADGQVHVIAFTDPLEALSSARNIDIDIVFADYEMPKMDGISLIRRLRSLPKFSDIPIVMITSIESDEVRLQALDAGATDFLPKRPKSLETQVRLRNMIRLGSAVRKLNDRAALLASEVARATHALQEREEEIILRLALSVEYRDNDTGDHTLRVAKYSRMIAEGLGLPERLCRDIYLAAPLHDVGKVATPDHILLKPGKLTPDEIAVMQTHTTIGASILAGSRCELIQLAADIAIGHHERWDGKGYPNKLKGAEIPIAARIVAVADVFDALATARPYKVAMPLPVARQHLENGRGQHFDPTCVDVFLARWDEVVAIATERLKLQQTHDAPLQPSLPPDAREPTITLPASNRKAGQMGLVPSE

SEQ ID NO: 3069 - protein, 149 aa, Deinococcus radiodurans
MMPQSLSILLVDDNPADLMLAREVFESHEDWVNVASCSSGNEAISHLKDPNYALPDVVITDLNMPSMTGLDVIRAIKSDPELRHIPVVVLSTSDAPDQIEQAYNLHATSYMVKATGFSEFVDQIEAFLNFWRCSKLARRERQSLDTATL

SEQ ID NO: 3070 - protein, 249 aa, Agrobacterium tumefaciens str. C58 (U. Washington)
MFTQMVSMRLNEMLGVSVEVCRSFEELQACYEHSPEPVTLAISNINLPGAEKGEALEYLIDLSIPTIVFTSTFHEATRETLIAKDVVDYILKDNIFAVDMLTESVCRFLTNHRHHVLIVDDSPTARALLSSRLKRYNFRVSLADSGAKALEILRANPDIGLVVTDYNMPDIDGFELTRRIRTVRGSHELRIIGVSSSTNRLLSARFLKAGGNDFMLRPFIDEEFYCRVNQNLDTLVQIQLAKAGIRPAA

SEQ ID NO: 3071 - protein, 264 aa, Dianthus caryophyllus
MLNFGATARNGVVSTRRWKSDTCIDLGPSDVRSEAHVLAVDDSLIDRKVIERLLKTTSCKVTVVDSGMRALEFLGLDAEQRTSVVDGLKIDLIITDYCMPGMTGYELLKKIKESSTFKETPVVIMSSENVIARIDRCLEEGAEDFILKPVKLSDVKRLRDYMTNKYDKSNSRVISGTNKRKQMDGSDQSYDSSSSSSSSSSLSLSPISTQSQPLISPSSSTPSSPCGPLDSNSMPSSPSGPSDTPSRRRRMAVDVDDDQTAVMP

SEQ ID NO: 3072 - protein, 231 aa, Arabidopsis thaliana
MAKDGGVSCLRRSEMIGIGIGELESPPLDSDQVHVLAVDDSLVDRIVIERLLRITSCKVTAVDSGWRALEFLGLDDDKAAVEFDRLKVDLIITDYCMPGMTGYELLKKIKESTSFKEVPVVIMSSENVMTRIDRCLEEGAEDFLLKPVKLADVKRLRSYLTRDVKVAAEGNKRKLTTPPPPPPLSATSSMESSDSTVESPLSMVDDEDSLTMSPESATSLVDSPMRSPGLA

SEQ ID NO: 3073 - protein, 259 aa, Arabidopsis thaliana
MARDGGVSCLRRSEMMSVGGIGGIESAPLDLDEVHVLAVDDSLVDRIVIERLLRITSCKVTAVDSGWRALEFLGLDNEKASAEFDRLKVDLIITDYCMPGMTGYELLKKIKESSNFREVPVVIMSSENVLTRIDRCLEEGAQDFLLKPVKLADVKRLRSHLTKDVKLSNGNKRKLPEDSSSVNSSLPPPSPPLTISPESSPPLTVSTESSDSSPPLSPVEIFSTSPLSSPIDDEDDDVLTSSSEESPIRRQKMRSPGLD

SEQ ID NO: 3074 - protein, 238 aa, Glycine max
  unsure (1)..(238): unsure at all Xaa locations
MGMAAESQFHVLAVDDSLIDRKLIERLLRTSSYEVTTVDSGSKALEFLGLCENDESNPSTPYVCPNNHQEVEVNLVITDYCMPGMTGYDLLKKIKESSSLRNIPVVIMSSENVPSRINRCLEEGAEEFFLKPVRLSDLNKLKPHMKKTKLKDQKQGTVETTATTTNHHPKXAAPSXPKSRDLLQPESESESHPQPTIEQQQQILQQANNNNKRKTMEQGLSPETDRTRPRYSGIATVV

SEQ ID NO: 3075 - protein, 232 aa, Oryza sativa (japonica cultivar-group)
MTVVDAESRFHVLAVDDSLIDRKLIEMLLKNSSYQVTTVDSGSKALELLGLRDEGDDSSSSPSSSSPDHQEIDVNLIITDYCMPGMTGYDLLKRVKGSSSLKDIPVVIMSSENVPARINRCLEDGAEEFFLKPVKLADMKKLKSHLLKRKQQLPMAAAAPDKPPHKPDEAAASAAAIAEAATAQTDGIISDCSCSGSSKRKAAAMEQEVISSPDQRTKPRLSSTSSGLAVET

SEQ ID NO: 3076 - protein, 151 aa, Oryza sativa
  unsure (1)..(151): unsure at all Xaa locations
XARGDLLKAIKALGSPNPIPVVVMSSENEPQRISRCLTAGAEDFILKPLKMNDVQRLRKCSGATRPKSAVAGDDDRCCNTAKKAAAAAAATPEQQQQQQRSLLQVMNASSFEVSHYFQLIFKLILLAYAVLCLSQLLHRWSNGSILSLWCA

SEQ ID NO: 3077 - protein, 303 aa, Magnetospirillum magnetotacticum
MTFNTLKFPPAMAAVLTRTRDYLQEEIGLKVSRAKPRTGNVDSLQLRDITAVVCTDGPIKLMIVFSFQRVLLEHIREVVTARLKVLPEERELFLRETAGETVNFILGHATADLAETGNVMHLSPPSILDEERNILRPKKAIFTTIEMATSHGILDINFIGPSELFDQKLNVIEEEETQGGEMHPLKVLIVDDSLLTVRTLTGMLTELGHLVVQTAGSGALALEAYRRSKPDLVTMDITMPDMDGIEATSGILKEFPEANIIMVTSHGQQGMVMNAVKAGAKGYVLKPIKLEKLRDMIARVFKT

SEQ ID NO: 3078 - protein, 155 aa, Desulfovibrio desulfuricans G20
MLGRTNRQRRQEYLMNVLLVDDEVAFVEALARRLTRKNMTVHTVHNGPEALDFLRKNPSVDAVVLDVVMPGPDGLKVQEIIRKEFPLVEVIMLSGNSTTAMAVQGMKQGAFDYLSKPCSTEELIEKLHEAKRRRDTYCEELAALKAGDIVLRRGD

SEQ ID NO: 3079 - protein, 256 aa, Oceanobacillus iheyensis HTE831
MKKCRIKEMLETSKVDECNMNILIVEDDKTIATGLEYSLKQEGYDVVVCHKVQEAQRKINNDLDDISLCLFDLSLPDGSGYELCEMVKRKADIPVIFLTVVDDEVNVVMGLDMGADDYITKPFRIRELISRIKTVLRRYEKSKPNKEQLSSVISIGSINIHTLEGKVYKETEEILLTALEYRLLMIFVNHRGQVLSRKQLLQLIWDIAGDFVNDNTLTVYIKRLRKKIEEDAQHPTVIETVRGMGYRMVDTHDKKQ

SEQ ID NO: 3080 - protein, 131 aa, Burkholderia pseudomallei
MDKSMKILVVDDFPTMRRIVRNLLKELGYSNVDEAEDGLAGLARLRGGGYDFVISDWNMPNLDGLAMLKEIRADASLTHLPVLMVTAESKKENIIAAAQAGASGYVVKPFTAATLDEKLNKILEKMAKAGS

SEQ ID NO: 3081 - protein, 664 aa, Arabidopsis thaliana
MVNPGHGRGPDSGTAAGGSNSDPFPANLRVLVVDDDPTCLMILERMLMTCLYRVTKCNRAESALSLLRKNKNGFDIVISDVHMPDMDGFKLLEHVGLEMDLPVIMMSADDSKSVVLKGVTHGAVDYLIKPVRIEALKNIWQHVVRKKRNEWNVSEHSGGSIEDTGGDRDRQQQHREDADNNSSSVNEGNGRSSRKRKEEEVDDQGDDKEDSSSLKKPRVVWSVELHQQFVAAVNQLGVDKAVPKKILEMMNVPGLTRENVASHLQKYRIYLRRLGGVSQHQGNMNHSFMTGQDQSFGPLSSLNGFDLQSLAVTGQLPPQSLAQLQAAGLGRPTLAKPGMSVSPLVDQRSIFNFENPKIRFGDGHGQTMNNGNLLHGVPTGSHMRLRPGQNVQSSGMMLPVADQLPRGGPSMLPSLGQQPILSSSVSRRSDLTGALAVRNSIPETNSRVLPTTHSVFNNFPADLPRSSFPLASAPGISVPVSVSYQEEVNSSDAKGGSSAATAGFGNPSYDIFNDFPQHQQHNKNISNKLNDWDLRNMGLVFSSNQDAATATATAAFSTSEAYSSSSTQRKRRETDATVVGEHGQNLQSPSRNLYHLNHVFMDGGSVRVKSERVAETVTCPPANTLFHEQYNQEDLMSAFLKQEGIPSVDNEFEFDGYSIDNIQV

SEQ ID NO: 3082 - protein, 669 aa, Arabidopsis thaliana
MMNPSHGRGLGSAGGSSSGRNQGGGGETVVEMFPSGLRVLVVDDDPTCLMILERMLRTCLYEVTKCNRAEMALSLLRKNKHGFDIVISDVHMPDMDGFKLLEHVGLEMDLPVIMMSADDSKSVVLKGVTHGAVDYLIKPVRMEALKNIWQHVVRKRRSEWSVPEHSGSIEETGERQQQQHRGGGGGAAVSGGEDAVDDNSSSVNEGNNWRSSSRKRKDEEGEEQGDDKDEDASNLKKPRVVWSVELHQQFVAAVNQLGVEKAVPKKILELMNVPGLTRENVASHLQKYRIYLRRLGGVSQHQGNLNNSFMTGQDASFGPLSTLNGFDLQALAVTGQLPAQSLAQLQAAGLGRPAMVSKSGLPVSSIVDERSIFSFDNTKTRFGEGLGHHGQQPQQQPQMNLLHGVPTGLQQQLPMGNRMSIQQQIAAVRAGNSVQNNGMLMPLAGQQSLPRGPPPMLTSSQSSIRQPMLSNRISERSGFSGRNNIPESSRVLPTSYTNLTTQHSSSSMPYNNFQPELPVNSFPLASAPGISVPVRKATSYQEEVNSSEAGFITPSYDMFTTRQNDWDLRNIGIAFDSHQDSESAAFSASEAYSSSSMSRHNTTVAATEHGRNHQQPPSGMVQHHQVYADGNGGSVRVKSERVATDTATMAFHEQYSNQEDLMSALLKQV

SEQ ID NO: 3083 - protein, 690 aa, Arabidopsis thaliana
MMNPSHGRGLGSAGGSSSGRNQGGGGETVVEMFPSGLRVLVVDDDPTCLMILERMLRTCLYEVTKCNRAEMALSLLRKNKHGFDIVISDVHMPDMDGFKLLEHVGLEMDLPVIMMSADDSKSVVLKGVTHGAVDYLIKPVRMEALKNIWQHVVRKRRSEWSVPEHSGSIEETGERQQQQHRGGGGGAAVSGGEDAVDDNSSSVNEGNNWRSSSRKRKDEEGEEQGDDKDEDASNLKKPRVVWSVELHQQFVAAVNQLGVEKAVPKKILELMNVPGLTRENVASHLQKYRIYLRRLGGVSQHQGNLNNSFMTGQDASFGPLSTLNGFDLQALAVTGQLPAQSLAQLQAAGLGRPAMVSKSGLPVSSIVDERSIFSFDNTKTRFGEGLGHHGQQPQQQPQMNLLHGVPTGLQQQLPMGNRMSIQQQIAAVRAGNSVQNNGMLMPLAGQQSLPRGPPPMLTSSQSSIRQPMLSNRISERSGFSGRNNIPESSRVLPTSYTNLTTQHSSSSMPYNNFQPELPVNSFPLASATGISVPVRKATSYQEEVNSSEAGFTTPSYDMFTTRQNDWDLRNIGIAFDSHQDSESAAFSASEAYSSSSMSRHNTTVAATEHGRNHQQPPSGMVQHHQVYADGNGGSVRVKSERVATDTATMAFHEQYSNQEDLMSALLKQEGIAPVDGEFDFDAYSIDNIPV

SEQ ID NO: 3084 - protein, 382 aa, Arabidopsis thaliana
MPINDQFPSGLRILVVDDDTSCLFILEKMLLRLMYQVTICSQADVALTILRERKDSFDLVLSDVHMPGMNGYNLLQQVGLLEMDLPVIMMSVDGRTTTVMTGINHGACDYLIKPIRPEELKNIWQHVVRRKCVMKKELRSSQALEDNKNSGSLETVVVSVSECSEESLMKCRNKKKKKKRSVDRDDNEDDLLLDPGNSKKSRVVWSIELHQQFVNAVNKLGIDKAVPKRILELMNVPGLSRENVASHLQKFRLYLKRLSGEASQSNDSESTKRYENIQALVSSGQLHPQTLAALFGQPIDNHHSASFGVWIPNDNLGRSQNEHFSVDVSSASNRPVSVAVHGLSSSANFRQRGDVNNNRIRQGYGSNVNEESWILERSSRQR

SEQ ID NO: 3085 - protein, 382 aa, Arabidopsis thaliana
MPINDQFPSGLRILVVDDDTSCLFILEKMLLRLMYQVTICSQADVALTILRERKDSFDLVLSDVHMPGMNGYNLLQQVGLLEMDLPVIMMSVDGRTTTVMTGINHGACDYLIKPIRPEELKNIWQHVVRRKCVMKKELRSSQALEDNKNSGSLETVVVSVSECSEESLMKCRNKKKKKKRSVDRDDNEDDLLLDPGNSKKSRVVWSIELHQQFVNAVNKLGIDKAVPKRILELMNVPGLSRENVASHLQKFRLYLKRLSGEASQSNDSESTKRYENIQALVSSGQLHPQTLAALFGQPIDNHHSASFGVWIPNDNLGRSQNEHFSVDVSSASNRPVSVAVHGLSSSANFRQRGNVNNNRIRQGYGSNVNEESWILERSSRQR

SEQ ID NO: 3086 - protein, 620 aa, Arabidopsis thaliana
MALSLLRKNKHGFDIVISDVHMPDMDGFKLLEHVGLEMDLPVIMMSADDSKSVVLKGVTHGAVDYLIKPVRMEALKNIWQHVVRKRRSEWSVPEHSGSIEETGERQQQQHRGGGGGAAVSGGEDAVDDNSSSVNEGNNWRSSSRKRKDEEGEEQGDDKDEDASNLKKPRVVWSVELHQQFVAAVNQLGVEKAVPKKILELMNVPGLTRENVASHLQKYRIYLRRLGGVSQHQGNLNNSFMTGQDASFGPLSTLNGFDLQALAVTGQLPAQSLAQLQAAGLGRPAMVSKSGLPVSSIVDERSIFSFDNTKTRFGEGLGHHGQQPQQQPQMNLLHGVPTGLQQQLPMGNRMSIQQQIAAVRAGNSVQNNGMLMPLAGQQSLPRGPPPMLTSSQSSIRQPMLSNRISERSGFSGRNNIPESSRVLPTSYTNLTTQHSSSSMPYNNFQPELPVNSFPLASAPGISVPVRKATSYQEEVNSSEAGFTTPSYDMFTTRQNDWDLRNIGIAFDSHQDSESAAFSASEAYSSSSMSRHNTTVAATEHGRNHQQPPSGMVQHHQVYADGNGGSVRVKSERVATDTATMAFHEQYSNQEDLMSALLKQEGIAPVDGEFDFDAYSIDNIPV

SEQ ID NO: 3087 - protein, 660 aa, Glycine max
  unsure (1)..(660): unsure at all Xaa locations
KIKNSDPKSVFSFFLLRFLRCFWSWSNCELSSRRSSSIVSPQIRFELCKRHCRVGFVVSVFVAVLLFLGSDLRSMNLSNGKGSMSTLTASVVMXXSGDAVSDQFPAGLRVLVVDDDPTCLMILEKMLRTCLYEVTKCNRAETALSLLRENKNGFDIVISDVHMPDMDGFKLLEHIGLEMDLPVIMMSADDGKSVVMKGVTHGACDYLIKPVRIEALKNIWQHVVRKRKNEWKDAEQSGSAEEGDRQPKASDEADYSSSANEGSWRNSKKRRDEEEEAEDRDDXXSTLKKPRVVWSVELHQQFVAAVDQLGIDKAVPKKILELMNVPGLTRENVASHLQKYRLYLRRLSGVSQHQNNMNNSFLSPQEATFGTISSINGIDLQTLAVAGQLPAQSLATLQAAGLGRPTGKAGVPXXPLMDQRNLFSFENPRLRFGEGQQQHLSTSKXXMNLLHGIPTNMEPKQLANLHQSTQSIGSLNMRVNASATQGSPLLMQMAQSQPRGQSPRVPRLPSSLGQPTVSNGISNGLLGRNGIAGNNRGXXAYNPVPPSSSLLSFPMNQTSEMSVNNSFPLGSTPGISSITTKGSFQEEVTSGIKGSGGFPSYDIFNELHHQKPHDWEITNPNLTYNASQHANXFTGNIDVTPSVLVHKGFLLHTDWXSRDA

SEQ ID NO: 3088 - protein, 741 aa, Glycine max
  unsure (1)..(741): unsure at all Xaa locations
LELRFLSCVGLGGVTNSAAEEEAPQLFNLKFDSNYVNATFVSGLLSLLCCLALLLFLSSDLPSMNLSNGKGSMSTLTASVVMXXSGDAVSDQFPAGLRVLVVDDDPTCLMILEKMLRTCLYEVTKCNRAETALSLLRENKNGFDIVISDVHMPDMDGFKLLEHIGLEMDLPVIMMSADDGKXSVVMKGRVHGACDYLIKPVRIEALKNIWQHVVRKRKNEWKDAEQSGSAEEGDRHPKASDESXDYSSSANEGSWRNSKKRRDEEEEAEDRDDXXSTLKKPRVVWSWELHQHFVAAVDQLGIDKAVPKKILELMNVPGLTRENVASHLQKYRLYLRRLSGVSQHQNNLNNSFLGPQEATFGTISSINGIDLQTLAVAGQLPAQSLATLQAAGLGRSTAKAGVPIXXLMDQRNLFSFENPRLRFGEGQPQHLSTSKXXMNLLHGIPTNMEPKQLANLHQSTQSIGGLNMRVNASATQGNPILMQMAQSQPRGPGPRVPRLPSSLGQPTVSNGISNGLLGRNGIAGNNRGXXAYNPVPPSSSLLSFPMNQTSEMSVNNSFPIGTTPGISSITTKGSFQEEVTSGIKGSSGFPSYDIFNELHHQKSHDLEITNPGLTYNASHHVNPLQGNIDVAPSVLVHQGFSSTQQTGQSRDGALIGKAMFSMGEGLEQNNLQNANFNPLLVDNSIRIKAERIPDASSQTNLFPEHYGQEDLMTALLKQQEGMGPAENEFEFDGYSLDNIPV

SEQ ID NO: 3089 - protein, 329 aa, Glycine max
  unsure (1)..(329): unsure at all Xaa locations
NSRVRPTRPHTLHIVLRFSDSEFSPKRRRFMAPCAAAAEFPVGLRVLVVDDDATTLKIIEQMSIRCRYRVTTCTEATVALNLLRERKGCFDVVLSDVHMPDMDGYKLLEHVGLEMDLPVIMMSGDSTTSAVMKGIRHGACDYLIKPVREEELRNIWQHVVRKFWNDSKEQDNSGSMEDSDQNKRGNDDAEYTSSVADAAEVXXKAPKKRSSLKEEDIELESDDPAASKKPRVVWSVELHQQFVSAVNQLGLDKAVPKRILELMNVPGLTRENVASHLQKFRLYLKRLTGVAQHQNGMLYTXXLGLLESNLGTNGRFDXHALAAAAHVPX

SEQ ID NO: 3090 - protein, 691 aa, Oryza sativa (japonica cultivar-group)
MAPVEDGGGVEFPVGMKVLVVDDDPTCLAVLKRMLLECRYDATTCSQATRALTMLRENRRGFDVIISDVHMPDMDGFRLLELVGLEMDLPVIMMSADSRTDIVMKGIKHGACDYLIKPVRMEELKNIWQHVIRKKFNENKEHEHSGSLDDTDRTRPTNNDNEYASSANDGAEGSWKSQKKKRDKDDDDGELESGDPSSTSKKPRVVWSVELHQQFVNAVNHLGIDKAVPKKILELMNVPGLTRENVASHLQKFRLYLKRIAQHHAGIANPFCPPASSGKVGSLGGLDFQALAASGQIPPQALAALQDELLGRPTNSLVLPGRDQSSLRLAAVKGNKPHGEREIAFGQPIYKCQNNAYGAFPQSSPAVGGMPSFSAWPNNKLGMADSTGTLGGMSNSQNSNIVLHELQQQPDAMLSGTLHSLDVKPSGIVMPSQSLNTFSASEGLSPNQNTLMIPAQSSGFLAAMPPSMKHEPVLATSQPSSSLLGGIDLVNQASTSQPLISAHGGGNLSGLVNRNPNVVPSQGISTFHTPNNPYLVSPNSMGMGSKQPPGVLKTENSDALNHSYGYLGGSNPPMDSGLLSSQSKNTQFGLLGQDDITGSWSPLPNVDSYGNTVGLSHPGSSSSSFQSSNVALGKLPDQGRGKNHGFVGKGTCIPSRFAVDEIESPTNNLSHSIGSSGDIMSPDIFGFSGQM

SEQ ID NO: 3091 - protein, 793 aa, Dictyostelium discoideum
MNNKQEEIDQFLSSTSTSPSPSSSSSPSNNDSTSLKSMISGIENLNVHSKGNDNKNNNNNNNNNNSNNNEKQKDIVSLENNSSSNNTTTTTTTTTTSNHNSNNNSNNNNNNINNNNINNNNYEPLVNGHNNGFGDKLNDQPSPSSHRVSDFSDEYSPSKVRILVADDDDVQRKILNNLLKKFHYNVTLVPNGEIAWEYINKGQQKYDLVLTDVMMPHITGFDLLQRINDHPVHRHIPVILMSGTAVDYKYANDTIKIGGQDFLTKPIAKELLKKKIDTVLQSIWQRRKEEEYKATLAQEREKGNKLAKEMELKEHEIEELTKKVSKMSSISKEAMESPLVSVTRNIEELLKQSSWSHYESEIKEKLSSILKELGSSNIYRPSFEKLIKNDSVDPVTKSFLVSEFSSTTSRRNSIPTFPQTTYNRDTKEVIKGWEFDVFKYSEDDLMPLLVDMFENFQLPEIFKIPIEKLQRFIMTVNALYRKNNRYHNFTHAFDVTQTVYTFLTSFNAAQYLTHLDIFALLISCMCHDLNHPGFNNTFQVNAQTELSLEYNDISVLENHHAMLTFKILRNSECNILEGLNEDQYKELRRSVVQLILATDMQNHFEHTNKFQHHLNNLPFDRNKKEDRQMILNFLIKCGDISNIARPWHLNFEWSLRVSDEFFQQSHYETICGYPVTPFMDKTKTTRARIAADFIDFVASPLFQSMAKFLKESQFLLKVISKNRENWQAYMELQKEGKCNDDDLQFMEDPTILVKSKLPKIDEEENRDKVSSSSSSSTAPLTSTSSSNNETSSS

SEQ ID NO: 3092 - protein, 689 aa, Oryza sativa
MAPVEDGGGVEFPVGMKVLVVDDDPTCLAVLKRMLLECRYDATTCSQATRALTMLRENRRGFDVIISDVHMPDMDGFRLLELVGLEMDLPVIMMSADSRTDIVMKGIKHGACDYLIKPVRMEELKNIWQHVIRKKFNENKEHEHSGSLDDTDRTRPTNNDNEYASSANDGAEGSWKSQKKKRDKDDDDGELESGDPSSTSKKPRVVWSVELHQQFVNAVNHLGIDKAVPKKILELMNVPGLTRENVASHLQKFRLYLKRIAQHHAGIANPFCPPASSGKVGSLGGLDFQALAASGQIPPQALAALQDELLGRPTNSLVLPGRDQSSLRLAAVKGNKPHGEREIAFGQPIYKCQNNAYGAFPQSSPAVGGMPSFSAWPNNKLGMADSTGTLGGMSNSQNSNIVLHELQQQPDAMLSGTLHSLDGPPSRSRPPVRSLNTFSASEGLSPNQNTLMIPAQSSGFLAAMPPSMKHEPVLATSQPSSSLLGGIDLVNQASTSQPLISAHGGGNLSGLVNRNPNVVPSQGISTFHTPNNPYLVSPNSMGISKQPPGVLKTENSDALNHSYGYLGGSTPMDSGLLSSQSKNTQFGLLGQDDITGSWSPLPNVDSYGNTVGLSHPGSSSSSFQSSNVALGKLPDQGRGKNHGFVGKGTCIPSRFAVDEIESPTNNLSHSIGSSGDIMSPDIFGFSGQM

SEQ ID NO: 3093 - protein, 620 aa, Oryza sativa
MAPVEDGRGVEFPVGMKVLVVDDDPTCLAVLKRMLLECRYDATTCSQATRALTMLRENRRGFDVIISDVHMPDMDGFRLLELVGLEMDLPVIMMSADSRTDIVMKGIKHGACDYLIKPVRMEELKNIWQHVIRKKFNENKEHEHSGSLDDTDRTRPTNNDNEYASSANDGAEGSWKSQKKKRDKDDDDGELESGDPSSTSKKPRVVWSVELHQQFVNAVNHLGIDSQIPPQALAALQDELLGRPTNSLVLPGRDQSSLRLAAVKGNKPHGEREIAFGQPIYKCQNNAYGAFPQSSPAVGGMPSFSAWPNNKLGMADSTGTLGGMSNSQNSNIVLHELQQQPDAMLSGTLHSLDVKPSGIVMPSQSLNTFSASEGLSPNQNTLMIPAQSSGFLAAMPPSMKHEPVLATSQPSSSLLGGIDLVNQASTSQPLISAHGGGNLSGLVNRNPNVVPSQGISTFHTPNNPYLVSPNSMGISKQPPGVLKTENSDALNHSYGYLGGSTPMDSGLLSSQSKNTQFGLLGQDDITGSWSPLPNVDSYGNTVGLSHPGSSSSSFQSSNVALGKLPDQGRGKNHGFVGKGTCIPSRFAVDEIESPTNNLSHSIGSSGDIMSPDIFGFSGQM

SEQ ID NO: 3094 - protein, 412 aa, Triticum aestivum
  unsure (1)..(412): unsure at all Xaa locations
XGWKQEHEHSGSLDDTDRNRLTNNDNEYASSANDGAEDSWKSQKKKRDKEEDDSELESGDPSNNSKKPRVVWSVELHQQFVNAVNHLGIDKAVPKKILELMNVPXLTRENVASHLQKFRLYLKRIAQHHAGMTNPYGVPASSAQVASLGGLDFQALAASGQIPPQALAALQDELLGRPTNSLVLPGRDQSSLRLAAVKGNKPHGEQIAFGQPIYKVQNNSYAALPQNSPAAGRMPSFSAWPNNKLGMSDSMSALGNVNNSQNSNMVLHELQQQPDTMLSGTLHTLDVKPSGIVMPSQSLNTFPASEGLSPNQNSLIIPSQSSGFLTGIPPSMKPELVLPTSQSSNSLLGGXIDLINQASTSQPFISSHGGNLPGLMNRNSNVMPSQGISSFQTGNTPYLVNQNSMGMGSKPP

SEQ ID NO: 3095 - protein, 139 aa, Desulfovibrio desulfuricans G20
MPTILIVEDDPITRGILRDIVTSYGHKVLDVADGRTAWERLQNDPDIDLMITDVRMPGLDGMELVGMLRSNDRLQGLPVIITSGVVGLRQIARLLRRGASSFIAKPIDPKELQHCIQNTLAAGTGVPHSSRPDDVSARS

SEQ ID NO: 3096 - protein, 140 aa, Helicobacter pylori
  unsure (1)..(140): unsure at all Xaa locations
EEPNLXAILIRRSALKLKLLVVDDSSTMRRIIKNTLSRLGYEDVLEAEHGVEAWEKLDANADTKVLITDWNMPEMNGLDLVKKVRSDSRFKEIPIIMITTEGGKAEVITALKAGVNNYIVKPFTPQVLKEKLEVVLGAND

SEQ ID NO: 3097 - protein, 124 aa, Helicobacter pylori
MKLLVVDDSSTMRRIIKNTLSRLGYEDVLEAEHGVEAWEKLDANADTKVLITDWNMPEMNGLDLVKKVRSDSRFKEIPIIMITTEGGKAEVITALKAGVNNYIVKPFTPQVLKEKLEVVLGAND

SEQ ID NO: 3098 - protein, 368 aa, Thermotoga maritima
MTVLIVEDDDITREAMGQYLKLSGFNVIEAENGEKAVELSENVDVALVDVMLPGMSGIEVVNKIKAKNPSCVVFVVTAYDDTEIVKKCVEAGADDFIKKPVNLELLRLKITHALRNRVFHMYRNSYLKSLKKKLFLLEKTAEEFFTEYEDFLFEVLEILNMLSEYRDMETHRHTERVGWLSGRIAEEMGMSEVFVTEIQFAAPLHDIGKIGIPDRILLKPGILTPEEFEIMKQHTTIGFRILSRSNSPILQLGAEIALTHHERWDGSGYPRGLKEREIPISGLIVAVADSFDAMVSRRPYKNPKPLEEAFREIESLSGKLYSPEVVEAFLKLEKEITDVYRREKDEDTSHNGGRSHQSSPGEGVEGIR

SEQ ID NO: 3099 - protein, 727 aa, Arabidopsis thaliana
MNANEEGEGSRYPITDRKTGETKFDRVESRTEKHSEEEKTNGITMDVRNGSSGGLQIPLSQQTAATVCWERFLHVRTIRVLLVENDDCTRYIVTALLRNCSYEVVEASNGIQAWKVLEDLNNHIDIVLTEVIMPYLSGIGLLCKILNHKSRRNIPVIMMSSHDSMGLVFKCLSKGAVDFLVKPIRKNELKILWQHVWRRCQSSSGSGSESGTHQTQKSVKSKSIKKSDQDSGSSDENENGSIGLNASDGSSDGSGAQSSWTKKAVDVDDSPRAVSLWDRVDSTCAQVVHSNPEFPSNQLVAPPAEKETQEHDDKFEDVTMGRDLEISIRRNCDLALEPKDEPLSKTTGIMRQDNSFEKSSSKWKMKVGKGPLDLSSESPSSKQMHEDGGSSFKAMSSHLQDNREPEAPNTHLKTLDTNEASVKISEELMHVEHSSKRHRGTKDDGTLVRDDRNVLRRSEGSAFSRYNPASNANKISGGNLGSTSLQDNNSQDLIKKTEAAYDCHSNMNESLPHNHRSHVGSNNFDMSSTTENNAFTKPGAPKVSSAGSSSVKHSSFQPLPCDHHNNHASYNLVHVAERKKLPPQCGSSNVYNETIEGNNNTVNYSVNGSVSGSGHGSNGPYGSSNGMNAGGMNMGSDNGAGKNGNGDGSGSGSGSGSGNLADENKISQREAALTKFRQKRKERCFRKKVRYQSRKKLAEQRPRVRGQFVRKTAAATDDNDIKNIEDS

SEQ ID NO: 3100 - protein, 720 aa, Arabidopsis thaliana
MNANEEGEGSRYPITDRKTGETKFDRVESRTEKHSEEEKTNGITMDVRNGSSGGLQIPLSQQTAATVCWERFLHVRTIRVLLVENDDCTRYIVTALLRNCSYEVVEASNGIQAWKVLEDLNNHIDIVLTEVIMPYLSGIGLLCKILNHKSRRNIPVIMMSSHDSMGLVFKCLSKGAVDFLVKPIRKNELKILWQHSSGSGSESGTHQTQKSVKSKSIKKSDQDSGSSDENENGSIGLNASDGSSDGSGAQSSWTKKAVDVDDSPRAVSLWDRVDSTCAQVVHSNPEFPSNQLVAPPAEKETQEHDDKFEDVTMGRDLEISIRRNCDLALEPKDEPLSKTTGIMRQDNSFEKSSSKWKMKVGKGPLDLSSESPSSKQMHEDGGSSFKAMSSHLQDNREPEAPNTHLKTLDTNEASVKISEELMHVEHSSKRHRGTKDDGTLVRDDRNVLRRSEGSAFSRYNPASNANKISGGNLGSTSLQDNNSQDLIKKTEAAYDCHSNMNESLPHNHRSHVGSNNFDMSSTTENNAFTKPGAPKVSSAGSSSVKHSSFQPLPCDHHNNHASYNLVHVAERKKLPPQCGSSNVYNETIEGNNNTVNYSVNGSVSGSGHGSNGPYGSSNGMNAGGMNMGSDNGAGKNGNGDGSGSGSGSGSGNLADENKISQREAALTKFRQKRKERCFRKKVRYQSRKKLAEQRPRVRGQFVRKTAAATDDNDIKNIEDS

SEQ ID NO: 3101 - protein, 495 aa, Arabidopsis thaliana
MCFNNIETGDEVETERQVFGSSEEDEFRVEDTARNTNNVQISQQQQQPLAHVVKWERYLPVRSLKVLLVENDDSTRHIVTALLKNCSYEVTAVPDVLEAWRILEDEKSCIDLVLTEVDMPVHSGTGLLSKIMSHKTLKNIPVIMMSSHDSMVLVFKCLSNGAVDFLVKPIRKNELKNLWQHVWRRCHSSSGSGSESGIHDKKSVKPESTQGSENDASISDEHRNESGSSGGLSNQDGGSDNGSGTQSSWTKRASDTKSTSPSNQFPDAPNKKGTYENGCAHVNRLKEAEDQKEQIGTGSQTGMSMSKKAEEPGDLEKNAKYSVQALERNNDDTLNRSSGNSQVESKAPSSNREDLQSLEQTLKKTREDRDYKVGDRSVLRHSNLSAFSKYNNGATSAKKAPEENVESCSPHDSPIAKLLGSSSSSDNPLKQQSSGSDRWAQREAALMKFRLKRKERCFEKKVRYHSRKKLAEQRPHVKGQFIRKRDDHKSGSEDN

SEQ ID NO: 3102 - protein, 750 aa, Glycine max
  unsure (1)..(750): unsure at all Xaa locations
IRLEGCSCSSKDLLCVCSYCFDVLDFQVVQMSVDGDSKELKELNQRLRDGKKIAGGEHGLCEEVKCNGIAEEVRTVESSSVQQHIPQPQGAIICWERFLHIRSLKVLLVEIDDSTRHVVTALLRNCSYEVIEAANGLQAWKILEDLTNHIDLVLTEVAMPGLSGIGLLYKIMGHKTRKNIPVVMMSSHDSMGLVFKCLSKGAVDFLVKPIRKNELKNLWQHVWRRCHSSSGSGSESGTQTQKSIKSKSLEKSDNNSGSNDEDDNESIGLNNVDGSDNGSGTQSSWTKRAVEVDSHKPVSQWDQIAECPDSTCAQVVHSNAEMGGNKVVPLAAKDCAEXXNEQLVKTAGSQHSNAPDVGPSKFSEQINRGQLDLNCENQSSKLRCKGLSLSDAITSTCDSQREFEALNKKPKSSDIENKGTNNDEELPSLELSLKRLRGVEDADITIQDDRNVLRRSDQSAFSRYNAASNTKKSPTGCVGSNSPYNNSLEVTKKDSSRDIQSHSCGNPPNQNSNGASNNIDMGSTTNNAYAKSGEPAGASTTKCLYQTSAFQPVKNSLHQLPPDHDAESIKKMATAAPHCGSSNVEEVLVEGNVGNHSINRSVSGSNNGSNGQNGSSTAVNAGGTNTESNNGLTGNSGSGDASGSGSANRVDQNKTSQREVALTKFRQKRKERRERCFHKKVRYQSRKRLAEQRPRFRGQFVRQTSNENASEAXQQIADSEHWPQWHNDGDMRKKVEESSCRIWELFCVLC

SEQ ID NO: 3103 - protein, 686 aa, Glycine max
  unsure (1)..(686): unsure at all Xaa locations
TGGDCGVLLCPASIPEFPVPQPQGAIICWERFLHIRSLKVLLVEIDDSTXRHVVTALLRNCSYEVIEVANGLQAWKILEDLTNHIDLVLTEVAMPGLSXGIGLLYKIMGHKTRKNIPVVMMSSHDSMGLVFKCLSKGAVDFLVKPIRKNELKNLWQHVWRRCHSSSGSGSESGTQTQKSIKSKSLEKSDNNSGSNDEDDNESIGLNNVDGSDNGSGTQSSWTKRAVEVDSHKPVSQWDQIAECPDSTCAQVVHSNAEMGGNKVVPLAAKDCAEXXNEQLVKTAGSQHSNAPDVGPSKFSEQINRGQLDLNCENQSSKLRCKGLSLSDAITSTCDSQREFEALNKKPKSSDIENKGTNNDEELPSLELSLKRLRGVEDADITIQDDRNVLRRSDQSAFSRYNAASNTKKSPTGCVGSNSPYNNSLEVTKKDSSHDIQSHSCGNPPNQNSNGASNNIDMGSTTNNAYAKSGEPSGASTTKCLYQTSAFQPVKNSLHQLPPDHDAESIKKMATAAPHCGSSNVEEVLVEGNVGNHSINRSVSGSNNGSNGQNGSSTAVNAGGTNTESNNGLTGNSGSGDASGSGSANRVDQNKTSQREVALTKFRQKRKERRERCFHKKVRYQSRKRLAEQRPRFRGQFVRQTSNENASEAXQQIADSEHWPQWHNDGDMRKKVEESSCRIWELFCVLC

SEQ ID NO: 3104 - protein, 461 aa, Glycine max
  unsure (1)..(461): unsure at all Xaa locations
XPRPEKNCFRRSNKRKEKKNGLGEEKKKKAYGSLQISQQPPQEPAVCWERFLPLRSIKVLLVEDDDSTRHVVRALLQNCSYKVTAVSNGLQAWKVLEDPENGIDLVLTEVAMPILSGIGRPRVXLLCKIMSHKTLKNIPVIMMSSHDSMGIVFKCLSKGAVDFLVKPIRRNELKNLWQHVWRRCHSSSGSGSESATLTRKFAKSRSNDAYENNSDSSDENDYGSRGLSIRDGSDNGSGTQSSWTKCLAQVGSPPPHKQLVDAPDSTCAQVMQTKTEKVSSRWVHXXTEKECHELIDPLDDVARGKDLAMGISLNMQLALEELSSNPIVGKGANKMSDVDDMQIIKRKSNVCEKGQLEYNGDKTGTQENQAMNVIDVTDSNSPHAESRDLNTPNGFSGFSQSKANCCXXKEHPSLELTLKRLGEVGDAKNVTGEECNVLRHSDQSAFSKYNTVSAXPAQTGX

SEQ ID NO: 3105 - protein, 693 aa, Glycine max
  unsure (1)..(693): unsure at all Xaa locations
IVRLREDDRRGPRHDESSDDLGSRMDELNGAXXTTENSNAEVVRWERFLPRMVLRVLLVEADHSTRQIIAALLRKCSYTVIAVPDGLKAWETLKKKAPELDLILTEVELPAISGFALLSLIMEHDICKNIPVIMMSSHDSVSLALKCMLKGAVDFLIKPIRKNELRNLWQHVWRRHAISTPTQNTTFSPKKLKTASEDNSASNKSSGSVASSKKNNECSERLSEGTSPIFEAESTYVENMQDVPQYVHCQVMQTLVQSTCTSPIFEAKSTYVENMQDVXPAEKESAEHNDETEDKSVTXXVSDAARCDKTSELTELRPEQDCGVAEPETENEDEILKSELDGDNSHVSMMQGCSAERVKPSKGAIDLIATVGNLPKHLDENCSLNGGNTTKFDCETQLELSLRSDFPGSSGNQASEATEESQRLNHSNTSAFSWYSNSSGSNQNLENMIGTVICQYGQVTPKLSNSQCGLLPVSGVISNLKSEGHGNVFTSLFYAQSGIHPMSSPKPVCQNESSPFPTSTSTQSYPESHNSDQLHDCSNDATCLNQNVKDNTDSDHARHDSPVADQSAGNSLCHDAANHVNSSAYGSMDSGNDGNATSAIXXSKNAPDGFSDSGCHNYDGFRVTDPHRSSQREAVLVKFRLKRKERCFEKKVRYQSRKRLAEQRPRVKGQFVRQQAAAHQSGNNRNXFDMTVS

SEQ ID NO: 3106 - protein, 365 aa, Glycine max
  unsure (1)..(365): unsure at all Xaa locations
XHASDGIDLVLTEVAMPILSGIGLLCKIMSHKTLKNIPVIMMSSHDSMGIVFKCLSKGAVDFLVKPIRRNELKNLWQHVWRRCHSSSGSGSESATHTRKFAKSKXSNDACENNSDSSDENDYGSRDLSVRDGSGDGSGTQSSWTKCLAQVGSPPPHKQLVDAPDSTCAQVMQTKTEKVSSRWVHXXTEKECHELIDPLDDVAMGKDLAMGISLNXCDXSIHSRNCPAIQCKGANKMSDVDDRSXKRQSNACEKGQLEYNGDKTRTRENQAMNVIDVTDSNSPLAESRDLNTPNGFSGFSQSKANCCXXKEHPSLELTLERLGEVRDGKNFTGEECNVLRHSDQSAFSKYNTASANQQILGTVMFC

SEQ ID NO: 3107 - protein, 235 aa, Glycine max
  unsure (1)..(235): unsure at all Xaa locations
MNNNVGKGKKGLAEQNHMFFDKKSLKNGVVNGGVASGSSTEDDTRFNKVVEDGNNLQISQQXXPQEPVVCWERFLPLRSIKVLLVEDDDSTRHVVRALLRNCSYEVTAVSNGLQAWKXALEDPENGIDLVLTEVAMPILSGIGLLCKIMSHKTLKNIPVIMMSSHDSMGIVFKCLSKGAVDFLVKPIRRNELKNLWQHVWRRCHSKKXSEMLSPKSDPANPNCYSTLFLDRETAX

SEQ ID NO: 3108 - protein, 235 aa, Glycine max
  unsure (1)..(235): unsure at all Xaa locations
MNNNVGKGEKGLAEQNHMFFNKKSLNNGVVNEGVASGSSTEDDTRFNKVAEDGNNLQISQQPPQEPAVCWERFLPLRSIKVLLVEDDDSTRHVVRALLRNCSYEVTAVSNGLQAWKVLEDPENGIDLVLTEVAMPILSGIGLLCKIMSHKTLKNIPVIMMSSHDSMGIVFKCLSKGAVDFLVKPIRRNELKNLWQHVWVWRRCHSKKXSEMLSPKSDPANPNCYSTLFLDRETAX

SEQ ID NO: 3109 - protein, 789 aa, Oryza sativa (japonica cultivar-group)
MGSACEAGTDEPSRDDVKGTGNGILENGHSHKPEEEEWRNGMGEDLPNGHSTPPEPQQTDEQKEHQVQIVRWERFLPVKTLRVLLVENDDSTRQVVSALLRKCCYEVIPAENGLHAWQCLEDLQNHIDLVLTEVVMPRLSGIGLLSKITSHKICKDIPVIMMSSNDSMGTVFKCLSKGAVDFLVKPIRKNELKNLWQHVWRRCHSSSGSGSESGIRTQKCTKPKVDDEYENNSGSNNDNEDDDDNDEDDDDLSVGHNARDGSDNGSGTQFSLNVGQLCQCILMPSACFKTQSSWTKRAVEIDSPQQMSPDQPSDLPDSTCAQVIHPTSEICSNRWLPTANKRSGKKHKENNDDSMGKYLEIGAPRNSSMEYQSSPREMSVNPTEKQHETLMPQSKTTRETDSRNTQNEPTTQTVDLISSIARSTDDKQVVRINNAPDCSSKVPDGNDKNRDSLIDMTSEELGLKRLKTTGSATEIHDERNILKRSDLSAFTRYHTTVASNQGGAGFGGSCSPQDNSSEALKTDSNCKVKSNSDAAEIKQGSNGSSNNNDMGSSTKNAITKPSSNRGKVISPSAVKATQHTSAFHPVQRQTSPANVVGKDKVDEGIANGVNVGHPVDVQNSFMQHHHHVHYYVHVMTQQQQQPSIERGSSDAQCGSSNVFDPPIEGHAANYSVNGSFSGGHNGNNGQRGPSTAPNVGRPNMETVNGIVDENGAGGGNGSGSGSGNDLYQNGVCYREAALNKFRQKRKVRNFGKKVRYQSRKRLAEQRPRIRGQFVRQSGQEDQAGQDEDR

SEQ ID NO: 3110 - protein, 491 aa, Triticum aestivum
  unsure (1)..(491): unsure at all Xaa locations
DDDADDDFSVGPNARDGSDNGSGTQSSWTKRAVEIDSPQLLSSDHLAESPDSTCAQVIHPRSEIGSNRWLPTANKRNINNQKENNDDSMGKYLEIGAPRNSSLGYQSSPNEMSVNPTEKQHENLTSQNKSVNKIVIDKPTCQTADLISSIARNTESKQAARITDAPDCSSKMPNGNEMKNDSPINMPSQELGLKISETTRCXXTEIHDERSIPKRSNLSAFTRYHTPMASDQGGATFRGSCSPQDNSSEAVKTNSTCKMESNSDAAQIKQGSNGSSNNNDMGSSTKNAIAKPCTDRERVMSPSLVKHSSEAQQSSVQHHHHAHYYRHVIAQQQTLIDRASNARCGSSNASDLPLEGHAANYGVNGSISGSNNGSNTQNASSSAPNIARPNMGGAMDKTEAGGGNGSGSGPSGSGNDMVCQNQLSQREAAVNKFRQKRKERNFGKKVRYQSRKRLAEQRPRVRGQFVRQSGQEDEAGQAEDXDDATLPSGPL

SEQ ID NO: 3111 - protein, 277 aa, Triticum aestivum
IGSNRWLPTANKRNINNQKENNDDSMGKYLEIGAPRNSSLGYQSSPNEMSVNPTEKQHENLTSQNKSVNKIVIDKPTCQTADLISSIARNTESKQAARITDAPDCSSKMPNGNEMKNDSPINMPSQELGLKISETTRCETEIHDERSIPKRSNLSAFTRYHTPMASDQGGATFRGSCSPQDNSSEAVKTNSTCKMESNSDAAQIKQGSNGSSNNNDMGSSTKSAIAKPCSDRERGFMVPSTWLNRTSRLQHSIRCSTKCHQLMWHARTKLLKKLPMQ

SEQ ID NO: 3112 - protein, 171 aa, Triticum aestivum
  unsure (1)..(171): unsure at all Xaa locations
XNDDCTRHVVRALLRKCGYEVISAENGLHAWQYLEDVQNRIDLVLTEVAMPCLSGIGLLSKITSHSICKGIPVIMMSKNDSMSTVFRCLSKGAVDFLVKPIRKNELKTLWQHIWRRCHSSSGSESGIHTQKCSKPKAGSHDDDDDDDDDADDDFSVGPNARDGSDNGSGXX

SEQ ID NO: 3113 - protein, 191 aa, Triticum aestivum
  unsure (1)..(191): unsure at all Xaa locations
XGHQAWAYLQDMQSNIDLVLTEVFMHGGLSGIDLLGRIMNHEVCKDIPVIMMSSHDSMGTVLSCLSNGAADFLAKPIRKNELKNLWAHVWRRSHSSSGSGSGSAIQTQKCTKSKSADDSNNNSNNRNDDASMGLNARDGSDNGSGTQSSRTKRAVEIDSPQDMSPDQSVDPPDSTCAHVSHLKSEICSNRX

SEQ ID NO: 3114 - protein, 114 aa, Triticum aestivum
FGTRARPNIESVNGTVSHNIAGGGIVSGSGSGNDVYQNRFPQREAALNKFRLKRKDRNFGKKVRYQSRKRLAEQRPRVRGQFVRQSGQEDQEHKVQKDDTDLLIRTTWHLHRQI

SEQ ID NO: 3115 - protein, 104 aa, Brassica rapa subsp. pekinensis
YSSMFHPFNGSMDAEERRHISSTTEHSAIDNHCSANSSSVGRTQQSLQREAALNKFRMKRKDRCFDKKVRYESRKKLAEQRPRIKGQFVRQVQSTETSTQEAPQ

SEQ ID NO: 3116 - protein, 124 aa, Helicobacter pylori 26695
MKLLVVDDSSTMRRIIKNTLSRLGYEDVLEAEHGVEAWEKLDANADTKVLITDWNMPEMNGLDLVKKVRSDSRFKEIPIIMITTEGGKAEVITALKAGVNNYIVKPFTPQVLKEKLEVVLGTND

SEQ ID NO: 3117 - protein, 124 aa, Helicobacter pylori J99
MKLLVVDDSSTMRRIIKNTLSRLGYEDVLEAEHGVEAWEKLDANADTKVLITDWNMPEMNGLDLVKKVRADNRFKEIPIIMITTEGGKAEVITALKAGVNNYIVKPFTPQVLKEKLEVVLGTND

SEQ ID NO: 3118 - protein, 312 aa, Magnetococcus sp. MC-1
MVTMSKAQILLVDDQPINLEILSEYLRDEGYRLCIARDGQEAWELLEKNPLNFHALLLDRMMPRMDGMEVLARMKQHDELRMVPVIMQTAKASQEEIVEGLEGGAHYYLTKPYRKEMLRAIVRTAVDDYNNYRAIRDRSREAQDKAVDSVLSMRLMDSGQFRFQTIKQAQDLAALLSHSCPDPERVVLGLSELLINAVEHGNLGITYEDKSRLLKNRDDWWQEVHRRQSLPENCQKWGRIRFTKSEDRLEILIQDEGNGFDWRGFLEFDQARAFDSHGRGIAMAKMLSFDRLEYHDPGNTVVVRVNLPPKSE

SEQ ID NO: 3119 - protein, 878 aa, Magnetococcus sp. MC-1
MELDADFLNELLATFRAELEDQTAIMGDGLLALEKGQDEQARQETIHQIFRAAHNVKGAARGVEIRPLADLSHRLESLFSALQKQNATPNPGVISLALAAVDQMRQLGMVLIPGEPTPAEITALLDQLDQAAQGRLAGQNVEASVAASPSPPPTKAPTARFEQQTEPMLPTALAAPLSQENRTQPSPQAEPQPQAEYREQEPSPPHTSAPSSGENHKPHDAITETAIPAAPQQLHERSVEVAEPISAMDEEIPKQVEEPHSPAGVAGQASAAPTGEQSQAPIRHQTPVMKSAVHHEMVRVSATKINEAIGLAEEIQISKVQMEGLQAGVRRLEGNLLNLLHQITCLGDFSEDGMGMPDPALWRDFAQNAPDLMVQLKEDLRATRYGVKERAKRLGLLSNNLQSNLRMMRLVPLSTMTRPMARTARDLCVELGKLADFKVVGDEIELDRAVLEQLKDPLTHLLRNAVDHAIETPQARLAAGKPERGVIQLEIIADGGTIRLVLEDDGRGLDLQRIKEKAIRERLIGAEDAHMMDDEAITELIFMPGFSSRDEVTSVSGRGVGLDVVRANLRHINGQVRVRTQHGKGTQFVLTVPLTLATERGLLVELAGEVFALSISHVERIRSVPRSAVRTLEAGPAVVLDGRPMPLHSLADLLNISGSRALSLNPMPVVILSKGWHQMAVVVDDVVGEQEIVVKPFQPPLCSVKHLKGGNLDRNGNIVVVLDSASLVDAALENRTAPLPLEGQEAGTSINRPKVPHILVVDDSITTRTLEKNILEAKGFLVTTAVNGQKGWETLQEGQFDLVISDVEMPIMNGFEFARTIRDDSRYDDLPVIIVSSLDSQENKRRGMEAGADAYIVKGSFETATLLQTVRQLLAIEN

SEQ ID NO: 3120 - protein, 484 aa, Magnetococcus sp. MC-1
MPPPQVTTSYWLATALQAVDAPCLLLNTDLHLLGWNHAMVAWLVHLPDLYTNTTLSDLLAPQDKQVLYQGLQTLREGRHFTAKVEGLHWLTETGPKQVTLHFSTMATQNGLPPMMLCHLLLTQEGNPSPKERHTASQLSEQVGRLEQALNDKNHFFTLIQRNLREPLASTINLLEAINAEQLLPRDLHEACAQAQLNLNTLVEMAGYRNRSSHQPADALSPAFGYLNTHHLMQRVLRSLANLAQEQHITVLNQINPSQRLHGDPYLLDEALRHLLTLAMDLSSSGDTLHILQVGSKLSFRSLGLAKHIPGLEQTLLRPTDPNRQGTITEYDTHCRAIIAAHKGEIRFSTLPALGGEIAILLPHTDPVVLLVDDNDAERMLLRKPLEEIGLQVCEAKDGQEALEMLGQQHVDMVLTDVRMPRMDGFSLLRQIQSNPLYESIPTLLLTVDQESDSRTQAFQLGAVDFVNKPIQFHDLIPRIRRFLG

SEQ ID NO: 3121 - protein, 123 aa, Methanosarcina mazei Goe1
MMMKEILIVEDNPMNMELILDLLEFYGHRVTEAEDGIKALERLAEKKFDLILLDMQLPKMDGLEVLERIKKNPATSEIPVIAVTAHAMKGSEEHFIEMGCVDYISKPIDIHRFRSLIDKYLGE

SEQ ID NO: 3122 - protein, 871 aa, Thermosynechococcus elongatus BP-1
MTLDAADLDAITQEARHCFLYEDAPEYLLLLEQWAEQVVTDPERHYTAEDYNTLMRAAHSLKGGAGIAQLSELQALSHRLEDILEALKEGRLGDRPRAHHLLVQGIEQAQELLAAAKQNHSLTPTPPYQALLAALTELLSTVSDPSSPPTVAPPDLRTALTQTLEESLQLLEASATDAERETALAQLIATAHTLGKQYPLPWLQQLAAELPKLAADLPLGELVPAIVAECRQLQQAELVKLLPPEPTPPPPAETAPPQDSYLRIPVSRLDRLGNTVSELLIGQERLTLYQQQFLRANRELKQRLDQFRPIRDQVQTFYDRLATPLGGPGRPTNGHNDFDALEFDRYTELHTALQDFQELLVRIQETGADIDLLSRDLQEALDLNRQHLNSLYAELTNSRLVPFRQLAQMFVTAVQALGDRHHKPVQLVIEGGDTLVDQVILQQLKAPLTHLVRNAFDHGLEPPKQRQQLGKSPTGTIWLRARLRGNAVEIQVADDGRGIDLQRVSQKAVELRLCSAEQVPHLSREQILEFLFVPGFSTAKQVSDLSGRGVGLDVVREQVQRSRGHLQITTEPQRGTTFTLTLPLTLSLLPMVLCQVGELTLAIPDLSIREVIALKEYTDIRHPSATIDWQGQSIPLYPLHQLLPYQRPLSGPTRPLGVGVVVDVAGQAVALAVNYLIAERELVVKPFDQTVPVPPYVMGCTVLGSGEVVPVLAPDNFTVLLRPVEVRASPMESPQQPITPQVLIVDDSITVRRLLDRVLRQAGYNVVQCRDGKEALDFLLAAGDQVSLVITDIEMPRLDGYDLLEAIRLSARLRHLPVAMLTSRGGDTHRQKALQLGANGYITKPFQPQGILQTVTQLLTGRHGGVATLSQ

SEQ ID NO: 3123 - protein, 123 aa, Desulfovibrio desulfuricans G20
MSKHILIVDDSKTVRNLVAFIMKKEGFRVTMAEDGLDGLEKLYSAEETVDLIISDVNMPRMDGFTFIKTVREQDTYRDLPIVVLSTEGQEKDIQMGMSLGANLYMVKPAQPDKMVKNIKMLLG

SEQ ID NO: 3124 - protein, 667 aa, Arabidopsis thaliana
MWQTWPRQPILLDIFSNPNTLSTTVRSWSVRHPLSIITVKTFARFFLDIFFSPHYYRKNKVLFFALFSFISPLTNILICFVTVSLSLELSSSSSIIDLGFSKLSVCVVIMTSSEEVVEVTVVKAPEAGGGKLSRRKIRKKDAGVDGLVKWERFLPKIALRVLLVEADDSTRQIIAALLRKCSYRVAAVPDGLKAWEMLKGKPESVDLILTEVDLPSISGYALLTLIMEHDICKNIPVIMMSTQDSVNTVYKCMLKGAADYLVKPLRRNELRNLWQHVWRRQTSLAPDSFPWNESVGQQKAEGASANNSNGKRDDHVVSGNGGDAQSSCTRPEMEGESADVEVSARDAVQMECAKSQFNETRLLANELQSKQAEAIDFMGASFRRTGRRNREESVAQYESRIELDLSLRRPNASENQSSGDRPSLHPSSASAFTRYVHRPLQTQCSASPVVTDQRKNVAASQDDNIVLMNQYNTSEPPPNAPRRNDTSFYTGADSPGPPFSNQLNSWPGQSSYPTPTPINNIQFRDPNTAYTSAMAPASLSPSPSSVSPHEYSSMFHPFNSKPEGLQDRDCSMDVDERRYVSSATEHSAIGNHIDQLIEKKNEDGYSLSVGKIQQSLQREAALTKFRMKRKDRCYEKKVRYESRKKLAEQRPRIKGQFVRQVQSTQAP

SEQ ID NO: 3125 - protein, 558 aa, Arabidopsis thaliana
MTSSEEVVEVTVVKAPEAGGGKLSRRKIRKKDAGVDGLVKWERFLPKIALRVLLVEADDSTRQIIAALLRKCSYRVAAVPDGLKAWEMLKGKPESVDLILTEVDLPSISGYALLTLIMEHDICKNIPVIMMSTQDSVNTVYKCMLKGAADYLVKPLRRNELRNLWQHVWRRQTSLAPDSFPWNESVGQQKAEGASANNSNGKRDDHVVSGNGGDAQSSCTRPEMEGESADVEVSARDAVQMECAKSQFNETRLLANELQSKQAEAIDFMGASFRRTGRRNREESVAQYESRIELDLSLRRPNASENQSSGDRPSLHPSSASAFTRYVHRPLQTQCSASPVVTDQRKNVAASQDDNIVLMNQYNTSEPPPNAPRRNDTSFYTGADSPGPPFSNQLNSWPGQSSYPTPTPINNIQFRDPNTAYTSAMAPASLSPSPSSVSPHEYSSMFHPFNSKPEGLQDRDCSMDVDERRYVSSATEHSAIGNHIDQLIEKKNEDGYSLSVGKIQQSLQREAALTKFRMKRKDRCYEKKVRYESRKKLAEQRPRIKGQFVRQVQSTQAP

SEQ ID NO: 3126 - protein, 568 aa, Glycine max
  unsure (1)..(568): unsure at all Xaa locations
CDSMGEVVIMSGEKKSESGGGGEGRXWWRSKAGEFKGLMRWEKFLPKMVLRVLLVEADDSTRQIIAALLRKCSYKVVAVPDGLKAWELLKGRPHNVDLILTEVDLPSISGYALLTLIMEHEICKNIPVIMMSSQDSISTVYKCMLRGAADYLVKPIRKNELRNLWQHVWRRQSSTTGINGLQDESVAQQKVEATAENNAASNRSSGDAACKGSDAQSSCTKPDCEAESDPVEHAGIFSAEMWGSISKWNRDTTGXNKLSLRPDEAMDLIGAFHTRSLKNSTVNCTGNFDHSPQLDLSLRRSCPGSFENKLTEERHTLMHSNASAFKRYTTRQLQISMPAVLIISDQQREQITNCEKNISHIATGSNSDSSTPMQRCIVSPTTVQSKXXSELATSHPPQGHSLPIPVKGVRFNDLCTAYGSVLPSVFHTQSGPPAMPSPNSVVLLEPNFQVNAFYQSNMKESSSEQLYESRGPNGNTTQNHIVYTQEHKSEHADLTNNANSHRSIQREAALNKFRLKRKERCYEKKVRYESRKKLAEQRPRVKGQFVRQVHPDPLVAEKDGKEYDHSDF

SEQ ID NO: 3127 - protein, 595 aa, Glycine max
  unsure (1)..(595): unsure at all Xaa locations
KLRNSLSLSLPPLNLANFSDIFTAQLKTKHEQQQQQQQIVXEWVKCRLXCRRRRGNRATMPPXVHWERFLPRMVLRVLLVEADDSTRQIIAALLRKCGYKVVAFCDGLKAWETLKNKAFDLDLILTEVDLPSISGFSLLTLIMEHDICKNIPVIMMSSHDSVSMVFKCMLKGAADFLIKPVRKNELRNLWQHVWRRHAISRPPQNLTLPEIVGFAAENHAASNDSSGSVEDDECSEKTSEAHSTCPSPFLEAESTYMENMQDILQLKSSSNLSNNIHRCSDELVDPSTGAIDLIATFKNXFQRALMKNVVXSSGNTAKFDFDTQLELSLRRDFPGSSCKAAFKERQILNHSNASAFSRYSNRLLQPLFPTPSTISAKLTNASQNSHESLKLSKNTSTSHQYSEKSQNQEEKIITSVIGQSGQVDPKLPNSQLGLFPATGVTSDHKSKGNGNVFPSKLYAKSGVHPISTPKSVCQKESSPFPTSTSSQSNPQSHNSERHHWLEDATHASDQNVNDQSNLECETHDSPAASQSAAHRTSQREAALTKFRLKRKDRCYEKKVRYQSRKRLAEQRPRVKGQFVRQVHDDHPVADVGGGS

SEQ ID NO: 3128 - protein, 553 aa, Glycine max
  unsure (1)..(553): unsure at all Xaa locations
XRPTRPRLEGQVEGAVHWERFLPRMVLRVLLVEADDSTRQIIAALLRKCGYKVVAFCDGLKAWETLKNKAFDLDLILTEVDLPSISGFSLLTLIMEHDICKNIPDIMMSSHDSVSMVFKCMLKGAADFXLIKPVRKNELRNLWQHVWRRHALSRPPQNLTLTEIVGXVAENHDAINDSSGSMDSTPKDDDCSKTTSETNCTCISPFLEAESTXMENMQGILQLRSSSSLSNIDTVKHENSTKCERESDNHNDEAGEKSLLISEDASTAKFDFDTQLELSLRRDFPGSSCKAAFKERQILNHSNASAFQLNTYSDAELQYTIIDVIVNKVKKVXXNQEEKIITSVIGQSGQVDPKLPNSQLGLFPATGVTSDHKSKGNGNVFPSKLYXQNQVSIPYRLQNQCARKRVLHFPQALPPSPIXQSHNSERHHWLEDATHASDQNVNDXSNLECETHDSPAASQSAASFFHDTANHNSSGVYRSDGNATSAKVAKESHEIQREAALTKFRLKRKDRCYEKKVRYQSRKRLAEQRPRVKGQFVRQVHDDHPVADVGGGS

SEQ ID NO: 3129 - protein, 492 aa, Oryza sativa
  unsure (1)..(492): unsure at all Xaa locations
PPIPSPGLRWTARREEGRTARALLKERSFNIHLVLTEVELPLMSGFLLLSTIMEHDACKNIPVIMMSSNDSVSMVFKCMLKGAADFLVKPIRKNELRNLWQHVWRKQLSSGVLDVPQQEDNLTERHEQKTGVTKAEHVTENVVHKNMGDAQSSCTRSELEADSRQTKMTCSNDINCEKASRDMELVHIIDNQQKNNTHMEMDVARANSRGNDDKCFSIPAHQLELSLRRSDYSRLESQEKNERRTLNHSTSSPFSLYNCRTASSTINAGDAQACSTSATHIDLENKNGDSKTPSQDKRETNQPPIRVVPFPVPVGGLTFDGQPFWNXVHLWHPFSIHXSAPPIWNSKTSTWQDATTQAISLQQNGPKDTDTKQVENVEEQTARSHLSANRKHLRIEIPTDEPRHVSPTTGESGSSTVLDRIAPTESSNVVPENPDGLRHLSQREAALNKFRLKRKDRCFEKKVRYQSRKLLAEQRPRVKGQFVRQDHGVQGS

SEQ ID NO: 3130 - protein, 207 aa, Oryza sativa
MISLFVHLDNLTYWLTCSFTQFYQEPTYEISHFRSFLVHRYNCRTASSTINAGDAQACSTSATHIDLENKNGDSKTPSQDKRETNQPPIRVVPFPVPVGGLTFDGQPFWNGAPVASLFYPQSAPPIWNSKTSTWQDATTQAISLQQNGPKDADTKQVENVEEQTARSHLSANRKWYNSNGRLVCFPLVLRGSFGISIMRTRGRRGFD

SEQ ID NO: 3131 - protein, 131 aa, Oryza sativa
LDPLLQSSCTRSELEADSRQTNNLLEYKQPMGRHFSKPDHKNTEKNGGTKIHASNDGNLIPRREEDASLRRMTCSNDINCEKASRDMELVHIIDNQQKNNTHMEMDVARANSRGNDDKCFSIPAHQLELSL

SEQ ID NO: 3132 - protein, 181 aa, Triticum aestivum
CLNDNNSERASKDMDLVHIMDNQQKHNTQREVDTMRTTSRGNDEKGSIPAHQLELSLRRTDYGKLENHDKNDRRTLNHSTSSAFSLYNCRAVSTSGNAGDGQLCSTSETLMDVENKNGDSAAPSQDMTETNRPPIRVVPFPVPVQGLTFDGQPFWNGTPMASLFYHSQLLPFGIAKHPCGK

SEQ ID NO: 3133 - protein, 276 aa, Triticum aestivum
DIEVVHIIDDEPKPSTPMEVDIVRTNPQGNGDKWFSIPAHQLELSLRRSDYGRSEDQEKNDTRTLNHSTSSAFSLYNCRPISSFGNAGDAQPCSTSATHADLQNKNGDSAAPFQDKADPICHPIRVVALPVPVGGLTFDGQPFWSGAPVAPLLYPQSGPPIWNGRTPVSQEVDTQATSSQQSDPTEMDCQQTESTQRQEVLPSPTANEKHLHVEIPSDSNPQQVSPMASESGTGSSTVLNNSGNALSGSACGSSSNRIATPTEQCNASDGATENPS

SEQ ID NO: 3134 - protein, 164 aa, Triticum aestivum
GGRAPASGDNQTEPPGMVRGGQGQEGGLGEREVVNVVDQDGREEEVRRALPMMPVRVLLAEGDDSTRHVISALLRKCGYHVSAASDGVKAWELLKEKSFKIDLVLTEVELPLMSGFLLLSTIMEHDACKNIPVIMMSSNDAVSMVFKCMLEGASDFLVKPIRKN

SEQ ID NO: 3135 - protein, 525 aa, Bacillus halodurans
MYKVLLADDEFFVRHGLKSLIEWEKCGYEVAAEADNGEDAFKLVQEIKPDLVITDIRMPVFDGLQLIQKVNETLSFNTKFIIISGYNDFSYAQKAVRFGAVDFVLKPIDQDELEAALIKLAATLDQEKATNSDQEKVLLDQIFIHSLGENKKENEVRRWAAKLNINNRHFYYYLLLEVNNLSLDKGFINEQYKEPIRKVIRETVARQAATEEYTAIYEQLDHAYGLLITSEHLKKFNGQIEPLAEKLRKDIQDFTNIPLTVYVGAKTDDLSTIKKSYETANSLRNYKYIFNEKNVFIHEQTESVDTTYDELNNHLFVTLMEQMEENNSDRIVNIIDKIFSEFQTKKFVPSAVKTSVNRCVHKVMQTVQAMEGDTGKIISAQAMTNWESYNLTFDQLKQVFTKFVLEAAVIIQELRKENMKSDIYKVKTYIENHYHENISLKSIASLFYMNPVYMGQLFKKTFGVYFKEYLLKLRMNEAKKLLRQTDMRVYEVAERVGFGSTDYFVTQFEKINKMTPTEYRNKLLK

SEQ ID NO: 3136 - protein, 237 aa, Magnetococcus sp. MC-1
  unsure (1)..(237): unsure at all Xaa locations
MQTHRFLSGRRFSMGAKILIIEDDPTLNRLMVNHLSRLGHHVTGTHSRAEAEHYFNQHEPLLIIMDLRLPDVNGIDYLPQIPVPAPVIMLTAYSSVTSAVKAMKAGAFEYLVKPVNVEELELVVSRGLEHANMLHDRQFFSQQQPQQQRMIGTSVAMLHLQQQIQQMLEHEQPVWVFGEPGTGKSLVARTIHEKSLRRGGHFGILHCDSLPESLLEAELFGHEKGFSPXMLVANWVF

SEQ ID NO: 3137 - protein, 296 aa, Rhodococcus ruber
GSGHDATLPLPGHPGREWPGPLRSDGPAWHDGPAVNETTDTLTVLAVDDEPPALDELAYLLRRREEIGHVHTAGEATTALRLLRDGGIDAVFLDINMPGLDGLELAGILRNFANPPAVVFVTAHDDRAVAAFDLGAVDYLLKPLREERLAEAVRRIAERRRTRETESAAAGAAASDEVIPVELGGVTTLVPRSSVQWVEADGDYARLHTGTGSHLVRIPISTLESRWADAGFLRVHRSYLVALPLVTGIRSVGSGLVVCLRAEEGKPAVELPVSRRHTRELKDRLIRGPMQTWTSR

SEQ ID NO: 3138 - protein, 265 aa, Thermobifida fusca
MMLPSPRGLRVLAVDDVPLALTELCRLLRAAPEVGEVVAADDPISALRNIQADRFDAVFLDISMPGLDGVELANLLSKLSDPPVIVFVTAHEEHAVTAYGIGAVDYLLKPVRAERLAMALTKVVRMLSAGTAPVTPHRVRRPDAMAVLPVETAGRTRYVRRSDVRFVEANGDYVRLHTPEGVHLVRMPISRLEEYWADSGFLRVHRGYLVALSAIRELRSDSSGGLLAHTDLGDVPVSRRHARELREQLLHAAQTGMFDDPTRGA

SEQ ID NO: 3139 - protein, 226 aa, Bacillus subtilis subsp. subtilis str. 168
MARKEWKVLLIEDDPMVQEVNKDFITTVKGVTVCATAGNGEEGMKLIKEEQPDLVILDVYMPKKDGIKTLQEIRKQKLEVDVIVVSAAKDKETISLMLQNGAVDYILKPFKLERMRQALEKYKQYKQKIEANDTLSQEQLDAILNIPQQAVQDLPKGLNHFTMNEVTAFLKQQTASLSAEEVAKALGIARVTARRYLDYLEKTGIIKLDVQYGGVGRPVNRYVLKG

SEQ ID NO: 3140 - protein, 573 aa, Arabidopsis thaliana
MTVEQNLEALDQFPVGMRVLAVDDDQTCLKILESLLRHCQYHVTTTNQAQKALELLRENKNKFDLVISDVDMPDMDGFKLLELVGLEMDLPVIMLSAHSDPKYVMKGVTHGACDYLLKPVRIEELKNIWQHVVRSRFDKNRGSNNNGDKRDGSGNEGVGNSDPNNGKGNRKRKDQYNEDEDEDRDDNDDSCAQKKQRVVWTVELHKKFVAAVNQLGYEKAMPKKILDLMNVEKLTRENVASHLQKFRLYLKRISGVANQQAIMANSELHFMQMNGLDGFHHRPIPVGSGQYHGGAPAMRSFPPNGILGRLNSSSGIGVRSLSSPPAGMFLQNQTDIGKFHHVSSLPLNHSDGGNILQGLPMPLEFDQLQTNNNKSRNMNSNKSIAGTSMAFPSFSTQQNSLISAPNNNVVVLEGHPQATPPGFPGHQINKRLEHWSNAVSSSTHPPPPAHNSNSINHQFDVSPLPHSRPDPLEWNNVSSSYSIPFCDSANTLSSPALDTTNPRAFCRNTDFDSNTNVQPGVFYGPSTDAMALLSSSNPKEGFVVGQQKLQSGGFMVADAGSLDDIVNSTMKQV

SEQ ID NO: 3141 - protein, 552 aa, Arabidopsis thaliana
MTMEQEIEVLDQFPVGMRVLAVDDDQTCLRILQTLLQRCQYHVTTTNQAQTALELLRENKNKFDLVISDVDMPDMDGFKLLELVGLEMDLPVIMLSAHSDPKYVMKGVKHGACDYLLKPVRIEELKNIWQHVVRKSKLKKNKSNVSNGSGNCDKANRKRKEQYEEEEEEERGNDNDDPTAQKKPRVLWTHELHNKFLAAVDHLGVERAVPKKILDLMNVDKLTRENVASHLQKFRVALKKVSDDAIQQANRAAIDSHFMQMNSQKGLGGFYHHHRGIPVGSGQFHGGTTMMRHYSSNRNLGRLNSLGAGMFQPVSSSFPRNHNDGGNILQGLPLEELQINNNINRAFPSFTSQQNSPMVAPSNLLLLEGNPQSSSLPSNPGFSPHFEISKRLEHWSNAALSTNIPQSDVHSKPDTLEWNAFCDSASPLVNPNLDTNPASLCRNTGFGSTNAAQTDFFYPLQMNQQPANNSGPVTEAQLFRSSNPNEGLLMGQQKLQSGLMASDAGSLDDIVNSLMTQEQSQSDFSEGDWDLDGLAHSEHAYEKLHFPFSLSA

SEQ ID NO: 3142 - protein, 390 aa, Glycine max
  unsure (1)..(390): unsure at all Xaa locations
MTVEKKMNAGDEFPVGMRVLAVDDDPTCLLVLETLLRRCQYHATTTNQAIKALALLREHKDKFDLVISDVHMPDMDGFKLLELVGLEMDLPVIMLSANGDTKLVMKGISHGACDYLLKPVRMEELKNIWQHVIRRKKFDSKEKNNNIDKRNGLGSSGTGNSDHNEKLTKKRKDQDEDEDEDQENDLDNEDPSAQKKPRVVWSVDLHRKFVAAVNQLGIDKAVPKKILDLMNVEKLTRENVASHLQKYRLYLKRISCVANQQANMVAALGVADPSYLRMSSVSGVGHVQTLSGSGQLHNNXXFRSFPPSGIINRLNTPAGLNVHGFPSGVLQLSQSQNLNNANDHHXXIPVSHSANQNGVQGMTVSVGLDQLQNNKGKKKKKKKKKKKGGR

SEQ ID NO: 3143 - protein, 389 aa, Glycine max
  unsure (1)..(389): unsure at all Xaa locations
MTVEKKMNAGDEFPVGMRVLAVDDDPTCLLVLETLLRRCQYHATTTNQAIKALALLREHKDKFDLVISDVHMPDMDGFKLLELVGLEMDLPVIMLSANGDTKLVMKGISHGACDYLLKPVRMEELKNIWQHVIRRKKFDSKEKNNNIDKRNGLGSSGTGNSDHNEKLTKKRKDQDEDEDEEQENDHDNDDPSAQKKPRVVWSVELHRKFVAAVNQLGIDKAVPKKILDLMNVEKLTRENVASHLQKYRLYLKRISCVANQQTNMVVALGGADPSYLRMNSVSGVGHIQSISGSGQLHNNAFRSFPPSGIINRLNTPAGLNVHGFPSXXSTSIESITKFKKHQXXSXVPVSHSANQNGVHGMTVSVGLDQLQNNKGKKKKKKKKKKKGGR

SEQ ID NO: 3144 - protein, 384 aa, Glycine max
  unsure (1)..(384): unsure at all Xaa locations
MTVEKKMNAGDEFPVGMRVLAVDDDPTCLLVLETLLRRCQYHATTTNQAIKALALLREHKDKFDLVISDVHMPDMDGFKLLELVGLEMDLPVIMLSANGDTKLVMKGISHGACDYLLKPVRMEELKNIWQHVIRRKKFDSKEKNNNIDKRNGLGSSGTGNSDHNEKLTKKRKDQDRNEQQXNDHDNDDPSAQKKPRVVWSVELHRKFVAAVNQLGIDKAVPKKILDLMNVEKLTRENVASHLQKYRLYLKRISCVANQQTNMVVALGGADPSYLRMNSVSGVGHIQSISGSGQLHNNAFRSFPPSGIINRLNTPAGLNVHGFPSXXSTSIESITKFKKHQXXSXVPVSHSANQNGVHGMTVSVGLDQLQNNNGCYVCSKPDYCF

SEQ ID NO: 3145 - protein, 604 aa, Glycine max
  unsure (1)..(604): unsure at all Xaa locations
MAVENQREDGGCDRFPVGMRVLAVDDDPICLKVLENLLRKCQYHVTTTNQAVEALTMLRENRNKFDLVISDVNMPDIDGFKLLELVGLEMDLPVIMLSAHGDTKLVMKGVTHGACDYLLKPVRIEELKNIWQHVVRRKNFDSRDQNNNEEKAPNFAGGGSQGLRSENSADQNKRLGKKRKDQSDEEEEGGEENEDDEDPSAQKKARVVWSVELHRKFVAAVNQLGLDKAVPKKILDLMNVEGLTRENVASHLQKYRLYLKKAAQQANMVAALGGSDSYLRIGSIDGYGDFCTSSGSGRITNAXXLPSYASTGIFSRLNSPAALNMRGISSSALIRPVQSQNINSSLNTLGNIQLPANQSSSLLQGIPTSIELNQSKQRNCTTGISQLSQVDSSGFTVASGFPDHSNGPNNSLPCVSNNHIMLQGNPQTHGPGAFSNQSSVRAASFCEAFSNDQLPPTSINDSNSSTHIGNNSPLDYNQNMSCPFNSVNSHASSSGVTSSMGHVLNQNNTICSNRVDASSLVGQLNGASPSISRCTEVEKFSSDIRLKPNEAYILEQMKSQDGFMQNTFGTLDDIMGVMVKREQNESTLLDGEMGFDAYPVGSCN

SEQ ID NO: 3146 - protein, 308 aa, Glycine max
  unsure (1)..(308): unsure at all Xaa locations
MAVENQREDGGCDRFPVGMRVLAVDDDPICLKVLENLLRKCQYHVTTTNQAVEALTMLRENRNKFDLVISDVNMPDIDGFKLLELVGLEMDLPVIMLSAHGDTKLVMKGVTHGACDYLLKPVRIEELKNIWQHVVRRKNFDSMGSEQGLPMRSGGGSQGLRSENSADQNKRLGKKRKDQSDEEEXGGEENEDDEDPSAQKKARVVWSVELHRKFVAAVNQLGLDKAVPKKILDLMNVEGLTRENVASHLQKYRLYLKKAAQQANMVAALGGSDSYLRMGSIDGYGDFCTSSGSGRITNTSPFFKIYKT

SEQ ID NO: 3147 - protein, 346 aa, Glycine max
  unsure (1)..(346): unsure at all Xaa locations
XNSARGEKTXQKGREHKDKFDLVISDVHMPDMDGFKLLELVGLEMDLPVIMLSANGDTKMVMKGISHGACDYLLKPVRMEELKNIWQHVIRRKKFDSKEKNNNLDKRNGLGSSGTGNSDQNEKLTKKRKDQDEDEDEDQENDLDNEDPSAQKKPRVVWSVDLHRKFVAAVNQLGIDKAVPKKILDLMNVEKLTRENVASHLQKYRLYLKRISCVANQQANMVAALGVADPSYLRMSSVSGVGHVQTLSGSGQLHNNXXFRSFPPSGIINRLNTPAGLNVHGFPSGVLQLSQSQNLNNANDHHXXIPVSHSVNQNGVQGMTVSVGLDQLQNNKKKKKKKKKKKAAAX

SEQ ID NO: 3148 - protein, 487 aa, Oryza sativa
  unsure (1)..(487): unsure at all Xaa locations
LRTIWQHVIRRKNCDAKNRGNDDDAGQKAQGMNNEGESIGANRNKRQSRKSRDENGDDGDDSGGNSARGGDSSTQKKPRVVWSVELHRKFVAAVNQLGIEKAVPKKILDLMNVENITRENVASHLQKYRLYLKRLSTDASRQANLAAAFGGRNPAYINMNSFGNYNAYGRYRTVPTAGHTQANNILTRMNSPSAFGVHGLLHSQPIQLGHAQNNLSTSLNDLGGLNNGNMIRGAQMSTXXLTGPSGNSFPNISNGAPLATANRXXLQPLESSNQQHLSRVHSSSADPFSTLVGESPQFPDLGRTTNTWQTAVXXSNIQDRGHNDNIMNGPKIEPVSSFTSSNQIPLLGNEMQGQVASLASNVPIAFNQDTSPFNYGSSTNSRDMLNNSHVFSNSSINTSLPNLSLDNPAVPRQTLDRGNTGIVSPMQDGRIHHQAVSNQLNYNDDLMRTTGLQRGLSGGLDDIVVDMFRPDREDDGVPYIDGDWELV

SEQ ID NO: 3149 - protein, 344 aa, Triticum aestivum
  unsure (1)..(344): unsure at all Xaa locations
XRNPAYSNMNLDVFRHYSNTYGRYRPVPTSNHSQSNNLVARMNSPSAYGMHGLLSPQSQPLHLGHAQNNLGTSLNDLGVNNGNPSGGAHMSTMGTGTSGNSFANISNGAPLAPTNRXXVQSLESNNRQHLGRINSSSTDSFSSFASDSPHFPDLGRSSNTWQTAVXXSNIQQLGQNGSIGNGPRMEPVSSYTPPSNQITSLGNDMQXXQVAPLASNTLPMVFNQGAAPFTFGNSTNSREALNSNLAFSNSGINTSLPNLRIDNSVVPRQTLDGGNTGGVPSLQDGKIDQQAVGNQLNYNNNDLVGTSGLQRELSGGLDDIVVDMFRPDXXDNGGIFIDTDWGLV

SEQ ID NO: 3150 - protein, 201 aa, Triticum aestivum
GRGGDFSGVVVLMRTDVRRGAAAAGRDQFPVGMRVLAVDDDPVCLKVLETLLRRCQYHVTATNQAVIALRMLRENRDMFDLVISDVHMPDMDGFKLLELVGLEMDLPVIMLSVNGETKTVMKGITHGACDYLLKPVRIEELRNIWQHVVRRKFSTRDSVNLDTYEECNKPPSADSDYVYGQVTCGSRLARRGRNTNMRRKI

SEQ ID NO: 3151 - protein, 617 aa, Magnetospirillum magnetotacticum
MTARDEVLAAFDAGATDVIHKPFDPRELVSRVSVHTANALMSRAMRLDNTRMVNELAEAALLMTSVLPRTETLKAIRTAAGIAFDWFSRPCSAVGGDLWQAWLLGGGKVALFFGDVSGHGIGAALRAFSTHSVLSPLPSFADDPLKMAALLDCRLVSVDRDHHHFVAGVYGVFDRVEGCFSYVAAGLRNAVLLRADGRREALKLSGLPFGLTEDAGRQLGRVAIGKGDRLLIYSDALVEQAAEGSMTETALAGWIEEQVARAGETGEAEVARHLGKTFLASNPDCADDLLLVSATFPDYPVLVNGRPLHPFTGPAELLPGHGASLLVVDDMPMNRKLLDTMLKAEGYAIAEAEDGLVALERLQAEPERFDAILLDRQMPRMDGMTLLRHLKSDIRLAQIPVIMQTAFGSSEDIAEGIQAGVFYYLVKPLQLQILSSVVKAAVADHRRAQKLRTDLRRQSGTLALLEQGEFAFRTLAEADWLAVALASLCPWAPDVVTGLSELMVNAIEHGNLEISYQEKTEFLTSGRLIEEIEARLARPDLGDRRASIAVSREPQGLRFTVRDQGPGFDWRPYMDISPERAFHSHGRGIAIARRLSFDTLAYHEPGNVVEVAVAMPS

SEQ ID NO: 3152 - protein, 457 aa, Arabidopsis thaliana
MEKSGFSPVGLRVLVVDDDPTWLKILEKMLKKCSYEVTTCGLAREALRLLRERKDGYDIVISDVNMPDMDGFKLLEHVGLELDLPVIMMSVDGETSRVMKGVQHGACDYLLKPIRMKELKIIWQHVLRKKLQEVRDIEGCGYEGGADWITRYDEAHFLGGGEDVSFGKKRKDFDFEKKLLQDESDPSSSSSKKARVVWSFELHHKFVNAVNQIGCDHKAGPKKILDLMNVPWLTRENVASHLQKYRLYLSRLEKGKELKCYSGGVKNADSSPKDVEVNSGYQSPGRSSYVFSGGNSLIQKATEIDPKPLASASLSDLNTDVIMPPKTKKTRIGFDPPISSSAFDSLLPWNDVPEVLESKPVLYENSFLQQQPLPSQSSYVANSAPSLMEEEMKPPYETPAGGSSVNADEFLMPQDKIPTVTLQDLDPSAMKLQEFNTEAILKKLELGNFQNHIILFL

SEQ ID NO: 3153 - protein, 521 aa, Arabidopsis thaliana
MEKSGFSPVGLRVLVVDDDPTWLKILEKMLKKCSYEVTTCGLAREALRLLRERKDGYDIVISDVNMPDMDGFKLLEHVGLELDLPVIMMSVDGETSRVMKGVQHGACDYLLKPIRMKELKIIWQHVLRKKLQEVRDIEGCGYEGGADWITRYDEAHFLGGGEDVSFGKKRKDFDFEKKLLQDESDPSSSSSKKARVVWSFELHHKFVNAVNQIGCDHKAGPKKILDLMNVPWLTRENVASHLQKYRLYLSRLEKGKELKCYSGGVKNADSSPKDVEVNSGYQSPGRSSYVFSGGNSLIQKATEIDPKPLASASLSDLNTDVIMPPKTKKTRIGFDPPISSSAFDSLLPWNDVPEVLESKPVLYENSFLQQQPLPSQSSYVANSAPSLMEEEMKPPYETPAGGSSVNADEFLMPQDKIPTVTLQDLDPSAMKLQEFNTEAILRSLNWELPESHHSVSLDTDLDLTWLQGERFLANTGLQFQDYSSSPSLLSELPAHLNWYGNERLPDPDEYSFMVDQGLFIS

SEQ ID NO: 3154 - protein, 444 aa, Arabidopsis thaliana
MEKSGFSPVGLRVLVVDDDPTWLKILEKMLKKCSYEVTTCGLAREALRLLRERKDGYDIVISDVNMPDMDGFKLLEHVGLELDLPVIMMSVDGETSRVMKGVHTGACDYLLKPIRMKELKIIWQHVLRKKLQEVRDIEGCGYEGGADWITRYDEAHFLGGGEDVSFGKKRKDFDFEKKLLQDESDPSSSSSKKARVVWSFELHHKFVNAVNQIGCDHKAGPKKILDLMNVPWLTRENVASHLQKYRLYLSRLEKGKELKCYSGGVKNADSSPKDVEVNSGYQSPGRSSYVFSGGNSLIQKATEIDPKPLASASLSDPNTDVIMPPKTKKTRIGFDPPISSSAFDSLLPWNDVPEVLESKPVLYENSFLQQQPLPSQSSYVAISAPSLMEEEMKPPYETPAGGSSVNADEFLMPQDKIPTVTLQDLDPSAMKLQEFNTEGDSEEA

SEQ ID NO: 3155 - protein, 292 aa, Glycine max
MDNGCFSSSPRHDAFPAGLRVLVVDDDLTWLRILEKMLKKCLYEVTTCCLATEALKKLRERKEAYDIVISDVNMPDMDGFKLLEQVGLEMDLPVIMMSVDGETSRVMKGVQHGACDYLLKPIRMKELRNIWQHVFRKRMHEARDFESHEGFDFEGIHLMRNGSDHYLFAVEETTSIKKRKDADNKHDDKEFGDHFPTKKARVVWSVDLHQKFVKAVNQIGFDKVGPKKILDLMNVPWLTRENVASHLQKYRLYLSRLQKENDQKSSSSGIKHSDSPSKDLKQNLVFVRAGRF

SEQ ID NO: 3156 - protein, 515 aa, Glycine max
  unsure (1)..(515): unsure at all Xaa locations
EFGSSDMDGFKLLEHVGLEMDLPVIMMSVDGETSKVMKGVQHGACDYLLKPIRMKELRNIWQHVFRKKIHEAKEFESFESIHLMRNGSELSDDGNLFAVEDVTSSKKRKDADSKHDDKECLDPSSTKKARVVWSVDLHQKFVKAVNQIGFDKVGPKKILDLMNVPWLTRENVASHLQKYRLYLSRIQKENDQRSSSSGMKHSDFPSKDMGSFGFQNSGGRXVIKQQNDVAIDNYNHSDGSLQLQNVETKSHEADPKGIVSQSTIAKKGRILTGNIADTNMRESLRVGLNQTFPPLESEGNHAVFDCSMPTPYSWTEVPHMQLKEEHKSLVYLEDSFNQLPLHGKQQQHIHVDQSQSVASISSAPSITEEEAAACIEPKPLFADYNNDYASSVSSTGNAVATFPIQPGSLIMNGQSSERISTTTSGLKTQEYNNLSSISDQEIYQRNLLGCEAASASLDEDLHFYWLEGECYNNMNFGLQNIGMSEYYDPGLISEAPIHLYDSADYSVMDQGLFIA

SEQ ID NO: 3157 - protein, 455 aa, Oryza sativa (indica cultivar-group)
MLAVSPAMCPDIEDRAAVAGDAGMEVVGMSSDDMDQFDFSVDDIDFGDFFLRLEDGDVLPDLEVDPAEIFTDFEAIATSGGEGVQDQEVPTVELLAPADDVGVLDPCGDVVVGKENAAFAGAGEEKGGCNQDDDAGEANADDGAAAVEAKSSSPSSSTSSSQEAESRHKSSSKSSHGKKKAKVDWTPELHRRFVQAVEQLGIDKAVPSRILEIMGIDSLTRHNIASHLQKYRSHRKHMIAREAEAASWTQRRQIYAAGGGAVAKRPESNAWTVPTIGFPPPPPPPPSPAPMQHFARPLHVWGHPTMDPSRVPVWPPRHLVPRGPAPPWVPPPPPSDPAFWHHPYMRGPAHVPTQGTPCMAMPMPAARFPAPPVPGVVPCPMYRPLTPPALTSKNQQDAQLQLQVQPSSESIDAAIGDVLSKPWLPLPLGLKPPSVDSVMGELQRQGVANVPPACG

SEQ ID NO: 3158 - protein, 122 aa, Triticum aestivum
  unsure (1)..(122): unsure at all Xaa locations
DTRRKMTVEGRVSGGGDGGGKDKFPVGMRVLAVDDDPTCLKVLENLLRRCVSDVTTTGQAATALRMLRENKDQFDLVISDVHMPDMDGFKLLELVGLEMDLPVIMLVLLGKMENLCSFVXGX

SEQ ID NO: 3159 - protein, 123 aa, Triticum aestivum
  unsure (1)..(123): unsure at all Xaa locations
VGRSSENMATMGGDRRQMMEDAADDKFPEGLRILVVDDDRVCLTVLEALLHRCKYQPTTVMDAKTALRMLMAGKQQFDLVITDVRMPDMDGFKLLELIRLQMDLPVIILQKRKPYQTSLRGEX

SEQ ID NO: 3160 - protein, 170 aa, Triticum aestivum
  unsure (1)..(170): unsure at all Xaa locations
AATPSFPASAGXTLPQDFPAGMRVLVVEDDPNDLEHLTQILERCGYKVTAKASPREALKEVEENGEGFHFDIIMTVVHGGEEGDGFDGFDLLGVRDRYPVIIFSADYSKEMVMRTINEGACDFLPKPMCYQEVRNIWFHVDMQRFSGLEVDDPDEGVEGPSNHENPPEIK

SEQ ID NO: 3161 - protein, 224 aa, Desulfitobacterium hafniense
MIKVLIIEDDPMVAELNRYYLEQIGGFQLVASAGTAADALKVLKKKKVDLILLDIFMPGINGLEFLTQLRKSEIESDVIIVSASTDSQSIRKALQHGAVDYLIKPFEYERFRDALNVYKKRELLMKNKQTLSQKDLDKQIFNMEEEETVDKKSDLPKGISGDTLKLVWDHILATQGTAFTTEEMALRVGISRVSMSKYIGFLREQEVVNTEISYGAVGDGSARI

SEQ ID NO: 3162 - protein, 645 aa, Deinococcus radiodurans
MRSAHSGEQTPVPPMSAAAPVVAPVPAPAPAAATSIRVPAARLEGLMDQLGELVTARARMTQLLSRLDELQGSMTASQERFQRTVRDFEERYLNPDMVREEGAAPTTRMGGLDLSQQFAELEFDTYNDLNILSRSITELSADFAEVRRRLSDTAAELSEENEQLGKLVRRLRLDVNQTSRVAFSQTTARLRRWAREQQADLTLQVEGEDVLIESGILQRISDPLLHLLTNAAYHGLASESAESRRAAGKNPQGTVWIRAAEQGNFLEVTVADDGQGLDYARIRERALERGLRSAQELEQLSSDELGRLILLPGFSTAREVGNVAGRGVGLDVVATAVRQLGGELLISSERGVGTAFTLRVPTTQRIMDVLHLDLGAGHHAALPVGSVRSLRDVPLGDLRRDDGQLWLDFGGQPVPVVDARPIWGHAPQDTDTEAHLAVVSSISGLLALRVHDFGDIEEVAVTAPSGLLAPLDYLAGMAVSGTGQVLAILDPAGVLRLSRRPATWLGQAQRQVQATGNQRLLLVDDSLSVRRLVGRMLERGGYQVVTASDGQEALDLLQQDADFGAVVTDLEMPRVNGYELLSAVRARPATAGLPMLVMTTRAGEKHQRLAFQLGADDYFTKPVNEALLLRRLGTLQQAQQAGVSA

SEQ ID NO: 3163 - protein, 129 aa, Anopheles gambiae str. PEST
EGILDKNMKILIVDDFSTMRRIIKNLLRDLGFNNTHEADDGNTALPMLKNGDFQFVVTDWNMPGMQGIDLLKAIRVDDKLKHLPVLMVTAEAKREQIIEAAQAGVNGYIVKPFTAATLKEKLDKIFERI

SEQ ID NO: 3164 - protein, 430 aa, Agrobacterium tumefaciens str. C58 (U. Washington)
MQDKILLIEDSVALSMLLRTRLSDETEAEVVHCASMAEADALMQANNFTLALTGLNLPDAPKGEILTLLSERKVPAIVFTATVDEEARKRYAEKKIIDYIVKDGHRTVDAVVKTVDRIMTNKRFSVLVVDDARTARSGLVEILERQNFKVSEAHSGNRALEILSQDPSIQLVITDYHMPDMDGYELTRRIRDSRSSEDLRVIGISSSTDRLLSASFLKAGASDFVYRPFVPEELQCRIDNNIETLKQLKRLRELAERDHLTGLPNRRSFFERTRALMDVINDNDESGAVAILDIDHFKKINDTLGHDAGDRALKKLAELLQGMCDEQRHIPARLGGEEFAVFLRGLDARAAYAFCEELREQVEKNGRQLSGSSLALTISLGVVEIEKGEPFDNQLNAADQLLYLAKANGRNRVYSDIMIQEGLQKIGLNG

SEQ ID NO: 3165 - protein, 445 aa, Agrobacterium tumefaciens str. C58 (Cereon)
MRKDWGDGPGGLGTAMQDKILLIEDSVALSMLLRTRLSDETEAEVVHCASMAEADALMQANNFTLALTGLNLPDAPKGEILTLLSERKVPAIVFTATVDEEARKRYAEKKIIDYIVKDGHRTVDAVVKTVDRIMTNKRFSVLVVDDARTARSGLVEILERQNFKVSEAHSGNRALEILSQDPSIQLVITDYHMPDMDGYELTRRIRDSRSSEDLRVIGISSSTDRLLSASFLKAGASDFVYRPFVPEELQCRIDNNIETLKQLKRLRELAERDHLTGLPNRRSFFERTRALMDVINDNDESGAVAILDIDHFKKINDTLGHDAGDRALKKLAELLQGMCDEQRHIPARLGGEEFAVFLRGLDARAAYAFCEELREQVEKNGRQLSGSSLALTISLGVVEIEKGEPFDNQLNAADQLLYLAKANGRNRVYSDIMIQEGLQKIGLNG

SEQ ID NO: 3166 - protein, 304 aa, Agrobacterium tumefaciens str. C58 (Cereon)
MLAKVLLMILKNEPDMFSSHTIGDRGRMNFLGITGMQYSGVPFTNNRILLAEDSNVFTQMVSMRLNEMLGVSVEVCRSFEELQACYEHSPEPVTLAISNINLPGAEKGEALEYLIDLSIPTIVFTSTFHEATRETLIAKDVVDYILKDNIFAVDMLTESVCRFLTNHRHHVLIVDDSPTARALLSSRLKRYNFRVSLADSGAKALEILRANPDIGLVVTDYNMPDIDGFELTRRIRTVRGSHELRIIGVSSSTNRLLSARFLKAGGNDFMLRPFIDEEFYCRVNQNLDTLVQIQLAKAGIRPAA

SEQ ID NO: 3167 - protein, 127 aa, Shewanella oneidensis MR-1
MDKNMKILIVDDFSTMRRIIKNLLRDLGFNNTQEADDGSTALPMLQKGDFDFVVTDWNMPGMQGIDLLKAIRADDSLKHLPVLMVTAEAKREQIIAAAQAGVNGYVVKPFTAATLKEKLDKIFERLA

SEQ ID NO: 3168 - protein, 126 aa, Vibrio parahaemolyticus RIMD 2210633
MNKNMKILIVDDFSTMRRIVKNLLRDLGFNNTQEADDGLTALPMLKKGDFDFVVTDWNMPGMQGIDLLKHIRADAELKHLPVLMITAEAKREQIIEAAQAGVNGYIVKPFTAATLKEKLEKIFERL

SEQ ID NO: 3169 - protein, 225 aa, Arabidopsis thaliana
MVMETESKFHVLAVDDSLFDRKMIERLLQKSSCQVTTVDSGSKALEFLGLRVDDNDPNALSTSPQIHQEVEINLIITDYCMPGMTGYDLLKKVKESAAFRSIPVVIMSSENVPARISRCLEEGAEEFFLKPVKLADLTKLKPHMMKTKLKKESEKPVAIEEIVVSKPEIEEEEEESSVIEILPLHQEIESEQLEPMLSSNKRKAMEEVVSTDRSRPKYNDITTSV

SEQ ID NO: 3170 - protein, 232 aa, Oryza sativa; identical to SEQ ID NO: 3075

SEQ ID NO: 3171 - protein, 234 aa, Triticum aestivum
  unsure (1)..(234): unsure at all Xaa locations
MPSAHTSCLXTLPSLLSPHSILLHHTKHTLSLSSPMAVAIAEAPFHVLAVDDSVLDRKLIERLLKTSSFQVTTVDSGTKALEFLGLHGEDASISSVHADQLDVEVNVNLIITDYCMPGMTGYDLLKKIKESSSFRDIPVVIMSSENIPSRINRCLEEGANEFFLKPVRLSDMSKLKPHIMKSRCKEHCHQDEDLLSNSETNPTNNSSSSSDNIRKRKAADDEILTKTSRPNHNC

SEQ ID NO: 3172 - protein, 152 aa, Triticum aestivum
  unsure (1)..(152): unsure at all Xaa locations
XVNLIITDYCMPGMTGYDLTRPVKGSSSLKDIPVVIMSSENVPARISRCLEDGAEEFFLKPVKLADMKKLKSHLVRRKQQQPNKPQAEQQLPKKAEQAPAEPTEEVAAKVSSTGMTSDCGGGSRKRKAVMMEQDXXTSASLSSGGSGLAVET

SEQ ID NO: 3173 - protein, 104 aa, Triticum aestivum
  unsure (1)..(104): unsure at all Xaa locations
XVNLIITDYCMPGMTGYDLLRRVKGSSSLKDIPVVIMSSENVPARISRCLEDGAEEFFLKPVKLADMKKLKSHLVRRKQPQLQPPQPQEKPPQQQKAELAPTEX

SEQ ID NO: 3174 - protein, 223 aa, Triticum aestivum
  unsure (1)..(223): unsure at all Xaa locations
MPSAHTSCLXTLPSLLSPHSILLHHTKHTFSLSSPMAVAIAEAPFHVLAVDDSVLDRKLIERLLKTSSFQVTTVDSGTKALEFLGLHDEDASISSVHADQLDVEVNVNLIITDYCMPGMTGYDXLKKIKESSSFRDIXRCLEEGANEFFLKPVRLSDMSKLEPYIMKSRCNQHCHQDKPLLSNSARNPTWSTSHRXXNHKIRGGRLTKFLPQTMHTDPHFLVE

SEQ ID NO: 3175 - protein, 377 aa, Desulfitobacterium hafniense
ERGTRIAFTLPLAAKDSCSAPASVRPPEKYPMDEPWGRTELPQGGTGKFTLLAVDDDSANLQVLARLFANEPYNVLWATNGLEALELLKSRSDIDLVLLDVMMPRMSGYEVCREIRRQFSLFELPVILLTVRHSPGDIAAGFKAGANDFMIKPFDALEVRARTETLLQLKQSVAAALKAEMDFLQSQIKPHFLFNALNAIITLCGTDGLRAEQLITHLSYYLRRCFEPRTDSFLLLQDELRLVEAYVEIEKARFEDRLTVLYEVDPGALLKRILPLTIQPLVENAIRHGVMKREEGGTIRLTIQLAGDRVHVEVWDNGVGIREEQLKNLWLSDNSSSERRGVGLANIQRRLKHFCGEELHVTSREGEWTKVQFCFRG

SEQ ID NO: 3176 - protein, 924 aa, Synechocystis sp. PCC 6803
MFDAATLAAITAEARQAFLEEDAPECLAQLTVGFQSLERVLGPAGDSQQRQKLIQDMGRAAHSLKGGAGMSALTPLQTLCHRLEDLFEALEQGRVEDKSMAVGLIAMTIEETQAMVELANSGRLQDTDEPPELALALGEFLETCQPQPSQEEAIAGDVSQFVRTSLTVELEACLERVERRLERGGTATELRESFSLLLEECTLLGQALSCDWLEEAGNRWRGELVRPQVDLLTLLPTAIAELRSLREQFLAGELTPPAPEIVAEPDPEPLPEVKPVTAVIAPPVPGVPIPAVVTAKASPAPSTRQTLRIPLDRLNKLSNTVSELLINQERLLEYDKQLRQASRNLKRRGQQLIPMREQVESLYDELSFSDQTKISPSNGGGNQNGDSQSSLGIAGLVDFDALEMDSYTAVHGILQRFQELMVQVQEIQEDVDLVERDLQETLIQMSQSLHQLDSELTQSRLVPFRGLAQSFAQPLEKLGDRHKKPVQFVIEGENTLVEVAILDQLRTPLTHLIRNAFDHGLEFVPERQAQGKLPEGTITLSASTANNQVLITVSDDGRGIDPEKISRKAMELGWLTPEQLGTIGEAQMLDFLFQPGFSTAAEVSNLSGRGLGLDIVKQMIESLRGTLTVETKLGQGSRFLIRIPLSLNIVPLLLVRYQQRLLAFPSESVLRILPLDDYPIKNGRVEWQSQIMEACPLDEVLPQIYPQGFSPSPGLPHKVGLMVNLGDRSALLTVEQIVDERTLVVKALDAITPIPSYVAGCTVLGTGEVVPVLIPNNFAVLWRTEPTLPQDAAGSAGGQTTILVIDDSVTVRRTLQRVLGGSFRLIQCRDGKEAWDLLNRQNQGIDLALCDIEMPNMDGFSLLQLVRAHRVWHSLTVVMLTSRENPLHRNRAKALGADGYLTKPFQPNQLLSTIDQFLAESAQR

SEQ ID NO: 3177 - protein, 380 aa, Bacillus anthracis str. A2012
MSILIVDDNPVNIFVIKKILKQAGYQDLVSLNSAQELFEYIHFGKDSSRHNEIDLILLDIMMPEIDGLEVCRRLQKEEKFKDIPIIFVTALEDANKLAEALDIGAMDYITKPINKVELLARMRVALCLKSELNWHKEQEENLRNELDLATQVQRNLLSSPLREEHIKIEASYLPSFKLAGDMYYWYKIDENRYGIILLDVMGHGVSASLVCMFISSVLRETIKCLIDPELVMKDLNKYMTLLHNENDNIPYYFTAIYLVVNTEDRTIEYVNAGHPSGYVLVDETNVVELNRGSCAVGFFDEIKVEKTVIPFEKNAQIVLFTDGVLEAIANDEFEAEEKLRTFTERKWGELEEEIEGFYKEEQKQAQSDDMCLIMIQTNAK

SEQ ID NO: 3178 - protein, 123 aa, Pseudomonas fluorescens PfO-1
MKILIVDDFSTMRRIIKNLLRDLGFTNTVEADDGTTAIPVLNSGSIDFLVTDWNMPGMTGIDLLRHVRADEKLKHLPVLMVTAEAKREQIIEAAQAGVNGYVVKPFTAQALKEKIEKIFERIG

SEQ ID NO: 3179 - protein, 323 aa, Vibrio parahaemolyticus RIMD 2210633
MKILICDDSAVARKLIARTIVQDTSLHLIEAQDGNEALKILAEQNIDVLFLDLTMPIMDGFEVLESLPVSHYPTQIVIVSGDVQQEAKQRCLELGAMDFIAKPLSEEQVIPLYERLGLHYAQRTSMELNSAQSQEELSSLAKFREIANIALGKGAAIMADHLHEFIQLPVPHVGPLSYGELHMTLVDVIGRDSSVAVSQRFVGGGIHGEALVCLRGKDINQIGERLGYLLEFTPHNEIILNVSNLLVSSFLTSLGNQLDKQFSLRQPGIVDTITPYNEEQGESGELFTIEYTYMAEALDFECEVLFLIDKPSVEIIYEIMELI

SEQ ID NO: 3180 - protein, 124 aa, Pseudomonas fluorescens
MKILIVDDFSTMRRIIKNLLRDLGFTNTVEADDGLTAIPILNSGSIDFLVTDWNMPGMTGIDLLRHVRADEKLRSLPVLMVTAEAKREQIIEAAQAGVNGYVVKPFTALALKEKIEKIFERIHG

SEQ ID NO: 3181 - protein, 148 aa, Mesorhizobium loti
MSQAGKPVTIVMIEDDEGHARLIEKNIRRAGVNNDVVAFTNGSSALAYLLGPDGSGDASVGRHLLVLLDLNLPDMTGLDILQQIKANQHLKRIPVVVLTTTDDSREIQRCYDLGANVYITKPVNYEGFANAIRQLGLLFTVIQVPETA

SEQ ID NO: 3182 - protein, 131 aa, Oryza sativa
  unsure (1)..(131): unsure at all Xaa locations
LATRISASLLSLFALPSSSPLVVVVVVGEGEMEGGRGVTRVLLVDDSPVDRRVVQLLLXXSSACAGSFHVIAVDSAKKAMEFLGLKEEGKEQXXIDMVLTDYCMPEMTGYELLKAIKALSPLKPIPVIVMX

SEQ ID NO: 3183 - protein, 277 aa, Triticum aestivum
  unsure (1)..(277): unsure at all Xaa locations
FSLASFLPLVLVGGPPPVAAGVVACVVERRGEGDGRRRXADGVTRVLLVDDSPVDRKVVELVLGSNTFAGSFHVVAVDSAKKAMEFLGLKDGKEQAVDMVLTDYCMPEMTGYDLLKAIKAMSPLKPIPVIVMSSENEPQRISRCLKAGAEDYIVKPLQSKDVPRLRSCSNVKPKDPPCSTVSKSSDHIAAVDGKSSLRRRAHLTDIAMVLHSSSAGLSHYFPFLFKFILLVYAILCVGELLHRWSNGCFLSYLRXWCRGPVTCCSSARSSSCVVAYE

SEQ ID NO: 3184 - protein, 159 aa, Triticum aestivum
  unsure (1)..(159): unsure at all Xaa locations
FSLASFLPLVLVGGPPPVAAGVVACVVERRGEGDGRRRXADGVTRVLLVDDSPVDRKVVELVLGSNTFAGSFHVVAVDSAKKAMEFLGLKDGKEQAVDMVLTDYCMPEMTGYDLLKAIKVQISLHTCPFFXIHICDVKEDVQCSQNLITNFHGHFQAMX

SEQ ID NO: 3185 - protein, 708 aa, Chloroflexus aurantiacus
SVITVWNRSQSKSGARPAGVKSFEQIAHHIEHIFAALRQNQLTLTADICDVIYQALDVIGALMEQAVPGQIDDQDALDDLLAHLMAIGQNMRDGDATSLSPSSFTPEDHTRQSAPSLAAETSVRVDVAVLDNLMSEMGELLTSTLRTRQLARDLQELARLPERWQRAWRRTAPFLRHGSSLHANGQLIPQSQQQIVIDMLRQANDVISALGTRLSQLAYQARDNHDLLADISTRMQAQVQRTRMSPLSRIVGSLRLHVRDLARSAGKEVTFVVEDSGAEADRQVLDQVYEICLHLLRNAVDHGIEPPEVRKARGKPPTGLIRLTANASSDRLNLVISDDGAGIDREDIKRHALQLGLLSQHDSEHADDAMVLDLIFTPGFSTKSHVSELSGRGVGLDVVRTTVERMGGSVTVMSVPGQDTTFTLALPLTLMRTRGLLMYVNNQVFALPVDSLRRVVQVNRTQLHTLEGRPVVLVDGRPLQLISMARLIGFSSETVIDFPGPKPALLIGSNERQIACIVDSIGEEIDLVVHRLPPPLQRVRFVSGAAILADGSVAPILDAVDLLRAALTVEHAVMLPTANPTPAHSPTILVVDDSITTRTLEKNILEAAGYRVVLATDGQEALERLHNLQNQGGCQLVLSDIDMPRLNGFDLTRQIRTDPAFRHLPVVLVTSLDSPADRERGLAAGADAYIVKRAFDQQALLETIARLL

SEQ ID NO: 3186 - protein, 234 aa, Arabidopsis thaliana
MGMAAESQFHVLAVDDSLFDRKLIERLLQKSSCQVTTVDSGSKALEFLGLRQSTDSNDPNAFSKAPVNHQVVEVNLIITDYCMPGMTGYDLLKKVKESSAFRDIPVVIMSSENVPARISRCLEEGAEEFFLKPVRLADLNKLKPHMMKTKLKNQKLEEIETTSKVENGVPTAVADPEIKDSTNIEIEILPLQQDLLLVQQEEQTLSINNKRKSVEEGISTDRARPRFDGIATAV

SEQ ID NO: 3187 - protein, 238 aa, Glycine max
MGMAAAESQFHVLAVDDSIIDRKLIERLLRTSSYQVTTVDSGSKALEFLGLRENDESNPSIPSVCPNNHQPQEVEVNLVITDYCMPGMTGYDLLKKINESSSLRNIPVVIMSSENVPSRINRCLEEGAEEFFLKPVRLSDLNKLKPHMKKTKFKDQKQETVERFEDSEVQQQQSQQQIIIQNEHHQAPKLQVLQPDIEQQQQILQQANNNNKRKTMEQGLSPETDRTRPRYSGIATVV

SEQ ID NO: 3188 - protein, 210 aa, Glycine max
  unsure (1)..(210): unsure at all Xaa locations
XGMAAEAQFHVLAVDDSLIDRMLIERLLKTSSFHVTAVDSGSKALKFLGLVEEKRNEEPPPCIALXXSHQDVDINLIITDYCMPGMTGYDLLRKIKESKSLKNIPVVIMSSENVPSRINRCLEEGAEEFFLKPVQQADVNKLRPHLMKSRAKEEQDQPFNNKRKDMEEIHSPNKTRINNNHAKGIKSTSHLCKXPEKEFHSILVIKYHFI

SEQ ID NO: 3189 - protein, 249 aa, Oryza sativa
  unsure (1)..(249): unsure at all Xaa locations
FGVTCSIIKEQAPQSLSCQAHTPSASSLLPFLLSPCSLFLLFFQSSSMAVAIEAPFHVLAVDDSLPDRKLIERLLKTSSFQVTTVDSGSKALEFLGLHDHEDSPISTXXSDQQEVGVNLIITDYCMPGMTGYDLLKKIKESSYLRDIPVVIMSSDNIPSRINRCLEEGADEFFLKPVRLSDMSKLKPHILKSRCKEHYQQEQHLQSNSESNNSSNPTSENSSSSTSTNSHKRKAVDEEILPHTIRPRHS

SEQ ID NO: 3190 - protein, 243 aa, Oryza sativa
  unsure (1)..(243): unsure at all Xaa locations
QSLSCQAHTPSASSLLPFLLSPCSLFLLVFQSSSMAVAIEAPFHVLAVDDSLPDRKLIERLLKTSSFQVTTVDSGSKALEFLGLHDHEDSPISTQSDQQVRREVGVNLIITDYCMPGMTGYDLLKKIKESSYLRDIPVVIMSSDNIPSRINRCLEEGADEVFLKPVXRLSDMSKLKPHILKSRCTEHYQREQHLQSHSESYTSSYPTGENSSSSTSTNSHNRKAGEDSLSDRKLIERLLKTSS

SEQ ID NO: 3191 - protein, 515 aa, Rhodobacter sphaeroides
MPGQRGPTCREADPEDAPVNARSLPLAETGAHGASAPVRHVLIVDDSRAQRRLVALSLARWGYRVSEAATASEALALCQGGDVDIVLSDWMMPGMSGLELCRRIRALPGEAYCYFILLTSRSGTGEVVDGLDCGADDYLVKPAAPDELRARLRAGERVLSMQAELVDKNQLLERAFSELRTIYESLDRDLIEARRLQQSFARDRSRRFGRSTVTLLLRPSGHVGGDLAGSLDLGTGRIALYSIDVSGHGVASALMTARLAGLLSGLSTDGGVARSDGACRQCAGHDSWPPEILAARLNRMMIADLGVEQYFTMAYAEIDLRSGALALVQAGHPHPVVLRAGGRVELLGQGRTARGSPPRRHLRAVGDAASAGRPALSAVGRGDGMPGSLGARAGRGRAGAPACRTCGPRIRGTDGGSRLGAPRADGRRRLPGRCLGRALRLPAVRSARPRPEAVSAGLPPEAPGRPHCRAAQAPPRPAARRRDGPVRWAGQGGGSDARDRPCRASRPRDRIPACR

SEQ ID NO: 3192 - protein, 121 aa, Synechocystis sp. PCC 6803
MKTVLVVEDTKSDQLLVQGLLKSMGTEAVICNNADEALEWLNKNTVPDLIMLDIVMPDISGYDLCRKIRGELALEDVPIVFCSTKNEDYDRFWALRQGGNAYLIKPYSPIELMKTVKPYIS

SEQ ID NO: 3193 - protein, 267 aa, Thermoanaerobacter tengcongensis
MEKGKETKDILVVDDSVLIRLMVKDILGGEGYNVVAAATSEEAVRKIKSRKELFDLIIVDINLPDQNGFEFIRNLKSEEKYRHIPVIILSIDATVPSIKRAVEAGAVDYLVKPFKAEELVKRVVKLVGSVKKEDRYPELKDLLKKEVNRARRSNTNLSLILAHCEGKIAGEISKIAGKIRSKLRDIDAVFEINENTLALVLPVTGREGAEVVVKKIQGELRGSWRYAISIYPDNGKDEEELIGFAKESLMKEESNSSQEDDKEKEEK

SEQ ID NO: 3194 - protein, 125 aa, Burkholderia fungorum
MIRHILAIDDSASMRQILAATLTTAGYEVTLAADGNEGLENALAMSFDLVLTDQYMPGKTGLDLIAALRNNPAYQATPILVLTTESGEPFKEAARAAGATGWIEKPLDPDMLTELVAALAEPDHA

SEQ ID NO: 3195 - protein, 160 aa, Pseudomonas fluorescens PfO-1
MPGDRIENVENAMSDHDILSDAEREALSAVMLEPDLPPQRVLIVDDDKDARELLSEILALDGIRCLTAASGETALKMLAEKPSIGLVITDLRMGNVDGLELIRQVRESVRAALPIIIVSGDADVKDAIAAMHLSVVDFLLKPIDTAKLLGLVRHELGIEP

SEQ ID NO: 3196 - protein, 120 aa, Desulfovibrio desulfuricans G20
MAPTIMTVDDSASVRQMVSFTLRNEGYEVIEASDGKDALAKIRPDVKMVITDLNMPNMDGIELIRNIRAKSGFKFIPIIMLTTESQAAKKQDGKAAGATGWIVKPFKPEQLLAVVKKVLR

SEQ ID NO: 3197 - protein, 292 aa, Desulfovibrio desulfuricans G20
MVEGVRGRFFRVLHIPQGFGMMNDMEALYAAQTVLIIEDSPVQSKIIRNQIMALSQFDTLAAYTLEEARALLTTHKERIFVAVIDLNLPDAPNGEGVDLCLDFGVPTVVLTATFNEDIRRRFIERNVADFFFKGTIQDMDPMVRSLERLFKNQFVKALVVEDSRMSRAHLRHLLEVQRFQVLEAADGLEAVDRLAENPDIGLIITDYNMPNMDGFELVKTVRARYKVDRIAIVGVSAAGSGSLTAQFLKNGANDFLTKPFEVEEFYWRVNQTVSVLEVMKDLRTCQDTLPEG

SEQ ID NO: 3198 - protein, 124 aa, Pseudomonas aeruginosa PAO1
MKILIVDDFSTMRRIIKNLLRDLGFTNTAEADDGTTALPMLHSGNFDFLVTDWNMPGMTGIDLLRAVRADERLKHLPVLMVTAEAKRDQIIEAAQAGVNGYVVKPFTAQVLKEKIEKIFERVNG

SEQ ID NO: 3199 - protein, 121 aa, Bacteroides thetaiotaomicron VPI-5482
MKKKILLVDDKATIGKVASIYLGKDYDVMYLENPIKAIDWLNEGNVPDLIISDIRMPLMRGDEFLRYMKANELFKSIPIVMLSSEESTTERIKLLEEGAEDYILKPFNPLELKIRIKKIID

SEQ ID NO: 3200 - protein, 137 aa, Ralstonia solanacearum
MSEKHILVVDDSTSIRRMIATCLRACGFAVTEATDGAAALEAVQRQADGSHHLVITDQVMPAMDGLTLIRALRTLPAYADTPILMLTTEADSTIRDQARAAGATGFLPKPFDPDGLTDSVMQLLEWHAQTHGSASTH

SEQ ID NO: 3201 - protein, 135 aa, Glycine max
  unsure (1)..(135): unsure at all Xaa locations
MTSFKGLVGEGSTALPHVLAVDDSSVDRAVISGILRSSKFRVTAVDSGKRALELLGSETNVSMIITDYWMPEMTGYELLKKVKGSSKLREIPVVIMSSENVPTRINRCLEEGAEDFLLKXVQPSDVSRLCSRVLR

SEQ ID NO: 3202 - protein, 206 aa, Oryza sativa (japonica cultivar-group)
MRVPAAVTGGCGCGVDGGGGCCRGGGKLADWEEGKDDEMKSVVVKGWTRMAQVVPLHDNASAEDDDDDEEDDDEDDDDDDDEDDEEEAAPPYVMAVDDSSVDRAVITALLRRSKYRDSGKRALEILGSEPNVSMIITDYWMPEMTGYDLLKKIKESSELKQIPVVIMSSENVPTRISRCLEEGAEDFLLKPVRPADISRITSRMLQ

SEQ ID NO: 3203 - protein, 248 aa, Oryza sativa
  unsure (1)..(248): unsure at all Xaa locations
VDQWRQRRXAPAAAKVVVATSPRAGGGGGGGGDRKVVPVVVAAAAGDEAQSEMHVLAVDDNSVDRAVIAKILRSSKYRVTTVESATRAFELLCLGLVPNVNMIITDYWMPGMTGYELLKRVKESSQLKEIPVVIMSSENVPNRISRCLEEGAEDFLLKPTEIERTGDSDSLREKPNQTHRSRVRGELMAEAVCRYETATGARNTARVGRVACVRECVAARVGTRRDRIPCVLGVLNYGVRGSGSSDVN

SEQ ID NO: 3204 - protein, 204 aa, Triticum aestivum
MHQQVNPSDEFFAVPYFCSCCSGEFDLLMAAAAPTQAPAMTLPAAMAAKVAPSPKPAPAGDRKVVPVMTDADEVVVQVQVQAELHVLAVDDSVVDRAVIAKILRSSKYRVTTVDSATRALELLGLGLITDVNMIITDYWMPGMTGYELLKRVKESSELREIPVVIMSSENVPNRITRCLEEGAEDFLLKPVRPSDVSRLCNRIR

SEQ ID NO: 3205 - protein, 618 aa, Arabidopsis thaliana
MDLNGECKGGDGFIDRSRVRILLCDNDSTSLGEVFTLLSECSYQVTAVKSARQVIDALNAEGPDIDIILAEIDLPMAKGMKMLRYITRDKDLRRIPVIMMSRQDEVPVVVKCLKLGAADYLVKPLRTNELLNLWTHMWRRRRMLGLAEKNMLSYDFDLVGSDQSDPNTNSTNLFSDDTDDRSLRSTNPQRGNLSHQENEWSVATAPVHARDGGLGADGTATSSLAVTAIEPPLDHLAGSHHEPMKRNSNPAQFSSAPKKSRLKIGESSAFFTYVKSTVLRTNGQDPPLVDGNGSLHLHRGLAEKFQVVASEGINNTKQARRATPKSTVLRTNGQDPPLVNGNGSHHLHRGAAEKFQVVASEGINNTKQAHRSRGTEQYHSQGETLQNGASYPHSLERSRTLPTSMESHGRNYQEGNMNIPQVAMNRSKDSSQVDGSGFSAPNAYPYYMHGVMNQVMMQSAAMMPQYGHQIPHCQPNHPNGMTGYPYYHHPMNTSLQHSQMSLQNGQMSMVHHSWSPAGNPPSNEVRVNKLDRREEALLKFRRKRNQRCFDKKIRYVNRKRLAERRPRVKGQFVRKMNGVNVDLNGQPDSADYDDEEEEEEEEEEENRDSSPQDDALGT

SEQ ID NO: 3206 - protein, 618 aa, Arabidopsis thaliana
MDLNGECKGGDGFIDRSRVRILLCDNDSTSLGEVFTLLSECSYQVTAVKSARQVIDALNAEGPDIDIILAEIDLPMAKGMKMLRYITRDKDLRRIPVIMMSRQDEVPVVVKCLKLGAADYLVKPLLTNELLNLWTHMWRRRRMLGLAEKNMLSYDFDLVGSDQSDPNTNSTNLFSDDTDDRSLRSTNPQRGNLSHQENEWSVATAPVHARDGGLGADGTATSSLAVTAIEPPLDHLAGSHHEPMKRNSNPAQFSSAPKKSRLKIGESSAFFTYVKSTVLRTNGQDPPLVDGNGSLHLHRGLAEKFQVVASEGINNTKQARRATPKSTVLRTNGQDPPLVNGNGSHHLHRGAAEKFQVVASEGINNTKQAHRSRGTEQYHSQGETLQNGASYPHSLERSRTLPTSMESHGRNYQEGNMNIPQVAMNRSKDSSQVDGSGFSAPNAYPYYMHGVMNQVMMQSAAMMPQYGHQIPHCQPNHPNGMTGYPYYHHPMNTSLQHSQMSLQNGQMSMVHHSWSPAGNPPSNEVRVNKLDRREEALLKFRRKRNQRCFDKKIRYVNRKRLAERRPRVKGQFVRKMNGVNVDLNGQPDSADYDDEEEEEEEEEEENRDSSPQDDALGT

SEQ ID NO: 3207 - protein, 121 aa, Glycine max
  unsure (1)..(121): unsure at all Xaa locations
XMLKYIARDKEFRRIPVIMMPAQDEVSIVVKCLRLGAADYLVKPLRTNELLNLWTHMWRRRRMLGLVEKNILNYDFDLVVSDPSDANTXSTTLFSDDTDDKSKRSTNPEAGISVQQEQEST

SEQ ID NO: 3208 - protein, 514 aa, Oryza sativa
  unsure (1)..(514): unsure at all Xaa locations
XVRILLCDSDPSSSREVLRLLCNCSYQVTCAKSPRQVINVLNCEAGEIDIILAEVDLPVSKCFKARGLVPRSARGRHIPIIMMSNRDEVSVVVKCLRLGAAEYLVKPLRMNELLNLWTHVWRRRRMLGLSEKNFFNDNFELALSEPSDANTNSTTLLSDDTDDKPKENINQETSTSNQHEYESNPSDAEPKQKGTPEGLLVSTEGGDQASSPGVMFSRPIKTNLRVAESSAFLAYVKSSTPTTSSFDSELQKGGNRLDYHRGNFSSTTDRSDTGTDVNIRDKEAFEMPVQYPVVCFSSSNLHLERSNEGQNDASGTPPVYHFPFYYPGMMDHGMTHPPVQNFQGNINNAQVHTPQTLLPQYNVYPQXXHGVXXMMPPFQYNPAGMSIQSNQLPTQNMWPQASSTPMPEETCSRSERRAAALAKFRLKRKERCFDKKVRYVNRKKLAETRPRVRGQFVRQANYTDITSTGDDISEDEDDDPSSREVEMVSSPEXFERFSYMXNRVQMITAHFATH

SEQ ID NO: 3209 - protein, 377 aa, Oryza sativa
  unsure (1)..(377): unsure at all Xaa locations
MGLSCSQLLPIGLDRELFLVSSLKGNILVAVTLKIFYSSAQPPPYRHAAHQGLYYVKTTTTVARLPGVRSLAPSSRAWRLPYRTATAPPRPPPLIASAIKIFPCQSRRRQLLLAAVLFVLIRTRRQLVTRGGQQFVDRSKVRILLCDSDPSSSREVLRLLCNCSYQVTCAKSPRQVINVLNCEAGEIDIILAEVDLPVSKCFKMLKYIARNKELRHIPIIMMSNRDEVSVVVKCLRLGAAEYLVKPLRMNELLNLWTHVWRRRRMLGLSEKNFFNDNFELALSEPSDANTNSTTLLSDDTDDKPKENINQETSTSNQHEYESNPSDAEPKQKGTPEGLPLVSTVHCSASSIPHRRXHLLQSLPKPRATPPPPASLIX

SEQ ID NO: 3210 - protein, 198 aa, Oryza sativa
  unsure (1)..(198): unsure at all Xaa locations
MVGAGEGDRVGGGAAVGGGQQFVDRSKVRILLCDSDPSSSREVLRLLCNCSYQVTCAKSPRQVINVLNCEAGEIDIILAEVDLPVSKCFKMLKYIARNKELRHIPIIMMSNRDEVSVVVKCLRLGAAEYLVKPLRMNELLNLWTHVWRRRRMLGLSEKNFFNDNFELALSEPSSPAIASATIITEAKSDAATTGITDX

SEQ ID NO: 3211 - protein, 267 aa, Triticum aestivum
  unsure (1)..(267): unsure at all Xaa locations
MVGAGEGVRAGGSGAGVGAGAGAGQPFVDRSKVRILLCDSDPDSSQDVLRLLCNCSYQVTCAKSPRQVINVLNCEGAEIDIILAEVDLPVSKCFKLLKYIGRNKELRHIPIIMMSNRDEVSVVVKCLRLGAAEYLVKPLRMNEXLLNLWTHVLRRKQMLCFGPEKLLDXQFRLVRVEPSDANANSTTLLSDETDDKPKGNRNHETNISSQHEYESPAMDPPKHMTDKLENLPSIAEDDDKASSPGGMFSRPIKTNLRIAESSAFLAY

SEQ ID NO: 3212 - protein, 251 aa, Triticum aestivum
  unsure (1)..(251): unsure at all Xaa locations
YRAQPTGGQPSSSVLRNSRGPELTGGLQRPHAWCRKHDASYHATFAQPPRPATSVLYCCGACXVIILPEVDPPVSLGFKVLEDVGSNGGLRHSVGVRAAERDAVSVGGKCLRLRAEEYLVNSXLRMNELLNLWTHVWRRKRMLGLAEKNFFIDNLELVLSEPSDANTNSTTLLSDETDDKPKGNRNHETNISSQHEYESPAMDPPKHMTDKLENLPSIAEDDDKASSPGGMFSRPIKTNLRIAESSAFLAY

SEQ ID NO: 3213 - protein, 168 aa, Triticum aestivum
  unsure (1)..(168): unsure at all Xaa locations
XFSSKFPRYHKHCSSSYTXPTMLHQSNVYHQSHGASMQSYQYSPAGMNVHSSHLSTRKCXWSSVSSTPIPEERHSRSGRRAAALAKFRQKRKDRCFDKKVRYVNRKKVAETRPRVRGQFVRQASNTDIISTGDDISEYEDDDPSSRDVELVSSPEXLKGHIICGVVCG

SEQ ID NO: 3214 - protein, 117 aa, Triticum aestivum
  unsure (1)..(117): unsure at all Xaa locations
XSFQFNPAGMNMHSSHLPTQMCGHRHQAHQXAXGNMQSLXKGAAALAKFRQKRKERCFDKKVRYVNRKKLAETRAXVRGQFVRQASNTDITSTGDYISEDEDDDPSSREVDIVSSPE

SEQ ID NO: 3215 - protein, 91 aa, Triticum aestivum
  unsure (1)..(91): unsure at all Xaa locations
LEVYKCFRMLKYIVRNNELRHISINMMSNIDDVSVGLKCLRHGAAVXLVKPLRMTHLLELWTHVWPVRQQLGXVHKDFVNVNRDLGLSVTN

SEQ ID NO: 3216 - protein, 329 aa, Oryza sativa
MAASAAAAAAVSQALRDRDVLDAVGTSAAALSLAGSSFIVLCYLLFRELRKFSFKLVYFLAVSDMFCSLFTIMGGPSNAFYCFAHDYSAHFFCVASFLWTTTIAFTLHRTVVKHKTDVEEFGSIFHLYVWGTSLATTVLRSIGSDYGRPGTWCWIQQGSMGKALHLVTFYLPLWGAILYNGYTYFQVNRMINNATRMAVGISDRSIQSDVRADKKAFNRWGYYPLILIGSWAFATINRVHDFANPGHKIFWLSILDVGFAGLMGLFNSIAYGLNSSVRRAIAERLDMFLFPELSRYLPERFKRSLPTLTRFKSQQENELTSLIVDASNT

SEQ ID NO: 3217 - protein, 159 aa, Oryza sativa
YSAHFFCVASFLWTTTIAFTLHRTVVKHKTDVEEFGSIFHLYVWGTSLATTVLRSIGSDYGRPGTWCWIQQGSMGKALHLVTFYLPLWGAILYNGYTYFQVNRMINNATRMAVGISDRSIQSDVRADKKAFNRWGYYPLILIGSWAFATINRVHDFANP

SEQ ID NO: 3218 - protein, 485 aa, Arabidopsis thaliana
MTLSIVSFPICGRFTLIWFLTALVSVSCNPGVFNVKYRYPRLQGSLTALKEHDDRRQLTILAGIDLPLGGTGRPDIPGLYYAKIGIGTPAKSYYVQVDTGSDIMWVNCIQCKQCPRRSTLGIELTLYNIDESDSGKLVSCDDDFCYQISGGPLSGCKANMSCPYLEIYGDGSSTAGYFVKDVVQYDSVAGDLKTQTANGSVIFGCGARQSGDLDSSNEEALDGILGFGKANSSMISQLASSGRVKKIFAHCLDGRNGGGIFAIGRVVQPKVNMTPLVPNQPHYNVNMTAVQVGQEFLTIPADLFQPGDRKGAIIDSGTTLAYLPEIIYEPLVKKITSQEPALKVHIVDKDYKCFQYSGRVDEGFPNVTFHFENSVFLRVYPHDYLFPHEGMWCIGWQNSAMQSRDRRNMTLLGDLVLSNKLVLYDLENQLIGWTEYNCSSSIKVKDEGTGTVHLVGSHFISSALPLDTSMCLLFSLLLLMTLFLL

SEQ ID NO: 3219 - protein, 488 aa, Arabidopsis thaliana
MDLRRRQWFLSAILLSAALLIDPQFSTAATASENLVFEVRSKFAGKRVKDLGALRAHDVHRHSRLLSAIDIPLGGDSQPESIGLYFAKIGLGTPSRDFHVQVDTGSDILWVNCAGCIRCPRKSDLVELTPYDVDASSTAKSVSCSDNFCSYVNQRSECHSGSTCQYVIMYGDGSSTNGYLVKDVVHLDLVTGNRQTGSTNGTIIFGCGSKQSGQLGESQAAVDGIMGFGQSNSSFISQLASQGKVKRSFAHCLDNNNGGGIFAIGEVVSPKVKTTPMLSKSAHYSVNLNAIEVGNSVLELSSNAFDSGDDKGVIIDSGTTLVYLPDAVYNPLLNEILASHPELTLHTVQESFTCFHYTDKLDRFPTVTFQFDKSVSLAVYPREYLFQVREDTWCFGWQNGGLQTKGGASLTILGDMALSNKLVVYDIENQVIGWTNHNCSGGIQVKDEESGAIYTVGAHNLSWSSSLAITKLLTLVSLLIPFFCNVAL

SEQ ID NO: 3220 - protein, 478 aa, Arabidopsis thaliana
MDPSRISRIVAVVFVLVIQVVSGNFVFNVTHKFAGKEKQLSELKSHDSFRHARMLANIDLPLGGDSRADSIGLYFTKIKLGSPPKEYYVQVDTGSDILWVNCAPCPKCPVKTDLGIPLSLYDSKTSSTSKNVGCEDDFCSFIMQSETCGAKKPCSYHVVYGDGSTSDGDFIKDNITLEQVTGNLRTAPLAQEVVFGCGKNQSGQLGQTDSAVDGIMGFGQSNTSIISQLAAGGSTKRIFSHCLDNMNGGGIFAVGEVESPVVKTTPIVPNQVHYNVILKGMDVDGDPIDLPPSLASTNGDGGTIIDSGTTLAYLPQNLYNSLIEKITAKQQVKLHMVQETFACFSFTSNTDKAFPVVNLHFEDSLKLSVYPHDYLFSLREDMYCFGWQSGGMTTQDGADVILLGDLVLSNKLVVYDLENEVIGWADHNCSSSIKVKDGSGAAYQLGAENLISAASSVMNGTLVTLLSILIWVFHSFTS

SEQ ID NO: 3221 - protein, 475 aa, Arabidopsis thaliana
MELRRKLCIVVAVFVIVIEFASANFVFKAQHKFAGKKKNLEHFKSHDTRRHSRMLASIDLPLGGDSRVDSVGLYFTKIKLGSPPKEYHVQVDTGSDILWINCKPCPKCPTKTNLNFRLSLFDMNASSTSKKVGCDDDFCSFISQSDSCQPALGCSYHIVYADESTSDGKFIRDMLTLEQVTGDLKTGPLGQEVVFGCGSDQSGQLGNGDSAVDGVMGFGQSNTSVLSQLAATGDAKRVFSHCLDNVKGGGIFAVGVVDSPKVKTTPMVPNQMHYNVMLMGMDVDGTSLDLPRSIVRNGGTIVDSGTTLAYFPKVLYDSLIETILARQPVKLHIVEETFQCFSFSTNVDEAFPPVSFEFEDSVKLTVYPHDYLFTLEEELYCFGWQAGGLTTDERSEVILLGDLVLSNKLVVYDLDNEVIGWADHNCSSSIKIKDGSGGVYSVGADNLSSAPRLLMITKLLTILSPLIVMAFTSLA

SEQ ID NO: 3222 - protein, 388 aa, Arabidopsis thaliana
MTLSIVSFPICGRFTLIWFLTALVSVSCNPGVFNVKYRYPRLQGSLTALKEHDDRRQLTILAGIDLPLGGTGRPDIPGLYYAKIGIGTPAKSYYVQVDTGSDIMWVNCIQCKQCPRRSTLGIELTLYNIDESDSGKLVSCDDDFCYQISGGPLSGCKANMSCPYLEIYGDGSSTAGYFVKDVVQYDSVAGDLKTQTANGSVIFGCGARQSGDLDSSNEEALDGILGFGKANSSMISQLASSGRVKKIFAHCLDGRNGGGIFAIGRVVQPKVNMTPLVPNQPHYNVNMTAVQVGQEFLTIPADLFQPGDRKGAIIDSGTTLAYLPEIIYEPLVKKEPALKVHIVDKDYKCFQYSGRVDEGFPNVTFHFENSVFLRVYPHDYLFPHAHQA

SEQ ID NO: 3223 - protein, 449 aa, Arabidopsis thaliana
MELRRKLCIVVAVFVIVIEFASANFVFKAQHKFAGKKKNLEHFKSHDTRRHSRMLASIDLPLGGDSRVDSVGLYFTKIKLGSPPKEYHVQVDTGSDILWINCKPCPKCPTKTNLNFRLSLFDMNASSTSKKVGCDDDFCSFISQSDSCQPALGCSYHIVYADESTSDGKFIRDMLTLEQVTGDLKTGPLGQEVVFGCGSDQSGQLGNGDSAVDGVMGFGQSNTSVLSQLAATGDAKRVFSHCLDNVKGGGIFAVGVVDSPKVKTTPMVPNQMHYNVMLMGMDVDGTSLDLPRSIVRNGGTIVDSGTTLAYFPKVLYDSLIETILARQPVKLHIVEETFQCFSFSTNVDEAFPPVSFEFEDSVKLTVYPHDYLFTLEEELYCFGWQAGGLTTDERSEVILLGDLVLSNKLVVYDLDNEVIGWADHNFFFYRSYTTIYRHLHICYRGWERR

SEQ ID NO: 3224 - protein, 320 aa, Arabidopsis thaliana
MYGDGSSTNGYLVKDVVHLDLVTGNRQTGSTNGTIIFGCGSKQSGQLGESQAAVDGIMGFGQSNSSFISQLASQGKVKRSFAHCLDNNNGGGIFAIGEVVSPKVKTTPMLSKSAHYSVNLNAIEVGNSVLELSSNAFDSGDDKGVIIDSGTTLVYLPDAVYNPLLNEILASHPELTLHTVQESFTCFHYTDKLDRFPTVTFQFDKSVSLAVYPREYLFQVREDTWCFGWQNGGLQTKGGASLTILGDMALSNKLVVYDIENQVIGWTNHNCSGGIQVKDEESGAIYTVGAHNLSWSSSLAITKLLTLVSLLIPFFCNVAL

SEQ ID NO: 3225 - protein, 537 aa, Glycine max
  unsure (1)..(537): unsure at all Xaa locations
PFLYYNRPNTTTAPIQLYFIPKHQSGNLHYSSIESTLSCAGSLLLLLLSPXATELMDPRGVLILVAVLVAEIGSVANGNLVFPVERRKRSLSAVRAHDVRRRGRILSAVDLNLGGNGLPTETGLYFTKLGLGSPPRDYYVQVDTGSDILWVNCVECSRCPRKSDLGIDLTLYDPKGSETSEVVSCDQDFCSATFDGPIPGCKSEIPCPYSITYGDGSATTGYYVQDYLTYNHVNGNLRTAPQNSSIIFGCGAVQSGTLSSSSEEALDGIIGFGQSNSSVLSQLAASGKVKKIFSHCLDNIRGGGIFAIGEVVEPKVSTTPLVPRMAHYNVVLKSIEVDTDILQLPSDIFDSGNGKGTIIDSGTTLAYLPAIVYDELIPKVMARQPRLKLYLVEQQFSCFQYTGNVDRGFPVVKLHFEDSLSLTVYPHDYLFQFKDGIWCIGWQKSVAQTKNGKDMTLLGDLVLSNKLVIYDLENMAIGWTDYNCSSSIKVKDEATGIVHTVVAHNISSASTLFIGRILTFFLLLTAMLNNXINLVLI

SEQ ID NO: 3226 - protein, 537 aa, Glycine max
  unsure (1)..(537): unsure at all Xaa locations
PFLYYNRPNTTTAPIQLYFIPKHQSGNLHYSSIESTLSCAGSLLLLLLSPXATELMDPRGVLILVAVLVAEIGSVANGNLVFPVERRKRSLSAVRAHDVRRRGRILSAVDLNLGGNGLPTETGLYFTKLGLGSPPRDYYVQVDTGSDILWVNCVECSRCPRKSDLGIDLTLYDPKGSETSEVVSCDQDFCSATFDGPIPGCKSEIPCPYSITYGDGSATTGYYVQDYLTYNRINGNLRTSPQNSSIIFGCGAVQSGTLGSSSEEALDGIIGFGQANSSVLSQLAASGKVKKIFSHCLDNVRGGGIFAIGEVVEPKISTTPLVPRMAHYNVVLKSIEVDTDILQLPSDIFDSVNGKGTVIDSGTTLAYLPAIVYDELIQKVLARQPGLKLYLVEQQFRCFLYTGNVDRGFPVVKLHFKDSLSLTVYPHDYLFQFKDGIWCIGWQRSVAQTKNGKDMTLLGDLVLSNKLVIYDLENMVIGWTDYNCSSSIKVKDEATGIVHTVVAHNISSASTLFIGRILTFFLLLTAMLNNXINLVLI

SEQ ID NO: 3227 - protein, 489 aa, Glycine max
  unsure (1)..(489): unsure at all Xaa locations
MEMLRRSSRRIFVSACVWLLLSLSPSPPSVVNASHGVFNVKCKYQDXXSLSALKAHDYRRQLSLLAGVDLPLGGSGRPDAVGLYYAKIGIGTPPKNYYLQVDTGSDIMWVNCIQCKECPTRSSLGMDLTLYDIKESSSGKLVPCDQEFCKEINGGLLTGCTANISCPYLEIYGDGSSTAGYFVKDIVLYDQVSGDLKTDSANGSIVFGCGARQSGDLSSSNEEALDGILGFGKANSSMISQLASSGKVKKMFAHCLNGVNGGGIFAIGHVVQPKVNMTPLLPDQPHYSVNMTAVQVGHTFLSLSTDTSAQGDRKGTIIDSGTTLAYLPEGIYEPLVYKMISQHPDLKVQTLHDEYTCFQYSESVDDGFPAVTFFFENGLSLKVYPHDYLFPSGDFWCIGWQNSGTQSRDSKNMTLLGDLVLSNKLVFYDLENQAIGWAEYNCSSSIKVRDERTGTVHLVGSHYISFACVFNINWVVILSLLALLHKLIY

SEQ ID NO: 3228 - protein, 493 aa, Glycine max
  unsure (1)..(493): unsure at all Xaa locations
MDLRESLVLLLVGSFVVVQLCCHANANLVFPVVRKFKGPAENLAAIKAHDAGRRGRFLSVVDLALGGNGRPTSTGLYYTKIGLGPKDYYVQVDTGSDTLWVNCVGCTTCPKKSGLGMDLTLYDPNSSKTSKAVPCDDEFCTSTYDGPISGCTKGMSCPYSITYGDGSTTSGSYIKDDLTFDRVVGDLRTVPDNTSVIFGCGSKQSGTLSSTTDTSLDGIIGFGQANSSVLSQLAAAGKVKRIFSHCLDSISGGGIFAIGEVVQPKVKTTPLLQGMAHYNVVLKDIEVAGDPIQLPSDILDSSSGRGTIIDSGTTLAYLPVSIYDQLLERTXLAQRSGMELYLVEDQFTCFHYSDEVDDAFPTVKFTFEEGLTLTAYPHDYLFPFKEDMWCIGWQKSTAQTKDGKDLILLGDLVLTNKLFIYDLDNMSIGWPDYNCSSSIKLKDNKTGTVYTRGAQDLSSASTVLIGKILTFFVLLITMLSTXLNDIIVSRDGI

SEQ ID NO: 3229 - protein, 563 aa, Glycine max
  unsure (1)..(563): unsure at all Xaa locations
VETAKIPSFLSFSFTRLCFTKRLRFIFVFVSSPFPLLCFHRPLFSIWVGKWFSISVSVLFLHCCFLSKLAQPEMDLRESLVLLLVGSFVVQFCCNANANLVFPVVRKFKGPVENLAAIKAHDAGRRGRFLSVVDLALGGNGRPTSTGLYYTKIGLGXNDYYVQVDTGSDTLWVNCVGCTACPKKSGLGMDLTLYDPNSSKTSKAVPCDDEFCTSTYDGPISGCKKDMSCPYSITYGDGSTTSGSYIKDDLTFDRVVGDLRTVPDNTSVIFGCGSKQSGTLSSTTDTSLDGIIGFGQANSSVLSQLAAAGKVKRVFSHCLDTVNGGGIFAIGEVVQPKVKTTPLVPRMAHYNVVLKDIEVAGDPIQLPTDIFDSTSGRGTIIDSGTTLAYLPVSIYDQLLEKTLAQRSGMELYLVEDQFTCFHYSDEIDDAFPTVKFTFEEGLTLTAYPHDYLFPFEDMWCIGWQKSTAQTKDGKDLILLGDLVLTNKLFIYDLDNMSIGWTDYNCSSSIKLKDNKTGTVYTRGAQDLSSASTVLIGKILTFFVLLITMLSTXLNDIIVSRDGI

SEQ ID NO: 3230 - protein, 438 aa, Glycine max
  unsure (1)..(438): unsure at all Xaa locations
XKAHDYRRQLSLLSGVDLPLGGSGXPDAVGLYYAKIGIGTPPKNYYXLQVDTGSDIMWVNCIQCKEXPTRSNLGMDLTLYDIKESSSGKFVPCDQEFCKEINGGLLTGCTXNISCPYLEIYGDGSSTXGYFVKDIVLYDQVSGDLKTDSANGSIVFGCGARQSGDLSSSNEEALGGILGFGKANSSMISQLASSGKVKKMFAHCLNGVNGGGIFAIGHVVQPKVNMTPLLPDQPHYSVNMTAVQVGHAFLSLSTDTSTQGDRKGTIIDSGTTLAYLPEGIYEPLVYKIISQHPDLKVRTLHDEYTCFQYSESVDDGFPAVTFYFENGLSLKVYPHDYLFPSGDFWCIGWQNSGTQSRDSKNMTLLGDLVLSNKLVFYDLENQVIGWTEYNCSSSIKVRDERTGTVHLVGFHYISFACGLNINLVMILSLLALLHKWVY

SEQ ID NO: 3231 - protein, 483 aa, Glycine max
  unsure (1)..(483): unsure at all Xaa locations
LVVSLFVVVQLCCHANANMVFPVVRKFKGPAENLAAIKAHDAGRRGRFLSVVDLALGGNGRPTSTGLYYTKIGLGXNDYYVQVDTGSDTLWVNCVGCTTCPKKSGLGMELTLYDPNSSKTSKVVPCDDEFCTSTYDGPISGCKKDMSCPYSITYGDGSTTSGSYIKDDLTFDRVVGDLRTVPDNTSVIFGCGSKQSGTLSSTTDTSLDGIIGFGQANSSVLSQLAAAGKVKRVFSHCLDTVNGGGIFAIGEVVQPKVKTTPLVPRMAHYNVVLKDIEVAGDPIQLPTDIFDSTSGRGTIIDSGTTLAYLPVSIYDQLLEKTLAQRSGMELYLVEDQFTCFHYSDEIDDAFPTVKFTFEEGLTLTAYPHDYLFPFEDMWCIGWQKXSTAQTKDGKDLILLGDLVLTNKLFIYDLDNMSIGWTDYNCSSSIKLKDNKTGTVYTRGAQDLSSASTVLIGKILTFFVLLITMLSTXLNDIIVSRDGI

SEQ ID NO: 3232 - protein, 419 aa, Glycine max
  unsure (1)..(419): unsure at all Xaa locations
CYVVGLYFTKLGXGSPPKDYYVQVDTGSDILWVNCVKCSRCPRKSDLGIDLTLYDPKGSETSELISCDQEFCSATYDGPIPGCKSEIPCPYSITYGDGSATTGYYVQDYLTYNHVNDNLRTAPQNSSIIFGCGAVQSGTLSSSSEEALDGIIGFGQSNSSVLSQLAASGKVKKIFSHCLDNIRGGGIFAIXEVVEPKVSTTPLVPRMAHYNVVLKSIEVDTDILQLPSDICDSGNGNGTIIDSGTSLAYLAGILYDELIPKVMGRQPRLKXYLVSNNXXLFQYTGNVDRGFPVVKLHFEDSLSLTVYPHDYLFQFKDGIWCIGWQKSVAQTKNGKDMTLLGDLVLSNKLVIYDLENMAIGWTDYNCSSSIKVKDEATGIVHTVGAHNISSATTLFMGRILTFFLLLTTMLNNXINLVLI

SEQ ID NO: 3233 - protein, 538 aa, Glycine max
  unsure (1)..(538): unsure at all Xaa locations
FGSSHTRAARVDPYFPSPTAFVESSPNLPTPTPSLSLSRLHQTNKLHSSREDDDDGDATQKQQKNLRLRVCVVASVTVTVTAQCCSSHGVFNVKCKYXXDRSLSALKAHDYRRQLSLLAGVDLPLGGSGRPDAVGLYYAKIGIGTPPKNYYLQVDTGSDIIWVNCIQCKECPTRINLGMDLTLYDINYXPYRKIYPCDRATCGYFVEDIVLCDQVYGDFKTDSANGSIVFGCGARQSGDLSSSNEEALGGILGFGKANSSMISHLASSGKXKRCLLHCLNGVNGGGIFAIGHVVQPKVNMTPLLPDQPHYSVNMTAVQVGHTFLSLSTDTSAQGDRKGTIIDSGTTLAYLPEGINVSLIYMMISQQDLKVQTLHDEYTCFQYSESVDDGFPAVTFFFENGLSLKVYPHDYLFPSGDFWCIGWQNSGTQSRDSKNMTLLGDLVLSNKLVFYDLENQAIGWAEYNCSSIIKVRDERTGTVHLVGSHYISSAXXVFNINWVMILSLLVYFINXFIEMEQQIHIPKSKLWSKKEDKKCYVRN

SEQ ID NO: 3234 - protein, 539 aa, Glycine max
  unsure (1)..(539): unsure at all Xaa locations
PFLYYNRPNTTTAPIQLYFIPKHQSGNLHYSSIESTLSCAGSLLLLLLSPXATELMDPRGVLILVAVLVAEIGSVANGNLVFPVERRKRSLSAVRAHDVRRRGRILSAVDLNLGGNGLPTETGLYFTKLGLGSPPRDYYVQVDTGSDILWVNCVECSRCPRKRDLGIDLTLYDPKWSDTSKLVSCDQEFCSFTFDGPISGCKSEFLCPYSITYVDGSLTTGYYVGDFVTYNRMEPKVSTTPLVPRMAHYNVVLKSIEVDTDILQLPSDIFDSGNGKGTIIDKWNNLGXNLTAIVYDELIPMLIGRQPRLRLFLEQQLSXMLAVXPGIAHYSVVLMNIDFDTDILQLPSDIFDSVNGKGTVIDSGTTLAYLPAIVYDELIQKVLARQPGLKLYLVEQQFRCFLYTGNVDRGFPVVKLHFKDSLSLTVYPHDYLFQFKDGIWCIGWQRSVAQTKNGKDMTLLGDLVLSNKLVIYDLENMVIGWTDYNCSSSIKVKDEATGIVHTVVAHNISSASTLFIGRILTFFLLLTAMLNNXINLVLI

SEQ ID NO: 3235 - protein, 492 aa, Dictyostelium discoideum
MKLSNILLVIFLLSINIIKGSTTELNSNNLNIDDIEHDQDGDFGIDLPLTIESRYSVEFDRNIENGMMTLKPTQPSNYKRNPLSKNIDIDMQGNFYQINVNVLIGQQKFILQVDTGSTLTAIPLKGCNSCKDNRPVYDPALSSSSQLIPCSSDKCLGSGSASPSCKLHQNAKSTCDFIILYGDGSKIKGKVFSDEITVSGVSSTIYFGANVEEVGAFEYPRADGIMGLGRTSNNKNLVPTIFDSMVRSNSSIKNIFGIYLDYHGQGYLSLGKINHHYYIGSIQYTPIQPAGPFYAIKPTSFRVDNTSFPANSMGQVIVDSGTSDLILTSRVYDHLIQYFRKHYCHIDMVCSYPSIFSSRVCFEKEEDFATFPWLHFGFEGGVRIAIPPKNYMIKTESNQQGVYGYCWGIDRGDDMTILGDVFMRGYYTIFDNIENRVGFAIGKNSKNSNVGDITDINQFDSTYYRNDGNKNNFNYLSFSFISIILIINLILL

SEQ ID NO: 3236 - protein, 410 aa, Hordeum vulgare
MAAMWSPIIGLLLLLLPLGPSSAIKFPLEGNVYPVGHFYATLNIGEPAKPYFLDVDTGSNLTWLECHHPVHGCKGCHPRPPHPYYTPADGNLKVVCGSPLCVAVRRDVPGIPECSRNDPHRCHYEIQYVTGKSEGDLATDIISVNGRDKKRIAFGCGYKQEEPADSPPSPVDGILGLGMGKAGFAAQLKGHKMIKENVIGHCLSSKGKGVLYVGDFNPPTRGVTWAPMRESLFYYSPGLAEVFIDKQPIRGNPTFEAVFDSGSTYTHVPAQIYNEIVSKVRGTLSESSLEEVKGRALPLCWKGKKPFGSVNDVKNQFKALSLKITHARGTNNLDIPPQNYLFVKEDGETCLAILDASLDPVLKELNFILIGAVTMQDLFVIYDNEKKQLGWVRAQCDRVQELESVIDSRL

SEQ ID NO: 3237 - protein, 410 aa, Hordeum vulgare
MAAMWSPIIGLLLLLLPLGPSSAINFPLEGNVYPVGHFYATLNIGEPAKPYFLDVDTGSNLTWLECHPPVHGCKGCHPRPPHPYYTPADGKLKVVCGSPLCVAVRRDVPGIPECSRNDPHRCHYEIQYVTGKSEGDLATDIISVNGRDKKRIAFGCGYKQEEPPDSPPSPVNGILGLGMGKAGFAAQLKGLKMIKENVIGHCLSSKGKGVLYVGDFNPPTRGVTWAPMRESLFYYSPGLAEVFIDKQPIRGNPTFEAVFDSGSTYTHVPAQIYNEIVSKVRGTFSESSLEEVKGRALPLCWKGKKPFGSVNDVKNQFKALSLKITHARGTNNLDIPPQNYLFVKEDGETCLAILDASLDPVLKELNFILIGAVTMQDLFVIYDNEKKQLGWVRAQCDRVQELESVIDSRL

SEQ ID NO: 3238 - protein, 289 aa, Oryza sativa
  unsure (1)..(289): unsure at all Xaa locations
MDRPPAPAPAVALLLVVVVVAAAVMLAAVEGAGAEATGVFHVRRSLPAGGAGAAAEAYRAHDGSRRGRLLGXAADIPLGGLGLPTDTGLYYTEIGIGTPTKRYYVQVDTGSDILWVNCISCDRCPRKSGLGLELTLYDPKDSSTGSKVSCDQGFCAATYGGLLPGCTTSLPCEYSVTYGDGSSTTGYFVSDLLQFDQVSGDGQTRPANSTVTFGCGSQQGGDLGSSNQALDGIIGFGQSNTSMLSQLSAAGKVKKIFAHCLDTINGGGIFAIGNVVQPKVKTTPLVPNX

SEQ ID NO: 3239 - protein, 378 aa, Oryza sativa
  unsure (1)..(378): unsure at all Xaa locations
NSIKYKKGRDSTYFAEEMAAPLLLSTIILALVVVASSTHGTMANGVFQVRRKFHIVDGVYKGSDIGALQTHDENRHRRRNLMAAELPLGGFNIPYGTGLYYTDIGIGTPPVKYYVQLDTGSKAFWVNGISCKQCPHESDILRKLTFYDPRSSVSSKEVKCDDTICTXXRPPCNMTLRCPYIPGYADGGLTMGILFPDLLPYHQLYGNGQTQPTSPRVPFGCGLQQSGSLNNSAVAIDGIIGFGNSNQTALSQLAAAGKTKKIFSHCLDSTNGGGIFAIGEVVEPKVKTTPIVKNNEVYHLVNLKSINVAGTTLQLPANIFGTTKTKGTFIDSGSTLVYLPEIIYSELILAVWQKYCYSFLVVELFAITFTYNSQPIAX

SEQ ID NO: 3240 - protein, 243 aa, Oryza sativa
MDRPPAPAPAVALLLVVVVVAAAVMLAAVEGAGAEATGVFHVRRSLPAGGAGAAAEAYRAHDGSRRGRLLAAADIPLGGLGLPTDTGLYYTEIGIGTPTKRYYVQVDTGSDILWVNCISCDRCPRKSGLGLELTLYDPKDSSTGSKVSCDQGFCAATYGGLLPGCTTSLPCEYSVTYGDGSSTTGYFVSDLLQFDQVSGDGQTRPANSTVTFGCGSQQGKVKKIFAHCLDTINGGGIFAIGNV

SEQ ID NO: 3241 - protein, 276 aa, Triticum aestivum
  unsure (1)..(276): unsure at all Xaa locations
PRLLSVGFPLSRCLNAETSVASLPSPRCRSGVFEVRRKFPRHHGGGAGGGKHLADLREHDARRRCSLAAAVDLPLGGNGLPTETGLYFTQIGIGTPAKSYYVQVDTGSDILWVNCVSCDTCPRKSGLGIELTLYDPSGSSSGTGVTCGQEFCVATHGGVLPSCVPAAPCQYSISYGDGSSTNGFFXVTDFLQYNQVSGNSQTTLANTSITFGCGAKIGGDLGSSSQALDGILGFGQSNSSMLSQLAAAGKVRKVFAHCLDTINGGGIFAIGDVVQP

SEQ ID NO: 3242 - protein, 162 aa, Triticum aestivum
  unsure (1)..(162): unsure at all Xaa locations
XVVYNAIMSKVFAQYGEMPLKXXDQDFQCFRYSGSVDDGFPIITFHFEGGLPLNIHPHDYLFQNGELYCMGFQTGGLQTKDGKDMVLLGDLAFSNRLVLYDLENQVIGWTDYNCSSSIKIKDDKTGSIYTVNAHDISSGWRFQWHKPLFVLLVTALCSYTMF

SEQ ID NO: 3243 - protein, 535 aa, Arabidopsis thaliana
MFSKYSFILCLIFFFVTAFSGDSRALAGNNEQKNISGFSGIDFPNPMRFGSASSSTSNDCGFSSPEKEPTKERTGENKTVKFHLKRRETTTTEKATTNSVLELQIRDLTRIQTLHKRVLEKNNQNTVSQKQKKNDKEVVTTTPVASSVEEQAGQLVATLESGMTLGSGEYFMDVLVGSPPKHFSLILDTGSDLNWIQCLPCYDCFQQNGAFYDPKASASYKNITCNDQRCNLVSSPDPPMPCKSDNQSCPYYYWYGDSSNTTGDFAVETFTVNLTTNGGSSELYNVENMMFGCGHWNRGLFHGAAGLLGLGRGPLSFSSQLQSLYGHSFSYCLVDRNSDTNVSSKLIFGEDKDLLSHPNLNFTSFVAGKENLVDTFYYVQIKSILVAGEVLNIPEETWNISSDGAGGTIIDSGTTLSYFAEPAYEFIKNKIAEKAKGKYPVYRDFPILDPCFNVSGIHNVQLPELGIAFADGAVWNFPTENSFIWLNEDLVCLAMLGTPKSAFSIIGNYQQQNFHILYDTKRSRLGYAPTKCADI

SEQ ID NO: 3244 - protein, 527 aa, Arabidopsis thaliana
MSTKLSIFLLGLILFSVSPFSGDCRTLSGKHEHYSSSLNMFNSQDTMRFSSASSSTSNDCGFSSKEHDPSKEHTRESVKPQSRIKQETKRTTHSVVDLQIQDLTRIKTLHARFNKSKKQKNEKVRKKITSDISLVGAPEVSPGKLIATLESGMTLGSGEYFMDVLVGTPPKHFSLILDTGSDLNWLQCLPCYDCFHQNGMFYDPKTSASFKNITCNDPRCSLISSPDPPVQCESDNQSCPYFYWYGDRSNTTGDFAVETFTVNLTTTEGGSSEYKVGNMMFGCGHWNRGLFSGASGLLGLGRGPLSFSSQLQSLYGHSFSYCLVDRNSNTNVSSKLIFGEDKDLLNHTNLNFTSFVNGKENSVETFYYIQIKSILVGGKALDIPEETWNISSDGDGGTIIDSGTTLSYFAEPAYEIIKNKFAEKMKENYPIFRDFPVLDPCFNVSGIEENNIHLPELGIAFVDGTVWNFPAENSFIWLSEDLVCLAILGTPKSTFSIIGNYQQQNFHILYDTKRSRLGFTPTKCADI

SEQ ID NO: 3245 - protein, 481 aa, Arabidopsis thaliana
MRFSSASSSTSNDCGFSSKEHDPSKEHTRESVKPQSRIKQETKRTTHSVVDLQIQDLTRIKTLHARFNKSKKQKNEKVRKKITSDISLVGAPEVSPGKLIATLESGMTLGSGEYFMDVLVGTPPKHFSLILDTGSDLNWLQCLPCYDCFHQNGMFYDPKTSASFKNITCNDPRCSLISSPDPPVQCESDNQSCPYFYWYGDRSNTTGDFAVETFTVNLTTTEGGSSEYKVGNMMFGCGHWNRGLFSGASGLLGLGRGPLSFSSQLQSLYGHSFSYCLVDRNSNTNVSSKLIFGEDKDLLNHTNLNFTSFVNGKENSVETFYYIQIKSILVGGKALDIPEETWNISSDGDGGTIIDSGTTLSYFAEPAYEIIKNKFAEKMKENYPIFRDFPVLDPCFNVSGIEENNIHLPELGIAFVDGTVWNFPAENSFIWLSEDLVCLAILGTPKSTFSIIGNYQQQNFHILYDTKRSRLGFTPTKCADI

SEQ ID NO: 3246 - protein, 165 aa, Brassica oleracea
FTPISTITDGTSFYGLDIVGISVGGQKLAIPQTVFSTPGALIDSGTVISRLPPKAYAALRGAFKAKMSQYKNTSAVSILDTCFDLTGFKTVTIPTVSFYFNGGAVVELGSKGVLYAFKMSQVCLAFAGNSDDNNAAIFGNVQQQTLEVVYDGAAGRVGFAPNGCS

SEQ ID NO: 3247 - protein, 144 aa, Cicer arietinum
GVRVPISEDVFRLNELGEGGVVMDTGTAVTRLPTAAYDAFRDAFIGQTTNLPRSSDVSIFDTCYDLYGFVSVRVPTISFYFLGGPILTLPARNFLIPVNDVGTFCFAFAPSPSGLSIIGNIQQEGIEISVDGVNGFVGFGPNIC

SEQ ID NO: 3248 - protein, 110 aa, Cicer arietinum
QAYESVRDAFKRLTQNLRSAEGVAIFDTCYDLSSLRSVRVPTVSFHFGNDRVWDLPAKNYLIPVDSDGTFCFAFAPTSSSLSIIGNVQQQGTRVSFDIANSLVGFSPNKC

SEQ ID NO: 3249 - protein, 369 aa, Glycine max
  unsure (1)..(369): unsure at all Xaa locations
XFPSPKPHKNSVKLHLKHRSGSKGAEXXKNSVIDSTVRDLTRIQNLHRRVIENRNQNTISRLQRLQKEQPKQSSPAASSTSPVSGQLVATLESGVSLGSGEYFMDVFVGTPPKHFSLILDTGSDLNWIQCVPCIACFEQSGPYYDPKDSSSFRNISCHDPRCQLVSSPDPPNPCKAENQSCPYFYWYGDGSNTTGDFALETFTVNLTTPNGKSELKHVENVMFGCGHWNRGLFHGAAGLLGLGKGPLSFASQMQSLYGQSFSYCLVDRNSNASVSSKLIFGEDKELLSHPNLNFTSFGGGKDGSVDTFYYVQINSVMVDDEVLKIPEETWHLSSEGAGGTIIDSGTTLTYFAEPAYENIKEAFVKENKX

SEQ ID NO: 3250 - protein, 504 aa, Oryza sativa (japonica cultivar-group)
MQPPILLPLLLLLLLLAAASPRPVLSRRHASPPLATETLDVAASLSRARAAVSAEAVPLHQSAAAAVSTEVVGEEHEEGRLALRLHSRDFLPEEQGRQRHASYRSLVLARLRRDSARAAAVSARAAMAADGVSRFDLVPANVTAFEASAAEIQGPVVSGVGLGSGEYFSRVGVGSPARQLYMVLDTGSDVTWVQCQPCADCYQQSDPVFDPSLSTSYASVACDNPRCHDLDAAACRNSTGACLYEVAYGDGSYTVGDFATETLTLGDSAPVSSVAIGCGHDNEGLFVGAAGLLALGGGPLSFPSQISATTFSYCLVDRDSPSSSTLQFGDAADAEVTAPLIRSPRTSTFYYVGLSGLSVGGQILSIPPSAFAMDSTGAGGVIVDSGTAVTRLQSSAYAALRDAFVRGTQSLPRTSGVSLFDTCYDLSDRTSVEVPAVSLRFAGGGELRLPAKNYLIPVDGAGTYCLAFAPTNAAVSIIGNVQQQGTRVSFDTAKSTVGFTTNKC

SEQ ID NO: 3251 - protein, 155 aa, Triticum aestivum
  unsure (1)..(155): unsure at all Xaa locations
XKSVLVGGEAVNIPSDTWGGAKDGSGGTIIDSGTTLSYFPEPAYRAIRQAFIDRMSPSYPLIAGFPVLSPCYNVSGAGKIEVPELSLVFADGAAWEFPAENYFIRLAEGVMCLAVLGTPRSGMSIIGNYQQQNFHVLYDLERNRLGFAPRRCAEV

SEQ ID NO: 3252 - protein, 473 aa, Triticum aestivum
  unsure (1)..(473): unsure at all Xaa locations
MPMAPPPLLPLSALLLLLAAASHASAKPVQIQALLATPLSPDRVSAPSELAREDDTNVFAGNLAAADDAAASTVRFRVVHRDDFSKNATAAELLAHRLERDERRAARLSAAAGAANGTRRGGGGXXVAPVVSGLAQGSGEYFTKIGVGTPATPALMVLDTGSDVVWLQCAPCRRCYEQSGQVFDPRRSRSXYGAVGCAAPLCRRLDSGGCALRRSACLYQVAXYGDGSVTAGDFATETLTXFAGGARVARVALGCGHDNEGLFVAAAALLGLGRGSLSFPTQISRRYGRSFSYCLVDRTSSANSASRSSTVTFGSGALGSTVASSFTPMVKNPRMETFYYVQLIGISVGGARVPGVANSDLRLDPSSGRGGVIVDSGTSVTRLARPAYSALRDAFRGAXRXGLXXYXGGFFXVXTXCYXXSGAXWXKXXPTXXRXXFXXXXXRXXXXXXXNTXXXXXTXXXGXFXFXRYXXNX

SEQ ID NO: 3253 - protein, 474 aa, Arabidopsis thaliana
MSINRNLLNIIIILCICLNLGCNDGAQERETDSHTIQVSSLLPSSSSSCVLSPRASTTKSSLHVTHRHGTCSRLNNGKATSPDHVEILRLDQARVNSIHSKLSKKLATDHVSESKSTDLPAKDGSTLGSGNYIVTVGLGTPKNDLSLIFDTGSDLTWTQCQPCVRTCYDQKEPIFNPSKSTSYYNVSCSSAACGSLSSATGNAGSCSASNCIYGIQYGDQSFSVGFLAKEKFTLTNSDVFDGVYFGCGENNQGLFTGVAGLLGLGRDKLSFPSQTATAYNKIFSYCLPSSASYTGHLTFGSAGISRSVKFTPISTITDGTSFYGLNIVAITVGGQKLPIPSTVFSTPGALIDSGTVITRLPPKAYAALRSSFKAKMSKYPTTSGVSILDTCFDLSGFKTVTIPKVAFSFSGGAVVELGSKGIFYVFKISQVCLAFAGNSDDSNAAIFGNVQQQTLEVVYDGAGGRVGFAPNGCS

SEQ ID NO: 3254 - protein, 446 aa, Arabidopsis thaliana
MELKKERLILILSKSALSSLHHHHLVFFLPESSLHVTHRHGTCSRLNNGKATSPDHVEILRLDQARVNSIHSKLSKKLATDHVSESKSTDLPAKDGSTLGSGNYIVTVGLGTPKNDLSLIFDTGSDLTWTQCQPCVRTCYDQKEPIFNPSKSTSYYNVSCSSAACGSLSSATGNAGSCSASNCIYGIQYGDQSFSVGFLAKEKFTLTNSDVFDGVYFGCGENNQGLFTGVAGLLGLGRDKLSFPSQTATAYNKIFSYCLPSSASYTGHLTFGSAGISRSVKFTPISTITDGTSFYGLNIVAITVGGQKLPIPSTVFSTPGALIDSGTVITRLPPKAYAALRSSFKAKMSKYPTTSGVSILDTCFDLSGFKTVTIPKVAFSFSGGAVVELGSKGIFYVFKISQVCLAFAGNSDDSNAAIFGNVQQQTLEVVYDGAGGRVGFAPNGCS

SEQ ID NO: 3255 - protein, 464 aa, Arabidopsis thaliana
MSIMRNFLSMIIMLCVCLNWCFAEGAEKSDSGKVLDSYTIQVSSLFPSSSSCVPSSKASNTKSSLRVVHMHGACSHLSSDARVDHDEIIRRDQARVESIYSKLSKNSANEVSEAKSTELPAKSGITLGSGNYIVTIGIGTPKHDLSLVFDTGSDLTWTQCEPCLGSCYSQKEPKFNPSSSSTYQNVSCSSPMCEDAESCSASNCVYSIGYGDKSFTQGFLAKEKFTLTNSDVLEDVYFGCGENNQGLFDGVAGLLGLGPGKLSLPAQTTTTYNNIFSYCLPSFTSNSTGHLTFGSAGISESVKFTPISSFPSAFNYGIDIIGISVGDKELAITPNSFSTEGAIIDSGTVFTRLPTKVYAELRSVFKEKMSSYKSTSGYGLFDTCYDFTGLDTVTYPTIAFSFAGGTVVELDGSGISLPIKISQVCLAFAGNDDLPAIFGNVQQTTLDVVYDVAGGRVGFAPNGC

SEQ ID NO: 3256 - protein, 464 aa, Arabidopsis thaliana
MSIMRNFLSMIIMLCVCLNWCFAEGAEKSDSGKVLDSYTIQVSSLFPSSSSCVPSSKASNTKSSLRVVHMHGACSHLSSDARVDHDEIIRRDQARVESIYSKLSKNSANEVSEAKSTELPAKSGITLGSGNYIVTIGIGTPKHDLSLVFDTGSDLTWTQCEPCLGSCYSQKEPKFNPSSSSTYQNVSCSSPMCEDAESCSASNCVYSIVYGDKSFTQGFLAKEKFTLTNSDVLEDVYFGCGENNQGLFDGVAGLLGLGPGKLSLPAQTTTTYNNIFSYCLPSFTSNSTGHLTFGSAGISESVKFTPISSFPSAFNYGIDIIGISVGDKELAITPNSFSTEGAIIDSGTVFTRLPTKVYAELRSVFKEKMSSYKSTSGYGLFDTCYDFTGLDTVTYPTIAFSFAGSTVVELDGSGISLPIKISQVCLAFAGNDDLPAIFGNVQQTTLDVVYDVAGGRVGFAPNGC

SEQ ID NO: 3257 - protein, 482 aa, Glycine max
  unsure (1)..(482): unsure at all Xaa locations
MHIQMSSFLLASLALLFCIXLLGEELCLSSNKGKQQSSXXYHSVHLNSLFPSSSCSSSAKGPKRKASLEVVHKHGPCSQLNHSGKAEATISHNDIMNLDNERVKYIQSRLSKNLGGDRVKELDSTTLPAKSGRLIGSGDYYVVVGLGTPKRDLSLTFDTGSYLTWTQCEPCAGSCYKQQDPIFDPSKSSSYTNIKCTSSLCTQFRSAGCSSSTDASCIYDVKYGDNSISRGFLSQERLTITATDIVHDFLFGCGQDNEGLFRGTAGLMGLSRHPISFVQQTSSIYNKIFSYCLPSTPSSLGHLTFGASAATNANLKYTPFSTISGENSFYGLDIVGISVGGTKLPAVSSSTFSAGGSIIDSGTVITRLAPTAYAALRSAFRQGMEKYPVAYGTRLFDTCYDFSGYKEISVPRIDFEFAGGVKVELPLVGIFYGESAQQLCLAFAANGNGNDITIFGNVQQKTLEVVYDVEGGRIGFGAAGCN

SEQ ID NO: 3258 - protein, 493 aa, Glycine max
  unsure (1)..(493): unsure at all Xaa locations
AWLFLTSWHGHSNVFFCLCFSYNFILLLFLVCLSNNKGGHRKQQSSSXXTHLVHLSSLLPSSSCSSSAKGPKRKASLEVVHKHGPCSQLNNHDGKATTTPHSEILNQDKERVKYINSRISKNLGQDSSVSELDSVTLPAKSGSLIGSGNYFVVVGLGTPKRDLSLIFDTGSDLTWTQCEPCARSCYKQQDAIFDPSKSTSYSNITCTSTLCTQLSTATGNEPGCSASTKACIYGIQYGDSSFSVGYFSRERLSVTATDIVDNFLFGCGQNNQGLFGGSAGLIGLGRHPISFVQQTAAVYRKIFSYCLPATSSSTGRLSFGTTTTSYVKYTPFSTISRGSSFYGLDITGISVGGAKLPVSSSTFSTGGAIIDSGTVITRLPPTAYTALRSAFRQGMSKYPSAGELSILDTCYDLSGYEVFSIPKIDFSFAGGVTVQLPPQGILYVASAKQVCLAFAANGDDSDVTIYGNVQQKTIEVVYDVGGGRIGFGAGGCK

SEQ ID NO: 3259 - protein, 470 aa, Oryza sativa (japonica cultivar-group)
MAAAGLNHGGASPSARGKWLGGPVAPGVVELPADRDCWAEEFWGGIEDGTSSVTLSHRYGPCSPADPNSGEKRPTDEELLRRDQLRADYIRRKFSGSNGTAAGEDGQSSKVSVPTTLGSSLDTLEYVISVGLGSPAVTQRVVIDTGSDVSWVQCEPCPAPSPCHAHAGALFDPAASSTYAAFNCSAAACAQLGDSGEANGCDAKSRCQYIVKYGDGSNTTGTYSSDVLTLSGSDVVRGFQFGCSHAELGAGMDDKTDGLIGLGGDAQSPVSQTAARYGKSFFYCLPATPASSGFLTLGAPASGGGGGASRFATTPMLRSKKVPTYYFAALEDIAVGGKKLGLSPSVFAAGSLVDSGTVITRLPPAAYAALSSAFRAGMTRYARAEPLGILDTCFNFTGLDKVSIPTVALVFAGGAVVDLDAHGIVSGGCLAFAPTRDDKAFGTIGNVQQRTFEVLYDVGGGVFGFRVGAC

SEQ ID NO: 3260 - protein, 411 aa, Oryza sativa
  unsure (1)..(411): unsure at all Xaa locations
MALPSAVLRLTHRHGPCAPAGKASALAPSFLDTLRADQRRAEYIQRRVSGAAAAAPVAGSKAATVPANLGFSIGTLQYVVTVSLGTPAVAQTLEVDTGSDVSWVQCKPCPSPPCYSQRDPLFDPTRSSSYSAVPCAAASCSQLALXXSNGCSGGQCGYVVSYGDGSTTTGVYSSDTLTLTGSNALKGFLFGCGHAQQGLFAGVDGLLGLGRQGQSLVSQASSTYGGVFSYCLPPTQNSVGYISLGGPSSTAGFSTTPLLTASNDPTYYIVMLAGISVGGQPLSIDASVFASGAVVDTGTVVTRLPPTAYSALRSAFRAAMARYPSAPATGILDTCYDFTRYGTVTLPTISIAFGGGAAMDLGTSGILTSGCLAFAPTGGDSQASILGNVQQRSFEVRFDGSTVGFMPASCX

SEQ ID NO: 3261 - protein, 282 aa, Triticum aestivum
  unsure (1)..(282): unsure at all Xaa locations
XFGTRNDPKSDQTATGEHHATASQTVVVDTSSDIPWVQCLPCPIPQCHLQKDPFYDPAKSSTFAPIPCGSPACKELGSSYGNGCSGSTDQCKYTVNYGDGRATSGTYVTDTLTMSPTILVKDFRFGCSHXLXGAPSATRPPAFWPLGGGGGSLLEQTAGAYGNAFSYCIPXXPSSSGFLSLGGAGGGXSSKFARTPLFKNKHAPTFYIVHLEAITMAGKRLGVPPATCAGGAXMDSGAVVTQLPPAAYAALRAAFRSAMAAYALAAPVRNLDTCYDFTRFPX

SEQ ID NO: 3262 - protein, 307 aa, Triticum aestivum
  unsure (1)..(307): unsure at all Xaa locations
XCRVSCHRQSGPVFDPKXSSSYAAVSCSTPQCNDLSTATLNPAACSSSDVCIYQASYGDSSFSVGYLSKDTVSFGSNSVPNFYYGCGQDNEGLFGRSAGLMGLARNKLSLLYQLAPTLGYSFSYCLPSSSSSGYLSIGSYNPGQYSYTPMVSSTLDDFYFIKLSGMTVAGKPLAISSSEYSSLPTIIDSGTVITRLPTTVYDALSKAVAGAMKGTKRADAYSILDTCFXXGQASSLRVPAVSMAFSGGAALKLSAQNLLVDVDSSTTCLAFAPARSAAIIGNTQQQTFSVVYDVKSNRIGFAAGGCR

SEQ ID NO: 3263 - protein, 216 aa, Triticum aestivum
  unsure (1)..(216): unsure at all Xaa locations
SFSDQTAGVLALGGGAGSLLAQTAETFGNAFSYCVPXXPSSDGFLSLGGPVGNSSQFTSTPLIKNQHAPTFYIVRLEAITVAGRRLDVPPATFAGGAVMDSGAVVTQLPPSAYAALRAAFRSAMTAYALADPVRNLDTCYDLTRFPEVNVPKVSLVFAGGATLELEPASIMLDGCLAFTASPGDGSIGFIGNVQQQTYEVLYDVGSGSVGFRSGAC

SEQ ID NO: 3264 - protein, 904 aa, Mus musculus
MEVNCLTLKDLISPRQTRLDFAIEDAENAQKENIFVDRSRMTPKTPMKNEPIDLSKQRIFTPDRNPITPVKPVDRQPQVEPWTPTANLKMLISAASPDIRDREKKKELFRPIENKEDAFVNSLQLDVAGDGAVDEYEKQRPSRKQKSLGLLCQKFLARYPSYPLSTEKTTISLDEVAVSLGVERRRIYDIVNVLESLHLVSRVAKNQYGWHGRHSLPKTLRTLQRLGEEQKYEEQMACLQQKELDLMGYRFGERRKDGSPDPRDPHLLDFSEADYPSSSANSRKDKSLRIMSQKFVMLFLVSKTKIVTLDVAAKILIEESQDTPDHSKFKTKVRRLYDIANVLTSLALIKKVHVTEERGRKPAFKWIGPVDFSSIDEELLDVSASILPELKKEAYGQIRVCAKERLVRYGSFNTVHTSEKIQRKVSSEPSSPQGERQGSAYSLEIGSLAAIYRQKVEDNSQEEAFVSNTAVPPASILDPALSMDSEYCVKPLAQPVFSVAQTDLPAFSAQNGPSGQVGVPVPSAASDTENLKPALLAGQPLVYVPSTQLFMLYGSVQEGLSPESRSEEDGGGSDVPADLSVTPSAQKRLCEERDPQEEEDEPAMKRQSQEFEDSPLSLVMPKKPSSSTDLACPVTMGNGSSPPLEDACVKGQLPAAEEVTGKAAPNCYVASECGNPARNPDTEKPSNENEITKDPSLMQYLYVQSPAGLNGFNMVLPGTQTPHTVAPSPAQLPSFGVPCMFLQSPGLGPFPVLYSPAIPGPISSAHGTHPNPGPMNFGLSTLASASHLLISPAAMVNPKPSTLPCTDPQLRCQPSLNLNPVMPGSHGVIHPESPCYVRHPVSMVKAEQSPAPATPKSIQRRHRETFFKTPGSLGDPVFRRKERNQSRNTSSAQRRLEISSSGPD

SEQ ID NO: 3265 - protein, 421 aa, Mus musculus
MEVNCLTLKDLISPRQTRLDFAIEDAENAQKENIFVDRSRMTPKTPMKNEPIDLSKQRIFTPDRNPITPVKPVDRQPQVEPWTPTANLKMLISAASPDIRDREKKKELFRPIENKEDAFVNSLQLDVAGDGAVDEYEKQRPSRKQKSLGLLCQKFLARYPSYPLSTEKTTISLDEVAVSLGVERRRIYDIVNVLESLHLVSRVAKNQYGWHGRHSLPKTLRTLQRLGEEQKYEEQMACLQQKELDLMGYRFGERRKDGSPDPRDPHLLDFSEADYPSSSANSRKDKSLRIMSQKFVMLFLVSKTKIVTLDVAAKILIEESQDTPDHSKFKTKVRRLYDIANVLTSLALIKKVHVTEERGRKPAFKWIGPVDFSSIGKEMRSFDKDLWYIPFPSSTCRQQNWPFPVLPVTRNLRLMTSLLEQ

SEQ ID NO: 3266 - protein, 904 aa, Mus musculus
MEVNCLTLKDLISPRQTRLDFAIEDAENAQKENIFVDRSRMTPKTPMKNEPIDLSKQRIFTPDRNPITPVKPDDRQPQVEPWTPTANLKMLISAASPDIRDREKKKELFRPIENKEDAFVNSLQLDVAGDGAVDEYEKQRPSRKQKSLGLLCQKFLARYPSYPLSTEKTTISLDEVAVSLGVERRRIYDIVNVLESLHLVSRVAKNQYGWHGRHSLPKTLRTLQRLGEEQKYEEQMACLQQKELDLMGYRFGERRKDGSPDPRDPHLLDFSEADYPSSSANSRKDKSLRIMSQKFVMLFHVSKTKIVTLDVAAKILIEESQDTPDHSKFKTKVRRLYDIANVLTSLALIKKVHVTEERGRKPAFKWIGPVDFSSIDEELLDVSASILPELKKEAYGQIRVCAKERLVRYGSFNTVHTSEKIQRKVSSEPSSPQGERQGSAYSLEIGSLAAIYRQKVEDNSQEEAFVSNTAVPPASILDPALSMDSEYCVKPLAQPVFSVAQTDLPAFSAQNGPSGQVGVPVPSAASDTENLKPALLAGQPLVYVPSTQLFMLYGSVQEGLSPESRSEEDGGGSDVPADLSVTPSAQKRLCEERDPQEEEDEPAMKRQSQEFEDSPLSLVMPKKPSSSTDLACPVTMGNGSSPPLEDACVKGQLPAAEEVTGKAAPNCYVASECGNPARNPDTEKPSNENEITKDPSLMQYLYVQSPAGLNGFNMVLPGTQTPHTVAPSPAQLPSFGVPCMFLQSPGLGPFPVLYSPAIPGPISSAPGTHPNPGPMNFGLSTLASASHLLISPAAMVNPKPSTLPCTDPQLRCQPSLNLNPVMPGSHGVIHPESPCYVRHPVSMVKAEQSPAPATPKSIQRRHRETFFKTPGSLGDPVFRRKERNQSRNTSSAQRRLEISSSGPD

SEQ ID NO: 3267 - protein, 878 aa, Mus musculus
MEVNCLTLKDLISPRQTRLDFAIEDAENAQKENIFVDRSRMTPKTPMKNEPIDLSKQRIFTPDRNPITPVKPVDRQPQVEPWTPTANLKMLISAASPDIRDREKKKELFRPIENKEDAFVNSLQLDVAGDGAVDEYEKQRPSRKQKSLGLLCQKFLARHPSYPLSTEKTTISLDEVAVSLGVERRRIYDIVNVLESLHLVSRVAKNQYGWHGRHSLPKTLRTLQRLGEEQKYEEQMACLQQKELDLMGYRFGERRKDGSPDPRDPHLLDFSEADYPSSSANSRKDKSLRIMSQKFVMLFLVSKTKIVTLDVAAKILIEESQDTPDHSKFKTKVRRLYDIANVLTSLALIKKVHVTEERGRKPAFKWIGPVDFSSIDEELLDVSASILPELKKEAYGQIRVCAKERLVRYGSFNTVHTSEKIQRKVSSEPSSPQGERQGSAYSLEIGSLAAIYRQKVEDNSQEEAFVSNTAVPPASILDPALSMDSEYCVKPLAQPVFSVAQTDLPAFSAQNGPSGQVGVPVPSAASDTENLKPALLAGQPLVYVPSTQLFMLYGSVQEGLSPESRSEEDGGGSDVPADLSVTPSAQKRLCEERDPQEEEDEPAMKRQSQEFEDSPLSLVMPKKPSSSTDLACPVTMGNGSSPPLEDACVKGQLPAAEEVTGKAAPNCYVASECGNPARNPDTEKPSNENEITKDPSLMQYLYVQSPAGLNGFNMVLPGTQTPHTVAPSPAQLPSFGVALHVPAIPRPGPFSSSLFSRNTRAHFFSPRHSPKPRTHGLRLVHPGICFSPSHQPGSHGQSKAIHPPLYRPSASLSALTQPEPRDARLTRRHPPRVPLLRETSGIDGKGRAVPCTGDSQEHPTETSGDVLQDSRQPRRSGL

SEQ ID NO: 3268 - protein, 308 aa, Mus musculus
MENQKENLFSEPHKRGLMKSPLHPSSKANMVLAEIQPDLGPLTTPTKPKEVSQGEPWTPTANLKTLISAVSPEIRSRDQKRGLSDNRSALPEARDCLHEHLSGDEFEKSQPSRKEKSLGLLCHKFLARYPKYPNPAVNNDICLDEVAEELNVERRRIYDIVNVLESLHMVSRLAKNRYTWHGRHNLTKTLGTLKSVGEENKYAEQIMMIKRKEYEQEFDFIKSCGIEDHVIKSHTGQNGHSDMCFVELPGVEFRAASVNSRKDKSLRVMSQKFVMLFLVSTPQIVSLEIAAKILIGEDHVEDLDKSKY

SEQ ID NO: 3269 - protein, 209 aa, Mus musculus
MENQKENLFSEPHKRGLMKSPLHPSSKANMVLAEIQPDLGPLTTPTKPKEVSQGEPWTPTANLKMLISAVSPEIRSRDQKRGLSDNRSALPEARDCLHEHLSGDEFEKSQPSRKEKSLGLLCHKFLARYPKYPNPAVNNDICLDEVAEELNVERQRIYDIVNVLESLHMVSRLAKNRYTWHGRHNLTKTLGTLKSVGEENKYAEQIMMT

SEQ ID NO: 3270 - protein, 985 aa, Rattus norvegicus
MPGFQVCSLKAIRVFKEELKQKENIFVDRSRMTPKTPMKNEPIDLSKQRIFTPERSPITPVKLVDRQPQVEPWTPTANLKMLISAASPDIRDREKKKELFRPIENKGDAFVNSLQGMLPRFLSFCILRIVQREIYQALFSESVERIRSPFSLGVFIESLLFSSETCLKLDVVGDSAVDDYEKRRPSRKQKSLGLLCQKFLARYPSYPLSTEKTTISLDEVAVSLGTIFLSDHLLALSLNPLLPPGLARPPFTQSCAGFETAMSRICCDTALTLVLMTEHLKTWKGMVRFVGRRCCCVSTDWREEPDSSAQRLLPEPSSRAAGTEPGVAVSRVRYLRHVRRLVPRKNKQGVERRRIYDIVNVLESLHLVSRVAKNQYGWHGRHSLPKTLRTLQRLGEEQKYEEQMACLQQKELDLMEYRFGERRKDGSPDPRDQHLLDFSESDYPSSSANSRKDKSLRIMSQKFVMLFLVSKTKIVTLDVAAKILIEESQDTPDHSKFKTKVRRLYDIANVLTSLALIKKVHVTEERGRKPAFKWIGPVDFSSIGPAYSLEIGSLAAIYRQKVEDSSQGEAFVNKRAAPPASVLDPTLPVDSEYCVKPLAQPVFSVAQTDLQAFSAQNGLNGQVGVPVPSAASDAETLKSALLASQPLVYVPSTSLFMLYGSVQEALSPESRSEEDGSGSDVPADLSLAPTAQKRLCEERNPLEDDEPAVKRQSREFEDSPLSLVMPKKPSNSTDLAFPVTTGNGRATPLEDACVKGQLPAAEDASGRAVPNGFIASECGNPSRNPDTEKSSNDNEITKDPSLLQYLYVQSPAGLNGFNMLLPGGQTPHAVAPSSAAMPSFGLGPFPVLYSPAIPGPISSAPGTLPNTGPMNFGLSTLASASHLLISPAAMVNPKSSTLPSADPQLRCQPPLNPNPVMPGSHGVIHPESPGYMRHPVSMVKAEQRLPRASNGDIGRRSSRLLAASVIRPLEEKGTNPGTLAQPRGD

SEQ ID NO: 3271 - protein, 881 aa, Rattus norvegicus
MPESLSNMFPPQACASAVDTTTVGTSTVSTSTVGTTTVSTSTVGTSAVDTTTVGTSTVDTTTVDTSTVDTNTVGTTTVDTSTMGTTTVGTTTVDTSTMGTTIVDTTTVNTGTVGTTIVDTSTVDTSTVSTGTVDTNTEAPLHCEHAVKVCAFLADVERRRIYDIVNVLESLHMVSRLAKNRYTWHGRHNLTKTLGTLKSVGEENKYAEQIMMIKRKEHEQEFDFIKSCGLEDHVIKGDHVIKSTAGQNGHSDMCFVELPGVEFRAASANSRKDKSLRVMSQKFVMLFLVSTPQIVSLEIAAKILIGEDHVEDLDKSKFKTKIRRLYDIANVLSSLDLIKKVHVTEERGRKPAFKWTGPEISPNNSGSSPVMPLTASLEAEQSAKENCAKNLFSTRGKPSFTRHPSLIKLVKSIENDRRKISSAPSSPVKSSKAESSQNSPPVPNKMAQLAAICKMQLEEQSSEPRKRVKVNLTRSGHYKPLAPLDPAVNTELELLAPSLIQPLGMVPLIPSPLSSAVPVILPQAPSGPSYAIYLQPAQAQMLTPPHGLSPTVCPTQSSNATGSKDPTDAPTEKTATDATKSSASCRPGSLQPAPERQGAKNRSKETTGDRGTKRTGALEDGGPGPIKKPKEDLKALENVPTPTTLFPSGYLIPLTQCPSLGPDPMLSNTENSGTLSPNHRIYGSPIAGVIPVASSELTAVNFPPFHVTPLKLMVSPTSMAAVPVGNSPALSSSHPAPTQNPSSAIVNFTLQHLGLISPGVQMSASPGPGAGTVPLSPRVEAASVIPDNLSSRQGRATIHDSPVLGQSQLNGQPVAGTGAQQPVPVTPKGSQLVAESFFRTPGGPTKPTSSSFMDFDGANKTSFGTLFVPQRKLEVSTEDVH

SEQ ID NO: 3272 - protein, 403 aa, Arabidopsis thaliana
MSDLSPERFKLAVTSPSSIPESSSALQLHHSYSRKQKSLGLLCTNFLALYNREGIEMVGLDDAASKLGVERRRIYDIVNVLESVGVLTRRAKNQYTWKGFSAIPGALKELQEEGVKDTFHRFYVNENVKGSDDEDDDEESSQPHSSSQTDSSKPGSLPQSSDPSKIDNRREKSLGLLTQNFIKLFICSEAIRIISLDDAAKLLLGDAHNTSIMRTKVRRLYDIANVLSSMNLIEKTHTLDSRKPAFKWLGYNGEPTFTLSSDLLQLESRKRAFGTDITNVNVKRSKSSSSSQENATERRLKMKKHSTPESSYNKSFDVHESRHGSRGGYHFGPFAPGTGTYPTAGLEDNSRRAFDVENLDSDYRPSYQNQVLKDLFSHYMDAWKTWFSEVTQENPLPNTSQHR

SEQ ID NO: 3273 - protein, 379 aa, Arabidopsis thaliana
MSDLSPERFKLAVTSPSSIPESSSALQLHHSYSRKQKSLGLLCTNFLALYNREGIEMVGLDDAASKLGVERRRIYDIVNVLESVGVLTRRAKNQYTWKGFSAIPGALKELQEEGVKDTFHRFYVNENVKGSDDEDDDEESSQPHSSSQTDSSKPGSLPQSSDPSKIDNRREKSLGLLTQNFIKLFICSEAIRIISLDDAAKLLLGDAHNTSIMRTKVRRLYDIANVLSSMNLIEKTHTLDSRKPAFKWLGYNGEPTFTLSSDLLQLESRKRAFGTDITNVNVKRSKSSSSSQENATERRLKMKKHSTPESSYNKSFDVHESRHGSRGGYHFGPFAPGTGTYPTAGLEDNSRRAFDVENLDSDYRPSYQNQGAYILFTSI

SEQ ID NO: 3274 - protein, 323 aa, Arabidopsis thaliana
MVGLDDAASKLGVERRRIYDIVNVLESVGVLTRRAKNQYTWKGFSAIPGALKELQEEGVKDTFHRFYVNENVKGSDDEDDDEESSQPHSSSQTDSSKPGSLPQSSDPSKIDNRREKSLGLLTQNFIKLFICSEAIRIISLDDAAKLLLGDAHNTSIMRTKVRRLYDIANVLSSMNLIEKTHTLDSRKPAFKWLGYNGEPTFTLSSDLLQLESRKRAFGTDITNVNVKRSKSSSSSQENATERRLKMKKHSTPESSYNKSFDVHESRHGSRGGYHFGPFAPGTGTYPTAGLEDNSRRAFDVENLDSDYRPSYQNQGAYILFTSI

SEQ ID NO: 3275 - protein, 354 aa, Arabidopsis thaliana
MSSAIVVSQDAESLGLQIYSRKEKSLGVLVSNFLRLYNRDDVDLIGLDDAAGQLGVERRRIYDVVNILESIGIVARRGKNQYSWKGFGEIPRSLDELKEEGMRERLGYSSSNNSDKVSNGCEREEPLTLTPDDQENSSSSKMDQKKEKSLWLLAQNFVKMFLCSDDDLITLDSAAKALLSDSPDSVHMRTKVRRLYDIANVFASMNLIEKTHIPVTRKPAYRWLGSKSIAERGLSLFNSGEPKRVFGTEITNLRAKRNKTYCSSIRKQIGYKKHDEENTEQESKPAASKYVFGPFSPIGASKTNNDKVGKGRLLEIEALASTYQPQYCNQEITGLLGHFTEAWKKWYAEVDRNK

SEQ ID NO: 3276 - protein, 339 aa, Arabidopsis thaliana
MSSAIVVSQDAESLGLQIYSRKEKSLGVLVSNFLRLYNRDDVDLIGLDDAAGQLGVERRRIYDVVNILESIGIVARRGKNQYSWKGFGEIPRSLDELKEEGMRERLGYSSSNNSDKVSNGCEREEPLTLTPDDQENSSSSKMDQKKEKSLWLLAQNFVKMFLCSDDDLITLDSAAKALLSDSPDSVHMRTKVRRLYDIANVFASMNLIEKTHIPVTRKPAYRWLGSKSIAERGLSLFNSGEPKRVFGTEITNLRAKRNKTYCSSIRKQIGYKKHDEENTEQESKPAASKYVFGPFSPIGASKTNNDKVGKGRLLEIEALASTYQPQYCNQGNNHTLIVS

SEQ ID NO: 3277 - protein, 359 aa, Arabidopsis thaliana
MDSLALAPQVYSRKDKSLGVLVANFLTLYNRPDVDLFGLDDAAAKLGVERRRIYDVVNILESIGLVARSGKNQYSWKGFGAVPRALSELKEEGMKEKFAIVPFVAKSEMVVYEKEGEESFMLSPDDQEFSPSPRPDNRKERTLWLLAQNFVKLFLCSDDDLVTFDSATKALLNESQDMNMRKKVRRLYDIANVFSSMKLIEKTHVPETKKPAYRWLGSKTIFENRFIDGSASLCDRNVPKKRAFGTELTNVNAKRNKSGCSKEDSKRNGNQNTSIVIKQEQCDDVKPDVKNFASGSSTPAGTSESNDMGNNIRPRGRLGVIEALSTLYQPSYCNPELLGLFAHYNETFRSYQEEFGREK

SEQ ID NO: 3278 - protein, 200 aa, Arabidopsis thaliana
MSSAIVVSQDAESLGLQIYSRKEKSLGVLVSNFLRLYNRDDVDLIGLDDAAGQLGVERRRIYDVVNILESIGIVARRGKNQYSWKGFGEIPRSLDELKEEGMRERLGYSSSNNSDKVSNGCEREEPLTLTPDDQENSSSSKMDQKKEKSLWLLAQNFVKMFLCSDDDLITLDSAAKALLSDSPDSVHMRSTSIFPVLDLF

SEQ ID NO: 3279 - protein, 261 aa, Oryza sativa
  unsure (1)..(261): unsure at all Xaa locations
FGSSYLYESSSLHGFFIPISSRHYTYNRKQKSLGLLCTNFLSLYNRDTVHLIGLDDAATRLGVERRRIYDIVNVLESIGVLSRKAKNQYTWRGFAAIPLTLQDLKEEGLKENSNSLRGPGNHDKVSDDEDDEETQSNPAATGSQSDKLNPNSTLPKPLKNENRREKSLALLTQNFVKLFVCSNVELISLDEAAKLLLGDAHNTSVMRTKVRRLYDIANVLSXMNLIEKTHTMDTRKPAFRWLXSEGKTWDETLHISNLNDS

SEQ ID NO: 3280 - protein, 397 aa, Oryza sativa
  unsure (1)..(397): unsure at all Xaa locations
MAAAADAPPPPPEVAPPAPAPAPAPAPYQPPRLAVADGAGGGGGGGGKPCRHHAYSRKQKSLGLLCTNFVALYDREDVESVGLDDAARRLGVERRRIYDIVNVLESIGEMSLRAVSSVASPSLDETSAAXXVSDDEDDDKLDDAEGDAESEKLSLSQSIDNPSDKPDAPPCKPEHRKEKSLGLLTQNFVKLFLTMEIETISLDEAAKRLLGEGQANNMRTKVRRLYDIANVLSSLNLIEKTQQADSRKPAFRWLGQAKRNEGVTVALPPTKTLPNKRAFGTDLTNIDNKRGKLDSTMENRGKPTQDGGNLFNNLQRQLGQENRSDFVYGPFHPAVARKQEHGNRTVQEKERKSIQDWENLASSFRPQYQNPGLNDLFGHYMEAWRSWYSDLRRDRAS

SEQ ID NO: 3281 - protein, 394 aa, Oryza sativa
  unsure (1)..(394): unsure at all Xaa locations
MLPRLLRRSPRPRPRPPPRRRHISRRGWRWPTEREVAAAAAGSRGHHAYSRKQKSLGLLCTNFVALYDREDVESVGLDDAARRLGVERRRIYDIVNVLESIGMLVRRAKNRYTWIGFGGVPAALAKLKXSRMMRMMTSXMMLRAMRRARSSASASPLTXPSDKPDAPPCKLRSEHRKEKSLGLLTQNFVKLFLTMERNLYLIQIETISLDEAAKRLLGEGHAANNMRTKVRRLYDIANVLSSLNLIEKTQQADSRKPAFRWLGQAKRNEGVTVAFKTLPNKRAFGTDLTNIDNKRGKLDSTMENRGKPTQDGGNLFNNLQRQLGQENRSDFVYGPFHPAVARKQEHDKRRRGRALDWENLASSFRPQYQNPGELHSLYISISPNECCFKNPFCI

SEQ ID NO: 3282 - protein, 317 aa, Oryza sativa
  unsure (1)..(317): unsure at all Xaa locations
SVGLDDAARRLGVERRRIYDIVNVLESIGMLVRRAKNRYTWIGFGGVPAALAKLKVRRIRIFYILGFVNYDYKSSDDEDDDKLDDAEGDAESEKLSLSQSIDNPSDKPDAEHRKEKSLGLLTQNFVKLFLTMEVIETISLDEAAKRLLGEGHAANNMRTKVRRLYDIANVLSSLNLIEKTQQADSRKPAFRWLGQAKRNEGVTVALPPTKTLPNKRAFGTDLTNIDNKRGKLDSTMEKEASPRRMVATYSIICRGNXGQENRSDFVYGPFHPAVARKQEHGIQEKERKSIQDWENLASSFRPQYQNPGELQLSLYIY

SEQ ID NO: 3283 - protein, 297 aa, Triticum aestivum
  unsure (1)..(297): unsure at all Xaa locations
XHNASDKPNVPMCPPRSDHRKEKSLGLLTQNFVKLFLTMEVETVSLDEAARLLLGERHAESNMRTKVRRLYDIANVLSSLNLIEKTQQVDSRKPAFRWLGQXQSERKVPLSRLLYQIMSSKRAFGTDITNIDNKRGKLVLETENXXPKLMQGGSSMLKTFESXXLGQGKSSGFVYGPFHPGKETYDQTVRENEMKNIQDWENLAVSFRPQYQNHALNDLFGHYVEAWKSWYLDLTRESTSXRMVXFRQVCCKSVLVGRSTHLPRTLERIRPVQDVIKAQRLISPLLDVFTQCKKETE

SEQ ID NO: 3284 - protein, 200 aa, Triticum aestivum
  unsure (1)..(200): unsure at all Xaa locations
MSAAPPSSTAAETTATAPAPLPRLPIPNPLPLFAERGGGARLRHHAYSRKPKSLGLRCSNFVALYDWDGVESIGLDDASRRLGVERRRIYDIVNVLESVGILARKAKNRYSWIGFGGVPMALRELKERALREKSGLAPLPADANMSDDEDDDKLGDPEAEREGEKLNQTVDNPSDMPDAXSLPAEIXDHRKEMSLGLLTX

SEQ ID NO: 3285 - protein, 444 aa, Zea mays
  unsure (1)..(444): unsure at all Xaa locations
MPPPPPPPPGLPSLAPSPPRPPPSRRRRLRSCASTAPAAAAASREPXRHHAYSRKQKSLGLLCSNFVALYDREDVEVIGLDDAAKRLGVERRRIYDIVNVLESVGILVRRAKNRYTWLGFGGVPAALKELKERALRKMYHRCYCQWRXSSTANLSDDEDDDDEDAESEKLSQPVDNTSDKPDAPSCRLRSDHRKEKSLGLLTQNFVKLFLNMEVGTISLDEAARLLLGEGHADSNMRTKVRRLYDIANVLSSLNLIEKTQQADTRKPAFRWLGQXQSESKITMSSPSMKAMPNKRAFGTDLTNIDNKRGKLDSAAENKVKLMQGAXXNIVKTFXXRQLVQGKRSDFVYGPFHPAGAKKHETDDQTVKQQERKNIQDWENLAVSFRPQYQNQALNDLFGHYVEAWKSWYVDLTQXNGIMKQNVGRSVVTCKPFPVVRSTELLMLA

SEQ ID NO: 3286 - protein, 417 aa, Zea mays
  unsure (1)..(417): unsure at all Xaa locations
YFQEFSPLPRPAPHHAKSSPAKASRLPHGGGANGRHHAYSRKDKSLGLLCSNFVVLYNRDDVESIGLDEAAKCLGVERRRIYDIVNVLESVGILVRKAKNRYTWIGFGGVSISLRELKERALREKSGLAPLQTEQQSAATISEDEDDDTLANQTERLSQTVDKPSGKPGASGCRLRSDHRKEKSLGLLTQNFVKLFLTMEVDTISLDEAAKLLLGEGHEETNMRTKVRRLYDIANVLSSLNLIEKIHQGDSRKPAFRWLGRATLNTENGVTVAATREDRESKKRAFGTELTNIDMHRSNLDSKNKKKAXXLVQSGGDVLTNCKLDVRSRRQGKQSGFVYGPFHPSGARKPGGNKPGQRERAEDWESLSASFRPQYKNQALSDLFAHYVDAWKTWYSEFAQGSSIMQQHFGHLGNHFL

SEQ ID NO: 3287 - protein, 207 aa, Zea mays
  unsure (1)..(207): unsure at all Xaa locations
ARGFLXRLVQTQQADTRKPAFRWLGQXQSESKITMSSPSMKAMPNKRAFGTDLTNIDNKRGKLDSAAENKVKLMQGAXXNIVKTFXXRQLVQGKRSDFVYGPFHPAGAKKHETDDQTVKQQERKNIQDWENLAVSFRPQYQNQALNDLFGHYVEAWKSWYVDLTQXNGIMKQNVGREPPCTRWNKNTKAILSFDCIYSNARSEAIFS

SEQ ID NO: 3288 - protein, 101 aa, Zea mays
  unsure (1)..(101): unsure at all Xaa locations
AVFLDHRKEKSLGLLTQHFLKLFLTMEVVETISLDEAARLLLGEGHAESNMRTKVRRLYDIANVLSSLNFIEKTQQVDTRKPVFRWLGQAKRKQENNAAGX

SEQ ID NO: 3289 - protein, 657 aa, Caenorhabditis elegans
MTTIFGSSNAMFLNIEANKENIPPGTEFKKESFVLPEPRVNRTTDPDHENLLPSPVPRPSPAMSQLSDASFLSQDGGAVNTSADEADDDLEVTSRKEKSLGLLCQRFLIAINEETVGSSTREVHLETVARKMNVEKRRIYDIVNVMEALDAMQKTNKSYYQWQGLESLPKLMFDLQNEAVEEGLPERVLRVEQAMCSFTELSSPRGKQGFKDIVGSFVSCTSTPTTPSTSFDSVTVKMEPAGLLEKRSRVDTRDRQGRNSLAQLCRRFLMVLLSNPKNIRKVSLDVASTVLIKDPETEGFEPPSRSRCRRLYDIANVLVALGLIKKVHYLFGTKKIPLFVYCGPEPDQTGSFDVFQSVERLLSSSQNVPQTPIIKAQTDKIVQQIAGFGKRTLSEQNLTKPSGNTPKIAKIKSAAVRSSPMYMENNLFMFAEVVTAEAAAEKMRYDAFAQLSRTILGSVASINSLNAPLTSSQHPMTSRLPPLPMAPLQLPKLPEIPKPQAQKQFTFPATSRPRFNFPDYTPVQSTIRPLVSQMTFPQESSQLHNLDVKPKHLMSNILGESKKFKNNQNTFEHTTSSAFQVVKKGETRPKFFIFTNNCSLPRISSRYVHRFSEIIWCTVEMKGFGEKTFRRWRDLIEVGAAEKIRSAPLPSPRFLSD

SEQ ID NO: 3290 - protein, 911 aa, Homo sapiens
MEVNCLTLKDLISPRQPRLDFAVEDGENAQKENIFVDRSRMAPKTPIKNEPIDLSKQKKFTPERNPITPVKFVDRQQAEPWTPTANLKMLISAASPDIRDREKKKGLFRPIENKDDAFTDSLQLDVVGDSAVDEFEKQRPSRKQKSLGLLCQKFLARYPSYPLSTEKTTISLDEVAVSLGVERRRIYDIVNVLESLHLVSRVAKNQYGWHGRHSLPKTLRNLQRLGEEQKYEEQMAYLQQKELDLIDYKFGERKKDGDPDSQEQQLLDFSEPDCPSSSANSRKDKSLRIMSQKFVMLFLVSKTKIVTLDVAAKILIEESQDAPDHSKFKTKVRRLYDIANVLTSLALIKKVHVTEERGRKPAFKWIGPVDFSSSDEELVDVSASVLPELKRETYGQIQVCAKQKLARHGSFNTVQASERIQRKVNSEPSSPYREEQGSGGYSLEIGSLAAVYRQKIEDNSQGKAFASKRVVPPSSSLDPVAPFPVLSVDPEYCVNPLAHPVFSVAQTDLQAFSMQNGLNGQVDVSLASAASAVESLKPALLAGQPLVYVPSASLFMLYGSLQEGPASGSGSERDDRSSEAPATVELSSAPSAQKRLCEERKPQEEDEPATKRQSREYEDGPLSLVMPKKPSDSTDLASPKTMGNRASIPLKDIHVNGQLPAAEEISGKATANSLVSSEWGNPSRNTDVEKPSKENESTKEPSLLQYLCVQSPAGLNGFNVLLSGSQTPPTVGPSSGQLPSFSVPCMVLPSPPLGPFPVLYSPAMPGPVSSTLGALPNTGPVNFSLPGLGSIAQLLVGPTAVVNPKSSTLPSADPQLQSQPSLNLSPVMSRSHSVVQQPESPVYVGHPVSVVKLHQSPVPVTPKSIQRTHRETFFKTPGSLGDPVLKRRERNQSRNTSSAQRRLEIPSGGAD

SEQ ID NO: 3291 - protein, 879 aa, Sulfolobus tokodaii
MIIRRIDIENFLSHDRSLIEFKGTVNVIIGHNGAGKSSIIDAISFSLFRKSLRDAKKQEDLIKRGAGRATVTLYLENKGKIYVIKRNAPNQYTSEDTISELTNDTRRTIARGATTVSQKIKELLNLDEEVLKSTIIVGQGKIESVFENLPDVTKKILKIDKIEKLRDSNGPIKEVMDKINNKIIELQSLEKYKNESENQKIQKEKELENIKRELEDLNIKEEKERKKYEDIVKLNEEEEKKEKRYVELISLLNKLKDDISELREEVKDENRLREEKEKLEKDILEKDKLIEEKEKIIEAQNKIKLAQEKEKSLKTIKINLTDLEEKLKRKRELEEDYKKYIEIKGELEELEEKERKFNSLSDRLKSLKIKLSEIESKISNRKISINIEELDKELQKLNEDLNNKNQEREKLASQLGEIKGRIEELNKLLGNLNQVKGNVCPVCGRELSDDHKRKIQNEIIEKLKELDELNKKFKLEINKINGLISELNQIINKKSKEKDIAIRNLADYNNLLTQQQELRKEIEEIENEIERLSIYHEKYIRLKEEEKNLKPKYEEYLKYYDVTEEKIRELERQKIELEKEIEEIMNKVREYYNTDLTQKIRDIEKRIQEIKGKENKLRELDTLLAKIETAKQKIKQNEEEIKKLTDELQLLNFDPNRFQQIKREKEVLEKILGEINSKKGELLGKKEVLENDIKRLEEQIKDYEEKLKNKQKLITAYDKLKKLREHLAEDKLQAYLMNTVKSLVEDSLNSILSRFELSFTRVEVDFNDKNGIYAYTTSGQRLPVNLLSGGERVSIALALRLAIAKSLMNEVGFLILDEPTVNLDEYRKKELIDIIRSTVEVVPQIIVVTHDEELLQAGDYIIRLEKRGDSSKVEVINND

SEQ ID NO: 3292 - protein, 882 aa, Sulfolobus tokodaii
MLKMIIRRIDIENFLSHDRSLIEFKGTVNVIIGHNGAGKSSIIDAISFSLFRKSLRDAKKQEDLIKRGAGRATVTLYLENKGKIYVIKRNAPNQYTSEDTISELTNDTRRTIARGATTVSQKIKELLNLDEEVLKSTIIVGQGKIESVFENLPDVTKKILKIDKIEKLRDSNGPIKEVMDKINNKIIELQSLEKYKNESENQKIQKEKELENIKRELEDLNIKEEKERKKYEDIVKLNEEEEKKEKRYVELISLLNKLKDDISELREEVKDENRLREEKEKLEKDILEKDKLIEEKEKIIEAQNKIKLAQEKEKSLKTIKINLTDLEEKLKRKRELEEDYKKYIEIKGELEELEEKERKFNSLSDRLKSLKIKLSEIESKISNRKISINIEELDKELQKLNEDLNNKNQEREKLASQLGEIKGRIEELNKLLGNLNQVKGNVCPVCGRELSDDHKRKIQNEIIEKLKELDELNKKFKLEINKINGLISELNQIINKKSKEKDIAIRNLADYNNLLTQQQELRKEIEEIENEIERLSIYHEKYIRLKEEEKNLKPKYEEYLKYYDVTEEKIRELERQKIELEKEIEEIMNKVREYYNTDLTQKIRDIEKRIQEIKGKENKLRELDTLLAKIETAKQKIKQNEEEIKKLTDELQLLNFDPNRFQQIKREKEVLEKILGEINSKKGELLGKKEVLENDIKRLEEQIKDYEEKLKNKQKLITAYDKLKKLREHLAEDKLQAYLMNTVKSLVEDSLNSILSRFELSFTRVEVDFNDKNGIYAYTTSGQRLPVNLLSGGERVSIALALRLAIAKSLMNEVGFLILDEPTVNLDEYRKKELIDIIRSTVEVVPQIIVVTHDEELLQAGDYIIRLEKRGDSSKVEVINND

SEQ ID NO: 3293 - protein, 1177 aa, Thermoanaerobacter tengcongensis
MKPIRLKISGVNSFTEEQVINFELLTEKGLFGIFGPTGSGKSTIIDAITLSMYGKIPRNSKDFINTDSLSTSVVYEFEIGVGTERRRYIVERNIKKDLKNGGYKTTLARLREITAEGEKVLAEKEREVHQKIVEIIGLTAEDFTRSVVLPQGKFSEFLKLSGRERRDMLERIFGLERYGNDLMEKVRKVKNEKALLLGMVNGELSRYEGVTEEALKEALAKLELLKEEEKNLSAEREELLKEREKLKEIWERQKELNQFLEKKRLLDEKASEIEVKRGKIEKARKALSVKPYIDSVEETEKKLLLNKKELEKHAKELEEVSAQLEKIEKDYEITFREKEEKIPLLIEKEERLKRAVQIEDEIKRLSEEREKLLTEYKNLESNIKRLEEEKEKLFLSIENLKKNIAEKEEKIVSIRISTEEKENVFKAFELEKEFERVKREREEKAYKIEEIEKLVEKQKGEYERIKVELTEKEEELQKEESSFNLLEVQKPLSSEELFNFQKELESKRLKLIEAQRNKELEEKLEKTLKEVLEEREKLVGELEKTEREYVEKGKALDALQKEIEEIVRKNMAGELAEGLEEGMPCPVCGSFHHINLAKKVDEKLIEEKKKLERGLRTEREVLQEKLIMLKSQLSGFTAKEEISRAELEKAKENLRGIDLEILRKEIEEMEVKFKEEKEKLEDWAKEKEEKEKVLKRLKEEKGQLALEEARIKERLQKDLKLLEEYKLSFEGIEREYQSLLKELENWKEKLGYANFSEKVEEINQKEKLIEKLREEVESLKKNLEELNIKREKVLEDLNQLIVRKTQVVEVGKEKRSVLEKMQKELYSYSEGKDVKKYLEDVQKERAEILQRESFLKNRLEEERRKKQEIESKKVSTLENQILLTNMLKEQIEKLELSLSKEGFKTKEEALSFVISSEEMSEIEIEVKRFENEYTSLVANIERLEGFLKGRQIEEEHWNRLEERIRELEEILTGKRKEIGATEKAIHDMKENLKKVEELTKKKKELEHVIDMLEELDKLFQGNKFVDFIASKQLKYITFSASKRLKEISRGRYALEIDSENNFVMRDDFNGGVRRSVDTLSGGETFLTSLSLALALSSHIQLKGKAPLEFFFLDEGFGSLDSELLDVVMTSLERLKKDKMVVGIISHVEELKDRVPVKLIVTPPTVSGEGSKVRIEYT

SEQ ID NO: 3294 - protein, 739 aa, Streptococcus pneumoniae
MFASKSERKVHYSIRKFSIGVASVVVASLVMGSVVHATENEGITQVATSYNKANESQTEHRKAAKQVDEDIKKMLSEIQEYIKKMLSEIQLDKRKHTQNVNLNRKLSAIQTKYLYELRVLKEKSKKEELTSKTKKELDAAFEKFKKEPELTKKLAEAKQKAKAQKEEDFRNYPTNTYKTLELEIAEFDVKVKEAELELVKEEAKPRNEEKIKQAKAKVESKKAEATRLEEIKTERKKAEEEAKRKAEESEKKAAEAKQKVDTKEQGKPKRRAKRGVSGELATPDKKENDAKSSDSSVGEETLPSPSLNMANESQTEHRKDVDEYIKKMLSEIQLDRRKHTQNVNLNIKLSAIKTKYLYELSVLKENSKKEELTSKTKAELTAAFEQFKKDTLKPEKKVAEAEKKVEEAKKKAKDQKEEDRRNYPTNTYKTLELEIAESDVKVKKAELELVKEEANESRNEEKIKQAKEKVESKKAEATRLEKIKTDRKKAEEEAKRKAEESEKKAAEAKQKVDAEEYALEAKIAELEYEVQRLEKELKEIDESDSEDYLKEGLRAPLQSKLDTKKAKLSKLEELSDKIDELDAEIAKLEVQLKDAEGNNNVEAYFKEGLEKTTAEKKAELEKAEADLKKAVDEPETPAPAPQPAPAPEKPAEKPAPAPAPEKPAPAPEKPAEKPAEKPAEEPAEKPAPAPEKPAPTPEKPAPTPETPKTGWKQENGMWYFYNTDGSMATGWLQNNGSWY

SEQ ID NO: 3295 - protein, 558 aa, Streptococcus pyogenes
MARENTNKHYSLRKLKKGTASVAVALTVLGAGLVVNTNEVSARVRYTRHTPEDKLKKIIDDLDDLDAKEHELQQQNEKLSTQKQALESQKQALESQKQALESQKQALESQKQALESQKQALEGRTQDLEGQTQDLESQKQAPESHIQALESQTQDLESQTQALESQKQALESRKQALEEQNKQLSTQKETLERQVQEAQHNNNELTEKLDETQKKLVNKQQESEETKKTLNELLDKTVKDKLAKEQENQETIGTLKKILDETVKDKIAKEQKSKQDIGALKKILDETVKDKIAKEQKSKQDIGALKQELAKKEEHNKISDASRKGLRRDLDASREAKKQLEAEHQKLEEQNKISEASRKGLRRDLDASREAKKQVEKDLANLTAELNKVKEEKQTSDASRQGLRRDLDASREAKKQVEKALEEANSKLAALEKLNKELEESKKLTEKEKAELQAKLEAEAKALKEQLAKQAEELAKLRAGKASDSQTPDTKPGNKAVPGKGQAPQAGTKPNQNKAPMKETKRQLPSTGEATNPFFTAAALTVMATAGVAAVVKRKEEN

SEQ ID NO: 3296 - protein, 1163 aa, Clostridium acetobutylicum
MKPIRVRIKGLNSFENEQEINFEKLTKRGLFGIFGPTGSGKTTILDSITLSLYGEVARKSSNFMNTNCNSLNVSFEFQISGKEIKRYLVEREFRRDNKTGSVRSKSAKIVDITGDEVEVLEEGAKSVNEKCQEIIGLSLDDFTRTVVLPQGKFSEFLKLEGKERRNMLERLFNLQEYGDELSFKLARKIRKEREKENVLVGELKGYENINEDVLKERRELLKENNDFFNEASKEYLKAEEEYNEGKEVWGLQIEIEEKNRVRKDLMEKKDEIDLKEKRARLGESSSKVKPYIDNYENTLKQIDILKEQILSRENTMKAISLEKEDMEKKLSIAKDNKEKALPKFMIKHHIILDAIKEKDLLDNIKLEKKRLQGKIEKLSLEASNKEELIKQNIKDIDSLTLKIQNLESKIDNLKVPEEYKNKINEGIFLLRNYDEKLKHKNKLGLDCDKFQVDFEKAKSKKEMLFNKLEEERSKLDTYTKKLQDLNKDFPKDDVLLTFQEKLNDSRQKWAKYSEYNESLKASLRVVENSEQVLRTKKEEMTKLEDKISKVNIKIESLETENMAHVLREKLKSGEACPVCGSVHHIKEGFKEVDLKALETLKSELEGFEKKRKFENEEIVMCEASIKVEEKNIKKLNESINNLGEEFKEVSLESMEKKFNYLKEKVNKFNLEKIQLDDNIKDLSERSNKIEVEYQKEKTVEKQCEKRIVDLKSELEEAIKEFNEVAYTIENLKAELKIQDFKFEMKEILEKERVRVEAEGEIKDLRNLLNIRHTEKEQLMDKCSRLKEELSKNKAELKEKDKIINEKIELIKNKVGVLDNLYELKEKIEGTIKKIEEQYNLCDKKMNEIEDKYRKCSDEIIKYHSNLSSLKDRKVNDIDKLNKILMEEKFENIEKAKENYLNDKEINLLKSDVEKYKNELSKVNGAVEVLSKKLKNRKLTEEKWIEIQNNRVEKASKAKALQERSIKLEEEVKNIEIKLKELGKLLKTKQELEHKLSLLDDLEKLFKGKKFVEFVALNQLKYISIEASKRLKEITGGNYGLEVDDNGKFIIRDYKNGGAKRDASTLSGGETFVTSLALALSLSNQIQLRGSAPLELFFLDEGFGTLDSNLLEVVMDSLEKIHSERLSVGIISHLEVIKERMPVRLIVSPAEAGVGGSKVKLEIS

SEQ ID NO: 3297 - protein, 1606 aa, Anopheles gambiae str. PEST
AVLTADTDSFIIGQRVWVGGIRPGQIAYIGETHFAPGEWAGVVLDEPNGKNDGSVAGKRYFQCEAKKGVFSRLTRLTREPLANAGGGGGDSTASTPLDASFRSLTSPARSGTVSPTHSVQSYASKSPAMAGKAASLNVGDRVIVSSGFGSRPGMLKFIGETQFASGTWCGVQLDEASGKNDGTVDGVRYFECPAKYGIFVPIAKVTLSPSARKTSARLSRANSKESLNSLATMSSIATTATSRLRMSAQVSLAAWKSTVSAVPSTPKSSFSLQDVLREKQNHIEQLMQEREIDREETANQSIMYQKNIQQLKEKVTLLEKSLADEKRRNEDLQFSVDEATFCGEELNAQTQVFKEKIADLEAQLAAGGTAGKPNEPTQPGVPPEEINECLKEQINYLEHRVDEQSDQLTVKDAELEKQYLALKNAESEQEERLAALQDELRSKKDLLAERDQQVQLLEQTVEELRADVRQRDLKTVELESDLRAKLQEQGTSSSKLAEKLSELEVALVEVNASKTHLERDLTNATQTIKVLEEDRSVKEKAAQEVESKLTASEAALKAEIAARQEQESLAQKLQRDLQSLATSGESSAALLAAKQDELSNQAKQLQELEAEKVKVQQELSSLQQKFEQSRTEHEQLIAEVHALADAERNTIAELRKQLQTSEQENLAKDKQLEENEVLVSALQNELKELNVSKASLNQELTAIKASFADKDGTLANILQEKTALEKQLEESKQELASKVKQLEEDLRNREDTLRKELELSASTAQQQLSAKEEELTRLSQAREELQKQLETAQQQMKDVSDKMKQAEDTIATQTNESQSLNQQLSSLRSELSSKDEQLAKLNAVLAETAAREEAGGKKLGEAAEQYGKLEIEHADLRRKMDAQEQKSAQVQQQKLDLERELDLQRSSTLDSNSELAKLTDELKTKQRALDELRDSYDTLKIETERRADESAQAHAALQEQVERVRQEMQQISDQKIIQENELNTELRKIKELAEQEQDNLVRTIAELKVSFEQERQRIDSEHAAELAKSVSEREQQMAAMKSELESALGELKAQLEDARTESKKLQELNETAVRAAKEQEESLQKQLQQSRDESSTLQQRLDELRQSMEQGSQDLTVQIDQKAQRIVELEQELDEQRTLQQKRSAEVAEMVAKLEENGKSYAEMLQQLQDSYTQIEALKKAKSESEEACQQVQQRLQDLNSSYSEMEEEQVDLVSREETLRKELAQLQEQMQQAAGEQKERQTTSSDAKIVEKEEELKQLQTASASKDTQLKDLQQQLEAMQKTLADSTELSKRTAVEASELQAALEKSRTTVKEQEDRQKEQQRRIAELETKLAAQATQFDELLDRKKSAETEYSHRTHDLSQKLLELESAKKQEIDELQQRLAELMQRVETQVSETAQTVSSKRAVEKRQHELECAKKDLELRETELQLANRRLEKDNEQLRSQLVLKESELTKLAKAATAAATAADNSGSVPNRAVGVTSDSKEDDSGAQIDFLNSIIVDMQRKNEKLTLRIQALESTSADSHNMSFDIQKRKPAPRVFCDICDEFDLHETEDCPKQCSDSPPESLKHPSDGKERKVPPPRKYCESCEVFGHEIGECPDDETY

SEQ ID NO: 3298 - protein, 1432 aa, Anopheles gambiae str. PEST
MFKKLKDKIAEEVKQSPQRFEQISKGLQAAVSSASSTTSEVSGSENFFSITEDDTPQNSPQRGTTTTSTSTPVQPNSSNVANASSASSSILQQQQPRTRRLSNSSMASDVSFRLPVYDSPAIYHLETDVDISASETESVSGSANANQLDLVSKDKLFQAYKKALDRYQKYRERYTELARRYRELEKDNNKARAVLVETQDKALRRMSELREQCVLEQQAKAHLDSALRMEIDELQCVVKTLRSKLEMVGENGNVSGGEKDLISLAGEDGTNGNTDGHVPVRDTGPLEDRIKALESKLNDELRQKAVLSLEVSELKKREEEHTITIAENKMAIHSELEAKEAEVRKLKEQLASLEKNMKQTLLEKDGLGKELSEVRKVAGKVRELESALGTCNEQKNKLESKFIDFERTIMELEKDKQQLKATNLTLDYEKGELQKKGSEMDARLVGMEKEKADLLVQVQELQKTAQSLDRKAEIETLQQELDEAKKSVEESAQKVAAVEQQLNEKEQQLSEARTTRESLEKQVKQTEARLAESEKEIERLQNQQSEQHSKDREESVKKLQQAEEELAAFRKSQSLDQEKLLELTKALDAANELHDRDRKSSEASLKELLERNNQLTEQLEQLQEKLDKTSGKQKKIQEEKNGLRAANDDLAKELKQVRQEMKQLTAQKQTLTEEVRNLKIINENSESEALRSLQESMRASMAAAETKLLETTRDLNHVLELKSDENRRLGEERDELVEKLEGAHKEKADLETEGTSLRAKIETVRGEKRDLEKTLEREIREKTELKAQVENILQEIGRLEEQLKDIKEAHSKLQEEKQTLEEKIERLQREHCEARVKLEKDTVGKLAAKVKDHETKLQQVECENSQLAEKNCLLEESSRRTAEELKRLTAALRAAEQGAREGQEKCGKLEEQLSQCTGDHARLYNEKELLDHQHRSLQDAMEAREKEKLCVLDTNKCLEEELAKVRSENDYLKGKHHELKALLESDKRRLMDQNDALQRQMEELAKEKQSLGRNATDLEKRLASYEEVKIENEYLNTFNKQLQGELQEAKGRVAAKETELTTLRTKQSQTESMLEERDKEITKLINEFVAKEKKQEADHKQRLEELEQRLRAELDGVAERVRSECDATLAKEKKTLRDEQTALEGRLEEMRKEKQTLREEQTALEGRLEEMSKEKQTLEQKLEELSRKEDAEKELRLENANFARDLDELKNELNAAIVEKLSQVKEHEQAQQELRAQKDRLETDNEQLRTRLAAFTAETEQNVRRFEAEIEQLKTASSSAASAPHDGTDGAGPGATAELQQSYEELRNKKEELENKLKKIMHEVQDVSNRNLFLEQKCENYLILEQSNERLKLANDKLSRQLDETLVSMHHNEGIAANTEFEYLRNILFQYLSGSVTGNNSTLVKVIAAVLKFSPQQTQVVIEKEAHRRSLV

SEQ ID NO: 3299 - protein, 1035 aa, Giardia lamblia ATCC 50803
MPLADSSPAAPMATDISRKDREIARLSHEVTTLTLTVMHLQSDIDVRDAQIRTLKSSSGGSSTDDEVKELMELLGGLQQETQLLRQQLAQKDALVDALSAKVEGRVIDFVAVVKEKDLEIAELHADLSRLRADHIRTKRTQDGTGSGAKTPTTPVSIKRSSLRESFGNTLEFNKLNDDLASRDEEIAQLTTSVARYRRELEEIQAADDSKARELLEKDREIEAFKQSIEIMANDLDRKSTEIAKLTEQCKTLEAELVKLSEATQNNLRSSRTLEGKVEELEELNMNLDLQLSQAKDDYASMNSSITAELTQRCSELELLRKEVDSLKEINKTQASEVDTLLSDTSVLRKNNEQLQLKLRDSLTRLDSQQDHIAAISAEKQASDEEMALVKAQLNSLQAQEIDNRNEITSLSSSLNKKDEQIAVLQKQVEVIPSLLAEKEGLALDLRKSTDSLKAATDTIDRLTEELVDKKNKICAYKHDNESMFEDLRMRNNSMAQLQNDLKRLSESASQREADLAEQAQKLKAALSDGEHLTCINIGLTEDLQAKTEQVEKLENNLTAEKAITLEKSQELERVSALLDQREHDLEVAAETISTMKSTTDSLEKKANGHETRVLELTVENDRLMRELTECRGTLEQAEQQIRELEIAQAAKHEKIDTLEKELQRSTELYSSKDAELLHASQRLSSLEEENKALEATAKDSLNQVAAKTEQLDALQRSVAEYDRSARERDLELEALKNEAEVSSTRLASLLAQENSNNDLIEGLKRQVNEFSNKLLEAKQAQQESSRRCAELETDYYTLQCSLEEKQASLQLETEKCTNMAHKLSEATYLAEKYEGEKAQLISQLQQTREDLKEAEKEAELVRTNLKEKITECDGLAVKLSLLEDEHEVLKVNYARDKGELKEKERQMEDLENELLVAEDNVRELTNEMDEMRRQLESVLHEKQLQEVEVNRVTNTLNVTTDTMKKQSAERTLLMEKLRLKEEEYRIPQESLIKMAFYLREKGDEVTKLNELLAEKQKTIDDLLLRIETTNDPAIA

SEQ ID NO: 3300 - protein, 882 aa, Pyrococcus furiosus DSM 3638
MKLERVTVKNFRSHSDTVVEFKEGINLIIGQNGSGKSSLLDAILVGLYWPLRIKDIKKDEFTKVGARDTYIDLIFEKDGTKYRITRRFLKGYSSGEIHAMKRLVGNEWKHVTEPSSKAISAFMEKLIPYNIFLNAIYIRQGQIDAILESDEAREKVVREVLNLDKFETAYKKLSELKKTINNRIKEYRDILARTENIEELIKENEQELIQVLQEISKIEEVLPSKRSKVDMLRKEVLRLEETKVEIENSERLLEKRRGDKRTLEERIKNTEEYLEKLKEKEKELEEQVKEITSIKKDVDAYLALKEFKNEYLDKKYKIEKELTRVEELINEIQKRIEELNEKESEKEKLENEKKEILNKLAILEKDHQLYEEIKAKKENLRQLKEKLGDKSPEDIKKLLEELETKKTTIEEERNEITQRIGELKNKIGDLKTAIEELKKAKGKCPVCGRELTDEHREELLSKYHLDLNNSKNTLAKLIDRKSELERELRRIDMEIKRLTPLLTVAEQIRSIEEELNVVNLEKIEKNATEYEKLLEELRTLEGRIRGLAEDLKKLAPLEKKLAALIHKKQELEKELKELNTKLESFGFKSVEDLDSKLRELEEIYKRYLTLLNSKKELEITQREIAKAKETLEMSFEELAEVEADIERIEKKLSQLKQKYNEEEYKKKREEKEELEKELARLEAQKKELEKRRDTIKSTLEKLKAEKENRERVKKEIKDLEKAKDFTEELIEKVKKYKALAREAALSKIGELASEIFAEFTEGKYSEVVVRAEENKVRLFVVWEGKERPLTFLSGGERIALGLAFRLAMSLYLAGEISLLILDEPTPYLDEERRRKLITIMERYLKKIPQVILVSHDEELKDAADHVIRISLENGSSKVEVVS

SEQ ID NO: 3301 - protein, 1137 aa, Leptospira interrogans serovar lai str. 56601
MGIELLLPFIASVGITILLRRLDKSNYKLSQIKRFTGKVQEELNGIALEKIGSVKDAGIDLEISLKQTRKLANEVHSLNEESRQLLESIKTNRDFLDSVARDLKEVVQLSSEIREESNAIQQGLLRMESGKKEIQLLDQKILDLRSEAEAILEVFSDKVNLRSDELLQSLASKIVELEELLEIKNDKIDQGLNSIAVNYKEGLEAHSNSLMRESVGRVEQLRSEITSLFETIRNKEEDWDLRSEKLQTIFLTVSDKLERLDLRIEEKTEAADHKLEEMAKLAEKSSQEKLDRILEQVTHSKEAFINGVKLEVDSIRREIEGMSLETMTRRDEILNETRRQAESINESIQFFQEKYLEAENKLLRQADARKSELLRQIDTFEEEFNRISSNLRNDSDVLKKEILLGFKEFHSTLEVAKEDAKEKTIQGIVSLKEEFDLELSKLHSERSALIRQDLEVVRQSIETLDKQISTRIKDVDSYLGDLQAALESSAGDLVAQVEEKIDLLSGTVDEEVRKIDQRFENLSRYWEEELGNIRLNAQDQMGRLQEKLGDVHIEGKGLLEEFKNEYSIQKDKIEEFVSRYKSNFQKEGDLVSDRLGESLRHIKEEGNEILQTLRVEFSGTIDKMEQIVKKNEKVLEIHAEKIKNNVESSLENSSRDAERVLDRLRDSAEVFFEKQEEKISRLNETIDSKISKQLTSLMDKGQLQLGQLEDRISKYILDVKKNLEESLKNSRKDNDDQMKGFQQQLQNQLYEMETAAQEILRSGKEEFDGSMMEYKELQMNLKRDLEEIRNSKQNLISEIQEESENLRSSVEEITDKMDEFGEKMELFQKASEIVDRTDSYIQTMEELLSKADEQTPLLNELGQKLNELQNLKYSLVHETEDLKLKLDSFHSIKESSDLLRSDFEELQRRSSEWQDTFTKLLEAGEKALEMEETFGDLSSRLETLESVREEVKILFEETETHKESAKGIANKLYSLQNDVEILEAREKEIAETVRKTDDRIESLFRKKEEIRSVEAKFEKIEDLMVDLSERHKQISTLQHRMEDLKNGAMVVKDDLEGLLGEADDKFEKLSGFLDAVDNVTSGKSKDSSKDHLIQRKKATVLNLYHNFQWPAETIAEKLNLETGLVNTILQSESIKKK

SEQ ID NO: 3302 - protein, 1175 aa, Clostridium perfringens str. 13
MKKMKPIKLEVKGLNSFIDKQVVEFDKLTERGLFGIFGPTGSGKSTILDGITLALYGDIARKSSNYINTNCDGVYVSYEFQITGNEVKRYRVDREFKRDNKSGGIRNKSSKIIDITGGVENVLEEKAKAVTSKCEEIIGLKLDDFMRTVVLPQGKFSEFLKLEGKERRNMLERLFNLRKYGDDLSSKLSFEIRKEKDKMNVLEGQLKGYEGISEEALKAKEEEIKEINLSIKSKEELLNKIKKEFEEAEKVWNTQKELYDKRIEEESLVSRSEEIKSFKERVEISNKADKVIVFINNLEEILKEINKEDLKFSELNKKLEELINLREENKLKFEEFTKKKEEKLPDLRLKKEKLLESQKERDILFQIKADGVKLKEACKKIFEDRSKCDTKLNSIEENEKRLNEELKEKEERKEELFVHEEFKNKINSGLFILNSYESLDKQFNEIKSEEVELKKYIKNLTEDKEKSEKDLKVKVESLSKIRDKLESLLKETPGDSNSILEKQIKLGEYREKLNKYKEIKNSLEESLKTKNNFEEKLKTFENQKLLLEKEVRELKDYINKVKVEELAHKLRENLVEGECCPVCGSTHHELNKVEKINLEESNEKTILLESKEEKLKELILEFSKIEATLEYENKKIEELNISIEEVGEVNEERLKFLEEEFNTLKDKIEEFNLKKENLEKDLEKLKEEKNNLENIFNKAEVILCEKIVREKEIASKIKELDKELKLKNSELNSIKNELKIEDIKLENELILKKEKEKNLLEKEIRILRTQLEESNKIKDELREKRDALKENYLSQKSLLDGKVEVYREKERMIKGSLKGLIDEALPIEKIDIKGLLEDLQLEIDYIEKAYLNLSEAKEKLEKAFNNMNQEVSVTKERVNSLKLRKENEEKKVNLALEEEGFKTILEVKEGILSKDEKEKLKTLIEEYDNNLIKIKANIELLIKKLNGKSLTEEEWTRVLQEKNNTEKELKEVEELKIRLVTESESIKKKLEEQRDILHIKAKQEHKLALLSDLEKLFKGKKFVEFIAANQLKYISIEASKKLKDITNGVYGLEVDENGKFIIRDYKNGGAERDASTLSGGETFLASLALALSLSSQIQLKGTAPLELFFLDEGFGTLDDNLLDVVMSSLERLHHERLSVGIISHVESIKNRVPVKLILTPAEAGIGGSKVKIERS

SEQ ID NO: 3303 - protein, 1805 aa, Mycoplasma genitalium
MKPFDKKPSLQPIYDIGFDDGYLQSEYEKNRSKTDVDKIENQLLKEIKSLEDELKNLKGLKNQAEDNPELDKKINHLEVDLNRLVNEYKNFQFQKNHMVDKVSELDNLTRFYKNELTRLQQENADFLNSKYANLANFQANYHNKLNDFHRLIENQNQTINRLNQKINGNQNLIDNNVALLQNPNITVEKKNYLLNVIDQLYNELDQLENQKRLLSIEYENTYRELVSADNELQNVYENIDQNQIQFKHQYQTYRDELSQLERKIQLTKQELVDKESALRVKIDDADFYINARLAELDDVAKQLSFQDGITKQNAQHVEDKLVALNKEKDRLNTQKEAFFNLRQSALIDINKLQQENELFAKHLEHQQNEFEQKQSDSLLKLETEYKALQHKINEFKNESATKSEELLNQERELFEKRREIDTLLTQASLEYEHQRESSQLLKDKQNEVKQHFQNLEYAKKELDKERNLLDQQKKVDSEAIFQLKEKVAQERKELEELYLVKKQKQDQKENELLFFEKQLKQHQADFENELEAKQQELFEAKHALERSFIKLEDKEKDLNTKAQQIANEFSQLKTDKSKSADFELMLQNEYENLQQEKQKLFQERTYFERNAAVLSNRLQQKREELLQQKETLDQLTKSFEQERLINQREHKELVASVEKQKEILGKKLQDFSQTSLNASKNLAEREMAIKFKEKEIEATEKQLLNDVNNAEVIQADLAQLNQSLNQERSELQNAKQRIADFHNDSLKKLNEYELSLQKRLQELQTLEANQKQHSYQNQAYFEGELDKLNREKQAFLNLRKKQTMEVDAIKQRLSDKHQALNMQQAELDRKTHELNNAFLNHDADQKSLQDQLATVKETQKLIDLERSALLEKQREFAENVAGFKRHWSNKTSQLQKIYELTKKQESEQTQKETELKIAFSDLQKDYQVFELQKDQEFRQIEAKQRELDKLAEKNNQVKLELDNRFQALQNQKQDTVQAQLELEREQHQLNLEQTAFNQANESLLKQREQLTKKIQAFHYELKKRNQFLALKGKRLFAKEQDQQRKDQEINWRFKQFEKEYTDFDEAKKRELEELEKIRRSLSQSNVELERKREKLATDFTNLNKVQHNTQINRDQLNSQIRQFLLERKNFQRFSNEANAKKAFLIKRLRSFASNLKLQKEALAIQKLEFDKRDEQQKKELQQATLQLEQFKFEKQNFDIEKQRQLVAIKTQCEKLSDEKKALNQKLVELKNLSQTYLANKNKAEYSQQQLQQKYTNLLDLKENLERTKDQLDKKHRSIFARLTKFANDLRFEKKQLLKAQRIVDDKNRLLKENERNLHFLSNETERKRAVLEDQISYFEKQRKQATDAILASHKEVKKKEGELQKLLVELETRKTKLNNDFAKFSRQREEFENQRLKLLELQKTLQTQTNSNNFKTKAIQEIENSYKRGMEELNFQKKEFDKNKSRLYEYFRKMRDEIERKESQVKLVLKETQRKANLLEAQANKLNIEKNTIDFKEKELKAFKDKVDQDIDSTNKQRKELNELLNENKLLQQSLIERERAINSKDSLLNKKIETIKRQLHDKEMRVLRLVDRMKLAEQKYQTEINRLRTQTFDSEKQDIKNFFPPLFKINGNDMAFPYLYPWLYPQQKQDDNTLQIRQLFEQQLQFMQQRYENELNELRRQRNLLEKKLDQIQLESQLNNKQSEFSKVESMMEKLLEKTESRLNDFDQKINYLTKKVNQHNTYQPSSYQPTPSYQDSDKQQLLFRIQELEKQNLFQQQFQPAPAVVQQPTSFAAPNITKQQQIAQLNAEINNIKRLIAQKAASK

SEQ ID NO: 3304 - protein, 1404 aa, Mycoplasma hominis
MKKKLNILLSISLIAAAASTAAIASVCASKNNKFRKQRKYNKETEKQEINQAKENLKKLLELIKSSDIDKTNESKVLDNSKIDENSSIEDIQNKTQEIEKAIESLTKKINDKNKKHEEDQKIVQAMQEFKKSQKALGDLINSDDGQRVDNSNAKQSLQNNTVNNKSSIEQIIQAISKINEAKKELQSQINNARNQEKEVFEEKKQQLNKLIKSNEIDNSKKADETAILKNTNVVVGDSIKTIETKTKEIEKAIESLTNKINEFKKEQEKANVKAVFSKKSKQLKDLIDSEDGKKVDSSNESQVLTKTKIDENSSIEDIQNKTKDIEKAIESLTNKINDQKQQKNMLNEVINKAKELVKKLVDSDSEIQQAKTQLDQEIQKASQVVASNDTKAINSSKTSLDAKITDITKKLEAFNATKKLEFTKLQETRSNIDKFLTPEVKANPNYTTLVNELEVAKKAKEWVSESSNKSDIVAANNELKQAFQTAQSSKNDADKTSNEEKAKLSASLSNAKKLDKNLTDSDGEIQQAKAELAEEVEKANQAITSNNTKEIQNSNTSLLNKISEVKNKLDKFSNEKEAEFNKLEASRSAIKEFINENNTNPNYTALIQKLQAKLDAKNSITKSSNKSDIIATNQALQEALAIEKTEKESANSQNQAVKNTLNETIGKAKELDKNLTDSDGEIQQAKAELTNEIEKANQTIASNNTALMENSNTSLLNKISEVQNKLDKFNNDKKAEFNKLQELKNKIDDFEKKNKNNEIYSKFNLDELINKSVQIKNSLGSINESSNKKDIVDANKKMQDALNELQAKMAEIHKKTFQEFNEHKNELENLIKKEDAKEVGTDEANTAITNNDVKENSSIEEITKATKALDEAKSKLDQKINTQKATELNSLNESKEKLNNLITSSSNQVSAEEISKAKKVLEEINNLSLNNDSSIKSLKEATQKIKDAETQLTKEIEKAKIEKTDKLKKFNEVKKSLEDLIKDDDAIQVGTDDAPKLLEDNNNINENSSIEEIINATKTLEDGKSKLDKKIKTKKQPLIRDLKRKVDDLSRWLEYSSNSEEHFAALDPDKRPKNITLDTIKKDLEDARRLLQEANKLNDDSKIANINKKIDEIKELNKKTNLWVFAIEYAFEYLARKIENSEKSIDWYLKEFKSKEKNREFVTKLREKVEKIKKLSKENKIPNLKKAAEYLENLAIIPLLLFQYNFYYELPATLQEKLIKEFENILDKETIPSDSEITELENKSIELMIAQDPKIAFTILQKQSKDLSFELRNFIELHDNGYNNFRTWMNNSLKTIEDKYNLALEKNDLDALKKEIIKMENFYKLIKTFHLYLCEIGFIKSMFYYDDKKEEVSKQAFECAKNALNDLASQDISNKELISKKVTDIKNEFYKAYINVWRKFCLND

SEQ ID NO: 3305 - protein, 921 aa, Fusobacterium nucleatum subsp. vincentii ATCC 49256
MIIKKVQLENYRSHSNTTIEFTKGINLILGKNGRGKTSILEAISTVMFNTKDRSGKETGKSYIKFGEKSSKVDIDFIANDGREYNLKTEFFKTKPKKQTLKDMIGSEYDGDIQEKLEELCGIKKGFEETYENIVIAKQNEFINIFKAKPKDREEIFNKIFNTQIYKEMYDSFLKEAIDKYKSEKENLDSKINSLKENMEDKEQITNFLKEEKEVEKNLQDRFKNINVVSKNLENEIKDYETTEIELNNLIKNIKDEENKIKKYLNILKENIIEAKQAKKSKIIVKETEKSYFEYLEIENRLKDLRENLDNLLDEQKLNIQYQNNIEKLELSNKNLKVDISNLEENISKNSEKKENLESEISNLKIKEEDLDLKLKKYTTLLDELEKLEKIKKEKSDDKLKTTAEINIFQKNLSLKKDLFKAINIEIIEKKLSDFQELEKELKLLEEQKIIFETEIKTLKKSSKELSNKICPFLNEKCQNLEDKEAEDYFSSKISIKTEDLENLKKNIEEKTQILVEKVVFEDRKKQYFELEKSIKDLELSSKNEEINLKEIELDIKNLDMNIKKLIENQEFQNSQMLREKKKELEVELRNLNLDEKRENLKNLLENLETEKEKILKNQNSIESNLKKIDEFSKKIKVDTNKNIESIKSEIKTFENKLDDLKNPYNEYLKNNVLAEDLENLLLKVDKNIKELYSLRTDKNLLKEKVSILEEKIKNIKIDELKEKYDIIKEELNEINKKLGSSQEKIENYKKILEKISSQEEKEKKLLIEFKKLENKFNKANLIRNEVGQMGRAISKYMLSGISNIASVNFNKITGRTERIEWSNEEKDKYAVYLVGQERKIAFEQLSGGEQVSVAIAIRGTMTEYFTNSKFMILDEPTNNLDTERKKLLAEYMGEILNNLEQSIIVTHDDTFREMAEKIIEL

SEQ ID NO: 3306 - protein, 1818 aa, Mycoplasma pneumoniae
MNDTDKKFPLQPVYDTGFDDGYLQRDYEKCLESAAANDAQTVELQTQLLAEIKNLENEIKALKAQESRQPDPHNNARIQSLEASLNRLVNEYNNFEFQKNYMVDRVAELNNKARFFKDELKRLQQENAAFVNSRYANWADFQSNYQLKLDQFQALIDQQNQTIKQLNEQIAANQGLIDQNVQRLQQNHSLDQQERDALLYEVDHLYNELYELENQKRLVGIEYEATYQDLVSADAELQNVYETIAQNQANFQKQCDAYWAQLKQVEQQIQTTKQELVDEESTLKVRLNDADFYINSRLAELDDLTSKINERDFVSKEQAQDVKASLANLTKEKERLSAEKDSFERLRNTALNDINRMEQENALFAKHLEQQQYEFERKQQESLLKLETEHKQLQKRIGEFKIESEAKSEALLIQERELLEKRREIDDLLTQASLEYEQQRRTNQVLKEKHRQVQQHFQNLVHAKKKLDQKRHYLAEQKRIDEEQIFKLKEKIATERRELEKLYLVKKQKQDQKENDLLIFEKQLRQYQADFENEIEEKQNELFASQKSLQKSFTQLKNKEAELNQKAQKIAEDWAHLKQNKHHHADLEIFLEGEFNHLQQEKHKLLEARTQFDNRVSLLSARFKQKQAELVKQKQSLEQLTAAFNKEQEAVERDWKDRLANLEKQKEMLGDKVHQFDENSLNISKKLAERELAIKFKEKELEAAQKQLSLDNNNNAGLKLQLDKLSESLKTERLELEASKERILDFYDESSRRIADYESDLQARLAEVKTLEKNQQETAAKSERELKVALEKLNQAKKAFLQIRKQQLLEIASVKQQLAQKANLLKNQQAELDKQTEELEAAFLEQDTDKKELEKALHSVKSKQELLERERSFLLQKQREFAEHVAGFKRQVHFKTTQMQRLSEFNKQQQSEQIKRETELKIAFADLKKDYQLFELQKNQEFQQIEQKHKELELLAQKQAELKQELEQKATALASQDQDTVQAKLDLARQQHELELRQNAFNQASLSLNKQREQLTNQVKVLHGELKKRHEKLTLKDRLLAEKEKDQHKKDAEINQRFKQFENEYADFDQAKKRELQELNQIRRNLEQSNASLLKKRNQLTLDFALLRKVQHNTQTNRVQLNTQIKEFLLEKKNFQKASDEAALQKALLIKRLRSFASKLQLQREALAIQKLEFDKRDEQQKSEINNAKLQLEQFKLEKQNFDEAKQKQLIEFKDQCQRLDVEKRLLKQKLVQLKNLSKSYLTYKNRADLSQQQLQHKYANLLELKEKLQTAKRALDKKHRAIYGKMAQFVSELRQEKKQLLSAQKQVDDKSRLLEQNQRHLQNLSSETKKKRQSLEHDINKFDQRRKEAVSSILNSHKKLKQKEGELQGILQKLSLKKTQIEQEFSKLYQQREKLDRQRTTLSKLHRELKAQNEATAHKNREVLEIENYYKKELQRLTTEKSEFDNNKNRLFEYFRKIRNEIEKKEAHIKTVLEETQKKRHLVETEAVKLHLQKQSIISKGQELKEIKERVSRDISHTNKQREELNSLLHQNKLLQKNLAEREREINNKDSLLTQKIQTAKQKLSEKEARILKLLEKMRAVEQQYQAEITRLKTRNADLEKNDNKHLFPPLFKINGNDMNYPYPYPWFYPQQKQEDSSNQIRHLFEQQLQFMQQRYENELTELRRQRALLEKKLDQIQLESQLSAKKNDFEKVEQMMQKLLEKTEQKLSAFDQKINALAEQINTQKAEHADSEKQQLLLRIEQLEKQNLAQAVQTPQPVQPVVQAPAVVPQVIQPQVVQSQPAFLATQQSISKQQQIAQLNAEINSIKKLIAQKAAK

SEQ ID NO: 3307 - protein, 1005 aa, Methanocaldococcus jannaschii
MSMILKEIRMNNFKSHVNSRIKFEKGIVAIIGENGSGKSSIFEAVFFALFGAGSNFNYDTIITKGKKSVYVELDFEVNGNNYKIIREYDSGRGGAKLYKNGKPYATTISAVNKAVNEILGVDRNMFLNSIYIKQGEIAKFLSLKPSEKLETVAKLLGIDEFEKCYQKMGEIVKEYEKRLERIEGELNYKENYEKELKNKMSQLEEKNKKLMEINDKLNKIKKEFEDIEKLFNEWENKKLLYEKFINKLEERKRALELKNQELKILEYDLNTVVEARETLNRHKDEYEKYKSLVDEIRKIESRLRELKSHYEDYLKLTKQLEIIKGDIEKLKEFINKSKYRDDIDNLDTLLNKIKDEIERVETIKDLLEELKNLNEEIEKIEKYKRICEECKEYYEKYLELEEKAVEYNKLTLEYITLLQEKKSIEKNINDLETRINKLLEETKNIDIESIENSLKEIEEKKKVLENLQKEKIELNKKLGEINSEIKRLKKILDELKEVEGKCPLCKTPIDENKKMELINQHKTQLNNKYTELEEINKKIREIEKDIEKLKKEIDKEENLKTLKTLYLEKQSQIEELELKLKNYKEQLDEINKKISNYVINGKPVDEILEDIKSQLNKFKNFYNQYLSAVSYLNSVDEEGIRNRIKEIENIVSGWNKEKCREELNKLREDEREINRLKDKLNELKNKEKELIEIENRRSLKFDKYKEYLGLTEKLEELKNIKDGLEEIYNICNSKILAIDNIKRKYNKEDIEIYLNNKILEVNKEINDIEERISYINQKLDEINYNEEEHKKIKELYENKRQELDNVREQKTEIETGIEYLKKDVESLKARLKEMSNLEKEKEKLTKFVEYLDKVRRIFGRNGFQAYLREKYVPLIQKYLNEAFSEFDLPYSFVELTKDFEVRVHAPNGVLTIDNLSGGEQIAVALSLRLAIANALIGNRVECIILDEPTVYLDENRRAKLAEIFRKVKSIPQMIIITHHRELEDVADVIINVKKDGNVSKVKING

SEQ ID NO: 3308 - protein, 1029 aa, Oceanobacillus iheyensis HTE831
MRPLYLKLTAFGPYKDTEIIDFTKLGDVQLFSISGNTGAGKTTIFDGIAFALYGRASGSDREDNRLLRSDFAEDHTHTSVELTFTIKERTYRVLRQPGHIKKGNKTKTGEKYELFELTEQKEISIVDRQIVSEVDKKIEELIGLTQDQFKQIVMLPQGEFRKLLTSETENKEAILRRLFKTEHYKYMNEILRQKKNTFEQSYNRVSDQLTQTMKQVSSTFPLRENSKLQYVFQTEYYNVQQVLEALNEEKTYYHQEIEKKTQQYTSSYKKHDIAQKEYYAAKHINEQFDQLQVKKQRSQELMNKQAEIRLIENQLKAAEQAQRIEPIEQFALNYQQQLQEKEIQLKTLTEKEQQAAEQLKLVTAKYKNEEEKSEQREKISIYISQLESYLPIVEQLDSESNEIQSLKNQNVQQEQKIREDGQLLERKEKEQESLSEEIKKLTKQVEKASDLNKRLTELRQVGKLLQRLISLQKEEAYIQNKYQQTKQDYENSEKQYQEIEQNWINNQAFVLASHLHDEEECPVCGSTTHPNKASIENQSVTKEALESFRIQKEEKNKNWQEQQVALSSTKTSLTEVSAELNEWGISLDNPSITFDEIVQEGKQLAEQKKNIQHAKEKRNNYEAKVEQQKREDKKNKEAFEQLKQKYQEQVSLLKSKQASHIEKKKQVPEEFHQLSKLKDSLRIQKQQKQEMEQAWKEIQQEYQQITQRHLEIRSEVKNYQTQITDLSKQVEKANKEFEQKISEAGFTRETYQEAKLEESILLQRKQQVENYKQEKQQIDNQVKELEAILAQQERQDLGFLEERLRDLKHDFEQNLNELNTLKKFDQEIRSIKERMEVLHNEVAETENKLMVITEVYDVLRGQNQKKVSFERYLQMEYLEQIIEAANYRLKDLSNGQFYLTRSDRQESHGRQSGLALDVYDTYTGQTRDVKTLSGGEKFNASLCLALGMSDVIQSFQGNVMIQTMFIDEGFGSLDEESLTKAIDTLVQLQKSGRLIGVISHVQELKDILPATIEVKKTKEGYSHTKLIVK

SEQ ID NO: 3309 - protein, 978 aa, Aquifex aeolicus VF5
MRPLKLEVKGFTVYKKPQVIDFTPLKFFVIQGKTGAGKTSIIDAITYALYGKVPRYGASVATKYVLSRGEKELKVALDFSLRGRNYRVERYYREFPEDSQVRVYEEGRRLNIKANEVEKWLFKISGLDYKTFTKVILLPQGEFDRFLKESSERKKILINLLGLEELEKVRQLASETFKNLEGKREALKKEYELLKDYTPTKKEVLEKTLKNLEEELKELKETEEKLRQELKKAEEKDSLERELSQVVTKLKELENLEKEVEKLREKLEFSRKVAPYVPIAKRIEEIDKKLTELKVRKNKLTKELAVLKDELSFAQEELNRIEAEKEKFKEEKEREKELEHRLKKLQEIKEILKELSQLSSSLKEKEREYEQAKQEFEDLSERVEKGKKLVAETEEKLEKIKELFSEEEYTSLKMKERLLVELQRKLKELKEKEGQLENLTQKYKEKKKVHEKVLNELKELERELKERELHYHAHMVASYLSPGDTCPVCGGIYRGKALENVDAEGISELKHAKELKEKEEREIDTTLKLYAQKINSLKEEMEKLRNEVEELRKEIPENLKERIKKLEELRIEKEKLEHKLNKYRKALEDRQKQKEEAQAKLHKAQTELELLKEKIREKSRLVKEFKELYRVERLEDYEESLKEEINYINSKLQEIEEKEKKLRKHFEELSSRKSKLEGELSALNESINSLEEERKEKLKELANIYEVAKSPREVVELYLGDKEAELERKIKEFEESFQSLKLKKSEIEEKLKEYEGIRELSDIKGEYESVKTQLEEKHKKLGEVKRELEHLGERLKRKEELQKEISELEKKLEVYRVISNDFRGDRFQKYVSEIMLQKVVDRASEYFYKFTGNYFFELERATKGRDKDIVVVESSTSQRRPVSSLSGGETFLASLSFAFAVSDLLSGSANLESLFIDEGFGSLDQDMRERVSEILEAIKTNVNKMIGIVSHIPDFAERFTERIVVEKKGDYSEVRVIY

SEQ ID NO: 3310 - protein, 886 aa, Archaeoglobus fulgidus DSM 4304
MILLKELQIKNFRSHSDSKIEFDTGINLIAGRNGAGKSSILEAILVAFYGLKPATLRKNDLVRVNSSGYSLSLTFSLNGDDYTISRKSNGESILTGKEIVEGDSNITEWVERHLCPAHVFTGAIYVRQGEIDSIIRDDESRERIIRQITRIEDYENAWKNLGAVIRMLEREKERLKEFLSQEEQIKRQKEEKKAEIERISEEIKSIESLREKLSEEVRNLESRLKELEEHKSRLESLRKQESSVLQEVRGLEEKLRELEKQLKEVVERIEDLEKKAKEVKELKPKAERYSILEKLLSEINQALRDVEKREGDLTREAAGIQAQLKKAEEDNSKLEEITKRIEELERELERFEKSHRLLETLKPKMDRMQGIKAKLEEKNLTPDKVEKMYDLLSKAKEEEKEITEKLKKLIAKKSSLKTRGAQLKKAVEELKSAERTCPVCGRELDEEHRKNIMAEYTREMKRIAEELAKADEIEKKLKERLEKVEKALEKQETVLKYRQMVDELKALENELSSHDAEKLSAESEEYRKVKERLDGLRGQQKILLSSASRIKELKSSLREIEEALKNVESERGELHRKIREEGFESLEELEREVQSLRPFYNKWLELKDAESRLESELKRREKLEDEISEAIAKLEEANGKAEEIRGQIDELLRIYSEEEHRRLSDEHLRKSKELAGLKSRLETLRESLQSAEKDLKFLEEQLAKMDEYRKKVEVFEKIAIPELTRIREKFRKYRNLVAENSMREVERYASQIFEELTEGKYSGVRLKKTTERGKEKLKVFVVYQGEEREIGFLSGGEIIALGLAFRLALSMFMIRGKIPLLILDEPTPFLDEERRRKLVDITTNYLRKIPQVIIVSHDEELKDAADKVIFVESQGGVSRVRYVEAQ

SEQ ID NO: 3311 - protein, 886 aa, Sulfolobus acidocaldarius
MIIREIRLQNFLSHEDTTVKFEGSINVIIGNNGAGKSSIIDGILFGLFKRTNRDIGKNEELIKKGKKSGQVSIKFEINGDTYLIDRNVGETSRDTISLLKEGKIITLARQSTTVNNKIKEILGFDHKILMSTTIIGQGSVESVFSDFPEVMKELLKINKLEMLRESNGPIHSLIKVLTDRIRSLQSIKDILKREEAEIDRLKKEIEEIKVKLENIEREAKEKEDELNQYNTEFNRIKEIKVQYDILSGELSVVNKKIEEIALRLKDFEEKEKRYNKIETEVKELDENREKINTISSFKSILVQIDSLKSQINVVENDLKRKKEKLKRKKELEEKEKQYEEIEKRKKELEEKEKQYEEIEKRLTYVLKNIERQKNEIEKLNYVDTQDLENKIKDVSDRINQIDNELKGLLDRRGDLNGRKEQTLKIYNNLNSIEDDRCPICGRPLDSEHKAKIREEIKVQLLELNKQITALQARINSLIKEREELEATRNKLQLELQKRSKEKGIYEAKLKELQRLEEEKNKLQNEILSLLSYHQEFENIAEKEKELIDYHEEYLKNSDILEEDIQEQEQRLNELNSKLSELEKSYNDYKAKYQFLPADLKSLVSLEERIRRRISELEKLKIEYERLKEEITRMKGLKEEYEKLKEEEDALLNRISELGYSEKRYKQLEEIIDKLSKILSGIEADKGKIKGSLEEKIKNIEEKERNIEELRNKMNEESKLNLGISKLQKLREVLDNKHLQSHIMNIVRNQIENNVNEVIAKFDLSFSAVEIDFVGKSELYVYTASGQKIHINALSGGERISIALALRLAIAKALMNQFSTLILDEPTVNLDEYRRKELIDVIRSAIEIVPQIILVTHDQELIQAGDYIIRVEKKGDTSKVEVSSYDR

SEQ ID NO: 3312 - protein, 864 aa, Sulfolobus solfataricus
MRIDKITLTNFLSHEHSEIQFMGEINVIVGQNGAGKSSIIDGIVFSLFRTHSRGNNDNLIRKGSNRGSVTLYLSNEKDKIEIIRDIRSTTEDRLIRNQFPIARSATVVSNEIEKILGIDKDIALSTIIVRQGELDKILENFQEIMGKILKLELIEKLIDSRGPIVEFRKNLENKLRELDRIEQDYNNFKKTVEEKRARVLELKKDKEKLEDEIKNLEKRIKDIKDQFDEYEKKRNQYLKLTTTLKIKEGELNELNRSIEELRKQTENMDQLEKEINELENLRNIKLKFEKYEVLAKSHTEMSANVINLEKEIEEYEKAIRRKEELEPKYLKYKELERKLEELQPKYQQYLKLKSDLDSKLNLKERLEKDASELSNDIDKVNSLEQKVEETRKKQLNLRAQLAKVESLISEKNEIINNISQVEGETCPVCGRPLDEEHKQKIIKEAKSYILQLELNKNELEEELKKITNELNKIEREYRRLSNNKASYDNVMRQLKKLNEEIENLHSEIESLKNIDEEIKKINEEVKELKLYYEEFMRLSKYTKEELDKKRVKLDEMKKKKEEIEKEMRGLESELKGLDRKALESKILDLENKRVKLDEMKKKKGILEDYIRQVKLLQEEVKNLREEVNIIQFDENRYNELKTSLDAYNLSLKEKENRKSRIEGELESLEKDIEEISNRIANYELQLKDREKIINAINKLEKIRSALGERKLQSYIIMTTKQLIENNLNDIISKFDLSIKNVEMEIMPKTGRGRSSSGDILVYTNSGDTLPIVSLSGGERIALSIALRLAIAKALMSNTNFFILDEPTIHLDDQRKAYLIEIIRAAKESVPQIIVVTHDEEVVQAADYVIRVEKRGNKSFVREET

SEQ ID NO: 3313 - protein, 852 aa, Thermotoga maritima
MRPERLTVRNFLGLKNVDIEFQSGITVVEGPNGAGKSSLFEAISFALFGNGIRYPNSYDYVNRNAVDGTARLVFQFERGGKRYEIIREINALQRKHNAKLSEILENGKKAAIAAKPTSVKQEVEKILGIEHRTFIRTVFLPQGEIDKLLISPPSEITEIISDVFQSKETLEKLEKLLKEKMKKLENEISSLQALYTAIWKYLEENDLEVLKSELKTVSEKKKELLKKREELQKEEEQLKRLLEKYRELVKKKERLRVLSLRRNELQKEVIYEQKVKKAKELEPLFREIYLRQREFERFSQELNSREKRYKELESEKEAISKEIPVHRERLSKLEEIGEKIKEELDLLEKVLKASRPLLEQRIRLKENLTRLEEEFRRLVGEKEKREKELLSIEKTENETKNELEKLLDELSILKKDHMKWLAYQIASSLNEGDTCPVCGGVFHGKVEAVEFNIDEFEKLDQKRSELENTLNVLKERKKSLSSLIEDLLMKIEEGKKNLKSIRNQIEKIEEELHRLGYSEDLEEKLDEKRKKLRKIEEERHSISQKITAADVQISQIENQLKEIKGEIEAKRETLKEQREEMDQLKSDFFDRLRKIGIGFEEFRILVKEEVKDAEKELGVVETEIRLLEESLKELESENVRDVSEDYEKVRNQLEALSQEISDLERKEGRLNHLIEETLRRERELKSLEKKLKEMSDEYNNLDLLRKYLFDKSNFSRYFTGRVLEAVLKRTKAYLDILTNGRFDIDFDDEKGGFIIKDWGIERPARGLSGGERALISISLAMSLAEVASGRLDAFFIDEGFSSLDTENKEKIASVLKELERLNKVIVFITHDREFSEAFDRKLRITGGVVVNE

SEQ ID NO: 3314 - protein, 880 aa, Pyrococcus abyssi
MKIEEVKVYNFRSHEETVVRFRKGINLIIGQNGSGKSSLLDAILVGLYWSKKLRLRGLKKDEFRRIGGKGGTRIEIKFENDDSKYVLFRDFSRNVAYLKVQENGKWRHASEPSMESVSSYIERILPYNVFLNAIYIRQGQIDAILESDETRDKVVREILNLDKLESAYENLKRIKTNINLLIESKKSFIARTENIEELIKANEDELTKKLSEINEISSKLPPIRGELEKVRENVKELESIKGKISELKIQVEKLKGRKKGLEEKIVQIERSIEEKKAKISELEEIVKDIPKLQEKEKEYRKLKGFRDEYESKLRRLEKELSKWESELKAIEEVIKEGEKKKERAEEIREKLSEIEKRLEELKPYVEELEDAKQVQKQIERLKARLKGLSPGEVIEKLESLEKERTEIEEAIKEITTRIGQMEQEKNERMKAIEELRKAKGKCPVCGRELTEEHKKELMERYTLEIKKIEEELKRTTEEERKLRVNLRKLEIKLREFSVMRDIAEQIKELESKLKGFNLEELEQKEREFEGLNEEFNKLKGELLGLERDLKRIKALEGRRKLIEEKVRKAKEELENLHRQLRELGFESVEELNLRIQELEEFHDKYVEAKKSESELRELKNKLEKEKTELDQAFEMLADVENEIEEKEAKLKDLESKFNEEEYEEKRERLVKLEREVSSLTARLEELKKSVEQIKATLRKLKEEKEEREKAKLEIKKLEKALSKVEDLRKKIKDYKTLAKEQALNRISEIASEIFSEFTDGKYSNVIVRAEENKTKLFVVYEGKEVPLTFLSGGERIALGLAFRLALSMYLVGRIDLLILDEPTPFLDEERRRKLLDIMERHLRRISQVIMVSHDEELKDAADYVIRLRLEGGKSKVEVVS

SEQ ID NO: 3315 - protein, 1132 aa, Arabidopsis thaliana
MSTPLKVWQRWSTPTKATNPDSNGSSHGTGLDMVTPVSGRVSEIQFDDPRILPEKISELEKELFEYQHSMGLLLIEKKEWSSQYEALQQAFEEVNECLKQERNAHLIAIADVEKREEGLRKALGIEKQCALDLEKALKELRAENAEIKFTADSKLTEANALVRSVEEKSLEVEAKLRAVDAKLAEVSRKSSDVERKAKEVEARESSLQRERFSYIAEREADEATLSKQREDLREWERKLQEGEERVAKSQMIVKQREDRANESDKIIKQKGKELEEAQKKIDAANLAVKKLEDDVSSRIKDLALREQETDVLKKSIETKARELQALQEKLEAREKMAVQQLVDEHQAKLDSTQREFELEMEQKRKSIDDSLKSKVAEVEKREAEWKHMEEKVAKREQALDRKLEKHKEKENDFDLRLKGISGREKALKSEEKALETEKKKLLEDKEIILNLKALVEKVSGENQAQLSEINKEKDELRVTEEERSEYLRLQTELKEQIEKCRSQQELLQKEAEDLKAQRESFEKEWEELDERKAKIGNELKNITDQKEKLERHIHLEEERLKKEKQAANENMERELETLEVAKASFAETMEYERSMLSKKAESERSQLLHDIEMRKRKLESDMQTILEEKERELQAKKKLFEEEREKELSNINYLRDVARREMMDMQNERQRIEKEKLEVDSSKNHLEEQQTEIRKDVDDLVALTKKLKEQREQFISERSRFLSSMESNRNCSRCGELLSELVLPEIDNLEMPNMSKLANILDNEAPRQEMRDISPTAAGLGLPVTGGKVSWFRKCTSKMLKLSPIKMTEPSVTWNLADQEPQSTEQANVGGPSTTVQAATTYSFDVQKAESETGTKEVEVTNVNSDGDQSDINSKAQEVAADSLSNLDVDGQSRMKGKGKARTRRTRSVKDVVDDAKALYGESINLYEPNDSTENVDDSTKASTGETGRSDKAISKNGRKRGRVGSLRTCTTEQDGNESDGKSDSVTGGAHQRKRRQKVASEQQGEVVGQRYNLRRPRRVTGEPALSKKNEDIGGVQQEEGIHCTQATATASVGVAVSDNGVSTNVVQHEATADSEDTDAGSPKRTDESEAMSEDVNKTPLRADSDGEDDESDAEHPGKVSIGKKLWTFLTT

SEQ ID NO: 3316 - protein, 1166 aa, Arabidopsis thaliana
MSTPLKVWQRWSTPTKATNPDSNGSSHGTGLDMVTPVSGRVSEIQFDDPRILPEKISELEKELFEYQHSMGLLLIEKKEWSSQYEALQQAFEEVNECLKQERNAHLIAIADVEKREEGLRKALGIEKQCALDVYDTLVLLQLEKALKELRAENAEIKFTADSKLTEANALVRSVEEKSLEVEAKLRAVDAKLAEVSRKSSDVERKAKEVEARESSLQRERFSYIAEREADEATLSKQREDLREWERKLQEGEERVAKSQMIVKQREDRANESDKIIKQKGKELEEAQKKIDAANLAVKKLEDDVSSRIKDLALREQETDVLKKSIETKARELQALQEKLEAREKASPHSLYLSLWIKSDTYKQCLHVDKMAVQQLVDEHQAKLDSTQREFELEMEQKRKSIDDSLKSKVAEVEKREAEWKHMEEKVAKREQALDRKLEKHKEKENDFDLRLKGISGREKALKSEEKALETEKKKLLEDKEIILNLKALVEKVSGENQAQLSEINKEKDELRVTEEERSEYLRLQTELKEQIEKCRSQQELLQKEAEDLKAQRESFEKEWEELDERKAKIGNELKNITDQKEKLERHIHLEEERLKKEKQAANENMERELETLEVAKASFAETMEYERSMLSKKAESERSQLLHDIEMRKRKLESDMQTILEEKERELQAKKKLFEEEREKELSNINYLRDVARREMMDMQNERQRIEKEKLEVDSSKNHLEEQQTEIRKDVDDLVALTKKLKEQREQFISERSRFLSSMESNRNCSRCGELLSELVLPEIDNLEMPNMSKLANILDNEAPRQEMRDISPTAAGLGLPVTGGKVSWFRKCTSKMLKLSPIKMTEPSVTWNLADQEPQSTEQANVGGPSTTVQAATTYSFDVQKAESETGTKEVEVTNVNSDGDQSDINSKAQEVAADSLSNLDVDGQSRMKGKGKARTRRTRSVKDVVDDAKALYGESINLYEPNDSTENVDDSTKASTGETGRSDKAISKNGRKRGRVGSLRTCTTEQDGNESDGKSDSVTGGAHQRKRRQKVASEQQGEVVGQRYNLRRPRRVTGEPALSKKNEDIGGVQQEEGIHCTQATATASVGVAVSDNGVSTNVVQHEATADSEDTDAGSPKRTDESEAMSEDVNKTPLRADSDGEDDESDAEHPGKVSIGKKLWTFLTT

SEQ ID NO: 3317 - protein, 1128 aa, Arabidopsis thaliana
MTPRSETHKIGGVTNPRNADRKGKAVAFSDDLVIPTLPPPPIGTLTGQGVSRGHTDDMDMGDWRRFREVGLLNEASMEKKDQEALLEKISTLEKELYGYQHNMGLLLMENKELVSKHEQLNQAFQEAQEILKREQSSHLYALTTVEQREENLRKALGLEKQCVQELEKALREIQEENSKIRLSSEAKLVEANALVASVNGRSSDVENKIYSAESKLAEATRKSSELKLRLKEVETRESVLQQERLSFTKERESYEGTFQKQREYLNEWEKKLQGKEESITEQKRNLNQREEKVNEIEKKLKLKEKELEEWNRKVDLSMSKSKETEEDITKRLEELTTKEKEAHTLQITLLAKENELRAFEEKLIAREGTEIQKLIDDQKEVLGSKMLEFELECEEIRKSLDKELQRKIEELERQKVEIDHSEEKLEKRNQAMNKKFDRVNEKEMDLEAKLKTIKEREKIIQAEEKRLSLEKQQLLSDKESLEDLQQEIEKIRAEMTKKEEMIEEECKSLEIKKEEREEYLRLQSELKSQIEKSRVHEEFLSKEVENLKQEKERFEKEWEILDEKQAVYNKERIRISEEKEKFERFQLLEGERLKKEESALRVQIMQELDDIRLQRESFEANMEHERSALQEKVKLEQSKVIDDLEMMRRNLEIELQERKEQDEKDLLDRMAQFEDKRMAELSDINHQKQALNREMEEMMSKRSALQKESEEIAKHKDKLKEQQVEMHNDISELSTLSINLKKRREVFGRERSRFLAFVQKLKDCGSCGQLVNDFVLSDLQLPSNDEVAILPPIGVLNDLPGSSNASDSCNIKKSLDGDASGSGGSRRPSMSILQKCTSIIFSPSKRVEHGIDTGKPEQRLSSSVAVGMETKGEKPLPVDLRLRPSSSSIPEEDEEYTDSRVQETSEGSQLSEFQSSRRGRGRPRKAKPALNPTSSVKHASLEESSKDELSGHVSVTSKKTTGGGGRKRQHIDDTATGGKRRRQQTVAVLPQTPGQRHYNLRRKKTVDQVPADVEDNAAAGEDDADIAASAPSKDTVEETVVETLRARRIETNADVVSAENNGDVPVANVEPTVNEDTNEDGDEEEDEAQDDDNEENQDDDDDDDGDDDGSPRPGEGSIRKKLWTFLTT

SEQ ID NO: 3318 - protein, 1085 aa, Arabidopsis thaliana
MFTPQRNRWPETDRKGKAIAFSDEIITPPPQRVLLREDDDWQKFKEVGLLDEASLERKDRDALIEKILKLEKELFDYQHNMGLLLIEKKQWTSTNNELQQAYDEAMEMLKREKTSNAITLNEADKREENLRKALIDEKQFVAELENDLKYWQREHSVVKSTSEAKLEEANALVIGMKEKALEVDRERAIAEEKFSVMNRKSSELERKLKEVETREKVHQREHLSLVTEREAHEAVFYKQREDLQEWEKKLTLEEDRLSEVKRSINHREERVMENERTIEKKEKILENLQQKISVAKSELTEKEESIKIKLNDISLKEKDFEAMKAKVDIKEKELHEFEENLIEREQMEIGKLLDDQKAVLDSRRREFEMELEQMRRSLDEELEGKKAEIEQLQVEISHKEEKLAKREAALEKKEEGVKKKEKDLDARLKTVKEKEKALKAEEKKLHMENERLLEDKECLRKLKDEIEEIGTETTKQESRIREEHESLRITKEERVEFLRLQSELKQQIDKVKQEEELLLKEREELKQDKERFEKEWEALDKKRANITREQNEVAEENEKLRNLQISEKHRLKREEMTSRDNLKRELDGVKMQKESFEADMEDLEMQKRNLDMEFQRQEEAGERDFNERARTYEKRSQEELDNINYTKKLAQREMEEMQYEKLALEREREQISVRKKLLKEQEAEMHKDITELDVLRSSLKEKRKEFICERERFLVFLEKLKSCSSCGEITENFVLSDLRLPDVEDGDKRFGKQKLKAEEALNISPSAENSKRTSLLGKIASKLLSISPIGKTDKVTDLGITVKLPESSQPDDSLDRVSGEDHEPSATEQSFTDSRIQEGPEGSLQSEMKSDKPRRGRGRGRGRGKSVRGRSQATKAVSRDSKPSDGETPRKRQREQTSRITESEQAAGDSDEGVDSITTGGRRKKRQIAVPVSQTPGQTRYQLRRHRNVGTEEDKAQASKGATEKQERVNDDIRKVPSPKETRTPPEGENRENGKAEVLVETVTHEEIVTVETETVFKVNNTGKNPVEDPQLEVGGSGEIREHGEEDDENISMIEEENEGEEEEETERQGNDASIGKKIWVFFTT

SEQ ID NO: 3319 - protein, 1003 aa, Kaposi's sarcoma-associated herpesvirus
MAPPGMRLRSGRSTGAPLTRGSCRKRNRSPERCHLGDDLHLQPRRKHVADSVDGRECGPHTLPIPGSPTVFTSGLPAFVSSPTLPVAPIPSPAPATPLPPPALLPPVTTSSSPIPPSHPVSPGTTDTHSPSPALPPTQSPESSQRPPLSSPTGRPDSSTPMRPPPSQQTTPPHSPTTPPPEPPSKSSPDSLAPSTLRSLRKRRLSSPQGPSTLNPICQSPPVSPPRCDFANRSVYPPWATESPIYVGSSSDGDTPPRQPPTSPISIGSSSPSEGSWGDDTAMLVLLAEIAEEASKNEKECSENNQAGEDNGDNEISKESQVDKDDNDNKDDEEEQETDEEDEEDDEEDDEEDDEEDDEEDDEEDDEEDDEEDDEEEDEEEDEEEEDEEEEEEDEEDDDDEDNEDEEEDKKEDEEDGGDGNKTLSIQSSQQQQEPQQQEPQQQEPQQQEPQQQEPLQEPQQQEPQQQEPQQQEPQQQEPQQQEPQQQEPQQQDEQQQDEQQQDEQQQDEQQQDEQEQQDEQQQDEQQQDEQQQQDEQEQQEEQEQQEEQEQQEEQEQELEEQEQELEEQEQELEEQEQELEEQEQELEEQEQELEEQEQELEEQEQELEEQEQELEEQEQELEEQEQELEEQEQELEEQEQELEEQEQELEEQEQELEEQEQELEEQEQELEEQEQELEEQEQELEEQEQELEEQEQEQELEEVEEQEQEQEEQELEEVEEQEQEQEEQEEQELEEVEEQEEQELEEVEEQEEQELEEVEEQEQQGVEQQEQETVEEPIILHGSSSEDEMEVDYPVVSTHEQIASSPPGDNTPDDDPQPGPSREYRYVLRTSPPHRPGVRMRRVPVTHPKKPHPRYQQPPVPYRQIDDCPAKARPQHIFYRRFLGKDGRRDPKCQWKFAVIFWGNDPYGLKKLSQAFQFGGVKAGPVSCLPHPGPDQSPITYCVYVYCQNKDTSKKVQMARLAWEASHPLAGNLQSSIVKFKKPLPLTQPGENQGPGDSPQEMT

SEQ ID NO: 3320 - protein, 1047 aa, Glycine max
  unsure (1)..(1047): unsure at all Xaa locations
XEKECVLDLEKALREMRSEHAKIKFTADSKLAEANALVASIEEKSLEVEAKLRSADAKFAEISRKSSEFDRKSLDLESQESALRRDRYGCEKTTEGHESTLSKQREDLREWEKKLQEGEERXLAKGQRIINEREQRANENDRLCRQKEKDLEEAQKKIDATNVTLRNKEDDVNNRFANITLKEKEYDSLRINLDIKEKELSAWEEKLNAREKVEMQKLLDEQNTILDVKKQEFEVELDEKRKSFEDGLKNKLVEVEKKEAEITHMEEKVAKRKQALGKKAEKLKEKEIEYEQKVKALREKEKLIKSEEKSLVTEKGKIESEREELLTHKAEVEKIRANNEEESLRINEEIDRLKVTEEERSEYLRLQSQLKHEVDQYRHQKELLLKEAEDLRQQKETFEREWDELDLKRTDVEKELKSVIQQKEEILKLQQYEEEKLRNEKQDTQAYVQRELETLKLAKESFAAEMELEKSSLAEKAQSERNQILLDFELQKKELEADMQNQLEQKEKDLIERKKLFEEKRESELNNINFLREVANREMDEMKLERSKSEKEKQEADENKKHLERQRMEMQEDIDVLVDLNRKLKNQREEFIVERRRFIEFVEKLRSCQNCGEMISEFVLSDLQSSVDIENLEVPSHPKLAADIVRVSNENLASSRQNTGVSPATDPKSPVSGGTVSWLRKCTSKIFKISPIRKIESEDSGTLRDVVTLSVEKTNVEDSPGRIPDAENEAELSFAVVNDSFDVQRVQSGNDIVEVEADHEPSVENLNNVDSKAXXEDLQAPDSKVGQQKSRKGGGRPRVKRTHTVKAVIKEARGILGESAEALPGESVDDHENEFPNGNAEDSANVNSETANVRKRNRVQTSSQMTVSGHGGDASEGHSDSLIPGQRKRRRQKAAAPPAQTAGESRYNLRRPKIGATTSSVRAMSGGGKESQGEVDRVKDTGEGIVDSKTSHSHSVGITXXRMVEAYILSSLXKVRXTRDGYGGDTIGTFVNNMALSEEVNGTADDVEGSESHGEDAAGGVENEDDEDYLQPGEASIGKKLWNFFTT

SEQ ID NO: 3321 - protein, 1119 aa, Daucus carota
MGRVEDMGLNAKLMKLETELFDYQYNMGLLLIEKKEWTSKFEELQQVYTETKDALKQEQEAHLIAISDAEKREENLTKALGVEKQCVLDLEKALRDMRSDYAEIKFTSDSKLAEASALITKVEEKSLEVESKLHSADAKLAELSRKGSDIERKSHELEARESALRRERLALNAEREALTDNISRQREDLREWERKLQEDEERLAEVRRLLNQREERANENDRLYQQKQSELDGEQKKIEIIMVSLKNKEDDISSRIAKLNIKEKEADAVKHSLEVKEKDLTEFEQKLNAREQSEIQKLLDEHKAILEVKKQSFEMEMDKRKNDFENDLQNRAVEVEKKEVEVKHLEAKLAKREHALDQKHEKLKEKEQYLASKLQDLNEREKSMKLEENKIEDERNQLLSDKQEMLCLKAEIEKDRASTEEQRLKLSEEIERLKITEEERLELARLQSELKQEIENCRHQRELLLKEEDELKQEKMRFEKEWEDLDERRTALMKDLKDITVQKENFEKLKHSEEDRLNNKKLDTESYVQKELDALRLTKDSFAATMEHEKAVLAERTSSEKKQMLNDFELWKRELETKLFNEREDMENALRLREKQFDEEREKELNNINYIKEVISKEREDIKLERSRIAKEKQEILMHQKHLDEQHVVMQKDIGQLVSLSEKLKDQREQFFKERECFIRFVESQKSCKNCGEMTSEFVVSDLQSLAELENLKALSVPQLAENYLRQDLQGTPDKNLSTVTPGAVGLGSPASGGTKSWLQKCTSKIFIFSASKKNNSPDQNTSRRLHVEASPNKLLNTEVIPELPSGVAGETLEMQNMQVSNSNREMESNLNLSGTEQSNIDSKALDVEDSQQSDVRAGNRKPGKRAKGRVRRKRSAKEVAEEAKTVLADPIELNENEHSNGLASAYTNESRGDSSLVGKRTRNSRKRNPSQPSQSAAGDVGADSEGHSDSVTAGGRQKRRRKVVPAVQAPTGRYNLRRHKTAAPLVANGALSDPNKGKEKEIDDGGGIGEEIPDEVDGNTHLVQVTTLKKRINVVNEFSSAGFHGINATSESQDRDAANQLVSDTMLSEEVNGTPEQSRGYQNQGDTSGAEGEDEDGDEVEHPGEVSMRKKVWKFLTT

SEQ ID NO: 3322 - protein, 1127 aa, Oryza sativa
  unsure (1)..(1127): unsure at all Xaa locations
QRENRERRDTHIEETRCAYAFPKSSRTTHQPTPEPEPGRRATSSASPRRRERAGRLPTPXLHEYQYNMGLLLIEKKEWTAKLDEINQALTQKEEILKREQAAHLNAISEYERREESMRKALGVEKQCVTDLEKALREIRGEIAEVKFMSEKKITDAQSLEASLEEKRLEIEGKLHAADAKLAEANRKKSQADRDLEEVEARQRRLEKEKLYFENERKAGEDRIKRQEDSLRDWDKKLKESQNRILDLQRSLNDREERANENDKLFKIKQEELEEAKKALEHTKATLKIKEDDINKRLAELHLQEKEAESKNRKLEEREKKIAEREEKVSAREKVGLQKLLEDHNVKLESKRRDFDLQLENEKKSFDAMLVQKEADLVQREKDVRSSEEKLSKKEQVLNESKKKLEEWQNDLDTKSNALKKWEESLQNDEKQLSEQKLQIENERKQAEMYKLELESLKATVVAEKEKILQEQNNLKLTEEERQEHIMLTAQLKKEIDEYRMRSNSLSEETEDLRKQRQKFEEEWEQLDEKRTHLEEEAKKLNNEKKNLERWHDNEEKRLKDREDELDIKYKEQGENLALKEKSLIDNIDHQRLENEELLKRERADLQRNLQLHRHELEMEMEKKQASKERELEEKENELNRKMDFVENELKRAAELNESKIQKILLEKKQLQKEKEVLVEDRQKLETDKADIRRDIDSLNTLSKSLKERREAYNRDRNNLIDIFEKYKVCKNCGXXIIFEGLDALALKDSTDIEYPSLAXXEADDRSPNPDTLAQETGALVNSGGRLSLLQKCSRIFKFSPRKKAEQSSEQQSGAFENEESERQDIADDVQMESSLGVADNCVDIHGTQSFDGNTDMVVDTTIVDVDQNGKDSAVLPVVDLEPETSKQGRRQQNRKGRAKGGVKRTRSVLAVVEDAKEILGENLEVKKDDGQGDSVTVGGTRKRRFAGATISEQDXXDSEAHSESVSLGGQRRKRRQTAAAVTQAPGEKRYNLRRTTVANAATAAQTNKKKAAKKGSKQTVEATADDTEGTSKAEEPATGSKGASQSADDASQLPEYSQAEAGDTHGPVEVTSAEGVDIVDGIDAAPDAMPMTPSGSELGAEQDDEEDDDSERRNQSIGKKLWSFFTT

SEQ ID NO: 3323 - protein, 461 aa, Oryza sativa
  unsure (1)..(461): unsure at all Xaa locations
DDINKRLAELHLQEKEAESKNRKLEEREKKIAEREEKVSAREKVGLQKLLEDHNVKLESKRRDFDLQLENEKKSFDAMLVQKEADLVQREKDVRSSEEKLSKKEQVLNESKKKLEEWQNDLDTKSNALKKWEESLQNDEKQLSEQKLQIENERKQAEMYKLELESLKATVVAEKEKILQEQNNLKLTEEERQEHIMLTAQLKKEIDEYRMRSNSLSEETEDLRKQRQKFEEEWEQLDEKRTHLEEEAKKLNNEKKNLERWHDNEEKRLKDREDELDIKYKEQGENLALKEKSLIDNIDHQRLENEELLKRERADLQRNLQLHRHELEMEMEKKQASKERELEEKENELNRKMDFVENELKRAAELNESKIQKILLEKKQLQKEKEVLVEDRQKLETDKADIRRDIDSLNTLSKSLKERREAYNRDRNNLIDIFEKYKVCKNCGQAVRTQLWCKLEEASQSX

SEQ ID NO: 3324 - protein, 431 aa, Triticum aestivum
LLVSFVMMYQDLSLKDDADIVLPSLAVEGDDRSPNTDTLAQDTGTLVNSAGRFSLLQKCSRLFKFSPRTKAEQSSEQEAEINIPFGARLEEASPSEVDYEPTPVYQAANNSFDAEGLPSDSGARGNEESERLDIADDIQIESSVGVADNCIDVHGTQPFAAANDMAVDTTIASVDQNGKDSTAAPEVDLQPEASNPPKRRGRPRGVKKTKSVRAVLEDAKVILGENLDEKNDDQEEFSYCWVVHGKRRLGWTRYQVMKKISEAQSGSVSVGGQRRKRRQPAGPSTQAPGEKRYNLRRTTVANAAAAAPPAPEKKKGGRTGKKRTVETTADDTEGTSKAADSKRTGPSESADGASQLQEFSQAETVDAHATAGEEYGDIVVDGEQGEDAMPMTPSGSERGGVEDDDEDDDDDDDSERQNKSIGKTLWSFFTT

SEQ ID NO: 3325 - protein, 171 aa, Triticum aestivum
  unsure (1)..(171): unsure at all Xaa locations
XRHEEASAREKMGLQKLIEDHEVKLEARRRDFELELESERKSFDEKMKHREADLVKKEKDLSSRENKISKREQALNESKKKLEELQNDLDTKSKALKKWDESLKLEKDKLSEEKLQVDHERKQAEMYRSDVERLKATIEAEKKQILEEQNNLKVTEEERQEHSMLTAQLKK

SEQ ID NO: 3326 - protein, 122 aa, Triticum aestivum
  unsure (1)..(122): unsure at all Xaa locations
MFTPQGKGWNGWSTPSPGNQRAGGGAPPASAPLGKAKGTSQRAAELEQELHEYQYNMGLLLIEKKEWAAKFDEVTHVLTQKEEILKRXQAAHLNAISEYERREXNMRKSLGVEKHCGADLEX

SEQ ID NO: 3327 - protein, 101 aa, Triticum aestivum
  unsure (1)..(101): unsure at all Xaa locations
ERKAREKQLKEQEESLQDWEKKLKESQNRLVDLQRSVNDREERANENDKLCKIKQEELEEAKKTVESTKIILKTKEDDIAKRLNELRSQEKDADAKHKILX

SEQ ID NO: 3328 - protein, 1957 aa, Schizosaccharomyces pombe
MSNQSSSGSNTSDLDEESASSLVSSAASPFIDSDLETPRPNISRASTGQLAEDGDTSSQHEDSSEELKRQEVRGMRRHSDLSIDAKLGSSEGSTASSALPLTPRSPSNASWLLVRGGLLDSPILDINSVTQKSNLLNELKQVRSKLAALEHENGILSLQLSSSNKKDKNTSSVTTLTSEEDVSYFQKKLTNMESNFSAKQSEAYDLSRQLLTVTEKLDKKEKDYEKIKEDVSSIKASLAEEQASNKSLRGEQERLEKLLVSSNKTVSTLRQTENSLRAECKTLQEKLEKCAINEEDSKLLEELKHNVANYSDAIVHKDKLIEDLSTRISEFDNLKSERDTLSIKNEKLEKLLRNTIGSLKDSRTSNSQLEEEMVELKESNRTIHSQLTDAESKLSSFEQENKSLKGSIDEYQNNLSSKDKMVKQVSSQLEEARSSLAHATGKLAEINSERDFQNKKIKDFEKIEQDLRACLNSSSNELKEKSALIDKKDQELNNLREQIKEQKKVSESTQSSLQSLQRDILNEKKKHEVYESQLNELKGELQTEISNSEHLSSQLSTLAAEKEAAVATNNELSESKNSLQTLCNAFQEKLAKSVMQLKENEQNFSSLDTSFKKLNESHQELENNHQTITKQLKDTSSKLQQLQLERANFEQKESTLSDENNDLRTKLLKLEESNKSLIKKQEDVDSLEKNIQTLKEDLRKSEEALRFSKLEAKNLREVIDNLKGKHETLEAQRNDLHSSLSDAKNTNAILSSELTKSSEDVKRLTANVETLTQDSKAMKQSFTSLVNSYQSISNLYHELRDDHVNMQSQNNTLLESESKLKTDCENLTQQNMTLIDNVQKLMHKHVNQESKVSELKEVNGKLSLDLKNLRSSLNVAISDNDQILTQLAELSKNYDSLEQESAQLNSGLKSLEAEKQLLHTENEELHIRLDKLTGKLKIEESKSSDLGKKLTARQEEISNLKEENMSQSQAITSVKSKLDETLSKSSKLEADIEHLKNKVSEVEVERNALLASNERLMDDLKNNGENIASLQTEIEKKRAENDDLQSKLSVVSSEYENLLLISSQTNKSLEDKTNQLKYIEKNVQKLLDEKDQRNVELEELTSKYGKLGEENAQIKDELLALRKKSKKQHDLCANFVDDLKEKSDALEQLTNEKNELIVSLEQSNSNNEALVEERSDLANRLSDMKKSLSDSDNVISVIRSDLVRVNDELDTLKKDKDSLSTQYSEVCQDRDDLLDSLKGCEESFNKYAVSLRELCTKSEIDVPVSEILDDNFVFNAGNFSELSRLTVLSLENYLDAFNQVNFKKMELDNRLTTTDAEFTKVVADLEKLQHEHDDWLIQRGDLEKALKDSEKNFLRKEAEMTENIHSLEEGKEETKKEIAELSSRLEDNQLATNKLKNQLDHLNQEIRLKEDVLKEKESLIISLEESLSNQRQKESSLLDAKNELEHMLDDTSRKNSSLMEKIESINSSLDDKSFELASAVEKLGALQKLHSESLSLMENIKSQLQEAKEKIQVDESTIQELDHEITASKNNYEGKLNDKDSIIRDLSENIEQLNNLLAEEKSAVKRLSTEKESEILQFNSRLADLEYHKSQVESELGRSKLKLASTTEELQLAENERLSLTTRMLDLQNQVKDLSNIKDSLSEDLRTLRSLEDSVASLQKECKIKSNTVESLQDVLTSVQARNAELEDEVSRSVDKIRRRDDRCEHLSGKLKKLHSQLEEQHETFFRAEQQRMTQLGFLKETVKKQEKLLKKLNLRQEQLIPRSSILVYESYIRDIEKEIIVLQERLNGIELSQQLPKGYFGYFFKTNRVEMEVLDSFKQQVAKLQFLAGAEFIVKFKEDLEKCAAEEKEKQATFDNYSEKVENLGKSIEALYFALNREISFRKSLALSKSAYHNLLVRDSPKFNPDSQITYSIPVTNTKQSLLRSAILCVISLQRLRLLGQRHSFCEEVIENLSCV

SEQ ID NO: 3329 - protein, 1015 aa, Saccharomyces cerevisiae
NSSHSSLKENFSILETELKNVRDSLDEMTQLRDVLETKDKENQTALLEYKSTIHKQEDSIKTLEKELETILSQKKKAEDGINKMGKDLFALSREMQAVEENCKNLQKEKDKSNVNHQKETKSLKEDIAAKITEIKAINENLEKMKIQCNNLSKEKEHISKELVEYKSRFQSHDNLVAKLTEKLKSLANNYKDMQAENESLIKAVEESKNESSIQLSNLQNKIDSMSQEKENFQIERGSIEKNIEQLKKTISDLEQTKEEIISKSDSSKDEYESQISLLKEKLETATTANDENVNKISELTKTREELEAELAAYKNLKNELETKLETSEKALKEVKENEEHLKEEKIQLEKEATETKQQLNSLRANLESLEKEHEDLAAQLKKYEEQIANKERQYNEEISQLNDEITSTQQENESIKKKNDELEGEVKAMKSTSEEQSNLKKSEIDALNLQIKELKKKNETNEASLLESIKSIESETVKIKELQDECNFKEKEVSELEDKLKASEDKNSKYLELQKESEKIKEELDAKTTELKIQLEKVTNLSKAKEKSESELSRLKKTSSEERKNAEEQLEKLKNEIQIKNQAFEKERKLLNEGSSTITQEYSEKINTLEDELIRLQNENELKAKEIDNTRSELEKVSLSNDELLEEKQNTIKSLQDEILSYKDKITRNDEKLLSIERDSKRDLESLKEQLRAAQESKAKVEEGLKKLEEESSKEKAELEKSKEMMKKLESTIESNETELKSSMETIRKSDEKLEQSKKSAEEDIKNLQHEKSDLISRINESEKDIEELKSKLRIEAKSSSELETVKQELNNAQEKIRVNAEENTVLKSKLEDIERELKDKQAEIKSNQEEKELLTSRLKELEQELDSTQQKAQKSEEESRAEVRKFQVEKSQLDEKAMLLETKYNDLVNKEQAWKRDEDTVKKTTDSQRQEIEKLAKELDNLKAENSKLKEANEDRSEIDDLMLLVTDLDEKNAKYRSKLKDLGVEISSDEEDDEEEEDDEEDDEEDEEEGQVA

SEQ ID NO: 3330 - protein, 1790 aa, Saccharomyces cerevisiae
MDIIQGLIQQPKIQSVDETIPTLCDRVENSTLISDRRSAVLGLKAFSRQYRESVIASGLKPLLNTLKRDYMDEDSVKAILETILILFIRGDGHDDLTRGWISQQSRLQNGKYPSPLVMKQEKEQVDQFSLWIADALTQSEDLIHLLVEFWEIDNFHIRLYTIQLLEAVMATRPLKARSALISLPTSISTMVSLLDDMHEPIRDEAILLLMAVVNDSPHVQKLVAFENIFERLFSIIEEEGGLRGSLVVNDCLSLINNILKYNTSNQTLFLETGNLPKLAHLLSEPISQDEVFFWNDQRIVNINTALDIVSLTVEPGNTVTTKHQNALLDSSVLMVVLRLAFFHNIPKKVRPVALLTAANMVRSNEHAQLEFSKIDVPYFDPSLPVNSTANGGPIKLIPVVSILINWMLYANSVHTFDTRVACSRLLKAYFMDNFDLQRDFLLKQVQLCNNSTNNVGDNAKENGGSNKSDKESDSDKDTDGKDGTEYEGSFKANLFEVLLNYDAELNLNPFKLFFTTDIFMFFFQQDHKYSEELREITRNVTTGNDLEDEEPLKAIQTISELLTTSLTAADIRIPISYLTFLIYWLFGDFKATNDFLSDKSVIKSLLSFSYQIQDEDVTIKCLVTMLLGVAYEFSSKESPFPRKEYFEFITKTLGKDNYASRIKQFKKDSYFSKVDMNEDSILTPELDETGLPKVYFSTYFIQLFNENIYRIRTALSHDPDEEPINKISFEEVEKLQRQCTKLKGEITSLQTETESTHENLTEKLIALTNEHKELDEKYQILNSSHSSLKENFSILETELKNVRDSLDEMTQLRDVLETKDKENQTALLEYKSTIHKQEDSIKTLEKGLETILSQKKKAEDGINKMGKDLFALSREMQAVEENCKNLQKEKDKSNVNHQKETKSLKEDIAAKITEIKAINENLEEMKIQCNNLSKEKEHISKELVEYKSRFQSHDNLVAKLTEKLKSLANNYKDMQAENESLIKAVEESKNESSIQLSNLQNKIDSMSQEKENFQIERGSIEKNIEQLKKTISDLEQTKEEIISKSDSSKDEYESQISLLKEKLETATTANDENVNKISELTKTREELEAELAAYKNLKNELETKLETSEKALKEVKENEEHLKEEKIQLEKEATETKQQLNSLRANLESLEKEHEDLAAQLKKYEEQIANKERQYNEEISQLNDEITSTQQENESIKKKNDELEGEVKAMKSTSEEQSNLKKSEIDALNLQIKELKKKNETNEASLLESIKSVESETVKIKELQDECNFKEKEVSELEDKLKASEDKNSKYLELQKESEKIKEELDAKTTELKIQLEKITNLSKAKEKSESELSRLKKTSSEERKNAEEQLEKLKNEIQIKNQAFEKERKLLNEGSSTITQEYSEKINTLEDELIRLQNENELKAKEIDNTRSELEKVSLSNDELLEEKQNTIKSLQDEILSYKDKITRNDEKLLSIERDNKRDLESLKEQLRAAQESKAKVEEGLKKLEEESSKEKAELEKSKEMMKKLESTIESNETELKSSMETIRKSDEKLEQSKKSAEEDIKNLQHEKSDLISRINESEKDIEELKSKLRIEAKSGSELETVKQELNNAQEKIRINAEENTVLKSKLEDIERELKDKQAEIKSNQEEKELLTSRLKELEQELDSTQQKAQKSEEERRAEVRKFQVEKSQLDEKAMLLETKYNDLVNKEQAWKRDEDTVKKTTDSQRQEIEKLAKELDNLKAENSKLKEANEDRSEIDDLMLLVTDLDEKNAKYRSKLKDLGVEISSDEEDDEEDDEEDEEEGQVA

SEQ ID NO: 3331 - protein, 1790 aa, Saccharomyces cerevisiae
MDIIQGLIQQPKIQSVDETIPTLCDRVENSTLISDRRSAVLGLKAFSRQYRESVIASGLKPLLNTLKRDYMDEDSVKAILETILILFIRGDGHDDLTRGWISQQSRLQNGKYPSPLVMKQEKEQVDQFSLWIADALTQSEDLIHLLVEFWEIDNFHIRLYTIQLLEAVMATRPLKARSALISLPTSISTMVSLLDDMHEPIRDEAILLLMAVVNDSPHVQKLVAFENIFERLFSIIEEEGGLRGSLVVNDCLSLINNILKYNTSNQTLFLETGNLPKLAHLLSEPISQDEVFFWNDQRIVNINTALDIVSLTVEPGNTVTTKHQNALLDSSVLMVVLRLAFFHNIPKKVRPVALLTAANMVRSNEHAQLEFSKIDVPYFDPSLPVNSTATAGPIKLIPVVSILINWMLYANSVHTFDTRVACSRLLKAYFMDNFDLQRDFLLKQVQLCNNSTNNVGDNAKENGGSNKSDKESDSDKDTDGKDGTEYEGSFKANLFEVLLNYDAELNLNPFKLFFTTDIFMFFFQQDHKYSEELREITRNVTTGNDLEDEEPLKAIQTISELLTTSLTAADIRIPISYLTFLIYWLFGDFKATNDFLSDKSVIKSLLSFSYQIQDEDVTIKCLVTMLLGVAYEFSSKESPFPRKEYFEFITKTLGKDNYASRIKQFKKDSYFSKVDMNEDSILTPELDETGLPKVYFSTYFIQLFNENIYRIRTALSHDPDEEPISKISFEEVEKLQRQCTKLKGEITSLQTETESTHENLTEKLIALTNEHKELDEKYQILNSSHSSLKENFSILETELKNVRDSLDEMTQLRDVLETKDKENQTALLEYKSTIHKQEDSIKTLEKGLETILSQKKKAEDGINKMGKDLFALSREMQAVEENCKNLQKEKDKSNVNHQKETKSLKEDIAAKITEIKAINENLEEMKIQCNNLSKEKEHISKELVEYKSRFQSHDNLVAKLTEKLKSLANNYKDMQAENESLIKAVEESKNESSIQLSNLQNKIDSMSQEKENFQIERGSIEKNIEQLKKTISDLEQTKEEIISKSDSSKDEYESQISLLKEKLETATTANDENVNKISELTKTREELEAELAAYKNLKNELETKLETSEKALKEVKENEEHLKEEKIQLEKEATETKQQLNSLRANLESLEKEHEDLAAQLKKYEEQIANKERQYNEEISQLNDEITSTQQENESIKKKNDELEGEVKAMKSTSEEQSNLKKSEIDALNLQIKELKKKNETNEASLLESIKSVESETVKIKELQDECNFKEKEVSELEDKLKASEDKNSKYLELQKESEKIKEELDAKTTELKIQLEKITNLSKAKEKSESELSRLKKTSSEERKNAEEQLEKLKNEIQIKNQAFEKERKLLNEGSSTITQEYSEKINTLEDELIRLQNENELKAKEIDNTRSELEKVSLSNDELLEEKQNTIKSLQDEILSYKDKITRNDEKLLSIERDNKRDLESLKEQLRAAQESKAKVEEGLKKLEEESSKEKAELEKSKEMMKKLESTIESNETELKSSMETIRKSDEKLEQSKKSAEEDIKNLQHEKSDLISRINESEKDIEELKSKLRIEAKSGSELETVKQELNNAQEKIRINAEENTVLKSKLEDIERELKDKQAEIKSNQEEKELLTSRLKELEQELDSTQQKAQKSEEERRAEVRKFQVEKSQLDEKAMLLETKYNDLVNKEQAWKRDEDTVKKTTDSQRQEIEKLAKELDNLKAENSKLKEANEDRSEIDDLMLLVTDLDEKNAKYRSKLKDLGVEISSDEEDDEEDDEEDEEEGQVA

SEQ ID NO: 3332 - protein, 1268 aa, Saccharomyces cerevisiae
FQQDHKYSEELREITRNVTTGNDLEDEEPLKAIQTISELLTTSLTAADIRIPISYLTFLIYWLFGDFKATNDFLSDKSVIKSLLSFSYQIQDEDVTIKCLVTMLLGVAYEFSSKESPFPRKEYFEFITKTLGKDNYASRIKQFKKDSYFSKVDMNEDSILTPELDETGLPKVYFSTYFIQLFNENIYRIRTALSHDPDEEPINKISFEEVEKLQRQCTKLKGEITSLQTETESTHENLTEKLIALTNEHKELDEKYQILNSSHSSLKENFSILETELKNVRDSLDEMTQLRDVLETKDKENQTALLEYKSTIHKQEDSIKTLEKGLETILSQKKKAEDGINKMGKDLFALSREMQAVEENCKNLQKEKDKSNVNHQKETKSLKEDIAAKITEIKAINENLEEMKIQCNNLSKEKEHISKELVEYKSRFQSHDNLVAKLTEKLKSLANNYKDMQAENESLIKAVEESKNESSIQLSNLQNKIDSMSQEKENFQIERGSIEKNIEQLKKTISDLEQTKEEIISKSDSSKDEYESQISLLKEKLETATTANDENVNKISELTKTREELEAELAAYKNLKNELETKLETSEKALKEVKENEEHLKEEKIQLEKEATETKQQLNSLRANLESLEKEHEDLAAQLKKYEEQIANKERQYNEEISQLNDEITSTQQENESIKKKNDELEGEVKAMKSTSEEQSNLKKSEIDALNLQIKELKKKNETNEASLLESIKSVESETVKIKELQDECNFKEKEVSELEDKLKASEDKNSKYLELQKESEKIKEELDAKTTELKIQLEKITNLSKAKEKSESELSRLKKTSSEERKNAEEQLEKLKNEIQIKNQAFEKERKLLNEGSSTITQEYSEKINTLEDELIRLQNENELKAKEIDNTRSELEKVSLSNDELLEEKQNTIKSLQDEILSYKDKITRNDEKLLSIERDNKRDLESLKEQLRAAQESKAKVEEGLKKLEEESSKEKAELEKSKEMMKKLESTIESNETELKSSMETIRKSDEKLEQSKKSAEEDIKNLQHEKSDLISRINESEKDIEELKSKLRIEAKSGSELETVKQELNNAQEKIRINAEENTVLKSKLEDIERELKDKQAEIKSNQEEKELLTSRLKELEQELDSTQQKAQKSEEERRAEVRKFQVEKSQLDEKAMLLETKYNDLVNKEQAWKRDEDTVKKTTDSQRQEIEKLAKELDNLKAENSKLKEANEDRSEIDDLMLLVTDLDEKNAKYRSKLKDLGVEISSDEEDDEEDDEEDEEEGQVA

SEQ ID NO: 3333 - protein, 944 aa, Saccharomyces cerevisiae
MDEASHLPNGSLKNMEFTPVGFIKSKRNTTQTQVVSPTKVPNANNGDENEGPVKKRQRRSIDDTIDSTRLFSEASQFDDSFPEIKANIPPSPRSGNVDKSRKRNLIDDLKKDVPMSQPLKEQEVREHQMKKERFDRALESKLLGKRHITYANSDISNKELYINEIKSLKHEIKELRKEKNDTLNNYDTLEEETDDLKNRLQALEKELDAKNKIVNSRKVDDHSGCIEEREQMERKLAELERKLKTVKDQVLELENNSDVQSLKLRSKEDELKNLMNELNELKSNAEEKDTQLEFKKNELRKRTNELNELKIKSDEMDLQLKQKQNESKRLKDELNELETKFSENGSQSSAKENELKMLKNKIAELEEEISTKNSQLIAKEGKLASLMAQLTQLESKLNQRDSQLGSREEELKKTNDKLQKDIRIAREETVSKDERIIDLQKKVKQLENDLFVIKKTHSESKTITDNELESKDKLIKILENDLKVAQEKYSKMEKELKEREFNYKISESKLEDEKTTLNEKISNLAAENSQLKNKIEDNSTATHHMKENYEKQLESLRKDIEEYKESAKDSEDKIEELKIRIAENSAKVSEKRSKDIKQKDEQISDLTQNLKLQEDEISSLKSIIDRYKKDFNQLKSEQSNIQHDLNLQILNLENKLIESEDELKSLRDSQKIEIENWKRKYNNLSLENDRLLTEKESASDKEREISILNRKLDEMDKEKWNLQESKEKYKRELQKVITANDRLRREKEELNENSNNIRIMEDKMTRIKKNYLSEITSLQEENRRLEERLILNERRKDNDSTMQLNDIISYYKLKYHSEVRHNNDLKVINDYLNKVLALGTRRLRLDTRKGEHSLNISLPDDDELDRDYYNSHVYTRYHDYEYPLRFNLNRRGPYFERRLSFKTVALLVLACVRMKRIAFYRRSDDNRLRILRDRIESSSGRISW

SEQ ID NO: 3334 - protein, 1875 aa, Saccharomyces cerevisiae
MSDHDTPMESIQNGENSDERLNAIASFFGCSLEQVKSFDGDVVKHLNDKLLQFNELKSENLKVTVSFDELKASSLKKIDGLKTEMENVIRENDKIRKERNDTFVKFESVENEKMKLSSELEFVKRKLDDLTEEKKETQSNQQRTLKILDERLKEIELVRVENNRSNSECKKLRSTIMDLETKQQGYITNDLNSRTELERKTQELTLLQSNNDWLEKELRSKNEQYLSYRQKTDKVILDIRNELNRLRNDFQMERTNNDVLKQKNNELSKSLQEKLLEIKGLSDSLNSEKQEFSAEMSLKQALVDLLESQLNAVKEELNSIRELNTAKVIADDSKKQTPENEDLLKELQLTKEKLAQCEKECLRLSSITDEADEDNENLSAKSSSDFIFLKKQLIKERRTKEHLQNQIETFIVELEHKVPIINSFKERTDMLENELNNAALLLEHTSNEKNAKVKELNAKNQKLVECENDLQTLTKQRLDLCRQIQYLLITNSVSNDSKGPLRKEEIQFIQNIMQEDDSTITESDSQKVVTERLVEFKNIIQLQEKNAELLKVVRNLADKLESKEKKSKQSLQKIESETVNEAKEAIITLKSEKMDLESRIEELQKELEELKTSVPNEDASYSNVTIKQLTETKRDLESQVQDLQTRISQITRESTENMSLLNKEIQDLYDSKSDISIKLGKEKSSRILAEERFKLLSNTLDLTKAENDQLRKRFDYLQNTILKQDSKTHETLNEYVSCKSKLSIVETELLNLKEEQKLRVHLEKNLKQELNKLSPEKDSLRIMVTQLQTLQKEREDLLEETRKSCQKKIDELEDALSELKKETSQKDHHIKQLEEDNNSNIEWYQNKIEALKKDYESVITSVDSKQTDIEKLQYKVKSLEKEIEEDKIRLHTYNVMDETINDDSLRKELEKSKINLTDAYSQIKEYKDLYETTSQSLQQTNSKLDESFKDFTNQIKNLTDEKTSLEDKISLLKEQMFNLNNELDLQKKGMEKEKADFKKRISILQNNNKEVEAVKSEYESKLSKIQNDLDQQTIYANTAQNNYEQELQKHADVSKTISELREQLHTYKGQVKTLNLSRDQLENALKENEKSWSSQKESLLEQLDLSNSRIEDLSSQNKLLYDQIQIYTAADKEVNNSTNGPGLNNILITLRRERDILDTKVTVAERDAKMLRQKISLMDVELQDARTKLDNSRVEKENHSSIIQQHDDIMEKLNQLNLLRESNITLRNELENNNNKKKELQSELDKLKQNVAPIESELTALKYSMQEKEQELKLAKEEVHRWKKRSQDILEKHEQLSSSDYEKLESEIENLKEELENKERQGAEAEEKFNRLRRQAQERLKTSKLSQDSLTEQVNSLRDAKNVLENSLSEANARIEELQNAKVAQGNNQLEAIRKLQEDAEKASRELQAKLEESTTSYESTINGLNEEITTLKEEIEKQRQIQQQLQATSANEQNDLSNIVESMKKSFEEDKIKFIKEKTQEVNEKILEAQERLNQPSNINMEEIKKKWESEHEQEVSQKIREAEEALKKRIRLPTEEKINKIIERKKEELEKEFEEKVEERIKSMEQSGEIDVVLRKQLEAKVQEKQKELENEYNKKLQEELKDVPHSSHISDDERDKLRAEIESRLREEFNNELQAIKKKSFDEGKQQAMMKTTLLERKLAKMESQLSETKQSAESPPKSVNNVQNPLLGLPRKIEENSNSPFNPLLSGEKLLKLNSKSSSGGFNPFTSPSPNKHLQNDNDKRESLANKTDPPTHLEPSFNIPASRGLISSSSTLSTDTNDEELTSNNPAQKDSSNRNVQSEEDTEKKKEGEPVKRGEAIEEQTKSNKRPIDEVGELKNDEDDTTENINESKKIKTEDEEEKETDKVNDENSI

SEQ ID NO: 3335 - protein, 1875 aa, Saccharomyces cerevisiae
MSDHDTPMESIQNGENSDERLNAIASFFGCSLEQVKSFDGDVVKHLNDKLLQFNELKSENLKVTVSFDELKASSLKKIDGLKTEMENVIRENDKIRKERNDTFVKFESVENEKMKLSSELEFVKRKLDDLTEEKKETQSNQQRTLKILDERLKEIELVRVENNRSNSECKKLRSTIMDLETKQQGYITNDLNSRTELERKTQELTLLQSNNDWLEKELRSKNEQYLSYRQKTDKVILDIRNELNRLRNDFQMERTNNDVLKQKNNELSKSLQEKLLEIKGLSDSLNSEKQEFSAEMSLKQRLVDLLESQLNAVKEELNSIRELNTAKVIADDSKKQTPENEDLLKELQLTKEKLAQCEKECLRLSSITDEADEDNENLSAKSSSDFIFLKKQLIKERRTKEHLQNQIETFIVELEHKVPIINSFKERTDMLENELNNAALLLEHTSNEKNAKVKELNAKNQKLVECENDLQTLTKQRLDLCRQIQYLLITNSVSNDSKGPLRKEEIQFIQNIMQEDDSTITESDSQKVVTERLVEFKNIIQLQEKNAELLKVVRNLADKLESKEKKSKQSLQKIESETVNEAKEAIITLKSEKMDLESRIEELQKELEELKTSVPNEDASYSNVTIKQLTETKRDLESQVQDLQTRISQITRESTENMSLLNKEIQDLYDSKSDISIKLGKEKSSRILAEERFKLLSNTLDLTKAENDQLRKRFDYLQNTILKQDSKTHETLNEYVSCKSKLSIVETELLNLKEEQKLRVHLEKNLKQELNKLSPEKDSLRIMVTQLQTLQKEREDLLEETRKSCQKKIDELEDALSELKKETSQKDHHIKQLEEDNNSNIEWYQNKIEALKKDYESVITSVDSKQTDIEKLQYKVKSLEKEIEEDKIRLHTYNVMDETINDDSLRKELEKSKINLTDAYSQIKEYKDLYETTSQSLQQTNSKLDESFKDFTNQIKNLTDEKTSLEDKISLLKEQMFNLNNELDLQKKGMEKEKADFKKRISILQNNNKEVEAVKSEYESKLSKIQNDLDQQTIYANTAQNNYEQELQKHADVSKTISELREQLHTYKGQVKTLNLSRDQLENALKENEKSWSSQKESLLEQLDLSNSRIEDLSSQNKLLYDQIQIYTAADKEVNNSTNGPGLNNILITLRRERDILDTKVTVAERDAKMLRQKISLMDVELQDARTKLDNSRVEKENHSSIIQQHDDIMEKLNQLNLLRESNITLRNELENNNNKKKELQSELDKLKQNVAPIESELTALKYSMQEKEQELKLAKEEVHRWKKRSQDILEKHEQLSSSDYEKLESEIENLKEELENKERQGAEAEEKFNRLRRQAQERLKTSKLSQDSLTEQVNSLRDAKNVLENSLSEANARIEELQNAKVAQGNNQLEAIRKLQEDAEKASRELQAKLEESTTSYESTINGLNEEITTLKEEIEKQRQIQQQLQATSANEQNDLSNIVESMKKSFEEDKIKFIKEKTQEVNEKILEAQERLNQPSNINMEEIKKKWESEHEQEVSQKIREAEEALKKRIRLPTEEKINKIIERKKEELEKEFEEKVEERIKSMEQSGEIDVVLRKQLEAKVQEKQKELENEYNKKLQEELKDVPHSSHISDDERDKLRAEIESRLREEFNNELQAIKKKSFDEGKQQAMMKTTLLERKLAKMESQLSETKQSAESPPKSVNNVQNPLLGLPRKIEENSNSPFNPLLSGEKLLKLNSKSSSGGFNPFTSPSPNKHLQNDNDKRESLANKTDPPTHLEPSFNIPASRGLISSSSTLSTDTNDEELTSNNPAQKDSSNRNVQSEEDTEKKKEGEPVKRGEAIEEQTKSNKRPIDEVGELKNDEDDTTENINESKKIKTEDEEEKETDKVNDENSI

SEQ ID NO: 3336 - protein, 1363 aa, Podospora anserina
MVQPGIGGLDTPRTNIGDATYLGRQPDFDLSQELSDFQSPSKDANLLQQLRNGGRPTLKTPRGGRGPLRDRQNLPGFGGNEFTPLLKSATRNSARRYGAGKENGLGRASTLNFLNRIDEDMTPLPAGETSMYLGSRNTSSIEHTPLPEVDSSSVASTPLVMRRRDNSGKGPLEDGNQLSLREQENVIDRIEKENFGLKLKIHFLEEALRKAGPGFSEAALKENTELKVDKVTMQRELQRYKKHLTSAEKDLETYRQQIVEVQEKAKKKYATEDQGAELERLRQALEDKETEVDKLQRQIEEEQKEQDKLGNLQDEITDLEHDLRRKDDVITQQEDEIEDLKDKVTEFEEKLKETQRRMLEMEEKAKDSDRLHEAKDTIEDLEHNVRRLEQQVDDMKDKLQDAVAEKERAENDLEELQEEMANKSVVTKGLSRQVEEKVSRLQAEVDKARQECAVVAEEREVQQREMETLRAKLKEAREERDSAERLRLAIEGQLNEEQGSQRKEFDELRMQLKSARQERDDAERIRLSLEAKLDQAQADLNMRADEKNLLQTRHDALTNESVSLLGEVQSLQKAVEELEESLEREQQHALNMERDIQSQYKDEIDRLNDEISDLQAECREKDNLYDNDSEKWETERHQLQAEKQRAEERAAGLQKTIDKLRDTEGALSSKESKLQEALQSETERHKKDELLLKVQIEQLRSDLNARQSMLEELRHELSAVKDELRQSQLDCQAQQEKIEALEDEVEVLQVTIDEESERARVELEQHQDECDQLRHEINLLQIKADSAQASSPTTRESTKQTNDNVARLKFQLADATEKVSQLTKERRTLQERSTTLDAELRSVRAALEETRAERDELEAQINGLKGQQGADTFKIDQERLDLRVTRTKLEAELRRLKEENKALAERKQEVERSLESEIEKAAAEEDRLGDEIRQLQAKLRQSTDSQELASLRRTIREMERRVQDYETQLAAPQLPAQGLDGNSELSFLQKELSAARKKEIEQLKSEASQKDTIKSLKRQISELERKAHEAEIKRFASSPSSQGGSAQKSEISELRHQLSTAAQSVHDLKKALREAERKAEASARELATQLEEIEDEKLLLEQALDDAQLAAEESAAAHEEALKKHKAKMERYKSERDQLAAAIREQQHLNGNDTNHSEMSLEERRDLHKMLRESQLTADKLDRELREHREALDELMDVEISLRKKLERARNERAAYRTSAEKLQKDFKKLQAQKDKAVAEAMAATEERALVRVTKGSVDTDAIIRAAEAAERRHEKEIRGMVMQMEWLKACWDREAKLRKDAAFAKKYLLLEVQIRDAWYVSPLLALSLTNNANNKTATRLTWRSSTGYGLSLTLRIVMLFPS

SEQ ID NO: 3337 - protein, 1197 aa, Candida albicans
MSETKEAPKPTKQESQGILKKLTSGDTWVSPFRSQASEEDPKKKINLYKQFKESNKIEHIKVPVKFSYHPTLEAEAKKKKAAEAEAKKAKETKATVTSTEAKDAKEETETKAEKVEEKLETDAKEPLIEDETKEEAKVDTEAKEPLIEDEDKQEPANEAEEKEAELEDKAEEKLVTDQPKDEEIEVAEPKEVSAASEVEEQKLEKDAAEPEIQDGEALKGDDNIEKQIKENPIELVDQPSQFKYEPVELPNKETLDKLQDKPVLLKHYQELNAIGVGSIANRIEDPNKVIELGSGLRMTQQQLLDIAAKRVAPVITNINDEVSKTRQEDEIKRQQGLDNKVKKHESKLQSDFEKYLGKIGKKKDKFNKEIEEKLANFETMIKKSNNTAIEFEKTTKGEIETANKEYEEREAKAVEQHATDKETIEKNHEELLATKKQELEDAKTGQETATQEIEELKDKKTELDDKNSELADKIEQLTAQLNTELAKLDDLKANHKEHQDSIDANLTKKKELDDNLTIIRKDLSDKKEKHKGLSAEVGVLAGSAAAYAARLTSLHSDKEDRAKRLAEAKDKHASWLKEKRELAEQTARDHERKRLEATHEYETQKHLEELERQKQKEELERKEKEEAEERERQAKIEAEERERKEKEEAEEKARLEKEQAEKEAKEKELKEQQEKEEAQKKKNDVEYQVSQAILSRETDQKKFEEERAESERIYNERKAKEKEETDRLLKEIEDLKAEKEKAAELEREEAEKVAQAKLAQIEKLKQEHEAKTKLFNDKLEFENLQKQRLEEEVANLKKIRELREEKARLASEQYKDPELERVKKLIQERELEVDKLTKVIEFEKPEQTSSEGGHFLGISNDSKSGAIPVIKSKDVVVGNNENSHSKSVNTGNEAKTENESDDKKKDHHYGGAALGIAGGILAAAGAGALAAGSAGKNAVSGIASGVSNAVPSGNKDVQLPSNGSGTQGNTTTSAPGQSQSSSPLATTTEPSGSAASIPTSSNTSTISSKKNAASVTPTPVEAQRTNSLSDKFKGWGRKLSKKDKSKDVNSAAGETTAETGVIAKDDDKPVGGITALDAEKNTVVARDAKPIGGVTALDAEKNTVVARDTKPIGGINANDIEEKPSVGIFVSKNVSSNKTSTDADDESFEIQSVYEVVSDSEYEANKHNPNYFEVSPEEFEKHKNLENKVVLIEKISE

SEQ ID NO: 3338 - protein, 857 aa, Giardia intestinalis
MSEAMVFSKIDEYTLFMSRSLQKSLKTFAEQVMALIYQYKDTLVEDRLALTNTLDEAVQILVDSGKEEADKLGFNIYSAVSRYISEIWASQSGQTTAAPPATDIDGLHRQLVALKNSLGQNAELYEQRCQLQAELRELQEFSENPAAAVEEIMQLKAQIDELKYGASNHNALVQEKRDLERHLADLRLSRQDTNSRLPQEIDRLRAEIEDEKRNLPHMDDLQRQRDELQRQLDTIRRRGNTSGVMAEIENIQRQIDDANSSASSEHELRMLRAEVETLRAQKSIVTRLEAENADLRRELQDIRGRAQEMSASQRYSANQAQELQEKAMQAEELLQQKIELRRQLHEALERADAGEAALRDKRRLEDEIKGLQLRLTENDFTKERSILRNEIQAKTTEIDTLISDRRALETKLLNKEAEVDQLLYEKQLLKTELNSYRGTNEDIDKLTFEKRQLVEELNDLREKTIKYDQLAREKAALETELKENSYNFDQLLEQKQQMRSDLNALREKAADYERVDRELRLKDKELEEKNAEIERLLEDRRVMRTELLHSKESATDVDSLIQEKRLRDRELAHLRDRMSEYERVVEERIQKEKENNLLKQRITELEQQQRTATVRETEMSALREKANELDGYNRERQAREHEINMLRDKALESDKLRQDNRVMAMELTELREKVQLLEKLQYEKRARDVEMLELRHKAMDVDTLVEEKQRLEMRLAELKIKVNNYDQLADDKARLQEQLKEMSDKLIEFEMIMDDNRRLKLQVKELDLKTANMEKLYEEYKKLEDQLKATKAMTSTGMGVSAASPAFYKTKSMRLTQQNNQMKNTTDNLLTRDIPKLIDKLIERPAGTTTMGRSGKF

SEQ ID NO: 3339 - protein, 746 aa, Naegleria fowleri
RYRMEEELKIKNSEIDRLKKLSESSKDELTLQLNKTNDEKNELVNKLKKAEKDLKNLKKSKDDLQAEKDDSDNRIRKLEQDLREKEQLSENLAKRIADLENEARTKEAQKKSTEMELSSVKDDLNRTKQRAEQLQSDLEAQRERANELENLLSDTEGGKNQLDSQFKQLQNELQNERTNLQKMKSENERLQRELEEMKRSLSDKQNESTSLDSKVKSLEDKIRELTALLETERSSKTDLDKKRSKMDKEVKRLAQQLQETEQALKGETQKKNDADNRVKQLESELQGVKSERDRLNKDLNNTSGDMNGLKRQLDESNNLVAKLKAEIQKLQKDLSDHHGDREETEEQLDALRKQLQELTSRLSDANQKTQQEAASRQNLESENNRLKSEVSRLREDLQNENRRLKQEMERVQSESENEKSELLTQLQKLQEAYSEVKDELKDLSKNASRGGGVVGGVDSAEVEKLRREYEMQLAQLKARVEEVTQQRVDVENKKRSVEMDLTEMKTRLQTEERLRKKVEQQKKSVEMECDELRELAEEAEDLRDELNRTKLEHQALIQQLRQDLLQERHSRASAEESATRQKREIEELQQDLEQERAKLDEAARRLKQQYENEILDLNNQIAQAKKERSAASRDMKKADRDLREYQRRFQEEARAKQDLEQRLTKVERENKLLQSQSQSDASKYQKAEQEKQRLEAENRQQKDKILELQDDLEKLRQQVNSERKKTQRIARKASPFSAGELIDDLQ

SEQ ID NO: 3340 - protein, 1939 aa, Plasmodium chabaudi
MIFNLKKSKKNEDGSNKDSKKTNETSGIEKKEKSNKWYNKIVNNSTKKDKDKNNDSIVYDDESKVGENDHHMKEYELEDQLKETLKSITALSIKVKEYEVKIEELEKELKLEKEKQINKEYEKELNEKSEFIKRQMELLKEKELNINLKENKINNKEIITLKREEKLNDIESEYIEKNKEKEKLNYEVTNIKMSLDKLTCEVQEKKDNLEKINKKVIEKENNLRELKEFMKEKNEIIESLDGTINDKKNAYEKLEISFEEKRKMIEMLDSKLIEKEENFANKQAKLEKENEIIIEKLKDIESREKDFKSKEEKFASMENELNTLKSDLSKNACQMEVYKLEIKDLSQSLVEKEREIFEIKNEYDDKINNMKEKLSSINDKGIDNTVLHSEEEKINKLLKEKETELNEIHKKYNLEIETIKNELNEKEEELEKNKKAHTVEVTNLTKEIKLLEKKTEDAKEGHKNELNELNNQLSKLNKEKDNIKNENTELNDKISSLNSEVNILNKDKQTLGNDIKTLNDLINNLKNEINTSDNKMNKMKEDLAMLNEEMEGKCVVIDEIEKKYKNEIFMLEEKLKEKENYADLNDEISILRNSIYVKEKEFIEMKEFYENKINLFNKNFEEKKNIYENELNSLRLKYDNEQGLIKQIDELNIQKLKTEEKYLQLYNDNMHMFRSICTKIDMPYSENIKGSDLVDFVTAYIKRRDESSSDANPDTTHKEMVAELEKRHAAIVAELEEKHKEEIAKLGEGHKEVVLRLGEQHKEETIILEEKHKDVVTKLGEQHKENIIKLEEEHKDVVTKLGDQYKEEIAKLKEEHAVVVAELEEKHKLGEGHKEMVDELEKRHADFVEGLEEKHKAETAKLEEGHKSEMNEVEKRHADFVEGLEEKHKAETAKLGEGHREVVAGLEEKHKEVVAELEEKHKEEIAKLEEGHKEVMAELGEKHKEVVAGLEAKHNLEEGHKEMVAELEKRHADLVAVLEEQHKAEIIKLGEEHKEVVAGIEEKYKVEAIKLAEEHKDVVTKLGEQHKEEIAKLEDGHKEVVNEVEKKNASLLNMLEENHKNEMIKLKEEHKESASDLVEKLYQKDEEVKNSNNKIEELTNVIKDLNDSIMCYKKQILEEVEKRNEYNEEINKLKIVQNEMKDMNDKKILEKENEIKKLNKKLSNYKVFETKENTYKNSEMVVNENKERIIVDSVCKENISESDVEGKGGNLKMTLSLKKKERNIFSINDNKNESSELVDTIKSAYINKIEMYKKEIEDNGKNIEDLKNKILDLSNELINLENMKNVLTDENNNLKKEIEIKDNKLNEKEKNENTEILNLNDDIIKLKKEISEWKDEEEKLTKENIKLKNDIEQINKEYKIKEENLMIKFNENINEVTSLKNQIEIEKMKLEELNKNYELLLAEKRETNMSISNDDNKIVENNILEDTDSKQNNLNKNVEDKTGDDINCEKNNDQAKEISYLKDEIKKISMLYGEELNRKNSYDEKVKNLTNELKELKIRNKKGEEAIAELNKLKNIKEKNKSVKQNDESSSNNIITKDGDKTPEYVSNDDKIQKDWKANLVLKLKEKPDLWDNINSLEKENFRVMSIVKENKNVQNDKIVGIYSYFKKCEKELKNDMLVICLVLKDILSILFLNDNFVNLFEKIDKILWKQMYIPTEIRILFLRYFSFLDKLRNYVKCVNEEYVNNERYEYSWALFQTYLETASNLKKEMIYYVLEKAEKDSCENNSSNFDKPKITDILNFSKDSIRLKTIAQLRKELNFEREAKNILNYDYQIILNKYHECLRKLKIVKNMARELDFNYNVSSKFSIKKELEMCSDENDEFKYNNIKNNEEKNDTIKDPKHNNLIQKIINLQRNKKTEKKKNNLVNEINTMYPGDTTPKGKIFTTNDNSKQNEILKKKDNINNNITHKNVYTGQVKNIFNEPVERKVRISFIHKSPFN

SEQ ID NO: 3341 - protein, 1909 aa, Plasmodium falciparum
MKHILYISFYFILVNLLIFHINGKIIKNSEKDEIIKSNLRSGSSNSRNRINEEKHEKKHVLSHNSYEKTKNNENNKFFDKDKELTMSNVKNVSQTNFKSLLRNLGVSENIFLKENKLNKEGKLIEHIINDDDDKKKYIKGQDENRQEDLEEKAAKETLQGQQSDLEQERLAKEKLQEQQSDSEQERLAKEKLQEQQSDLEQERLAKEKLQEQQSDLEQERLAKEKLQEQQSDLEQERRAKEKLQEQQSDLEQERRAKEKLQEQQSDLEQERRAKEKLQEQQSDLEQERLAKEKLQEQQSDLEQERRAKEKLQEQQSDLEQERLAKEKLQEQQSDLEQERLAKEKLQEQQSDLEQERLAKEKLQGQQSDLEQERLAKEKLQEQQSDLEQDRLAKEKLQEQQSDLEQERLAKEKLQEQQSDLEQERRAKEKLQEQQSDLEQERLAKEKLQEQQSDLEQERRAKEKLQEQQSDLEQERRAKEKLQEQQSDLEQERLAKEKLQEQQSDLEQERLAKEKLQEQQSDSEQERLAKEKLQEQQSDLEQERLAKEKLQEQQSDLEQERLAKEKLQEQQSDLEQERLAKEKLQEQQSDLEQERLAKEKLQGQQSDLEQERLAKEKLQGQQSDLEQERLAKEKLQEQQSDLEQERLAKEKLQEQQSDLERTKASKETLQEQQSDLEQERLAKEKLQEQQSDLEQERRAKEKLQEQQSDLEQERRAKEKLQEQQSDLEQERRAKEKLQEQQSDLEQERRAKEKLQEQQSDLEQDRLAKEKLQEQQSDLEQERRAKEKLQEQQSDLEQDRLAKEKLQEQQSDLEQERRAKEKLQEQQSDLEQERLAKEKLQEQQSDLEQERRAKEKLQEQQSDLEQDRLAKEKLQEQQSDLEQERRAKEKLQEQQSDLEQERRAKEKLQEQQSDLEQERLAKEKLQEQQRDLEQERRAKEKLQEQQSDLEQERRAKEKLQEQQSDLEQERLAKEKLQEQQSDLEQERLAKEKLQEQQSDLEQERLAKEKLQGQQSDLEQERLAKEKLQGQQSDLEQERLAKEKLQEQQSDLEQERLAKEKLQEQQSDLEQERLAKEKLQGQQSDLEQERLAKEKLQGQQSDLEQERLAKEKLQGQQSDLEQERLAKEKLQGQQSDLEQERLAKEKLQEQQSDLEQERLAKEKLQEQQSDLEQERRAKEKLQEQQSDLERTKASKETLQEQQSDLEQERLAKEKLQEQQSDLEQERRAKEKLQEQQSDLEQERLAKEKLQEQQSDLEQERRAKEKLQEQQSDLEQERRAKEKLQEQQSDLEQERRAKEKLQEQQSDLEQERLAKEKLQEQQSDLEQERLAKEKLQEQQSDLEQERRAKEKLQEQQSDLEQERLAKEKLQEQQSDLEQERRAKEKLQEQQSDLEQDRLAKEKLQEQQRDLEQERRAKEKLQEQQSDLEQERRAKEKLQEQQSDLEQERRAKEKLQEQQSDLEQERRAKEKLQEQQSDLEQERLAKEKLQEQQRDLEQERRAKEKLQEQQSDLEQERRAKEKLQEQQSDLEQERLANEKLQEQQRDLEQERRAKEKLQEQQSDLEQERRAKEKLQEQQSDLEQERRAKEKLQEQQSDLEQERLAKEKLQEQQRDLEQERLAKEKLQEQQRDLEQRKADTKKNLERKKEHGDVLAEDLYGRLEIPAIELPSENERGYYIPHQSSLPQDNRGNSRDSKEISIIEKTNRESITTNVEGRRDIHKGHLEEKKDGSIKPEQKEDKSADIQNHTLETVNISDVNDFQISKYEDEISAEYDDSLIDEEEDDEDLDEFKPIVQYDNFQDEENIGIYKELEDLIEKNENLDDLDEGIEKSSEELSEEKIKKGKKYEKTKDNNFKPNDKSLYDEHIKKYKNDKQVNKEKEKFIKSLFHIFDGDNEILQIVDELSEDITKYFMKL

SEQ ID NO: 3342 - protein, 2910 aa, Plasmodium falciparum
MRIREKKLEDKDLPKNKKGSRNVKDEKCNRNIRNEEYIKSTTKKDKIENIVKKLDDIKNKVTDSTDGLKCVEILFNKAGTNCLLPVDNDIQNKLGKKRNTNLIKKENNNNNNNNKCDNLHNTYLFNGPVKNFEYLNVQNVHTFFHKYFYLKKNTDDTYDNIHFEDILKENKNNFSFLEKQPSDINPLFISLPYNIHMDEIAEYNKMMEQTSDYNNVDLGDKKEQTNDILLKKNTNIENNNNNKKNKMNVYQNDFYNLLNKKRKVNNNTDNVNLQMNEMVSLNMYKKNNLTSNFLLNHDNNIDNKELYYFNESINEIHENCTDSKILILKICNIIFEKKKTKNIHILKQLDLLFNLQKSYENRNIFYEKKSLYGMENISSKDNINNDNNNNNNYHQNFSFGKENYVFLDNNNTSINIVREDESKEKSISNYNFDKTLFLFYNVLLKVSVHISGLYNTFMDILNYNSSDALNNHINSNNNNNNNNNNNNNNNNNDYFISYELRKLIESINIYQRAVNAALYLFHYILHMLEITSQKNNNMLIIENEISTIRNFIKIINKWKKVDSNILINIVQYKNYPNTQNNDNTYKSNKQLNIQQNENKKYKVNLINKELVRHNFEIRKIIICKYNNKIIKWMKKIHNLYIMHVYKSYKNDQNGYINEEEKNETKTETKNEKKNETKREINNEKKNETKREINNETKKERNDERNDERNDERNNERNNERNNERNNERNNERNNERKSETNKWTCQYRDNYQTPYCCNIYTKDKIENKKNNYNIPCEVESLSFFFHCCNINTYYWYKKEIDINNMKIIFYLSNLLTKEVQNSEFIKRQMNSYFKEINNLFFDIKDIYDILLCYNNMRNLNKEDNINIPTCQLNNSTCQLNNSTCELNNSTNQLNNFIYNKDLCSKEIEDLLSDMSKYNNINVDKIMHKYNTYNDEILLKMSNMKNVDMLLLLLSNNIYNKIMSTTLYNNFDIIKFIMKWIFVHVIKIFVKDTYMLYINNNQGKINESNEDHNLNKNKDSHIDNNIEGENFLMNQKLIDEEVEKRVNIIKVELENEKNIIINNIKEELQNEEKIKYNDIKTNLEREKKINMHMNIELEKERKINDEMMIKFEKKNKMYDDINKELENEKKQNKEIYMELQNIKNINSDMNFALEDKSVQYDQKCIDFEKLNKMYEDTCKELNNKNVLYEQMNTQLYKEKINNDEICTELEKIKNINKNIQINLENEKKTNEQKDKQIEKQKMNIKEMVIQLEKEKIINNEIITQLENEKLNNKIIYEDIEKKNKLNSELEENYENQQKKINEMIIQLEKEKIINNEIIIQLENEKGSVKKINTELENIKKMNDEMNEKLNKEQKINNDLQLDLENEKNEKDHINKEFEKEKIKNIQLKKNMDEEKKTNESLNVEIDRLYKINEHVLLNLEEEKKIIDQFTIDLENERKRNHILQLHFDDEKKKNDQNYEDLLKEREKNKKLQILYDDGKNNISQLNIDLENERTRNNDLKILLDQEKKKNEQINDDLENERKRNNQLQNILNEEQKKKEQLNVSYEEQKNINHQLENELQKQRITYKKMIAKFERKFLMKNTNDTQKIKDTQQIIDTQKIIDTQKIIDTQKIIDTSNNVNQMNDEHKHVDQMNDAESEDNTFLELQLEKVKQVNIDMIIQLKKDKKRIDELNLELEKEKEVNDKIIIQMEEYKMKIEHINEELEKEKEINHNLNIRIEKDNEKNEQLNIQLDTEKKMNNQMSIELDEEKKMNHQRRIELDEEKKMNHEMNIELDEEKKINKEINILLEENKNKIIQINSCLQKEKEINELLNIQLEDKKNNIQELNIKLEDEKKLNEQINVTLENKINNIQELNIKLEDEKKLNEQINITLENKINNIQELNIKLEDEKKMNQQINIQLEEEKNKIIQINSHLKKEKEINEELNILLENKKNNIQEITIKLEEQKKINEEQYIQLEKDKEIINSMVVEMEKEKIINNEIKQKLEKEKKQNDQLVIHLENEKQANKKLNILLDQNKKINEELNIQVEQEKLINNEIIVQLKKENEENNKINSLLEEQNGLNKKVTLQLEKEKEENGKLKLQLENEKQENGNLRFELENEKKDIANLILQLQEEKENTKNVMVQMDKEKEKTKNVMVEMDKEKENTKNVMIELERERENNQNLNIKLEEGKNIMNQISIQLVEKQKIINQLNVKLENEKEENEKLKLEIDEEKKYNKQMSVELESEKEENEKLKLEIDEEKKYNNQMSVELESEKEENEKLKLEIDEEKKYKNQMSIELENEKEENEKLKLEIDEEKKYNKQMSVELESEKEENEKLKLEIDEAKKYNNQMNVELESKKEENEKLKLEIDEEKKNLNKVIYELDGEKIKYNDVCIILDNEKNKMKELNEKLINQEKELENIKKKLEEETLNFKKYREINYKEKNGSNDYTMENGKNVVTRNKINNEMNILDILDKNKKTKKTISKSNNNDNDDNNMKDEKYNKLYYSYVEIVIKKEELENEFNEQMKYFNDKVDIFDKKVQYFNKKITHYKNVCNMYIKNNGKISTCIKKLEEILYSIEKVHIKDKIILDGKIYNIKIIIKEINECIHMKIQETEDTDVLLYDEVINEKNILLEKILNNEKDKNIYHIEKDSELEKYMKELNFKNINDLFTFHLSMLDELCIIKKCYQQAVEENAMKIKEYDNNILILNKQIELKEKKNYINEKNCKSLLLEVDNLKFILNDLLSYVDHKDGKRNKRQRKMSIKNELKYINMEIKNIENEEQNMLINSEIENDGNHNEVPCAVINVHENIRNNHNRKMDNNSNIHENIETKKTLELHDSIEKMNTFENSFERNNTLNEENNLRNVQSLYPNFLEYKENSSFKSSTLKSNNLSELDILSNELNSNTTSKRKYSRNKNKKRDSVRQYELRSRRKE

SEQ ID NO: 3343 - protein, 980 aa, Plasmodium falciparum
MKELRKELILKKKNYEELRLKLNHLECVERDSVKINSEKEKGEKVIYELKEKLDNDEKIINDLKKKNSYQVYKMKDYEKRENNLINEINKLKLFIEENKMTVERGNEMNNKKLEEMKQKNKELINNLNDISDELKNCIEQVNSVSRNMANVEKEKENIINELQILRMKNDTMRKRISKFVEQEKVLKFKLYTLNNDIFSKNEKLNDMQKKLNDVNEKYKNIVECLNNYKTEHKEQIEKKIERINTLKQNYYYLKKEYDLKNKELEKNIEHGKKLEHELSHCYEENQKLNEEIKRRNSFIKNKDRKIDLLTNIENELLKKKEINNIKLMEKQNVIKNNEQLLKDIKDENEKMNEHVNKLQNELIKRELQNKCISKDIEFCKKEKEDKIKNLEDDLLEKKKCIENLKDELINIKKKMEDKMHMTNEMDLLSNKVEELNRINKTYEKNIVELNNELDVIKKKLNDEEFLKEEEKKKNIDMVYKIKEYEIQIKEKENEIDSLKKNEQNLHVLKNEELNEKEIILKNKYDKEINMIIEQYNKKIQEEKDMLNNKIKSMDQTHKNQIEEMQEENKKELKRLKNVCDMNLQSQILIKENEKHMQEKVEEYKNLLKQKDQELKNIIQEYDERIEIQNKEMEDIVNDCEEKLKQAKINNKKLTTATNMANNNNMLMDENLKEKDKKINDLMKDMEKKKEEINKLVEEKSKLEHSHVKIQNEMSLLVEQNEKLKEEMGLSRIAIKDMEEIKKDMEKYEEEKKKNEEERKKNEEERKKNEEERKKNEEEKKKNEEERKKNEEEKKKLEKDKHQFEEEKERMEIYEHQKEDRKRKDKKKKGHSSDKEEKYNKKEKTKEKSSNILFDEEYIIQLEELRDTGENCFIYLKSLSKELDVIINKLKSKDDALLNDAFNKINLAITSWNIFNEENKEGDNITTVENTATEGNITIDENTTEVEMNNEEVYKIFSVEKYDMLKKEVGEKVECIQKLIG

SEQ ID NO: 3344 - protein, 1164 aa, Tetrahymena pyriformis
MMSDAENDHVKRSKKNLEDQHNLVIQERDRMILQLKELTVKITEFQSLIASRDVQINTLKVQNEALSIRLVLTTAELERISKERVEAEPLRRKVSDLEGYLVVQEKTIEELRIKLGQQDQVISQLRIFEIRCTQYEQDINALKMKLEEFLRTLQLKSQECDELRGKLSQYDLLVIRYQQLEQKLQESEQNSLLLIKKIEELQALLNDEGVKRSKNRNDLDVSLRDKQALEEKLVMMTQQIEFLTRKCQQQEQDINNYRLRISELEILAGKVAGYEQQIQLLSQQIERLNQLLREKDNQIGQLTVELNNLKLANGQIVQLQEQIAQQNQVIVLRTAEIESLRKRLAELEVLLPQLKMFESRCAEYEQIINALRQRLAELEGQLGDENVKRSQKDGELAISLRDKQALEEKLVMMTQQIEFLSQKVNQLTAQLQERDNIIAQLRVYEVRVKEYENVINALRQRVAELEGQLGDENVKRSKKDGELAISLRDKQALEEKLVHLTQQIEFLTQKVAQYERMIQDLQGQLGDENLKRSKKDGELAISLRDKQALEEKLVHMTQQIEFLTQKVSQYERMIQELQGQLGDENVKRSKKDGELAISLRDKQALEEKLVHMTQQIEFLSVKVTQYEKLIGELQAQLQDRDSPYRLVDIRIKEYENIINALKQRNAELENNLGDESTKRSKRDGELAISLRDKQALEEKLVHMTQQIEFLTQKVAQYERMIQDLQGQLGDENVKRSKKDGELAISLRDKQALEEKLVHMTQQIEFLTQKVSQYEKLLAEQQAQLQERDNIISQLRVYEIRVKEYENVINALRQRLAELEGQLGDENVKRSKKDGELAISLRDKQALEEKLVMMTQQIEFLDQKVNSWSAQPQERDNIIAQLRVFEIRVKEYGNVINALRQRVAELEAMLGDENVKRSKRDGELAISLRDKQALEEKLVHLTQQIEFLDMKVASYEKQIQEKDALINQLRIEISRLQINLQQLSNADQEVKRLSELLVVKTTEIDQLRKRLAECEFALQEFNLVQAKLQECEKNNSLLRQRIAELEALLNDENIKRSRGQNDLEISLRDRQALEEKLVHLTQQIEFLTRKVTQITEENNNLKIVVASYQQIFDEWQQISVRHGNFSQLLEQVRVRVQQLSISSSSSIITQSTSSYAVRGSNVVPK

SEQ ID NO: 3345 - protein, 764 aa, Tetrahymena thermophila
MSSYVRNNPHSSGVQNNTTSSPNRSISPIHYVKPSSVYYTSTISPSKSLQSTAKKSVQPVRPNIEASPNKNLTLAQQDEVDLWKSRCNELETSLCQVNTDLELASFKAKKAKDLESKVDDILKQNAQLLGENDQLSKQFSQKRTESDIWKSKYDAQMNTILSLKDNYEREIKRLQNELSQSRELYDGLQQERLKEAQETKQQLIHDNLTQIESLKRSHCSNVTLYEEQLRKMRDNLEEREKENLNLQGKLMDLKNYSESEQNRLNEDREKLRMKISQMELDQSKELENLKRRCDGLTLEQISALKKLHESELDVLESELNKLKNLLDIKNQEIGTLIQQNKSQKRNFDNELQSVRDENEALKDKILENNRCKEDEIDDIQNKLAKLHTTDIQNLKDRHDNQVKMLNDQINDLKRVIDLKQEEIENQIREKNNQRDAFNAKCDRLNSDIETQKLKYQVLEEDRKKDYDEATEALNRANSAHAEFSEQQRRQIQFLESEIEKLKQLLVHKNNEIDINIAQHRTIKNNLEEDIRQLKLDNSDLRKRLDQLEYSKNLQLEELRQKVVALDNNNSERTKKFEAQIDYLENELSRARDNLKIKTEETNIHQIHRNLLETENMKLNAEIDSLNNHMVMLEKLKAQEIQELRHKLESSNNYTIESIKASHNNQLEAMANEIEDLKNIIEMKDRQLGEKADQYQKLEKSLVDIQNNTDLSDYQMRISKLGAEVATTKNLYDVFVKTRQPSYGSGKKLMPNNSGVSPIKKVSQF

SEQ ID NO: 3346 - protein, 1088 aa, Oxytricha fallax
MNYPQSQQSQTQKLSQLGSQMQTNKYLIPQTQPLKVSQGLSNNNSYQSTGNSFIQNMKMAYHNNNSSQSSAQNNSNLSYSPPIKESSNKSSSSINLQSNYQHTNSVLGANMNILNMTDLNKSQLQNSQIYNPKQAQTFKPNTISSLNLTSTSQNGISSQFQNTKSNFEPVNSHNISISQQNHSQDRSVNIQTLYQERLNHMQSQLKNIYTRIANDDIANTMKENYVSQEFIYDRIKEIVEEALINEKEMQIEKSLQEIAQLKTELAQTQVVLQNQSSVPGQYQEILEKQDAKLKYFEQENQKLKENVVQLSTGFKQTDDHYSTILQQKEDELKFCKQQFKQSQAQIDNYEIQMMDKQKSQGQMQQELYQIKRLYEMLQEEFQKKIQKFDTVQNQYQEQNNELGIVKAQNFEMQLQIQKMISEFQQQQETSQIFDKEKQDLLEKFNNFGEQLQKQQLQELEKAKEQFQNKLSHYKSKINDLKSKHELYEQELEKERAVQYNLKSSFDIIIQQMKEDMRRIKDEWENRLHDEELEHQRHIVAQQSQHSIQIQNMKNECTLIFDQKVSQIQLESQKENERIRRECDDLKYTLDSKVKSIELEYIKISKHEEILNSELQNCESTLTDKIKKVKEQMQNEIVQRLEEKELEREKSSQSQLKAIKAQLEQDKTQALQEMELKMQKQFDWQLKELQEEHSHELRSVTKKAEIQREDIVSQNQKLLHEMSYLKQDLDHKSQLLQEVRGEIENQQQNEQQRIDELEQDNQALRNECERLSDIVEVNQNEFQNQLNEVERQNQKELRRQEIKWNNVLENIQKQVHIRVSDLKKQQNLLKSELINQFQTEFTKFTQKSFKNFIRVVRSNNYQEQLVQTLDQKEDYIQQLQKDKQYLEQELQNVQQTLDQTEDKLQRLRKDRENELQNQKREYFRVLETAKKEVQRKYSDELKNLKNYLREFKKRFLDQLLSKEKEIRQLHLQHQLEKTQLQENLQSSQSKIRQLQGQFQDFQLKHDQERQQLETQKKNWIEEFKKKYHFKEKEIEGLTSLISKSYMSINSSIDNIRVAAKLESDIEELTRKAQQKTGVLRSDSSQRSVV

SEQ ID NO: 3347 - protein, 891 aa, Geodia cydonium
GKRRQELEKEKRKLQQEIAELQEQLAQARQKIDELETVISRLQKELAAMTQKAEEEAAGRAKAEKEKRDLQAQLQETQDDLESEKEARTKAEKQKRQVNDEAGSSAESLEEGESSTVAQQEIRTQRENELAALKKTLEDEVVSHEEAIAAMRSKHSKAVEELNEQLGVCQEVQKHGEGENKLEGENEALQLDLRDSVQVCRGRQEEKDSRAQLSESQAKNTDDTALIQDLNSQNEKLKAELASVTAQLEELDGYRALLAERTVKDLKEQLEDAQERLTEENRAKISVSNKQKQAGDEVERLNQQLEDEEEAKAALQSKLTHLTQQLNEAKKKVDDDQVELEEVAERYEKVWTRKLKALQERLEELKAENAKLARGKKKVQGELDDVTVNLENNRADCRSGEEQRVDSQLSEQQALGGEDRQERDQAEARDRQRETKALSLTRELEAYQDKLDEVERLRKHWAGERFSGGEQDEAGRVHSLQAKSDLEAQLEEQKQLLEEVEDELQVCEDARLRLEINLQAAKTNYERELASKEEAAEELRRTLTKQVRELEAHLEDERKQRQTSRAARRNWRVTSRNLENQVEAEARGKEDANRTTRDLHAQLKECQLSADDALRAKENAANLRTERCAHEQTSTRLREYEMAERARRTAESERDELQDEVQSATSKANSLAEEKRRVENRLSTLEEDLEEEQMNSEAASDKARKAEQQADALATEVSQLQASLQKAESAKSQFEKQVKDMKERLEEAESMGVRRMKAQVQAMEGRVSSLEEQLDSATRERATAHRTLRRQDKKLKDLMQSVEDEREQAENYKAEADKALGRMRTLKRNMEESEEETARLQAAKRRLQRELDELTEQNEQLQRDIARKGTGASSSRRPYASGAQLQARSPP

SEQ ID NO: 3348 - protein, 431 aa, Girardia tigrina
RIKELEDHLLEEEDASAGLEETKKKMQGEIEELKKDVVDLESSLQKAEQDKAAKDQQIKSLQDQMARQEEEMNKMKKEKKAADELQKKTEESLLAEEEKVKNLNKVKAKLEQTIDEMEENLSREQKIRADVEKVKRKIEGELKQTPETVDDLERVKRELEEQLKRKEMELSSASSKIEDESGLVAQLQKKIRELQARIQELEEDLEAERQARSKAEKSRHQLEAELEELSDRLEEQGGATSAQMGLNKKREAELIELKRDLEEANVQHDQSVAQARKKQQDAVNEFSEQLDQLQKAKAKTEKEKNELKEDLNDFHGQLESLNKAKFNSDKRLKDLEAQNSDLQGKLDETNRHLNDASNTSGKSQQLNAELQARLEEAEFQINQLNKVKQQMQAQLEEARQNLEDESRTKAKLSSDIRNLNADLDNFREALG

SEQ ID NO: 3349 - protein, 1955 aa, Parascaris univalens
MEGTCSEEENLAKRVTPTAVTSGTYGTHVVDTTDLALSDVVIGCGSTIYETSDSIGSDVMLGLSSHGVSSVSGLDRDLNSFKKRIDANTEEQREHADMMVGLQRKIEEYRRRIVDAEKQVSIQKANDDVSFSIKETADTWLPDMKSDAADYEWASRLDEERRRNDELHMQITQQQVDLQRLQKYFEANMQEKEKIYQTREKNLAYYLNAEQRKMLDLWEELQRVRRQFADYKEQTERDLENQKNEVAKVTQSVGGMAGRLNTSSHGDSGLVQDVVLLEAMRRFRELQAVPVGASADDYNALMKKYEETVERVIELESHGDGSTAKMLSLEAELRRTKDKFIECSEFLRKLGDLAAGSYRGDERTSKIVSLSPGGMSLPSEIYRSVRNILRNHDSEMQHIQRKLKNSDTQVCELTTRLEGTEEARRRSDKQLVDAKREINIQQRAVDDANRELRRVEDRLHIMESEKIVAENARQQLEEEVRRLTLQVDQSKADGERRVVEEGEIQKRIVEDEYRSMISELTRRMNAFQDENKRLKNDLGCTKERLKNVEFEYNSTVRKLEDKDIALKHLEDTKLDLLKDLENQRTRYDAVTNELDTLQTTFETSTKNIAQLEANIKEINLMRDEISKEKDSLAQKLADVTHKLEIETVRREDIQRSCVGHSEDVEKQRLQIIEYEREVMALRRLNDELDTNVKTGQAKVTSLENSIISVQTEVTKLTTLNDKLQKEKQSIMSSKQKADTDVDLLKEKLRKLEQECDKLKEENKALHEDEQIARQMCKEEASRIHLLERDLKDAMTEVEELKKQLQKMDEENSERLESVLRTKISSDTVDTSEIAEYTEVKVKELREKYKADLERLQSNKDDLERRVQILEDELAERQRIVERQRTEMNDLKLEYQLESDRLRAEMATVELKYQSEVEDERDQRSRDADSWKVTSEELRSKISFMEKMLEEAKHRETVLREEATEWEEKHDIISNESLKLRNEIERIRSDAEEDIQKWKKDVHMAQNELKNLERVCETLRSQLTAANDRVASLNTTINEQTSKIRELNSHEHRLEEDLADSRATSSAIENDLGNATGRLRSSEEHNAILQSENRKSKTEIEALKHQIDTIMNTKESCESEVERLKKKIVQTTTITKEQNEKIEKLRIEHDHLERDYREKTKEVDRLKEVEKTFELKVNRARQELDEFSKKLIVTETERNAISGEAQKLDKEVQLVKEQLQYKSDEFHKALDELANAHRISEEGRVNAIHQLEARRFEIDDLKSRLENSEQRLATLQQEYVNADKERGALNDAMRRFQATISRSVVAEEHVDVSTIETQMQKLMSRIEAIERERNEYRDSLNRLKNRCSTSYSSVDRQETVYRTFEERVISAEDERRKVELKLSSMKEMLKSQEEKLKQRDEERRNLKSNIVTFELEARAKDAQIRHLNDLLKRVQAELENSQNDNRALRERQEQYETNRIHLEQRLPTDEGEPRVKALMAAFATERQSLSDSLKKLASQLQISETKNADLRDDAERLKRDLLKAERVEEDLRRNLVEQTEIMRENQQLRSQLGVAQSDLANASGRKQQLEGELAAVRAELRDHKQHLHDAISRIAELQRQLQDANAEKSRLTDRIIGLEKTIGTLRNTETELRAQLSTAADERKALNSELEEMRRRIVQMESEKKDVDNQLEEVNKARIIMTKKIEILETEKHSAELVISETASQREAIERSLNALERENKELYKNCAQLQQQIAQLEMDNGERLIALTTKQKEDHEKFVAAVKAEKVQVERIVENRDRAQKSRIRQLENQLSMMREQLDNERARSHQMSERFIVNETNRRVSSSSFRLSGDAAGVAAATILHPQTDRLDYVFANRSALSSYYTVPTEQHASRGKEAYRTSSTIKSSEGTTRESYTYQSRTVSSNIIEQANGMTSSASGEGMSRAYPPTEVNQGDVTGRKSRPATRKQQMKSTFSE

SEQ ID NO: 3350 - protein, 692 aa, Dermatophagoides farinae
MNKKRDSELAKLRKLLEDVHIESEETAHHLRQKHQAAIQEMQDQLDQLQKAKNKSDKEKQKFQAEVFELLAQLETANKEKLTALKNVEKLEYTVHELNIKIEEINRTVIELTSHKQRLSQENTELIKEVHEVKLQLDNANHLKTQIAQQLEDTRHRLEEEERKRASLENHAHTLEVELESLKVQLDEESEARLELERQLTKANGDAASWKSKYEAELQAHADEVEELRRKMAQKISEYEEQLEALLNKCSSLEKQKSRLQSEVEVLIMDLEKATRHAQQLEKRVAQLEKINLDLKNKLEEVTMLMEQAQKELRVKIAELQKLQHEYEKLRDQRDQLARENKKLTDDLAEAKSQLNDAHRRIHEQEIEIKRLENERDELSAAYKEAETLRKQEEAKNQRLIAELAQVRHDYEKRLAQKDEEIEALRKQYQIEIEQLNMRLAEAEAKLKTEIARLKKKYQAQITELELSLDAANKANIDLQKTIKKQALQITELQAHYDEVHRQLQQAVDQLGVTQRRCQALQAELEEMRIALEQANRAKRQAEQLHEEAVVRVNELTTINVNLASAKSKLESEFSALQADYDEVHKELRISDERVQKLTIELKSTKDLLIEEQERLVKLETVKKSLEQEVRTLHVRIEEVEANALAGGKRVIAKLESRIRDVEIEVEEERRRHAETDKMLRKKDHRVKELLLQ

SEQ ID NO: 3351 - protein, 1985 aa, Plasmodium yoelii yoelii
KRNDDNNQDNVMKNNIRYNSTNVDIPKHNNTNKIDLNMLYNNNVDKLNSNLSAYNDTNKLIELQEKYKNKYRYEKDIPNHTNDTRGKSNNNQIKDNNIYFNNAILYNNNANNNDINNIKTDYNNYNINMNINDGNEINSKNNLPSNKSNQNNYISEKGDMTEKELDHYSNFNFNNDNRNKGSNQNDIINKKYKKLESLMNINKNNDDEKRKINFNVNDIKNNYFDNFYKNKNTENNEYKTYKPRRSNSSNVHTRKHDTGKISNYLNYADDMQAKINYYNEGKNGNMRAYEKYIKMKNENIHMNNNTHNLTMNDLNGNANGTIEMGNNSEIKNVNNNKTNDNNLNNMNNNYNENTYQNRNESNSKVEHDLGKLRNFDLNDIRKKHLNLFNNKMENESTYTNKMDHIMNDKNENYNFSFINEKNITKNLTNNDDDALNFDKNFRKKMDVKSIVCVCQASKQMARLQLHIEESRQMLETEKMLLKKKKENFEKKVGMLADKEKEIDKIHSQIKEKELSINKKNNEIDEKEKYVNSIKSKYDNAQKELLDKMNECILIENKCKSKLYEYDEKFGQFNKKIKEIEEREKEIEQEKKNIEKKENMLNENRREIDEEKLMNMKEKNELEMLKKELESLEKEKKKIIDCEYNNLQNKEEELRRNERNNLIKENELKNRIDKYNELIDELNKNKKEIENDKMKMLNDIQDERIKLLNETNNIKKENEKEINYMKEEIKKERISMINDVEKMKRLMLEDIENTKNIMLEDMEKENTKIKEEIENDKRMMIKNIEDEKEKYKTYLEEKFNENLEKEKSELQKKYDDENNRLQAEINNEKKKINKERDNLEKQKKVYEDEFRNKCEKYEEDIRKKYNMLEEEENNMKYRIMKEQEELENYKKNVYLDIEEEKDKLYVQQEKINLEKENLLVEKEQIDIELKNFKNFKEKEENDIKIRIINLSQQKEDLNKEKENIEKEKDKLEKIKYDLDAREEGLNNDKIQMEKSRKLFDEQLEKIKKNKEELLNYDRELKTKEMDLIEKGTEIKNKENELNKKKEKLDSLDNELKSYSSKLQDREKKLKEKKTELQKVKDQLVDYKNSLKEKEIQFQMIEKREKELLDEQTVIQIDRNSLEAEKKQFLLIKEKHEKDTEYIQEQLKLLHEQLKNKDKSLKEKENEINLLNKLQDCRSKNGKGAIISLKNYDNRKLNMNLSRISVSKNRVKAKAIGKNKFDIIRRTRRKSINYNYNNLEINNSIQYIDSVINDNFKNKPFLKNKNNNLELSNENFMQEQGNNNMNFKYPNDTYDNSMVDKNNRNISNNSMKNITDYGNNVENNDEPERENRNQNISNENDYYENKNNDNKRNKKKYPPKPRANLEKDSYNVNNGNKSERNDNFNDLYNDNTTNYKKKEKYDNDNNYGDHMNYNNNNDNHNNTKNGNVYENNNNNGGYNNSYNINNMNTNIKMGKSDLNDTIKSKNGLRLNFQENKDQENNNMLGSLNVNNLIESDIIDTKSNYGYHPDNHNDKYGENESNRNIMCINKNINFIDNDVNNINNNISNINSKLYKMNSNVYEENDSFVGEHNNKNRNKHSCQNNNENGMSNKNPNEKPSLNRLDSLVNQNMQSVNQISNLMQSSKKANNNTMNKLNSNIKNYNSLKDTKRNNNDNYYDDNNESPKKEDNFNEFLEELNDGKSYNSNFIEKGDDDFYYNMEKSLNDKSMNETYDHKNRNNYNTSNKNMDRKVHTLKNNTNSTNFVTTNINTNHNNDNNTKINVHVNRNNGETRKDNINLSLMPGNNNKIGMDNNGYNSDSNIMRNQNYLTNENYNSRRMNSHAIEQDNYNKQRGHKNNNENDYTNYRKYGMENKKDELLGNNFNRAQIVRNHDNENKNVNIHKHNNSNDNNKMNTWNQNGNKNTNMVGIKGFMRELQNEKDSYNSGANATESNNNRNNVQNHKNYNTKYTNSANPSDSDAQANSNKIIEQLDKTLMNKSIVMNKNKKKY

SEQ ID NO: 3352 - protein, 1441 aa, Plasmodium yoelii yoelii
NDNIIYDDDDQVRETGHNFKEYELEDQLKETLKSITALSIKVKEYENKIEELENELKLEKEKQINKEYEKELNEKCEFIKREMELLKEKELNINIKENKINNKEIITLKKEEKLNDIENEYIEKNKEKEKLNYEITNIKMSLDKLSCEIQEKKENLEKINKKVVEKENNLRELKEFMKEKNEIIESLNKTIDDKKNAYEKLETNFEEKRKMIEMLDSKLIEKEKKFEIKKEKLEKENEVIMEKLKDIENKEEHFKNKEEKFKNKEEKFINLENELNKLKSDLSKNACQMEIYKMEIKDLSQSLVEKEREIFEIKNEYDDKINNMKNKLSNFNNDDNDDNTVKCSEEIINKKIEEAVNKLIKEKEMELNEIHKKYNLEIEKIKNEINEKEKELEQNKKKHNIEINDLTKEIQIREKKIEDVKEEYKIELSKLDSEKNNIKIENNELNNEVNSLNNEVNSLNNEVNSLNNEINSLNNDKQTLSKNNKLLNDLINNLKNEINNSDNKMNKMKEDIIMLNEELEGKCVVIDEIEKKYKNEIFIFEKKLKEKENYDDLNDEINILRNDISVKEKEFIEMKEFYENKINLYNKNFEEKTKYYENELNILRLKYNNEQDLIKQIDELNIQKLKTEEKYLQLYDDNIKMFKSICAKINTTYSENIKGSDLVNFVEAYIKHRDESRFDANSESGIKEVVAELEEKHREEVSRIREEHKKEVVRIGEEHKEEVVRIGEEHKEEVVKIGEQHREELGEKEEEHKKEVAKIGEQHKEEMVRIREEHKKEVSRIREEHKKEMAELEDGRTDVVAVLEEEHKKEVVRIGEEHKKEVSKIEEEHKKEVSRIREEHKKEMSELEKKHADVVAELEEQHKEEVVKIGEEHREEVSKIEEEHKKEVSRIREEHKKEVNMLEKRHAAVMTELEEHKKEMSELEKNSADVVTELEEKHREELGKMGEQHIEEMGKIEEKHREEVSRIEEQHKEEVAELEKKHTDVVVMLEEQHKEEVNVLEKRHADVVVVLEEKHREEVSKMGEQHKEEVAELEKNNASLLDVIEENHKSEVSRLKEEHKESTRELVETLSQKNEEIQNSNNKIEELTNVIKDLNDSIMCYKKKISEDVEKRNEYNEEIQKLNKRLNEMKDKSDKEIIKKEDEIKKLNKKISNYKIFEIKENTYKNSKMLINENKEEIIVDNICKEKISESDIEGKGKNLKMILSLKKKERSVFSVSDNKNENNELVDIVRNTYINKIEVYKKEIKDNNKNMEDLKNKIIDLSNELANLKNVKNVLTEENDNLRKEMEMKQNKVNENDEILNLNDDIIKLTKEISEWKEKNIKLENDIEQINKEYKIKEENLMIKINESINEVNNLKNQIEIEKKKKENLNTSNVNNKIVENNILENGNLKQNNSNKEIEDKTGNDDDNDDDDNDDDNDNDNNNDNNDNDNNDNSEEDNPY

SEQ ID NO: 3353 - protein, 1478 aa, Plasmodium yoelii yoelii
  unsure (1)..(1478): unsure at all Xaa locations
MNTNHLLFIKEIVIKFHHRTSRKSRESXVRENADDENLAIKERELINLQNELNNIISEKEMHSDAIKNMKHQLDEFQDQKNNYINELRILEKELDIKRDEIEKFNIKLEEINRREESLAYKENEFIQIKEEIMNRERDIIDREHEITEKVNELSYKEKELVEKEHELLNKESDILKNNEDFINNNNELARKREELNIEQIQIEELKNDLILKFEHLHNEQKDIKIKETKLKTIYKKLKNNNINDLLDVSNDENLFNSRTRSNINGNNNENENSNISSMRKIAELDNLENQSENLNLDSLEYTTYFNEFKKKIKNLKQDLQSREKELEFFEKTLEIEKREKEEYRNELDNLKNLLHAEQLNKKKLDDQLERYKNDDEHIIKSLKESEEIINEKNTLILELQQKLAQASYEISMIENKSNKKSNNNSYNGERNSEYEKKLEELNNITNSYEKEINELNKEKENITKQFMEKIMDDEEGINKLKEELNDANALIVNLKNKNNELYNVNIEMEQANKDMRDDIDILLANIDKLNDEKNVTENEKEQKELKYNELKINYEHKVKECNKFFNMLPPKMKKKIEYEKKHRNSKEGNINMSQFNSSVISKDHESLGNSSEEETCDIDKIVNVVENGQNGKRASIKINNILNEKDMVIESLNEKLLYYEKDNAKNHEIINDYKSKIDELLSKLNIFEGNMPFFIKINEIINENNYTHQYVLNLLNNAILYRKIITKIFIENQFYKEIIQIKEYIFDIISKNTSNKKKETLKLSMIKKKGSPKKGHHSVSHPNYPLHMSDAIHKYQNPXDEEQSMDGLDIEPETNMIIKAVNDEFDTFENICNELYNLNKSEEWDIMYKKLNVLEYSYNSIINIIINEIKKTNKISNIEKSELKKNMKLLKKKYNSLSNDFLQNVEDVDKLKLILVKESEQNELLVTENEELKNLYKELNDEYNEKLNLIKQNEYQIKNLQEQLIEKNENKTKTEEINEFLKTDLDYLNTSLEQANQSLTNLNSENEKNKIALKQLTEENIYLKNQIEDKEENIEYLTQKIKSNDQVISELKEFNEMLIKKVETYDSIEELNRKEGNNHTKGHIENNSTTELYDHNRFYEDIDKNELLGVISKLENDNNNLKEECDMLKNDFYILSEKNHELEEIIQKNDLPIKYNDELDIKNDIIEKENLINERNKYKIKCIQIIDICFNKDFSIIDIREKIVAIFENDDEEIINIINCHRSMLSNNTNEEFGYDKENNPIKNARHSRIIRGTKSVCSVADNNQYNENESMKDRLSNQRKDDAAKTHQENITHIEEMSKKNEELIKKNEQIWKLNKYIEDLNKEITNKDYIIMKSQQESADKNDVLEKNKQYIIFLKDQIKLLCNNIDENNLFDIDNVNLSPTLRSFIKRKSYNNRCSFVEVYDEKKSNHGHENENFASRQKRRETFDQSRKKRLSEFTSQEQYNFYDENEVKIEEMNLKMDELNDKLKQRNIKSRY

SEQ ID NO: 3354 - protein, 1527 aa, Plasmodium yoelii yoelii
  unsure (1)..(1527): unsure at all Xaa locations
GQKKKKRDIISYSSFYQCLIFCRFIYFVFSLISFFHLFRFFTYFKNDDGEPKPTVAHLGEENKFYYNKELKRWVVKGEEDKIETEEKIAPPPQMSALQNASSGYRSLIQQNKTRSARTMYAEIPGLKTINKKNTIVQGGIISPYMGSSNIDKNKNIPNDNKKELFAFNTFIPKSENEENKESREVEPNINKQNEKRHDGDIFKEEEFTNNLNKISDNVLDGNKNNIPFESNHINDKERTSLSKDNLFNLNEINKNKYDSKNDDNNNNLLFSENQTLIPAKVNEVTEIEASRTPNYEINRVPNYEINKSKGIHPNIPQFNNPAQLPTEINIKNNINYDNISPKINSKGVIENLENKNKEIKRISMDNFEFNNPISNHINKRNSTTVVRSVFNPQLEYNNVENNEIRKFNTIGNNYMNIGRENDILNISPKVIEKINRRNTHQLFNESSNISTDKLTIHKVTSPFLFDNINNDSNTNVSNEIPEKGGKMEKVEKMEKMEKMEKMEKVEKMEEFEKMEKSNEHVNSFSMFNLDKGVSVESTSNIIAMDENPIILNDSNTINKNNIIDAESDKLVQNILDMIKIKLQDDNKNNIDTIIKNESKRITSLLEEKTGSMEILCNKICQLKKKNEDVEDKNDTIREETHQINIDKDKENEINNLLYVINIKNKKIKEELEAFTNSFNVLKKLKMKNDEIINIYKNRENVFLTTINKLEEKRKLKYAEFKEKEKQYKELIMKKEELLKIXQINNKKNIETFKNQEQMLKDEIQKIELKTKEKIEELKQDFEKTQKINMENLEMEKESFINNNLENEINKMKEKLEEKYETQIKETEMKYKYQIKEEIEKTKQNAEQNFNSKFEKYKENLEKNKNDFINNLIIEKNNEIESFKNDIEQKKFKEMEKFKEENEKLLQNNFENMKNHFIEEQNKHIENIKKEYELIKNNEIEYLKEEMKKNKIQEIENVELKLADEKNKHIDDMKKELENIYNVEINNLKEKINAEQTLAQEMLETQRNEYEQKLEIQRNEYEQQLEIRRNEMENKLIEQRKESYDLGSKKESEIQILTDKIEKLKMEIEIINKEKIDLEHNISILNDERENILNQNKNLEDNLKNNEDIYNKKINILNDEKLKLEKEIEHIKENGAKESDQIREQFADLLQEEIDRIKKESKEKVNIYIQQYNEINEEYEEKKKEYNDLLEKANVSNKQLTEKCEENIQKINEYEDMIKMLENQTEVLVTKKIQELNEDFLKKKEAFDNEKNDLLKNYEHAITENKHIKEQLENFTNSNEEKISQIKNQYETQIKEMQIHFDELLNETKNKNNEMLEDIVKEQNDKEQSIQHMNSVNTELVTKNEQLNLNITEIKNELSNFQEKYDKLVKENNHLKNEEQTKFLDKILDLENVNKHLMEVTEKEREINIKNVNIIKSLQNQINEQTKLYKEYTDELKDEILQLKKQKKNSIDSNVPIDANSSINNALIEENKKLKLQNEVISTKNDTMSTVLDNLTKRLSFIESKIKEEKYGNDIIKQANDLQLQGFN

SEQ ID NO: 3355 - protein, 884 aa, Ciona intestinalis
FEDVVAEQRRKKELEDKERSRLSKQKREFFKKKFEIKKKKGNTENGKPVIEQTTVHPVQSIPTTVAADEQKKPKKEKPTKKVKATTPVSDPPAKVAKLEQSSAPVKEKQPKPEPKAKKVEPVIKPTVADNVQSKPAVKSSKKSAEPAKETKVEEPRKPRQHKVSFSEDVKSVDSGNQEQKSKKKKGRKQQEEHPIIQAVSSADIDDSTIYYLVELLNQRLQSASGDWATAGNDVSKQQYAELQRKYESKSVEMQNAVSQSKVQSQKIQQLNQALQEAKLQQKSEVQKSDEELLKTRKAFDEYQARIKTQMEEDKKMITIMQEKLKSVNSSGDALQKMKEENDILKMTIQANASQVAEKDRLAHEVSACQAKLKENEQIRVEMERKIAEYSGTYQDQAQLEQSYTKRLEDMAAKLKATEGKYGALESEFQEAQTHLQSTQAKSSQLISQVVLLTEQNDQRSALESEYGSLAETKQALEDRLTAMEANEQSTADEFARLQSQNNQLNLKATSLTEQLNKATEEVNKYKQGRSDEVTNVTKQLKEKEVALSELQKRFDDLTEQSQKAASQVEKLDKKNNDERDTAVLDTENQVKKSLSKSFPSVKVEGKDFECWLSNFLVKASESVVVTEVVDNEDKLQDLKQQLSEAKGKADKVDKYQSQVGALEKSLSAALQRNKETEEMINKQKKEIKGKSEEVLQFKEILKNTEGILDQLQSSVEKSEKDKQEQAAMWESKKQEEVSKLEKQLSKSNKELKEQTEMLVNMEKERDNLKECVAQRQSELDTCLRKCGELETSLSSEKVNDTQESRDSSVQENGHIDEIAKLKERLEKEKTLTKNLGAAAGKLQNVLKQTQEQLGKEREKNKELMQKKKEGSSSSSSSSSESDLD

SEQ ID NO: 3356 - protein, 681 aa, Canis familiaris
QLEAEYRRLQEDQQREGKLREEHEEEASFLQDKLKRLEKERAMAEGKITVKEVLKLEKDVATEREVGDLKRQYEDEEAKARANQREKTELLRKIWALEEENARVLVQEKVREIVRPDPEAEREVANLRLELVEQERKYRGAEEQLKSYQSELEALRRRGPQVEVKEVTKEVIKYKTDPEMEKELQRLREEIVDKTRLIERCDVEIYQLKQEIQSLKDTKPQVQTKEVVQEILQFQEDPQTKEEVQSLRARLSEEQKKQVDLERERASQEEKIKQKEEELSHVKEKVVQQEVVRYEEEPGLRAEVNAFTESIDAELRQIDTLRGELRRLQRRRAGARTQLEELEREKQARREAELEVQRLKQRLAELEEEGEAREKVTLKQKVVLQQDPQQAREHALLKVQLEEERHRRQVLESELETLRKKLVNLEKMEVKEKVVFSESVQVEKGDTEQEIQKLKSSLEEESRSKRELDAEVSRLEAKLSELEFCNSKSSKELDFLREENHRLDLERQSLQSETRRLQSEIEMAATETRDLRNVTAVDSGTNLNSRLWSLERELDDLKRLSKDKDLEIDELQKRLGSVAVKREQRRTTCGAPLWSSTLTHRVGLIDWNMFVKLRSQECDWEEISVKGPSGESSVILDRKSGRKFSIEEALQKGRLTPAQYDRYVNKDMSIQELAVLVSGQK

SEQ ID NO: 3357 - protein, 458 aa, Ovis sp.
LRRQERDRKFREEEQLLQEREEQLRRQERDRKFREEEQLLQEREEQLRRQERDRKFREEEQQLRLLEREQQLRQERNRKFREEQLLREREEQLRLQEGEPQLRQKRDRKFHEEEQLLQEREEQLRRQERDRKFREEEQLLQEREKLRRQEREPQLRQERDRKFHEEEQLLQEREEQLRRQERDRKFREEEQLLQEREEQLRRQERDRKFREEEQLLQEREEQLRRQERDRKFREEEQLLKESEEQLRRQERDRKFHEKEHLLREREEQQLRRQELEGVFSQEEQLRRAEQEEEQRRQRQRDRKFLEEGQSLQREREEEKRRVQEQDRKFLEQEEQLHREEQEELRRRQQLDQQYRAEEQFAREEKRRRQEQELRQEEQRRRQERERKFREEEQLRRQQQEEQKRRQERDVQQSRRQVWEEDKGRRQVLEAGKRQFASAPVRSSPLYEYIQEQRSQYRP

SEQ ID NO: 3358 - protein, 1549 aa, Ovis aries
MSPLLRSIFNITKIFNQYASHDCDGTTLSKKDLKNLLEREFGEILRKPHDPETVDLVLELQDRDRDGLIDFHEFLAIVFKVAAACYYALGQASGLNEKEAKCERKGNPLQDRRREDQRRFEPQDRQLEERRLKRQELEELAEEEELREKQVRREQRLQRREQEEYGGEEELQQRPKGRELEELLNREQRFERQEQRERQRLQVEQQQRQRGELRERQEEVQLQKRETQELQRERLEEEQQLQKQKRGLEERLLEQERREQELRRKEQERREQQLRQEQEEATQEEISERGESRTSRCQWQLESEADARQRKVYSRPHRQEQQSRRQEQELLERQQEQQISEEVQSLQEDQGRQRLKQEQRYDQNWRWQLEEESQRRRYTLYAKPAQREQVREEEQLRLKEEKLQREKRRQERERQYREVELQREEERLQREEEQLQREEREKRRRQEREKQYLEKVELWEEEQLQREEREKRRQEREKQYLEKVELREEEQLQRQEREKRRQERERQYLEKVELQEEEQLQREEREKRRQERERQYLEKVELQEEEQLQRQEREKRRQEREKQYLEKVELQEEEQLQRQERQKRRQEREKQYLEKVELQEEEQLQRQEREKRRQERERQYLEKVELQEEEQVQRQEREKRRQERERQYLEKELQRQEERLQEEEQLLREEREKRRQERERQYLEKVELQEEEQLQREEREKRRQERERQYLEKEELQRQEERLQREKEQLQREDREKRRQVRERKYLEEELQQEEDRLQREKQLLREDREKRQYLEKVELQREEEQLQREKRRQERERQYREEELLREEERLHRKEQQLQREECEKRRRQELERQLEEEELQRLDRKRQFRDDDQHQNEVRNSRVYSKHRENKEKSRQLDDSWVRESQFQQDLRPLQDEQEEKREREQEWRSRQKRDSQFPAEQLLEREQQKETERRDRKFREEEQLLKGQREEKIRYLEEDRKFREEEQQLRRLEREQQLRQERDRKFREELSRQERDRKFREEEQLLQEREEQLRRQERDRKFREEEQLLQEREEQLRRQERDRKFREEEQLLQEREEQLRRQERDRKFREEEQQLRLLEREQQLRQERNRKFREEQLLREREEQLRLQEGEPQLRQKRDRKFHEEEQLLQEREEQLRRQERDRKFREEAQILKEREEQLRRQERDRKFREEEQLLQEREELRRQEREPQLRQERDRKFREEEQLLQEREKLRRQEREPQLRQERDRKFHEEEQLLQEREEQLRRQERDRKFREEAQLLQEREEQLRRQERDRKFREEEQLLQEREEQLRRQERDRKFREEEQLLQEREEQLRRQERDRKFREEEQLLKESEEQLRRQERDRKFHEKEHLLREREEQQLRRQELEGVFSQEEQLRRAEQEEEQRRQRQRDRKFLEEEQSLQREREEEKRRVQEQDRKFLEQEEQLHREEQEELRRRQQLDQQYRAEEQFAREEKRRRQEQELRQEEQRRRQERERKFREEEQLRRQQQEEQKRRQERDVQQSRRQVWEEDKGRRQVLEAGKRQFASAPVRSSPLYEYIQEQRSQYRP

SEQ ID NO: 3359 - protein, 1407 aa, Oryctolagus cuniculus
MSPLLKSIIDIIEIFNQYASHDCDGAVLKKKDLKILLDREFGAVLQRPHDPETVDVMLELLDRDSDGLVGFDEFCLLIFKLAQAAYYALGQASGLDEEKRSHGEGKGRLLQNRRQEDQRRFELRDRQFEDEPERRRWQKQEQERELAEEEEQRKKRERFEQHYSRQYRDKEQRLQRQELEERRAEEEQLRRRKGRDAEEFIEEEQLRRREQQELKRELREEEQQRRERREQHERALQEEEEQLLRQRRWREEPREQQQLRRELEEIREREQRLEQEERREQQLRREQRLEQEERREQQLRRELEEIREREQRLEQEERREQRLEQEERREQQLKRELEEIREREQRLEQEERREQLLAEEVREQARERGESLTRRWQRQLESEAGARQSKVYSRPRRQEEQSLRQDQERRQRQERERELEEQARRQQQWQAEEESERRRQRLSARPSLRERQLRAEERQEQEQRFREEEEQRRERRQELQFLEEEEQLQRRERAQQLQEEDSFQEDRERRRRQQEQRPGQTWRWQLQEEAQRRRHTLYAKPGQQEQLREEEELQREKRRQEREREYREEEKLQREEDEKRRRQERERQYRELEELRQEEQLRDRKLREEEQLLQEREEERLRRQERERKLREEEQLLRQEEQELRQERERKLREEEQLLRREEQELRQERERKLREEEQLLQEREEERLRRQERARKLREEEQLLRQEEQELRQERERKLREEEQLLRREEQLLRQERDRKLREEEQLLQESEEERLRRQEREQQLRRERDRKFREEEQLLQEREEERLRRQERERKLREEEQLLQEREEERLRRQERERKLREEEQLLQEREEERLRRQERERKLREEEQLLRQEEQELRQERARKLREEEQLLRQEEQELRQERDRKLREEEQLLRQEEQELRQERDRKLREEEQLLQESEEERLRRQERERKLREEEQLLRREEQELRRERARKLREEEQLLQEREEERLRRQERARKLREEEQLLRREEQELRQERDRKFREEEQLLQEREEERLRRQERDRKFREEERQLRRQELEEQFRQERDRKFRLEEQIRQEKEEKQLRRQERDRKFREEEQQRRRQEREQQLRRERDRKFREEEQLLQEREEERLRRQERARKLREEEQLLRREEQLLRQERDRKFREEEQLLQESEEERLRRQERERKLREEEQLLQEREEERLRRQERARKLREEEQLLRQEEQELRQERARKLREEEQLLRQEEQELRQERDRKFREEEQLLRREEQELRRERDRKFREEEQLLQEREEERLRRQERARKLREEEEQLLFEEQEEQRLRQERDRRYRAEEQFAREEKSRRLERELRQEEEQRRRRERERKFREEQLRRQQEEEQRRRQLRERQFREDQSRRQVLEPGTRQFARVPVRSSPLYEYIQEQRSQYRP

SEQ ID NO: 3360 - protein, 356 aa, Mus musculus
CSSPTLLEQPPAPGRGGGGGPPAKRRLELGESGHQYLSDGLKTPKGKGRAALRSPDSPKTPKSPSEKTRYDTSLGLLTKKFIQLLSQSPDGVLDLNKAAEVLKVQKRRIYDITNVLEGIHLIKKKSKNNVQWMGCSLSEDGGMLAQCQGLSKEVTELSQEEKKLDELIQSCTLDLKLLTEDSENQRLAYVTYQDIRKISGLKDQTVILVKAPPETRLEVPDSIESLQIHLASTQGPIEVYLCPEETETHRPMKTNNQDHNGNIPKPTSKDLASNNSGHSDCSVSTANLSPLASPANLLQQTEDQIPSNLEGPFVNLLPPLLQEDYLLSLGEEEGISDLFDAYDLEKLPLVEDFMCS

SEQ ID NO: 3361 - protein, 335 aa, Mus musculus
EMPLQQQAKRRLELGESGHQYLSDGLKTPKGKGRAALRSPDSPKKKTRYDTSLGLLTKKFIQLLSQSPDGVLDLNKAAEVLKVQKRRIYDITNVLEGIHLIKKKSKNNVQWMGCSLSEDGGMLAQCQGLSKEVTELSQEEKKLDELIQSCTLDLKLLTEDSENQRLAYVTYQDIRKISGLKDQTVIVVKAPPETRLEVPDSIESLQIHLASTQGPIEVYLCPEETETHRPMKTNNQDHNGNIPKPTSKDLASNNSGHSDCSVSTANLSPLASPANLLQQTEDQIPSNLEGPFVNLLPPLLQEDYLLSLGEEEGISDLFDAYDLEKLPLVEDFMCS

SEQ ID NO: 3362 - protein, 334 aa, Mus musculus
MPLQQQAKRRLELGESGHQYLSDGLKTPKGKGRAALRSPDSPKKKTRYDTSLGLLTKKFIQLLSQSPDGVLDLNKAAEVLKVQKRRIYDITNVLEGIHLIKKKSKNNVQWMGCSLSEDGGMLAQCQGLSKEVTELSQEEKKLDELIQSCTLDLKLLTEDSENQRLAYVTYQDIRKISGLKDQTVIVVKAPPETRLEVPDSIESLQIHLASTQGPIEVYLCPEETETHRPMKTNNQDHNGNIPKPTSKDLASNNSGHSDCSVSTANLSPLASPANLLQQTEDQIPSNLEGPFVNLLPPLLQEDYLLSLGEEEGISDLFDAYDLEKLPLVEDFMCS

SEQ ID NO: 3363 - protein, 335 aa, Mus musculus
MAAAEPTSSAQPTPQAQAQPPPHGAPSSQPSAALAGGSSRHEKSLGLLTTKFVSLLQEAQDGVLDLKAAADTLAVRQKRRIYDITNVLEGIDLIEKKSKNSIQWKGVGAGCNTKEVIDRLRCLKAEIEDLELKERELDQQKLWLQQSIKNVMEDSINNRFSYVTHEDICNCFHGDTLLAIQAPSGTQLEVPIPEMGQNGQKKYQINLKSHSGPIHVLLINKESSSSKPVVFPVPPPDDLTQPSSQSSTSVTPQKSTMAAQNLPEQHVSERSQTFQQTPAAEVSSGSISGDIIDELMSSDVFPLLRLSPTPADDYNFNLDDNEGVCDLFDVQILNY

SEQ ID NO: 3364 - protein, 335 aa, Mus musculus
MAAAEPTSSAQPTPQAQAQPPPHGAPSSQPSRRSRGGSSRHEKSLGLLTTKFVSLLQEAQDGVLDLKAAADTLAVRQKRRIYDITNVLEGIDLIEKKSKNSIQWKGVGAGCNTKEVIDRLRCLKAEIEDLELKERELDQQKLWLQQSIKNVMEDSINNRFSYVTHEDICNCFHGDTLLAIQAPSGTQLEVPIPEMGQNGQKKYQINLKSHSGPIHVLLINKESSSSKPVVFPVPPPDDLTQPSSQSSTSVTPQKSTMAAQNLPEQHVSERSQTFQQTPAAEVSSGSISGDIIDELMSSDVFPLLRLSPTPADDYNFNLDDNEGVCDLFDVQILNY

SEQ ID NO: 3365 - protein, 410 aa, Mus musculus
MAEAGPQAPPPPGTPSRHEKSLGLLTTKFVSLLQEAKDGVLDLKLAADTLAVRQKRRIYDITNVLEGIGLIEKKSKNSIQWKGVGPGCNTREIADKLIELKAEIEELQQREQELDQHKVWVQQSIRNVTEDVQNSCLAYVTHEDICRCFAGDTLLAIRAPSGTSLEVPIPEGLNGQKKYQIHLKSMSGPIEVLLVNKEAWSSPPVAVPVPPPDDLLQSPPAVSTPPPLPKPALAQPQESSPPSSPQLTTPTPVLGSTQVSEVACQTSEIAVSGSPGTENKDSGEVSSLPLGLTALDTRPLQSSALLDSSSSSSSSSSSSSSSSSGPNPSTSFEPIKADPTGVLDLPKELSEIFDPTRECMSSELLEELMSSEVFAPLLRLSPPPGDHDYIYNLDESEGVCDLFDVPVLKL

SEQ ID NO: 3366 - protein, 410 aa, Mus musculus
MAEAGPQAPPPPGTPSRHEKSLGLLTTKFVSLLQEAKDGVLDLKLAADTLAVRQKRRIYDITNVLEGIGLIEKKSKNSIQWKGVGPGCNTREIADKLIELKAEIEELQQREQELDQHKVWVQQSIRNVTEDVQNSCLAYVTHEDICRCFAGDTLLAIRAPSGTSLEVPIPEGLNGQKKYQIHLKSMSGPIEVLLVNKEAWSSPPVAVPVPPPDDLLQSPPAVSTPPPLPKPALAQPQESSPPSSPQLTTPTPVLGSTQVSEVACQTSEIAVSGSPGTENKDSGEVSSLPLGLTALDTRPLQSSALLDSSSSSSSSSSSSSSSSSGTNPSTSFEPIKADPTGVLDLPKELSEIFDPTRECMSSELLEELMSSEVFAPLLRLSPPPGDHDYIYNLDESEGVCDLFDVPVLKL

SEQ ID NO: 3367 - protein, 443 aa, Mus musculus
MLRAPRTLAPATAQPTKSLPALNPTELWPSGLSSPQLCPATTATTYYTSLYTQTVPSSVALGTCLDATPHGPEGQIVRCAPAGRLPAKRKLDLEGIGRPTVPEFRTPKGKCIRVDGLPSPKTPKSPGEKTRYDTSLGLLTKKFIYLLSESEDGVLDLNWAAEVLDVQKRRIYDITNVLEGIQLIRKKSKNNIQWVGRELFEDPTRPSRQQQLGQELKELMNAEQTLDQLIQSCSLSFKHLTEDNANKKLAYVTYQDIRAVGNFKEQTVIAVKAPPQTRLEVPDRAEENLQIYLKSTQGPIEVYLCPEEGQEPDSPAKEALPSTSALSPIPDCAQPGCSTDSGIAETIEPSVLIPQPIPPPPPPPLPPAPSLVPLEATDNMLELSHPLLQQTEDQFLSPILAANSPLISFSPPLDQDEYLWGMDEGEGISDLFDSYDLGDLLIN

SEQ ID NO: 3368 - protein, 272 aa, Mus musculus
MSQQRTARRQPSLLVDPAQETVRRRCRDPINVENLLPSKIRINLEENVQYVSMRKALKVKRPRFDVSLVYLTRKFMDLVRSAPGGILDLNKVATKLSVRKRRVYDITNVLDGIELVEKKSKNHIRWIGSDLNNFGAAPQQKKLQAELSDLSAMEDALDELIKDCAQQLLELTDDKENERLAYVTYQDIHGIQAFHEQIVIAVKAPEETRLDVPAPREDSITVHIRSTKGPIDVYLCEVEQNHSNGKTNDGIGASPSKSSHPQCPEKEDEPPQ

SEQ ID NO: 3369 - protein, 272 aa, Mus musculus
MSQQRTARRLPSLLVDPAQETVRRRCRDPINVENLLPSKIRINLEENVQYVSMRKALKVKRPRFDVSLVYLTRKFMDLVRSAPGGILDLNKVATKLGVRKRRVYDITNVLDGIELVEKKSKNHIRWIGSDLNNFGAAPQQKKLQAELSDLSAMEDALDELIKDCAQQLLELTDDKENERLAYVTYQDIHGIQAFHEQIVIAVKAPEETRLDVPAPREDSITVHIRSTKGPIDVYLCEVEQNHSNGKTNDGIGASPSKSSHPQCPEKEDEPPQ

SEQ ID NO: 3370 - protein, 272 aa, Mus musculus
MSQQRTARRQPSLLVDPAQETVRRRCRDPINVENLLPSKIRINLEENVQYVSMRKALKVKRPRFDVSLVYLTRKFMDLVRSAPGGILDLNKVATKLGVRKRRVYDITNVLDGIELVEKKSKNHIRWIGSDLNNFGAAPQQKKLQAELSDLSAMEDALDELIKDCAQQLLELTDDKENERLAYVTYQDIHGIQAFHEQIVIAVKAPEETRLDVPAPREDSITVHIRSTKGPIDVYLCEVEQNHSNGKTNDGIGASPSKSSHPQCPEKEDEPPQ

SEQ ID NO: 3371 - protein, 237 aa, Mus musculus
MPSKIRINLEENVQYVSMRKALKVKRPRFDVSLVYLTRKFMDLVRSAPGGILDLNKVATKLGVRKRRVYDITNVLDGIELVEKKSKNHIRWIGSDLNNFGAAPQQKKLQAELSDLSAMEDALDELIKDCAQQLLELTDDKENERLAYVTYQDIHGIQAFHEQIVIAVKAPEETRLDVPAPREDSITVHIRSTKGPIDVYLCEVEQNHSNGKTNDGIGASPSKSSHPQCPEKEDEPPQ

SEQ ID NO: 3372 - protein, 385 aa, Mus musculus
MGKCFTQLQMVGLIFELMSAGLLQNLWLGSAHSCLLEVKRRLDLETDHQYLAGSSGPFRGRGRHPGKGVKSPGEKSRYETSLNLTTKRFLELLSRSADGVVDLNWAAEVLKVQKRRIYDITNVLEGIQLIAKKSKNHIQWLGSHTMVGIGKRLEGLTQDLQQLQESEQQLDHLMHICTTQLQLLSEDSDTQRLAYVTCQDLRSIADPAEQMVIVIKAPPETQLQAVDSSETFQISLKSKQGPIDVFLCPEESADGISPGKTSCQETSSGEDRTADSGPAGPPPSPPSTSPALDPSQSLLGLEQEAVLPRMGHLRVPMEEDQLSPLVAADSLLEHVKEDFSGLLPGEFISLSPPHEALDYHFGLEEGEGIRDLFDCDFGDLTPLDF

SEQ ID NO: 3373 - protein, 430 aa, Mus musculus
MAVAPAGGQHAPALEALLGAGALRLLDSSQIVIISTAPDVGAPQLPAAPPTGPRDSDVLLFATPQAPRPAPSAPRPALGRPPVKRRLDLETDHQYLAGSSGPFRGRGRHPGKGVKSPGEKSRYETSLNLTTKRFLELLSRSADGVVDLNWAAEVLKVQKRRIYDITNVLEGIQLIAKKSKNHIQWLGSHTMVGIGKRLEGLTQDLQQLQESEQQLDHLMHICTTQLQLLSEDSDTQRLAYVTCQDLRSIADPAEQMVIVIKAPPETQLQAVDSSETFQISLKSKQGPIDVFLCPEESADGISPGKTSCQETSSGEDRTADSGPAGPPPSPPSTSPALDPSQSLLGLEQEAVLPRMGHLRVPMEEDQLSPLVAADSLLEHVKEDFSGLLPGEFISLSPPHEALDYHFGLEEGEGIRDLFDCDFGDLTPLDF

SEQ ID NO: 3374 - protein, 201 aa, Mus musculus
MSQQRTARRQPSLLVDPAQETVRRRCRDPINVENLLPSKIRINLEENVQYVSMRKALKVKSPRFDVSLVYLTRKFMDLVRSAPGGILDLNKVATKLGVRKRRVYDITNVLDGIELVEKKSKNHIRWIGSDLNNFGAAPQQKKLQAELSDLSAMEDALDELIKDCAQQLLELTDDKENERYPSISTFLRVSASRVDSVLGRA

SEQ ID NO: 3375 - protein, 206 aa, Mus musculus
IRHAQTVPSSVALGTSDDARPHGPEGQVVRCLPAGRLPEKEVGPGGEIGRLRSLNSGPKGKSIREDGLPSPKTPKSPGEKTHYDTSLGLLTKKFIYLLSESEDGVLDLNWAAEVLDVQKRRIYDITNVLEGNIQLIRKKSKNNIQWVGRELFEDPTRPSRQQQLGQELKELMNAEQTLDQLIQSCSLSFKHLTEDNANKNGPRGRI

SEQ ID NO: 3376 - protein, 300 aa, Rattus norvegicus
GGSSRHEKSLGLLTTKFVSLLQEAQDGVLDLKAAADTLAVRQKRRIYDITNVLEGIDLIEKKSKNSIQWKGVGAGCNTKEVIDRLRCLKAEIEDLELKERELDQQKLWLQQSIKNVMEDSINNRFSYVTHEDICSCFNGDTLLAIQAPSGTQLEVPIPEMGQNGQKKYQINLKSHSGPIHVLLINKESNSSKPVVFPVPPPDDLTQPSSQSSTSVTPPKSTMAAQNLPEQHVSERSQNFQQTPATEISSGSISGDIIDELMSSDVFPLLRLSPTPADDYNFNLDDNEGVCDLFDVQILNY

SEQ ID NO: 3377 - protein, 331 aa, Rattus norvegicus
MAEAGPQAPPPPGTPSRHEKSLGLLTTKFVSLLQEAKDGVLDLKLAADTLAVRQKRRIYDITNVLEGIGLIEKKSKNSIQWKGVGPGCNTREIADKLIELKAEIEELQQREQELDQHKASAVLLNPHTLAYVTHEDICRCFAGDTLLAIRAPSGTSLEVPIPEGLNGQKKYQIHLKSMSGPIEVLLVNKEAWSSPPVAVPVPPPDDLLQSPPAVSTPPPLPKPALAHPQETSRPSSPQITTPTPVLGSTEVSDVAGQTAEIAVLDLPKELSEIFDPTRECMSSELLEELMSSEVFAPLLRLSPPPGDHDYIYNLDESEGVCDLFDVPVLKL

SEQ ID NO: 3378 - protein, 189 aa, Rattus norvegicus
DPINVENLLPSKIRINLEENVQYVSMRKALKVKRPRFDVSLVYLTRKFMDLVRSAPGGILDLNKVATKLGVRKRRVYDITNVLDGIELVEKKSKNHIRWIGSDLNNFGAAPQQKKLQAELSDLSAMEDALDELIKDCAQQLLELTDDKENERLAYVTYQDIHGIQAFHEQIVIAVKAPEETRLDVPAPR

SEQ ID NO: 3379 - protein, 181 aa, Rattus norvegicus
MPSKIRINLEENVQYVSMRKALKVKRPRFDVSLVYLTRKFMDLVRSAPGGILDLNKVATKLGVRKRRVYDITNVLDGIELVEKKSKNHIRWIGSDLNNFGAAPQQKKLQAELSDLSAMEDALDELIKDCAQQLLELTDDKENERLAYVTYQDIHGIQAFHEQIVIAVKAPEETRLDVPAPR

SEQ ID NO: 3380 - protein, 388 aa, Rattus norvegicus
MAVAPAGGQHAPALEALLGAGALRLLDSSQIVIISTAPDVGAPQVKRRLDLETDHQYLAGSSGPFRGRGRHPGKGVKSPGEKSRYETSLNLTTKRFLELLSHSADGVVDLNWAAEVLKVQKRRIYDITNVLEGIQLIAKKSKNHIQWLGSRTMVGIGQRLEGLTQDLQQLQESEQQLDHLMHICTTQLQLLSEDSDIQRYPWVDLRSIADPAEQMVIVIKAPPETQLQAVDSAETFQISLKSKQGPIDVFLCPEESAEGISPGRTSYQETSGEDRNADSGTAGPPPSPPSTSPTLDPSQSLLGLEQEAVLPRIGNLRAPMEEDRLSPLVAADSLLEHVKEDFSGLLPGEFISLSPPHEAVDYHFGLEEGEGIRDLFDCDFGDLTPLDF

SEQ ID NO: 3381 - protein, 193 aa, Rattus norvegicus
MSQQRTARKLPSLLVDPAQETVRRRCRDPINVENLLPSKIRINLEENVQYVSMRKALKVKRPRFDVSLVYLTRKFMDLVRSAPGGILDLNKVATKLGVRKRRVYDITNVLDGIELVEKKSKNHIRWIGSDLNNFGAAPQQKKLQAELSDLSAMEDALDELIKDCAQQLLELTDDKENERYPSIQTFIEFLLPE

SEQ ID NO: 3382 - protein, 184 aa, Rattus norvegicus
MEDSINNRFSYVTHEDICSCFNGDTLLAIQAPSGTQLEVPIPEMGQNGQKKYQINLKSHSGPIHVLLINKESNSSKPVVFPVPPPDDLTQPSSQSSTSVTPPKSTMAAQNLPEQHVSERSQNFQQTPATEISSGSISGDIIDELMSSDVFPLLRLSPTPADDYNFNLDDNEGVCDLFDVQILNY

SEQ ID NO: 3383 - protein, 184 aa, Rattus norvegicus
MEDSINNRFSYVTHEDICSCFNGDTLLAIQAPSGTQLEVPIPEMGQNGQKKYQINLKSHSGPTHVLLINKESNSSKPVVFPVPPPDDLTQPSSQSSTSVTPPKSTMAAQNLPEQHVSERSQNFQQTPATEISSGSISGDIIDELMSSDVFPLLWLSPTPADDYNFNLDDNEGVWDLFDVQILNY

SEQ ID NO: 3384 - protein, 443 aa, Thlaspi caerulescens
MSESQQDSEQYPPSKRQYHPSVSSMKPPLVAPGEYHRFDAAETRGGGASDQLKRKTDMVNQIEEPNELNTGVLQTPVSGKGGKPKKSSRSVKSNKTGTQASGSNAGSPGNNFAQATCRYDSSLGLLTKKFINLIKQAEDGILDLNKAADTLEGTKETDIRYTNVLEGIGLIEKTLKNRIQWKDLDVSKPGETVESIANLQDEIQNLTAEEVKLDDQIRESQERLTSLSEDENNKRFLFVTEDDIKNLPCFQNKTLIAVKAPHGTTLEVPDPDEAGGYPQRRYRIILRSTMGPIDVYLVSQFEEKFEEIPNADEPSNLPSTSGLPENQDVAMPMEEDSSDKNMETQEVDDTQRVYSEIESHDFVDGIMKIVPPDLDMDVDYWLRSEVGEVSITDLWPNESGADWNQIVTFDQDHAGPSNTTLEQPRTPLSPAPENSTATKSTGS

SEQ ID NO: 3385 - protein, 386 aa, Thlaspi caerulescens
MAATSNSGEDPVLYNHRSPFRFELLQSLPPTDPRYSSQTPSSTNRPFSVSEPLPNAQSPQIPPHWDESYSQITQKVQKSRKNHRIQLGSISNMPGETIDIAKVIVKQESPQDTKRGIKSKVAKQLKAGKRMANTEAHNGGPNGTNNCRYDSSLGLLTKKFVNLIREAEDGSLDLNYCADVLEVQKRRIYDITNVLEGIGLIEKTTKNHIRWKGADNLGQNGLGDQISRLKLEVESMQSEESRLDELIRERQEALRSLEEDEYCKRYMFMTEEDITSIPRFQNQTLLAIKAPTASYIEVSDPDKVMSFPQRQYRMVIRSRMGPIDVYLLSKYKRDSGETSESDQNTQSGVDTPSLKIVTSDTDLKTDYWFESDAEVSLTDLWNNNFS

SEQ ID NO: 3386 - protein, 198 aa, Anopheles gambiae str. PEST
MSDSKQQRAKALALRGLSSPTPSMLLEEDDDGEFEPTSKRRFDKSLTMLTRSVVKMLRETPDGVLYLRDVSSTLSNRQKRRIYDVTNVLEGIGLVKKQVKNHIKWVGEELTTESCLGTARQIGVHMRKRRQLELREAWFDAQLEAMRKSTQMLHADEALRSFLYVTSDDLTTVFGDKRQLLVLSENEFAPRSNNQSSS

SEQ ID NO: 3387 - protein, 400 aa, Physcomitrella patens
MKRRNECEEHHVEMNGWNGYTNSDLSPAPTPTGPRGRGSRAKTVKQTKNGPQTPGPSGIGSPTSSAPTPTSTCRYDSSLGLLTKKFIDLIKQADDGVLDLNKAADTLHVQKRRIYDITNVLEGIGLIEKKLKNRIRWKGLGMVRNAEAKDDAAGLLAEVEDLRIKEKKLDESISEMRERLRSLSEDEHNKQWLYVTEDDIKNLHCFQNETLIAIKAPLGTTLEVPDPDEAVEYPHRRFQILLRSTLGPIDVYLVSRFEGRTEVPMETLPDSQEAGPSSSVDGMSHQENMVMVPEVGYGLSDLVPPVSHESASQAPEPTGSHPDFAGGIMRIAPAEVNTDTDYWLLSDAGVGISDMWRSDPSNAMWDEVVRLNPEFGSENIGSPRPHTPPSNNALEVDPVS

SEQ ID NO: 3388 - protein, 454 aa, Chenopodium rubrum
MSTPKATNHQSQPQPLKRQLPFTSMKPPFVPSPGDYHRFSDNRAPPAPDPETIVVKTPPMKRKSDTAEYDAESSDWTASPGYTEVVSSPHQTPVSGKAGKGRGSRISKCNRPGPQTPMSNVGSPGNNLTPVGPCRYDSSLGLGTKKFINLIKHAEEGILDLNKAADTLEVQKRRIYDITNVLEGIGLIEKKLKNRIQWKGLDVSRPGEVDDSVTSLQADVENLSIEERRLDEQIREMQERLREMSEDENNQKWLFVTEEDIKGLPCFQNETLIAIKAPHGTTLEVPDPDEAVDYPQRRYRIVLRSTMGPIDVYLVSQFEEKFEEISGAEPPPSIPSTSGYNEDTTTAAKEENRDDETKMQGQETHRICSDANAQQDFVSGIMKIVPEVDSDADYWLLSDADVSITDMWRTDSGVEWNELGTIHEDYTVANVGTPQPQSPPPSATEVLPTNTTGR

SEQ ID NO: 3389 - protein, 483 aa, Arabidopsis thaliana
MSGVVRSSPGSSQPPPPPPHHPPSSPVPVTSTPVIPPIRRHLAFASTKPPFHPSDDYHRFNPSSLSNNNDRSFVHGCGVVDREEDAVVVRSPSRKRKATMDMVVAPSNNGFTSSGFTNIPSSPCQTPRKGGRVNIKSKAKGNKSTPQTPISTNAGSPITLTPSGSCRYDSSLGLLTKKFVNLIKQAKDGMLDLNKAAETLEVQKRRIYDITNVLEGIDLIEKPFKNRILWKGVDACPGDEDADVSVLQAEIENLALEEQALDNQIRQTEERLRDLSENEKNQKWLFVTEEDIKSLPGFQNQTLIAVKAPHGTTLEVPDPDEAADHPQRRYRIILRSTMGPIDVYLVSEFEGKFEDTNGSGAAPPACLPIASSSGSTGHHDIEALTVDNPETAIVSHDHPHPQPGDTSDLNYLQEQVGGMLKITPSDVENDESDYWLLSNAEISMTDIWKTDSGIDWDYGIADVSTPPPGMGEIAPTAVDSTPR

SEQ ID NO: 3390 - protein, 485 aa, Arabidopsis thaliana
MSGVVRSSPGSSQPPPPPPHHPPSSPVPVTSTPVIPPIRRHLAFASTKPPFHPSDDYHRFNPSSLSNNNDRSFVHGCGVVDREEDAVVVRSPSRKRKATMDMVVAPSNNGFTSSGFTNIPSSPCQTPRKGGRVNIKSKAKGNKSTPQTPISTNAGSPITLTPSGSCRYDSSLGLLTKKFVNLIKQAKDGMLDLNKAAETLEVQKRRIYDITNVLEGIDLIEKPFKNRILWKGVDACPGDEDADVSVLQLQAEIENLALEEQALDNQIRQTEERLRDLSENEKNQKWLFVTEEDIKSLPGFQNQTLIAVKAPHGTTLEVPDPDEAADHPQRRYRIILRSTMGPIDVYLVSEFEGKFEDTNGSGAAPPACLPIASSSGSTGHHDIEALTVDNPETAIVSHDHPHPQPGDTSDLNYLQEQVGGMLKITPSDVENDESDYWLLSNAEISMTDIWKTDSGIDWDYGIADVSTPPPGMGEIAPTAVDSTPR

SEQ ID NO: 3391 - protein, 485 aa, Arabidopsis thaliana
MSGVVRSSPGSSQPPPPPPHHPPSSPVPVTSTPVIPPIRRHLAFASTKPPFHPSDDYHRFNPSSLSNNNDRSFVHGCGVVDREEDAVVVRSPSRKRKATMDMVVAPSNNGFTSSGFTNIPSSPCQTPRKGGRVNIKSKAKGNKSTPQTPISTNAGSPITLTPSGSCRYDSSLGLLTKKFVNLIKQAKDGMLDLNKAAETLEVQKRRIYDITNVLEGIDLIEKPFKNRILWKGVDACPGDEDADVSVLQLQAEIENLALEEQALGNQIRQTEERLRDLSENEKNQKWLFVTEEDIKSLPGFQNQTLIAVKAPHGTTLEVPDPDEAADHPQRRYRIILRSTMGPIDVYLVSEFEGKFEDTNGSGAAPPACLPIASSSGSTGHHDIEALTVDNPETAIVSHDHPHPQPGDTSDLNYLQEQVGGMLKITPSDVENDESDYWLLSNAEISMTDIWKTDSGIDWDYGIADVSTPPPGMGEIAPTAVDSTPR

SEQ ID NO: 3392 - protein, 469 aa, Arabidopsis thaliana
MSEEVPQQFPSSKRQLHPSLSSMKPPLVAPGEYHRFDAAETRGGGAVADQVVSDAIVIKSTLKRKTDLVNQIVEVNELNTGVLQTPVSGKGGKAKKTSRSAKSNKSGTLASGSNAGSPGNNFAQAGTCRYDSSLGLLTKKFINLIKQAEDGILDLNKAADTLEVQKRRIYDITNVLEGIGLIEKTLKNRIQWKGLDVSKPGETIESIANLQDEVQNLAAEEARLDDQIRESQERLTSLSEDENNKRLLFVTENDIKNLPCFQNKTLIAVKAPHGTTLEVPDPDEAGGYQRRYRIILRSTMGPIDVYLVSQFEESFEDIPQADEPSNVPDEPSNVPDEPSNLPSTSGLPENHDVSMPMKEESTERNMETQEVDDTQRVYSDIESHDFVDGIMKIVPPDLDMGVDYWFRSEVGEVSITDMWPDESGPDWNQMITFDQDHAGPSDNKILEQPQTPSSPTPEESTATRSPTGS

SEQ ID NO: 3393 - protein, 391 aa, Arabidopsis thaliana
SASVAGVLQTPVSGKGGKAKKTSRSAKSNKSGTLASGSNAGSPGNNFAQAGTCRYDSSLGLLTKKFINLIKQAEDGILDLNKAADTLEVQKRRIYDITNVLEGIGLIEKTLKNRIQWKGLDVSKPGETIESIANLQDEVQNLAAEEARLDDQIRESQERLTSLSEDENNKRLLFVTENDIKNLPCFQNKTLIAVKAPHGTTLEVPDPDEAGGYQRRYRIILRSTMGPIDVYLVSQFEESFEDIPQADEPSNVPDEPSNVPDVPSNLPSTSGLPENHDVSMPMKEESTERNMETQEVDDTQRVYSDIESHDFVDGIMKIVPPDLDMGVDYWFRSEVGEVSITDMWPDEYWNQMITFDQDHAGPSDNKILEQPQTPSSPTPEESTATRSPTGS

SEQ ID NO: 3394 - protein, 469 aa, Arabidopsis thaliana
MSEEVPQQFPSSKRQLHPSLSSMKPPLVAPGEYHRFDAAETRGGGAVADQVVSDAIVIKSTLKRKTDLVNQIVEVNELNTGVLQTPVSGKGGKAKKTSRSAKSNKSGTLASGSNAGSPGNNFAQAGTCRYDSSLGLLTKKFINLIKQAEDGILDLNKAADTLEVQKRRIYDITNVLEGIGLIEKTLKNRIQWKGLDVSKPGETIESIANLQDEVQNLAAEEARLDDQIRESQERLTSLSEDENNKRLLFVTENDIKNLPCFQNKTLIAVKAPHGTTLEVPDPDEAGGYQRRYRIILRSTMGPIDVYLVSQFEESFEDIPQADEPSNVPDEPSNVPDVPSNLPSTSGLPENHDVSMPMKEESTERNMETQEVDDTQRVYSDIESHDFVDGIMKIVPPDLDMGVDYWFRSEVGEVSITDMWPDESGPDWNQMITFDQDHAGPSDNKILEQPQTPSSPTPEESTATRSPTGS

SEQ ID NO: 3395 - protein, 532 aa, Arabidopsis thaliana
MSGVVRSSPGSSQPPPPPPHHPPSSPVPVTSTPVIPPIRRHLAFASTKPPFHPSDDYHRFNPSSLSNNNDRSFVHGCGVVDREEDAVVVRSPIFPSEIGLEIRGCFGDFDCYLLLLSLIQKLRSVRLSSIRVNFCRLFSFAMSRKRKATMDMVVAPSNNGFTSSGFTNIPSSPCQTPRKGGRVNIKSKAKGNKSTPQTPISTNAVRSFYEISFMSRVTSSPITLTPSGSCRYDSSLGLLTKKFVNLIKQAKDGMLDLNKAAETLEVQKRRIYDITNVLEGIDLIEKPFKNRILWKGVDACPGDEDADVSVLQLQAEIENLALEEQALDNQIRWLFVTEEDIKSLPGFQNQTLIAVKAPHGTTLEVPDPDEAADHPQRRYRIILRSTMGPIDVYLVSEFEGKFEDTNGSGAAPPACLPIASSSGSTGHHDIEALTVDNPETAIVSHDHPHPQPGDTSDLNYLQEQVGGMLKITPSDVENDESDYWLLSNAEISMTDIWKTDSGIDWDYGIADVSTPPPGMGEIAPTAVDSTPR

SEQ ID NO: 3396 - protein, 514 aa, Arabidopsis thaliana
MSGVVRSSPGSSQPPPPPPHHPPSSPVPVTSTPVIPPIRRHLAFASTKPPFHPSDDYHRFNPSSLSNNNDRSFVHGCGVVDREEDAVVVRSPIFPSEIGLEIRGCFGDFDCYLLLLSLIQKLRSVRLSSIRVNFCRLFSFAMSRKRKATMDMVVAPSNNGFTSSGFTNIPSSPCQTPRKGGRVNIKSKAKGNKSTPQTPISTNAVRSFYEISFMSRVTSLLTKKFVNLIKQAKDGMLDLNKAAETLEVQKRRIYDITNVLEGIDLIEKPFKNRILWKGVDACPGDEDADVSVLQLQAEIENLALEEQALDNQIRWLFVTEEDIKSLPGFQNQTLIAVKAPHGTTLEVPDPDEAADHPQRRYRIILRSTMGPIDVYLVSEFEGKFEDTNGSGAAPPACLPIASSSGSTGHHDIEALTVDNPETAIVSHDHPHPQPGDTSDLNYLQEQVGGMLKITPSDVENDESDYWLLSNAEISMTDIWKTDSGIDWDYGIADVSTPPPGMGEIAPTAVDSTPR

SEQ ID NO: 3397 - protein, 396 aa, Arabidopsis thaliana
MAATSNSGEDPTLSYHHRSPFRFELLQSISSSDPRYSSLTPSSTNRPFSVSQSLPNSQLSPLISPHWDDSYSQITQKVQKSRKNHRIQLGSIANMSGGESIDIAKVIVKQESSPQNVKRVYNKSKGGTKLLKAGKRMANGEVQNGGLNGASINCRYDSSLGLLTKKFVKLIQEAEDGTLDLNYCAVVLEVQKRRIYDITNVLEGIGLIEKTTKNHIRWKGADNLGQKDLGDQISRLKSEVESMQSEESRLDDLIRERQEALRSLEEDDYCRRYMFMTEEDITSLPRFQNQTLLAIKAPTASYIEVPDPDEMSFPQQYRMVIRSRMGPIDVYLLSKYKGDSAETSDKLGNESDQKAPVGVDTPSLKIVTSDTDLKADYWFESDAEVSLTDLWSNFNS

SEQ ID NO: 3398 - protein, 396 aa, Arabidopsis thaliana
MAATSNSGEDPTLSYHHRSPFRFELLQSISSSDPRYSSLTPSSTNRPFSVSQSLPNSQLSPLISPHWDDSYSQITQKVQKSRKNHRIQLGSIANMSGGESIDIAKVIVKQESSPQNVKRVYNKSKGGTKLLKAGKRMANGEVQNGGLNGASINCRYDSSLGLLTKKFVKLIQEAEDGTLDLNYCAVVLEVQKRRIYDITNVLEGIGLIEKTTKNHIRWKGADNLGQKDLGDQISRLKSEVESMQSEESRLDDLIRERQEALRSLEEDDYCRRYMFMTEEDITSLPRFQNQTLLAIKTPTASYIEVPDPDEMSFPQQYRMVIRSRMGPIDVYLLSKYKGDSAETSDKLGNESDQKAPVGVDTPSLKIVTSDTDLKADYWFESDAEVSLTDLWSNFNS

SEQ ID NO: 3399 - protein, 426 aa, Arabidopsis thaliana
MAATSNSGEDPTLSYHHRSPFRFELLQSISSSDPRYSSLTPSSTNRPFSVSQSLPNSQLSPLISPHWDDSYSQITQKVQKSRKNHRIQLGSIANMSGGESIDIAKVIVKQESSPQNVKRVYNKSKGGTKLLKAGKRMANGEVQNGGLNGASINCRYDSSLGLLTKKFVKLIQEAEDGTLDLNYCAVVLEVQKRRIYDITNVLEGIGLIEKTTKNHIRWKGADNLGQKDLGDQISRLKSEVESMQSEESRLDDLIRERQEALRSLEEDDYCRRYMFMTEEDITSLPRFQNQTLLAIKAPTASYIEVPDPDEMSFPQQYRMVIRSRMGPIDVYLLRYLVTHSTLCVWSYLYICQSVLITGNKHDRSKYKGDSAETSDKLGNESDQKAPVGVDTPSLKIVTSDTDLKADYWFESDAEVSLTDLWSNFNS

SEQ ID NO: 3400 - protein, 276 aa, Glycine max
  unsure (1)..(276): unsure at all Xaa locations
IRLEGIGLIEKKLKNRIQWKGLDVSRPGEADDSFASLQAEVENLTMKERQLDEQIREMQERLRDLSEDENNDKLLFVTEEDIKNLPCFQNETLIAIKAPHGTTLEVPDPDEAVDYLQRRYRIVLRSTMGPIDLYLVSQFEEKFEEINGADVAPKLPSSPDVTKQQSTVVPEXXRGKHIEVQGQAAPGPSSDFTPSQDFVSGIMKIVPSDVASEADYWLLSDADVSITDMWRTEPGVEWNELEPLQEDYCMTDENTTTPSHPSNVGEVSSASKPTGG

SEQ ID NO: 3401 - protein, 260 aa, Glycine max
  unsure (1)..(260): unsure at all Xaa locations
MSSAAGAPDRRASPPRVAAGAPTRPPLKRHLAFITKPPFAPPDEYHSFSSIGSRRAADEAVVVRSPYIMKRKSGMNDSEGESLAQKWSNSPGYTNVSNVTNNSPFKTPVSAKGGRTQKAKASKGXXSCPPTPISNAGSPSPLTPASSCRYDSSLGLLTKKFINLVKHAEGGILDLNKAAETLEVQKRRIYDITNVLEGIGLIEKKLKNRIHWKGIESATSGDVDGDISLLKAEVEKLSLEEQGIDDQIREMQERLRNLSE

SEQ ID NO: 3402 - protein, 196 aa, Glycine max
  unsure (1)..(196): unsure at all Xaa locations
MSASRAPPAANPPDQIMPMKRQLPFSSMKPPFVAAGDYHRHXXPPKXIVVKTPLLKRKSEVADFEADSGDRMTAGFTEAANSPFQTPVSGKTGKGGKSSRLTKGNRVGTQTPGSNIGSPAGSNLTPAGPCRYDSSLGLLTKKFINLIKQAEDGILDLNKAADTLEVQKMRIYDITNVLEGIGLIEKRLQDRIQWKG

SEQ ID NO: 3403 - protein, 198 aa, Glycine max
  unsure (1)..(198): unsure at all Xaa locations
MDQYQDDYDFEGGNGKSGKGGRDKSKXSYVGPGRRDNSLNVLTRKFIDLIRKSPNQTVDLNNAVKILNVQKRRIYDITNVLEGIQYIEKVLKNKIKWVGXXQVTEELDDKINELEELENLQKEESDIDHWINYLQENLGDLTKDEVNNNYSYVTFDDVKSVNXPCQRNQPFLVIRAPKGTVLEVPSPCFINKKKKKKK

SEQ ID NO: 3404 - protein, 181 aa, Glycine max
  unsure (1)..(181): unsure at all Xaa locations
TRIKAPHGTTLEVPDPEEAVDYPQRRYRIILRSTMGPIDGYLISHFEEKFEEVNGAEPPMIPLASSSGSNEQLMTEMVPAGSGKELEPQTQLSSHAFSDSFXXEFAGGMLKGQSSDVDNDADYWLLSDADVSITDMWRTDSTVDWNGIDMLHPDFGIISRPQSPSSGLAEVPSTGANSIQK

SEQ ID NO: 3405 - protein, 182 aa, Glycine max
TRIKAPHGTTLEVPDPEEAVDYPQRRYRIILRSTMGPIDGYLISHCEENFEEVNGAEPPMIPLASSSGSNEQLMTEMVPAGSGKELEPQTQLSSHAFSDLNASQEFAGGMLKGQSSDVDNDADYWLLSDADVSITDMWRTDSTVDWNGIDMLHPDFGIISRPQSPSSGLAEVPSTGANSIQK

SEQ ID NO: 3406 - protein, 123 aa, Glycine max
  unsure (1)..(123): unsure at all Xaa locations
XAVNNCRYDSSLGLLTKKFVSLIQDAKDGTLDLNRTAEILEVQKRRIYDITNVLEGVGLIEKTSKNHIQWKGCDGLGPQELEDQVNSLKVLILFTCQLVQMFYIIYAFRLLYMVALNCEPHLX

SEQ ID NO: 3407 - protein, 115 aa, Glycine max
  unsure (1)..(115): unsure at all Xaa locations
XSVADPAPVTPSRHEKSLGLLTSKFVSLLQEAEDGVLDLKAAADTLAVRQKRRIYDITNVLEGIGLIEKKSKNSIQWKGVGPGCNTREIADKLIDLKAELADLEQREQELDQQRV

SEQ ID NO: 3408 - protein, 181 aa, Glycine max
  unsure (1)..(181): unsure at all Xaa locations
XTKEDILSLPCFQNQEIIAIKAPKASCIEVPDPDEELGFRQRQYKMIVRSAIGPINLYLLSKDDSKFEDDSAKRMKLMDPSWNSDPIRKRGVGLLESQHDEKNPSEXXFSLQGSQAFGIQEITPTDFEMEDDYWFQSDPGVSQTELWEXRXAAVAISSNQSLLYEFDSWISPLHKNTRWPI

SEQ ID NO: 3409 - protein, 226 aa, Glycine max
  unsure (1)..(226): unsure at all Xaa locations
XNPKILSHRSHQFNSIPCKLNETLIAIKALHGTTLEVPNPEEAVDHRERRYKIILRSTMGXIDVYLMSQFEEVSGADLPMIPLASSFGSIEQLMTEMATKCSGKELEPQTQLSSQAFSDLXXILHRWVVDLWSSCGDEMMXTXLGADHLIQTTNIWMMPLPVKEDKSGXXTPLPMNEDKSGXTPQGLSXXSMRLVQQGTQRETLTKFYQVPKVSLLKIKTNTYSVF

SEQ ID NO: 3410 - protein, 471 aa, Oryza sativa (japonica cultivar-group)
MDGSAAIPPRPAPTPPAPAPAPPQVFLRRSVLPPPPAPHHAPPPPGAHVHYFRAASPIPIFRAAASSRPPRPPPPSTTTAPPPPAAPAVTPARPPPQQPAVAVAAPPPATTMATATEEVAAPATGNPMANAADNEEKNERETVQSEVAKGETVQGPDKECTTGAVKGIKRPRKPKGFKKGDAGPSLFSPNNCRYDSSLGLLTKKFINLLEGAEDGTLDLNKAAETLEVQKRRIYDITNVLEGVDLIEKTLKNMIRWKGFDMSKPKERERQISALKEEIESLYDEESRLDDEIMEAQEKLNALRVDEDRRKLLYVSKEDINAIPRFQGSTLIAVNAPRGTYIEVPDPNLDMDIYKDLDNQEKHYQIVFRSAMGPVDCFLISNHQETFNADQQMADNLDAAVTSGSSQAPQQMDYVQASEIGESNGVREHTSEPSKRDDPVPGIVKIVPSDDIAADYWLSSDADVSMTDTWGT

SEQ ID NO: 3411 - protein, 431 aa, Daucus carota
MKPPFVPSDDYYRFGESRGVADHEADVIIVKSTPSKRKPGNYNEVESSRLSMSPAYTNTVKSPNQTPVSGKGGRVYGRSNATKSLASVPQTPMSNAGSPSPLTPAGSCRYDSSLGLLTKKFINLIKQAEDGTLDLNNAAETLEVQKRRIYDITNVLEGIGLIEKKLKNRIHWKGIDASRPGEMEDDSNVLQAEVEKLSLEEKRLDDRIREMQEKLRDLSEDEANQKWLFVTEEDIKGLECFMNKTLIAIKAPHGTTLEVPDPDEVVDYPQRRYRIILRSTMGPIDVYLVSQFEEKFDEMNSVQPSMSLPLASSTGSNDNPAAETAIVGHGLENGTMTQDGHGVNSDLYTSEDISGGIMKILPSELDNDADYWLLTDPSISMTDMWKTDAGVEWDGASLLNEEFELPCISPRPQTPPSGVADVSTVANGTQR

SEQ ID NO: 3412 - protein, 439 aa, Nicotiana tabacum
MQQPHHQQRELPFTSSKPPLGDYHRFSTDPLQQPEAILVKSTPLKRKSETTNYKQGVGAQITDSGYADVSSPMQTPISGKVGKAQKVPRTSKARSASQAATSNLGSPSGNNATPVGPCRYDSSLGLLTKKFINLIKHAEDGILDLNKAADTLEVQKRRIYDITNVLEGIGLIEKKLKNRIQWKGLDVSRPGEVDDSVTSLQAEVENMTIEERRLNEQTREMQERLTDLCEDENNQRWLLVTEDDIKSLPCLQNETLIAIKAPHGTTLEVPDPDEAVDYPQRRYRIVLRSTMGPIDVYLVSQFEEKFEEINAVEAPSAMPSTSGFNENDTATLPTEENGGVDGRIDEKENQSVCADVGTSQDFASGIMKIVSDVDNEEDYWLLSDADVSITDIWRADSVLDWNELNVIHEDYSIANVSTPRAQTPPSSTTELPSANTTGS

SEQ ID NO: 3413 - protein, 165 aa, Populus alba
LTKKFINLIKHAEDGILDLNKAAETLEVQKRRIYDITNVLEGIGLIEKKLKNRIQWKGLDVSRPGEADDNNVATLQAEVENLTMEERRLDEQTREMQERLRDLSEDENNQKWLFVTEEDIKSLPGFQNETLIAIKAPHGTTLEVPDPDEAVDYPQRRYRILLRST

SEQ ID NO: 3414 - protein, 319 aa, Triticum aestivum
  unsure (1)..(319): unsure at all Xaa locations
XPFAVPAEYHRFPLPPSSSAPAAASRGSAGGDVEEGIVITTPLKRKAPCERNDAIESTEWMITSPGFTGRPRMTPGSGKAARTYKSKAKGSKDGLQTPISNAGSPGTPLTPGSSRAEHSLGELTKKCISLLKHAEDGILDLNNVAEILVVKKRRIYDITNVLEGIGLLEKEXLKNRIRWEGLDDSXANLDNEISILETELENLKLQEKALDNRISEMHEKVRELTEEENNQRWLYLTEDDIKGLPCFQNETLIAIKAPHGTTLEVPDPDEAGDYVQRRYTIVIRSTMGSIDLYLVSKFEENMEELVGVTTPPRHANVAX

SEQ ID NO: 3415 - protein, 151 aa, Triticum aestivum
RWKGLDDSGVELDDGLSGLQTEVENLNLQEQALDERISDMREKLRGLTEDENSQRWLYVTEDDIKGLPCFQNETLIAIKAPHGTTLEVPDPDEAGDYLQRRYRIVLRSTLCPIDVYLVSQYDDGFENLCGAATPARHTNVPKSGPCEDLHA

SEQ ID NO: 3416 - protein, 147 aa, Triticum aestivum
  unsure (1)..(147): unsure at all Xaa locations
MAAAAGGTSSEGAARVLLQRYQPFGSPPGEYHHFGPADGGGSADMTEAVVLRTPLKRKHNREDNEVAESNDWMMSPGYANAANSPIPTPPSGKGSKMSAKPKAAKGQKSCPQTPLFSGSPGNPATPVGGCRYDSSLGLLTKKFLNLX

SEQ ID NO: 3417 - protein, 112 aa, Triticum aestivum
KHYQLLLRSSMGPIDCFLISDHQGVSDPEQVAQDNLGHASTAGGSDAPRPVDESQAPEKGEGDTVGKHTSEPSSTHEPMSGILKILLPDTDVDADYWLASDIDATMTETWAT

SEQ ID NO: 3418 - protein, 458 aa, Triticum sp.
MSGGGRPPAAQKILQSLRPPPVFSTPSRPPFASPDDYHRFHAPTTPSATGSGGIGSGGVGGDIDEGLVIRTQLKRKATREENNAAESSDCMIVTTGVTGNPLLTPVSGKAVKNSKSKTKNNKAGPQTPTPNVGSPLNPSTPAGTCRYDSSLGLLTKKFINLLKQAEDGILDLNNAAETLEVQKRRIYDITNVLEGIGLIEKTLKNRIRWKGLDDSGVELDNGLSGLQTEVENLNLQEQALDERISDMREKLRGLTEDENSQRWLYVTEDDIKGLPCFQNETLIAIKAPHGTTLEVPDPDEAGDYLQRRYRIVLRSTLGPIDVYLVSQFDDGFENLGGAATPPRHTNVPKPGPCEDLHATNATQSSKSINVEYNIQHRQNTPQDPSSSNDYGGMTRIIPSDVNTDADYWLLTEGDVSITDMWETAPEVQWDTAVFLPEDVSIPHAHHSPRMQVPSMDQP

SEQ ID NO: 3419 - protein, 480 aa, Zea mays
  unsure (1)..(480): unsure at all Xaa locations
MSGVGSGRPPAAQKILQSLRPPLSFATPSRPPFAAPDDYHRFPTPAAATAPAATSGGVGAGAPPRDTIEEGLVIRTPLKRKATSEENDAAAEPSDCIITSPMPTSVSGKTVKASKAKAKNSKTGPQTPTSNVGSPLNPPTPVGTCRYDSSLGLLTKKFINLLKQAPDGILDLNNAAETLEVQKRRIYDITNVLEGIGLIEKTLKNRIRWKALDDSSVQLDNGISALQAEVENLSLQEQALDERISDMREKLRGLTEDENNKRWLYVTEDDIKGLPSFQNETLIAIKAPHGTTLEVPDPDEAGDYLQRRYRIVLRSTMGPIDVYLVSQFDEKFEELGGVATPVKHSNVPRHQPVEDFNTYAGQSSTPMDVAHDVQHGQKIPQDPSALHDFGGMTRISPSDVHTDSDYWLLTEGDVSMTDMWKTGQEVQWDQIDFLSEDVVTPRAHNQQPVTVDGPHMEVPSMDPXYHNGPTKLTSGAVSFE

SEQ ID NO: 3420 - protein, 196 aa, Encephalitozoon cuniculi
MTRKPTSDRLSSTRSENSLYNLTRRFLKLVSMSPDRNVSIHQASIELNVGKRRIYDITNVLEGLGLLSKWSVSNAKWIGGNVDRYILDGEEKENKENHRLDPEGILRGDDLDATLCRLNEEISMLSQSEKNLANAYVTYADLQRLPSLDGSLVFAVKAPSETTMEYPRYEKGFYKLKLSSEQGTINIFYVSDEKKD

SEQ ID NO: 3421 - protein, 342 aa, Caenorhabditis elegans
MEDSYNDMEDPGFRQLSDMELQKALEMTKQSSIKNNLMLGLDNELDFDFDFDEDEDLDQPQMGTRADKSLGLLAKRFIRMIQYSPYGRCDLNTAAEALNVRQKRRIYDITNVLEGIGLIEKRSKNMIQWKGGDFMLNVKEGKRQSATTEEEDRMEQLKAEIEQLNKEEELIEQRQRWLQQSLRNMTESVENNKLSYVLRSQLAEIQGSDLTIGIQTRVGTQVRLSDPEQVEIHGGPSWCYLKDPSGPLRAAIVSNHELHDFVQRERAKRPGEEHVDADAPDEMMDDSRYRNRRTINDDEMFGFEQKVPAMKHLEPPPASDDYVYSSTGDEYRGDSIVDLYGD

SEQ ID NO: 3422 - protein, 287 aa, Caenorhabditis elegans
MQSMDPSSIDLGSIPGGSEQQQHEDGAAAAAGSPKEVFRSQQSLGLITQRFMSLRQRNEVLNLNEVAKELNISKRRVYDVINVLEGLGYVEKVEKNNIRWIGDNNNSEEQNALEARVEMLRQQEKLLELMIRDAQAIIELHFEDPIERPYNYVSKEDIRKTAEPNTKSIIVKSELDTSSSFEIQVTDPSTSGSHDMIVRNKNGVKSHALLFTNDPPEYGDEEDEDDVKKLSSQKRFETSEALRVTLAEMLTDPTTISSSPKHIKLEEPEEIDTEDLGARNSQNSEKI

SEQ ID NO: 3423 - protein, 470 aa, Caenorhabditis elegans
MPRNRRSQPDHAHKMGVAYCTLYSESYSFSHENRSEHGFQLKICDFLELNRFISVMQSMDPSSIDLGSIPGGSEQQQHEDGAAAAAGSPKEVFRSQQSLGLITQRFMSLRQRNEVLNLNEVAKELNISKRRVYDVINVLEGLGYVEKVEKNNIRWIGDNNNSEEQNALEARVEMLRQQEKLLELMIRDAQAIIELHFEDPIERPYNYVSKEDIRKTAEPNTKSIIVKSELDTSSSFEIQVTDPSTSGSHDMIVRNKNGVKSHALLFTNDPPEYGDEEDEDDVKKLSSQKRFETSEALRVTLAEMLTDPTTISSSPKHIKLEEPEEIDTEDLETFAPPEFSENKWSQKIGGGLAILWAWLALMPRPQNGNFFSAKFFKFFPETVARKTFVLPPSTSASQSNAPYLPETPGRGLFFSPFKSLIDPCILPSFSDDLTSGYINITTPSRATGAGAGASGQEDEEPVSVMDFFSD

SEQ ID NO: 3424 - protein, 412 aa, Caenorhabditis elegans
MDPSSIDLGSIPGGSEQQQHEDGAAAAAGSPKEVFRSQQSLGLITQRFMSLRQRNEVLNLNEVAKELNISKRRVYDVINVLEGLGYVEKVEKNNIRWIGDNNNSEEQNALEARVEMLRQQEKLLELMIRDAQAIIELHFEDPIERPYNYVSKEDIRKTAEPNTKSIIVKSELDTSSSFEIQVTDPSTSGSHDMIVRNKNGVKSHALLFTNDPPEYGDEEDEDDVKKLSSQKRFETSEALRVTLAEMLTDPTTISSSPKHIKLEEPEEIDTEDLETFAPPEFSENKWSQKIGGGLAILWAWLALMPRPQNGNFFSAKFFKFFPETVARKTFVLPPSTSASQSNAPYLPETPGRGLFFSPFKSLIDPCILPSFSDDLTSGYINITTPSRATGAGAGASGQEDEEPVSVMDFFSD

SEQ ID NO: 3425 - protein, 805 aa, Drosophila melanogaster
MSKFFVNVAPINNSNSSSSHTTTSSNTQRHQQHQQHYGGSGTTGHTMVARRLNYDLHGGTTSINNNNNIVIKNESVDLDYDHVLSSSDSNSNGGVAAHLRDHVYISLDKGHNTGAVATAAAAATAGQTQQQLQQQHHHQNQQQRKATGKSNDITNYYKVKRRPHAVSDEIHPKKQAKQSAHHQTVYQKHTASSAPQQLRHSHHQLRHDADAELDEDVVERVAKPASHHPFSLSTPQQQLAASVASSSSSGDRNRADTSLGILTKKFVDLLQESPDGVVDLNEASNRLHVQKRRIYDITNVLEGINILEKKSKNNIQWRCGQSMVSQERSRHIEADSLRLEQQENELNKAIDLMRENLAEISQEVENSGGMAYVTQNDLLNVDLFKDQIVIVIKAPPEAKLVLPNTKLPREIYVKAENSGEINVFLCHDTSPENSPIAPGAGYVGAPGAGCVRTATSTRLHPLTNQRLNDPLFNNIDAMSTKGLFQTPYRSARNLSKSIEEAAKQSQPEYNNICDIAMGQHHNLNQQQQQQQQQLLQQPEEDDVDVELNQLVPTLTNPVVRTHQFQQHQQPSIQELFSSLTESSPPTPTKRRREAAAAAIAAGSSTTATTTLNSHNNRNHSNHSNHSNHSSSNNSKSQPPTIGYGSSQRRSDVPMYNCAMEGATTTSATADTTAATSRSAAASSLQMQFAAVAESNNGSSSGGGGGGGGYGSIAGAGANADPHQPYSHDRNSLPPGVADCDANSNSSSVTLQGLDALFNDIGSDYFSNDIAFVSINPPDDNDYPYALNANEGIDRLFDFGSDAYGP

SEQ ID NO: 3426 - protein, 805 aa, Drosophila melanogaster
MSKFFVNVAPINNSNSSSSHTTTSSNTQRHQQHQQHYGGSGTTGHTMVARRLNYDLHGGTTSINNNNNIVIKNESVDLDYDHVLSSSDSNSNGGVAAHLRDHVYISLDKGHNTGAVATAAAAATAGHTQQQLQQQHHHQNQQQRKATGKSNDITNYYKVKRRPHAVSDEIHPKKQAKQSAHHQTVYQKHTASSAPQQLRHSHHQLRHDADAELDEDVVERVAKPASHHPFSLSTPQQQLAASVASSSSSGDRNRADTSLGILTKKFVDLLQESPDGVVDLNEASNRLHVQKRRIYDITNVLEGINILEKKSKNNIQWRCGQSMVSQERSRHIEADSLRLEQQENELNKAIDLMRENLAEISQEVENSGGMAYVTQNDLLNVDLFKDQIVIVIKAPPEAKLVLPNTKLPREIYVKAENSGEINVFLCHDTSPENSPIAPGAGYVGAPGAGCVRTATSTRLHPLTNQRLNDPLFNNIDAMSTKGLFQTPYRSARNLSKSIEEAAKQSQPEYNNICDIAMGQHHNLNQQQQQQQQQLLQQPEEDDVDVELNQLVPTLTNPVVRTHQFQQHQQPSIQELFSSLTESSPPTPTKRRREAAAAAIAAGSSTTATTTLNSHNNRNHSNHSNHSNHSSSNNSKSQPPTIGYGSSQRRSDVPMYNCAMEGATTTSATADTTAATSRSAAASSLQMQFAAVAESNNGSSSGGGGGGGGYGSIAGAGANADPHQPYSHDRNSLPPGVADCDANSNSSSVTLQGLDALFNDIGSDYFSNDIAFVSINPPDDNDYPYALNANEGIDRLFDFGSDAYGP

SEQ ID NO: 3427 - protein, 370 aa, Drosophila melanogaster
MYKRKTASIVKRDSSAAGTTSSAMMMKVDSAETSVRSQSYESTPVSMDTSPDPPTPIKSPSNSQSQSQPGQQRSVGSLVLLTQKFVDLVKANEGSIDLKAATKILDVQKRRIYDITNVLEGIGLIDKGRHCSLVRWRGGGFNNAKDQENYDLARSRTNHLKMLEDDLDRQLEYAQRNLRYVMQDPSNRSYAYVTRDDLLDIFGDDSVFTIPNYDEEVDIKRNHYELAVSLDNGSAIDIRLVTNQGKSTTNPHDVDGFFDYHRLDTPSPSTSSHSSEDGNAPACAGNVITDEHGYSCNPGMKDEMKLLENELTAKIIFQNYLSGHSLRRFYPDDPNLENPPLLQLNPPQEDFNFALKSDEGICELFDVQCS

SEQ ID NO: 3428 - protein, 429 aa, Xenopus laevis
MRKGFQGGHEKLLLPGLQGTDKGSGLAGGFIAGGGGASVVGAGGGGYVQIISSPGPPLHHHGLCITEQAASFIYSTPHGPAARAGQLQPVLGRPPAKRRLELGDGSHQYLSDVLKTPKGKGRAATHCPDSPKTPKSPLEKTRYDTSLGLLTKKFIQLLSQSSDGVVDLNKAAEVLKVQKRRIYDITNVLEGIHLIKKKSKNNIQWMGCSLPDDGGNLAKSQELSKELSELAQEENKLDELIKNCTLDLKHLTENAENQRLAYVTYQDIRKISGLKEQTVIVIRAPPETRLEVPDPVESLQIHLSSSQGAIEVYLCPEENESSSPVKQCNQDHNGNVSKPKPHTKDSLSPNMENVNGSVEGISPLTSPTNLLQQTEDQISLNLDAPFVNLLPPSMQEDYLLSLGDEEGISDLFDAYELEKLPSLDDFMCS

SEQ ID NO: 3429 - protein, 403 aa, Gallus gallus
MATAGGAAGLAALLGGASPHLLIVSASEEPAGGCRPDADLLLFATPQPSRPGPAPRRPALGRPPVKRKLNLETDHQYIAESLPAARGRARIPGRGAKSPGEKSRYETSLNLTTKRFLELLSQSPDGVVDLNWAAEVLKVQKRRIYDITNVLEGIQLITKKSKNNIQWLGSQVAAGASSRQRLLEKELRDLQAAERQLDDLIQTCTVRLRLLTEDPSNQHAAYVTCQDLRSIVDPSEQMVMVIKAPPETQLQVSDPGEAFQVSVRSTQGPIDVFLCPEDSSGVCSPVKSPFKAPAEELSPGSSQQRASPLLHSAQDVNMLLPEALLPGTALPTKCPTEDVSLSPLASMDTLLEHGKDDFPGFLADEFIALSPPQPQDYHFGLEEGEGISELFDCDFGDFTHLDF

SEQ ID NO: 3430 - protein, 281 aa, Macaca fascicularis
MSQQRPARKLPSLLLDPAEETVRRRCRDPINVEGLLPSKIRINLEDNVQYVSMRKALKVKRPRFDVSLVYLTRKFMDLVRSAPGGILDLNKVATKLGVRKRRVYDITNVLDGIDLVEKKSKNHIRWIGSDLSNFGAVPQQKKLQEELSDLSAMEDALDELIKDCAQQLFELTDDEENERLAYVTYQDIHSIQAFHEQIVIAVKAPAETRLDVPAPREDSITVHIRSTNGPIDVYLCEVEQGQTGSKRSEGVGTSSSESTHAEGPEEEENPQQSEELLEVSN

SEQ ID NO: 3431 - protein, 334 aa, Homo sapiens
AKRRLELGESGHQYLSDGLKTPKGKGRAALRSPDSPKTPKSPSEKTRYDTSLGLLTKKFIQLLSQSPDGVLDLNKAAEVLKVQKRRIYDITNVLEGIHLIKKKSKNNVQWMGCSLSEDGGMLAQCQGLSKEVTELSQEEKKLDELIQSCTLDLKLLTEDSENQRLAYVTYQDIRKISGLKDQTVIVVKAPPETRLEVPDSIESLQIHLASTQGPIEVYLCPEETETHSPMKTNNQDHNGNIPKPASKDLASTNSGHSDCSVSMGNLSPLASPANLLQQTEDQIPSNLEGPFVNLLPPLLQEDYLLSLGEEEGISDLFDAYDLEKLPLVEDFMCS

SEQ ID NO: 3432 - protein, 465 aa, Homo sapiens
MRKGIQPALEQYLVTAGGGEGAAVVAAAAAASMDKRALLASPGFAAAAAAAAAPGAYIQILTTNTSTTSCSSSLQSGAVAAGPLLPSAPGAEQTAGSLLYTTPHGPSSRAGLLQQPPALGRGGSGGGGGPPAKRRLELGESGHQYLSDGLKTPKGKGRAALRSPDSPKTPKSPSEKTRYDTSLGLLTKKFIQLLSQSPDGVLDLNKAAEVLKVQKRRIYDITNVLEGIHLIKKKSKNNVQWMGCSLSEDGGMLAQCQGLSKEVTELSQEEKKLDELIQSCTLDLKLLTEDSENQRLAYVTYQDIRKISGLKDQTVIVVKAPPETRLEVPDSIESLQIHLASTQGPIEVYLCPEETETHSPMKTNNQDHNGNIPKPASKDLASTNSGHSDCSVSMGNLSPLASPANLLQQTEDQIPSNLEGPFVNLLPPLLQEDYLLSLGEEEGISDLFDAYDLEKLPLVEDFMCS

SEQ ID NO: 3433 - protein, 465 aa, Homo sapiens [sequence omitted]

SEQ ID NO: 3434 - protein, 421 aa, Homo sapiens
VDPGAAGAMAEAGPQAPPPPGTPSRHEKSLGLLTTKFVSLLQEAKDGVLDLKLAADTLAVRQKRRIYDITNVLEGIGLIEKKSKNSIQWKGVGPGCNTREIADKLIELKAEIEELQQREQELDQHKVWVQQSIRNVTEDVQNSCLAYVTHEDICRCFAGDTLLAIRAPSGTSLEVPIPEGLNGQKKYQIHLKSVSGPIEVLLVNKEAWSSPPVAVPVPPPEDLLQSPSAVSTPPPLPKPALAQSQEASRPNSPQLTPTAVPGSAEVQGMAGPAAEITVSGGPGTDSKDSGELSSLPLGPTTLDTRPLQSSALLDSSSSSSSSSSSSSNSNSSSSSGPNPSTSFEPIKADPTGVLELPKELSEIFDPTRECMSSELLEELMSSEVFAPLLRLSPPPGDHDYIYNLDESEGVCDLFDVPVLNL

SEQ ID NO: 3435 - protein, 413 aa, Homo sapiens
MAEAGPQAPPPPGTPSRHEKSLGLLTTKFVSLLQEAKDGVLDLKLAADTLAVRQKRRIYDITNVLEGIGLIEKKSKNSIQWKGVGPGCNTREIADKLIELKAEIEELQQREQELDQHKVWVQQSIRNVTEDVQNSCLAYVTHEDICRCFAGDTLLAIRAPSGTSLEVPIPEGLNGQKKYQIHLKSVSGPIEVLLVNKEAWSSPPVAVPVPPPEDLLQSPSAVSTPPPLPKPALAQSQEASRPNSPQLTPTAVPGSAEVQGMAGPAAEITVSGGPGTDSKDSGELSSLPLGPTTLDTRPLQSSALLDSSSSSSSSSSSSSNSNSSSSSGPNPSTSFEPIKADPTGVLELPKELSEIFDPTRECMSSELLEELMSSEVFAPLLRLSPPPGDHDYIYNLDESEGVCDLFDVPVLNL

SEQ ID NO: 3436 - protein, 416 aa, Homo sapiens
MAEAGPQAPPPPGTPSRHEKSLGLLTTKFVSLLQEAKDGVLDLKLAADTLAVRQKRRIYDITNVLEGIGLIEKKSKNSIQWKGVGPGCNTREIADKLIELKAEIEELQQREQELDQHKVWVQQSIRNVTEDVQNSCLAYVTHEDICRCFAGDTLLAIRAPSGTSLEVPIPEGLNGQKKYQIHLKSVSGPIEVLLVNKEAWSSPPVAVPVPPPEDLLQSPSAVSTPPPLPKPALAQSQEASRPNSPQLTPTAVPGSAEVQGMAGPAAEITVSGGPGTDSKDSGELSSLPLGPTTLDTRPLQSSALLDSSSSSSSSSSSSSSSSNSNSSSSSGPNPSTSFEPIKADPTGVLELPKELSEIFDPTRECMSSELLEELMSSEVFAPLLRLSPPPGDHDYIYNLDESEGVCDLFDVPVLNL

SEQ ID NO: 3437 - protein, 345 aa, Homo sapiens
MAAAEPASSGQQAPAGQGQGQRPPPQPPQAQAPQPPPPPQLGGAGGGSSRHEKSLGLLTTKFVSLLQEAKDGVLDLKAAADTLAVRQKRRIYDITNVLEGIDLIEKKSKNSIQWKGVGAGCNTKEVIDRLRYLKAEIEDLELKERELDQQKLWLQQSIKNVMDDSINNRFSYVTHEDICNCFNGDTLLAIQAPSGTQLEVPIPEMGQNGQKKYQINLKSHSGPIHVLLINKESSSSKPVVFPVPPPDDLTQPSSQSLTPVTPQKSSMATQNLPEQHVSERSQALQQTSATDISSGSISGDIIDELMSSDVFPLLRLSPTPADDYNFNLDDNEGVCDLFDVQILNY

SEQ ID NO: 3438 - protein, 346 aa, Homo sapiens
MAAAEPASSGQQAPAGQGQGQRPPPQPPQAQAPQPPPPPQLGGAGGGSSRHEKSLGLLTTKFVSLLQEAKDGVLDLKAAADTLAVRQKRRIYDITNVLEGIDLIEKKSKNSIQWKGVGAGCNTKEVIDRLRYLKAEIEDLELKERELDQQKLWLQQSIKNVMDDSINNRFSYVTHEDICNCFNGDTLLAIQAPSGTQLEVPIPEMGQNGQKKYQINLKSHSGPIHVLLINKESSSSKPVVFPVPPPDDLTQPSSQSLTPVTPQKSSMATQNLPEQHVSERSQALQQTSATDISSAGSISGDIIDELMSSDVFPLLRLSPTPADDYNFNLDDNEGVCDLFDVQILNY

SEQ ID NO: 3439 - protein, 346 aa, Homo sapiens
MAAAEPASSGQQAPAGQGQGQRPPPQPPQAQAPQPPPPPQLGGAGGGSSRHEKSLGLLTTKFVSLLQEAKDGVLDLKAAADTLAVRQKRRIYDITNVLEGIDLIEKKSKNSIQWKGVGAGCNTKEVIDRLRYLKAEIEDLELKERELDQQKLLLQQSIKNVMDDSINNRFSYVTHEDICNCFNGDTLLAIQAPSGTQLEVPIPEMGQNGQKKYQINLKSHSGPIHVLLINKESSSSKPVVFPVPPPDDLTQPSSQSLTPVTPQKSSMATQNLPEQHVSERSQALQQTSATDISSAGSISGDIIDELMSSDVFPLLRLSPTPADDYNFNLDDNEGVCDLFDVQILNY

SEQ ID NO: 3440 - protein, 437 aa, Homo sapiens
MLQGPRALASAAGQTPKVVPAMSPTELWPSGLSSPQLCPATATYYTPLYPQTAPPAAAPGTCLDATPHGPEGQVVRCLPAGRLPAKRKLDLEGIGRPVVPEFPTPKGKCIRVDGLPSPKTPKSPGEKTRYDTSLGLLTKKFIYLLSESEDGVLDLNWAAEVLDVQKRRIYDITNVLEGIQLIRKKAKNNIQWVGRGMFEDPTRPGKQQQLGQELKELMNTEQALDQLIQSCSLSFKHLTEDKANKRLAYVTYQDIRAVGNFKEQTVIAVKAPPQTRLEVPDRTEDNLQIYLKSTQGPIEVYLCPEEVQEPDSPSEEPLPSTSTLCPSPDSAQPSSSTDPSIMEPTASSVPAPAPTPQQAPPPPSLVPLEATDSLLELPHPLLQQTEDQFLSPTLACSSPLISFSPSLDQDDYLWGLEAGEGISDLFDSYDLGDLLIN

SEQ ID NO: 3441 - protein, 281 aa, Homo sapiens
MSQQRPARKLPSLLLDPTEETVRRRCRDPINVEGLLPSKIRINLEDNVQYVSMRKALKVKRPRFDVSLVYLTRKFMDLVRSAPGGILDLNKVATKLGVRKRRVYDITNVLDGIDLVEKKSKNHIRWIGSDLSNFGAVPQQKKLQEELSDLSAMEDALDELIKDCAQQLFELTDDKENERLAYVTYQDIHSIQAFHEQIVIAVKAPAETRLDVPAPREDSITVHIRSTNGPIDVYLCEVEQGQTSNKRSEGVGTSSSESTHPEGPEEEENPQQSEELLEVSN

SEQ ID NO: 3442 - protein, 275 aa, Homo sapiens
HEKLPSLLLDPTEETVRRRCRDPINVEGLLPSKIRINLEDNVQYVSMRKALKVKRPRFDVSLVYLTRKFMDLVRSAPGGILDLNKVATKLGVRKRRVYDITNVLDGIDLVEKKSKNHIRWIGSDLSNFGAVPQQKKLQEELSDLSAMEDALDELIKDCAQQLFELTDDKENERLAYVTYQDIHSIQAFHEQIVIAVKAPAETRLDVPAPREDSVTVHIRSTNEPIDVYLCEVEQGQTSNKRSEGVGTSSSESTHPEGPEEEENPQQSEELLEVSN

SEQ ID NO: 3443 - protein, 437 aa, Homo sapiens
MALAGAPAGGPCAPALEALLGAGALRLLDSSQIVIISAAQDASAPPAPTGPAAPAAGPCDPDLLLFATPQAPRPTPSAPRPALGRPPVKRRLDLETDHQYLAESSGPARGRGRHPGKGVKSPGEKSRYETSLNLTTKRFLELLSHSADGVVDLNWAAEVLKVQKRRIYDITNVLEGIQLIAKKSKNHIQWLGSHTTVGVGGRLEGLTQDLRQLQESEQQLDHLMNICTTQLRLLSEDTDSQRLAYVTCQDLRSIADPAEQMVMVIKAPPETQLQAVDSSENFQISLKSKQGPIDVFLCPEETVGGISPGKTPSQEVTSEEENRATDSATIVSPPPSSPPSSLTTDPSQSLLSLEQEPLLSRMGSLRAPVDEDRLSPLVAADSLLEHVREDFSGLLPEEFISLSPPHEALDYHFGLEEGEGIRDLFDCDFGDLTPLDF

SEQ ID NO: 3444 - protein, 476 aa, Homo sapiens
LCRQRRPGAERDRALAEACRHGPAPPPPPVTRAARAVSVMALAGAPAGGPCAPALEALLGAGALRLLDSSQIVIISAAQDASAPPAPTGPAAPAAGPCDPDLLLFATPQAPRPTPSAPRPALGRPPVKRRLDLETDHQYLAESSGPARGRGRHPGKGVKSPGEKSRYETSLNLTTKRFLELLSHSADGVVDLNWAAEVLKVQKRRIYDITNVLEGIQLIAKKSKNHIQWLGSHTTVGVGGRLEGLTQDLRQLQESEQQLDHLMNICTTQLRLLSEDTDSQRLAYVTCQDLRSIADPAEQMVMVIKAPPETQLQAVDSSENFQISLKSKQGPIDVFLCPEETVGGISPGKTPSQEVTSEEENRATDSATIVSPPPSSPPSSLTTDPSQSLLSLEQEPLLSRMGSLRAPVDEDRLSPLVAADSLLEHVREDFSGLLPEEFISLSPPHEALDYHFGLEEGEGIRDLFDCDFGDLTPLDF

SEQ ID NO: 3445 - protein, 437 aa, Homo sapiens [sequence omitted]

SEQ ID NO: 3446 - protein, 282 aa, Homo sapiens
MSQQQPAGKLTDLPINPAEETVRRRDATNAECPLPSTIRINSKDDVQPESKRETVNMKPHNKTSLACTTRKFIDILKSAPGGVLSLSQVAAKLAVHRRRIYDIISVLQGVKLIEKTSKNHIQWIGPDFNSGATPEEKKLEEEVSKLSATEDALDKLIEDCSQQLCELTNDKELGKLAYVTLEDIHNLERFQEQTVFVAKLPVEITLEIPISEDSFSLRLSNNDGPVDAYLCLSKKDYEANYTSESAGTSSESTGTSSESRHPEHPEEEENPQQGEELLDMSN

SEQ ID NO: 3447 - protein, 430 aa, Homo sapiens
MDTCQVWPVHTALPTSPALHQHLTGLSHRARPPCGFLRRSPAHARAEVLSSTAFKSSIAKSTTACGFDRHCYRDRSQLSQKGEKAASGLPEIGGVALAAPHLVPEPTDHPPRTPGIRNGGWKVWQWSGTNLSASNSLETGFLAGAVPARALKQLKVKRPPPRSAAFLSGTRLPGSGGTARAVIDSAPLETRRRSHRPPPPQCPRRGADRRQPPLHHAAGTLQQSRAAAATSAGTRRQWPSGKVKSGARRKRSSVPLGWFKNPQGQRKSCTKKSRYSKNSKIYLRKNTKFIQLLNQSPDGVLVLNKAAEVLKVQNRRIYDITKALKGIHLIKKKSKNNVQWMGCSLSADGGMLTQCQGLSKEMTKLTQEEKKLDELIPSCTLDLKLLTEDSDRQRLAYVTYQHIRKISGLKDQTVIVVKAPPEIRLECLTQ

SEQ ID NO: 3448 - protein, 76 aa, Homo sapiens
PPGTPSRHEKSLGLLTTKFVSLLQEAKDGVLDLKLAADTLAVRQKRRIYDITNVLEGIGLIEKKSKNSIQWKGVGP

SEQ ID NO: 3449 - protein, 154 aa, Mus musculus
  unsure (1)..(154): unsure at all Xaa locations
MAXDLDFYTGDAGASSTFPMQCSALRKNGFVVLKGRPCKIVEMSTSKTGKHGHAKVHLVGIDIFTGKKYEDICPSTHNMDVPNIKRNDFQLIGIQDGYLSLLQDSGEVREDLRLPEGDLGKEIEQKYDCGEEILITVLFAMTKEAAVAIKAMAK

SEQ ID NO: 3450 - protein, 100 aa, Mus musculus
MADDLDFETGDAGPSATFPMQCSALRKNGFVVLKGGPCKIVEMSTSKTGKHGHAKNSEEVREDLRLPEGDLGKEIEQKYDCGEEILITVLSAMTEEAMAK

SEQ ID NO: 3451 - protein, 61 aa, Mus musculus
MADEIDFTTGDAGASSTYPMQCSALRKNGFVVLKGRPCKIVEMSTSKTGKHGHAKVHLVGI

SEQ ID NO: 3452 - protein, 49 aa, Rattus norvegicus
GDAGASSTYPMQCSALRKNGFVVLKGRPCKIVEMSTSKTGKHGHAKVHL

SEQ ID NO: 3453 - protein, 131 aa, Sulfolobus tokodaii
MSIQYTTVGDLKVGNYVVIDGEPCRVVEISKAKTGKHGSAKANIVAIGLFTGQKRTLMAPVDQQVEVPIIEKHIGQILADKGDTITIMDMENYETFDIEKPTDADIVDKIRPGAEVEYWEIMGRKKIVRVK

SEQ ID NO: 3454 - protein, 138 aa, Pyrobaculum aerophilum
MVLKWVMSTKYVEAGELKEGSYVVIDGEPCRVVEIEKSKTGKHGSAKARIVAVGVFDGGKRTLSLPVDAQVEVPIIEKFTAQILSVSGDVIQLMDMRDYKTIEVPMKYVEEEAKGRLAPGAEVEVWQILDRYKIIRVK

SEQ ID NO: 3455 - protein, 136 aa, Pyrobaculum aerophilum
  unsure (1)..(136): unsure at all Xaa locations
KWVXSTKYVEAGELKEGSYVVIDGEPCRVVEIEKSKTGKHGSAKARIVAVGVFDGGKRTLSLPVDAQVEVPIIEKFTAQILSVSGDVIQLXDXRDYKTIEVPXKYVEEEAKGRLAPGAEVEVWQILDRYKIIRVKG

SEQ ID NO: 3456 - protein, 132 aa, Pyrobaculum aerophilum str. IM2
MSTKYVEAGELKEGSYVVIDGEPCRVVEIEKSKTGKHGSAKARIVAVGVFDGGKRTLSLPVDAQVEVPIIEKFTAQILSVSGDVIQLMDMRDYKTIEVPMKYVEEEAKGRLAPGAEVEVWQILDRYKIIRVK

SEQ ID NO: 3457 - protein, 203 aa, Anopheles gambiae str. PEST
CRGSSNRKNSASFLAPTPPLCSFFSLSVCERLIVPPQKPQSIKMTEMEDTHFETADSGASQTFPMQCSALRKNGHVMLKGRPCKIVEMSTSKTGKHGHAKVHMVGIDIFTGKKYEDICPSTHNMDVPNVKREDYQLTDIDDGFLVLMSDNGDLREDLKIPDGELGTQLRSEFDSGKEIVCTVLKSCGEETVIAIKNNTSGDKN

SEQ ID NO: 3458 - protein, 149 aa, Giardia lamblia ATCC 50803
MSAAGEPMYPKQAGNLKKGDYIVMKDVFPCKVTEISTSKTGKHGHAKCSITAVDIFTGKKYEDSCPSSHNIMCPNVSRTDYLLINIDDEYAFYFDQNDAEQQVRLPLENEELVADLRAAFEAGDKTIMINIQRAMNTEGIVAFKTETNK

SEQ ID NO: 3459 - protein, 136 aa, Methanopyrus kandleri AV19
MDVAVKKVEVRQLKKGKYIMIDDEPCKIVEYTTSSPGKHGSAKARIVAVGLFDGKKRTLTKPVDAKVDVPVIERKTAQVVSDMGDTVQLMDMETYETFEVQKPEDEELASQLEPGTMVEYMEAAGKRKIVGIKEEE

SEQ ID NO: 3460 - protein, 135 aa, Methanocaldococcus jannaschii
MIIMPGTKQVNVGSLKVGQYVMIDGVPCEIVDISVSKPGKHGGAKARVVGIGIFEKVKKEFVAPTSSKVEVPIIDRRKGQVLAIMGDMVQIMDLQTYETLELPIPEGIEGLEPGGEVEYIEAVGQYKITRVIGGK

SEQ ID NO: 3461 - protein, 132 aa, Methanocaldococcus jannaschii
MPGTKQVNVGSLKVGQYVMIDGVPCEIVDISVSKPGKHGGAKARVVGIGIFEKVKKEFVAPTSSKVEVPIIDRRKGQVLAIMGDMVQIMDLQTYETLELPIPEGIEGLEPGGEVEYIEAVGQYKITRVIGGK

SEQ ID NO: 3462 - protein, 136 aa, Methanocaldococcus jannaschii
MVIIMPGTKQVNVGSLKVGQYVMIDGVPCEIVDISVSKPGKHGGAKARVVGIGIFEKVKKEFVAPTSSKVEVPIIDRRKGQVLAIMGDMVQIMDLQTYETLELPIPEGIEGLEPGGEVEYIEAVGQYKITRVIGGK

SEQ ID NO: 3463 - protein, 135 aa, Methanocaldococcus jannaschii
VIIMPGTKQVNVGSLKVGQYVMIDGVPCEIVDISVSKPGKHGGAKARVVGIGIFEKVKKEFVAPTSSKVEVPIIDRRKGQVLAIMGDMVQIMDLQTYETLELPIPEGIEGLEPGGEVEYIEAVGQYKITRVIGGK

SEQ ID NO: 3464 - protein, 128 aa, Archaeoglobus fulgidus DSM 4304
MKQQVEVRQLREGGYVVIDDEPCEILSISVSKPGKHGAAKARIDAIGIFDSQKRSIVQPVTAKIYVPIVERKRAQIISVTGNVAQLMDLETYETFELEVPEELKDKMEQGREVIYLESLGKRKIERMA

SEQ ID NO: 3465 - protein, 135 aa, Sulfolobus acidocaldarius
MGIQMSIQYTTVGDLKVGSYVMIDGEPCRVVEITKAKTGKHGSAKANVVAIGLFTGQKRSLMAPVDQQVEVPIIEKHVGQILADKGDNLTIMDLESYETFDLEKPTENEIVSKIRPGAEIEYWSVMGRRKIVRVK

SEQ ID NO: 3466 - protein, 131 aa, Sulfolobus acidocaldarius
MSIQYTTVGDLKVGSYVMIDGEPCRVVEITKAKTGKHGSAKANVVAIGLFTGQKRSLMAPVDQQVEVPIIEKHVGQILADKGDNLTIMDLESYETFDLEKPTENEIVSKIRPGAEIEYWSVMGRRKIVRVK

SEQ ID NO: 3467 - protein, 131 aa, Sulfolobus solfataricus
MSITYTTVGELKVGSYVVIDGEPCRVVEVTKAKTGKHGSAKANVVAIGVFSGAKKTLMAPVDQQVEVPIIEKHIGQIIADMGNKIQVMDLESYETFEIEKPTEDELASKIKPNAELEYWEIMGRRKIVRVK

SEQ ID NO: 3468 - protein, 129 aa, Thermoplasma acidophilum
MSWQEAEVRELKVGRYILIDDAPCKIVEITMSKPGKHGEAKGRIVAIGVFDNQKRSVVYPVKHKVKIPIIEKKNAQVLSVQNNEVQLMDSETFETFVLPLDPEIADKIKPGMEVPYWETMGMRKIMLQN

SEQ ID NO: 3469 - protein, 162 aa, Crypthecodinium cohnii
MSDEDHTFESTDAGASATYPQQAGEIRKGSYLMIKGRPCKCIEVSTSKTGKHGHAKAHIVALDIFSGKKYEDLCPTSHNLDVPFVKRTEYLLTADGTLARACDGHKDDLNLPTVVKVGEPTDRDKKVTAEILESVEKGTTIFVIVQAASGEEKIIQTKTTSG

SEQ ID NO: 3470 - protein, 160 aa, Dianthus caryophyllus
MSDDDHHFESSADAGASKTYPQQAGTIRKSGHIVIKNRPCKVVEVSTSKTGKHGHAKCHFVAIDIFNGKKLEDIVPSSHNCDVPHVNRVDYQLLDITEDGFVSLLTDSGDTKDDLKLPADEALVKQMKEGFEAGKDLILSVMCAMGEEQICAVKDVSGGK

SEQ ID NO: 3471 - protein, 161 aa, Plasmodium falciparum 3D7
MSDHEMYDNIDAGASQTYPVQAGAIKKNGHVMLKEHPCKVVDYSTSKTGKHGHAKAHIVGIDIFTGRKYEDICPTSHNMDVPVVKRTELQLIDITEDGFVSLLYDNGDTKDDLSLPKDTEGNLDEVAKQIRNLFDNGKSVLVSVLSACGQEKIIAAKELSS

SEQ ID NO: 3472 - protein, 158 aa, Arabidopsis thaliana
MSDEEHHFESSDAGASKTYPQQAGTIRKNGYIVIKNRPCKVVEVSTSKTGKHGHAKCHFVAIDIFTSKKLEDIVPSSHNCDVPHVNRTDYQLIDISEDGYVSLLTDNGSTKDDLKLPNDDTLLQQIKSGFDDGKDLVVSVMSAMGEEQINALKDIGPK

SEQ ID NO: 3473 - protein, 158 aa, Arabidopsis thaliana
MSDDEHHFESSDAGASKTYPQQAGNIRKGGHIVIKGRPCKVVEVSTSKTGKHGHAKCHFVAIDIFTSKKLEDIVPSSHNCDVPHVNRVDYQLIDISEDGFVSLLTDNGSTKDDLKLPTDEALLTQLKNGFEEGKDIVVSVMSAMGEEQMCALKEVGPK

SEQ ID NO: 3474 - protein, 158 aa, Arabidopsis thaliana
MSDDEHHFESSDAGASKTYPQQAGNIRKGGHIVIKGRPCKVVEVSTSKTGKHGHAKCHFVAIDIFTSKKLEDIVPSSHNCDVPHVNRVDYQLIDISEDGFVSLLTDNGSTKDDLKLPTDEALLTQLKNGFEEGKDIVVSVMSAIGEEQMCALKEVGPK

SEQ ID NO: 3475 - protein, 159 aa, Arabidopsis thaliana
MSDDEHHFEASESGASKTYPQSAGNIRKGGHIVIKNRPCKVVEVSTSKTGKHGHAKCHFVAIDIFTAKKLEDIVPSSHNCDVPHVNRVDYQLIDITEDGFVSLLTDSGGTKDDLKLPTDDGLTAQMRLGFDEGKDIVVSVMSSMGEEQICAVKEVGGGK

SEQ ID NO: 3476 - protein, 216 aa, Arabidopsis thaliana
MSDDEHHFEASESGASKTYPQSAGNIRKGGHIVIKNRPCKVVEVSTSKTGKHGHAKCHFVAIDIFTAKKLEDIVPSSHNCDVPHVNRVDYQLIDITEDGFVSLLTDSGGTKDDLKLPTDDGLTAQMRLGFDEGKDIVVSVMSSMGEEQICAVKEVGGGNVRYVIEYLWKHRVTQAAIVFDILTGFDITRFCIPCTKSGKTVIARKGQCFPLLRNWN

SEQ ID NO: 3477 - protein, 191 aa, Arabidopsis thaliana
MSDEEHHFESSDAGASKTYPQQAGTIRKNGYIVIKNRPCKVSFSNISPLSSSDLIRSVHYLDSSDSFFCHLHDVVEVSTSKTGKHGHAKCHFVAIDIFTSKKLEDIVPSSHNCDVPHVNRTDYQLIDISEDGYVSLLTDNGSTKDDLKLPNDDTLLQQIKSGFDDGKDLVVSVMSAMGEEQINALKDIGPK

SEQ ID NO: 3478 - protein, 149 aa, Glycine max
  unsure (1)..(149): unsure at all Xaa locations
XEAGSSATYPMQCSALRKNGHVVIKNRPCKIVDMSTSKTGKHGHAKVHLVAIDIFTGKKLEELSPSTHNMDVPHVSRKEYQLLDIQDDGFLSLMSEDGTMKDDVKSPEGEIGAKIEKLFRDEEKDTNVIILTAMGEETAIEAKEAPRGA

SEQ ID NO: 3479 - protein, 160 aa, Glycine max
MSDEEHHFESKADAGASKTYPQQAGTIRKNGYIVIKGRPCKVVEVSTSKTGKHGHAKCHFVGIDIFTAKKLEDIVPSSHNCDVPHVNRTDYQLIDIAEDGFLSLLTENGNTKDDLKLPTDESLLTQIKDGFAEGKDLVVSVMSAMGEEQICALKDIGPKN

SEQ ID NO: 3480 - protein, 161 aa, Glycine max
  unsure (1)..(161): unsure at all Xaa locations
MSDEEHHFESXRADAGASKTYPQQAGTIRKNGYIVIKGRPCKVVEVSTSKTGKHGHAKCHFVGIDIFTAKKLEDIVPSSHNCDVPHVNRTDYQLIDIAEDGFLSLLTENGNTKDDLKLPTDESLLTQIKDGFAEGKDLVVSVMSAMGEEQICALKDIGPKN

SEQ ID NO: 3481 - protein, 159 aa, Glycine max
MSDEEHHFESSDAGASKTYPQQAGNIRKGGHIVIKGRPCKVVEVSTSKTGKHGHAKCHFVAIDIFTAKKLEDIVPSSHNCDVPHVNRIDYQLIDIFEDGFVSLLTDSGGTKDDLKLPTDDSLSALMKSGFEEGKDVVVSVMSSMGEEQICAVKEVGGGK

SEQ ID NO: 3482 - protein, 160 aa, Glycine max
MSDEEHHFDSQADAGASKTYPQQAGTIRKNGYIVIKSRPCKVVEVSTSKTGKHGHAKCHFVAIDIFNGKKLEDIVPSSHNCDVPHVNRTDYQLIDISEDGFVSLLTDNGNTKDDLKLPTDEALLAQIKDGFSEGKDLVVSVMSAMGEEQICSLKDIGPKN

SEQ ID NO: 3483 - protein, 160 aa, Glycine max
MSDEEHHFDRQADAGASKTYPQQAGTIRKNGYIVIKSRPCKVVEVSTSKTGKHGHAKCHFVAIDIFNGKKLEDIVPSSHNCDVPHVNRTDYQLIDISEDGFVSLLTDNGNTKDDLKLPTDEALLAQIKDGFSEGKDLVVSVMSAMGEEQICSLKDIGPKN

SEQ ID NO: 3484 - protein, 126 aa, Glycine max
  unsure (1)..(126): unsure at all Xaa locations
MTMADDAQHEHTFESADAGASQTFPMQCSALRKNGFVVIKNRPCKIVEMTTSKTGKHGHAKVHLVAIDIFTSKKLEELCPSTHNMNVPNVRRQEYQLLDVTDDGFLSFMSDDGTTQDDVKLPDGEX

SEQ ID NO: 3485 - protein, 162 aa, Glycine max
  unsure (1)..(162): unsure at all Xaa locations
MSDSEEHHFESKADAGASKTYPQQAGTVRKNGFIVIKNRPCKVVEVSTSKIGKHGHAKCHFVAIDIFNGKKLEDIVPSSHNCDIPHVNRTEYQLIDISEDGFVSLLTXDGNTKDDLRLPTDETLVAQIKEGFESGKDLVVTVQSAMGEEQICALXDVGPSNS

SEQ ID NO: 3486 - protein, 160 aa, Glycine max
  unsure (1)..(160): unsure at all Xaa locations
MSDEEHHFESKADAGASKTFPQQAGTIRKNGYIVIKNRPCKVVEVSTSKTGKHGHAKCHFVGIDIFTGKKLEDIVPSSHNCDVPHVNRIDYQLIDISEDGFVSLQTETGGTKDDLRLPTDENLLTQIKDGFAEGKDLVVSVMSSMGEEQICALKDIGPKX

SEQ ID NO: 3487 - protein, 165 aa, Glycine max
  unsure (1)..(165): unsure at all Xaa locations
MADETFEQVTSGASLTFPQQASALRKNGFVLLKGFPCKIVDMSTSKTGKHGHAKISITGVDIFTGKKYEDVTPSTHNMDVPHVSRLDYQLIDIWXRXEKAPVSLLTEAGETKDDLNLPDDAELAGEIRAAFDEGKDIIVSVLAAMGIEQIISWKVDTKAXMAISL

SEQ ID NO: 3488 - protein, 162 aa, Glycine max
  unsure (1)..(162): unsure at all Xaa locations
MSDEEHHFESKADAGASKTYPQQAGTIRKNGYIVIKGTPXCKVVEVSTSXKTGKHGHAKCHFVGIDIFTAKKLEDIVPSSHNCDVPHVNRTDYQLIDIAEDGFLSLLTENGNTKDDLKLPTDESLLTQIKDGFAEGKDLVVSVMSAMGEEQICALKDIGPKN

SEQ ID NO: 3489 - protein, 126 aa, Glycine max
  unsure (1)..(126): unsure at all Xaa locations
MAESGEHDHDFTSGESGAAATYPKQCSALRKNEFVMIKGRPCKVVEMSTSKTGKHGHAKVHLVALDIFTNKKLEDICPSTHNMEVPVVKRKEYQLLSTNEDGFISLMDLETCDTKDDLRLPEGEIX

SEQ ID NO: 3490 - protein, 183 aa, Glycine max
  unsure (1)..(183): unsure at all Xaa locations
SLVWPSLGIFCALPGAEFGTRSDEEHHFESKADAGASKTFPQQAGTIRKNGXYIVIKNRPCKVVEVSTSKTGKHGHAKCHFVAIDIFTGKKLEDIVPSSHNCDVPHVNRIDYQLIDISEDGFVSLLTETGGTKDDLRLPTDENLLSQXLIKDGFAEGKDXLVVSVMSSMGEEQICALKDIGPK

SEQ ID NO: 3491 - protein, 161 aa, Glycine max
  unsure (1)..(161): unsure at all Xaa locations
MSDEEHHFESKADAGASKTYPQQAGTIRKNGYIVIKGRPCKVVEVSTSKTGKHGHAKCHFVGIDIFTAKKLEDIVPSSHNCDVPHVNRTDYQLIDIAEDGFLSLLTENGNTKDDLKLPTDLCTEGYWAKELASIAGSLLFSFMQKLYIFVXSCXTPELWRL

SEQ ID NO: 3492 - protein, 165 aa, Glycine max
  unsure (1)..(165): unsure at all Xaa locations
MSDEEHHFESXKADAGASKTYPQQAGTIXRKNGYIVIKGRPCKVVEVSTSKTGKHGPXAKCHFVGIDIFTAKKLEDIVPSSHNCDVPHVNRTDYQLIDIAEDGFLSLLTENGNHPQDDLKLPTDESLLTQIKDGFAEGKDXLVVSVMSAMGEEQICALKDIGPKN

SEQ ID NO: 3493 - protein, 139 aa, Glycine max
  unsure (1)..(139): unsure at all Xaa locations
MSETDEHHFESKADSGASKTYPQQAGAIRKGGHIVIKARPCKVVEVSTSKTGKHGHAKCHFVAIDIFNGKKLEDIVPSSHNCDVPHVDRQDYQLIDITDDGYVSLLTESGNTKDDHEASTDDVLLGQIKTGFAXGKDLX

SEQ ID NO: 3494 - protein, 150 aa, Glycine max
  unsure (1)..(150): unsure at all Xaa locations
MKDEEHHFESKADAGASNSYPQQAVTRRKNGYIVIKGRPCKVVEVSPPKTGKHXHAKCHFGGIDIFTGQKLEDIGPSSHNCDXPHVNXPGXQLIDXGGDGXXGXXTXXGXPKDDXKLXTXERRVTXXKGGXAEGQGXXXXXXGAXGGEEQ

SEQ ID NO: 3495 - protein, 115 aa, Glycine max
  unsure (1)..(115): unsure at all Xaa locations
MSDEEHHFESKADAGASKTYPQQAGTIRKNGYIVIKGRPCXVGEGSTSKTGKHXHAKGYLVEXDFFTCQKLGEIGPFXYHCEGPQVNWADYQLIDIAEDGVLRLLYENGDTQEDL

SEQ ID NO: 3496 - protein, 97 aa, Glycine max
  unsure (1)..(97): unsure at all Xaa locations
MSDQEHHFESKAHSGASKTDSHQAGTIRTNGYLVIKGRPCKVVEVSTSKTGKHGHAXCHFVGIDIFTAKKLXDIVPSSHNCDVPHVNRTDYQLIDIX

SEQ ID NO: 3497 - protein, 126 aa, Glycine max
  unsure (1)..(126): unsure at all Xaa locations
MDVAEPHFKSKADAGACTTYPNQAGTILHNSYIVINGRPCKDVRCPTYKTGKHGHAKRHFAGIDIITAKKLEDIVHSTDNCDAPYVNRTHYQLIDIPADGFFILLTENGDTKDDLKLTTDESMLTX

SEQ ID NO: 3498 - protein, 97 aa, Glycine max
  unsure (1)..(97): unsure at all Xaa locations
MSDDEHHFDSKADAGASNTFPQHAGTIRINGYIVNINMPCNVVDVSTSKTGXHGYAKCHIVAIDIFTGKKLEDNVTSSHNCDVPHVNRIEYQLIDIX

SEQ ID NO: 3499 - protein, 123 aa, Glycine max
  unsure (1)..(123): unsure at all Xaa locations
MMSDEXHHFDSEADAGASKTYSQLAGTMRKNGLIAIRSMPCRAVECCTXNTGEHGPAKWHSVAIDIINGKEIEDVERSSDKCDVTHVNRTDYELIDIYEDGYVSVMTDNGHTKDDLKLSTDEA

SEQ ID NO: 3500 - protein, 94 aa, Glycine max
  unsure (1)..(94): unsure at all Xaa locations
MSDEDHHFDSHADAGASNTYPQQAGTIRNNGYIFITSRPCTVVXVSTLNTGNHGHAKCHFVAIDIFNGKSLHDIFPSSHSCDVPHVTRTDYHLX

SEQ ID NO: 3501 - protein, 147 aa, Glycine max
  unsure (1)..(147): unsure at all Xaa locations
MSLYQXHFEXKADAAASKTFPQEAATIRKNCYIVIKNSSCKAVEASTSKTXGKHGHAKVSTYXYAIVHLSLAKKLEDIAPSSHNCDVPHANHIDYHLIDISEDVLVMLLTDTGDTNDDLRLPTDENLLSHINDXSFAEGKDLVVYVX

SEQ ID NO: 3502 - protein, 102 aa, Glycine max
  unsure (1)..(102): unsure at all Xaa locations
MSDEEHHFXSKADAGAXKTXXXQAGTIRXXGXIVXXGXPCKVVEVSTXXKTXKHXHAKXHXVXIDIFTAKKLEDIVPSSHNCDVPHVNRTDYQXXIDIAEDX

SEQ ID NO: 3503 - protein, 123 aa, Glycine max
  unsure (1)..(123): unsure at all Xaa locations
MPDEQHQMEXKADGGASKPYPQHAGPIRTNGYIVTKRRPCKVAEDATCKPAKHGHAQRHSGEIDIPTATKPEDIGPSCHNCDVPHLNRTGYKLIHLAEDGCPSPLTESGHTNDDLMLSTEESX

SEQ ID NO: 3504 - protein, 159 aa, Glycine max
  unsure (1)..(159): unsure at all Xaa locations
WFRAYARNSAIGLGSLLPPCFVYIESTILSDGERXFNFKDGAGPFNTYAQXAEPIRKNCCTDIIGRPCKVVPVTTSNTVKLGPAXCHLVGMDIHSANNLEDIVPWSHKCDVPHVNRTDYQLIDIAEDGFLSLLTDNGNTXDDLKLPTDDSLLTHINDRX

SEQ ID NO: 3505 - protein, 119 aa, Glycine max
  unsure (1)..(119): unsure at all Xaa locations
MSDEEHHFESKADAGASKTFPQQAGTIRKNGYIVIKNRPCKVPHVNRIDYQLIDISEDGFVSLLTETGGTKDDLRLPTDENLLTQIKDGFAEGKDLVVSVMSSMGEEQICALKDIGPKX

SEQ ID NO: 3506 - protein, 83 aa, Glycine max
  unsure (1)..(83): unsure at all Xaa locations
XEHHFESKADAGASNTYPQQATTIHKNGYILIKGHPYKVIKFSTSKTVKHSHTKFHFIMINISTANKLKDIIPSSHNYNVPHV

SEQ ID NO: 3507 - protein, 123 aa, Glycine max
  unsure (1)..(123): unsure at all Xaa locations
MPDDHHRVEYXAGGGAFKPYPQHAGPIPKNGYIAIKRRPCNVVQIATCKPANHGHPQRHYGEIDIPTAKNLEDIAHSSHNCDGPHDNRTDYQLIHLAXDGCQNPLTENGHTKDEPKLSTDKSX

SEQ ID NO: 3508 - protein, 128 aa, Glycine max
  unsure (1)..(128): unsure at all Xaa locations
XVRCNSNSDRGASRTIDTRAXTILLNCYMAIKGRSXCTNGCGCTTQTMAHVPPKCDSAGIEILTGKKLDYIVPSSHSCDVPHVNRTDYQLIDIADDGYLSLLTENGNTKDDLKLPTDESLLTQIKDGX

SEQ ID NO: 3509 - protein, 99 aa, Glycine max
  unsure (1)..(99): unsure at all Xaa locations
VGXGQVVEVSTSKTGKHGHAKCHFVAIDIFTGKKLEDIVPSSHNCDVPHVNRIDYQLIDISEDGFVRFQLHFXNXVSLIHSPFLLSYIYEILIPLSDLM

SEQ ID NO: 3510 - protein, 159 aa, Glycine max
  unsure (1)..(159): unsure at all Xaa locations
GPEPQGRPTPTLGIESTTTGERERQKRKPKLDRTNKNKTDEEHQHKHKADAGATKTNPQQAGTKRKNGXNDNKGRPRKAAEETTPKXGKHGHAKSHKDGKETNTAKKQDDNAPXNHNRDEPQEKRTDNQPXDRDEEGNKRQTTEKGNTKDXTQAPTEEX

SEQ ID NO: 3511 - protein, 122 aa, Glycine max
  unsure (1)..(122): unsure at all Xaa locations
MSLEEHHSYSHADAXAVHTYPXQAATIRMIHYIPIKSIPCKVVAVSTSKTGKHAHPKXSHFVAXSIFMGQKLXEDIGPSSHICDGPHVIRTDYXLIVIHKDLSASQLSDIAYTRILRMLSTX

SEQ ID NO: 3512 - protein, 81 aa, Glycine max
  unsure (1)..(81): unsure at all Xaa locations
MXDEXHHFXSKXDAGXXXTYPQQXGXIRKXGYIVIKGRPCKVVXXSXXXTXKHGXAKCHFVXIXIFXXKXLEDLVXXSXNC

SEQ ID NO: 3513 - protein, 76 aa, Glycine max
  unsure (1)..(76): unsure at all Xaa locations
MSDXEDHFESXGDCGASKTYPQQAGTIRKSGYIVMIGPPCKVVEVSTSKTGKHGHRXGHFGGIDIFTWQKPGDSGX

SEQ ID NO: 3514 - protein, 65 aa, Glycine max
  unsure (1)..(65): unsure at all Xaa locations
MSDDEHDFNSHADAGASNTYPQQAGTIRTNGYILIXSSPCKVVEVSTSTTGXHGRAQCHSVSLDX

SEQ ID NO: 3515 - protein, 94 aa, Glycine max
  unsure (1)..(94): unsure at all Xaa locations
MVXADYDHHPESKAYAGAYKSXPKQARTMSENGYLVLKDSPYKAVEFSTSITAKHDHAECHFVGIDIVTAKKLEAIEPYSDNCDVPHENPTDYX

SEQ ID NO: 3516 - protein, 129 aa, Glycine max
  unsure (1)..(129): unsure at all Xaa locations
LNSFNFTTFSYXXHHFXFESISKAFKTYPXQFGTILKNGYIVFKCLPXIVFLIFSYIIVMHXHAIFXFYLIVIFTSQKLDDILPYSYNYDVPHVNRSDYHLIDIAQDGFLSLLTENCNTNVDLKLSTDX

SEQ ID NO: 3517 - protein, 137 aa, Glycine max
  unsure (1)..(137): unsure at all Xaa locations
MSDEEHHLEYKDDAGAYKAYNQHAGTIRENGYIENKGRPCKVWNGPTSQNXKNGTSKKKLLGELRINXANTLCDICAKTENXDVANVKKTDNQPIDNPGDGKKSLLTEPVYTDDDIRPCTGDTPITPIIDGXEDGLD

SEQ ID NO: 3518 - protein, 72 aa, Glycine max
  unsure (1)..(72): unsure at all Xaa locations
XCEVVEVGTSKTGKHGHAKCHFSGIDVFTAKKLIDIVPSSGDWNIPHGNRTHYHLIDITKDRWGTLLTKNNN

SEQ ID NO: 3519 - protein, 136 aa, Glycine max
  unsure (1)..(136): unsure at all Xaa locations
PASGHGRWYTLWVRGVSGGGVSLGAGGTVFDEEHHFQSEADAGASKTYSXQAGSILTTATYVVKGGPCXDDEIATFKTGLAGTAKGDFVGKESVNANMVDDIXEPFSHNCEVXDVNRAECHMIDIDGEGXVILITX

SEQ ID NO: 3520 - protein, 81 aa, Glycine max
  unsure (1)..(81): unsure at all Xaa locations
XKGYTGACNTYPKEAETICKNGYIAIKRRACMGEEGTTFKTGKHGHRQSHCVGSDKCTVKTLEDIEPSSHNCDGPHESCTD

SEQ ID NO: 3521 - protein, 96 aa, Glycine max
  unsure (1)..(96): unsure at all Xaa locations
SFQQITKESYARSIADYVHNFQSKGDAVTSNVDTHQPGFSRSISYIVIMGXSCLVVAVTTSYTGSHGHTCCHFVGPDIFTAKQLEDLAPSSHNCDV

SEQ ID NO: 3522 - protein, 99 aa, Glycine max
  unsure (1)..(99): unsure at all Xaa locations
LLTISYHQHHFXSKSYSLTSKTFPQQTLTIRKNFYILINNKPFNIFXFSTYKTIKHXHPKSHLFIIDIFTLKNLQYIIPSYHNYHPSHFNLIYYQLINI

SEQ ID NO: 3523 - protein, 54 aa, Glycine max
  unsure (1)..(54): unsure at all Xaa locations
MSDDEHHFESKADAGASKTYTQHAGTIRSIGYIVIKGGPCRVMVVSTPKTGTHX

SEQ ID NO: 3524 - protein, 159 aa, Medicago sativa
MSDEEHHFEPAADAGASKTYPQQAGTIRKNGYIVIKSRPCKVVEVSTSKTGKHGHAKCHFVAIDIFNGKKLEDIVPSSHNCDVPHVNRTDYQLIDISEDGFVSLLTDNGSTKDDLKLPTDDSLLTQIKDGFADGKDLVVSVMSAMGEEQICALKDIGPK

SEQ ID NO: 3525 - protein, 161 aa, Medicago sativa
MSDEEHQFESKADAGASKTYPQQAGTIRKNGYIVIKNRPCKVVEVSTSKTGKHGHAKCHFVAIDIFTSKKLEEVYVPSSHNCDVPHVNRTDYQLIDISEDGFVSLLTENGNTKDDLKLPTDDSLLTQIKDGFAEGKDLVVSVMSAMGEEQICALKDIGGKN

SEQ ID NO: 3526 - protein, 160 aa, Manihot esculenta
MSDEEHHFESKADAGASKTFPQQAGTIRKNGYIVIKNRPCKVMEVSTSKTGKHGHAKCHFVGIDIFNGKKLEDIVPSSHNCDVPHVNRTDYQLIDISEDGFVSLLTETGNTKDDLRLPTDENLLSQIKDGFAEGKDLVVSVMSAMGEERICSLKDIGPKN

SEQ ID NO: 3527 - protein, 160 aa, Manihot esculenta
  unsure (1)..(160): unsure at all Xaa locations
MSDEEHHFESKADAGASKTFPQQAGTIRKNGYIVIKNRPCKVMEVSTSKTGXHGHAKCHFVGIDIFNGKKLEDIVPSSHNCDVPHVNRTDYQLIDISEDGFVSLLTETGNTKDDLRLPTDENLLSQIKDGFAEGKDLVVSVMSAMGEERICSLKDIGPKN

SEQ ID NO: 3528 - protein, 156 aa, Euphorbia esula
HEDHFESKADAGASKTYPQQAGTIRKNGYIVIKNRPCKVVEVSTSKTGKHGHAKCHFVGIDIFNGKKLEDIVPSSHNCDVPHVTRTDYQLIDISEDGFVSLLTENGNTKDDLRLPTDESLLSQIKDGFGDGKDLVVTVMSSMGEEQICALKDIGPK

SEQ ID NO: 3529 - protein, 161 aa, Oryza sativa (japonica cultivar-group)
MSDSEEHHFESKADAGASKTYPQQAGTIRKNGHIVIKNRPCKVVEVSTSKTGKHGHAKCHFVAIDIFNGKKLEDIVPSSHNCDVPHVNRTDYQLIDISEDGFVSLLTESGGTKDDLRLPSDEALLTQIKDGFAEGKDLIVTVMSAMGEEQICALKDIGPKN

SEQ ID NO: 3530 - protein, 162 aa, Oryza sativa (japonica cultivar-group)
MSDSEEHHFESKADAGASKTYPQQAGTIRKNGYIVIKNRPCKVVEVSTSKTGKHGHAKCHFVGIDIFNGKKLEDIVPSSHNCDVPHVDRTDYQLIDISEDGFVSLLTESGNTKDDLRLPTDDTLTNQIKNGFGEEGKDMILTVMSAMGEEQICAVKEIGAKN

SEQ ID NO: 3531 - protein, 159 aa, Lycopersicon esculentum
MSDEEHQFESKADAGASKTYPQQAGTIRKNGYIVIKGRPCKVVEVSTSKTGKHGHAKCHFVAIDIFTGKKLEDIVPSSHNCDVPHVNRTDYQLIDISEDGFVSLLTDNGNTKDDLRLPTDENLLSLIKDGFAEGKDLVVSVMSAMGEEQINALKDIGPK

SEQ ID NO: 3532 - protein, 160 aa, Lycopersicon esculentum
MSDEEHHFESKADAGASKTYPQQAGTIRKNGYIVIKGRPCKVVEVSTSKTGKHGHAKCHFVAIDIFNAKKLEDIVPSSHNCDVPHVNRTDYQLIDISEDGFVSLLTENGNTKDDLRLPTDDTLLNQVKGGFEEGKDLVLSVMSAMGEEQICAVKDIGTKT

SEQ ID NO: 3533 - protein, 160 aa, Lycopersicon esculentum
MSDEEHHFESKADAGASKTFPQQAGTIRKNGYIVIKGRPCKVVEVSTSKTGKHGHAKCHFVAIDIFNGKKLEDIVPSSHNCDVPHVNRTDYQLIDISEDGFVSLLTESGNTKDDLRLPTDENLLKQVKDGFQEGKDLVVSVMSAMGEEQINAVKDVGTKN

SEQ ID NO: 3534 - protein, 159 aa, Lycopersicon esculentum
MSDEEHHFESKADAGASKTYPQQAGTIRKGGHIVIKNRPCKVVEVSTSKTGKHGHAKCHFVAIDIFTGKKLEDIVPSSHNCDVPHVNRTDYQLIDISEDGFVSLLTENGNTKDDLRLPTDDTLLAQVKDGFAEGKDLVLSVMSAMGEEQICGIKDIGPK

SEQ ID NO: 3535 - protein, 159 aa, Nicotiana plumbaginifolia
MSDEEHQFESKADAGASKTYPQQAGTIRKNGHIVIKGRPCKVVEVSTSKTGKHGHAKCHFVAIDIFTGKKLEDIVPSSHNCDVPHVNRTDYQLIDISEDGFVSLLTENGNTKDDLRLPTDDNLLTQIKDGFAEGKDLVVSVMSAMGEEQICALKDIGPK

SEQ ID NO: 3536 - protein, 145 aa, Nicotiana plumbaginifolia
GASKTYPQQAGTIRKNGHIVIKNRPCKVVEVSTSKTGKHGHAKCHFVAIDIFTGKKLEDIVPSSHNCDVPHVNRTDYQLIDISEDGFVSLLTENGNTKDDLRLPTDDNLLALIKDGFAEGKDLVLSVMSAMGEEQICGIKDVGPK

SEQ ID NO: 3537 - protein, 159 aa, Nicotiana tabacum
MSDEEHHFESKADAGASKTYPQQAGTIRKNGHIVIKNRPCKVVEVSTSKTGKHGHAKCHFVAIDIFTGKKLEDIVPSSHNCDVPHVNRTDYQLIDISEDGFVSLLTENGNTKDDLRLPTDDNLLALIKDGFAEGKDLVLSVMSAMGEEQICGIKDVGPK

SEQ ID NO: 3538 - protein, 160 aa, Solanum tuberosum
MSDEEHHFESKADAGASKTYPQQAGTIRKNGYIVIKGRPCKVVEVSTSKTGKHGHAKCHFVAIDIFNGKKLEDIVPSSHNCDVPHVNRTDYQLIDISEDGFVSLLTESGNTKDDLRLPTDESLLKQVKDGFQEGKDLVVSVMSAMGEEQINAIKDIGTKN

SEQ ID NO: 3539 - protein, 159 aa, Solanum tuberosum
MSDEEHQFESKADAGASKTYPQQAGTIRKSGYIVIKGRPCKVVEVSTSKTGKHGHAKCHFVAIDIFTGKKLEDIVPSSHNCDVPHVNRTDYQLIDISEDGFVSLLTDNGNTKDDLRLPTDDSLLSQIKDGFAEGKDLVVSVMSAMGEEQINALKDIGPK

SEQ ID NO: 3540 - protein, 160 aa, Solanum tuberosum
MSDEEHHFESKADAGASKTYPQQAGTIRKSGYIVIKGRPCKVVEVSTSKTGKHGHAKCHFVAIDIFNGKKLEDIVPSSHNCDVPHVNRTDYQLIDISEDGFVSLLTENGNTKDDLRLPTDDALLNQVKGGFEEGKDLVLSVMSAMGEEQICAVKDIGTKS

SEQ ID NO: 3541 - protein, 159 aa, Solanum tuberosum
MSDEEHHFESKADAGASKTYPQQAGTIRKSGHIVIKNRPCKVVEVSTSKTGKHGHAKCHFVAIDIFTGKKLEDIVPSSHNCDVPHVNRTDYQLIDISEDGFVSLLTENGNTKDDLRLPTDDTLLAQVKDGFAEGKDLVLSVMSAMGEEQICGIKDIGPK

SEQ ID NO: 3542 - protein, 169 aa, Dictyostelium discoideum
MKPLIMEYNKMSDNEALDVEDYAQAGSGASLTFPIQCSALRKNGFVVIKGFPCKIVDMSTSKTGKHGHAKVNITAIDIFTGKKYEEICPSTHNIDVPNVSRKEYTVMDVQDGYLSLLDAGGEVKEDLALPEDDIGKEITQMLKEGKEPLVSVISALGKEGVVSVKVSNN

SEQ ID NO: 3543 - protein, 160 aa, Oryza sativa
MSDSEEHHFESKADAGASKTYPQQAGTIRKNGYIVIKNRPCKVVEVSTSKTGKHGHAKCHFVAIDIFNGKKLEDIVPSSHNCDVPHVNRTEYQLIDISEDGFVSLLTESGNTKDDLRLPTDDSLLGQIKTGFGEGKDLVVTVMSAMGEEQICALKDIGPK

SEQ ID NO: 3544 - protein, 160 aa, Oryza sativa; identical to SEQ ID NO: 3543

SEQ ID NO: 3545 - protein, 160 aa, Oryza sativa; identical to SEQ ID NO: 3543

SEQ ID NO: 3546 - protein, 160 aa, Oryza sativa
MSDSEEHHFESKADAGASKTYPQQAGTIRKNGYIVIKNRPCKVVEVSTSKTGKHGHAKCHFVAIDIFTAKKLEDIVPSSHNCDVPHVNRTEYQLIDISEDGFVSLLTENGNTKDDLRLPTDDNLLSQIKDGFGEGKDLVVTVMSAMGEEQICALKDIGPK

SEQ ID NO: 3547 - protein, 161 aa, Oryza sativa
MSDSEEHHFESKADAGASKTYPQQAGTIRKTGHIVIKNRPCKVVEVSTSKTGKHGHAKCHFVAIDIFNGKKLEDIVPSSHNCDVPHVNRTDYQLIDISEDGFVSLLTESGGTKDDLRLPSDEALLTQIKDGFAEGKDLIVTVMSAMGEEQICALKDIGPKN

SEQ ID NO: 3548 - protein, 162 aa, Oryza sativa; identical to SEQ ID NO: 3530

SEQ ID NO: 3549 - protein, 161 aa, Oryza sativa
  unsure (1)..(161): unsure at all Xaa locations
MSDSEEHHFESKADAGASKTYPQQAGTIRKNGHIVIKNRPCKVVEVSTSKTGKHGHAKCHFVGIDIFNGKKLEDIVPSSHNCDVPHVDRTDYQLIDISEDGFVSLLTESGNIXDDLRLPTDDTLTNQIKNGFEEGKGMILTVMSAMGEEQICAVKEIGAKN

SEQ ID NO: 3550 - protein, 163 aa, Oryza sativa
  unsure (1)..(163): unsure at all Xaa locations
MSDSEEHHFESKADAGASXKTYPQQAGTIRKTGHIVIKNRPXCKVVEVSTSKTGKHGHAKCHFVAIDIFNGKKLEDIVPSSHNCDVPHVNRTDYQLIDISEDGFVSLLTESGGTKDDLRLPSDEALLTQIKDGFAEGKDLIVTVMSAMGEEQICALKDIGPKN

SEQ ID NO: 3551 - protein, 185 aa, Oryza sativa
  unsure (1)..(185): unsure at all Xaa locations
EIKRGRLSWLSXLHNKSKAHPGAXKTYPQQAGTIRKNGYIVIKNRPCKVVEVSTLKSGTRGHAGCPFVAIDIFNAXXLEDIVPSSHNCDVPHVNRTEYQLIDISEDGFVSLLTESGNTKDDLRLPTDDSLLGQIKTGFGEGKDLVVTVMSAMGEEQICALKDIGPQVTPSSGRQNRRDPYVSNLN

SEQ ID NO: 3552 - protein, 131 aa, Oryza sativa
  unsure (1)..(131): unsure at all Xaa locations
MSDSEEHHFESKADAGASKTYPQQAGTIRKNGYIVIKNRPCKVVEVSTSKTGKHGHAKCHFVAIDIFTAKKLEDIVPSSHNCDVPHVNRTEYXQLIDISEGXGFXSLVNLKMGNTRDDXRXPLLDDNXLRX

SEQ ID NO: 3553 - protein, 176 aa, Oryza sativa
  unsure (1)..(176): unsure at all Xaa locations
SDSEEHHFXSKAXXAGTIRKNGYIVIKNRPCKVVEVSTSKTSKHGHAKCHFVAXXDIVPSSHNCDVPHXNRTNYQLIDISEDGLFVSLLTESGNTKDDLGLPTYDNLLGQIKTGFGEGKDVVVTVMSAMXEEQICALKDIGPNGRQAAASFLMHCFFQLRLYFVIGPNLEGRSTLV

SEQ ID NO: 3554 - protein, 121 aa, Oryza sativa
MSDSEEHHFESKADAGASKTYPQQAGTIRKNGYIVIKNRPCKVPHVDRTDYQLIDISEDGFVSLLTESGNTKDDLRLPTDDTLTNQIKNGFGEEGKDMILTVMSAMGEEQICAVKEIGAKN

SEQ ID NO: 3555 - protein, 106 aa, Oryza sativa
  unsure (1)..(106): unsure at all Xaa locations
XTIHRNGYIIIKNRPCKAVEASTYKTGKHGDAKCHFVAHDIFTANKLENIVPSCNNCDEPHVNRTECQLIDICEDRTESPVTGNGNIQDDLTLPTDDNLLSQIHDG

SEQ ID NO: 3556 - protein, 78 aa, Oryza sativa
  unsure (1)..(78): unsure at all Xaa locations
MSDSXEHHFESKADAGXSKTYPXQAGTIRXNGHXVIKNXPCKXVEVSTSKTGKXRHAKCHXXAIDIFNGKKLEDIVPX

SEQ ID NO: 3557 - protein, 111 aa, Oryza sativa
  unsure (1)..(111): unsure at all Xaa locations
XGKHGHPKCPFVALAIFNGKKLXNIVPPPPNCDVPPVTRFDFHLIALFXNGFFTPLPESGGPKDALRLPSYKALLSQIKDGSPQGKDFIVPLMFPLGEEQICPFKDFGPKN

SEQ ID NO: 3558 - protein, 167 aa, Triticum aestivum
  unsure (1)..(167): unsure at all Xaa locations
MSAPNDNEHEMTFDSADAGASLTYPMQCSALRKNGFVVIKNRPCKIVDMSTSKTGKHGHAKVHLVATDIFTGKKYEDLSPSTHNMDVPNVSRREYQLLDISDDGFLSLMTDDGDTKDDVPLPDNEVGQKITKLFKEEEKDTNVIVLTSMGEECAMEAKEAPNQGXII

SEQ ID NO: 3559 - protein, 160 aa, Triticum aestivum
MSDSEEHQFESKADAGASKTYPQQAGTIRKNGYIVIKNRPCKVVEVSTSKTGKHGHAKCHFVAIDIFTGKKLEDIVPSSHNCDVPHVNRTEYQLIDISEDGFVSLLTDNGNTKDDLKLPTDETLLGQIKDGFAEGKDLVVSVMSAMGEEQINALKDIGPK

SEQ ID NO: 3560 - protein, 162 aa, Triticum aestivum
  unsure (1)..(162): unsure at all Xaa locations
MSDSEEHHFESKADAGASKTYPQQAGTIRKNGYIVIKNRPCKVVEVSTSKTGKHGHAKCHFVGIDIFTGKKLEDIVPSSHNCDVPHVNRVEYQLIDISEDGFVSLXLTESGNTKDDTKLPSDEALQAQIKSGYDEGKDILLTVMSAMGEEQICAVKEIGGKN

SEQ ID NO: 3561 - protein, 240 aa, Triticum aestivum
  unsure (1)..(240): unsure at all Xaa locations
MRWSPPGPRELITYHHQRPFLPPSSSSRVLIHHPAQVMIKVAMSDSEDHHFESKADAGASKTYPMQAGAIRKGGFLVIKNRPCKVVEVSTSKTGKHGHAKCHFVALDIFNGKKLEDIVPSSHNCDVPHVDRTEYQLIDISEDGFVSLLTDNGSTKDDLKLPTDDAILTQLKDGFAEGKDLALTVMSAMGEEQICAVKDVGPRXLPRSEGQDKRRDPLSVKFKLKKDESIKGGMLSSETFT

SEQ ID NO: 3562 - protein, 180 aa, Triticum aestivum
  unsure (1)..(180): unsure at all Xaa locations
MSDSEDHHFESKADAGASKTYPMQAGAIRKGGFLVIKNRPCKVVEVSTSKTGKHGHAKCHFVALDIFNGKKLEDIVPSSHNCDVPHVDRTEYQLIDISEDGFVSLLTDNGSTKDDLKLPTDDAILTQLKDGFAEGKDLALTVMSAMGEEQICAVKDVGPRXLPWSEGQDKQRDPLSVKLS

SEQ ID NO: 3563 - protein, 233 aa, Triticum aestivum
  unsure (1)..(233): unsure at all Xaa locations
MSDSEDHHFESKADAGASKTYPMQAGAIRKGGFLVIKNRPCKVVEVSTSKTGKHGHAKCHFVALDIFNGKKLEDIVPSSHNCDVPHVDRTEYQLIDISEDGFVSLLTDNGSTKDDLKLPTDDAILTQLKDGFAEGKDLALTVMSAMGEEQICAVKDVGPRXLPRIEVQDKRRDPVSVKFKLKKDEVLKEESYRVRHSPKPESSAVIAGCSISAYHYLSSVTFGTLAYVCAWCQ

SEQ ID NO: 3564 - protein, 198 aa, Triticum aestivum
  unsure (1)..(198): unsure at all Xaa locations
MSDSEDHHFESKADAGASKTFPMQAGAIRKGGYLVIKNRPCKVVEVSTSKTGKHGHAKCHFVALDIFNGKKLEDIVPSSHNCDVPHVDRTEYQLIDISEDGFVSLLTDNGSTKDDLKLPTDDAILTQLKDGFAEGKDLALTVMSAMGEEQICAVKDVGPRXLPRSEGQDKRRDPLSVKFKLKKDKSIKEGMLSSETFT

SEQ ID NO: 3565 - protein, 148 aa, Triticum aestivum
  unsure (1)..(148): unsure at all Xaa locations
MSDEEHHFESSDAGASKTYPQQAGNIRKGGHIVIKGRPCKVVEVSTSKTGKHGHAKCHFVAIDIFTAKKLEDIVPSSHNCDVPHVNRVDYQLIDISEDGFVSLLTDSGGTKDDLKLPTDDNLSALMKSGFEEGKDVVVSXVMSSMGEX

SEQ ID NO: 3566 - protein, 161 aa, Triticum aestivum
MSDTDEHHFESKADSGASKTYPQQAGAIRKGGHIVIKARPCKVVEVSTSKTGKHGHAKCHFVAIDIFNGKKLEDIVPSSHNCDVPHVDRQDYQLIDITDDGYVSLLTESGNTKDDLKLPTDDVLLGQIKTGFADGKDLILSVMSAMGEEQICAVKEIGGGK

SEQ ID NO: 3567 - protein, 161 aa, Triticum aestivum
  unsure (1)..(161): unsure at all Xaa locations
MSDSEDHHFESKADAGASKTYPMQAGAIRKGGFLVIKNRPCXVVEVSTSKTGKHGHAKCHFVALDIFNGXKLEXIVPSSHNXDVPHVDRQDYQLIDITDDGYVSLLTESGNTKDDLKLPTDDVLLGQIKTGFADGKDLILSVMSAMGEEQICAVKEIGGGK

SEQ ID NO: 3568 - protein, 162 aa, Triticum aestivum
  unsure (1)..(162): unsure at all Xaa locations
MSDSEEHHFESKADAGASKTYPQQAGTVRKNGFLVIKGRPXXRVVEVSTSKTGKHGHAKCHFVAIDIFNGKKLEDIVPSSHNCDIPHVNRTEYQLIDISEGXGFVSLLTSDGNTKDDLRLPTDETLVAQIKEGFESGKDLVVTVQSAMGEEQICALKDIGPK

SEQ ID NO: 3569 - protein, 162 aa, Triticum aestivum
  unsure (1)..(162): unsure at all Xaa locations
MSDTDEHHFESKADFGASKTYPQQAGAIRMGGHIVIKARPCKAVEVYTSKTGKHGHAKCHFVAIDIFNGKKLEDIVPSSHNCDVPHVDRPXDYQLIDITDDGYVSLLTESANTKDDLKLPTDDALLGQSKIGFADGKDLILSGMAAMGEEQICAEKEIADGT

SEQ ID NO: 3570 - protein, 167 aa, Triticum aestivum
  unsure (1)..(167): unsure at all Xaa locations
MSDTDEHHFESKADSGASKTYPQQAGAIRKGGHIVXIKARPCKVVEVSTSXKTGKHGHAKCHFVAIDIFNGKKLEDIVPSSHNCDVPHVDRPXDYQLIDITDDGYVSLLTESGNXTKDDLKLPTDDVLLGXQIKTGFADGXKDLILSVMSAMGEEQICAVKEIGGGK

SEQ ID NO: 3571 - protein, 122 aa, Triticum aestivum
  unsure (1)..(122): unsure at all Xaa locations
MSDSEDHHLEYKADAGAFKTYPMQAVAIRKGGFLVIKNRPCKVGEDSXTSDTGKHGHAKCHFVGLDIFNGKKLEDISASSHICDVPHVDRSEYQLIDISEAGFESPRTDNGCTMDDLKLPTX

SEQ ID NO: 3572 - protein, 160 aa, Triticum aestivum
  unsure (1)..(160): unsure at all Xaa locations
MWHCKDHHLKFKADAPASNTTPMQAAVIHKGVLLVIKNRPCKGKEATTXILATHEHPKSDYIALDIFNALELEDIVPSSHNCDVPHVDRTEYQLIDISEDGFVSLLTDNGSTKDDLKLPTDDAILTQLKDGFAEGKDLALTVMSAMGEEQICAVKDLGPR

SEQ ID NO: 3573 - protein, 104 aa, Triticum aestivum
  unsure (1)..(104): unsure at all Xaa locations
MSDTDEHHFKSKGDFCAYKTYPQQAGAIRKGGHIVIKARPCKVVEVTTSKTGKQWHAXXYFVAIDIFNGKKLEDLDSSYNNXDVPHGDRQDYQLYDITEDGYVX

SEQ ID NO: 3574 - protein, 136 aa, Triticum aestivum
  unsure (1)..(136): unsure at all Xaa locations
MEHTHEHHWXSKDDSGPCYTYPQRGGAIHTGGHIAIKAHTCQVVEACTYKTAKHGHAMCDFVAIDIFNRKKLDDIVPXCHNCDLPHVVRLDNHLIDITEDGYASLLTESGHTNDDLQLPTDDAVLGQIKNGCADGX

SEQ ID NO: 3575 - protein, 56 aa, Triticum aestivum
PTTPNKNHTFDSVDASASLIYPMQCSALRKNGFVLIKGRPCKIVDMSTSKTGKHGH

SEQ ID NO: 3576 - protein, 78 aa, Triticum aestivum
  unsure (1)..(78): unsure at all Xaa locations
GGSFGVGDTCEHHFESKADSCAFKTYPXQAGAIRKGGHIAIKALPCKGGEVSTCKTGKHGHAXDHLVCIDXIFNGKEA

SEQ ID NO: 3577 - protein, 57 aa, Triticum aestivum
  unsure (1)..(57): unsure at all Xaa locations
MKVSMSDSEDHHFQSKADAGASKTYPMQAGAIRKGGLLVMKNPPCKVADVSTSKTGX

SEQ ID NO: 3578 - protein, 144 aa, Triticum aestivum
  unsure (1)..(144): unsure at all Xaa locations
ESAAEGATPEHLINSXKPSAGPPITTPXHVYAFHTGGHXIKMKCRVLQENVGFAHRYGKRGHSKSHFGDIDIFDGKQXLVDMVPXYKKGDRPHGDRLTYQLIEITEDGYVRLITRXGNTEDDLKLCKEDVLLGQIKTGFDDGKD

SEQ ID NO: 3579 - protein, 182 aa, Triticum aestivum
  unsure (1)..(182): unsure at all Xaa locations
WIPRAAGIRHQXXTLASXSXHTPXXXAXYRIXHPXXXGTXXDXXXXXHTXENXLXSKDDSGPAXTYPXXXGAXRXXXHXXIXXHXCXVXEXCXXXTXXHXXAMCXFVAIDIFNXKXLXDIVPXXCHNCDXPHVXRXXXHLIDITDDGXXSLLTEXXXTXDXLXLXXDDAXLGQXXXGCADXX

SEQ ID NO: 3580 - protein, 160 aa, Triticum aestivum
  unsure (1)..(160): unsure at all Xaa locations
SASAGSAATPASVPNTVTIPCHHIRMGDILMLQGRPCQVIRISTSAATGQHRYLGVDLFTKQLHEESSFISNPAPSVFVQTMLGPILKQYRVLDLQDGNVVAMTESGEVKTSLPVVDQGGLWERLSRAFSTGRGSXRILVISDNGRELAVDCKVVHGASL

SEQ ID NO: 3581 - protein, 174 aa, Zea mays
  unsure (1)..(174): unsure at all Xaa locations
MAEEEHQTFETADAGASLTFPMQCSALRKNGHVVIKGRPCKIIDMSTSKTGKHGHAKVNLVAIDIFTGKKYEDLSPSTHNMDVPNINRQEYQLINIDDGYLNLMTQDGSTKDDVKLPEGDLGEKIQEEFDEGKDLLVTVVTAMGEEHALTYKEAPKXIASFSSFLYHFIKKYSF

SEQ ID NO: 3582 - protein, 248 aa, Zea mays
  unsure (1)..(248): unsure at all Xaa locations
MADNDAQHEHTFDSADAGASKTYPMQCSALRKNGFVCIKNRPCKIVDMSTSKTGKHGHAKVHLVAIDLFTGKKLEELCPSTHNMDVPNVTRREYQLLDVTDDGFLSLMTDDGATKDDVKIPDGEVGDKITKLFTEEGKDTNVIVLTAMGEEAAIDAKEAPKXMIGWFCRLFGRMRGAECEQLTDGAATLFACILQSCTLVANEAFSSAICAGRPVLDVLRTDLVSLNCHVGETYHESFPCLQKKKKKK

SEQ ID NO: 3583 - protein, 167 aa, Zea mays; identical to SEQ ID NO: 3558
  unsure (1)..(167): unsure at all Xaa locations

SEQ ID NO: 3584 - protein, 161 aa, Zea mays
  unsure (1)..(161): unsure at all Xaa locations
YIMADDEFESVGSGASTCFPMQCSAIKKNGYAVLKNRPCKVVETSTSKTGKHGHAKVHMVGIDIFTGKKYEEICPSTHNMMVPNVDRRDFQVINIEEGFVSLLKDDGSTKDDLKVPEGELGDKLKEAFDDGKDVVATVLAAMDEECIISWKEASNKSXTYI

SEQ ID NO: 3585 - protein, 187 aa, Zea mays
SPSLAVEDPSCKSPLILLHRIPVRFPEMSDEEHQFESKADAGASKTYPQQAGTIRKNGYIVIKGRPCKVVEVSTSKTGKHGHAKCHFVGIDVFTGKKLEDIVPSSHNCDVPHVDRTEYQLIDITEDGFVSLLTDSGNTKDDLRLPTDEALEGQIKSGYDDGKDLLLTVMSSMGEEQICAVKEIGGKN

SEQ ID NO: 3586 - protein, 187 aa, Zea mays
SPSLAVADPSCKSPLILLHRIPVRFPEMSDEEHQFESKADAGASKTYPQQAGTIRKNGYIVIKGCPCKVVEVSTSKTGKHGHAKCHFVGIDVFTGKKLEDIVPSSHNCDVPHVDRTEYQLIDITEDGFVSLLTDSGNTKDDLRLPTDEALEGQIKSGYDDGKDLLLTVMSSMGEEQICAVKEIGGKN

SEQ ID NO: 3587 - protein, 161 aa, Zea mays
MSDSEEHHFESKADAGASKTYPQQAGTIRKNGYIVIKNRPCKVVEVSTSKTGKHGHAKCHFVGIDIFTGKKLEDIVPSSHNCDVPHVNRVEYQLIDISEDGFVSLLTESGNTKDDTKLPSDEALQAQIKSGYDEGKDILLTVMSAMGEEQICAVKEIGGKN

SEQ ID NO: 3588 - protein, 160 aa, Zea mays
MSDSEEHHFESNADAGASKTYPQQAGTVRKNGFIVIKNRPCKVVEVSTSKTGKHGHAKCHFVAIDIFNGKKLEDIVPSSHNCDIPHVNRTEYQLIDISEDGFVSLLTSDGNTKDDLRLPTDETLVAQIKEGFESGKDLVVTVQSAMGEEQICALKDVGPK

SEQ ID NO: 3589 - protein, 187 aa, Zea mays
  unsure (1)..(187): unsure at all Xaa locations
SPSLAVADPSCKSPLILLHRIPVRFPEMSDEEHQFESKADAGASKTYPQQAGTIRKNGYIVIKGRPCKVVEVSTSKTGKHGHAKCHFVGIDVFTGKKLXHIVPSSHNCDVPHVDRTEYQLIDITEDGFVSLLADSGNTKDDLRLPTDEALEGQIKSGYDDGKDLLLTVMSSMGEEQICAVKEIGGKN

SEQ ID NO: 3590 - protein, 160 aa, Zea mays; identical to SEQ ID NO: 400

SEQ ID NO: 3591 - protein, 160 aa, Zea mays; identical to SEQ ID NO: 400

SEQ ID NO: 3592 - protein, 160 aa, Zea mays; identical to SEQ ID NO: 400

SEQ ID NO: 3593 - protein, 160 aa, Zea mays; identical to SEQ ID NO: 400

SEQ ID NO: 3594 - protein, 160 aa, Zea mays; identical to SEQ ID NO: 400

SEQ ID NO: 3595 - protein, 160 aa, Zea mays; identical to SEQ ID NO: 400

SEQ ID NO: 3596 - protein, 160 aa, Zea mays; identical to SEQ ID NO: 400

SEQ ID NO: 3597 - protein, 160 aa, Zea mays; identical to SEQ ID NO: 400

SEQ ID NO: 3598 - protein, 160 aa, Zea mays; identical to SEQ ID NO: 400

SEQ ID NO: 3599 - protein, 160 aa, Zea mays; identical to SEQ ID NO: 400

SEQ ID NO: 3600 - protein, 160 aa, Zea mays; identical to SEQ ID NO: 400

SEQ ID NO: 3601 - protein, 160 aa, Zea mays; identical to SEQ ID NO: 400

SEQ ID NO: 3602 - protein, 160 aa, Zea mays; identical to SEQ ID NO: 400

SEQ ID NO: 3603 - protein, 160 aa, Zea mays; identical to SEQ ID NO: 400

SEQ ID NO: 3604 - protein, 177 aa, Zea mays
MSDWEEHHFESKADAGASKTYPQQAGTVRKNGFIVIKNRPCKVVEVSTSKTGKHGHAKCHFVAIDIFNGKKLEDIVPSSHNCDIPHVNRTEYQLIDISEDGFVSLLTSDGNTKDDLRLPTDETLGAQIKEGFESGKDLVGTVQSAMGEEHICALKAGGPKQLPLASRRTPTLSPLKS

SEQ ID NO: 3605 - protein, 160 aa, Zea mays
MADSEEHHFESKADAGASKTYPQQAGTVRKNGFIVIKNRPCKVVEVSTSKTGKHGHAKCHFVAIDIFNGKKLEDIVPSSHNCDIPHVNRTEYQLIDISEDGFVSLLTSDGNTKDDLRLPTDETLVAQIKEGFESGKDLVVTVQSAMGEEQICALKDVGPK

SEQ ID NO: 3606 - protein, 180 aa, Zea mays; identical to SEQ ID NO: 3562
  unsure (1)..(180): unsure at all Xaa locations

SEQ ID NO: 3607 - protein, 161 aa, Zea mays
  unsure (1)..(161): unsure at all Xaa locations
MSDSEEHHFESKADAGASKTYPQQAGTVXRKNGFIVIKNRPCKVVEVSTSKTGKHGHAKCHFVAIDIFNGKKLEDIVPSSHNCDIPHVNRTEYQLIDISEDGFVSLLTSDGNTKDDLRLPTDETLVAQIKEGFESGKDLVVTVQSAMGEEQICALKDVGPK

SEQ ID NO: 3608 - protein, 162 aa, Zea mays
  unsure (1)..(162): unsure at all Xaa locations
MSDSEEHHFESKADAGASKTYPQQAGTVRKNGFIVIKNRPCKVVEVSTSKTGKHGHAKCHFVAIDIFNGKKLEDIVPSSHNCDIPHVNRTEYQLIDISEDGFVSLLTSDGNTKDDLRLPTDETLVAQIKEGFESGKXDLVVTVQSAMGEEQICALXKDVGPK

SEQ ID NO: 3609 - protein, 161 aa, Zea mays; identical to SEQ ID NO: 3566

SEQ ID NO: 3610 - protein, 228 aa, Zea mays
CAGARWRPCGPSLIICASTFLLSVFLRLRRIHPRQESPCLDSEEHHFKSKGDAGASKTYPQQAGTVRKNGFIVIKNRPCKAVEVSTSKTGTHGHAKCHFVAIDIFNGKKLEDIVPSSHNCDIPHVNRTEYQLIDISEDGFASLLTSDGNAKDDLRLPTDETLAGQIKEGFESGKDLVVTVQSAMGDEQICALKDGAPNQLPCLWRQNPTGSQLKSDQKCITRGLYTET

SEQ ID NO: 3611 - protein, 182 aa, Zea mays
  unsure (1)..(182): unsure at all Xaa locations
PLSISLLLRLLLEPAKTEHRHVRSSEEHRFESKADAGASKTYPQQGGTGRKNGFIVIKNRPCKVVEVSTSKTGKHGHAKCHFVXAIDIFNGKRLEDIVPSSHNCDIPHANRTEYQLIDISEDGFVSLLTSHGDTRDDLTLPTDETLVDQIEEGFESGKDLAETVQSAMGEEHICALKDVGPQ

SEQ ID NO: 3612 - protein, 166 aa, Zea mays
  unsure (1)..(166): unsure at all Xaa locations
MSDEEHHFESKADAGASKTYPQQAGTIRKNGYIVINNRPCKVVEVSTSKTGKHGHAXECHFVGIDIFTGKKLEDIVPSSHNCDVPHVNRTDYQVIDISQDGFLSLLTDSGGTKDDLRLSTDENLLTQIKDGFAEGKDLAVSVMSAMGEXXICALKDIGXMXWSHVN

SEQ ID NO: 3613 - protein, 160 aa, Zea mays
MSDSEEHHFESKGDDGASKTYPKEAATVRKNGFIVIKNRPCKVVEVSTSKTGKHGHAKCHCAAIDIFNGEKLEDIAPSSHFCDIPHVNRTEYQLIDISEDGFVSLLTSDGNAKDDLRLPTDETLVVQIRQGFESAKDLVVTVQSAMGEEQICALKDVAPK

SEQ ID NO: 3614 - protein, 160 aa, Zea mays
  unsure (1)..(160): unsure at all Xaa locations
MSDSEEHHFESKADAGASKTYPQQAGTVRNNGFIGIKNRPCKVVEVSTSKTGKRGHAKCHFVAIDIFNGKKLEDIVPSSHNCDIPHVDRTEYQLIDISXDGFVSLLTSDGNTKDDLRLPTDETLVVQIEEGVESGKDLDVTVQTAMGEEHIWPLEDADPX

SEQ ID NO: 3615 - protein, 160 aa, Zea mays
  unsure (1)..(160): unsure at all Xaa locations
MSDSEEXHFESKADAGASKTYPQQAGTARKNGFIVIKNRPCKVEEVSTSKTGKHGHAKCHFVAIDIFNGKKVEDMVPSSHNCDIPHANRTEDQLIDISEDGFVSLLTSDGNTKDDLRLPTDETLVAQIKEGLESGKDLGVTVQTAMGEEQICALKDDGPK

SEQ ID NO: 3616 - protein, 161 aa, Zea mays
  unsure (1)..(161): unsure at all Xaa locations
MSDSEEHDFESKADAGASRTYPQQGATVRKNGFIVIKNRPCKDAEDSTSKTGKHGHPKCHFVTIDLCTGKKLEDIVPSSHNCDIPHVNRTEHQLIDISEDGFVSLLTSDGNTNDELKVPTDETLVAQIKEGFXSDXKDLVVTVQSAMGEDQICAMKDVDPK

SEQ ID NO: 3617 - protein, 164 aa, Zea mays
  unsure (1)..(164): unsure at all Xaa locations
MSDSEEHHFESKADAGASKTYPXQQAGTVXRKNGFIVIKNRPXARVVEVSTSKTGKHGHAKCHFVAIDIFNGKKLEDIVPSSHNCDIPHVNRTEYQLIDISEDGFVSLLTSDGNTKDDLRLPTDETLVAQIKEGFESGKXDLVVTVQSAMGEEQICALKDVGPK

SEQ ID NO: 3618 - protein, 190 aa, Zea mays
  unsure (1)..(190): unsure at all Xaa locations
AAFSSLSLRSTFLLSLFLRLRLIHPRQESPCLDSEEHHFESKADAGASNTYPQHAATGRKNGFIVIKNRPCKVVQVSTSKTGKHGHAKCHFVAINIFSVKKLGDIVPSSHNCDIPYVNRTEYQLIDISEDVFVSLLTSYGNTKDDLRLPTDDTLVVQINESFXSGKDLVVTVQSAMGXEQICALNDVAPK

SEQ ID NO: 3619 - protein, 160 aa, Zea mays
  unsure (1)..(160): unsure at all Xaa locations
MSDSEGHHFESRVDAGGSTTYPQQAGTARKNGFIDIKNRPCKVVEVSTSXTGKHGHAKCHFVAIHIFNGKKLEDIGPSSHNCDIPHVNRTEYQLIDISDDGFVSLLTSDANTKDDLTLATDETLVDHIKEGIESENDLVVTVQSAMFERQICTLKDADHK

SEQ ID NO: 3620 - protein, 252 aa, Zea mays
  unsure (1)..(252): unsure at all Xaa locations
MSDDEHHFESSDAGASKTYPQQAGNIRKGGHIXIKGRPCKVVEVSTSKTGKHGHAKCHFVAIDIFTSKKLEXIRPSSHNCDVPHVNRVDYQLIDISEDGFGSLLTDNGSXTKDDLXLPTDELLLTQLKNGFEXGKDXVVSVMLHGKEQMCALKEVGPSXNNXXPXSLXXXXCFSSLTEQIVIRXXVXPFFXAXXYXLNXMXSHARHSYXYYXXLPKKKKKKXXGGPVPIXXXXSQYQFXXXXXKXXEXXTLX

SEQ ID NO: 3621 - protein, 160 aa, Zea mays
  unsure (1)..(160): unsure at all Xaa locations
MWDSEEHHFESKADAGACKTYPQQAGTVRKNGGGGINNRPCEGVEVSTSKTGKHGHAKCHFVAIDIFNGKKLEDIVPSSHNCDIPHVNRTEYQLIDISEEGFASLLTSXGDTKEDLRLPTDETLVAHIKEGVXSGKDLVVTVXSAMGEEXICALKDVGPK

SEQ ID NO: 3622 - protein, 162 aa, Zea mays
  unsure (1)..(162): unsure at all Xaa locations
MWDSEEHHFESRADAGACKTYPQQAGTVRENGVIVIKNRPCGGGEVSTSKTGKHGHAKCHFVAIDIFNGXKKLEDIVPSSHNCDIPHVNRTEYQLIEISEEGFVSLLTSEGNTKEELRLPTDETLVGQIKEGXXESGKDLVVTVQSAMGEEXICALKDVGPK

SEQ ID NO: 3623 - protein, 186 aa, Zea mays
  unsure (1)..(186): unsure at all Xaa locations
SPSAPLSISLLLRLLLEPTKPGDRHVWTQEEHHFESKADAGASKTYPQQGGTGRKNGFIVIKNRPCKVVEVXSTSKTGKHGHDKCHFVAVDIFHGKWLEDIVPSSHDCDIPHVNRTEYQLIEISEDGFVSLLTSHGDTMDDLRLPTDETLVDQIEEGFESVKDLAVTVQSAMRQEHICALKDVVPK

SEQ ID NO: 3624 - protein, 173 aa, Zea mays
  unsure (1)..(173): unsure at all Xaa locations
MPDSEENHFESKDDAGASKTYPQQAGTVRKNGFIVINNRPCKDEEVSTSKTGKHGXHAKCHFVAIDIFNGKKIKDIVPSSHNCDIPHANRTENQLIDISKDGFVSLLTSDGNTKDDLRLPTDETLVAQIKEGFESGKDLDETVQSAMGEEQICALNDVGPKELPLLGILYLKT

SEQ ID NO: 3625 - protein, 192 aa, Zea mays
  unsure (1)..(192): unsure at all Xaa locations
MAESEEHHLESKAEAAAPKTYPQQADTVRKNGFIVINNRPCKDVEVSTSKTGKDGHAKCHFAIIDIFNGKKRADIVPSSHNCDIPHANRTDYQLIDISEDGFVSLLTSHGNTNDDLRLPTDETLGAQINEGIKSGKDLVVTVQSAMGEEHICALKDVGPKXLPWLWRRNPTLSQLTSEEKCITTGLLPRHSP

SEQ ID NO: 3626 - protein, 160 aa, Zea mays
  unsure (1)..(160): unsure at all Xaa locations
MSDSEENHFKSKADAGACKTYPEHDGTVRNNGFISIENRPCKDGEVSTXKTGKHGHAECHFVAIDILHGKKLEDIGPSAHNCDIPHVNRTEHQLIDISEDGFVSLLTSDGNTNDDLTLPTDETLVVQIKEGFESGKDLVVTVQSAMGEEHICALKDVGPK

SEQ ID NO: 3627 - protein, 194 aa, Zea mays
  unsure (1)..(194): unsure at all Xaa locations
RSGSWIITYHPHPHLSPSACSSASFLIRPSQGSPCPDSEEHHFESKGDAGASKTYPQXAGTVRKNGFIVIKNRPCKGEEASTSKTVKHVHAKCHFVVIDIFNGKKLEDIVPSSHNCDIPHVNRTDDQLIDILEDGCVSLLTSDGNTKDDLRLPTDETLVDQIKAGLESGQDLVATEQSAMREEQICALKDVXPK

SEQ ID NO: 3628 - protein, 141 aa, Zea mays
MSDSEEHHFESKADAGASKTYPQQAGTVRKNGFIVIKNRPCKVVEVSTSKTGKHGHAKCHFVAIDIFNGKKLEDIVPSSHNCDVSLLTSDGNTKDDLRLPTDETLVAQIKEGFESGKDLVVTVQSAMGEEQICALKDVGPK

SEQ ID NO: 3629 - protein, 197 aa, Zea mays
  unsure (1)..(197): unsure at all Xaa locations
PDKPGIAVSDSEEHHFKSKADAGSSKTYPQQDGTVRKNGFIDIKNRPCKVVEVSTSKTGNHGHAKCHFVDIDIFDGKKLQDIVPSSRDCDIPHENRTEYQLIDISXDGFESLLTSDGNTNDDLRLPTDETLEAQIKEGVESAKDLVVTVQSAIAEEHICALNDVAPKELPCLAILLSRNLYRIKKRIKDCYRDIHLA

SEQ ID NO: 3630 - protein, 193 aa, Zea mays
MAAGFPMAYHLRLYFLLSLLLRLRLIHPRQGSPCSDSEEHHFESKDDAEAPKTYPHKAATVRKNGFIVIKNRPCKDVEASTSKTGKHGHIKCHFGAIDIFNGKEIEDIVPSSHNCDIPHVNRTEYQLIDISEDGFASLLTSYGNTEDDLRLPTDETLVAQIKEGFESVKDLGETVQSAMGEEQICAMKDGGPK

SEQ ID NO: 3631 - protein, 191 aa, Zea mays
  unsure (1)..(191): unsure at all Xaa locations
MSDSEEDHFXSKADAGASKTYPQQAATDRKNGFIVIKNRXPARSVEASTSETGKHVHAKCHFVAINIFHGKKLEEIVPSSHNXCDIPDVKRTEYQLIEISEDGFESLLTSDGNTKDDLILPTDETLVAHIKEGFEGGKDLVETVQSAMGEEQICALKXVGPSTYLPWNTVSQNLNRKKKCIKDCYRDIHLA

SEQ ID NO: 3632 - protein, 193 aa, Zea mays
  unsure (1)..(193): unsure at all Xaa locations
MSDSEDHHFQSKDDAGASKTYPQQAGTVRKNGFIVIKNRPCXVVEGSTSKTDKHGHAKCHFVAIDIFNVKKLEHIVPSSHNCDIPHVNRTEHHVIDISEDGFVRLLTSDDNAKDDVKLPTDETLVDHIKEGFXSVKDLGVTVQSAMMKGDIWTWKGVVPTCFLDFGDRTLLYLNLYPRRRVSPKDCYRDIHLP

SEQ ID NO: 3633 - protein, 162 aa, Zea mays
  unsure (1)..(162): unsure at all Xaa locations
MTDGEEHHXWATNADAXGTSNTYHKKGATARRNGSIVMKNRTCKGAEASTXKTGKHGHAKCHFVVIDIFNGKKLEDIVPSSHNCDIPHVNRTEYQLIDILEDGFVSLLTSDGNTKDDLRLPTDETLAAQIKEGHESGKDLVATVQSAMEEEQICALKDVAPK

SEQ ID NO: 3634 - protein, 164 aa, Zea mays
  unsure (1)..(164): unsure at all Xaa locations
MSDSEEHHFKSNADAGXASKTYPQQAATGRKNGFIDIKNRPCKVVEVSTSNTGKHGHAKCHFAAIDVFNDKKLEDIVPSSHDCDIPDVNRTEHQVIDISDDGCVSLLTSHGNTTDDLILPTDETRVVQIKEWCESGKDLVVTVQPAMGEEPICAMNDVGPKKLP

SEQ ID NO: 3635 - protein, 161 aa, Zea mays
  unsure (1)..(161): unsure at all Xaa locations
MSDSEEHHFESKADAVASKTYPQQDGTARKNGFIGIRNRPCKGAEVSTSRSGKHGHAKCHFAAIYIFNGRKLEPXIVPSSHNXDIPHVNRTEHQMIDISXDGFVSLLTSDGNTKDDRTLPTDDTLVAQIKEGFDSGKDLVETVQSAMGEEQICALNDAAPK

SEQ ID NO: 3636 - protein, 180 aa, Zea mays
  unsure (1)..(180): unsure at all Xaa locations
FLLSLLLRLRLIHPRQGIASVATLEEDHFESKDDAGASKTYPQXAGTARKNGFIDIKNRPCKAVEVSTSNTGKHGHGICHFVAINIFNGKNLEDIVPSSHNCDIPHVNHTEYHLTDISEDGFVSPLTSDWHTKDDLTLPTDDTLVAQINEGFXSGKDLAATVPSAMGEEQICALKECGPK

SEQ ID NO: 3637 - protein, 173 aa, Zea mays
  unsure (1)..(173): unsure at all Xaa locations
MSDSKEHHFQSKVDAGASKIYPQQAGTVRKNGFIDIXNRPCEVAEVSTSKTGMYDHAKCHFVAIDIFNEKKLEDIVPSTXHNCDIPHVNRTEYHLIDISEDGFVSLLTSDGNTKDDLTLPNDDTREAQIKESFESDKDLAVTVQSAMSNEXICTLKDGVPKQLPCLGILHLTI

SEQ ID NO: 3638 - protein, 162 aa, Zea mays
  unsure (1)..(162): unsure at all Xaa locations
MSDSEEHHFESKADAGAPKTYPHKAGTVRKNGFIVIMNRPCHDVEASTSKTAKHGHAKCHFXVAIDIFNGNELEQIVPSSHNWDIPHVNRTEYQLIDISEDGFASLLTXXGSTKDDLRLPTDETLVAQIREGFQSVXKDLVETVQTAMGEEHICAMKDVGPK

SEQ ID NO: 3639 - protein, 178 aa, Zea mays
  unsure (1)..(178): unsure at all Xaa locations
MTDSXEHHFKSKADAGVSDTYPQQAATVRKNGFIAIKNRPCKGVQVSTSKTDKHGHAKCHFVSXLYIFNWKKLEDIVPSSHDCDIPHVNRTEYQLIDISEDGSLLSLLTSDGNTKDDLRLPTDETLVSQISEGIESVKDLAVTVQNXAMGEEHICAMKDVAPKNTSLALETEPYSIST

SEQ ID NO: 3640 - protein, 162 aa, Zea mays
  unsure (1)..(162): unsure at all Xaa locations
MSDSXDDHFXSKADVGSLKTYPYXVGTVRKNGFIIINNRPCEVVEVSTSKTGKHGHAKCHFVAIDIFNGKKLEDIVPSSHNCDIPHESRTDYHVIDISKDGLVILLTSHGNTKDDLRLPSDXDTLVVQIXEGFESGKDLDVTVXQFAMGEEQICALNDDAPK

SEQ ID NO: 3641 - protein, 108 aa, Zea mays
  unsure (1)..(108): unsure at all Xaa locations
MSDSEEHHFESKADAGASKTYPQQAGTVRKNGFIVIKNRPCKVVEVSTSKTGKHGHAKCHFVAIDIFNGKKLEDIVPSSHNCDIPHVNRTEYQLIDISEDGFVSLLTX

SEQ ID NO: 3642 - protein, 161 aa, Zea mays
  unsure (1)..(161): unsure at all Xaa locations
MSDSEEHHLESKADAGASKTYPQQAGTVRKNXGSIGIKNRPCKAAEGPTXKTGXHGHAKCHFAAIDISNGKKLEDIVPSRHNCDIPHENRTEYQVIDISEDGCVSLLTXDGNTKDDLRLPTEETLVAQIKEGIESGKDPVGTVQSAMGEEQICALKDDGPK

SEQ ID NO: 3643 - protein, 161 aa, Zea mays
  unsure (1)..(161): unsure at all Xaa locations
MSDSEEHHFQSKADAGAPKTYPQHAGTCXRKNGFVVIKNRPCKGVEVSTSKTDKHGHAKCHFVAIDIFNGKKLAYIVPASHHWDIPHVNRTEYHVIDISEDGFVSLLTSRWDTKDDLRLPSDETLAALIIVGIESVKDLVVTVQSAMEEEQICTLKDVGPK

SEQ ID NO: 3644 - protein, 103 aa, Zea mays
  unsure (1)..(103): unsure at all Xaa locations
MSDEEHHFESSDAGASKTYPQQAGNIRKGGHIVIKGRPCKVVEVSTSKTGKHGHAKCHFVAIDIFTAKKLEDIVPSSHNCDVPXVNRIDYXLIDISEDGFVSL

SEQ ID NO: 3645 - protein, 161 aa, Zea mays
  unsure (1)..(161): unsure at all Xaa locations
MSDSEEHHFKSKADAGASKTYPQHDGTGRTNGFIVIKNRPCKGVEVSTSKTAKHAHAECHFVAIQIFNVKKLEYIVPSSHNCDIPHVNRTDYQLIDISEDGFESLLTSDGNTKDDRRLPTDETLVDQIKEGVESGXKDLAVTAQSAMSQEHICALTDVGPK

SEQ ID NO: 3646 - protein, 160 aa, Zea mays
  unsure (1)..(160): unsure at all Xaa locations
MSDSDVLHFESKADAGASKTYPQHAGTVRKNGFIVIKNRPCKVVEVSTSNTGKHVHGICHFVVIDIFNGKMLEDIVPSSHNCDIPHVNRTEYQLIDVPADGFASLLSSNGNTKVDLRLPIDETLVVQIKERIESVKDLVATVPSAMRHXRICTLKDVCTQ

SEQ ID NO: 3647 - protein, 188 aa, Zea mays
  unsure (1)..(188): unsure at all Xaa locations
MAKSEEHHFISKADAGATKTYPXEAGTARNNGFLVIKNRPCKVVEASTSKTGNHDHAXKCHFVAINIFHGKKLEDIVPASXHQCDIPYVNRTDYHLTDIAEDGYRTLLTSHGNTSDDLILPADETLEDHIKERVKSVKDLVVTVQTAMDEEHICSLKDVTPRNFLGFADGTLLYLYLNRNTSVSPKDC

SEQ ID NO: 3648 - protein, 160 aa, Zea mays
  unsure (1)..(160): unsure at all Xaa locations
MSDSYEHHFXSKGNAGSCKSYPQQAGTVRKNSVIAINNRPCKGVEASTSQTGKHGHANMRTVAASLFNTTRLEDLLPSSHNCDIPHANRTENQLIDISKDGFVSLLTSDGNTKDDLRLPTDETLVAQIKEGFESGKDLVVTVQSAMGEEQICALKDVGPK

SEQ ID NO: 3649 - protein, 190 aa, Zea mays
  unsure (1)..(190): unsure at all Xaa locations
MAAVFPDSTLSSLSAPPPASDTSKRGIYHARTTXEHHFESKADAGACKTYPQQAGTVRNNGFIDIKNRPCKAVEVSTSNTDTNGHIKCHFVAIHIFNVKKLEDIVPSSHNCDIPHVNRTEYQLIDISEDAFASLLTSNGNTRDDLRLPTDETLVDHIKEGFESGKDLVXATVQTAMSDEXICALDDDGPK

(The sequence listing continues in the following parts.)
